United States Patent Application Publication US 2025/0084491 A1 - sequence listing, part 37

SEQ ID NO: 706467 - DNA, 75 bp, synthetic construct
  source 1..75: mol_type = other DNA
gacgatggcggagacacgccagtaccaccggatgataaaccggacccgatcaaatacaacaacaacgtgacctgg

SEQ ID NO: 706468 - DNA, 75 bp, synthetic construct
  source 1..75: mol_type = other DNA
cggcgatgacgtacagtttaccaatgttggtgaaatcgatatctcaaaaaatggtacgggtgtagctattacggg

SEQ ID NO: 706469 - DNA, 75 bp, synthetic construct
  source 1..75: mol_type = other DNA
tggggcaaggaaaaatgccaccgcgtttaatcagcagccaggcacgatcactatctacaatgccggggccgggat

SEQ ID NO: 706470 - DNA, 75 bp, synthetic construct
  source 1..75: mol_type = other DNA
acgactggagcgcgaacgccacgctggagggcgggccgaacctgagttatgcgaagagccagcgcacggcgagcc

SEQ ID NO: 706471 - DNA, 75 bp, synthetic construct
  source 1..75: mol_type = other DNA
aaatcaggccagtgactcaaaggttgcgatggttcacgccagcggagagggatcaaatgcgacaaatgcggctgg

SEQ ID NO: 706472 - DNA, 75 bp, synthetic construct
  source 1..75: mol_type = other DNA
cacagattaacggtgacgacgccacggcgaataacacgggcaaaaccaccgttgacggcaaagattccaccggca

SEQ ID NO: 706473 - DNA, 75 bp, synthetic construct
  source 1..75: mol_type = other DNA
gtaaagattccaccggtacggaaatcaacggtaataacggaaaagtgattcaggacggcgatctggatgtcagcg

SEQ ID NO: 706474 - DNA, 75 bp, synthetic construct
  source 1..75: mol_type = other DNA
aacagcggcaaaaccaccgttgacggtaaagactccaccggcacagaaatcaacggtaataacgggaaggttatc

SEQ ID NO: 706475 - DNA, 75 bp, synthetic construct
  source 1..75: mol_type = other DNA
gatattactgttggtgataaggggcacgaaggtaatccattcggtgtactgatcgatggcgataatgcaaccttt

SEQ ID NO: 706476 - DNA, 75 bp, synthetic construct
  source 1..75: mol_type = other DNA
tgacgatgccgctatcgataataaagggaatatgaccgtcgatggtgaaaactcggcggcgaccaaaattgttgg

SEQ ID NO: 706477 - DNA, 75 bp, synthetic construct
  source 1..75: mol_type = other DNA
gtgatgccaacacaattgatataactggtaatattctggttgataaagatcagagcgcagacaatgcggcagagt

SEQ ID NO: 706478 - DNA, 75 bp, synthetic construct
  source 1..75: mol_type = other DNA
gtgcaaagcaggatatcagcaccagatacacaaaaactgaagttgataataagctgaaaaacaaagtggaagtga

SEQ ID NO: 706479 - DNA, 75 bp, synthetic construct
  source 1..75: mol_type = other DNA
atttagcggaacttgccgtcagtgaaaccggcatggggcgcgttgaagataaatttgcaaaaaacgtcgctcagg

SEQ ID NO: 706480 - DNA, 75 bp, synthetic construct
  source 1..75: mol_type = other DNA
cggtgaaggggtaaccagcgcacggacgtttgtccgtctgcgtcgctgtgtattagtcgatgcgtttcgcattgt

SEQ ID NO: 706481 - DNA, 75 bp, synthetic construct
  source 1..75: mol_type = other DNA
ctggcggcagccattgttaccggggcttattttggcgacaaactttcaccgttaagcgataccactaacctgact

SEQ ID NO: 706482 - DNA, 75 bp, synthetic construct
  source 1..75: mol_type = other DNA
catatccagaagctgacagaaagagttgatgaacttgagtcagaattaaagttgttattaacttcccgaagcgat

SEQ ID NO: 706483 - DNA, 75 bp, synthetic construct
  source 1..75: mol_type = other DNA
cgcgaagcgttttatttatggggggtgggcacgactactgcggcggcaaacctttatcttaatcctgaccctgca

SEQ ID NO: 706484 - DNA, 75 bp, synthetic construct
  source 1..75: mol_type = other DNA
ctcaggtgctgactggcgataacggcctgaccttaattgaaaatgcgccctggggtgtggtggcttcggtgacgc

SEQ ID NO: 706485 - DNA, 75 bp, synthetic construct
  source 1..75: mol_type = other DNA
gccgttcatgaaatgggcgttttcgcgtctctggatgacgctgtcgcggcagccaaagtcgcccagcaagggcta

SEQ ID NO: 706486 - DNA, 75 bp, synthetic construct
  source 1..75: mol_type = other DNA
tccagaagctgactgaaagagttgatgaacttgagtcagaattaaagttgttattaacttcccgaagcgatattg

SEQ ID NO: 706487 - DNA, 75 bp, synthetic construct
  source 1..75: mol_type = other DNA
cggcggcaatcggcctgaacgtgccgcaagaaacgcgcttgctgtttgtagaaaccaccgcagaacatccgtttg

SEQ ID NO: 706488 - DNA, 75 bp, synthetic construct
  source 1..75: mol_type = other DNA
gaaaccacagcagaacatccctttgccgttaccgagctgatgatgccggtgttgcctgtcgtgcgcgtcaccaac

SEQ ID NO: 706489 - DNA, 75 bp, synthetic construct
  source 1..75: mol_type = other DNA
tcgacgagcgcggaaaaggcaccgtcagccgtgactgggttggtcgcgatgcggcgaaaatcgcggcggcaatcg

SEQ ID NO: 706490 - DNA, 75 bp, synthetic construct
  source 1..75: mol_type = other DNA
agtttggtctgttaccgctactgcctatgcttattgttctgtgctttacctttttgcgtttgcctacagtaccgg

SEQ ID NO: 706491 - DNA, 75 bp, synthetic construct
  source 1..75: mol_type = other DNA
ctggaagccgcaggcgtgaaaaccgttcgcagcctggcggatatcggtgaagcactgaaaactgttctgaaataa

SEQ ID NO: 706492 - DNA, 75 bp, synthetic construct
  source 1..75: mol_type = other DNA
aggtgaaactggatgaagcgggcgttcgcatgatcggcccgaactgcccaggcgttatcactccgggtgaatgca

SEQ ID NO: 706493 - DNA, 75 bp, synthetic construct
  source 1..75: mol_type = other DNA
gcgcagaaggagttccccgtcgggctacggtctctgttaatacgggaatacggcgacgatgcgacgcatgattgt

SEQ ID NO: 706494 - DNA, 75 bp, synthetic construct
  source 1..75: mol_type = other DNA
tagcggtgttggtggcattggtgctggcggtgcgaaagagctgctgcatgaatggggaagtgtcgcaacgatggt

SEQ ID NO: 706495 - DNA, 75 bp, synthetic construct
  source 1..75: mol_type = other DNA
caggcgatagcgactggcttcagttagttcgtgaaaacgtaagctgggtaagcctgcgtgaagacgccaaaaaca

SEQ ID NO: 706496 - DNA, 75 bp, synthetic construct
  source 1..75: mol_type = other DNA
cagcgatggcgctgggacgtcgtgcaactggtgttgagctggagactgaacgttttgagcagacggtcagggaag

SEQ ID NO: 706497 - DNA, 75 bp, synthetic construct
  source 1..75: mol_type = other DNA
ggtactgacgggacatggcgcaactatcgatacgacaacacctgccggtaaacttgtatttggtatttttgcagc

SEQ ID NO: 706498 - DNA, 75 bp, synthetic construct
  source 1..75: mol_type = other DNA
gtagccgagtactctatccagctgagctacggatgcatcgggaaacttactttactgcagattttttgataccgc

SEQ ID NO: 706499 - DNA, 75 bp, synthetic construct
  source 1..75: mol_type = other DNA
cgtctgtactgcggtcaacatcgtctatccgctataagcattcagtagagacgatagattcagagcacgccgatc

SEQ ID NO: 706500 - DNA, 75 bp, synthetic construct
  source 1..75: mol_type = other DNA
tacggtcatggttaatgcaggaatacggcgacgatacagcgcataatgtgtcaggcttgaatacctttatcgaat

SEQ ID NO: 706501 - DNA, 75 bp, synthetic construct
  source 1..75: mol_type = other DNA
cggtagccaggggactttccactctgaacaggccattgcatacggcactaaaatggttggcggcgtaaccccagg

SEQ ID NO: 706502 - DNA, 75 bp, synthetic construct
  source 1..75: mol_type = other DNA
atggcacagctatatttctactattccgcaatgaatgcgggtaagtctacagcattgttgcaatcttcatacaat

SEQ ID NO: 706503 - DNA, 75 bp, synthetic construct
  source 1..75: mol_type = other DNA
tggagatttttacccgctgactggccgcgaagcgttttatttatgggggttgggcacgactactgcggcggcaaa

SEQ ID NO: 706504 - DNA, 75 bp, synthetic construct
  source 1..75: mol_type = other DNA
tggcggaaggtgaacacttgctgtctaaaccggtttcagagtgttccctcactgaattgcttgtcctgggtatta

SEQ ID NO: 706505 - DNA, 75 bp, synthetic construct
  source 1..75: mol_type = other DNA
gtgaagttaaatttattggcccgcaggctaatcatcagggactcattcgtgcactgatgtacggaggacagacca

SEQ ID NO: 706506 - DNA, 75 bp, synthetic construct
  source 1..75: mol_type = other DNA
tgggtggccaactgaaggatggtgacaacctgctttatgccgagggatatgcgacagcagccagtatcagcgaag

SEQ ID NO: 706507 - DNA, 75 bp, synthetic construct
  source 1..75: mol_type = other DNA
atgcagcagctttcctttctgcccggagagatgacgcccggcgagcgcagtctcattctgcaggccctgaaaacc

SEQ ID NO: 706508 - DNA, 75 bp, synthetic construct
  source 1..75: mol_type = other DNA
aacgacaacatgaatgatgccacccggcagattgcggcgtttcagtcacaggtgcaggtacagcaggatgcgttg

SEQ ID NO: 706509 - DNA, 75 bp, synthetic construct
  source 1..75: mol_type = other DNA
cgctgtcagccagaaccactgaccgctcaattatccgggccatgatggaaggcggcacagcaaaaatttatcact

SEQ ID NO: 706510 - DNA, 75 bp, synthetic construct
  source 1..75: mol_type = other DNA
aatccgccgttatgccgaacgctggaagccctggcgttcttatgcgctgttgcatatctggtatacggaaggctg

SEQ ID NO: 706511 - DNA, 75 bp, synthetic construct
  source 1..75: mol_type = other DNA
gcgcactctctggagattgttgtggctatctgtaagcatctgggcggcggtcaggtctatattcctcgtgggcag

SEQ ID NO: 706512 - DNA, 75 bp, synthetic construct
  source 1..75: mol_type = other DNA
gcgtatccgcatgttcagccagatcgccaatatcagtaagcgtcaacggagcaccgtattgacgcttatttattg

SEQ ID NO: 706513 - DNA, 75 bp, synthetic construct
  source 1..75: mol_type = other DNA
caaaggataaggagtccggtgagtaccatagcgtgattggaaaagtgaacaagcgtattgataaagacggaaact

SEQ ID NO: 706514 - DNA, 75 bp, synthetic construct
  source 1..75: mol_type = other DNA
aggctataaactccctcaagagtcaaaaaccgcgggtacacctttgctgatcgcaccgcataaaaaaggcgaacg

SEQ ID NO: 706515 - DNA, 75 bp, synthetic construct
  source 1..75: mol_type = other DNA
cagctttatggcgaacggctggatgattttccggagtatatctgcttccccacgcctcagcggctggcagcagcc

SEQ ID NO: 706516 - DNA, 75 bp, synthetic construct
  source 1..75: mol_type = other DNA
ggcggcacagcaaaaatttatcactgcaacgattctgataaatgcctgaaagtggtggcagacacaccggtgacc

SEQ ID NO: 706517 - DNA, 75 bp, synthetic construct
  source 1..75: mol_type = other DNA
gtacaggtcgcaatgcgaaaatgacaggcgtgactggggtttctaaggattgattgccgaggaagtcggagaaat

SEQ ID NO: 706518 - DNA, 75 bp, synthetic construct
  source 1..75: mol_type = other DNA
cgcttcagactgagatgaccagtgcaaagcaggatatcagctccagatacacaaaaactgaagttgataataagc

SEQ ID NO: 706519 - DNA, 75 bp, synthetic construct
  source 1..75: mol_type = other DNA
tggtacaggcactgggcctggtggatatccgggtgccggaccatctgatagtcggtggcaaccaggttttctcct

SEQ ID NO: 706520 - DNA, 75 bp, synthetic construct
  source 1..75: mol_type = other DNA
gtacaggtcgcaatgcgaaaatgacaggcgtgactgggggttctacggattgattgccgaggaagttggagaaat

SEQ ID NO: 706521 - DNA, 75 bp, synthetic construct
  source 1..75: mol_type = other DNA
gtacaggtcgcaatgcgaaaatgacaggcgtgactggggcttctatggattgattgccgaggaagtgggagaaat

SEQ ID NO: 706522 - DNA, 75 bp, synthetic construct
  source 1..75: mol_type = other DNA
gtacaggtcgcaatgcgaaaatgacaggcgtgactggggtttctacggattgattgccgaggaagtaggagaaat

SEQ ID NO: 706523 - DNA, 75 bp, synthetic construct
  source 1..75: mol_type = other DNA
tcagcggtaaccaaaactaaactttatgatctgattaaatatctactctggacgaccatcccatcaacgattatt

SEQ ID NO: 706524 - DNA, 75 bp, synthetic construct
  source 1..75: mol_type = other DNA
tgcaaaaagagaacgggctcgatttactgcctgtcctgcataacgcgcgttgcaaaagtgatgtgattgtcatct

SEQ ID NO: 706525 - DNA, 75 bp, synthetic construct
  source 1..75: mol_type = other DNA
acctgatatgggtagcttcacgctttctgtttcaggtactggatatcaaaaattaccatcaggttttattcttca

SEQ ID NO: 706526 - DNA, 75 bp, synthetic construct
  source 1..75: mol_type = other DNA
atggcgagcgaagaagatgcgggtgatagcgacaaccgcaacggtcaggccctgctggatctgcaaagcaacagt

SEQ ID NO: 706527 - DNA, 75 bp, synthetic construct
  source 1..75: mol_type = other DNA
cattattaagcagtgcgttcgtggccgtattggttggatggctgtatcaaggtttcccgctggccgaaggtatta

SEQ ID NO: 706528 - DNA, 75 bp, synthetic construct
  source 1..75: mol_type = other DNA
tatttcaccagaaagcatgcagatgctggtacagctcaaagagttatataagtttggtctgttaccgctactgcc

SEQ ID NO: 706529 - DNA, 75 bp, synthetic construct
  source 1..75: mol_type = other DNA
cagacagtgccacaaacgacgggcaattacagggaaatgccaccaccatcacggcaggacaactcacaaacggcg

SEQ ID NO: 706530 - DNA, 75 bp, synthetic construct
  source 1..75: mol_type = other DNA
ccgtatctgattacggtgaacccgaaactggatggtctcggaaaggtggacagcagtctgtttgccggactttat

SEQ ID NO: 706531 - DNA, 75 bp, synthetic construct
  source 1..75: mol_type = other DNA
aatgttaatactggtaaagcatatgatatgaaaattgttacaccacaaaggaatccgttacaaccaggtccttca

SEQ ID NO: 706532 - DNA, 75 bp, synthetic construct
  source 1..75: mol_type = other DNA
ctgtcaccggaatttgaaaacaataccatcagattttcactggatggccgggaaaaagattacacgcccggtaag

SEQ ID NO: 706533 - DNA, 75 bp, synthetic construct
  source 1..75: mol_type = other DNA
tccgggcttggcgttaagggcagttcactgctgcaaaatggtacagggcggctgtacagtgcaggcaacctgctg

SEQ ID NO: 706534 - DNA, 75 bp, synthetic construct
  source 1..75: mol_type = other DNA
caccgtgccggacagcaacggctggccgccgtgcaacgggccatgcagcagggggccgcgaatgattactggttt

SEQ ID NO: 706535 - DNA, 75 bp, synthetic construct
  source 1..75: mol_type = other DNA
atgaatatgatgatctcatatcaggaacttgttcgcaccttccctaagccaaaaccgatgatgacgggactggcg

SEQ ID NO: 706536 - DNA, 75 bp, synthetic construct
  source 1..75: mol_type = other DNA
tggtaagggctacaagtccgggattatcccgcagagcttcaccgcgcaggcggattgcttctgcttcagccgcac

SEQ ID NO: 706537 - DNA, 75 bp, synthetic construct
  source 1..75: mol_type = other DNA
gtttgtcacaaatgatccgatgacgctggtgcgctggctgacggcaggcgccggcatcgcctacgtgccgctgat

SEQ ID NO: 706538 - DNA, 75 bp, synthetic construct
  source 1..75: mol_type = other DNA
cggtggcgaaatcagtgctgttaacagcctgaacgtgacactcagtggtaatctgcaacagcacggtaaaatgct

SEQ ID NO: 706539 - DNA, 75 bp, synthetic construct
  source 1..75: mol_type = other DNA
acgctggcgcgtcttatcatgcctacaaacctgtgccggatcggtgggctggataaggcgttcacaccgcatccg

SEQ ID NO: 706540 - DNA, 75 bp, synthetic construct
  source 1..75: mol_type = other DNA
attaatcgggtatttgacaggcccacgccgtggattcagaactctacttacgttttggccgcaaagaagagtgat

SEQ ID NO: 706541 - DNA, 75 bp, synthetic construct
  source 1..75: mol_type = other DNA
caaacctgataagtgggagcaaaagtcagtccggtttctggcacactgatgacaacagttcatcatccaccacct

SEQ ID NO: 706542 - DNA, 75 bp, synthetic construct
  source 1..75: mol_type = other DNA
tatgaaaccggacactacaataaccaagtcagcgatatgtatccggatgcttacgggcagatagtaaacctgctg

SEQ ID NO: 706543 - DNA, 75 bp, synthetic construct
  source 1..75: mol_type = other DNA
acaggccatcacgggcgtgctgggcggactgaatgcagggaatccggggcaggtactggctggcggtctgaatcc

SEQ ID NO: 706544 - DNA, 75 bp, synthetic construct
  source 1..75: mol_type = other DNA
ctgcttcggcaaccggtcagttgaccagtaccggcgatatcatgagccagggtgacaccacgctgaaagcagcca

SEQ ID NO: 706545 - DNA, 75 bp, synthetic construct
  source 1..75: mol_type = other DNA
agtggcagtggctggctacaggccactgacctgctgctgaacgtggcgaagcttgccggtaatggcactgtgatg

SEQ ID NO: 706546 - DNA, 75 bp, synthetic construct
  source 1..75: mol_type = other DNA
agtctcgccggcaatgtcaataatctcacccggtactcacactggcagcttgatgcaccggaagacagcctcgcc

SEQ ID NO: 706547 - DNA, 75 bp, synthetic construct
  source 1..75: mol_type = other DNA
gtaagatagaagttctggctggtaaacaacgcttgtctaatagtttcgaggttagctcacttccagatgcaaatg

SEQ ID NO: 706548 - DNA, 75 bp, synthetic construct
  source 1..75: mol_type = other DNA
caccgtgccggacagcaacggctggccgccgtacagcgggccatgcagcagggggccgcgaatgattactggttt

SEQ ID NO: 706549 - DNA, 75 bp, synthetic construct
  source 1..75: mol_type = other DNA
tgaactccactgaccgtctgcagaacgacggcaaaatcctctccggcagtaacctcacgctgacggcgcaggtgc

SEQ ID NO: 706550 - DNA, 75 bp, synthetic construct
  source 1..75: mol_type = other DNA
ggaactatagatgacaatcatatttcagttaatcaaggggatatttatagtataggtgctcatggcggagcctcg

SEQ ID NO: 706551 - DNA, 75 bp, synthetic construct
  source 1..75: mol_type = other DNA
tgatgtactggtgctgaaggcgcaggatgtgacacagaacggtgtgctgtccggcggcaaagggctgacagtcag

SEQ ID NO: 706552 - DNA, 75 bp, synthetic construct
  source 1..75: mol_type = other DNA
ctgccggtacgggggcacaggcaggcaggaactcggttgagaataattatcttagcgtgtctgaaaagacagagc

SEQ ID NO: 706553 - DNA, 75 bp, synthetic construct
  source 1..75: mol_type = other DNA
agaaagctcaaaaagccgatgagctggctaaatgtcagactgctgcctgtaaggctcagacagaagcaaaatgga

SEQ ID NO: 706554 - DNA, 75 bp, synthetic construct
  source 1..75: mol_type = other DNA
ggcataccggaaaaacccgccgatttaagtagtcattcatggctggaatacagcgtgcgcccggacaatgaattt

SEQ ID NO: 706555 - DNA, 75 bp, synthetic construct
  source 1..75: mol_type = other DNA
tggtggagccggaaccgaaaagcatgcgtaatctgccgtccggggttgttcctgccgttcgccagccgctagtgg

SEQ ID NO: 706556 - DNA, 75 bp, synthetic construct
  source 1..75: mol_type = other DNA
aagaatggcttgcggatttttctgatgtggtaattattctcgtagagagttatggcactgtagctgaattgggcg

SEQ ID NO: 706557 - DNA, 75 bp, synthetic construct
  source 1..75: mol_type = other DNA
cctagatatttacgagcaaaagaaaattttatttcaagtttttttccaagtaacttgaattcttttaattatatc

SEQ ID NO: 706558 - DNA, 75 bp, synthetic construct
  source 1..75: mol_type = other DNA
agaccgccaccagcatattgaaacaacgcacaaaaaatcttgcaccgttgccttacgcccaccagcaacaaaaac

SEQ ID NO: 706559 - DNA, 75 bp, synthetic construct
  source 1..75: mol_type = other DNA
ttacgtcgttctctggggttacgtgccggaaaaaatccgctcggtgtaccgcgaaagcgacatcataccggagga

SEQ ID NO: 706560 - DNA, 75 bp, synthetic construct
  source 1..75: mol_type = other DNA
cagtccggacgccggtatatcggtatcgagctgcttgaacagtatcaccgtgccggacagcaacgcctggcagcc

SEQ ID NO: 706561 - DNA, 75 bp, synthetic construct
  source 1..75: mol_type = other DNA
aaaaactggaagactgctatttcagccagaaaactccagaacaacttcagcttccagaatcaacgctatctatca

SEQ ID NO: 706562 - DNA, 75 bp, synthetic construct
  source 1..75: mol_type = other DNA
ggccaccctgtggaacacgggcgcacgtataaacgaagcgctggcgctgacgcggggagatttttcactggcgcc

SEQ ID NO: 706563 - DNA, 75 bp, synthetic construct
  source 1..75: mol_type = other DNA
tcagacttttttgctggagaacgatgcgctggttttgcaactggaagtccattcacatgccgatacattcccggc

SEQ ID NO: 706564 - DNA, 75 bp, synthetic construct
  source 1..75: mol_type = other DNA
gaaattccagatgatatatctgttacaattgatgtttttacagcagcagagcatttactatctcctgatgctgac

SEQ ID NO: 706565 - DNA, 75 bp, synthetic construct
  source 1..75: mol_type = other DNA
aaatgcaaacacaaaaagaccaggcagaatcgatattgccatattggacagtagatcatttttcgagactcctat

SEQ ID NO: 706566 - DNA, 75 bp, synthetic construct
  source 1..75: mol_type = other DNA
gacattgcgtttgagaccatctacatggtgacgaagaacagagacgcgctactaagggaggtaacacgtctcgac

SEQ ID NO: 706567 - DNA, 75 bp, synthetic construct
  source 1..75: mol_type = other DNA
tcaatagtagaaatagtctagaatattatatcgagctgaaagaaaatatattaaaatctataataaaggaatttt

SEQ ID NO: 706568 - DNA, 75 bp, synthetic construct
  source 1..75: mol_type = other DNA
cgactcgcctgatcccgcaagggagatttgtgactaatgatccgatgacgctggtgcgctggctaacggcgggtg

SEQ ID NO: 706569 - DNA, 75 bp, synthetic construct
  source 1..75: mol_type = other DNA
tcaggaagtcagcaccagctttgtcaccattgaacaactgctcgctgattttctggctgacgttgaatctatccg

SEQ ID NO: 706570 - DNA, 75 bp, synthetic construct
  source 1..75: mol_type = other DNA
ggccttgtgcaatcttacattaaatcagggttggattcttttttttcaaaaaggctatcaaaagtacttgttcca

SEQ ID NO: 706571 - DNA, 75 bp, synthetic construct
  source 1..75: mol_type = other DNA
aggtacaggtcgtgatcaactcgctgacggattattttgttgaggtcggtaaattgtttcaggagatgcacgggc

SEQ ID NO: 706572 - DNA, 75 bp, synthetic construct
  source 1..75: mol_type = other DNA
cacgctacgtattggctgttcttcaactatggcacaaaatgttctcgcggggctgacggcaaaaatgctgaaaga

SEQ ID NO: 706573 - DNA, 75 bp, synthetic construct
  source 1..75: mol_type = other DNA
cgcgaaaagctatctcacacaatacggcataccggaaaaacccgccgatttgagtagtcattcatggcttgaata

SEQ ID NO: 706574 - DNA, 75 bp, synthetic construct
  source 1..75: mol_type = other DNA
acgacgcaatggtagcggagttgaatcgccgatacgtggcgcagatccctggttttcaatgctgcggaacagcct

SEQ ID NO: 706575 - DNA, 75 bp, synthetic construct
  source 1..75: mol_type = other DNA
aggcttcccgctttgaagaggcgctcaccggctggcggcaaaagaaatggcgctggaaaaacatcagtattatga

SEQ ID NO: 706576 - DNA, 75 bp, synthetic construct
  source 1..75: mol_type = other DNA
caaaggttctccgatatgcgatgggcaacccagggaatttatccatcaccaagctggcggtagcgctggattacg

SEQ ID NO: 706577 - DNA, 75 bp, synthetic construct
  source 1..75: mol_type = other DNA
tcgattctcgtactgatggtgctccgtcttgtgctaaggctgaaatatccaactccgccaattgtgcctaaaccg

SEQ ID NO: 706578 - DNA, 75 bp, synthetic construct
  source 1..75: mol_type = other DNA
gatgatgcctcatgcatcagaggccaatttcgatctggtagataccttaaaatcgtggcatgaaacgctggcaaa

SEQ ID NO: 706579 - DNA, 75 bp, synthetic construct
  source 1..75: mol_type = other DNA
aatttcgatctggtggatattttaaagtcgtggcatgaaacgctggcaaatttgggatatttcgttatcgggcta

SEQ ID NO: 706580 - DNA, 75 bp, synthetic construct
  source 1..75: mol_type = other DNA
atgactctgaggtgtctgttaaacccgtggcgattcaatcagcaccaggacgcggcccatgacgtgtgtcatttt

SEQ ID NO: 706581 - DNA, 75 bp, synthetic construct
  source 1..75: mol_type = other DNA
attttaaccgcctgttattttcacgatattgtgagcctggcgaaaaatcatccgcaacggcagcgctcctcatta

SEQ ID NO: 706582 - DNA, 75 bp, synthetic construct
  source 1..75: mol_type = other DNA
gctggcgcagcacaacgcgcattttttagtcgagtttatggcgaagctcagtgccgaactggcggggagaatgaa

SEQ ID NO: 706583 - DNA, 75 bp, synthetic construct
  source 1..75: mol_type = other DNA
cgggctttaaaccgagccacgaagtgaaggcgatgctcgacgacgcggatgtcttcctgttgccttcggtaacgg

SEQ ID NO: 706584 - DNA, 75 bp, synthetic construct
  source 1..75: mol_type = other DNA
ttttaagtgcggaatttgctgattttccgtcagagaaaatagacgccatttgccatgccatcgcggcacacagtt

SEQ ID NO: 706585 - DNA, 75 bp, synthetic construct
  source 1..75: mol_type = other DNA
tgataaacgctacgcgctggatcatttccagactaagttgctgaagctaccgcaaaccatgcaaaccgcaagagg

SEQ ID NO: 706586 - DNA, 75 bp, synthetic construct
  source 1..75: mol_type = other DNA
cccgcgaaaccagcagcctgtttctgcccttaagcggtcagtggaatttccatttttttgaccacccgctgcaag

SEQ ID NO: 706587 - DNA, 75 bp, synthetic construct
  source 1..75: mol_type = other DNA
gagtaccagaacgtcttctataagcacgattgtattcagggacattatgtttgggtggatttgcccctatatttc

SEQ ID NO: 706588 - DNA, 75 bp, synthetic construct
  source 1..75: mol_type = other DNA
caaataatgcgcgtccgctgacgctggaagacgatcgtttgagctgcaccgttcgcggctacaacttcgcgatca

SEQ ID NO: 706589 - DNA, 75 bp, synthetic construct
  source 1..75: mol_type = other DNA
cgtttcaggggcattgggcgtggcgctgtttgatggcgaagatccgctcgcacagcatcgcccgcttgatgataa

SEQ ID NO: 706590 - DNA, 75 bp, synthetic construct
  source 1..75: mol_type = other DNA
gcgtgatgcaatgggcggactctacctacgtggaagaccaggatatgtggtggtcggcggggatcttccgcgatg

SEQ ID NO: 706591 - DNA, 75 bp, synthetic construct
  source 1..75: mol_type = other DNA
acattatcgatatctggcgcagtaacgtcgatgcgatgttcgagaactatccgttcccacagaacaacggcaacc

SEQ ID NO: 706592 - DNA, 75 bp, synthetic construct
  source 1..75: mol_type = other DNA
tttggcccggcgggggtaaccgcagcaaaactacgggaactgggtgtcattcgcggcaaaatcgctactatcttc

SEQ ID NO: 706593 - DNA, 75 bp, synthetic construct
  source 1..75: mol_type = other DNA
cttgctcagggaacgagcaggaatgaaattgatttcagctgttgatgtcagggatatagcacaattgcttgacga

SEQ ID NO: 706594 - DNA, 75 bp, synthetic construct
  source 1..75: mol_type = other DNA
ctgggccataaaacccagcagcaaaccgatcgttaccatgatgaccgagggaaaggttggagcaaagtagcattg

SEQ ID NO: 706595 - DNA, 75 bp, synthetic construct
  source 1..75: mol_type = other DNA
acttggtgcattttttccgttcaacctcgcaggcagaacgtggggcgcaggttaaatccaatacattgacgatga

SEQ ID NO: 706596 - DNA, 75 bp, synthetic construct
  source 1..75: mol_type = other DNA
cttggccataaaacgcaacaacaaaccgatcgttatcatgatgatcggggaaaagattggatgtatatccaccag

SEQ ID NO: 706597 - DNA, 75 bp, synthetic construct
  source 1..75: mol_type = other DNA
aggcattgactggggtgaaggttcgcccgccacattccatgaacaaagatctttatctgagcgactttacgaagc

SEQ ID NO: 706598 - DNA, 75 bp, synthetic construct
  source 1..75: mol_type = other DNA
ctacttggtcataaaacacaacagcaaaccgatcgttatcatgacgatcgaggcaaaggatggatcaaagtagcg

SEQ ID NO: 706599 - DNA, 75 bp, synthetic construct
  source 1..75: mol_type = other DNA
ccagcgacattccacgaacaacgttccttgtccgaacgtctctacggaggtcaaggtattgatactcagaaattg

SEQ ID NO: 706600 - DNA, 75 bp, synthetic construct
  source 1..75: mol_type = other DNA
tctggctatcagtgacaggatcgcaaccagcaaaggaaaagcaatcacaacgtcaacctggttagatcgctatca

SEQ ID NO: 706601 - DNA, 75 bp, synthetic construct
  source 1..75: mol_type = other DNA
atggcagccagaccacgtaaaaataatgtttcagtcccgaacttgtatccgctttatagcagaaaagtaaataaa

SEQ ID NO: 706602 - DNA, 75 bp, synthetic construct
  source 1..75: mol_type = other DNA
ctttatctgagcgtctttacaaggaacaagggattgataccagaaagttactgggccataaaacccagcagcaaa

SEQ ID NO: 706603 - DNA, 75 bp, synthetic construct
  source 1..75: mol_type = other DNA
gggagcaaaatcgctatccctctttctttacgtttgaatgctatcaactggtgtttacgtgatgtagtagctcgc

SEQ ID NO: 706604 - DNA, 75 bp, synthetic construct
  source 1..75: mol_type = other DNA
acaggggttagacacacaaaaactacttggtcataaaacacaacaacaaaccgatcgttatcatgatgatcgagg

SEQ ID NO: 706605 - DNA, 75 bp, synthetic construct
  source 1..75: mol_type = other DNA
acggcggcggacgtttcgccacggcttttgatagccgcttctacatgaaaaatgcctctcacgatcccagcgacc

SEQ ID NO: 706606 - DNA, 75 bp, synthetic construct
  source 1..75: mol_type = other DNA
gaaggccatgctcgatgaagccgacgtgtttctgctgccgtccgttactggcgccgatggcaacatggaaggcat

SEQ ID NO: 706607 - DNA, 75 bp, synthetic construct
  source 1..75: mol_type = other DNA
cgttctcaaccaaatcactgcgtttattgatatgggctttgaggtggagattgtcgcgttgcaaaaaggcgatac

SEQ ID NO: 706608 - DNA, 75 bp, synthetic construct
  source 1..75: mol_type = other DNA
ggcaaacctaaacagactctgaacttcaaagcctggttagtcggtgcggctggtacgcctgacctgggtggtttt

SEQ ID NO: 706609 - DNA, 75 bp, synthetic construct
  source 1..75: mol_type = other DNA
ccggtgatccttaaatccgctaacgccttcgctgcctatggtctggctggcaaatatgacgctgacggctttttc

SEQ ID NO: 706610 - DNA, 75 bp, synthetic construct
  source 1..75: mol_type = other DNA
gaacaggcaagaacttcccgggcgacgcaatgaagcgtggctacgtgaccgttaatctcggttctgattttgatg

SEQ ID NO: 706611 - DNA, 75 bp, synthetic construct
  source 1..75: mol_type = other DNA
aaaagtgaacaagctgcgctaccgtgccagccagaccttacgcgggcttcatcgcgcgtcgacctggcgagcgct

SEQ ID NO: 706612 - DNA, 75 bp, synthetic construct
  source 1..75: mol_type = other DNA
aagcgacggttaatgtggccgatctcgaccgcaaccagtttctcgatgcctctctgacgctggcgcgccatcctt

SEQ ID NO: 706613 - DNA, 75 bp, synthetic construct
  source 1..75: mol_type = other DNA
gcggcgttacccgtgcctggtcttttccgacatggaaaggcggtggcacagtcggggtgacgtttgttatggata

SEQ ID NO: 706614 - DNA, 75 bp, synthetic construct
  source 1..75: mol_type = other DNA
atcacggaaggtgtgcttctccagcgcagtgacggcgtggtttaccgcatcaccgcctccctgaccggcaaggcc

SEQ ID NO: 706615 - DNA, 75 bp, synthetic construct
  source 1..75: mol_type = other DNA
ggaaacgagaattactacaccatttttaataccgatacaggtgctgcgtttaacaatgtaagcctggcgattggt

SEQ ID NO: 706616 - DNA, 75 bp, synthetic construct
  source 1..75: mol_type = other DNA
attgatatgggatttgaggtggagattgttgcgctgcaaaaaggcgacacccagaacacccacgcggcatggacg

SEQ ID NO: 706617 - DNA, 75 bp, synthetic construct
  source 1..75: mol_type = other DNA
gtggtgctgaccaacgctgaattcacaggtgccggtgatgctgacggcaatgcagaaatttcctggaaaatttaa

SEQ ID NO: 706618 - DNA, 75 bp, synthetic construct
  source 1..75: mol_type = other DNA
tcggcattggcccgtgggaacgtcgcctgcgcacgctgatcgaacagtatcaactggaaggctacgtggagatgc

SEQ ID NO: 706619 - DNA, 75 bp, synthetic construct
  source 1..75: mol_type = other DNA
tgcacattacgctgccgcaactggacgcccgcgaaacgttcctcaacattacagtgaccaaggattcccgtaccc

SEQ ID NO: 706620 - DNA, 75 bp, synthetic construct
  source 1..75: mol_type = other DNA
ctgttctggatcaataaccgttatgtgatgctgcacggcgtcaaccgtcacgacaacgatcatcgcaaaggccgc

SEQ ID NO: 706621 - DNA, 75 bp, synthetic construct
  source 1..75: mol_type = other DNA
cccgcgaaaccagcagcctgtttctgcccttaagcggtcagtggaatttccacttttttgaccatccgctgcaag

SEQ ID NO: 706622 - DNA, 75 bp, synthetic construct
  source 1..75: mol_type = other DNA
gagcgccatgtatgaagcgttaaagggcatttatctctccaccgcttacacctacgccaaacatcgccctgacca

SEQ ID NO: 706623 - DNA, 75 bp, synthetic construct
  source 1..75: mol_type = other DNA
gactaaccgccacggcaacggtctgctggtggttccgcagcgcccaattaacttcagcgcctggcactataccca

SEQ ID NO: 706624 - DNA, 75 bp, synthetic construct
  source 1..75: mol_type = other DNA
acggtacctatattgaaggtggcctggagatgaagtacggctcctggttcggcctgatttacggcgaaggctgga

SEQ ID NO: 706625 - DNA, 75 bp, synthetic construct
  source 1..75: mol_type = other DNA
aaatataagctggaaaaaaaaaccacgtggctacaggatgaacctaatggcaaattgaaaaagttgtttttccgt

SEQ ID NO: 706626 - DNA, 75 bp, synthetic construct
  source 1..75: mol_type = other DNA
tcgcgcaatctgatcctgtcggccatctgcgggcaaacggcgcagccgtaccgcgctgatgtctttatcgcccac

SEQ ID NO: 706627 - DNA, 75 bp, synthetic construct
  source 1..75: mol_type = other DNA
atgctcagttatcgccatagctttcacgctggcaaccacgccgacgtccttaaacataccgttcagagcctgatc

SEQ ID NO: 706628 - DNA, 75 bp, synthetic construct
  source 1..75: mol_type = other DNA
gaatatctcccgctatggcgcggagtcgcgcaatttgatcctgtcggccatgtgtgggcaaacggcgcagccgta

SEQ ID NO: 706629 - DNA, 75 bp, synthetic construct
  source 1..75: mol_type = other DNA
gtgattcgtctggctggttcgctcaccgcgcgggctacgcgcctggcgcatgaagcacaactggatgttgcgccg

SEQ ID NO: 706630 - DNA, 75 bp, synthetic construct
  source 1..75: mol_type = other DNA
aaaactctgacccgcctcgcgcaggagtatgaaatcccgctggcgcagaccgtggcgattggcgatggagccaat

SEQ ID NO: 706631 - DNA, 75 bp, synthetic construct
  source 1..75: mol_type = other DNA
tctcagtgcagggatgctgttgttagtaaatatctggtccattaccgtcacactacctctcaagcaaacagagga

SEQ ID NO: 706632 - DNA, 75 bp, synthetic construct
  source 1..75: mol_type = other DNA
tggtgttgatcgacgtcttcaaagaagcacaacacgcaggacatgttccgccaggatttaacccagcgcaggcaa

SEQ ID NO: 706633 - DNA, 75 bp, synthetic construct
  source 1..75: mol_type = other DNA
caaacctatcccctgaaaggtacgctgcaattctccgatgtgaccgttgatgaaagcaccggctccataacccta

SEQ ID NO: 706634 - DNA, 75 bp, synthetic construct
  source 1..75: mol_type = other DNA
atggtcagcccgggggaaaccggcagttacagtatggatgttgagccggggttgtaccgggtgacgctgaacacg

SEQ ID NO: 706635 - DNA, 75 bp, synthetic construct
  source 1..75: mol_type = other DNA
cgacatgttgcacattactcaggaaaaaaccggttcaaaacttgctattccgcttaacctgaatagactggcccc

SEQ ID NO: 706636 - DNA, 75 bp, synthetic construct
  source 1..75: mol_type = other DNA
atgatgctgtaaaggctgaaggtcataacaggatggcgcaagtcgtgagaatggtgttgatcgacgtcttcaaag

SEQ ID NO: 706637 - DNA, 75 bp, synthetic construct
  source 1..75: mol_type = other DNA
gcgaactggcgaaaagtgaagccgccgccgccatcgcgcatttgacggtaaaacgttacgttccgctcgtgggta

SEQ ID NO: 706638 - DNA, 75 bp, synthetic construct
  source 1..75: mol_type = other DNA
tattaccaatatcgacatcttcatatacatcaaatgagcatgtagatgaaacattcagaagaataaatactggcg

SEQ ID NO: 706639 - DNA, 75 bp, synthetic construct
  source 1..75: mol_type = other DNA
caatatcccgttcctttatttttgggtgtagtgtttcagcacaaagaaaaaggttcatgttttgaaatacttgac

SEQ ID NO: 706640 - DNA, 75 bp, synthetic construct
  source 1..75: mol_type = other DNA
aagccgaagttcgcccacaggttagcgggatcgtactgaatcgcaatttcactgaaggcagcgatgtgcaagcag

SEQ ID NO: 706641 - DNA, 75 bp, synthetic construct
  source 1..75: mol_type = other DNA
aggtgatgccactgtcctgattgttaacgagaaaagtcaagttgaagcgcgtccagtcgtcgccagtcaggctat

SEQ ID NO: 706642 - DNA, 75 bp, synthetic construct
  source 1..75: mol_type = other DNA
tcgcccacaggttagtgggatcgtactgaatcgtaatttcactgaaggtagcgatgtgcaggcaggacagtccct

SEQ ID NO: 706643 - DNA, 75 bp, synthetic construct
  source 1..75: mol_type = other DNA
gacagcctcgatccaggtagtttcaccgttacgcgcctggaatcacttctgacgagtgtcagagaggttaaccgt

SEQ ID NO: 706644 - DNA, 75 bp, synthetic construct
  source 1..75: mol_type = other DNA
gcgaatatctcgaaggcatcgcccgtatctggcagcaggacgatttgcccgcagaactggaggcgtacatcaatg

SEQ ID NO: 706645 - DNA, 75 bp, synthetic construct
  source 1..75: mol_type = other DNA
cggcaaatcatcagcgcaatagacaacatgactcacagtgagcaggaaaaagttgcgcaatttttgtcacgcgaa

SEQ ID NO: 706646 - DNA, 75 bp, synthetic construct
  source 1..75: mol_type = other DNA
gcaatggatgtggcaaatgaagcgaaaacaaaggcagaagaggctgcagcaggaggtggtgttcccggtccgaaa

SEQ ID NO: 706647 - DNA, 75 bp, synthetic construct
  source 1..75: mol_type = other DNA
tgaaatgaaaaccgactatcaggcggtggtcagcgggatagcagaaggctacaaacgtttcgccactggcactta

SEQ ID NO: 706648 - DNA, 75 bp, synthetic construct
  source 1..75: mol_type = other DNA
cagcagatgaataacgtgttgccgtggttgcacagcaaactggttccggctggcaccgggcatgccaccgtaagc

SEQ ID NO: 706649 - DNA, 75 bp, synthetic construct
  source 1..75: mol_type = other DNA
gcgagcaggacagtctgcaactgaccgagctgcacccgagcgattacccgttgctgcgtgctgaatttcagaaag

SEQ ID NO: 706650 - DNA, 75 bp, synthetic construct
  source 1..75: mol_type = other DNA
cagggaccaaagggggatactggcgctcccggggcaaaaggtgagaaaggagccaccggcgcaaccgggccacag

SEQ ID NO: 706651 - DNA, 75 bp, synthetic construct
  source 1..75: mol_type = other DNA
tatgacgccgccattgtacgggtcaccattggtgaatacggtgcaacggggtttattaatggcacggtctgtacc

SEQ ID NO: 706652 - DNA, 75 bp, synthetic construct
  source 1..75: mol_type = other DNA
ctgaaaagtagaggagcagatggtgtgatatcggtttcttacaggccgcttcaggtgacatttgatggttctcag

SEQ ID NO: 706653 - DNA, 75 bp, synthetic construct
  source 1..75: mol_type = other DNA
tggcagtaatgacgaaacaaaggcagccacgccgaaggccgtgaaggcggcaatggatgtggcaaatgaagcgaa

SEQ ID NO: 706654 - DNA, 75 bp, synthetic construct
  source 1..75: mol_type = other DNA
gaacaaaccggatacggtcagccagcgggatgccagcacgacgcagaaaggtgtggtgcagttaagcagtgatac

SEQ ID NO: 706655 - DNA, 75 bp, synthetic construct
  source 1..75: mol_type = other DNA
cgctcccggggcaaaaggtgagaaaggagccaccggcgcaaccgggccacagggagcaaaaggggataaaggtga

SEQ ID NO: 706656 - DNA, 75 bp, synthetic construct
  source 1..75: mol_type = other DNA
cgcggccacgccaataaaggttatcgcgacggcgcgctgcagatgagcagggcaaacgccgccagcatagctaaa

SEQ ID NO: 706657 - DNA, 75 bp, synthetic construct
  source 1..75: mol_type = other DNA
gatagcccttcaatgaattacgatggtgcttttgcactcgcttctagatatccttttaagtcaaaaccatcagca

SEQ ID NO: 706658 - DNA, 75 bp, synthetic construct
  source 1..75: mol_type = other DNA
gggaatgaatttccttggccagccaatatttttctccttcatgtttttaaatggatgtcggaaccgtctgatata

SEQ ID NO: 706659 - DNA, 75 bp, synthetic construct
  source 1..75: mol_type = other DNA
tgtatgctggagaatggatattctcagaaagctattgcggcgatgttggaggtttctactcgaaccattcgaaac

SEQ ID NO: 706660 - DNA, 75 bp, synthetic construct
  source 1..75: mol_type = other DNA
atgagcgggttttagacagaattcgaaacctcgaatgttccgctgaatttactgaacacaattttgtgttaagtg

SEQ ID NO: 706661 - DNA, 75 bp, synthetic construct
  source 1..75: mol_type = other DNA
accatgactactctcccaacccaatctcgccctgaaatcacgattatcaatggtcgcgttgtcaccacatctctt

SEQ ID NO: 706662 - DNA, 75 bp, synthetic construct
  source 1..75: mol_type = other DNA
atgccgggacctttaattttgtaggtgctggtaaacggaacgagtttgaaaccgatgtgatcttaatcggtgcga

SEQ ID NO: 706663 - DNA, 75 bp, synthetic construct
  source 1..75: mol_type = other DNA
aaatcactattccaaacctatattgcaaacttgataaacgtaccggaaaggtttactggcaatacaaacacccta

SEQ ID NO: 706664 - DNA, 75 bp, synthetic construct
  source 1..75: mol_type = other DNA
ccagcaacctttcatgagcaacgttcattgtcagaaaggctatacaaagaacagggaatagatactcagaaattg

SEQ ID NO: 706665 - DNA, 75 bp, synthetic construct
  source 1..75: mol_type = other DNA
aaaatattcgatatcgcagatgccagccatcgttacatgggaaatgccatgctgctagccttggttactggtcag

SEQ ID NO: 706666 - DNA, 75 bp, synthetic construct
  source 1..75: mol_type = other DNA
tggaaatagctgaagagtatgctgatgaactagttgaacagatgacgaaagatctgtttaaaacttttaaaaacc

SEQ ID NO: 706667 - DNA, 75 bp, synthetic construct
  source 1..75: mol_type = other DNA
atctgattcactttttccgagctacatcacaggctaaacgaggcgcacaagttaaatcgaacacattaacgatga

SEQ ID NO: 706668 - DNA, 75 bp, synthetic construct
  source 1..75: mol_type = other DNA
atatcaacaactgtttcgccgtggcgacctgatgctaccgataagcgatctgtgggccggaaggctgcaaaaaat

SEQ ID NO: 706669 - DNA, 75 bp, synthetic construct
  source 1..75: mol_type = other DNA
gtgaatacaccgacgcatcaggccgcaaactcccttgttaccaaatcacccgcgacggttttgcgtttcttgcca

SEQ ID NO: 706670 - DNA, 75 bp, synthetic construct
  source 1..75: mol_type = other DNA
gtcttcctgttgccatcggttacaggtgcggatggcgatatggaaggtattccggtggcgctgatggaagcgatg

SEQ ID NO: 706671 - DNA, 75 bp, synthetic construct
  source 1..75: mol_type = other DNA
tttggcccggcgggggtaaccgcagcaaaactacgggaactgggtgtcattcgcggcaaaattgccaccattttc

SEQ ID NO: 706672 - DNA, 75 bp, synthetic construct
  source 1..75: mol_type = other DNA
gccagccagacgttacgcggcattcatcgtaaaaatacctggcaggcgctcaacctcaaacgctatggcgccgag

SEQ ID NO: 706673 - DNA, 75 bp, synthetic construct
  source 1..75: mol_type = other DNA
aaattgccgccggagagcttcaccgttaatcgtctggagagtttactgggcagcgcgcgcgaacttaaccatcaa

SEQ ID NO: 706674 - DNA, 75 bp, synthetic construct
  source 1..75: mol_type = other DNA
gaaagcgatgctcgacgacgcggatgtcttcctgttgccatcggtaacgggcgcggatggcgatatggaaggtat

SEQ ID NO: 706675 - DNA, 75 bp, synthetic construct
  source 1..75: mol_type = other DNA
cgcgctttagcccgcgtcccgtgaaagcgcccgcaacgccgctggaaatcatctccgtcgcacgcttaaccgaaa

SEQ ID NO: 706676 - DNA, 75 bp, synthetic construct
  source 1..75: mol_type = other DNA
caactggaagatgtggtggagatgccgggctttaaaccgagccacgaagtgaaagcgatgctcgacgacgcggat

SEQ ID NO: 706677 - DNA, 75 bp, synthetic construct
  source 1..75: mol_type = other DNA
acctgaaatcaccattgacaacggccaggccgttaccacttctttggctgttgccaacttcttctccaagcgtca

SEQ ID NO: 706678 - DNA, 75 bp, synthetic construct
  source 1..75: mol_type = other DNA
ttaccaatcgccaccagcatattgattctgcaattccgggacgttacactgttcaggcaccttataaagcgggtg

SEQ ID NO: 706679 - DNA, 75 bp, synthetic construct
  source 1..75: mol_type = other DNA
ccgtcgcgacctggcggtggtgacccgcaccgcggtgaatcacatggccgccacggcgcgtcaggaattcgccca

SEQ ID NO: 706680 - DNA, 75 bp, synthetic construct
  source 1..75: mol_type = other DNA
gcgcggatggcgatatggaaggtattccggtggcgctaatggaagcgatggcggtcggtattccagtagtttcca

SEQ ID NO: 706681 - DNA, 75 bp, synthetic construct
  source 1..75: mol_type = other DNA
tttgcggccaggtcgtagcaccgcttcatgccgatgtctttatcgctcactttggtcccgcaggggtaaccgcag

SEQ ID NO: 706682 - DNA, 75 bp, synthetic construct
  source 1..75: mol_type = other DNA
aaacgccattgctcacgccattctgggcggtgcagtagcggcaatgcagggtaataatgttgctgccggtgcagc

SEQ ID NO: 706683 - DNA, 75 bp, synthetic construct
  source 1..75: mol_type = other DNA
gttaaaaaagagatggcccaggggcaaaagcagagtcgctttattgcctggacctttatgaacgacgagcagcgc

SEQ ID NO: 706684 - DNA, 75 bp, synthetic construct
  source 1..75: mol_type = other DNA
cgctgcggcacgggcgggtagtgagcgtaaacggcgtaatctggggctgaacaaagacgatgcattgaactttgg

SEQ ID NO: 706685 - DNA, 75 bp, synthetic construct
  source 1..75: mol_type = other DNA
aattaccctcgcttgagtggttaaaaatagtggcgactgatgagcacattcttgcctcggtaatgactccaactt

SEQ ID NO: 706686 - DNA, 75 bp, synthetic construct
  source 1..75: mol_type = other DNA
acttaccgccgttgtatcgtgctctgacggatgttggcgcggtaaaagtggtcaaaaaagagatggcccaggggc

SEQ ID NO: 706687 - DNA, 75 bp, synthetic construct
  source 1..75: mol_type = other DNA
tgctggcccatttttacgccgtagcgaactgggatatccccgacggttttctctgcccgccagtaccgggccggg

SEQ ID NO: 706688 - DNA, 75 bp, synthetic construct
  source 1..75: mol_type = other DNA
cgcggcagcgcgtgctggtagcgagcgcaaacggcgtaatctcggattaaacagagacgatgcgttgaactttgg

SEQ ID NO: 706689 - DNA, 75 bp, synthetic construct
  source 1..75: mol_type = other DNA
aagcggcagttgccgcggctatcgcccgtgttcaggctaaaaaagccgcccagcaaaaggttgtaaacgaggact

SEQ ID NO: 706690 - DNA, 75 bp, synthetic construct
  source 1..75: mol_type = other DNA
aacctgttgtgattaaggccggcgaacgaccggataacagtgcgattattgcggcccgggaagcgagaaaagcgc

SEQ ID NO: 706691 - DNA, 75 bp, synthetic construct
  source 1..75: mol_type = other DNA
gggctttacattaccgtggcttgacgttccggtggtaaaaatcaccaactgcctgttggcgccatctgccagtga

SEQ ID NO: 706692 - DNA, 75 bp, synthetic construct
  source 1..75: mol_type = other DNA
cattaattgctttgttattacccgaaaaaccagaaatggttcgttgttgctggatttcggcccacgccagttcac

SEQ ID NO: 706693 - DNA, 75 bp, synthetic construct
  source 1..75: mol_type = other DNA
gcggcagtacctgacaggtttcgaactggccgacatgttcgaaggccgtggagacgagaaagagctggttggcat

SEQ ID NO: 706694 - DNA, 75 bp, synthetic construct
  source 1..75: mol_type = other DNA
gcccacgccaaagcacgcaagctggagcagcagcaggctaacgcagaaccagaagaacaggttgacccgcgcaaa

SEQ ID NO: 706695 - DNA, 75 bp, synthetic construct
  source 1..75: mol_type = other DNA
tttactggcagaagcatcaggcgctattcctgttaatgccagcattctggacattggcgttggcgccaactgtat

SEQ ID NO: 706696 - DNA, 75 bp, synthetic construct
  source 1..75: mol_type = other DNA
atcgttcagcccgtgatggttatggttttgaagccgactggtccgaattttacaccaccaccagaaaaccttcag

SEQ ID NO: 706697 - DNA, 75 bp, synthetic construct
  source 1..75: mol_type = other DNA
gtgcatatactaaagcggaatgtaattcacgatttattacaggtgtccgtttaggaggactgtcatctgttcaaa

SEQ ID NO: 706698 - DNA, 75 bp, synthetic construct
  source 1..75: mol_type = other DNA
ggaaaccaaacgccgtcagcctaccggagcacctcgaaaattgctcctgcttttgcaagcgaatcctttcattat

SEQ ID NO: 706699 - DNA, 75 bp, synthetic construct
  source 1..75: mol_type = other DNA
tgtgaaggtgattgatggagttctggagtcgatggcccgtgagcaagtacgccgtgagcatgctacatggtcaca

SEQ ID NO: 706700 - DNA, 75 bp, synthetic construct
  source 1..75: mol_type = other DNA
gcgtcaggatctcgacagaccgtttgttatttttaaaacgcacatgtcggcaatgattgcgacggtggtggtcgt

SEQ ID NO: 706701 - DNA, 75 bp, synthetic construct
  source 1..75: mol_type = other DNA
ccgggatatcagtctggtctggcgatgttatcgtttgttgtatttgctatttttgcttacggtggaattgaagcc

SEQ ID NO: 706702 - DNA, 75 bp, synthetic construct
  source 1..75: mol_type = other DNA
cggcagatccgcgttatctcgccgccagttggcagtccggtcataccgacagtggcctgcattatcgccgttatc

SEQ ID NO: 706703 - DNA, 75 bp, synthetic construct
  source 1..75: mol_type = other DNA
aacgagcagtatgatgcgaccttgtgtaatccgccgttccacgattctgcggcgacggcacgggctggcagcgaa

SEQ ID NO: 706704 - DNA, 75 bp, synthetic construct
  source 1..75: mol_type = other DNA
aaactcatagtcaggcgttaagcagcgcgcaggcgattatcaacgccaaccctgggcttaaccgcgccatccgcc

SEQ ID NO: 706705 - DNA, 75 bp, synthetic construct
  source 1..75: mol_type = other DNA
aaatatcccttcctgctttccaacggtaaccgcgttgcacaaggcgaactggaaaacggacgtcattgggtacag

SEQ ID NO: 706706 - DNA, 75 bp, synthetic construct
  source 1..75: mol_type = other DNA
tttatcagtcaggcgatgcgctttgcacccagtgtgaagccgaaggtttccgccatattacgtattatctcgacc

SEQ ID NO: 706707 - DNA, 75 bp, synthetic construct
  source 1..75: mol_type = other DNA
cgaacccgcctccctggaactggtgcaaagtcgcctgcaaattctctttcccaccgctaaaaaggcagaacagta

SEQ ID NO: 706708 - DNA, 75 bp, synthetic construct
  source 1..75: mol_type = other DNA
cgatccgcgcaaagccgccgtcgaagccgctattgcccgtcgccaaagcacgcaagctggaacagcaacaggcta

SEQ ID NO: 706709 - DNA, 75 bp, synthetic construct
  source 1..75: mol_type = other DNA
gtttgctcgccacggcaaggcaggcaaattgcgcttacagcctgacgatccgctgcttgaacggcctttaatgtc

SEQ ID NO: 706710 - DNA, 75 bp, synthetic construct
  source 1..75: mol_type = other DNA
ctggcgatgatcgtggttgatcatactgatatgcgtgttcgcggctgggtaggatcggttgatctcaatgatgat

SEQ ID NO: 706711 - DNA, 75 bp, synthetic construct
  source 1..75: mol_type = other DNA
tgcaaaactggaagatatggcggcagcgtataccgcgtttgctcgccacggcaaggcaggcaaattgcgcttaca

SEQ ID NO: 706712 - DNA, 75 bp, synthetic construct
  source 1..75: mol_type = other DNA
cgaccagatggatgtgctggacatcctgaatgaagatggctcaatgaagccgatcagcagctggccaaaggtatg

SEQ ID NO: 706713 - DNA, 75 bp, synthetic construct
  source 1..75: mol_type = other DNA
cgcaacgtgaccctgcatttgacggataaaggtgattatcaattgctggtgatggatgacgtggggcaaatcgcg

SEQ ID NO: 706714 - DNA, 75 bp, synthetic construct
  source 1..75: mol_type = other DNA
ctgttgcaagacgtcccccgacgtaccggtgattaccgacctggcaactttgacagcggttttcatggcccgatc

SEQ ID NO: 706715 - DNA, 75 bp, synthetic construct
  source 1..75: mol_type = other DNA
ggcggaagcggcacataaaatcatcgtgatgtatgcaggccaggtagtagaaacgggcgatgcgcacgctatctt

SEQ ID NO: 706716 - DNA, 75 bp, synthetic construct
  source 1..75: mol_type = other DNA
ctgaatatgctcgctgacgggcgtcagtccaaatgccattacccacttgatgatgccgggaggccgacactatga

SEQ ID NO: 706717 - DNA, 75 bp, synthetic construct
  source 1..75: mol_type = other DNA
tggacgtgaccattcaggcgcaaatcatcgaactgctgctggagctacagcagaaagagaacatggcgctggtgt

SEQ ID NO: 706718 - DNA, 75 bp, synthetic construct
  source 1..75: mol_type = other DNA
gtaaagcaggtaaattgcgtctacaacccgatgagccgttgcttgaacgcccgttgatgtcgccgggagcggcgt

SEQ ID NO: 706719 - DNA, 75 bp, synthetic construct
  source 1..75: mol_type = other DNA
gggatcggttgatctcaacgatgattcacgctttggtcatgttgatatggtcaatgcgatccgatcgccaggatc

SEQ ID NO: 706720 - DNA, 75 bp, synthetic construct
  source 1..75: mol_type = other DNA
ttaatgcgatccgatcgccaggatcggtgcttaaaccattcgtctatggtctggctctggatgaaggattgatcc

SEQ ID NO: 706721 - DNA, 75 bp, synthetic construct
  source 1..75: mol_type = other DNA
tttccggtaccgtcacgattgccgaccgcatggcgaaggcccgtcgtcgcgtgaaagaacaggctggtggtgaag

SEQ ID NO: 706722 - DNA, 75 bp, synthetic construct
  source 1..75: mol_type = other DNA
aaaaaaataaaatctgggatttcaacggcggcatccatccaccggagatgaaaacccagtccaacggtactcccc

SEQ ID NO: 706723 - DNA, 75 bp, synthetic construct
  source 1..75: mol_type = other DNA
ctgacgcctgccctgcggatcttttgccgcaacagttgtactggttcagcaaaggtcagcaacacgataaagcca

SEQ ID NO: 706724 - DNA, 75 bp, synthetic construct
  source 1..75: mol_type = other DNA
aactggaacagcagcagactaacgccgagccggaagaacaggttgatccgcgcaaagctgccgtcgaggccgcta

SEQ ID NO: 706725 - DNA, 75 bp, synthetic construct
  source 1..75: mol_type = other DNA
accgcaggcgatttccatgctacgcgcggttctggcggattctcacgatatttcattgcgcgttattccgactaa

SEQ ID NO: 706726 - DNA, 75 bp, synthetic construct
  source 1..75: mol_type = other DNA
gattaccgctcacgcagtcgggaagaattaattgaacgcattcatcagtttggcgtcgccgggctgggtggtgcg

SEQ ID NO: 706727 - DNA, 75 bp, synthetic construct
  source 1..75: mol_type = other DNA
tgcgccccactctaccgcacatccttcggcattagctgaattaagcgtgattattgatgccgatggcgaagaccg

SEQ ID NO: 706728 - DNA, 75 bp, synthetic construct
  source 1..75: mol_type = other DNA
gctgtgggatgtatggcaaaaacgccggatggtcgtgaagttctgctgaggtactacacgccccgagtgctgaaa

SEQ ID NO: 706729 - DNA, 75 bp, synthetic construct
  source 1..75: mol_type = other DNA
atggattagctatagatccagattatgaattcaggcttaaaccggtaaaaatacgagataatgttttgatggcaa

SEQ ID NO: 706730 - DNA, 75 bp, synthetic construct
  source 1..75: mol_type = other DNA
aatatttatcactaatgaacaagaaatcttaagaaaattacgattagcggttaatcatgcgggattaaaacaaaa

SEQ ID NO: 706731 - DNA, 75 bp, synthetic construct
  source 1..75: mol_type = other DNA
gattatcgcactcgcagtcgcgaagagttaatcgagcgcatacatcagtttggtgttgccgggctgggcggtgca

SEQ ID NO: 706732 - DNA, 75 bp, synthetic construct
  source 1..75: mol_type = other DNA
tacgctggatgttaggggagtaattgcagtcaaaggcaatgagcaagtaaaaataggtagctatacaattcccat

SEQ ID NO: 706733 - DNA, 75 bp, synthetic construct
  source 1..75: mol_type = other DNA
cggaagttcatccccgggaagtgattaaacgcgccctgtaccacaatgtcgctgccgtggtgctggcgcacaatc

SEQ ID NO: 706734 - DNA, 75 bp, synthetic construct
  source 1..75: mol_type = other DNA
gcaacgcaaacagcagcgcgaccagcttcagggccaggcggtggaggtgccggacgacagcgatcgccgcctgca

SEQ ID NO: 706735 - DNA, 75 bp, synthetic construct
  source 1..75: mol_type = other DNA
gatctggttaacggcaatcagaaacctggcttcgacaatctggcgaaagcctccggcggctccatgcaactgacc

SEQ ID NO: 706736 - DNA, 75 bp, synthetic construct
  source 1..75: mol_type = other DNA
gccgattccgcctggttttccggagccaaagcggagaactaccagtccctcgccgccagcgataatgatgccatc

SEQ ID NO: 706737 - DNA, 75 bp, synthetic construct
  source 1..75: mol_type = other DNA
ctgacacgcggcatgattgaggcgctgcgcgacgatcccgatgcagcggtgcttattcagcgcctctccggcgaa

SEQ ID NO: 706738 - DNA, 75 bp, synthetic construct
  source 1..75: mol_type = other DNA
tgtttttcgccggggtttgcgtggcggcagacgactacagtttccgcacgcgaggcgcggttgacgacctgcttt

SEQ ID NO: 706739 - DNA, 75 bp, synthetic construct
  source 1..75: mol_type = other DNA
aacgtcaaagaggcgcaggaaagcctgggcaaaaccaccgcccaactggatgaagagctgagccagcttaagctg

SEQ ID NO: 706740 - DNA, 75 bp, synthetic construct
  source 1..75: mol_type = other DNA
atgaaaaatatcattcctgattaccgtcttgatatggtgggtgaaccctgcccttatccggcagtcgcaaccctt

SEQ ID NO: 706741 - DNA, 75 bp, synthetic construct
  source 1..75: mol_type = other DNA
cctgctcgggaagcagcacctgagtgacgaggccgacataatctctaccgggtttttacattctgcactctccag

SEQ ID NO: 706742 - DNA, 75 bp, synthetic construct
  source 1..75: mol_type = other DNA
atgtcagaattaaaaattgccgttagtcgttcttgccctgattgtttttccactcatcgtgcatgcgtgaatata

SEQ ID NO: 706743 - DNA, 75 bp, synthetic construct
  source 1..75: mol_type = other DNA
ttggctggaacgccgatatgatgtgcggcaatttcgacatcgacaccacggtgcgcaaccagctaaacggcatca

SEQ ID NO: 706744 - DNA, 75 bp, synthetic construct
  source 1..75: mol_type = other DNA
aacggcgaacactctgtcctttaccgtacccgctacgatcaaaagtctgatgcctggattatgcgtcttgcctga

SEQ ID NO: 706745 - DNA, 75 bp, synthetic construct
  source 1..75: mol_type = other DNA
ccctgcccttatccggcagtcgcaacccttgaggcgatgccgcagttaaaaaaggggaaatcctggaagtggtga

SEQ ID NO: 706746 - DNA, 75 bp, synthetic construct
  source 1..75: mol_type = other DNA
accttcccactgacggcaggcgtaagctggaacagcgatatgatgtgcggcaatttcgatatcgataccacggtg

SEQ ID NO: 706747 - DNA, 75 bp, synthetic construct
  source 1..75: mol_type = other DNA
caagcgcgcgcatcgtagcagaacgggaagccaatctgaatcatgcagtcgccgcgctgactcaatcgtgggtaa

SEQ ID NO: 706748 - DNA, 75 bp, synthetic construct
  source 1..75: mol_type = other DNA
tcgtaaacctatcattacctttacttagtgataagttttatatggtctatgataataatcctgaagtagtcgcca

SEQ ID NO: 706749 - DNA, 75 bp, synthetic construct
  source 1..75: mol_type = other DNA
caaagtgcgcaatttttatattttttatgaccttttacggatttagtgccggagaaggtttcgatcgtgatgcca

SEQ ID NO: 706750 - DNA, 75 bp, synthetic construct
  source 1..75: mol_type = other DNA
ctaccattactcaagagatgattgatacatccgagcgtatcaaccgcacgatcggcattgatatttcagactctg

SEQ ID NO: 706751 - DNA, 75 bp, synthetic construct
  source 1..75: mol_type = other DNA
ttaccgataaggcatccggcagttctaccgacaggaaggggctggacctgatgcgtatgaaagtggaagacggtg

SEQ ID NO: 706752 - DNA, 75 bp, synthetic construct
  source 1..75: mol_type = other DNA
catgaaatgaacgtgcgagaccttgctcctgcccttctatcactatcagatgcattagaggaagccggtaaaact

SEQ ID NO: 706753 - DNA, 75 bp, synthetic construct
  source 1..75: mol_type = other DNA
atggagcaagcctgacgatgccgcgcagtggctaacgcgggtggttggtgaacagaccattaacgtcgccccgga

SEQ ID NO: 706754 - DNA, 75 bp, synthetic construct
  source 1..75: mol_type = other DNA
gcgaagaccaaaggcctggcggtcggcgtggaagacgacaccgacaaacgggtggacgatctcagcaaacccaca

SEQ ID NO: 706755 - DNA, 75 bp, synthetic construct
  source 1..75: mol_type = other DNA
ctgacgcgcggcgtgattgaggcgctacgcgacgatcccgatgctgcggtacttatccagcgactctccggcgaa

SEQ ID NO: 706756 - DNA, 75 bp, synthetic construct
  source 1..75: mol_type = other DNA
caactctaatttacttcatgagcagtctcatcgtagcacttcctttcagttattctgttgtagtaagtgctaaga

SEQ ID NO: 706757 - DNA, 75 bp, synthetic construct
  source 1..75: mol_type = other DNA
ggagaagatcaacagccagcgcgggctggaaatgcgctcacgcccaggccatcgcatgccactggcaatcaccgg

SEQ ID NO: 706758 - DNA, 75 bp, synthetic construct
  source 1..75: mol_type = other DNA
cagcaactctaaacccaaagttaaagcacgcattgaatatgtaaaaaacaagttgcttgggaaagacattccaga

SEQ ID NO: 706759 - DNA, 75 bp, synthetic construct
  source 1..75: mol_type = other DNA
cagcgccttatcggtccgacgcgtgaggcattaagggtattatcagccactattccgggatttgagaaattcatg

SEQ ID NO: 706760 - DNA, 75 bp, synthetic construct
  source 1..75: mol_type = other DNA
ttgagatccccggcagtataacggaagaaaatgcgaaaaaactgaagagcaactgggacagcgggtataccggcg

SEQ ID NO: 706761 - DNA, 75 bp, synthetic construct
  source 1..75: mol_type = other DNA
tttcacgcggtgttttcatgcatttcgctgatatcccaggatattgccaaaatgcggcttcgcctgatgcagact

SEQ ID NO: 706762 - DNA, 75 bp, synthetic construct
  source 1..75: mol_type = other DNA
ctgtatcttcagcagcagaactacagtctggaggcgctgtcccgtcgtgatgcccgtgaagatccgttcgcgtcg

SEQ ID NO: 706763 - DNA, 75 bp, synthetic construct
  source 1..75: mol_type = other DNA
atggttgatttatattcgcctactcagcttgtacaggtggttaatgctgtagatgtacaaaaaaaattaaatgcg

SEQ ID NO: 706764 - DNA, 75 bp, synthetic construct
  source 1..75: mol_type = other DNA
agttctggcgttacttcacccacgcgttaatgcacttctcgctgatgcatatcctctttaacctgctctggtggt

SEQ ID NO: 706765 - DNA, 75 bp, synthetic construct
  source 1..75: mol_type = other DNA
attgttaagacactggatttggtgaaagtgagggtgctggatcatttcattattggggcgggtgatgttctctct

SEQ ID NO: 706766 - DNA, 75 bp, synthetic construct
  source 1..75: mol_type = other DNA
gatgggtatgccgtctatcgccatgtggatgcagtgcgggctggttactgtcttcatcctgctggtttcgtttgg

SEQ ID NO: 706767 - DNA, 75 bp, synthetic construct
  source 1..75: mol_type = other DNA
gaattgaatgcgatatctgcggacatgtatctactgacccagagggacggcactactactgcgaggataacagta

SEQ ID NO: 706768 - DNA, 75 bp, synthetic construct
  source 1..75: mol_type = other DNA
gacatgcaattcctgttatgggatgcgcaacgtcgtgccggtatcagtgatgaacagattacccaagcgatggta

SEQ ID NO: 706769 - DNA, 75 bp, synthetic construct
  source 1..75: mol_type = other DNA
gtgaaagttcgttatgcattggaaaagacagctttagataaatccgtctcaccacttgcgattcgttatgagcaa

SEQ ID NO: 706770 - DNA, 75 bp, synthetic construct
  source 1..75: mol_type = other DNA
atgcttattattgctgccgcttttcttatcggcttgccagtttttacatccactttaggttcggaagagactgat

SEQ ID NO: 706771 - DNA, 75 bp, synthetic construct
  source 1..75: mol_type = other DNA
gagagcgcctggaaaaaattaaatcatggcgtggaacctatggagctggaagcaacgtaatgctgccagcagaag

SEQ ID NO: 706772 - DNA, 75 bp, synthetic construct
  source 1..75: mol_type = other DNA
tggaacaactgaagatgacggctgaaattgtctgttcggtgttccgtgtcccggcctacaagattggcgttggcc

SEQ ID NO: 706773 - DNA, 75 bp, synthetic construct
  source 1..75: mol_type = other DNA
cagtctcctgaggagactaagccagaaacgtccggtctcaatacggtaccaggcaaaatttcacctggtaccgaa

SEQ ID NO: 706774 - DNA, 75 bp, synthetic construct
  source 1..75: mol_type = other DNA
tgggcaatcagcatgacacggttccgcgtcgcctgttgcaggatccgctgttatcgcccagagataaattcgcct

SEQ ID NO: 706775 - DNA, 75 bp, synthetic construct
  source 1..75: mol_type = other DNA
ctcctgaggagactaagccagaaacgtccggtctcaatacggtaccaggcaaaatttcacctggtaccgaatcag

SEQ ID NO: 706776 - DNA, 75 bp, synthetic construct
  source 1..75: mol_type = other DNA
caactatcaaactaagcggatctttagcttctttgttcgccagagaacatcagcgccttatcggtccgacgcgtg

SEQ ID NO: 706777 - DNA, 75 bp, synthetic construct
  source 1..75: mol_type = other DNA
ggcgtgatgttcggtaaccctgaaaccactaccggtggtaatgcgctgaaattctacgcttctgttcgtctcgat

SEQ ID NO: 706778 - DNA, 75 bp, synthetic construct
  source 1..75: mol_type = other DNA
aacccgcgtgaaagtggtgaagaacaaaatcgctgcgccgtttaaacaggctgaattccagatcctctacggcga

SEQ ID NO: 706779 - DNA, 75 bp, synthetic construct
  source 1..75: mol_type = other DNA
ccgcctgctaccggcaatgggtgggattgatttctcgccgatgatcctcgttctgctgctgtatgtcatcaatat

SEQ ID NO: 706780 - DNA, 75 bp, synthetic construct
  source 1..75: mol_type = other DNA
gcggaggtgctggttcgcctgaggaaggcggagtacatcacagcgcgacgtccggcgggtcagaaaaagaaacat

SEQ ID NO: 706781 - DNA, 75 bp, synthetic construct
  source 1..75: mol_type = other DNA
gcacgcatgatgcccgggccggggatatccgtgatgtcgcacagccgtgtgcggaggtgctggttcgcctgagga

SEQ ID NO: 706782 - DNA, 75 bp, synthetic construct
  source 1..75: mol_type = other DNA
actagggatgatgctttatcttatttatagtctggggttccagaacaccgacgagctaaagcaacaaatcactca

SEQ ID NO: 706783 - DNA, 75 bp, synthetic construct
  source 1..75: mol_type = other DNA
tagcccagcgcggactcttcggtgatagcacgccggaagctgaggcgttggcgctattcatcgtggcaaataatc

SEQ ID NO: 706784 - DNA, 75 bp, synthetic construct
  source 1..75: mol_type = other DNA
cttgttcggctggtgtcggaagagccagatccggaaatgcgtaatatcctgaccgcattaaatacggcagccagc

SEQ ID NO: 706785 - DNA, 75 bp, synthetic construct
  source 1..75: mol_type = other DNA
cggttactgccggacgggatatcacctcagttgcgactgctgtaacggcaaagggcgatatccgtgtgaatgccg

SEQ ID NO: 706786 - DNA, 75 bp, synthetic construct
  source 1..75: mol_type = other DNA
tatgtcagtaacgtcatactgaaccagacgggctcacgttatatcaacggcacaggctctgacctgacgcagatg

SEQ ID NO: 706787 - DNA, 75 bp, synthetic construct
  source 1..75: mol_type = other DNA
ggataaaaaccacctggataccggaacgctggggttcagtgaccttcacaacgaagcggattataaagtcagtca

SEQ ID NO: 706788 - DNA, 75 bp, synthetic construct
  source 1..75: mol_type = other DNA
caaaattatttaaccaaaattcatcattatttgatgagattcgtgcggaacatgaacagcaggcaattcattgcg

SEQ ID NO: 706789 - DNA, 75 bp, synthetic construct
  source 1..75: mol_type = other DNA
gttacctgagcagtggcaacagttgtctttccctctgttctggcagggctgcgaattacaggtcactcttgacgc

SEQ ID NO: 706790 - DNA, 75 bp, synthetic construct
  source 1..75: mol_type = other DNA
acgaacgctgtgacgccatcatcgcggctggctctaacggcgcgtacctgaaaagccgcctgtcagtgccagtta

SEQ ID NO: 706791 - DNA, 75 bp, synthetic construct
  source 1..75: mol_type = other DNA
gatagcgtactggtgctgttgcgcattccggcatggtggaacgattttatcgcgggcctggttctgctggcggtg

SEQ ID NO: 706792 - DNA, 75 bp, synthetic construct
  source 1..75: mol_type = other DNA
tgtggactggcggcaaatggattgaagggttacccgccgaactgaaacagctctccgcaccgctgctgtttggcg

SEQ ID NO: 706793 - DNA, 75 bp, synthetic construct
  source 1..75: mol_type = other DNA
aatgccagcggcagcctgcaggcaggcggggacgtcagcctgaccagccggggggatatcactctcgacggtttt

SEQ ID NO: 706794 - DNA, 75 bp, synthetic construct
  source 1..75: mol_type = other DNA
tactgagtggactgaaaccacaacagacagcggtaaaaccgtcaccatcaacagtggtcgggatacggtactgaa

SEQ ID NO: 706795 - DNA, 75 bp, synthetic construct
  source 1..75: mol_type = other DNA
cgcaatggcacgatgaactggcaggggccctgaaaaatattgccggaggttcgccactgaccggtcagaccggta

SEQ ID NO: 706796 - DNA, 75 bp, synthetic construct
  source 1..75: mol_type = other DNA
acttcagggcggtggcgatgtgagtctgaacagccggagtgatatcaccatcagtggttttaccggcacggcagg

SEQ ID NO: 706797 - DNA, 75 bp, synthetic construct
  source 1..75: mol_type = other DNA
tggtgccgggaaagtcagttcgcgtataggtttgtcatcgcctgcaaattatttaaccaaaattcatcattattt

SEQ ID NO: 706798 - DNA, 75 bp, synthetic construct
  source 1..75: mol_type = other DNA
cagcgttaccgggacaacgggactgacactgaatcagccccgtctggtgacggataaaaatctggtgctgtcttc

SEQ ID NO: 706799 - DNA, 75 bp, synthetic construct
  source 1..75: mol_type = other DNA
tctcacagtacagcagaaggaagccaagccatgctgaccagtcttcaaagtgcggttaaagatgcattttcgcag

SEQ ID NO: 706800 - DNA, 75 bp, synthetic construct
  source 1..75: mol_type = other DNA
gaaggccaggacagtaccgcatcagtagtgggtagcatggctggtacaggccttggctataacattggggcttca

SEQ ID NO: 706801 - DNA, 75 bp, synthetic construct
  source 1..75: mol_type = other DNA
tggaatgtctgcgggtaatgatatcaacattgccgcaaacctgataagcgggagcaaaagtcagtccggtttctg

SEQ ID NO: 706802 - DNA, 75 bp, synthetic construct
  source 1..75: mol_type = other DNA
tgaagacactcagaccaagttcgtgcaggagcatggcaaagatattgcgtcctgctcgactaaccctggcggggc

SEQ ID NO: 706803 - DNA, 75 bp, synthetic construct
  source 1..75: mol_type = other DNA
cctttccgtcacgtcgcaaaatgccatcaccaacggcggtgtgatgcagggtgatgccatggtgctcggtgccgg

SEQ ID NO: 706804 - DNA, 75 bp, synthetic construct
  source 1..75: mol_type = other DNA
ctatcgccaggtctcgccggatgcgacagaagccagtggcacctctccggcaggtcagtaccgtgcggttatcag

SEQ ID NO: 706805 - DNA, 75 bp, synthetic construct
  source 1..75: mol_type = other DNA
tgcttcagcgccggagctggcgaacatcatcggtcatcacgcgggtattgatgacaatacagcggcaaaagccat

SEQ ID NO: 706806 - DNA, 75 bp, synthetic construct
  source 1..75: mol_type = other DNA
ggcagggctggaaagggacaatagcctggaatacggcaggtggagcattaaccaacgccataaacggagatgatc

SEQ ID NO: 706807 - DNA, 75 bp, synthetic construct
  source 1..75: mol_type = other DNA
acgcactggcgcgaagggcaaagtggatatcacggccagcgggaaactgaccagtacaggttcgctggtgagcga

SEQ ID NO: 706808 - DNA, 75 bp, synthetic construct
  source 1..75: mol_type = other DNA
aggaaatgcaaaatacgctcagaggattaagaaatcatgcggatacgttgaaaaacgtcaacaatcctgaagctc

SEQ ID NO: 706809 - DNA, 75 bp, synthetic construct
  source 1..75: mol_type = other DNA
tggatacgctttattattacgctccgtttgctgacagtgccacacagcgctttctcagcagccagaacatcacaa

SEQ ID NO: 706810 - DNA, 75 bp, synthetic construct
  source 1..75: mol_type = other DNA
ggcagcttcggggataaatttcagggtaacatgccgggtggcatgatatccgccggaggtcacagcggacatgcg

SEQ ID NO: 706811 - DNA, 75 bp, synthetic construct
  source 1..75: mol_type = other DNA
aaatgatcctaagcagcaaaatgaaaaaactgtagataagcttaatcagaagcaagaaagtgcgattaagaagat

SEQ ID NO: 706812 - DNA, 75 bp, synthetic construct
  source 1..75: mol_type = other DNA
gtacccggggatcggggcatgtgctgaatggtgacaatacagacgaaaacaaacagccgaatctgggcaaagacg

SEQ ID NO: 706813 - DNA, 75 bp, synthetic construct
  source 1..75: mol_type = other DNA
acagataaccgccggacagaatctcacggccagcgccaccacgctgacgcaggacggaatattgctggcgaaaag

SEQ ID NO: 706814 - DNA, 75 bp, synthetic construct
  source 1..75: mol_type = other DNA
caaaagccattgcccatgccattctcggtggtgtgacagcagcccttcagggcaacagtgcggcagcaggcgcaa

SEQ ID NO: 706815 - DNA, 75 bp, synthetic construct
  source 1..75: mol_type = other DNA
cgacgggagtcagcctgtcgctcaccacccagaaatcgaaatcacaacaacattctgaaagtgacacagtatccg

SEQ ID NO: 706816 - DNA, 75 bp, synthetic construct
  source 1..75: mol_type = other DNA
caccagtacagatacgtcctggcgctttaaggaaacgaagaaatccggtctgatgggtaccggcggtattggttt

SEQ ID NO: 706817 - DNA, 75 bp, synthetic construct
  source 1..75: mol_type = other DNA
tgtcagcgggtatggccggcggcattgccagtggcgatgtggctggcgcggctgctggggctggtgccgggaaga

SEQ ID NO: 706818 - DNA, 75 bp, synthetic construct
  source 1..75: mol_type = other DNA
tgatattggtggtggctttgtttctgagttaataaactacggtattaaaaattatcctactcctactaataagga

SEQ ID NO: 706819 - DNA, 75 bp, synthetic construct
  source 1..75: mol_type = other DNA
taagcaaagtgatagttgatggttataaagatggcgtattgattgcaggcgcctggtatctggggcctgcggtgt

SEQ ID NO: 706820 - DNA, 75 bp, synthetic construct
  source 1..75: mol_type = other DNA
gcggcccgcgatatcgtgactgtcgccagtgacacgctgacaacacagggacagataaccgccggacagaatctc

SEQ ID NO: 706821 - DNA, 75 bp, synthetic construct
  source 1..75: mol_type = other DNA
gataaagctgagcttggtggtgcaggtgctggaacaccggggggatgggaaccggataatgaagaaaaagcccgt

SEQ ID NO: 706822 - DNA, 75 bp, synthetic construct
  source 1..75: mol_type = other DNA
aaaatagaaaaaaatcctagtaaagatttaccaaatggaaatatggcttctgctcatgctgaagttggtactatt

SEQ ID NO: 706823 - DNA, 75 bp, synthetic construct
  source 1..75: mol_type = other DNA
tcgctcgacagttccggctatatcgacaacctgaatgcggggctgataagcgcgggcggtagcctggacctgagc

SEQ ID NO: 706824 - DNA, 75 bp, synthetic construct
  source 1..75: mol_type = other DNA
ccctgctgtcggggaaccgcgtgaccgttaacgccggtgataacctgacggtagagggttcggatgtggtggctg

SEQ ID NO: 706825 - DNA, 75 bp, synthetic construct
  source 1..75: mol_type = other DNA
gctcacgttatatcaacggcacaggctctgacctgacgcagatgaaatacctgatggacagcgcggcagcacaac

SEQ ID NO: 706826 - DNA, 75 bp, synthetic construct
  source 1..75: mol_type = other DNA
taccctgaacgccagtgaaaagctcacccacagcgggaaaagcagcgccccgtcgctcagcctcagtgcgccgga

SEQ ID NO: 706827 - DNA, 75 bp, synthetic construct
  source 1..75: mol_type = other DNA
caccgtgccggacagcaacgtctggccgccgttcagcgggccatgcagcagggggccgcgaatgattactggttt

SEQ ID NO: 706828 - DNA, 75 bp, synthetic construct
  source 1..75: mol_type = other DNA
gagaatgtcgcagtacctgatggtgcaaattctgtttcagtcagagtgggcgatttaggtgaagatggatgggga

SEQ ID NO: 706829 - DNA, 75 bp, synthetic construct
  source 1..75: mol_type = other DNA
cggtgacctgacgttcaccacgccggactacagtggcagtggctggctacaggccactgacctgctgctgaacgt

SEQ ID NO: 706830 - DNA, 75 bp, synthetic construct
  source 1..75: mol_type = other DNA
agtaatggtaatgcgagtagttcagcgtgtgccagcgcaagactgaaagttattgcgtcgaaagaagggtacgaa

SEQ ID NO: 706831 - DNA, 75 bp, synthetic construct
  source 1..75: mol_type = other DNA
gtagcctagacctgagcgccatcggggatatcagcaatatcagctcagtcatcagcggtaaaaccgtacaactgg

SEQ ID NO: 706832 - DNA, 75 bp, synthetic construct
  source 1..75: mol_type = other DNA
tcctgacggcagctatggctatttcacccgtgaagttgaaaatcagcacggtacgccctgcaacgggcacggggc

SEQ ID NO: 706833 - DNA, 75 bp, synthetic construct
  source 1..75: mol_type = other DNA
aggaggggaccaccggaaaggaaacggtctggcggcttgcctccgactcactccccaaagcgtggtttactgagc

SEQ ID NO: 706834 - DNA, 75 bp, synthetic construct
  source 1..75: mol_type = other DNA
actgaaactgattgctgccctcacgaattacggtaccctgtccgcagggaaaaccctttccgtcacgtcgcaaaa

SEQ ID NO: 706835 - DNA, 75 bp, synthetic construct
  source 1..75: mol_type = other DNA
ttgccaccggcagtgccgacgttaaaggaaccacgctgaataataccggtacgcttcagggtgcggagctgctgg

SEQ ID NO: 706836 - DNA, 75 bp, synthetic construct
  source 1..75: mol_type = other DNA
caggttgcacaactgaccagaagcatactgtggtgggagtccgtcaccatcaacggacagacagtcatggttccg

SEQ ID NO: 706837 - DNA, 75 bp, synthetic construct
  source 1..75: mol_type = other DNA
cacgataacggtgccttcgctgaactccctgacaccaccgacggtcagtcagggggtgagcggtgaagccctgcg

SEQ ID NO: 706838 - DNA, 75 bp, synthetic construct
  source 1..75: mol_type = other DNA
cagtaaagatccggcagagcgtgaaaaggcacagcagaaatatgatgcattgcttgaaaaagatattgccagtga

SEQ ID NO: 706839 - DNA, 75 bp, synthetic construct
  source 1..75: mol_type = other DNA
cgtattttcttgaccgcctcgggctgaaaccggaaaaagattatcgtttcctgggggatgcggtctttgataccc

SEQ ID NO: 706840 - DNA, 75 bp, synthetic construct
  source 1..75: mol_type = other DNA
ctttctgctgaggctgaacgactggaaaaccgggcgtcatttatcctggcgaatggggatatcgcactctcgggc

SEQ ID NO: 706841 - DNA, 75 bp, synthetic construct
  source 1..75: mol_type = other DNA
atgctgaaggtaccacgtcatccgccatcagcggcggaaatctcattatccgtaataaggagagtcagaagcagg

SEQ ID NO: 706842 - DNA, 75 bp, synthetic construct
  source 1..75: mol_type = other DNA
gtgaacaatttgcctggctgcgcgagaacggttatcaaccggtcagtattgctcaaattcgtgaagcacatcgag

SEQ ID NO: 706843 - DNA, 75 bp, synthetic construct
  source 1..75: mol_type = other DNA
acttgcagaaatcgcattgatgcatggttgggtgttgctgaacacattctgtatataccaatgaaattagcgtta

SEQ ID NO: 706844 - DNA, 75 bp, synthetic construct
  source 1..75: mol_type = other DNA
ggtcgtatattggtggcggtaagacggggaatatgttcaaccagttgttgacctctaaaaagctgacaaaaacgg

SEQ ID NO: 706845 - DNA, 75 bp, synthetic construct
  source 1..75: mol_type = other DNA
gtgaggtgctggcagagcatccaggattgatttgcattctccggcaacgctatgaagggcgggggatgactaagc

SEQ ID NO: 706846 - DNA, 75 bp, synthetic construct
  source 1..75: mol_type = other DNA
gaaggtgtcgcagaaaaatcggctgaccaatggttaatacaattgaccaatcaaattaaaacatccctcaggcta

SEQ ID NO: 706847 - DNA, 75 bp, synthetic construct
  source 1..75: mol_type = other DNA
ttgggtcgatactccagcggataaacaagtgaaatttggcgatgagatggtcagtcgagaatattttgccacgtg

SEQ ID NO: 706848 - DNA, 75 bp, synthetic construct
  source 1..75: mol_type = other DNA
caggccgcgacagccgcgcttcagggactggcgggtggtaatttagcgggtgctctggccggagcttctgcaccg

SEQ ID NO: 706849 - DNA, 75 bp, synthetic construct
  source 1..75: mol_type = other DNA
gggaaattacggatgtgggggcggtggtcgtatatcggtgggggtaaatccggaaatatgtttaaccggttactg

SEQ ID NO: 706850 - DNA, 75 bp, synthetic construct
  source 1..75: mol_type = other DNA
tgaccagagggaagcagaagagctggttgtcacattgtacagacacagaggcgttgattattgatcgcgttatca

SEQ ID NO: 706851 - DNA, 75 bp, synthetic construct
  source 1..75: mol_type = other DNA
attgattagcgtccttcggcaacggtatgaggggcgggggatgaccaaacgcaaaatggctgaattgctaaatga

SEQ ID NO: 706852 - DNA, 75 bp, synthetic construct
  source 1..75: mol_type = other DNA
gaagaaccggcgctgaatatgctcgctgacgggcgtcagtccaaatgccattacccacttgatgatgccgggagg

SEQ ID NO: 706853 - DNA, 75 bp, synthetic construct
  source 1..75: mol_type = other DNA
gcctgcttaacccacgctgcccctatgcaacggacaaatgtcgcgctgaagaaccgacgctgaatatgcttgcag

SEQ ID NO: 706854 - DNA, 75 bp, synthetic construct
  source 1..75: mol_type = other DNA
gcaacctggtgggtgccgaagtggcgatgatcttccaggacccgatgaccagccttaacccgtgctacaccgtgg

SEQ ID NO: 706855 - DNA, 75 bp, synthetic construct
  source 1..75: mol_type = other DNA
ggtggcttcgacattacagtgggcagacatacccaactggatggtgcggtgattgcctccactgccacaccggat

SEQ ID NO: 706856 - DNA, 75 bp, synthetic construct
  source 1..75: mol_type = other DNA
cttggtgccgggacaaatgccgggatgcagtatgcagatagtggtgaaataaacccggtcaactcagtggcagca

SEQ ID NO: 706857 - DNA, 75 bp, synthetic construct
  source 1..75: mol_type = other DNA
ctgcgcaggataaatatgggcctgttccggcggatgcgacggaagaacagcgacaagcatatctggcgaaactgc

SEQ ID NO: 706858 - DNA, 75 bp, synthetic construct
  source 1..75: mol_type = other DNA
tttgcttcaaaagatataaatggtgtaccgcgtacaatgtttaaaccagagaaaggtatcgaatattggaacaag

SEQ ID NO: 706859 - DNA, 75 bp, synthetic construct
  source 1..75: mol_type = other DNA
gtattacaatcctgtgactaatgtctttgcttcaaaagatataaatggtgtaccgcgtacaatgtttaaaccaga

SEQ ID NO: 706860 - DNA, 75 bp, synthetic construct
  source 1..75: mol_type = other DNA
cagcaccgcatcagcagcagtgggagcacaaagcgggaagaatgctgttgagaataatgcgctgggtaacaagaa

SEQ ID NO: 706861 - DNA, 75 bp, synthetic construct
  source 1..75: mol_type = other DNA
aggaaatatgttcaatcagttgctgacatccaaaaaactgacaaaaaccgcgatcaatgaagccatgcgcaaaat

SEQ ID NO: 706862 - DNA, 75 bp, synthetic construct
  source 1..75: mol_type = other DNA
agggattctgatcgaaaacgtttactcatcagccttggcactgtaaaaccaatggttgatggtctggagctgatt

SEQ ID NO: 706863 - DNA, 75 bp, synthetic construct
  source 1..75: mol_type = other DNA
accagtgatttggtaaatcgcctgctttatgatgattcactacgcttctgttcagatcaggtagccgctgaaatg

SEQ ID NO: 706864 - DNA, 75 bp, synthetic construct
  source 1..75: mol_type = other DNA
ggtgcagatcgctctgttaatgcagaaattgttgcgaagcgtgggtgtggaattattccggacaagcatggactg

SEQ ID NO: 706865 - DNA, 75 bp, synthetic construct
  source 1..75: mol_type = other DNA
atcgcctgggttatggattctgccagtgaggtcgatgccgagatcatcctgcatatttcagccaatgcgcggtcc

SEQ ID NO: 706866 - DNA, 75 bp, synthetic construct
  source 1..75: mol_type = other DNA
atatattccttataacggaggtgctgtaaaggaaacatggtgggacagggattctgatcggaaacgtttacttat

SEQ ID NO: 706867 - DNA, 75 bp, synthetic construct
  source 1..75: mol_type = other DNA
ttgatttctctggctcaggcctttcgtgtaattggacatgatgtagtaattagtagcgctggcaaattcgcgaat

SEQ ID NO: 706868 - DNA, 75 bp, synthetic construct
  source 1..75: mol_type = other DNA
gaagatcagaagcaaactgtaagcacgctggcaacgctgtcagcgggtatggccggcggcattgccagtggcgat

SEQ ID NO: 706869 - DNA, 75 bp, synthetic construct
  source 1..75: mol_type = other DNA
tctcgccggtggcagtatgaccctgagtggcgacacactgaacaatcagggctggcaggagggaaccaccggaaa

SEQ ID NO: 706870 - DNA, 75 bp, synthetic construct
  source 1..75: mol_type = other DNA
ctggaagcagtcacggggtgatttcaccggttccggaaaataaccggtggtggggtgttgtccggcatgatggtg

SEQ ID NO: 706871 - DNA, 75 bp, synthetic construct
  source 1..75: mol_type = other DNA
tggattcgcgcatacatctgcccatattcagatgttaaaccgttctttaagcaatgcttacaggcggcatggagt

SEQ ID NO: 706872 - DNA, 75 bp, synthetic construct
  source 1..75: mol_type = other DNA
caggaaaatggaggccagatttaatagtctatccccctcttgatccggcaggcccattggttgctgctaaatata

SEQ ID NO: 706873 - DNA, 75 bp, synthetic construct
  source 1..75: mol_type = other DNA
gaacggatattacttcgagaaattttacagtccttatcaaaattatataactgaatttttaaatccgggcagtta

SEQ ID NO: 706874 - DNA, 75 bp, synthetic construct
  source 1..75: mol_type = other DNA
atgactgactacctgttactgtttgtcggaactgtactggtcaataactttgtactggtcaagtttctggggctt

SEQ ID NO: 706875 - DNA, 75 bp, synthetic construct
  source 1..75: mol_type = other DNA
atgaataaacacactctaacccgtatttcagaggaagcttttaacgagcttaccagaattaaacgagctactaac

SEQ ID NO: 706876 - DNA, 75 bp, synthetic construct
  source 1..75: mol_type = other DNA
tcaagaggtcgtaagcatattcgaattgaacgggaagcacttaacgctcttaagagtgaaaacaagctgccagta

SEQ ID NO: 706877 - DNA, 75 bp, synthetic construct
  source 1..75: mol_type = other DNA
atgaaaaacaaacacacattaacccgtatttcagaggaagcttttaacgagcttaccagaattaaacgagcgact

SEQ ID NO: 706878 - DNA, 75 bp, synthetic construct
  source 1..75: mol_type = other DNA
gcgttgattattgatcgcgttatcagtgaggtgcttggggaatatcccgggctaatcaatattctccggcaaagg

SEQ ID NO: 706879 - DNA, 75 bp, synthetic construct
  source 1..75: mol_type = other DNA
caccgtgccggacagcaacgactggccgccgtgcagcgggccatgcagcagggggccgcgaatgattactggttt

SEQ ID NO: 706880 - DNA, 75 bp, synthetic construct
  source 1..75: mol_type = other DNA
tttgaaggcacttaacaactttaaaattgatattgcccgtctattgagtcttaaaattcacaagctgtctctggg

SEQ ID NO: 706881 - DNA, 75 bp, synthetic construct
  source 1..75: mol_type = other DNA
cattaatgctgtggggatttttcgccaagaaatatgtatttggtctgattattgcggccgtggtctggcagctaa

SEQ ID NO: 706882 - DNA, 75 bp, synthetic construct
  source 1..75: mol_type = other DNA
aagtaattgaacgtttggtagaggcatatgggttcacaacccggcaggccctctgcgaccacttaggtgtatcaa

SEQ ID NO: 706883 - DNA, 75 bp, synthetic construct
  source 1..75: mol_type = other DNA
gatgtacggtcatgtttatgtggcgcagatttctctcggcgcgcagctcaaccagacggtgaaagcgattcagga

SEQ ID NO: 706884 - DNA, 75 bp, synthetic construct
  source 1..75: mol_type = other DNA
atgactataaaaaatctacctgcagactatttattggctgcgcaacagggggatatcgataaagtaaaaacctgc

SEQ ID NO: 706885 - DNA, 75 bp, synthetic construct
  source 1..75: mol_type = other DNA
atttaacgctgctacgaattattttaccggctaaacccgatcttaattgcgtcacccgttttggcggtgtcggcc

SEQ ID NO: 706886 - DNA, 75 bp, synthetic construct
  source 1..75: mol_type = other DNA
gatggcgggattaaacagcaggcgattgtccagttattgctggaacacggtgccagcccgcacatgacggataaa

SEQ ID NO: 706887 - DNA, 75 bp, synthetic construct
  source 1..75: mol_type = other DNA
tttacccctgcaataaaaattggttgcctgatgtacatctcgcaactgtacgagtaccggacaacgcttggcgat

SEQ ID NO: 706888 - DNA, 75 bp, synthetic construct
  source 1..75: mol_type = other DNA
ggtcatggaaagaaaggagcgacttagaaagagagcttaatacctggatccgtcagtatgttgccgaccaggaaa

SEQ ID NO: 706889 - DNA, 75 bp, synthetic construct
  source 1..75: mol_type = other DNA
ggtatcaggttgcactgagtgtgaggccgcattttaaatttatgggggcaaactttgaactttccctggttggcc

SEQ ID NO: 706890 - DNA, 75 bp, synthetic construct
  source 1..75: mol_type = other DNA
aggaactctcccaaaccgttcgttacgaaacccctgtcatcatgggtattgacgaagtgaacctggccggagggt

SEQ ID NO: 706891 - DNA, 75 bp, synthetic construct
  source 1..75: mol_type = other DNA
aaatatatcgttaccgctcctgaatttattaaaataaacggtatcccttatttgtccgccgacgacgttcgcgat

SEQ ID NO: 706892 - DNA, 75 bp, synthetic construct
  source 1..75: mol_type = other DNA
gccgcgaatttgaactggctgaagaagggtttatcaccctgaccatgcgtaaagactctgataatgccgcctttt

SEQ ID NO: 706893 - DNA, 75 bp, synthetic construct
  source 1..75: mol_type = other DNA
accatggtagatcgcgttgatttccgtgaaaacatcaaggtcaacgtactccatgtcactaagcaggagcttctt

SEQ ID NO: 706894 - DNA, 75 bp, synthetic construct
  source 1..75: mol_type = other DNA
tgtgctcgatggtatatttgagtttgtattttataatgccgaaaagtcatttaaaaaactcaatcttgtatatga

SEQ ID NO: 706895 - DNA, 75 bp, synthetic construct
  source 1..75: mol_type = other DNA
atggcaaagcggcacctttgtcgcccgacgctgatcgaactggatgactttgccgaattgcacaaagaggtcttt

SEQ ID NO: 706896 - DNA, 75 bp, synthetic construct
  source 1..75: mol_type = other DNA
cagccggaacattcgtaaaactgccggatgaagtgtttagtactttgttcaaagaggcgcgagcgagaggcgtaa

SEQ ID NO: 706897 - DNA, 75 bp, synthetic construct
  source 1..75: mol_type = other DNA
agaaaagaaaacattaaatctattaaaaaagatgttgattatgtccatatgttcacaaaaaacttccagcaactc

SEQ ID NO: 706898 - DNA, 75 bp, synthetic construct
  source 1..75: mol_type = other DNA
ggcaacgcgcgcgatgtcttttatcagcccgttcatccttactctatcggtttactcaatgcggtgccgcgtctt

SEQ ID NO: 706899 - DNA, 75 bp, synthetic construct
  source 1..75: mol_type = other DNA
ggatctgcgacaaagtgctggtaatgtacgccgggcgcacgatggaatatggcaatgcgcgcgatgtcttttatc

SEQ ID NO: 706900 - DNA, 75 bp, synthetic construct
  source 1..75: mol_type = other DNA
gtcaccattacggataacagcgccgttgcgcagtcgcgtggcatcccgaacggccacacgaaaggggcagtttcg

SEQ ID NO: 706901 - DNA, 75 bp, synthetic construct
  source 1..75: mol_type = other DNA
gctgcgttcactgagctttatcgaacgaaacgaaaatatcgtactgctgggaccgtcaggcgttggcaaaacgca

SEQ ID NO: 706902 - DNA, 75 bp, synthetic construct
  source 1..75: mol_type = other DNA
agcgctaccgtgcatgcgggattgggtggcgcgcgcaccaccaccacggtggatatgtcgcgtacctatctggag

SEQ ID NO: 706903 - DNA, 75 bp, synthetic construct
  source 1..75: mol_type = other DNA
ccgaatataacgctcacttgtgggtgaacctgacggattacctcgataccggtctgttcctcgatcaccgtatcg

SEQ ID NO: 706904 - DNA, 75 bp, synthetic construct
  source 1..75: mol_type = other DNA
tgtttaatcctggcgcgacctttgcagtccacttcagtggtctgaacgacaccatccgcaacagccagtatggcg

SEQ ID NO: 706905 - DNA, 75 bp, synthetic construct
  source 1..75: mol_type = other DNA
catatctttgttggcacctaccccaacgaccccgatactcaacgtgatgttgacgaagtgtgcgctcgctttccg

SEQ ID NO: 706906 - DNA, 75 bp, synthetic construct
  source 1..75: mol_type = other DNA
agaggtcaaagttgagtcgttcggcaataaattgcagctgagtaatctgctggatatcgatccgaagggtggcgg

SEQ ID NO: 706907 - DNA, 75 bp, synthetic construct
  source 1..75: mol_type = other DNA
aaactggcacggcatcagcgtaaacaggcgatgtacacgcgcatggcagcgttcccggcagttaaaacgttcgaa

SEQ ID NO: 706908 - DNA, 75 bp, synthetic construct
  source 1..75: mol_type = other DNA
cgggcatctgttgctggtgagcgttttgtataagggcttcacctactggccgattggcaacgcgctgcatccgca

SEQ ID NO: 706909 - DNA, 75 bp, synthetic construct
  source 1..75: mol_type = other DNA
tttggcctgctcaaccgcattgcgccgccgctgaacctcttttcgctcggctttcccatcaacatgctggcgggg

SEQ ID NO: 706910 - DNA, 75 bp, synthetic construct
  source 1..75: mol_type = other DNA
tacccggtacgcaatgaacaatttgcctctctccagcatctcctgagcaatacgcagggcttcttcgcgtttgcc

SEQ ID NO: 706911 - DNA, 75 bp, synthetic construct
  source 1..75: mol_type = other DNA
ataatcataaacgcatttaccggctctacagcgaacagagcctgtccctgcgtctcaaacgcacacgccggaata

SEQ ID NO: 706912 - DNA, 75 bp, synthetic construct
  source 1..75: mol_type = other DNA
atgagacgccgggaaaaatggctgaaccatacccggctgagtgcgttctggacccgggaggaggctgtgctgaca

SEQ ID NO: 706913 - DNA, 75 bp, synthetic construct
  source 1..75: mol_type = other DNA
gtgacgcggcgaaaaaagcagctaaccgttttgcggtgccaccaccaccccgactggtggtgaataatgataatg

SEQ ID NO: 706914 - DNA, 75 bp, synthetic construct
  source 1..75: mol_type = other DNA
ttaaatcattgaatatcgatattttaaaaatcgataaatcgtttgttgagacgctgactacccacaaaaccagcc

SEQ ID NO: 706915 - DNA, 75 bp, synthetic construct
  source 1..75: mol_type = other DNA
acgatcgctgaaggcgtcgaaactgaggagcaggttaactggctgcgcaaacgcggcgtgcgctattgccaggga

SEQ ID NO: 706916 - DNA, 75 bp, synthetic construct
  source 1..75: mol_type = other DNA
gcgaaacatcctgaactctctatttcagttaacttatccgcctctgattttcatacttcaagggtgattgcccta

SEQ ID NO: 706917 - DNA, 75 bp, synthetic construct
  source 1..75: mol_type = other DNA
ttgcgctggcgctcatgtccgggaaaaacaaaacggcgtcagccattgctgccggttattcggcgaagacggcca

SEQ ID NO: 706918 - DNA, 75 bp, synthetic construct
  source 1..75: mol_type = other DNA
gtgatgccgcgaaaaaagcggctaaccgttttgcggtgccaccgccaccccgactggtggtgaataacgataatg

SEQ ID NO: 706919 - DNA, 75 bp, synthetic construct
  source 1..75: mol_type = other DNA
cgggtcgagtgttatccattgacgccacagagaatggcagtgttattcatatttcactggtcaacttattaagta

SEQ ID NO: 706920 - DNA, 75 bp, synthetic construct
  source 1..75: mol_type = other DNA
ttcgttgcgtgaatggaccttcgatcgcgtactggcccacgctgatgcgggtgaaagctatatgtgggaatgtcc

SEQ ID NO: 706921 - DNA, 75 bp, synthetic construct
  source 1..75: mol_type = other DNA
gatggttcatcaccccactgtgcggtggtggatgaatatcacgagcatgccaccgatgcgctttataccacaatg

SEQ ID NO: 706922 - DNA, 75 bp, synthetic construct
  source 1..75: mol_type = other DNA
cgaacgctttcagaaatgggtggaaatgggcgtcctgaccgttaccgatggtgcagaggtggattatcgctacat

SEQ ID NO: 706923 - DNA, 75 bp, synthetic construct
  source 1..75: mol_type = other DNA
ttattaccagccaataatcgatatcaaaacagaaaaatgtatcggcgctgaagcgttgttacgttggcctggtga

SEQ ID NO: 706924 - DNA, 75 bp, synthetic construct
  source 1..75: mol_type = other DNA
gcaaaaactggtggatttgattaacgccagtgactcgccgccgtcagtgcttatttcaggctcggcggcgggata

SEQ ID NO: 706925 - DNA, 75 bp, synthetic construct
  source 1..75: mol_type = other DNA
tcgtttctggtgtcatgtattacatgtcaacagccaatgaaaatttacagaacagaagagtaacggaaatgttta

SEQ ID NO: 706926 - DNA, 75 bp, synthetic construct
  source 1..75: mol_type = other DNA
atcaattagctgatgccgtcagtctgcgcgatctgtcgcccgatcagcctatacagctccccctgttgcgccagg

SEQ ID NO: 706927 - DNA, 75 bp, synthetic construct
  source 1..75: mol_type = other DNA
ggcacctgatggcggtatcctcggcaaaatgttaccgccgtttcgcctcggtttaggcggcccgataggttccgg

SEQ ID NO: 706928 - DNA, 75 bp, synthetic construct
  source 1..75: mol_type = other DNA
tctggctgctggataacgagctgcgcgggccatttaatatggtttcgccctacccggtacgcaatgaacaatttg

SEQ ID NO: 706929 - DNA, 75 bp, synthetic construct
  source 1..75: mol_type = other DNA
ccgctgggaagagattgcctgtcgggcgcaaagtgacaaaacgcgagtgtgcctgctgcgtaccggcgtagtgct

SEQ ID NO: 706930 - DNA, 75 bp, synthetic construct
  source 1..75: mol_type = other DNA
acattgttatctgccgccaccctgacggggaagggttacgcactgactcgatgctcacgagcgacatgacgaacg

SEQ ID NO: 706931 - DNA, 75 bp, synthetic construct
  source 1..75: mol_type = other DNA
tagatgagctggtggactgtgtggcagagctggaaaccagagtcggaaagtttgaaaaactggtgcaggaggcgc

SEQ ID NO: 706932 - DNA, 75 bp, synthetic construct
  source 1..75: mol_type = other DNA
actgagcatgcatttcttgatgtcgaaaaaatgacgccgattaattctggctttccgccaggctggttacgaagt

SEQ ID NO: 706933 - DNA, 75 bp, synthetic construct
  source 1..75: mol_type = other DNA
atcaacttattgatgccgttagcctgcgcgatctatcacccgaacaacctatccaattaacccagttgcgccagg

SEQ ID NO: 706934 - DNA, 75 bp, synthetic construct
  source 1..75: mol_type = other DNA
atgtgtttttgtttttgttttttttgtttggggaaggcattgtaaacacaaatgccacatcaaataatgatattt

SEQ ID NO: 706935 - DNA, 75 bp, synthetic construct
  source 1..75: mol_type = other DNA
atcttcaagccaatctgattggctggcgggtacttgcttctgatgaatcttcggaactaaacgcgatcacaatta

SEQ ID NO: 706936 - DNA, 75 bp, synthetic construct
  source 1..75: mol_type = other DNA
gaattatgagaaacggcacaccaagcaggggatacaaaccaatctgtcgctgaaagaggaaagctacggcgactg

SEQ ID NO: 706937 - DNA, 75 bp, synthetic construct
  source 1..75: mol_type = other DNA
gattgccccggaggaacgtgacccgcagctccgggataaaattgcgcgtgagctggccgtgattgtgcgccagct

SEQ ID NO: 706938 - DNA, 75 bp, synthetic construct
  source 1..75: mol_type = other DNA
atgaaaatgaacgtaacggacaccgtcaaacaggcgtgcggccactggccgcgcattctcccggcgctgggtgta

SEQ ID NO: 706939 - DNA, 75 bp, synthetic construct
  source 1..75: mol_type = other DNA
agctggcagtgattgttcgccagcttatgcagcgtttcagtgacccaatgagtgccaggacattacttcagtcgc

SEQ ID NO: 706940 - DNA, 75 bp, synthetic construct
  source 1..75: mol_type = other DNA
gccttgccgggaattaaccgctatgcataaagtcggtggtgtggcatttcgcgcgggagatcttgtcgttccatt

SEQ ID NO: 706941 - DNA, 75 bp, synthetic construct
  source 1..75: mol_type = other DNA
gcgcacctttttcatccgggaaaattgcctctctcgtggaaaccctcaaactgatagttccgcaacagcagaatc

SEQ ID NO: 706942 - DNA, 75 bp, synthetic construct
  source 1..75: mol_type = other DNA
ttaccgcagcaaccttgccgtggacgccagcggggaaatcctctgccgctatgaggcgggtgcctggaaagtgat

SEQ ID NO: 706943 - DNA, 75 bp, synthetic construct
  source 1..75: mol_type = other DNA
cacgtgaacgtgctgcgttgattggcttctcactgatacgcctgcctgaccaggagaaatggagcggtgacgggg

SEQ ID NO: 706944 - DNA, 75 bp, synthetic construct
  source 1..75: mol_type = other DNA
ctgattattccgcagcaggacgcaccagcgcgccgtctgattggttttcgtaacggcgtacttgataccgccacc

SEQ ID NO: 706945 - DNA, 75 bp, synthetic construct
  source 1..75: mol_type = other DNA
cggatttctggcgctggctcgaccgtgccgccggtggccgaccggaaaaacgcgacgtgatacttgccgccctgt

SEQ ID NO: 706946 - DNA, 75 bp, synthetic construct
  source 1..75: mol_type = other DNA
gcgcattcttccggcgctgggtgtgaaggtgattaaaaaccgccatcaggcctgtccggtgtgtggcggctctga

SEQ ID NO: 706947 - DNA, 75 bp, synthetic construct
  source 1..75: mol_type = other DNA
gtggacttctgcggctatctgtttgccaccgctgagccaaccggcctgcacatgggcaacgccagtatccgtccg

SEQ ID NO: 706948 - DNA, 75 bp, synthetic construct
  source 1..75: mol_type = other DNA
gaaggtactgccaaagcagccaaacggctctggatagcggaaggatatgccaccgcactcactatcaaccatctg

SEQ ID NO: 706949 - DNA, 75 bp, synthetic construct
  source 1..75: mol_type = other DNA
tgtggaactggacgctatcgcgtcggtggtgattggcggcacgttgttaagtggtggggtagggacggtattggg

SEQ ID NO: 706950 - DNA, 75 bp, synthetic construct
  source 1..75: mol_type = other DNA
accatatggtcgttgccgacaaagaacgaacggcgctggtgcagggtttccgggataatatccagaatacgctct

SEQ ID NO: 706951 - DNA, 75 bp, synthetic construct
  source 1..75: mol_type = other DNA
attgtcttctcgatttatacccaggccggatatgcgctggcgggcgtaggtgtggaactggacgctatcgcctca

SEQ ID NO: 706952 - DNA, 75 bp, synthetic construct
  source 1..75: mol_type = other DNA
aggagttaacagattatgagtatgattgcatcatatggtggttgcaatacatgggttttaagttgcaattaatgg

SEQ ID NO: 706953 - DNA, 75 bp, synthetic construct
  source 1..75: mol_type = other DNA
gaaagttatggattgtattattgctgaccataatgctgatatatgtgtgttatgcgggagttctgacgatattac

SEQ ID NO: 706954 - DNA, 75 bp, synthetic construct
  source 1..75: mol_type = other DNA
tttcggaagagtcgatcccgataaaccatcccatttatgacacgctctcaagccttgcgtggaaaatccctggcg

SEQ ID NO: 706955 - DNA, 75 bp, synthetic construct
  source 1..75: mol_type = other DNA
ggccctggcggaagtggaaagagtattcttgctgaaatagcaaccatgctggcgggtgaagataacgcgacctcg

SEQ ID NO: 706956 - DNA, 75 bp, synthetic construct
  source 1..75: mol_type = other DNA
ttatggtgctggctaaccgttatgactggcagctgtttctggaggtcactggccctggcggaagtggaaagagta

SEQ ID NO: 706957 - DNA, 75 bp, synthetic construct
  source 1..75: mol_type = other DNA
cagggaatgcagaccaatctggcactcagagaggaaagcaatgctgactggctacctaagtgcgatagcccggta

SEQ ID NO: 706958 - DNA, 75 bp, synthetic construct
  source 1..75: mol_type = other DNA
tccgttgacccgaaataccgggatgcgtactccacgcacatcccggcggtaattctggccgtgaacaataacccg

SEQ ID NO: 706959 - DNA, 75 bp, synthetic construct
  source 1..75: mol_type = other DNA
gcgcgggagatcttatcgttccattgtatgcagatggagagctggtaaatctgcagttaatcaacgctgatgggg

SEQ ID NO: 706960 - DNA, 75 bp, synthetic construct
  source 1..75: mol_type = other DNA
agggcctgcaattgcacaatggtactcccgcctgtgtttggtgactggaacgatgccttcactcagaatggcgaa

SEQ ID NO: 706961 - DNA, 75 bp, synthetic construct
  source 1..75: mol_type = other DNA
cgcgcaatcgtgcctccctgattggcttctcgcttattcgtctgcctgaccaggaaaaatggagcggtgacggcg

SEQ ID NO: 706962 - DNA, 75 bp, synthetic construct
  source 1..75: mol_type = other DNA
atgtatggcgggttagcgttcgcacaggaaaagatcaatagcccgctggcgatcattacccttgcgcccggtgtt

SEQ ID NO: 706963 - DNA, 75 bp, synthetic construct
  source 1..75: mol_type = other DNA
tctttagcgataatcctgaacgttatgctgaactgtttggcggcgctcagcaatggggccaacaggtgtatgcca

SEQ ID NO: 706964 - DNA, 75 bp, synthetic construct
  source 1..75: mol_type = other DNA
acggttccgacagcgatgcgcgggtgattcaacgcgcacgcactaacgcccgcctcgccggtattggcgaactga

SEQ ID NO: 706965 - DNA, 75 bp, synthetic construct
  source 1..75: mol_type = other DNA
ttcagctgtccaccgcgcaacgccagggccgctataaaacaacgcttcaccgcggcgtaatggcgccgaagcggc

SEQ ID NO: 706966 - DNA, 75 bp, synthetic construct
  source 1..75: mol_type = other DNA
ctcatcagtgcccgacagaaacggtaccttatgttgctccgcgtcatgaaattctctgtcgcgaacgccgtgcga

SEQ ID NO: 706967 - DNA, 75 bp, synthetic construct
  source 1..75: mol_type = other DNA
attgtcgccatcaataaagataaaaacgcgccaatcttcaactatgccgactacggtctggtgggcgatatctac

SEQ ID NO: 706968 - DNA, 75 bp, synthetic construct
  source 1..75: mol_type = other DNA
accgcaaagcggcggccgggttggccgttaagctcatggagaaaacccgcacggccagcggcaacgcctacctca

SEQ ID NO: 706969 - DNA, 75 bp, synthetic construct
  source 1..75: mol_type = other DNA
tgctgccgcagaccaacgggatgtttatgggaaatgccagcatcatcccgcgtaattatcgtaaatatctctatc

SEQ ID NO: 706970 - DNA, 75 bp, synthetic construct
  source 1..75: mol_type = other DNA
tatgcagaaattcagcgacccgatgaccgcgcgcgcactgctccagtcgcagcagaactccgacgaggcactcag

SEQ ID NO: 706971 - DNA, 75 bp, synthetic construct
  source 1..75: mol_type = other DNA
ctggcagctctttctcgaagtcaccggtccgggtgggagtggcaaaagtattctggctgaaatcgcgaccctgct

SEQ ID NO: 706972 - DNA, 75 bp, synthetic construct
  source 1..75: mol_type = other DNA
gcgaacggccagctcctgtcccgctatgaggccgggatatggaaaatcattccgccgtcagattttgcccgcgat

SEQ ID NO: 706973 - DNA, 75 bp, synthetic construct
  source 1..75: mol_type = other DNA
aaaaccggcggcgtgacgttccgcgccggtgatatggttgtcccgctgtatgacgatgccggggcactggttaac

SEQ ID NO: 706974 - DNA, 75 bp, synthetic construct
  source 1..75: mol_type = other DNA
ggccctggcggaagtggcaaaagtatccttgctgaaattgcaacgatgcttgcaggagaggataacgccacctca

SEQ ID NO: 706975 - DNA, 75 bp, synthetic construct
  source 1..75: mol_type = other DNA
cagctgtttcttgaggtaacggggccgggcggaagtggtaaaagtgttatggctgagatctgcacgatgctggcg

SEQ ID NO: 706976 - DNA, 75 bp, synthetic construct
  source 1..75: mol_type = other DNA
aaaaagcgcagagggtagtggatcactataaaaattcactggcagtagacccgaacgggcagctcctttcacgct

SEQ ID NO: 706977 - DNA, 75 bp, synthetic construct
  source 1..75: mol_type = other DNA
caggaaaaatggagcggtgacggcgcaggacttaaggccatcaccggcggcgatgcggtctcagttgacccgaaa

SEQ ID NO: 706978 - DNA, 75 bp, synthetic construct
  source 1..75: mol_type = other DNA
gccggttgccccggaagtgattgcggtcgcagaggctgaaacggaggccgaccgcaaagcggcggccgcgctggc

SEQ ID NO: 706979 - DNA, 75 bp, synthetic construct
  source 1..75: mol_type = other DNA
aaattatgagaagcggcgaactaatcagggaatgcagactaacctcactttaaaagaggaaagtaatgcagactg

SEQ ID NO: 706980 - DNA, 75 bp, synthetic construct
  source 1..75: mol_type = other DNA
actgttatctttgcactatgcgtatgaagtggcacactgaatttggccacctgaacagaggtgatatgctcacct

SEQ ID NO: 706981 - DNA, 75 bp, synthetic construct
  source 1..75: mol_type = other DNA
atgaacgatatcatcagtataattattcttctggcagtctatctcatcggcctgatattcattgtcctgattttc

SEQ ID NO: 706982 - DNA, 75 bp, synthetic construct
  source 1..75: mol_type = other DNA
ctcctggcatgaacgacatcatcagtataatcattctcctgacagtctatctcatcggcctgatattcattatcc

SEQ ID NO: 706983 - DNA, 75 bp, synthetic construct
  source 1..75: mol_type = other DNA
aaacaattcactgaacaagccctgagtaatattgccaggagcttaggtgttgatattgcagatctctttacctca

SEQ ID NO: 706984 - DNA, 75 bp, synthetic construct
  source 1..75: mol_type = other DNA
tgtgggaacttaaaaaggctggcttcgttgataaaagcgtatacacctggcgtgtggctgataacaacgttcagc

SEQ ID NO: 706985 - DNA, 75 bp, synthetic construct
  source 1..75: mol_type = other DNA
agtcgctttatatctggttgaatacacaactgaccgctgaaccttatgcgtttggcgagcagctaacgttggtgg

SEQ ID NO: 706986 - DNA, 75 bp, synthetic construct
  source 1..75: mol_type = other DNA
caacaaagctccagggcgaagtcacaatttccggcgctaaaaatgctgctctgccaatccttttcgctgcgttgc

SEQ ID NO: 706987 - DNA, 75 bp, synthetic construct
  source 1..75: mol_type = other DNA
accgttatttgtcacggtgtcgaaaaactttccggcgcacaggtcatggcgaccgatctgcgtgcatcagcaagt

SEQ ID NO: 706988 - DNA, 75 bp, synthetic construct
  source 1..75: mol_type = other DNA
ggcaatctctcgcggcaaaattatctgccgtaacgcccagccagatactctggacgccgtgctggcgaaactgcg

SEQ ID NO: 706989 - DNA, 75 bp, synthetic construct
  source 1..75: mol_type = other DNA
gcgatcctgagttggttttatgaggttcgtggtaaattgcaggaggccgggcaagcattagcacccgtagaaggc

SEQ ID NO: 706990 - DNA, 75 bp, synthetic construct
  source 1..75: mol_type = other DNA
gatgttaatgtcttttgcgcgccatatgaactggtcaaaaccatgcgagcttctatttgggcgctggggccgctg

SEQ ID NO: 706991 - DNA, 75 bp, synthetic construct
  source 1..75: mol_type = other DNA
ggaaatggccttatccagggcggtgatgtcattgatgtgattcatgccattgaatacagaactgataatgctgta

SEQ ID NO: 706992 - DNA, 75 bp, synthetic construct
  source 1..75: mol_type = other DNA
cgcattgaatggaaggccttctgaaggtgtgccatggatgcttgctgctaattctgtttgcgcaatgaaacttta

SEQ ID NO: 706993 - DNA, 75 bp, synthetic construct
  source 1..75: mol_type = other DNA
gacggatgtactgaagagactgccgttatggcccgaagatcgtcttgaggaactgctgccactgccggggttcac

SEQ ID NO: 706994 - DNA, 75 bp, synthetic construct
  source 1..75: mol_type = other DNA
aagcctcaaccaaagtcgctcaaaacgccttgatccctatgcggaagtcaatgcgtgaggacgggatggatgctg

SEQ ID NO: 706995 - DNA, 75 bp, synthetic construct
  source 1..75: mol_type = other DNA
atgaatattgaattttatgaacacaatggtaccgcagttatcactatttcctgctggttctgggagttccgtcac

SEQ ID NO: 706996 - DNA, 75 bp, synthetic construct
  source 1..75: mol_type = other DNA
cgatacacatttaagtgattctggctcattaaaagttttagagttattgcttaaatctgttggtatcaatgcaac

SEQ ID NO: 706997 - DNA, 75 bp, synthetic construct
  source 1..75: mol_type = other DNA
atggaattgaatacaaagcaattgcagtattctatcagcctgttagcacaacagtggcttgacgatgatcgccta

SEQ ID NO: 706998 - DNA, 75 bp, synthetic construct
  source 1..75: mol_type = other DNA
atccgctaacttgtgcgactggtatgcggagcatgggccggtcatgctgaagaccgaacctacgcaggtggagaa

SEQ ID NO: 706999 - DNA, 75 bp, synthetic construct
  source 1..75: mol_type = other DNA
gacgttatcagaataccggacaggtttgtgcagcggcaaaacgctttattatcgaagagggaattgcttctgcat

SEQ ID NO: 707000 - DNA, 75 bp, synthetic construct
  source 1..75: mol_type = other DNA
gaaaatgaacaccggtttatggtctttggaaaggtcttaatcagccagtcacaaacccttaagcgacacaattaa

SEQ ID NO: 707001 - DNA, 75 bp, synthetic construct
  source 1..75: mol_type = other DNA
ccggctaattcaggaagaccacggcggtgcccctggcatcgaaaagatcgagaaagctattcgtgccggtaaggc

SEQ ID NO: 707002 - DNA, 75 bp, synthetic construct
  source 1..75: mol_type = other DNA
atgaccatcactccggcgacccatgccatttcgataaatccagccaatggtgaacaactttcttcactgccctgg

SEQ ID NO: 707003 - DNA, 75 bp, synthetic construct
  source 1..75: mol_type = other DNA
attcttgcaggtaacggttacttacttaaacatgcgccgaatgtgatgggctgtgctcagctcattgcccaggtg

SEQ ID NO: 707004 - DNA, 75 bp, synthetic construct
  source 1..75: mol_type = other DNA
ctgggcgcgaaaattagcggtcagggcaccgatcgtatcgtcatcgaaggtgtggaacgtttaggcggcggtgtc

SEQ ID NO: 707005 - DNA, 75 bp, synthetic construct
  source 1..75: mol_type = other DNA
tctgctgccgcaaaaagcgtttggtctgctgatggcgctggtggtagcaacgctgctgttgaactggattatgat

SEQ ID NO: 707006 - DNA, 75 bp, synthetic construct
  source 1..75: mol_type = other DNA
cagtatcgacaacctctggcgctacggtggtttctttgccaccggctggaatgggctgattttgtcgctggcggt

SEQ ID NO: 707007 - DNA, 75 bp, synthetic construct
  source 1..75: mol_type = other DNA
tttctggtcacggcggcgagaaagccagtatcgacaacctctggcgctacggtggtttctttgccaccggctgga

SEQ ID NO: 707008 - DNA, 75 bp, synthetic construct
  source 1..75: mol_type = other DNA
aaactgagttctggttcgcgctgattaaagtgctggcgatcatcggcatgatcggttttggcctgtggctgctgt

SEQ ID NO: 707009 - DNA, 75 bp, synthetic construct
  source 1..75: mol_type = other DNA
agtgctggcgatcatcggtatgatcggctttggcctgtggctgctgttttctggtcacggcggcgagaaagccag

SEQ ID NO: 707010 - DNA, 75 bp, synthetic construct
  source 1..75: mol_type = other DNA
tttgcgctgattaaagtgctggcgatcatcggtatgatcggctttggcctgtggctgctgttttctggtcacggc

SEQ ID NO: 707011 - DNA, 75 bp, synthetic construct
  source 1..75: mol_type = other DNA
acctatcttttcattttgtttatactatacaaggggggggggggtactattgctctatatattatctttgggtat

SEQ ID NO: 707012 - DNA, 75 bp, synthetic construct
  source 1..75: mol_type = other DNA
ttcaccgcaccaactgctgaggaagcgcaaacggtgttagcgggatatatcgactatatttccgctattgtggtg

SEQ ID NO: 707013 - DNA, 75 bp, synthetic construct
  source 1..75: mol_type = other DNA
cgtcagtatctagtcgagcaattaacaaaaacaaatgtcaacgatgtgaattttacgccgtttaaatatcagttg

SEQ ID NO: 707014 - DNA, 75 bp, synthetic construct
  source 1..75: mol_type = other DNA
gccttcaatggcattgatccgaacgatcccgatcgcggcgcggtcagcgagtacgaggcgctgcacgaaattttt

SEQ ID NO: 707015 - DNA, 75 bp, synthetic construct
  source 1..75: mol_type = other DNA
ggcaaaaaagatggctgaacagcttgaagacgcaagaaaactggtcgctcagctcactgaatgcctgaaacatcg

SEQ ID NO: 707016 - DNA, 75 bp, synthetic construct
  source 1..75: mol_type = other DNA
gagaagattgcagatgttttgggatatccagagtattatttttatacagtgaatgatgtcactgcaaaaatattg

SEQ ID NO: 707017 - DNA, 75 bp, synthetic construct
  source 1..75: mol_type = other DNA
gatcatgttctccttcggcggtctggagctgattgggattactgccgctgaagcgcgcgatccggaaaaaagcat

SEQ ID NO: 707018 - DNA, 75 bp, synthetic construct
  source 1..75: mol_type = other DNA
tctctgcaccatgcgcacatggggaccgggacacgaatggtttcaggataatgccccgggtaatgactccaactt

SEQ ID NO: 707019 - DNA, 75 bp, synthetic construct
  source 1..75: mol_type = other DNA
caggataatgccccgaacatcaatgcgattgctgatgctgtatgtcagataccaaagctaaaagggatactaaag

SEQ ID NO: 707020 - DNA, 75 bp, synthetic construct
  source 1..75: mol_type = other DNA
tttggagagcaactaacgctggtggactgttatctctgcaccatgcgcacatggggaccgggacacgaatggttt

SEQ ID NO: 707021 - DNA, 75 bp, synthetic construct
  source 1..75: mol_type = other DNA
gtagcgcgctttggtcaggggcaagtttcactgcctggcggttgtacgatcggtgcgcgtccggttgatctacac

SEQ ID NO: 707022 - DNA, 75 bp, synthetic construct
  source 1..75: mol_type = other DNA
cagagccgaaatatcgtgcgtcagacatgacagcgaagcacacaaaaaaccacaattctgtggtgaagttcgtat

SEQ ID NO: 707023 - DNA, 75 bp, synthetic construct
  source 1..75: mol_type = other DNA
aaccttggtggactgctatctctgcaccatgcgcatatggggaccgggacataaatggtttcaggataatgcgcg

SEQ ID NO: 707024 - DNA, 75 bp, synthetic construct
  source 1..75: mol_type = other DNA
cggaacctgctggtatgagctgacagggctgtggcacctgttgtccgcacagggacacaacgtttaccgtgtacc

SEQ ID NO: 707025 - DNA, 75 bp, synthetic construct
  source 1..75: mol_type = other DNA
tattgtggcgctgagtgcagagcctgttacgggctgggggcgtcatctgtcctggatacgtgaactgagggcaga

SEQ ID NO: 707026 - DNA, 75 bp, synthetic construct
  source 1..75: mol_type = other DNA
tgaaaatgtgggggtgagagatttcagaatgctgttaatgaccgggctggacagggaagtcaataaaatggagga

SEQ ID NO: 707027 - DNA, 75 bp, synthetic construct
  source 1..75: mol_type = other DNA
aggctcgatcaatatgatcagcaaacagccgcgcaatgattccggcattgacgcctccgccagtattggcagcgc

SEQ ID NO: 707028 - DNA, 75 bp, synthetic construct
  source 1..75: mol_type = other DNA
gctggaaatgctgaaggtgttgcgaaatatctgcccggtgtacagcggatgcatgtcgctgtcgtgcctggaaag

SEQ ID NO: 707029 - DNA, 75 bp, synthetic construct
  source 1..75: mol_type = other DNA
cagacaatgtgggcgtaagggatttcaggatgttactgatgaccgggctggacagagaggttcatgaaatggaag

SEQ ID NO: 707030 - DNA, 75 bp, synthetic construct
  source 1..75: mol_type = other DNA
gttgccgcacaccaagggtgagtgggcattcaagaggatgcccatcacgctggagccgtggcagctctttgtgat

SEQ ID NO: 707031 - DNA, 75 bp, synthetic construct
  source 1..75: mol_type = other DNA
gaaaacaaaatcgatggtgcggttgcactgattatggcgatcggtcgggcaatgctcaaagaacccgacgatttc

SEQ ID NO: 707032 - DNA, 75 bp, synthetic construct
  source 1..75: mol_type = other DNA
atgagccggaaatcttaccccaacgtaaatgcagccaatcagtatgcccgtgatgtcgtgcgcggaaagattgtg

SEQ ID NO: 707033 - DNA, 75 bp, synthetic construct
  source 1..75: mol_type = other DNA
agcgaaccccaatatggggatttctgtctacagtgattacctgttatctcaacagcgcgcggcaattaacaaccc

SEQ ID NO: 707034 - DNA, 75 bp, synthetic construct
  source 1..75: mol_type = other DNA
ctgctgcgcgtttggctgggtcaataaaggctcccggctgcgccgcttccgggaggtgtataccgaaatcccccg

SEQ ID NO: 707035 - DNA, 75 bp, synthetic construct
  source 1..75: mol_type = other DNA
tggttatatcggtaaaaaacttcaaaaggctgagggtattgttgacgggatgttaatggcacttaatgtttcact

SEQ ID NO: 707036 - DNA, 75 bp, synthetic construct
  source 1..75: mol_type = other DNA
agccactgatgtgggccattactactgccgggtacaacattgaggggccgtgctacgacaagcgacgggaagtta

SEQ ID NO: 707037 - DNA, 75 bp, synthetic construct
  source 1..75: mol_type = other DNA
gatatcatgccttaaggcttcatcaaattgtcaggggaacgaatcccggtgttacgactgtttatgcttttgcga

SEQ ID NO: 707038 - DNA, 75 bp, synthetic construct
  source 1..75: mol_type = other DNA
tggttatatcgggaaaaggttacagaaggctgagggggttgttgaaggcatgttgatgatgctggatgtgaagct

SEQ ID NO: 707039 - DNA, 75 bp, synthetic construct
  source 1..75: mol_type = other DNA
ggcataattgaagggatgttaatggcattagatatccggttagagatggatatcgttgttaataactctaattaa

SEQ ID NO: 707040 - DNA, 75 bp, synthetic construct
  source 1..75: mol_type = other DNA
cctcgaggaggccaaagcggcgaacaaaatcagcccggtcagtgagtcacccatcgaccccttcggggcgaccgg

SEQ ID NO: 707041 - DNA, 75 bp, synthetic construct
  source 1..75: mol_type = other DNA
actacaccaatatgtcggatcccatgaaggaacttgaggcggctatcgaggccgggcgttttcatcatgatggta

SEQ ID NO: 707042 - DNA, 75 bp, synthetic construct
  source 1..75: mol_type = other DNA
cctggcgcgtaaactggatatgaacagcatggcgcgactttatacccgcgagattgacggtaaaacgcattacta

SEQ ID NO: 707043 - DNA, 75 bp, synthetic construct
  source 1..75: mol_type = other DNA
ggcaaaaggtgatgccgcgaaaaaagcggctaaccgttttgcggtgccaccgccaccccgactggtggtgaataa

SEQ ID NO: 707044 - DNA, 75 bp, synthetic construct
  source 1..75: mol_type = other DNA
aaacaacaccccggaaacaatccgcagatgaccggcaaaggtcatgtctcctggtattgaatatatggaggatgg

SEQ ID NO: 707045 - DNA, 75 bp, synthetic construct
  source 1..75: mol_type = other DNA
ttaactcacgtaattaaatccgttaaagatcaacaaaacacttttatttttaccgagtttaacccagcaaaaacg

SEQ ID NO: 707046 - DNA, 75 bp, synthetic construct
  source 1..75: mol_type = other DNA
aaaccccgtcgccgtgaggcggctgcaataccacagccggacgaaacaaatccggagatgccaccgcccgtggtg

SEQ ID NO: 707047 - DNA, 75 bp, synthetic construct
  source 1..75: mol_type = other DNA
gtcggcggcatgacttttatggcgcttgcacgtaagcatgggcgatctgattgttgggttggcaggatgctccag

SEQ ID NO: 707048 - DNA, 75 bp, synthetic construct
  source 1..75: mol_type = other DNA
attcagcaggtttccgttaatagccgtccctttttaatcagtgccgccctgatgctcgtaatggcgattatcccc

SEQ ID NO: 707049 - DNA, 75 bp, synthetic construct
  source 1..75: mol_type = other DNA
ctcgtgtgcccggtgaaagcgaaaaagaagaaaaccttgcaggtgatattgttcaacaggtttctgttaatagtc

SEQ ID NO: 707050 - DNA, 75 bp, synthetic construct
  source 1..75: mol_type = other DNA
ccgggtaacgatgatgtggtgaagcccgtcaaagagcaggcggaaaacaaaattgacggtgcagttgcgctgatt

SEQ ID NO: 707051 - DNA, 75 bp, synthetic construct
  source 1..75: mol_type = other DNA
gtgatgcggcaaaaaaagcggctaaccgttttgcggtgccaccgcctccccgactggtggtgaataaccagaatg

SEQ ID NO: 707052 - DNA, 75 bp, synthetic construct
  source 1..75: mol_type = other DNA
tacaaatggtaaaaaaactcccggcattgcgacaaaaatactcagtcaaaccctgggcgaagaaaatgacccgtc

SEQ ID NO: 707053 - DNA, 75 bp, synthetic construct
  source 1..75: mol_type = other DNA
gtaatatttatagtgcagatattacacagcaaatggaggttatgcgttggcatttctttgaggaaagtggtattc

SEQ ID NO: 707054 - DNA, 75 bp, synthetic construct
  source 1..75: mol_type = other DNA
tactatcataaatagtaccaagacgctcgctggcgtggtgaaagcggttaaagacaagcaggacgaatttgtctt

SEQ ID NO: 707055 - DNA, 75 bp, synthetic construct
  source 1..75: mol_type = other DNA
gttattgggaaaaggatgtgaatatcccaaacggggaatcactggttaagctggctaaattcttcaatacatcaa

SEQ ID NO: 707056 - DNA, 75 bp, synthetic construct
  source 1..75: mol_type = other DNA
cggtatcccaacatcccgatcaatggtaattgcctgatcattggtgtagtcaaaggagttcaatacgaactctag

SEQ ID NO: 707057 - DNA, 75 bp, synthetic construct
  source 1..75: mol_type = other DNA
tgaaggtcagaatattgaccaacccgatctccttttaaccgccagagttctgaaacggatagctttattatgtcg

SEQ ID NO: 707058 - DNA, 75 bp, synthetic construct
  source 1..75: mol_type = other DNA
gggcagtctggcgtttgtcgaacgggccgagaacgtggtgctgatcggaccctctggcatcggcaagacccacct

SEQ ID NO: 707059 - DNA, 75 bp, synthetic construct
  source 1..75: mol_type = other DNA
cccataatgatcggcgcattctctttctttattggtggtctgacctataaaattacgattgcggtcataaaaaat

SEQ ID NO: 707060 - DNA, 75 bp, synthetic construct
  source 1..75: mol_type = other DNA
atggtaccgcagttatcactatctcctgctggttctgggaatttcgccgttactggcggggtgtggatgcggctt

SEQ ID NO: 707061 - DNA, 75 bp, synthetic construct
  source 1..75: mol_type = other DNA
gagtcaccgcaaaaatcattgttacatgctggttctgggagttccgccgctattgccgggttgtggatgcggcgc

SEQ ID NO: 707062 - DNA, 75 bp, synthetic construct
  source 1..75: mol_type = other DNA
tcagagcggtggcggtcttttaatgagaaccgtcatctacggtaagacggtcccgatgttacgggcgtttaaagt

SEQ ID NO: 707063 - DNA, 75 bp, synthetic construct
  source 1..75: mol_type = other DNA
agcctcgttgtttcctggcaaggtaaggccgcatggatcgttaccgacgataacgcggctgaacagggctgccgt

SEQ ID NO: 707064 - DNA, 75 bp, synthetic construct
  source 1..75: mol_type = other DNA
ccgccagcagcgaggcgcaggcgtataaagcgcgcagcccggtgtttgcggcggtgtatcaccacagcttgctgg

SEQ ID NO: 707065 - DNA, 75 bp, synthetic construct
  source 1..75: mol_type = other DNA
agtaacctggcgaacgccgaggcgcctgccggtagcgaggcgcaggcgtataaagcgcgcagcccggtgtttgcg

SEQ ID NO: 707066 - DNA, 75 bp, synthetic construct
  source 1..75: mol_type = other DNA
cggctgctgcaccatgcccatatcctgaccctgagcggcgaaagctaccgcttgaaggacaagaggaaggcggga

SEQ ID NO: 707067 - DNA, 75 bp, synthetic construct
  source 1..75: mol_type = other DNA
aggcctttcctcagccagcaggtgttgcgttaccagtccgggaagccgcaacacaggacgaaattaaaactgaaa

SEQ ID NO: 707068 - DNA, 75 bp, synthetic construct
  source 1..75: mol_type = other DNA
ctgaagttgtccatcaatatggccaatatccagttcgacactgttcaaccagttgaaacccggcagcggaaaaac

SEQ ID NO: 707069 - DNA, 75 bp, synthetic construct
  source 1..75: mol_type = other DNA
atgaacctaaagaaaacactgttaagcgtgttaatgatattgcaactttgcttattggtagggtgtgactatatt

SEQ ID NO: 707070 - DNA, 75 bp, synthetic construct
  source 1..75: mol_type = other DNA
ttgccaaacagcaagaattgcaaaaaagtaaaatagagattcttgaaaaagaacaagaacaatataaaagaaaaa

SEQ ID NO: 707071 - DNA, 75 bp, synthetic construct
  source 1..75: mol_type = other DNA
ggcagcgttattcgtatttcgctggttaatttattaagcgttcccgtatcaaatattggctttcatgcgacatga

SEQ ID NO: 707072 - DNA, 75 bp, synthetic construct
  source 1..75: mol_type = other DNA
attaaatgaatggatatctaatagagtccaggaattaggtgacagatattatcctgtaaataagcacgttaaaat

SEQ ID NO: 707073 - DNA, 75 bp, synthetic construct
  source 1..75: mol_type = other DNA
tttgattacctgctgagagaagactcgttaacgggagttcgggaagggaagtttgcagacagggggattgcatga

SEQ ID NO: 707074 - DNA, 75 bp, synthetic construct
  source 1..75: mol_type = other DNA
tggtaaagcctttcctcagccagccggtgttgcgttaccagtacaggaagcggcaacacaggaagatattaaaac

SEQ ID NO: 707075 - DNA, 75 bp, synthetic construct
  source 1..75: mol_type = other DNA
aatgaaaaacccaccgatgccaaagcactggcgaaatggcaacaattgcttttcaacaccaccctgaattccact

SEQ ID NO: 707076 - DNA, 75 bp, synthetic construct
  source 1..75: mol_type = other DNA
gaaaaagcgagtaaggtcgacgatctcgttacacagcaagagttgcaaaaaagcaaaattgaggcgcttgaaaaa

SEQ ID NO: 707077 - DNA, 75 bp, synthetic construct
  source 1..75: mol_type = other DNA
attaaatcaatggatatctaatagagtgcaggaattaggtgacagatattatcctgtaaataagcacgttaaaat

SEQ ID NO: 707078 - DNA, 75 bp, synthetic construct
  source 1..75: mol_type = other DNA
atgagacgggtgtttgtggataaaaagttttccattttgagaaaaagagtaaagcattctcaaaagaaagttatg

SEQ ID NO: 707079 - DNA, 75 bp, synthetic construct
  source 1..75: mol_type = other DNA
tgaagcagatacgcaggcggcgatcctgctggggattgacgatccgcacatccatgatctggccgccgatctcgc

SEQ ID NO: 707080 - DNA, 75 bp, synthetic construct
  source 1..75: mol_type = other DNA
atggttatatgtgggtgtatggcccgccttaaccggaacaacaacgatctacatgacttgctggttgactactac

SEQ ID NO: 707081 - DNA, 75 bp, synthetic construct
  source 1..75: mol_type = other DNA
gcacacgatctcgaacagggtattgccttttccaatgccttattcccctggtcagaggtttttccgccactctat

SEQ ID NO: 707082 - DNA, 75 bp, synthetic construct
  source 1..75: mol_type = other DNA
gatgcactgatttgtcgccacgcccgtaacctgctgctggcgcagggctggccggaagagacggatgttgaccag

SEQ ID NO: 707083 - DNA, 75 bp, synthetic construct
  source 1..75: mol_type = other DNA
cgctggtttgacagggatattctgcgggaggttgtcctggaggcacgggatgaaatccgcagcatggcggatgcc

SEQ ID NO: 707084 - DNA, 75 bp, synthetic construct
  source 1..75: mol_type = other DNA
atgctggaactggctgaacgcctgaaaaatacgcctaccgagtatggtattcgatttgtggcgaccagcggcgaa

SEQ ID NO: 707085 - DNA, 75 bp, synthetic construct
  source 1..75: mol_type = other DNA
tttcagccaatgcacaagcaactctcctgctaaccagcgatttttctcgcgcggcggcgagtgagtataaacctc

SEQ ID NO: 707086 - DNA, 75 bp, synthetic construct
  source 1..75: mol_type = other DNA
agtgtgtggctgaaccgcgcagaagaagagggaagggttatccgattgggcgaaggtcattatcagttcaggtaa

SEQ ID NO: 707087 - DNA, 75 bp, synthetic construct
  source 1..75: mol_type = other DNA
atggttatttgtgggtgtatggccagactgaataagaataatcaggatttgcacgatttattggtggattattac

SEQ ID NO: 707088 - DNA, 75 bp, synthetic construct
  source 1..75: mol_type = other DNA
atggcaggcgttattgcaatcgctggcacacgatctcgaacagggtattgccttttccaatgccttattcccctg

SEQ ID NO: 707089 - DNA, 75 bp, synthetic construct
  source 1..75: mol_type = other DNA
cgaaaagaaaaatacgctgctggtgattaatctcgataacttaattgttggcgataagctgtatttcaacagtgg

SEQ ID NO: 707090 - DNA, 75 bp, synthetic construct
  source 1..75: mol_type = other DNA
tgatagtttgttaaaaacaagcacgttagtgaaatggcgtaaagggcttatagcaggcaacctggtgttgatttc

SEQ ID NO: 707091 - DNA, 75 bp, synthetic construct
  source 1..75: mol_type = other DNA
caggtgtttttcccgtatgccggagaatggctgaccgaagacgaaatcagggcagttcttgatgcagtgcgcgat

SEQ ID NO: 707092 - DNA, 75 bp, synthetic construct
  source 1..75: mol_type = other DNA
gttgccgggtggcagaagatacgctgcgtatccgggcggcgctgaccaccaccggtcagacgttactgacccgcc

SEQ ID NO: 707093 - DNA, 75 bp, synthetic construct
  source 1..75: mol_type = other DNA
gcgtataccggaagaaccgtcccgtcgctggtttgaccgtggtgttctgcgggaggtggtcctggaagcccggag

SEQ ID NO: 707094 - DNA, 75 bp, synthetic construct
  source 1..75: mol_type = other DNA
agacggcggcaacatggcgaccttcgccgccgacttcttcccgcccgatttcagccagtggcaggattacctcac

SEQ ID NO: 707095 - DNA, 75 bp, synthetic construct
  source 1..75: mol_type = other DNA
ggctgaccgaagacgaaatcagggcagttcttgatgcggtgcgcgatgcagtatgcagtgtcagttgccgggtgg

SEQ ID NO: 707096 - DNA, 75 bp, synthetic construct
  source 1..75: mol_type = other DNA
cgaggggcaactccgaacccgtagctgggaagataacggtatcacccgttacgtcactgaaattcttgttaagac

SEQ ID NO: 707097 - DNA, 75 bp, synthetic construct
  source 1..75: mol_type = other DNA
cgaagcatctgttaccaggtggcagaagatgcgcggcgtatccgggcggcgctgaccaccaccggtcagacgttg

SEQ ID NO: 707098 - DNA, 75 bp, synthetic construct
  source 1..75: mol_type = other DNA
catttatgttctgctggatgcgccccgactggcgacgttacttatcaaccgtcacggcggcgtacttccaccgct

SEQ ID NO: 707099 - DNA, 75 bp, synthetic construct
  source 1..75: mol_type = other DNA
gtcacggcggcgtactgccgccgctcctggcctccgccattcacaaactgaccggaaccggggcggaacttgtac

SEQ ID NO: 707100 - DNA, 75 bp, synthetic construct
  source 1..75: mol_type = other DNA
ccccggctggcgacgttgctcgtcaacctccacgattgcgtactgccgccggtcctggcttccgccattcacaaa

SEQ ID NO: 707101 - DNA, 75 bp, synthetic construct
  source 1..75: mol_type = other DNA
gccggtacttccggcagacggaacacaggtgtttttcccgtatgccggagaatggctgaccgaagacgaaatcag

SEQ ID NO: 707102 - DNA, 75 bp, synthetic construct
  source 1..75: mol_type = other DNA
tgtgcgactggatatatcccggctggcgacgttacttatcagccgccatgatggcgtgctgccgccggtcctggc

SEQ ID NO: 707103 - DNA, 75 bp, synthetic construct
  source 1..75: mol_type = other DNA
cgaaaatctgcccgtggtgctcgatgccattctgaaccgtggcgcacgtttttcctctgtggaaatgtacctggt

SEQ ID NO: 707104 - DNA, 75 bp, synthetic construct
  source 1..75: mol_type = other DNA
cctggagtcggtagcacgccaggaaggcgttaagcgcgtgacctgtagcgcccgcgaagacgcggtggagttttt

SEQ ID NO: 707105 - DNA, 75 bp, synthetic construct
  source 1..75: mol_type = other DNA
ctgcagccgtacctctgccgctggagcctgctaatacaaccgtttctcaaccaatgatcacgttgctgctgattg

SEQ ID NO: 707106 - DNA, 75 bp, synthetic construct
  source 1..75: mol_type = other DNA
gctgggcattttaaccctgtcgctgctgggcggtaatgcgccgctgtggtggggaattgcgctgctggtgctcgg

SEQ ID NO: 707107 - DNA, 75 bp, synthetic construct
  source 1..75: mol_type = other DNA
tctatggcgtaaccttcctcggcgcaccgcgtaccaaagaagctgaaaacgccacctgtgcgccgatcctgatga

SEQ ID NO: 707108 - DNA, 75 bp, synthetic construct
  source 1..75: mol_type = other DNA
ctcgatcagttgatgcgctacgtgcaggaacagcgcggtaagtcaggcattatctactgcaacagccgcgcgaaa

SEQ ID NO: 707109 - DNA, 75 bp, synthetic construct
  source 1..75: mol_type = other DNA
ttgtggtggcgacggtagcgttcggcatgggcatcaacaagcctaacgtccgcttcgtggttcactttgatattc

SEQ ID NO: 707110 - DNA, 75 bp, synthetic construct
  source 1..75: mol_type = other DNA
ctgggcggtaacgcaccgctgtggtgggggatcgcgctgctggtgctcggcatgatcaccgcgttcgtcggcggt

SEQ ID NO: 707111 - DNA, 75 bp, synthetic construct
  source 1..75: mol_type = other DNA
ttgcaaaaatccagggcgttccggcgtatgtcgtcaatggtaaatacctgatctacaccaagagtattaaatcta

SEQ ID NO: 707112 - DNA, 75 bp, synthetic construct
  source 1..75: mol_type = other DNA
agagcctgcggttcaggaaacgctggaaaaatggaaagcctcttatgaagttgcaaaaatctgtactgcacccat

SEQ ID NO: 707113 - DNA, 75 bp, synthetic construct
  source 1..75: mol_type = other DNA
gttttcagctatgcctgcccgttctgctacaaatatgacaaagcagttaccggcccggtatcggagaaagtgaag

SEQ ID NO: 707114 - DNA, 75 bp, synthetic construct
  source 1..75: mol_type = other DNA
gggggatcgcgctgctggtgctcggcatgatcaccgcgttcgtcggcggtctgtatgcgttgatggaacacaata

SEQ ID NO: 707115 - DNA, 75 bp, synthetic construct
  source 1..75: mol_type = other DNA
gcaccgctgtggtgggggatcgcgctgctggtgctcggcatgatcaccgcgttcgtcggtggtctgtatgcgttg

SEQ ID NO: 707116 - DNA, 75 bp, synthetic construct
  source 1..75: mol_type = other DNA
atgggcataagagaactaaacctcaccaaagaacagcacgagtggctgaatggctggcttgaactgtggggcgca

SEQ ID NO: 707117 - DNA, 75 bp, synthetic construct
  source 1..75: mol_type = other DNA
tacgatcgcaaactgttcgccaaattacgcaaactgcgtaaatcgattgccgatgaaagtaatgtcccgccgtat

SEQ ID NO: 707118 - DNA, 75 bp, synthetic construct
  source 1..75: mol_type = other DNA
ggcggctgtatattaatgccgataacgaagcgtccatccgttttatggccgttcatcccgacgtgcaggacaaag

SEQ ID NO: 707119 - DNA, 75 bp, synthetic construct
  source 1..75: mol_type = other DNA
gaacgccacctcggcggaacgattattctggcggatgcgcatatccgctacagcaagccgattagcggtaaacct

SEQ ID NO: 707120 - DNA, 75 bp, synthetic construct
  source 1..75: mol_type = other DNA
ggtgttaagcgcgtgacctgtagcgcccgcgaagacgcggtggagtttttcgccaagctggggtttgtcaatcaa

SEQ ID NO: 707121 - DNA, 75 bp, synthetic construct
  source 1..75: mol_type = other DNA
ctgccagcggcctctctcggcctgaaatccgcccaggcgatattttccgggataactacggcggcacggtaacga

SEQ ID NO: 707122 - DNA, 75 bp, synthetic construct
  source 1..75: mol_type = other DNA
atgaaaaagaaaaattctggctttactgccagcggccccgctcggcctgaaatccgccccggcgatattttccgg

SEQ ID NO: 707123 - DNA, 75 bp, synthetic construct
  source 1..75: mol_type = other DNA
agcgacatcgacagaatcatgcgcgttacaggtatggaacgcattaaggcagtacgtgaaattattcgtgaacgg

SEQ ID NO: 707124 - DNA, 75 bp, synthetic construct
  source 1..75: mol_type = other DNA
acagcgaacgccgatgtaaatggcgctcgtaacattttagcggcggggcacgccgttcttgcctgtggagagatg

SEQ ID NO: 707125 - DNA, 75 bp, synthetic construct
  source 1..75: mol_type = other DNA
gtggttccaaccgtctatcacggcggcgatctcttccatgtgcgaggttctttgaccccttctgtgctaaacgcg

SEQ ID NO: 707126 - DNA, 75 bp, synthetic construct
  source 1..75: mol_type = other DNA
atgagcataagagaactaaacctcaccaaagagcagcacgagtggctgaatggctggcttgaactgtggggcgca

SEQ ID NO: 707127 - DNA, 75 bp, synthetic construct
  source 1..75: mol_type = other DNA
ccttgagtcggtggcgcgtcaggaaggcgttaagcgcgtgacctgtagtgcccgtgaagacgcggtggagttttt

SEQ ID NO: 707128 - DNA, 75 bp, synthetic construct
  source 1..75: mol_type = other DNA
attggctttgtcggcatttatgccatttttgatatccttaccagtaacgtcgggccggcggctcaggcgatggtg

SEQ ID NO: 707129 - DNA, 75 bp, synthetic construct
  source 1..75: mol_type = other DNA
cgtggcgtcaatgtgcgccgatgggcaggacgtgttccgtcgtttcctcttaaaagacccgaaagctggcgttgg

SEQ ID NO: 707130 - DNA, 75 bp, synthetic construct
  source 1..75: mol_type = other DNA
agaataatcgtttttggctgattgatttttcaaatagttacgagcattattattcaattgacaaagatagcaaat

SEQ ID NO: 707131 - DNA, 75 bp, synthetic construct
  source 1..75: mol_type = other DNA
tggaaggttactgtcatttatgccctgtttgcgggtgccctgttagtcagccaatgggtgatgaaaaagccgcta

SEQ ID NO: 707132 - DNA, 75 bp, synthetic construct
  source 1..75: mol_type = other DNA
acggtttttgaggtgcgcaacgtcaccagccgtgacagaaaaaatctatggtcacccccgtttttgcaacactga

SEQ ID NO: 707133 - DNA, 75 bp, synthetic construct
  source 1..75: mol_type = other DNA
tgccgcccaaggacgtggccaagaacctcggcgtgtccattccgacgctgtaccgctgggtgccagcctccacgc

SEQ ID NO: 707134 - DNA, 75 bp, synthetic construct
  source 1..75: mol_type = other DNA
cgacgcaggatcagaacctggagctgcaacgcgaagccttgagcaaggccggatgtaaaaaggtcttcgaggaca

SEQ ID NO: 707135 - DNA, 75 bp, synthetic construct
  source 1..75: mol_type = other DNA
tttttcaaacagttacgagcattattattcaattgacaaagatagcaaattatttgtaaatgagatggcagacag

SEQ ID NO: 707136 - DNA, 75 bp, synthetic construct
  source 1..75: mol_type = other DNA
ggcgaagggcgcgatgctgactcaccgcaatatgctggcgaatctggaacaagttaacgcgacttatgggccgct

SEQ ID NO: 707137 - DNA, 75 bp, synthetic construct
  source 1..75: mol_type = other DNA
catcttccagatgccatctcatttcgcagcgcactgcataacggctaccggatgcagtacgtcaaacccgaactg

SEQ ID NO: 707138 - DNA, 75 bp, synthetic construct
  source 1..75: mol_type = other DNA
gcgtccggatgccactgatgaaatcatcaaaaacggttggctacacactggcgacattgccgtaatggacgaaga

SEQ ID NO: 707139 - DNA, 75 bp, synthetic construct
  source 1..75: mol_type = other DNA
aatccagacactggacaccggtgatttcgtggcgctggcgactatggctgcgaatttttttgctcccacggagtc

SEQ ID NO: 707140 - DNA, 75 bp, synthetic construct
  source 1..75: mol_type = other DNA
tggttgccggtgctgataacgtcgacaactttgatgttgctgatggtaatgaggttgcctataacggtgagccca

SEQ ID NO: 707141 - DNA, 75 bp, synthetic construct
  source 1..75: mol_type = other DNA
caccttgttcaatgcgttgctgaacaataaagagttccagcagctggatttctccagtctgcatctttccgcagg

SEQ ID NO: 707142 - DNA, 75 bp, synthetic construct
  source 1..75: mol_type = other DNA
agtctcaaataattgatttatgcgaagccggaaaaatacaggaggttgtaattgaaaggatttcactaaagcagt

SEQ ID NO: 707143 - DNA, 75 bp, synthetic construct
  source 1..75: mol_type = other DNA
tatggatgttactggtcatcctttctgaaacctctgcaacatccacacttaaaatgttcgataacagtgagggga

SEQ ID NO: 707144 - DNA, 75 bp, synthetic construct
  source 1..75: mol_type = other DNA
aaatgttagatttgttgggcatgttgagcccaaagggaaatatccattgattagcatggttagagctggttcgtg

SEQ ID NO: 707145 - DNA, 75 bp, synthetic construct
  source 1..75: mol_type = other DNA
agggacttaatcctgcatggcctctcgtgccaatcaatggaaactgcaagattataggcgttgcaattgagacaa

SEQ ID NO: 707146 - DNA, 75 bp, synthetic construct
  source 1..75: mol_type = other DNA
atcctcactcgccagcagcgaaatcaattacatcaggtcattaccaccgtgcaaattgaacccgtcgatcatttg

SEQ ID NO: 707147 - DNA, 75 bp, synthetic construct
  source 1..75: mol_type = other DNA
aatccttatgattccagaagtgaggaatacttaaagaccgaactaggacagaactggaaagcggcgatggacata

SEQ ID NO: 707148 - DNA, 75 bp, synthetic construct
  source 1..75: mol_type = other DNA
acggggatatttatgtttcttgccccggcttgtggcttgatgattcgctttatggtggggtatggcaggcgatag

SEQ ID NO: 707149 - DNA, 75 bp, synthetic construct
  source 1..75: mol_type = other DNA
attgatttctaaatcagtcattactgatattaaagatatcaaatttacagttattcaattaacagactacacatt

SEQ ID NO: 707150 - DNA, 75 bp, synthetic construct
  source 1..75: mol_type = other DNA
agcaagttggttattagcaataggcctgattcaatatgctgagaaacaacttgaacctctgacaaaaaatattag

SEQ ID NO: 707151 - DNA, 75 bp, synthetic construct
  source 1..75: mol_type = other DNA
atgaacaaattagcacgcttattattaacagcaagctcaattgcacctgtttgcgcaactctattttttattgga

SEQ ID NO: 707152 - DNA, 75 bp, synthetic construct
  source 1..75: mol_type = other DNA
acagaacaagtgctcgcacccaacgatccgcagatgcgttataaagaaaaatgccagcaggaaggcattccggtt

SEQ ID NO: 707153 - DNA, 75 bp, synthetic construct
  source 1..75: mol_type = other DNA
gataatccgcatcgcggcgaaccggggaccggagaaattaattatgattatctctttaaggtaatcgaaaattct

SEQ ID NO: 707154 - DNA, 75 bp, synthetic construct
  source 1..75: mol_type = other DNA
ggatctggtgaaaaaccaggatggcgcagtggtcggttgtaccgcactgtgcatcgaaactggtgaagtggttta

SEQ ID NO: 707155 - DNA, 75 bp, synthetic construct
  source 1..75: mol_type = other DNA
gcgacattgcggtgatggatgaagaaggattcctgcgcattgtcgatcgtaaaaaagacatgattctggtttccg

SEQ ID NO: 707156 - DNA, 75 bp, synthetic construct
  source 1..75: mol_type = other DNA
caggcgatattgatatcactgaatccttcccgaaaaatatgtaccagaaactgttgagggatattccagggcagg

SEQ ID NO: 707157 - DNA, 75 bp, synthetic construct
  source 1..75: mol_type = other DNA
gattaatcaagccgtggctgaaaggttatcccattaataacccggaagatgtggcgtacagccggactatgtata

SEQ ID NO: 707158 - DNA, 75 bp, synthetic construct
  source 1..75: mol_type = other DNA
cactgatttatcgccacgcccgcaacctgctgctggcgcagggctggccggaagagacggatgttgaccagcgga

SEQ ID NO: 707159 - DNA, 75 bp, synthetic construct
  source 1..75: mol_type = other DNA
atgcttgatgatcgttttaattccctgaaacaggaattttccggcgtatctgatgatgcggctgatgcgctttcg

SEQ ID NO: 707160 - DNA, 75 bp, synthetic construct
  source 1..75: mol_type = other DNA
tgaaacgggaatttgatggcgcaccggaagatgcagagggcgcattgttgagcgttgctgacatgatgaaagctg

SEQ ID NO: 707161 - DNA, 75 bp, synthetic construct
  source 1..75: mol_type = other DNA
catctggacttttactttgcgcgataacgcaaaatgggctgatggcacgcctgtaacggcacaagattttgttta

SEQ ID NO: 707162 - DNA, 75 bp, synthetic construct
  source 1..75: mol_type = other DNA
gctggcgcagggctggccggaagagacggatattgaacaactgaatccgcactatccgggctggatcagcattta

SEQ ID NO: 707163 - DNA, 75 bp, synthetic construct
  source 1..75: mol_type = other DNA
cgcagtgtcagttgccggtggcagaagatgcgcggcgtatccgggcggcgctcgaccacaaccggtcagacgttg

SEQ ID NO: 707164 - DNA, 75 bp, synthetic construct
  source 1..75: mol_type = other DNA
gctttcgcctggtggtgaaggaaagcgatcacccctgctggctcgatgaggacgacgaaaacctgcccgtggtgc

SEQ ID NO: 707165 - DNA, 75 bp, synthetic construct
  source 1..75: mol_type = other DNA
cgtataccggatgaaccgccccgccgctggtttgaccgtggtgttctgcgggaggtggtccgggaagcccgggcc

SEQ ID NO: 707166 - DNA, 75 bp, synthetic construct
  source 1..75: mol_type = other DNA
ttcggcagtggaaatgtatctggtcagtgagtgtgtggagcatatcctgtccagtgggctggcctgcgatgtgct

SEQ ID NO: 707167 - DNA, 75 bp, synthetic construct
  source 1..75: mol_type = other DNA
accatccgggctggatcagcatttacgtgcggctggatgcgccccggctggcgacgttacttatcaaccgtcacg

SEQ ID NO: 707168 - DNA, 75 bp, synthetic construct
  source 1..75: mol_type = other DNA
gccatgataatttgtggttgtatggcacgattaaacaagaataatcagtatttgcacgatttgttggtggattat

SEQ ID NO: 707169 - DNA, 75 bp, synthetic construct
  source 1..75: mol_type = other DNA
cgcaggtgatgctgggttactggcagcgtccggatgctacagatgagatcatcaaaaatggctggttacacaccg

SEQ ID NO: 707170 - DNA, 75 bp, synthetic construct
  source 1..75: mol_type = other DNA
ctttccgcaggcggagggatgccagtgcagcaagtggtggcagagcgttgggtgaaactgacaggacagtatctg

SEQ ID NO: 707171 - DNA, 75 bp, synthetic construct
  source 1..75: mol_type = other DNA
ccgcttatttgcaacaagggttggggctgaagaaaggcgatcgcgttgcgttgatgatgcctaatttattgcaat

SEQ ID NO: 707172 - DNA, 75 bp, synthetic construct
  source 1..75: mol_type = other DNA
agcgaaatacccgtttaccgctatcaccggcgttaacaccttgttcaacgcgttgctgaacaataaagagttcca

SEQ ID NO: 707173 - DNA, 75 bp, synthetic construct
  source 1..75: mol_type = other DNA
gttgcatccgggcaaagagctggtggtgacggcgctgccgctgtatcacatttttgccctgaccattaactgcct

SEQ ID NO: 707174 - DNA, 75 bp, synthetic construct
  source 1..75: mol_type = other DNA
ccgttatcaatctctggtagatatgtttgagcaatcggtcgcgcgctatgccgacaagcccgcgtttgtgaatat

SEQ ID NO: 707175 - DNA, 75 bp, synthetic construct
  source 1..75: mol_type = other DNA
tgatgacaggctgtcgcaccgggcaaattcgtctgctttatatcgccccggaacgcctgatgctggataactttc

SEQ ID NO: 707176 - DNA, 75 bp, synthetic construct
  source 1..75: mol_type = other DNA
gtgtcgggatgcgtaagctggaacgctttggcaaaccgtttatgacgctgatccgcgcgcatgtcgacggcgacg

SEQ ID NO: 707177 - DNA, 75 bp, synthetic construct
  source 1..75: mol_type = other DNA
gcaggggcagttgcaggatatcgagcgccacaaactcaatgcgatgggcgcgtttgccgaagcgcaaacttgccg

SEQ ID NO: 707178 - DNA, 75 bp, synthetic construct
  source 1..75: mol_type = other DNA
ctggcactgccgtcagtaacggggaggcttccgcggtggcagttgccgctacggctgcacctaagaacgtggtga

SEQ ID NO: 707179 - DNA, 75 bp, synthetic construct
  source 1..75: mol_type = other DNA
tctgtacggtaccaggcagatcattgctaaaaaaccgattcgtacacctgaagacttgaaagggatgaagatccg

SEQ ID NO: 707180 - DNA, 75 bp, synthetic construct
  source 1..75: mol_type = other DNA
ggttttacaagaaacctttggctaccaacagtttcgccccggccaggaagaaattatcgacaccgtactttccgg

SEQ ID NO: 707181 - DNA, 75 bp, synthetic construct
  source 1..75: mol_type = other DNA
cgcagcggcggtgtgtcacgccgccgggtgattattcacttcccggaacagattgccccggaggaacgcgacccg

SEQ ID NO: 707182 - DNA, 75 bp, synthetic construct
  source 1..75: mol_type = other DNA
atgccatccggccaccggctgaaagcccgttcgacaccatgagcgaagcagagttttccgccatgagtaccagcg

SEQ ID NO: 707183 - DNA, 75 bp, synthetic construct
  source 1..75: mol_type = other DNA
ggcacgacaagcaacttcaaaggggttgttaccccctccacacctgtaaatacgaaccaagacattaacaagaca

SEQ ID NO: 707184 - DNA, 75 bp, synthetic construct
  source 1..75: mol_type = other DNA
atgaaaatgaacgtaacagagacggtaaaacaggcgtgcggccactggccgcgcattcttccggcgcttggtgtg

SEQ ID NO: 707185 - DNA, 75 bp, synthetic construct
  source 1..75: mol_type = other DNA
gagcgaagcggagttttccgccatgagtaccagcgaaaaggccatgcgtatctatgagcattacggcgaggcgct

SEQ ID NO: 707186 - DNA, 75 bp, synthetic construct
  source 1..75: mol_type = other DNA
ccatgatgctgaaagagtacggcctgaattatgagaagcggcacaccaagcaggggatacagaccaatctgtcgc

SEQ ID NO: 707187 - DNA, 75 bp, synthetic construct
  source 1..75: mol_type = other DNA
gcatgacttgctggttgattattacgtgttgggggagacgttcatggcgctggcacggaaacatgggtgctctga

SEQ ID NO: 707188 - DNA, 75 bp, synthetic construct
  source 1..75: mol_type = other DNA
caaaaactggagcaagatcccgcccgcccccgccattttattactgaaaccggtattgggtatcggtttatgctt

SEQ ID NO: 707189 - DNA, 75 bp, synthetic construct
  source 1..75: mol_type = other DNA
ccggatgaagttgacgtcgctaccgtagtgaacgttattgatacgtgcccaagtggcgcactgaaataccgtcat

SEQ ID NO: 707190 - DNA, 75 bp, synthetic construct
  source 1..75: mol_type = other DNA
gaagagatatcttcgacaacaccgcctgtacctgttagaaaaaaacataaaggactgatggggttagcgttgacc

SEQ ID NO: 707191 - DNA, 75 bp, synthetic construct
  source 1..75: mol_type = other DNA
tacattgcgaaacgggtgaaacacgtcgtctcggcgaataccattttattttgctggaaacattagcaaaaaatg

SEQ ID NO: 707192 - DNA, 75 bp, synthetic construct
  source 1..75: mol_type = other DNA
catatccaaatggattaaaaaatacagtgagattgatttttcgatgaagggacaaaaggaagatttgaggccgaa

SEQ ID NO: 707193 - DNA, 75 bp, synthetic construct
  source 1..75: mol_type = other DNA
aaaaccggcggcgtgacgttccgcgccggggatgtggttgtcccgctgtatgacgataccggcgcgctggtaaac

SEQ ID NO: 707194 - DNA, 75 bp, synthetic construct
  source 1..75: mol_type = other DNA
tgcgtgaattgtgtaaccgccacaatgcgctgttgatttttgatgaagtacaaaccggcgtcgggcgcaccgggg

SEQ ID NO: 707195 - DNA, 75 bp, synthetic construct
  source 1..75: mol_type = other DNA
tcatgctaccgggctaatgaaacacggcagtttgcccggatgttgggcttgaaccgaagaacacggcggtgcgga

SEQ ID NO: 707196 - DNA, 75 bp, synthetic construct
  source 1..75: mol_type = other DNA
cccggggatggggggtaagcttagtcagccgttgtctccgggtgtcgcgtgcgcagttgcacgtcattctcagac

SEQ ID NO: 707197 - DNA, 75 bp, synthetic construct
  source 1..75: mol_type = other DNA
aacctgcttatcactaacccgcgcgatattccagggttggtaaaagagttagcgaaatatccgtttaccgctatc

SEQ ID NO: 707198 - DNA, 75 bp, synthetic construct
  source 1..75: mol_type = other DNA
acagttaaaccttttatcgattttttatctcaggccgaaggattaaatgttgcttatggaaatttaaccgtagat

SEQ ID NO: 707199 - DNA, 75 bp, synthetic construct
  source 1..75: mol_type = other DNA
atggaacagaaaactgattatagaatacctgacaacctgaagttggttggtattggttttggctgtcattttgta

SEQ ID NO: 707200 - DNA, 75 bp, synthetic construct
  source 1..75: mol_type = other DNA
attcagcccagtctgttgtttaagtggaagaaacaatacaaggtaggaagcctcactgctgtggctgccggtgaa

SEQ ID NO: 707201 - DNA, 75 bp, synthetic construct
  source 1..75: mol_type = other DNA
ttccagcaaacaggtggaagcattccgctacaattctgaaggcgttaaagcactacaacacctggttcatgggag

SEQ ID NO: 707202 - DNA, 75 bp, synthetic construct
  source 1..75: mol_type = other DNA
aatagaagagcattactactcagcaggggaggttgcagagcagcttggagtaacggccaacaagattggtcgcat

SEQ ID NO: 707203 - DNA, 75 bp, synthetic construct
  source 1..75: mol_type = other DNA
agggttaattaaagaggactgcggagaacatttccttgctttcctagaccgggatattaatcctctgggtagtgg

SEQ ID NO: 707204 - DNA, 75 bp, synthetic construct
  source 1..75: mol_type = other DNA
tccgttgccgccggttttaagggattaattccttcaaaagtaaaatctcgcccgcaatgttgtgacgatgacgcg

SEQ ID NO: 707205 - DNA, 75 bp, synthetic construct
  source 1..75: mol_type = other DNA
ggctgaaagaaacggcatgtcagtgcaaaaagttaatagcatgataagcagtaatgacgaagccaaaataagaac

SEQ ID NO: 707206 - DNA, 75 bp, synthetic construct
  source 1..75: mol_type = other DNA
cctgatacagtcgatgtcgatattgtggtaaaggttattgatacctgtccaagtggcgcactgaaatatcgccat

SEQ ID NO: 707207 - DNA, 75 bp, synthetic construct
  source 1..75: mol_type = other DNA
cgcgcaaatcatgtacatcaacatgctgcatgaacacgcacacgcgctgtcagaccgttactgtgccgccgtctt

SEQ ID NO: 707208 - DNA, 75 bp, synthetic construct
  source 1..75: mol_type = other DNA
atggtggggcgtacggggccgacttcggtcgggccgggttttctttgttgaccggtactgcgaacctcgtacgtc

SEQ ID NO: 707209 - DNA, 75 bp, synthetic construct
  source 1..75: mol_type = other DNA
gcccgcgaaatccccatgattttacgtacagaaatctacgcaactgcctgtattatcggcggtattgtccacgct

SEQ ID NO: 707210 - DNA, 75 bp, synthetic construct
  source 1..75: mol_type = other DNA
tgctggcggtgctgcttaataacgccgggaaagtgctcacccagcgccagttactcaaccaggtgtgggggccaa

SEQ ID NO: 707211 - DNA, 75 bp, synthetic construct
  source 1..75: mol_type = other DNA
aggcacagcccctctgactaaagatgaaaaactagttctggaagccttccgtcgacgtttcggtgaccaacgtgg

SEQ ID NO: 707212 - DNA, 75 bp, synthetic construct
  source 1..75: mol_type = other DNA
aacgccttagagcgtcattatcccagagctgagcgcattattgccggggctctggatacgacaccggaaacatta

SEQ ID NO: 707213 - DNA, 75 bp, synthetic construct
  source 1..75: mol_type = other DNA
gctaccggaatgtactcagtctgaaaatgttcgggctggggctgccggtgatgctgaaggaatacggactgaatt

SEQ ID NO: 707214 - DNA, 75 bp, synthetic construct
  source 1..75: mol_type = other DNA
gactcaaggccatcaccggcggcgatgcggtgtccgttgacccgaaataccgggatgcgtactccacgcacatcc

SEQ ID NO: 707215 - DNA, 75 bp, synthetic construct
  source 1..75: mol_type = other DNA
tggcgcaaaaacatgaatgctctgatgggactatcggaaagcggctgcaaaaagctgaaggtgttattgaaggaa

SEQ ID NO: 707216 - DNA, 75 bp, synthetic construct
  source 1..75: mol_type = other DNA
cgtcagccgcgcctgtatctgtatcatgcctatctggcgtatatggaagcccacggctacaggaatactctcagc

SEQ ID NO: 707217 - DNA, 75 bp, synthetic construct
  source 1..75: mol_type = other DNA
gattgccccggatgaacgcgacccgcagctcaagaacaaaatcgcccgtgagctggccgtgattgtgcgccagct

SEQ ID NO: 707218 - DNA, 75 bp, synthetic construct
  source 1..75: mol_type = other DNA
gaaggggaaacgctggaaacccacgccccgcgttctggcgctggcttgaccgtgccgccggtggccgtgcggaaa

SEQ ID NO: 707219 - DNA, 75 bp, synthetic construct
  source 1..75: mol_type = other DNA
caaaaactagagcaagacccggcccgacctcgccattttattactgaaaccggtattgggtatcggtttatgctt

SEQ ID NO: 707220 - DNA, 75 bp, synthetic construct
  source 1..75: mol_type = other DNA
ccgccactccgccaccgccgcgcccgatccgctggtgaaattttccgatgttaccgtcgatttagccgcccgcgt

SEQ ID NO: 707221 - DNA, 75 bp, synthetic construct
  source 1..75: mol_type = other DNA
tatttatgcggtgaggtatggaaaaatcgtattgtcggcggcaacagcctgccaacggcgatccacgccctgcgc

SEQ ID NO: 707222 - DNA, 75 bp, synthetic construct
  source 1..75: mol_type = other DNA
catctgatggccacagcggccatcggtgcctacccctatctgcagctgcagatcgtcggggtcagcgatgcggcc

SEQ ID NO: 707223 - DNA, 75 bp, synthetic construct
  source 1..75: mol_type = other DNA
tgcgcggtaatagcaaactgtttaatctcaaacgtaagccgtggatcatgccggatgaagtagacgtcgccaccg

SEQ ID NO: 707224 - DNA, 75 bp, synthetic construct
  source 1..75: mol_type = other DNA
acaccgtggattcgctctgtttccggtactacggcacgacgcagggcgtcaccgaaaaggtactggatgccaacc

SEQ ID NO: 707225 - DNA, 75 bp, synthetic construct
  source 1..75: mol_type = other DNA
ctccttaaccaggtgtgggggccaaacgcggtcgaacacagtcattatttgcgtatttatatgggacatctgcga

SEQ ID NO: 707226 - DNA, 75 bp, synthetic construct
  source 1..75: mol_type = other DNA
tgccggagcggatgattacctgagtaagccatttggtattggcgaattgcaggcccgtctgcgcgtcgctttacg

SEQ ID NO: 707227 - DNA, 75 bp, synthetic construct
  source 1..75: mol_type = other DNA
atgggattgagtttatccgcgacctgcgccagtggagcgcggtgccggtgattgtgctttccgcacgtagcgaag

SEQ ID NO: 707228 - DNA, 75 bp, synthetic construct
  source 1..75: mol_type = other DNA
tgctggcagtgttgctcaataatgcgggaaaagtgctcacccagcgccagctcctcaaccaggtgtggggaccaa

SEQ ID NO: 707229 - DNA, 75 bp, synthetic construct
  source 1..75: mol_type = other DNA
ccaacagctatctgcaactggatgttatcggtattgcagacagtggcgcaggaaaggcagcaaccggcgcggtta

SEQ ID NO: 707230 - DNA, 75 bp, synthetic construct
  source 1..75: mol_type = other DNA
tgacctttttgatgagcatgtgacaaatgaaaatatcgtaaatggggatgtcgaatttagttttgatttggggaa

SEQ ID NO: 707231 - DNA, 75 bp, synthetic construct
  source 1..75: mol_type = other DNA
caaaaactggagcaagatcccgcccgcccccgccacttcattactgaaaccggtattgggtatcggtttatgctt

SEQ ID NO: 707232 - DNA, 75 bp, synthetic construct
  source 1..75: mol_type = other DNA
ccagagccagaagaaaaacagcgtaaaaagcctggtcgaaaacctaaggcggcagcagatgaacctgacaacgaa

SEQ ID NO: 707233 - DNA, 75 bp, synthetic construct
  source 1..75: mol_type = other DNA
atgacacacatgatctttcgtcatggagacatgaagaaatggaaaggcgttggatacgactttgaaatcgtgaaa

SEQ ID NO: 707234 - DNA, 75 bp, synthetic construct
  source 1..75: mol_type = other DNA
agccgtccctgcgggatgatgccagaatggtggtgctggagctggggggactggaagaccgtccgtccctgctgg

SEQ ID NO: 707235 - DNA, 75 bp, synthetic construct
  source 1..75: mol_type = other DNA
accaactccgacgcttggggctttggtttgaaagccggttacgacttcaaactgggtgatgcaggttacgtgact

SEQ ID NO: 707236 - DNA, 75 bp, synthetic construct
  source 1..75: mol_type = other DNA
ctggttcatggactgatgaaggtactactggttggtttggtaatactggtaatgctagtgattacaatggtgatg

SEQ ID NO: 707237 - DNA, 75 bp, synthetic construct
  source 1..75: mol_type = other DNA
gcaccgaaacgcgtttcctgaacgtccagcttctgcagaacagcatggacgcgcctagaatcatcgggtctttcc

SEQ ID NO: 707238 - DNA, 75 bp, synthetic construct
  source 1..75: mol_type = other DNA
tgctatacgggctgatatataaaataaacattaaaaaaaatactgcagtgtttgttcaacaattctggatgaaag

SEQ ID NO: 707239 - DNA, 75 bp, synthetic construct
  source 1..75: mol_type = other DNA
taatgccttgtgccgaacagaaactaaccatctgcacaccttacttcaacctgccggcaatccttgtgcgcaata

SEQ ID NO: 707240 - DNA, 75 bp, synthetic construct
  source 1..75: mol_type = other DNA
gggcgtagatgttccggtttatggcgttcctgtcaatacccgtgaagccctgggcgttctgcattttaaaggctt

SEQ ID NO: 707241 - DNA, 75 bp, synthetic construct
  source 1..75: mol_type = other DNA
tcattcaaaaaacaacaagtgcaacccgaatggccaactctaaagtaattatcagtggtaaagatgaacacggag

SEQ ID NO: 707242 - DNA, 75 bp, synthetic construct
  source 1..75: mol_type = other DNA
caacttagttctgatttggaaagagctgctcaagaggcgtattctgcattcacagaattaaaggatgaaggaaat

SEQ ID NO: 707243 - DNA, 75 bp, synthetic construct
  source 1..75: mol_type = other DNA
gaaattaaattatctgataaaagccaacttactgatgatgattctcaatttaagaataacccttctgagttgaca

SEQ ID NO: 707244 - DNA, 75 bp, synthetic construct
  source 1..75: mol_type = other DNA
atgacaatgctactgccgctcttcattctggttggttttattgcaggttattttgttaatgccatcgcctatcac

SEQ ID NO: 707245 - DNA, 75 bp, synthetic construct
  source 1..75: mol_type = other DNA
gaatgcggcaggtggtgcgctgggtaactggatcgacaacaaagatcctctgtctggtgtaatttcaaatggtat

SEQ ID NO: 707246 - DNA, 75 bp, synthetic construct
  source 1..75: mol_type = other DNA
gtactgtagatccggcaaacgcagccattgcaggctgggtgaatgtgttcagcatgggtaatggcctggcgggga

SEQ ID NO: 707247 - DNA, 75 bp, synthetic construct
  source 1..75: mol_type = other DNA
ttccatcgataacggtactgaagggtctgcggtacgtgttggtctgggtactcagttcagcttcaccaagaactt

SEQ ID NO: 707248 - DNA, 75 bp, synthetic construct
  source 1..75: mol_type = other DNA
tgcttaaaagcgtgctacttaccgctaccctggcggtttcatttactgcttccgccttcaccgaaggcacggatt

SEQ ID NO: 707249 - DNA, 75 bp, synthetic construct
  source 1..75: mol_type = other DNA
caaacaagcaagcgaagtctttgcggtcttgatcaataaagataaagcagcaggcatttccttatttgatgctaa

SEQ ID NO: 707250 - DNA, 75 bp, synthetic construct
  source 1..75: mol_type = other DNA
cagaaaactcttccggtgccgcctgccagaaagcaatgaatgagagggatgctgtagggctggctttggcaacag

SEQ ID NO: 707251 - DNA, 75 bp, synthetic construct
  source 1..75: mol_type = other DNA
cagaaagaaaaatgctgcctgagccagtttatcgacgctggatgacattattaatatctatgttaacagcaggta

SEQ ID NO: 707252 - DNA, 75 bp, synthetic construct
  source 1..75: mol_type = other DNA
tggttaataacaatttttcttatgttttcattaaattaaaccatgaaggcatagaaaaagagcaagggctaatac

SEQ ID NO: 707253 - DNA, 75 bp, synthetic construct
  source 1..75: mol_type = other DNA
gacacactattgctttatgaagaatgaggctaataattccctagatgatgaagaaacagtaaattataagatcag

SEQ ID NO: 707254 - DNA, 75 bp, synthetic construct
  source 1..75: mol_type = other DNA
ggtgaagatggtgaagttgctactgaccacctgacagttgatagctatagtactgttaatttaactgaatctact

SEQ ID NO: 707255 - DNA, 75 bp, synthetic construct
  source 1..75: mol_type = other DNA
tatactagcgaatatcatcagtgggacaacaacattaatgtgtctaactccactgtaacttcagggtcacagact

SEQ ID NO: 707256 - DNA, 75 bp, synthetic construct
  source 1..75: mol_type = other DNA
aatcaaatccagtctctttatgatgaaagatttgacggtctaattctggttgtttgtttacaaaactggccggag

SEQ ID NO: 707257 - DNA, 75 bp, synthetic construct
  source 1..75: mol_type = other DNA
cgtgagaaagaactggagctgatccgcgagcataccaccatcgttaagcactaccgcgatctgcaaagtattgcc

SEQ ID NO: 707258 - DNA, 75 bp, synthetic construct
  source 1..75: mol_type = other DNA
atgatgctggcttatgggtaattctttgcccgcgcgtggcgaaaactcatccgaaaattgttaaatggagttacg

SEQ ID NO: 707259 - DNA, 75 bp, synthetic construct
  source 1..75: mol_type = other DNA
caaaaggggatgataagtttatcaccaccgactatttgcaacagtgccctcttgcatatgtcgggcagggatacc

SEQ ID NO: 707260 - DNA, 75 bp, synthetic construct
  source 1..75: mol_type = other DNA
tccaccgccgcggtgaaatccgcgaccgttccgccgaaggccagcattaccgcatcgccggcatgaatctgctcg

SEQ ID NO: 707261 - DNA, 75 bp, synthetic construct
  source 1..75: mol_type = other DNA
aaggctgaaggaatagtcgacggaatgttgatggcactggatgttcgtctcgagatggatcttgaagttgttaga

SEQ ID NO: 707262 - DNA, 75 bp, synthetic construct
  source 1..75: mol_type = other DNA
acgggcgtcggcggcgggattatccgcgatgtgctggcgcgtgaaatcccgatgattttccgcacagagatctac

SEQ ID NO: 707263 - DNA, 75 bp, synthetic construct
  source 1..75: mol_type = other DNA
ctatgttaaagttgccctcacacacaatctacctgttttctcgtgtgtgtcacaggcgcaatacataaatagtct

SEQ ID NO: 707264 - DNA, 75 bp, synthetic construct
  source 1..75: mol_type = other DNA
gaccgtgagcgaggcaccgtatattctcgatggactactgatgaacgaggtcggtcgccatgttcgcgaacagta

SEQ ID NO: 707265 - DNA, 75 bp, synthetic construct
  source 1..75: mol_type = other DNA
gtcaacccgttgtatacaccgcgtgagcttgagcatcagcttaacgacagcggcgcatcagcgattgttatcgtg

SEQ ID NO: 707266 - DNA, 75 bp, synthetic construct
  source 1..75: mol_type = other DNA
ctggaaggttatggcctgaccgagtgtgcgccgctggtcagcgttaacccgtatgatattgattatcatagtggt

SEQ ID NO: 707267 - DNA, 75 bp, synthetic construct
  source 1..75: mol_type = other DNA
ggcgccgaagatctggtgctcgatctctacaagcagatcccgcccacgcgcatcaccgatctcctgctggaggtg

SEQ ID NO: 707268 - DNA, 75 bp, synthetic construct
  source 1..75: mol_type = other DNA
cgatctcttggcccatgtttcgccgctcggatgggaacacatcaatctcaccggagaatatcgctggccaaagcc

SEQ ID NO: 707269 - DNA, 75 bp, synthetic construct
  source 1..75: mol_type = other DNA
ccatctgcgcacaggagcaccctgcgctgaccggatcgggctaatgaacgttatcttggcggaagggatcaacct

SEQ ID NO: 707270 - DNA, 75 bp, synthetic construct
  source 1..75: mol_type = other DNA
atgacacaaacaagttacagcaaactatcccagcgcgacgttgatcgcgcagaaacagatttactcatcaacctg

SEQ ID NO: 707271 - DNA, 75 bp, synthetic construct
  source 1..75: mol_type = other DNA
ctggaacaagacaccgttggtactcgtctgaccaactctcgtcatggcctggctgataacggcgcgcatgggtaa

SEQ ID NO: 707272 - DNA, 75 bp, synthetic construct
  source 1..75: mol_type = other DNA
cgatccggctgatatggcgtggctgcgccgttgtctggaagagaagccgcaggggcagttgcaggatatcgaacg

SEQ ID NO: 707273 - DNA, 75 bp, synthetic construct
  source 1..75: mol_type = other DNA
ctgatttcgttgatgaaagatcaggtagatcaactgcaagccaacggcgtggcggcggcgtgccttaactcgacg

SEQ ID NO: 707274 - DNA, 75 bp, synthetic construct
  source 1..75: mol_type = other DNA
aacccgcgcgcctggcgtctggatctggaaaacgccattttgatccacgatccgcaactggagcttgcgccacag

SEQ ID NO: 707275 - DNA, 75 bp, synthetic construct
  source 1..75: mol_type = other DNA
tcgccgtggtgtttgttattgcatggcactacccgatgttaaagaacgtgaaatcagagatggcgttctgtgctt

SEQ ID NO: 707276 - DNA, 75 bp, synthetic construct
  source 1..75: mol_type = other DNA
tggatatataggaaaaaaacttcagaaggctgaaggaatagtcgacggaatgttgatggcactggatgttcgtct

SEQ ID NO: 707277 - DNA, 75 bp, synthetic construct
  source 1..75: mol_type = other DNA
catatgaggaaaggcaatatgggcaaaatggacaagatggacaagatggacaagatggacaagatgatatgggta

SEQ ID NO: 707278 - DNA, 75 bp, synthetic construct
  source 1..75: mol_type = other DNA
gattagtagggcttttaagtatgcgcttgatgaaatcacaaagaaaaaatccccggccgccaccgaggattttaa

SEQ ID NO: 707279 - DNA, 75 bp, synthetic construct
  source 1..75: mol_type = other DNA
gattagcagggcttttaagtatgcgcttgatgaaatcacaaagaaaaaacgcccggtgtgcaagaccgagcgttc

SEQ ID NO: 707280 - DNA, 75 bp, synthetic construct
  source 1..75: mol_type = other DNA
tctttttcttataacaaacgggtccggtcacctgtcactcgactggttgatattccgtgggattaatcgccagaa

SEQ ID NO: 707281 - DNA, 75 bp, synthetic construct
  source 1..75: mol_type = other DNA
atgcgagttctgaaaatcgaatgcccggaatgcggctcaaaggctgttattcgtaaaacaaacaggaagcaccgg

SEQ ID NO: 707282 - DNA, 75 bp, synthetic construct
  source 1..75: mol_type = other DNA
atgaaaaatattatttctgcaactgtactatccgcgctgttcatgttcaatgctcaggcagcagacacaatggat

SEQ ID NO: 707283 - DNA, 75 bp, synthetic construct
  source 1..75: mol_type = other DNA
aacgccagcgtcgtcagaggcatgaccagcttttttcatgtggtctttcctgcaaacagcgaaagacggaggggg

SEQ ID NO: 707284 - DNA, 75 bp, synthetic construct
  source 1..75: mol_type = other DNA
gcattgcggaccaatcgttgcttccgcttcaataaccgcatttttaatttcggtggcaaaaccaatttttacgcc

SEQ ID NO: 707285 - DNA, 75 bp, synthetic construct
  source 1..75: mol_type = other DNA
gcgaacacctcggggcatttgacccaaaaacgggtaaacaaattaaaggtccggatccgaaagggcgaaatatta

SEQ ID NO: 707286 - DNA, 75 bp, synthetic construct
  source 1..75: mol_type = other DNA
agaggtttttctccttctcagattattcaaaaaatactaagaaagaatgctaagcatcctgtcagaagaaacatt

SEQ ID NO: 707287 - DNA, 75 bp, synthetic construct
  source 1..75: mol_type = other DNA
cgctcataattttgccaaagataccccagcaggacggcaaaaaatgctcgatgatttacaaaaaacacacaacat

SEQ ID NO: 707288 - DNA, 75 bp, synthetic construct
  source 1..75: mol_type = other DNA
gcttctcagcgtctcagggctgtgattgaaggggcgctgagtgtcctgccagagcgtggtgaacaggatgagtgt

SEQ ID NO: 707289 - DNA, 75 bp, synthetic construct
  source 1..75: mol_type = other DNA
tcgaattgttcattaaaaaaccgcttgaaaacggtcttactcgtggggaacaaatggaactggcacgtattgctc

SEQ ID NO: 707290 - DNA, 75 bp, synthetic construct
  source 1..75: mol_type = other DNA
actttagcggttttgctccacttggtgcgatcctggcgctggttttaggtgccggcctagcggagcgcgtcggct

SEQ ID NO: 707291 - DNA, 75 bp, synthetic construct
  source 1..75: mol_type = other DNA
atgggtgcgctgatttttctggcggtgggcaggcatccagttgcaggtttactggctgccattgcaggcgtaggt

SEQ ID NO: 707292 - DNA, 75 bp, synthetic construct
  source 1..75: mol_type = other DNA
gcactgggcggtcactaccggcggcttcaacagtgaaacagtacaggacgtcatgccaggagcggtggaacgccg

SEQ ID NO: 707293 - DNA, 75 bp, synthetic construct
  source 1..75: mol_type = other DNA
tcgaattgttcattaaaaatccgcttgaaaacgggcttactcgtggggaacaaatggaactggcacgtattgctc

SEQ ID NO: 707294 - DNA, 75 bp, synthetic construct
  source 1..75: mol_type = other DNA
tcgaattgttcattaaaaaaccgcttgaaaacgggcttactcgtggtgaacaaatggaactggcacgtattgctc

SEQ ID NO: 707295 - DNA, 75 bp, synthetic construct
  source 1..75: mol_type = other DNA
ggccacaactgaccggtaaagcaacgctgcgtcctggccagtggagtaatgatgtaccagcactgcgcgagattt

SEQ ID NO: 707296 - DNA, 75 bp, synthetic construct
  source 1..75: mol_type = other DNA
cgctggtcattattttatcggtggtgatcttcggtggtttgtggggattctggggcgtattcttcgccattccat

SEQ ID NO: 707297 - DNA, 75 bp, synthetic construct
  source 1..75: mol_type = other DNA
cagtttggtgctggcacggaattctggagctgcttcgcggtgtatctgatcattcaggcgctggacggcaacctg

SEQ ID NO: 707298 - DNA, 75 bp, synthetic construct
  source 1..75: mol_type = other DNA
gtcggcttctcggtacttattccgtacattggcgcatttgtggtgaccattccggtggttggcgtggcgctattc

SEQ ID NO: 707299 - DNA, 75 bp, synthetic construct
  source 1..75: mol_type = other DNA
gaaaacaattcgagcagattcattccaatttgcttgaacaggttcgttatgtttcaaaaataaaagaattaagaa

SEQ ID NO: 707300 - DNA, 75 bp, synthetic construct
  source 1..75: mol_type = other DNA
gtcagcgtaaccgctgccgtcaaacaggtcgtccgcatggtttcctgcggaaattcgggttgagccgtattaagg

SEQ ID NO: 707301 - DNA, 75 bp, synthetic construct
  source 1..75: mol_type = other DNA
tttgggctgaactattcgctgctgctggcggtgctggtcggcttctcggttcttattccgtacattggcgcattt

SEQ ID NO: 707302 - DNA, 75 bp, synthetic construct
  source 1..75: mol_type = other DNA
acatcgaaacacgccccaggcgttcactcttcagagggcatcccgtggaatgagctgccagcttcgcacagggga

SEQ ID NO: 707303 - DNA, 75 bp, synthetic construct
  source 1..75: mol_type = other DNA
aatcacaaacatcttctgagggagagattccattttataaaattgggacatttggtaaggaacccgattcctata

SEQ ID NO: 707304 - DNA, 75 bp, synthetic construct
  source 1..75: mol_type = other DNA
gatataggtaaattacttatccccatcccttgccccaacaacccggaaaagtcgctggctatccagtctgaaatc

SEQ ID NO: 707305 - DNA, 75 bp, synthetic construct
  source 1..75: mol_type = other DNA
atctttttgaatttttttttctcattaggatcaaaaaaaataaaaacattgaaaaaaatccataaagttttatta

SEQ ID NO: 707306 - DNA, 75 bp, synthetic construct
  source 1..75: mol_type = other DNA
attggccagcctcagttgctcttccatgataaagatattccacgggagacaatgcgcaaatcccatcagggacgc

SEQ ID NO: 707307 - DNA, 75 bp, synthetic construct
  source 1..75: mol_type = other DNA
gctggcggcggcgttggtcggcactggttcgtcggtctttcatccggaatcctcacgcgtggcccgaatggcttc

SEQ ID NO: 707308 - DNA, 75 bp, synthetic construct
  source 1..75: mol_type = other DNA
cttttttcagccacatttcttccgatgcggcgttagtgatcatgccaccgatgggtgcgctgatttttctggcgg

SEQ ID NO: 707309 - DNA, 75 bp, synthetic construct
  source 1..75: mol_type = other DNA
tgacaagaacgatcgccaaagtaatccccatgctattaccgcgggcctcaactatacccccttcccgcttctgac

SEQ ID NO: 707310 - DNA, 75 bp, synthetic construct
  source 1..75: mol_type = other DNA
tagtcgttatgacctgattgatcgcaacaacaacatcgttctggaataccgcaagaaagagctgattcgcctgag

SEQ ID NO: 707311 - DNA, 75 bp, synthetic construct
  source 1..75: mol_type = other DNA
accttttttttgaccacgacctgagccgctatcactcccgcgcagggcttggcgcagaatactggcgtgattatc

SEQ ID NO: 707312 - DNA, 75 bp, synthetic construct
  source 1..75: mol_type = other DNA
cgcaacggcgagaaatgcgcggggtgaattgatgccagggcaaattatcacctttagcgtaacgcctgaaggtgc

SEQ ID NO: 707313 - DNA, 75 bp, synthetic construct
  source 1..75: mol_type = other DNA
acgttaccgccgaggatgtaaaaggtaacctgtcacgtcatgaacaaagcatggtcgtcattcaggctccgacat

SEQ ID NO: 707314 - DNA, 75 bp, synthetic construct
  source 1..75: mol_type = other DNA
cctcacgatcaacgtcactgatgagagtgataatcccctgacaaatcatcaggtcacctttaagaatgaaaaagg

SEQ ID NO: 707315 - DNA, 75 bp, synthetic construct
  source 1..75: mol_type = other DNA
atgagttttgtggtcattattcccgcgcgctacgcgtcaacgcgtctgcccggtaaaccattggttgatattaat

SEQ ID NO: 707316 - DNA, 75 bp, synthetic construct
  source 1..75: mol_type = other DNA
tatcgatggtgctgttggtgttagccgaagcaggcgtgttgcaattcaccgggcggcaaaaagtggactggctgg

SEQ ID NO: 707317 - DNA, 75 bp, synthetic construct
  source 1..75: mol_type = other DNA
tgatagcgacttcctttttcatatgcaggggaaaccgctgtttactttgctggcgtgggatttcggcttttactg

SEQ ID NO: 707318 - DNA, 75 bp, synthetic construct
  source 1..75: mol_type = other DNA
aataacgtcatagccggtcaacgcgtcagattaagtgcgctgctagactggccccctgaatctccagacaaccag

SEQ ID NO: 707319 - DNA, 75 bp, synthetic construct
  source 1..75: mol_type = other DNA
acgcttggtgcgctggaatcagcgcaaagcgttgctaatcgcttcggtatttcactggaggagcttcgtcgtctt

SEQ ID NO: 707320 - DNA, 75 bp, synthetic construct
  source 1..75: mol_type = other DNA
tatgcgctttacttctcacgagccaccattccgtgggatcgtgaccgttttgcaaaaggtctggaaaccgttggt

SEQ ID NO: 707321 - DNA, 75 bp, synthetic construct
  source 1..75: mol_type = other DNA
cagtactctgaccgccaccgtcacagactttcataacaacccgttaaaagatatgaaagtgaattttgtggcacc

SEQ ID NO: 707322 - DNA, 75 bp, synthetic construct
  source 1..75: mol_type = other DNA
ccaataattttcgggaaatctcggaaacgtcaaccaactatccggtaactctggatggttggataagctgtagtg

SEQ ID NO: 707323 - DNA, 75 bp, synthetic construct
  source 1..75: mol_type = other DNA
aggaaaggtgactggcgaatgaagtgggcgacttacatcccggggcatcctgacgctaatgatgggtggataatt

SEQ ID NO: 707324 - DNA, 75 bp, synthetic construct
  source 1..75: mol_type = other DNA
aacgtcaaccagatctccgataactctggatggctggataagctgtactgagcgaatgcctgaaaagagccagaa

SEQ ID NO: 707325 - DNA, 75 bp, synthetic construct
  source 1..75: mol_type = other DNA
cgcgtcggcttactgccagcgctaatggttaaaatggcatcgcatgttaatgcccgctacgccagttatatggtg

SEQ ID NO: 707326 - DNA, 75 bp, synthetic construct
  source 1..75: mol_type = other DNA
caatattatttggtgcagggcggttttaagcgcactgacctgaacgataccgagtctgactccactacgctggtg

SEQ ID NO: 707327 - DNA, 75 bp, synthetic construct
  source 1..75: mol_type = other DNA
gccgctgcttaagaacccgctggaacaatattatctggtacagggtggttttaagcgcaccgatctgaacgatac

SEQ ID NO: 707328 - DNA, 75 bp, synthetic construct
  source 1..75: mol_type = other DNA
cggacaacataacgtagtggtgagccggaaagcgcaaccctccgataataaaacgtttagtttatcagtgctccc

SEQ ID NO: 707329 - DNA, 75 bp, synthetic construct
  source 1..75: mol_type = other DNA
agcgggtgagtttacagttacggcgacgctgaccagaaataataccgttgctcatcagcaagtcacttttattgg

SEQ ID NO: 707330 - DNA, 75 bp, synthetic construct
  source 1..75: mol_type = other DNA
ataagcaagggacagcactaagggcacaacttagccttcacaactggaatgctccactgcaatcgcatatttata

SEQ ID NO: 707331 - DNA, 75 bp, synthetic construct
  source 1..75: mol_type = other DNA
ccagatggcgggcggcggcgcggcgggcgggatgggtattgcggcggcggtatttctcaatgcggatattaaacc

SEQ ID NO: 707332 - DNA, 75 bp, synthetic construct
  source 1..75: mol_type = other DNA
tgagtttatttgcgagcgaattgaactattagacaacaaaaaaaacaaagacaatggattaatatctgaattaag

SEQ ID NO: 707333 - DNA, 75 bp, synthetic construct
  source 1..75: mol_type = other DNA
aggcttattgatgagttattttataaattagatttcatttatagcgaaatgcttgaattgctgcgagacgataaa

SEQ ID NO: 707334 - DNA, 75 bp, synthetic construct
  source 1..75: mol_type = other DNA
tgcgtaaggttgctcaagattatcagtcgacgctggcgtggtatgaggctatcccggatagcccaaacgttgagg

SEQ ID NO: 707335 - DNA, 75 bp, synthetic construct
  source 1..75: mol_type = other DNA
actaggcccgcaaaccacacataccatcgtcgtatcctgtgatgaaccgttagtgccggggcagaaagttgaatt

SEQ ID NO: 707336 - DNA, 75 bp, synthetic construct
  source 1..75: mol_type = other DNA
atgatcaaagagtgggctaccgtcgtctcctggcaaaacgggcaggcgctggtcagttgtgatgttaaagcttca

SEQ ID NO: 707337 - DNA, 75 bp, synthetic construct
  source 1..75: mol_type = other DNA
ttcgtgaacagttcggtgacaaacgtcgtaccgaaatcaccgctaacagcgccgacatcaacctggaagatctga

SEQ ID NO: 707338 - DNA, 75 bp, synthetic construct
  source 1..75: mol_type = other DNA
gtgagtaagattgactatcaggcattgcgtgaggcagcacaaaactatcaatcgacgctggcgtggtatcaggaa

SEQ ID NO: 707339 - DNA, 75 bp, synthetic construct
  source 1..75: mol_type = other DNA
cagatatccaggcgaatcaggagcggtttagagagcttgtaagccgctaccctaccctttacgcgctgtgggatt

SEQ ID NO: 707340 - DNA, 75 bp, synthetic construct
  source 1..75: mol_type = other DNA
atgagcgaagtaatcatgattgtctatcccggtaaatgggtatccgaagagcaactaattgcactgaaaggaata

SEQ ID NO: 707341 - DNA, 75 bp, synthetic construct
  source 1..75: mol_type = other DNA
aacagtccatgcttttacaacctggaagaaattgatcgctggattgagcgcaggcatctgcaagaccaagacgtc

SEQ ID NO: 707342 - DNA, 75 bp, synthetic construct
  source 1..75: mol_type = other DNA
gcttttacaacctggaagaaattgaccgctggattgagcgccaggcatcggcaagaccaagacgccatcttactt

SEQ ID NO: 707343 - DNA, 75 bp, synthetic construct
  source 1..75: mol_type = other DNA
atgaacagtattcattatcaggcactgcgtgaggcagcgcaaaactatcagtcgatgctggcgtggtatgaagct

SEQ ID NO: 707344 - DNA, 75 bp, synthetic construct
  source 1..75: mol_type = other DNA
accttcgaatacgaagatatcccggcagacatggttgaactggctaacgaatggcaccagaacctgatcgaatcc

SEQ ID NO: 707345 - DNA, 75 bp, synthetic construct
  source 1..75: mol_type = other DNA
atttaggcactgttgaaccagattttgaaaataatgtcctgtatggaaaactggcgtttattcgggacctggtaa

SEQ ID NO: 707346 - DNA, 75 bp, synthetic construct
  source 1..75: mol_type = other DNA
aaaccgttacgttcggtaaccttgatggagataacccctttcgtcgcacgcgacttagtcgggtattccgccact

SEQ ID NO: 707347 - DNA, 75 bp, synthetic construct
  source 1..75: mol_type = other DNA
cataccagtatcgagttagtttataaaatctgtgctttccttccacttcttggtatgttgaccatattcttgcct

SEQ ID NO: 707348 - DNA, 75 bp, synthetic construct
  source 1..75: mol_type = other DNA
atatcctgcgacagtacaaagccctgattaatgcccgccgccgcgatgccggtcagcgggaactgaccactgcgc

SEQ ID NO: 707349 - DNA, 75 bp, synthetic construct
  source 1..75: mol_type = other DNA
gaagtatcctgtaaattacagaaatctgtctcagacacactaacatcattactccgtgaaaaattatctttcaca

SEQ ID NO: 707350 - DNA, 75 bp, synthetic construct
  source 1..75: mol_type = other DNA
agcgcgggacgtcacaagaacatgctaacctggctaaccagtcggtcacatatgccagggcttatcctgaagtgg

SEQ ID NO: 707351 - DNA, 75 bp, synthetic construct
  source 1..75: mol_type = other DNA
tccacgcggtgtcggaatgggcatgggttacggtggctgcggaggtggtggcggccatatgggtatgggccactg

SEQ ID NO: 707352 - DNA, 75 bp, synthetic construct
  source 1..75: mol_type = other DNA
tccgcgcggtaccggaatgggcatgggttacggtggttgcgatggtggcggtcatatgggtatgggccactggta

SEQ ID NO: 707353 - DNA, 75 bp, synthetic construct
  source 1..75: mol_type = other DNA
gcgaagtggtgacccgtcgtaccattttcgaactgcgtaaagcccgcgatcgtgctcatattcttgaagcattag

SEQ ID NO: 707354 - DNA, 75 bp, synthetic construct
  source 1..75: mol_type = other DNA
ttcgtgaacagttcggtgacaaacgtcgtactgaaatcaccgccaacagcgccgacatcaacctggaagatctga

SEQ ID NO: 707355 - DNA, 75 bp, synthetic construct
  source 1..75: mol_type = other DNA
tccgatcgtcaacctgctgccgctggagcaggacgaacgtatcaccgcgatcctgccggtgaccgagtttgaaga

SEQ ID NO: 707356 - DNA, 75 bp, synthetic construct
  source 1..75: mol_type = other DNA
agcggtttagagagcttgtaagcaaataccctaccctttacagcctttgggattgggaaagtcgagaaatacggc

SEQ ID NO: 707357 - DNA, 75 bp, synthetic construct
  source 1..75: mol_type = other DNA
ctctgatcgtgccgcgcggcgatggcgcaatccttactgcaacgcagaacggttacggtaaacgtaccgcggtgg

SEQ ID NO: 707358 - DNA, 75 bp, synthetic construct
  source 1..75: mol_type = other DNA
ctctgatcgtaccgcgtggcgatggcgcaatccttactgcaacacaaaacggttacggtaaacgtactgcggtgg

SEQ ID NO: 707359 - DNA, 75 bp, synthetic construct
  source 1..75: mol_type = other DNA
gtgaaatgcgtcgctatatcattaccatgatcgacgaacgtgaatttggcaaaaaattacaggcaggcagaaaaa

SEQ ID NO: 707360 - DNA, 75 bp, synthetic construct
  source 1..75: mol_type = other DNA
cgctcactgctctggcaggacttgccactgcagcagatcggttgccttattttaccggagcagaccgcgcagcgc

SEQ ID NO: 707361 - DNA, 75 bp, synthetic construct
  source 1..75: mol_type = other DNA
cacaccgccagcaggctggttaaagtgcgacgggcgcgcctttacaaaagaacaatatcctgttctggccagagt

SEQ ID NO: 707362 - DNA, 75 bp, synthetic construct
  source 1..75: mol_type = other DNA
aagctgggcaaacatgtggtcgttgtcggggcgggtaacaccgcaatggactgcgctcgtgcggcgttacgcgtt

SEQ ID NO: 707363 - DNA, 75 bp, synthetic construct
  source 1..75: mol_type = other DNA
gcttccactatgttctgattgccaccggcactgataaaaatagcggtgtgaaactggcgggcgacaaccaaaatg

SEQ ID NO: 707364 - DNA, 75 bp, synthetic construct
  source 1..75: mol_type = other DNA
ttgcgcgtcatgtcacttggcgaacctgatgagaaaggtcgccgccgtccggttgaaaccaacgaaacggtaacg

SEQ ID NO: 707365 - DNA, 75 bp, synthetic construct
  source 1..75: mol_type = other DNA
accaaaagcggtcaaggctgcatacgaccttgcagccggcaaggcgccaggcagccacactcacccgtggagtca

SEQ ID NO: 707366 - DNA, 75 bp, synthetic construct
  source 1..75: mol_type = other DNA
ttgtcgcggctatgttaaggaagaagataaagaaaaatgtgatgatgccggtaagttagttaggtatttccaatc

SEQ ID NO: 707367 - DNA, 75 bp, synthetic construct
  source 1..75: mol_type = other DNA
tcaggcgttatcgtcacctaattctcctgtaaagcctgttattgtcccaaaacagctgataatggataaaaaata

SEQ ID NO: 707368 - DNA, 75 bp, synthetic construct
  source 1..75: mol_type = other DNA
ggtacaagtttttctcattacgcaggtaattttgacattgggtctggtcattcaatcaataactatgaccaaatc

SEQ ID NO: 707369 - DNA, 75 bp, synthetic construct
  source 1..75: mol_type = other DNA
accaaaagcggtcaaggctgcatacgacctggcagccggcaaggcgccagtcagccacactcacccgtggagtca

SEQ ID NO: 707370 - DNA, 75 bp, synthetic construct
  source 1..75: mol_type = other DNA
accaaaagcggtcaaggctgcatacgacctcgcagccggcaaggcgcctgccagccacactcacccgtggagtca

SEQ ID NO: 707371 - DNA, 75 bp, synthetic construct
  source 1..75: mol_type = other DNA
atacgctgaataaactcctcctcgatgacgcatttttagcccgtcacggattacaagaaaaacgtgaaagcttgc

SEQ ID NO: 707372 - DNA, 75 bp, synthetic construct
  source 1..75: mol_type = other DNA
tgtgctacccccgtcggcccagccgccggaccgcacacacagctcgcacaaaacatcgtcacctcctggctgacc

SEQ ID NO: 707373 - DNA, 75 bp, synthetic construct
  source 1..75: mol_type = other DNA
aactgttagcgtcttcggtgaaacctgtgccactcccgtcggccctgccgctggcccgcacacgcaactcgcgca

SEQ ID NO: 707374 - DNA, 75 bp, synthetic construct
  source 1..75: mol_type = other DNA
cgtcgaacgactgaacaaactggcagcagacgcgttaaccatggaatacacccagaaacactggaagccagaaga

SEQ ID NO: 707375 - DNA, 75 bp, synthetic construct
  source 1..75: mol_type = other DNA
caatggtggtttatcgccttgccgtatgaagaaaaatggaaacgtaagcgtaaaccgatcgccgtatgtagccat

SEQ ID NO: 707376 - DNA, 75 bp, synthetic construct
  source 1..75: mol_type = other DNA
tatactggtgatccccgtatttctggttttatcaggattgttgagtgcagggtatcccgggttattatgtattac

SEQ ID NO: 707377 - DNA, 75 bp, synthetic construct
  source 1..75: mol_type = other DNA
tttgtttgtcgcgatggacggttggacaatgttatcaaaagggctcattttacaatattttgacctatccattaa

SEQ ID NO: 707378 - DNA, 75 bp, synthetic construct
  source 1..75: mol_type = other DNA
atggcgctggcaaaagaaaaatcactcggctttggcgtcaaactgactaacactctcggcaccatcaataacaaa

SEQ ID NO: 707379 - DNA, 75 bp, synthetic construct
  source 1..75: mol_type = other DNA
atacgcttaataagctgctccaggatgacacatttttaacccgccacggattgcaggaaaaacgcgaaagcttgc

SEQ ID NO: 707380 - DNA, 75 bp, synthetic construct
  source 1..75: mol_type = other DNA
tgacgcatttttagcccaccacggattgcaggaaaaacgcgaaagcttgcaagccttacccgctcgcatccccac

SEQ ID NO: 707381 - DNA, 75 bp, synthetic construct
  source 1..75: mol_type = other DNA
accgtcgaacagttaaaaaatcagggcttccactatgttctgattgccaccggcaccgataaaaacagcggtgtg

SEQ ID NO: 707382 - DNA, 75 bp, synthetic construct
  source 1..75: mol_type = other DNA
tcaggaagccgcacgctgccttgaatgtaactatgtttgcagcaagtgtgtagatgtttgcccgaaccgcgccaa

SEQ ID NO: 707383 - DNA, 75 bp, synthetic construct
  source 1..75: mol_type = other DNA
ctgtcccgtgcctttgacggcaaactgccaatttcttattccggtggtgccagccagctgactatccgcgatatt

SEQ ID NO: 707384 - DNA, 75 bp, synthetic construct
  source 1..75: mol_type = other DNA
taaccgcgcaagatatggcgggtgttaatgcggcaattctcgagcagcttaattccgacgtccaactgatcaatc

SEQ ID NO: 707385 - DNA, 75 bp, synthetic construct
  source 1..75: mol_type = other DNA
ggttacctgcgtgcttctgaagcatctcgtgaccgcgttgaagacgctaccttggttctgagcgttggcgacgaa

SEQ ID NO: 707386 - DNA, 75 bp, synthetic construct
  source 1..75: mol_type = other DNA
cccgtgaccgcgttgaagacgctaccctggttctgagtgttggcgacgaagttgaagctaaattcaccggcgttg

SEQ ID NO: 707387 - DNA, 75 bp, synthetic construct
  source 1..75: mol_type = other DNA
aacgtcggggacgatctgaacgaaggtaaaccgacgctgccgctgctacatgcgatgcataatggtacaccggag

SEQ ID NO: 707388 - DNA, 75 bp, synthetic construct
  source 1..75: mol_type = other DNA
tgatgtcagaagcagtcaacgtcatcgcagaaggtgaagttctgcaacttatgaacgttaatgacccggatatca

SEQ ID NO: 707389 - DNA, 75 bp, synthetic construct
  source 1..75: mol_type = other DNA
taatgcggcaatccttgagcagcttaattccgacgtccaactgatcaatcagttaggctattacatcgtcagcgg

SEQ ID NO: 707390 - DNA, 75 bp, synthetic construct
  source 1..75: mol_type = other DNA
atgcagcaggtgaaagcgtggcttgaacaggccgtgaagggctacagtatccgtctgaccaatgagccggtgctg

SEQ ID NO: 707391 - DNA, 75 bp, synthetic construct
  source 1..75: mol_type = other DNA
atgctgccctgcgtgacacctgtagtgcgttggtcagggcaatgaaactcaatatactggtccttaataatccgc

SEQ ID NO: 707392 - DNA, 75 bp, synthetic construct
  source 1..75: mol_type = other DNA
atgactcataccgatgttattcccgactaccttaaacctgcaatggaacggcttgagacggccagagaggaacat

SEQ ID NO: 707393 - DNA, 75 bp, synthetic construct
  source 1..75: mol_type = other DNA
tgacactctgcacctggaaggcaaggagcttgaatttaaagtaatcaagctggatcagaagcgcaacaacgttgt

SEQ ID NO: 707394 - DNA, 75 bp, synthetic construct
  source 1..75: mol_type = other DNA
ccggtgttatcaacggcaaagttaagggcggcttcactgttgagctgaacggaattcgtgcgttcctgccaggtt

SEQ ID NO: 707395 - DNA, 75 bp, synthetic construct
  source 1..75: mol_type = other DNA
attggatgaacaaagaatatttttaaacaagagacttattaagattcatagagtaacaagaaatacaaatgttat

SEQ ID NO: 707396 - DNA, 75 bp, synthetic construct
  source 1..75: mol_type = other DNA
ttcacaaaaccggagtccggctccggtttttgttgtcatgtccggggaatatttgttagataaaaaagaggagat

SEQ ID NO: 707397 - DNA, 75 bp, synthetic construct
  source 1..75: mol_type = other DNA
atcgatggaaagataaacgctttatttcttgacgggtgcggcgtcggcctgttgacagatttgcgagcgctcggg

SEQ ID NO: 707398 - DNA, 75 bp, synthetic construct
  source 1..75: mol_type = other DNA
acttatcggcaccgtgggaaccgcgcaaaaagcgcagagtgcgctaaaagcgggcgcatggcaggttattaacta

SEQ ID NO: 707399 - DNA, 75 bp, synthetic construct
  source 1..75: mol_type = other DNA
ttggggcgaaacttatcggcaccgtgggaatcgcgcaaaaagcgcagagtgcgctaaaagcgggcgcatggcagg

SEQ ID NO: 707400 - DNA, 75 bp, synthetic construct
  source 1..75: mol_type = other DNA
agttatcactggctatcaacgccatgaactggtagggcagccttactccatgttgttcgacaatactcagttcta

SEQ ID NO: 707401 - DNA, 75 bp, synthetic construct
  source 1..75: mol_type = other DNA
attcaacgacatggctggcagggaaccgaagaaggtaaacataccggcaacatggcggatgaaccggaaacgaaa

SEQ ID NO: 707402 - DNA, 75 bp, synthetic construct
  source 1..75: mol_type = other DNA
caatggaaccgtttgtgaagagaacagcgtctacctatggataccctgatgataaaaataaagaaatcgtctctg

SEQ ID NO: 707403 - DNA, 75 bp, synthetic construct
  source 1..75: mol_type = other DNA
gtgcggatgaaggtaaaacgcttgttactgaatctggtatgccggtgacagacttacttccttttgatgattatt

SEQ ID NO: 707404 - DNA, 75 bp, synthetic construct
  source 1..75: mol_type = other DNA
tttgatgttgtcggccagttttacggggagtttctgaagtatactgccggagataaaaaggcattaggtattgtt

SEQ ID NO: 707405 - DNA, 75 bp, synthetic construct
  source 1..75: mol_type = other DNA
taaaggcagaaccgatttatataaccggtggccatcgatacgggatcggtgggttgaaatgtatcgcaacaggga

SEQ ID NO: 707406 - DNA, 75 bp, synthetic construct
  source 1..75: mol_type = other DNA
tcgcgacgaaaatctggtcgagcgattaaaagagatcaccgacggcaagaaagtgcgcgtggtgtacgattccgt

SEQ ID NO: 707407 - DNA, 75 bp, synthetic construct
  source 1..75: mol_type = other DNA
aagtgcgcgtggtgtacgattccgtgggcagagacacctgggaacggtcgctggattgcctgcaacgccgcggct

SEQ ID NO: 707408 - DNA, 75 bp, synthetic construct
  source 1..75: mol_type = other DNA
gcggcgcgggtaaaagcaccctgctaaatttgatcgccggttttctgacgccagccagcggtttgctgactctcg

SEQ ID NO: 707409 - DNA, 75 bp, synthetic construct
  source 1..75: mol_type = other DNA
cgcgctggtcagggcaatgaaactcaacatactggtgctgaataacccgcttgccaatactaccggacatcaggg

SEQ ID NO: 707410 - DNA, 75 bp, synthetic construct
  source 1..75: mol_type = other DNA
gtcatgctttcgaacttgccgatcagcttggtttaaaacatccagattgtatcgagcatgtatttccaacttatg

SEQ ID NO: 707411 - DNA, 75 bp, synthetic construct
  source 1..75: mol_type = other DNA
atgaacagaactaatggcgaaccagagacagaaacagacgtgatggccaccgctttcagcaccatgcgcaagtac

SEQ ID NO: 707412 - DNA, 75 bp, synthetic construct
  source 1..75: mol_type = other DNA
acccgccagccacttaagcttaaggggctggccttcaaagaactgttccaatggttgtccagttcccttagtgct

SEQ ID NO: 707413 - DNA, 75 bp, synthetic construct
  source 1..75: mol_type = other DNA
ttgagtgtgacatcgaccgcgtgcgcgccattcgtaaaagtcggctggtggaagtggcagaagggcagcctgcgc

SEQ ID NO: 707414 - DNA, 75 bp, synthetic construct
  source 1..75: mol_type = other DNA
ttttctctgcggcaccgggcaaaaggcatttattgcagaactgatgccgaaacatccgatctatacccacttttt

SEQ ID NO: 707415 - DNA, 75 bp, synthetic construct
  source 1..75: mol_type = other DNA
tgaaatgttccccgacctccctgccataggaggtgttggttatcaattcctctacaaaggtgatacgttacgcat

SEQ ID NO: 707416 - DNA, 75 bp, synthetic construct
  source 1..75: mol_type = other DNA
gccgaggttctgaaaggcaatccggatgaaaaagtgatgaatgaattacgccggctggctcgcaactatggcaca

SEQ ID NO: 707417 - DNA, 75 bp, synthetic construct
  source 1..75: mol_type = other DNA
cgaagcggcggcgcgtgctgcctatctaaaagctaaagccagataccatccctcaacgccagccgatttgttgca

SEQ ID NO: 707418 - DNA, 75 bp, synthetic construct
  source 1..75: mol_type = other DNA
gtacgagaacagggaagcggtttcacctgtggagcagtctgaactgcctatggctatttctgcgctctggtcggt

SEQ ID NO: 707419 - DNA, 75 bp, synthetic construct
  source 1..75: mol_type = other DNA
cgaattgcccgatccctatgacggtttgattcctgggcaggagagtctgaaggttcacgcctgcgttggtctgcc

SEQ ID NO: 707420 - DNA, 75 bp, synthetic construct
  source 1..75: mol_type = other DNA
gacgggatgcagcccgatcagttcgatgttttcagcgacgaagagttacgcctgattgctgcgctggcggcggga

SEQ ID NO: 707421 - DNA, 75 bp, synthetic construct
  source 1..75: mol_type = other DNA
cagcccgatcagttcgatgttttcagcgacgaagagttacggctgattgccgcgctggcggcgggagcgttaagc

SEQ ID NO: 707422 - DNA, 75 bp, synthetic construct
  source 1..75: mol_type = other DNA
cgccatccgcaaaagtcggctggtggaagtagcggaagggcagccagcgcagggggatttcccggcctgtctggt

SEQ ID NO: 707423 - DNA, 75 bp, synthetic construct
  source 1..75: mol_type = other DNA
aatagcggaacgctttccggtgatcaaattacggtatcaagcggtcttctggaaaataccagcggtggcatcatc

SEQ ID NO: 707424 - DNA, 75 bp, synthetic construct
  source 1..75: mol_type = other DNA
tactggtgaaaatacaacaggtataaatagtggcacgatctcgttattacaaaatggtaaagatccggcaccgtc

SEQ ID NO: 707425 - DNA, 75 bp, synthetic construct
  source 1..75: mol_type = other DNA
gagagcactatcaccaatggcggcaccggcactcagatcaacggtaacgacgccaccgcgaataacagtggaaaa

SEQ ID NO: 707426 - DNA, 75 bp, synthetic construct
  source 1..75: mol_type = other DNA
aagggcaccatgaccgtcaccgatccggagtccatgggtatccagattgacggcgacaaggccatcgtcaataac

SEQ ID NO: 707427 - DNA, 75 bp, synthetic construct
  source 1..75: mol_type = other DNA
ggcaatataatcataaaggtgagcttgttattacgggtgataatgccacagtaaacaacaatggcaaaaccaccg

SEQ ID NO: 707428 - DNA, 75 bp, synthetic construct
  source 1..75: mol_type = other DNA
gacggggcgattatgagaggtgctgcgctgacaggtactgcagtggcaaataacgaaggaacctggaacctcgga

SEQ ID NO: 707429 - DNA, 75 bp, synthetic construct
  source 1..75: mol_type = other DNA
acttctcttgcggacctcgtcgaagcgaccggagccaaagcgcccacgctatacgcggaatttaccaacaaagag

SEQ ID NO: 707430 - DNA, 75 bp, synthetic construct
  source 1..75: mol_type = other DNA
aggcaccgtggcggggatttgcgccattgaggtggcggttgggctgaacgatccctggtacaactatcgcgtcgg

SEQ ID NO: 707431 - DNA, 75 bp, synthetic construct
  source 1..75: mol_type = other DNA
ggctatcaaaacctggcagggcgaactgcccaaaagtgagcagggttatgtgtttgtactggaagagagcgaaac

SEQ ID NO: 707432 - DNA, 75 bp, synthetic construct
  source 1..75: mol_type = other DNA
cattcaggaacttggcggaaccatgcctgaagagttgccgaccccgcaggtcagcatcaagcagttggaaaacag

SEQ ID NO: 707433 - DNA, 75 bp, synthetic construct
  source 1..75: mol_type = other DNA
tctctttcgagctacccaaacagaagaaaaactcaagcgggatggcgtgaattcaaaacagcaagctaacaccac

SEQ ID NO: 707434 - DNA, 75 bp, synthetic construct
  source 1..75: mol_type = other DNA
gtcaacatcaagcagttggaaaacagtgtaaaaattacagagaagaaatagcagaaactaaaaactctttttgtt

SEQ ID NO: 707435 - DNA, 75 bp, synthetic construct
  source 1..75: mol_type = other DNA
tcgtgactattccggtggttggcgtggcgctattccagtttggcgcaggcaccgagttctggagttgcttcgcgg

SEQ ID NO: 707436 - DNA, 75 bp, synthetic construct
  source 1..75: mol_type = other DNA
acgcctacgttctggaacatcagcagacggtcggcgctcttgtcgatgccctggaggaggtaaaacttccgggtg

SEQ ID NO: 707437 - DNA, 75 bp, synthetic construct
  source 1..75: mol_type = other DNA
atgttgcgtcgttctcttatttttctggtgttgttgagtgcgggatgtgtctcgctcgatccccactacagcacg

SEQ ID NO: 707438 - DNA, 75 bp, synthetic construct
  source 1..75: mol_type = other DNA
tgggaacacgatcttcatgccgcaatgaacaacattcaggaagagatcgaattagtcggtgagaatgcggcgagc

SEQ ID NO: 707439 - DNA, 75 bp, synthetic construct
  source 1..75: mol_type = other DNA
ccccttttaacgggtctgacggaacaggaacaaagcaaattagtcactcttgccgaacgttttttacagcaaaag

SEQ ID NO: 707440 - DNA, 75 bp, synthetic construct
  source 1..75: mol_type = other DNA
gtgccggaagatgaactgtcgaaaacgcgtatgacccttgccgcgaaaggcgtgcaggcgatattgcccagcggc

SEQ ID NO: 707441 - DNA, 75 bp, synthetic construct
  source 1..75: mol_type = other DNA
tgtggaaagatgacagcgtgctggcctgggtgcggctgattggctgcggcctgctggcgctgttgttgctgttct

SEQ ID NO: 707442 - DNA, 75 bp, synthetic construct
  source 1..75: mol_type = other DNA
cagcgtgctgtggaccggcaatcgcggctacgtctcgctctacggccgccaggaaaacctgcccgtttcgcagat

SEQ ID NO: 707443 - DNA, 75 bp, synthetic construct
  source 1..75: mol_type = other DNA
gagcaggtggcgatcctcgggccaagcggcgcgggtaaaagtaccctgctgaatttgatcgccggttttctgacg

SEQ ID NO: 707444 - DNA, 75 bp, synthetic construct
  source 1..75: mol_type = other DNA
atgttaaaactgactgatatcacctggctttaccaccatttgccgatgcgttttagcttaacggtagaacgcggc

SEQ ID NO: 707445 - DNA, 75 bp, synthetic construct
  source 1..75: mol_type = other DNA
ggggattgataatttaatggcgcggttaccgggcgagctttccggcggtcagcgacagcgcgtggcgttagcgcg

SEQ ID NO: 707446 - DNA, 75 bp, synthetic construct
  source 1..75: mol_type = other DNA
gacgctggctgccgataacagcaatctggcgctggcaaaagatacgatggccagtgcagagcactcgctgaaaat

SEQ ID NO: 707447 - DNA, 75 bp, synthetic construct
  source 1..75: mol_type = other DNA
tcaaacaatgacactttccaaaaagaaaaatataaacttatttctcttttttctggttgtggcgggatggactta

SEQ ID NO: 707448 - DNA, 75 bp, synthetic construct
  source 1..75: mol_type = other DNA
gtcggaagaaaccaccacggcaacagtcgctaaaatttcggagtgcgatttaactgcgacggttgaacaacgcgg

SEQ ID NO: 707449 - DNA, 75 bp, synthetic construct
  source 1..75: mol_type = other DNA
tctgttgccattggtggcggcgttgggctaatcggggtcgatgctattcgtggggctgcaatgagagtaatcggt

SEQ ID NO: 707450 - DNA, 75 bp, synthetic construct
  source 1..75: mol_type = other DNA
ccggattattaaactgtggggcataccgacggattgccatcgtctcggcagatatcgcttcacgcggtattgact

SEQ ID NO: 707451 - DNA, 75 bp, synthetic construct
  source 1..75: mol_type = other DNA
gcatcgctggcatcacgaaatgcgcccgctgtgggcggtacatgtggtgcatcatcagggggaacattataacct

SEQ ID NO: 707452 - DNA, 75 bp, synthetic construct
  source 1..75: mol_type = other DNA
tcctgatggtgttatttgtgttagccgaagcaggcgtgttgcaatttaccggacggcaaaaaattgactggctgg

SEQ ID NO: 707453 - DNA, 75 bp, synthetic construct
  source 1..75: mol_type = other DNA
atcctgctgctggacgatggtcgcgtacagttaaaagtactggaagttcagggcatgaaagtgttcaccgaagtc

SEQ ID NO: 707454 - DNA, 75 bp, synthetic construct
  source 1..75: mol_type = other DNA
tctatgggcaaactaatgcgtcgttattcccgacggtgaatgcggccttaagttcgacccgcagtcgttcgctgg

SEQ ID NO: 707455 - DNA, 75 bp, synthetic construct
  source 1..75: mol_type = other DNA
gcactgcaactgactgattttacaaaccgaatcacgctctggcagtcgctgggcggcggcatgtcatcactcaag

SEQ ID NO: 707456 - DNA, 75 bp, synthetic construct
  source 1..75: mol_type = other DNA
cggactggctggagttgtttcagagctggtggcgtggagacacaccgctgggtgcagtgattatgtcgatcgtta

SEQ ID NO: 707457 - DNA, 75 bp, synthetic construct
  source 1..75: mol_type = other DNA
atcaattgcgtgaacgcgggatctgcgtggtcttcgtcagtcatcgtctggaagaagtgatggaagtttccgacc

SEQ ID NO: 707458 - DNA, 75 bp, synthetic construct
  source 1..75: mol_type = other DNA
cccagatgatggagtcaatgattactaacccgatgccgacgcgtgcagaagtcatggacgtagcaaacgccgttc

SEQ ID NO: 707459 - DNA, 75 bp, synthetic construct
  source 1..75: mol_type = other DNA
ctttgtgccgcaggcggtgcctgtcgaaccggttattccactttggaaagatgacagtgtactggcgtgggtgcg

SEQ ID NO: 707460 - DNA, 75 bp, synthetic construct
  source 1..75: mol_type = other DNA
aaggaaaaactatcctgagttacatttacaaggtaaaatgaatcgcattacacggttaaaaaatagagatagtag

SEQ ID NO: 707461 - DNA, 75 bp, synthetic construct
  source 1..75: mol_type = other DNA
gcgccctggcggaagcgatggctcgctggcaggcagcgcaggtgagcgcgataatcacgctcaccccactgttta

SEQ ID NO: 707462 - DNA, 75 bp, synthetic construct
  source 1..75: mol_type = other DNA
cgatgagcgtcaacacctgtcgccaatttcagattcagaacgagaagaagctcgagaatatatcatcgcgatact

SEQ ID NO: 707463 - DNA, 75 bp, synthetic construct
  source 1..75: mol_type = other DNA
tattgtcagtccgatgaccggttatgtctcccgtaacgctcggtcgctgggactgcggcgagcggacgatacaat

SEQ ID NO: 707464 - DNA, 75 bp, synthetic construct
  source 1..75: mol_type = other DNA
ggaatcagattcaaattatgtctcaggtgtctggcagcgtgacgaaagtctgggccgataacaccgattttgtaa

SEQ ID NO: 707465 - DNA, 75 bp, synthetic construct
  source 1..75: mol_type = other DNA
gttgaagcgtttaaactcggttacgaagtgaccgatccagaagagctggaagttgaagatggtgatatcgtgatt

SEQ ID NO: 707466 - DNA, 75 bp, synthetic construct
  source 1..75: mol_type = other DNA
gatggcaggcgtggcgcatgaagtacgtaatccgctgacggctatccgtggttatgtgcagatcctacgccaaca

SEQ ID NO: 707467 - DNA, 75 bp, synthetic construct
  source 1..75: mol_type = other DNA
aacgcctcgccacactgggtgagctgatggctggcgtcgcgcatgaagtacgtaatccgctcacggctattcgtg

SEQ ID NO: 707468 - DNA, 75 bp, synthetic construct
  source 1..75: mol_type = other DNA
aacaacctcgcccaggcactgcgtgaaacgcggacacttaacgatctgattattgaaaacgctgccgatggcgtc

SEQ ID NO: 707469 - DNA, 75 bp, synthetic construct
  source 1..75: mol_type = other DNA
gatggttcaggtttcagccgggggagattgatgccctcgatactgacgatctggagatgtggctggagcaggctg

SEQ ID NO: 707470 - DNA, 75 bp, synthetic construct
  source 1..75: mol_type = other DNA
ctcccgtcgcctgagcgccaatattgatatcatcaccgatggcctctcgactctggcacaaaatattcccactcg

SEQ ID NO: 707471 - DNA, 75 bp, synthetic construct
  source 1..75: mol_type = other DNA
agtcgtattcataacacgcatggtgaaatgataggtgctttggtgattttctctgatttaactgcccgcaaagaa

SEQ ID NO: 707472 - DNA, 75 bp, synthetic construct
  source 1..75: mol_type = other DNA
ccggtaactggatcaaagtcgttcagcgtctgcctgtgcgtattgaactggaccagaaacagctggagcaatacc

SEQ ID NO: 707473 - DNA, 75 bp, synthetic construct
  source 1..75: mol_type = other DNA
agcgacaccgatcgcgtagccgaagttctcagacaatggatcaccagcaatgagcgaattgacaacaaatatgag

SEQ ID NO: 707474 - DNA, 75 bp, synthetic construct
  source 1..75: mol_type = other DNA
gaaccggaagccgtcagtgaaccgtggattgccatgccggaagaggagcgcaaaaaacgtcgacctgccgtcgct

SEQ ID NO: 707475 - DNA, 75 bp, synthetic construct
  source 1..75: mol_type = other DNA
ttatttcaacattgacttcttcgtggctcctgaagtcctgatggaaggtggaaggtgcgcaacaacggaaagtca

SEQ ID NO: 707476 - DNA, 75 bp, synthetic construct
  source 1..75: mol_type = other DNA
aggaacactacggcgacgcgccgaaaataaaccgcgaagagagcgtgctggacagcgacaccaatcaggtggcga

SEQ ID NO: 707477 - DNA, 75 bp, synthetic construct
  source 1..75: mol_type = other DNA
acaatctcaccttatcactgctcaactttgtgccgcaggcggtgcctgtcgaaccggttattccactgtggaaag

SEQ ID NO: 707478 - DNA, 75 bp, synthetic construct
  source 1..75: mol_type = other DNA
gtggtcagcgatgtgccgcaaaacagcgcctcggtggtagtacgcctgcactatggcgcgaagctgaatatggac

SEQ ID NO: 707479 - DNA, 75 bp, synthetic construct
  source 1..75: mol_type = other DNA
gtccggttgtttatcgcacggggataattattattcagttatttgttcccgcaggctctggctcaaaacttatta

SEQ ID NO: 707480 - DNA, 75 bp, synthetic construct
  source 1..75: mol_type = other DNA
tattgcgcccgatgccagcaacgcgcaggtcacgctgaatatccctgctcaacaggtggtgacgaataacagtga

SEQ ID NO: 707481 - DNA, 75 bp, synthetic construct
  source 1..75: mol_type = other DNA
aatacaccggtaaagtggtcggtctggatatgggtacgggtagcgcgttctcgctgcttccggcgcaaaacgcca

SEQ ID NO: 707482 - DNA, 75 bp, synthetic construct
  source 1..75: mol_type = other DNA
aaatatctcggctacgccgatgaacacagcgcagaacctgatcaggtgatcctcatcgaagcaggtcaattcgca

SEQ ID NO: 707483 - DNA, 75 bp, synthetic construct
  source 1..75: mol_type = other DNA
gttatccgttatgcatggggcggtcaaatatctcggttatgccgatgagcacagcgcagagcccgatcaggtgat

SEQ ID NO: 707484 - DNA, 75 bp, synthetic construct
  source 1..75: mol_type = other DNA
gctaagaagtttgcctttttcaccattggtgttcagggggctgatatgaagaccctggcacaaatcagcgtccgc

SEQ ID NO: 707485 - DNA, 75 bp, synthetic construct
  source 1..75: mol_type = other DNA
aggccacaatacggcgaaggtttctacagcgcttatgttagagaccccgatggcaacaagctggctttcgtctat

SEQ ID NO: 707486 - DNA, 75 bp, synthetic construct
  source 1..75: mol_type = other DNA
ctaagggaaatattcggtaaatgttggaagctgttacctgaaaattcagagcaacggcagaaagcgcaagatgta

SEQ ID NO: 707487 - DNA, 75 bp, synthetic construct
  source 1..75: mol_type = other DNA
ccagggaggaagaaagcaagaagggaatggacgcaagccagttaacaggagcaacatcaagttacgcgcgtaaat

SEQ ID NO: 707488 - DNA, 75 bp, synthetic construct
  source 1..75: mol_type = other DNA
tattgcctaaggattcagaacaacaacagaaagcgaaagacgtttatgacattcgcttaaaagagcttaacgggg

SEQ ID NO: 707489 - DNA, 75 bp, synthetic construct
  source 1..75: mol_type = other DNA
ccacgacggcagaatggtccttaacgatggcgataacggagaagatattccctatagctatcaacgggaaggttt

SEQ ID NO: 707490 - DNA, 75 bp, synthetic construct
  source 1..75: mol_type = other DNA
tgggctatcgattgtccagcgaatcgccaagctgcatgacatgaatgttgagtttgggaatgcggaacaaggtgg

SEQ ID NO: 707491 - DNA, 75 bp, synthetic construct
  source 1..75: mol_type = other DNA
cctgactcggaaaaaccactaaacgcgactggcgtacccagcgaagtgcgtccgttggttgagtcgctaaatcaa

SEQ ID NO: 707492 - DNA, 75 bp, synthetic construct
  source 1..75: mol_type = other DNA
acgcgctgaaaaaacgcatctccccagaggatataagaaagaaaaaacgcgaatctgttattgatgcattaaaaa

SEQ ID NO: 707493 - DNA, 75 bp, synthetic construct
  source 1..75: mol_type = other DNA
gtcagcgtagcatttggcgagaagggcattgaactggatacggccctgccggggacagtaaaacaagcgttgcat

SEQ ID NO: 707494 - DNA, 75 bp, synthetic construct
  source 1..75: mol_type = other DNA
aacaaaattcattttaggtgttcagatacccttttttatgccccaccagaaacctttgatttcctcagggacatt

SEQ ID NO: 707495 - DNA, 75 bp, synthetic construct
  source 1..75: mol_type = other DNA
gatgcttacgcgaaacagacaaatcaacagccgcgacagcagaaaaacccgccaaaacaacagcagcagaaagcg

SEQ ID NO: 707496 - DNA, 75 bp, synthetic construct
  source 1..75: mol_type = other DNA
ttggtgatcggtattacgtgaaagccacggcaactattaccgatggcgaaaacagccatacggcaaccgctcttg

SEQ ID NO: 707497 - DNA, 75 bp, synthetic construct
  source 1..75: mol_type = other DNA
agtaaattttttgagggagaaaaagacgatctcgaaacggtcgatgtcgtcttgcgcccaaaagtttattttcgg

SEQ ID NO: 707498 - DNA, 75 bp, synthetic construct
  source 1..75: mol_type = other DNA
ggcgctggcgctacgtatgcgcgatcctgactcggaaaaaccgctcaacgctgacggtgtacccaacgaagtgcg

SEQ ID NO: 707499 - DNA, 75 bp, synthetic construct
  source 1..75: mol_type = other DNA
actattgcgttgccgcaggtgcgtagaaattacccttatgagggggttgtggagtggcatcggaaagaggttttt

SEQ ID NO: 707500 - DNA, 75 bp, synthetic construct
  source 1..75: mol_type = other DNA
taaacggtagagggatcgttgagagattattctgggattttgatgggaaaactattacgttgccacatgtgtgta

SEQ ID NO: 707501 - DNA, 75 bp, synthetic construct
  source 1..75: mol_type = other DNA
attattgcgttgccacaggtgcgtaaaaattacccttttgagggggttgtagagtggtatcggaaagagtttttt

SEQ ID NO: 707502 - DNA, 75 bp, synthetic construct
  source 1..75: mol_type = other DNA
gttgtggcaacgccggaagccctgcggacgaagagtgtggtacccggtgattatgaagcaacagccacgtttgaa

SEQ ID NO: 707503 - DNA, 75 bp, synthetic construct
  source 1..75: mol_type = other DNA
ggttaggcattgcactgctggacaccgatggcagcagtctgctgaaacccggcacctcccataacaaaggccagg

SEQ ID NO: 707504 - DNA, 75 bp, synthetic construct
  source 1..75: mol_type = other DNA
ctcagcctgcaggtgttgcgttaccagtacaggaagctgcaacacaggaagaaattaaaacagaaactgtggcgg

SEQ ID NO: 707505 - DNA, 75 bp, synthetic construct
  source 1..75: mol_type = other DNA
taacgacagcatacttacagcaattggtattttttgcaggggaggctacttgtcatcctgacgcaaactatttat

SEQ ID NO: 707506 - DNA, 75 bp, synthetic construct
  source 1..75: mol_type = other DNA
ctattgctaagtttgctggtacgaaatctgctggataacgccgtgcgctacagtccacagggcagcgtggtggac

SEQ ID NO: 707507 - DNA, 75 bp, synthetic construct
  source 1..75: mol_type = other DNA
ccgcgggcgtacccagcgaagtgcgtccgctagtcgagtcgctgaatcaactgttcgaccgtacacatgcgatga

SEQ ID NO: 707508 - DNA, 75 bp, synthetic construct
  source 1..75: mol_type = other DNA
tcatcagcacccacacattccgacatctttgtctgacagaactggcacgcgtggggtgggacatccacgaaattg

SEQ ID NO: 707509 - DNA, 75 bp, synthetic construct
  source 1..75: mol_type = other DNA
catatatgcaagtgcaaacgatgtgattttacctaatcttgcgctgggcacgggcgtcttgattgcggcatgggt

SEQ ID NO: 707510 - DNA, 75 bp, synthetic construct
  source 1..75: mol_type = other DNA
tggaacagcaacgcggaaaaatcgatgtggactgtggttgtgtgtccactgaaacattcatgcactggttgcggg

SEQ ID NO: 707511 - DNA, 75 bp, synthetic construct
  source 1..75: mol_type = other DNA
aattcacttaataacacacatcatatttatagagtaaagaactctcattataagctttctttatctggtaggcag

SEQ ID NO: 707512 - DNA, 75 bp, synthetic construct
  source 1..75: mol_type = other DNA
ggcgcgagtattgtggtcggtccgttgctgaaaaataacgttgaagagttgctgaagagcaacaccccgctgaac

SEQ ID NO: 707513 - DNA, 75 bp, synthetic construct
  source 1..75: mol_type = other DNA
tcgccctgctgttgccactgaatggccaggcagcggtatttggtcgcactattcagcaaggctttgaagcggcga

SEQ ID NO: 707514 - DNA, 75 bp, synthetic construct
  source 1..75: mol_type = other DNA
aaatctacgatacctcatcacaaccgcttagccagatcctcaatcaggttcagcaggatggcgcaagcattgtgg

SEQ ID NO: 707515 - DNA, 75 bp, synthetic construct
  source 1..75: mol_type = other DNA
agatgcgattactggaaaggccaaagaagaatgccggtcgtttaactcggaagtgattaagcgattgctggacag

SEQ ID NO: 707516 - DNA, 75 bp, synthetic construct
  source 1..75: mol_type = other DNA
ccggcgaatccatccgcagaactgaaaatctacgatacctcatcacaaccacttagccagatcctcaaccaggtt

SEQ ID NO: 707517 - DNA, 75 bp, synthetic construct
  source 1..75: mol_type = other DNA
gaccagctcaccaataatggcggtcgtgtcgatgcggtatacattgtggcaacgccaggcgaaatcgccttcatc

SEQ ID NO: 707518 - DNA, 75 bp, synthetic construct
  source 1..75: mol_type = other DNA
aagccgcgttgttcaatatcgaaaccttttttggctgggtcagcgacgtcgaaacgttctgcgacgcgctttctc

SEQ ID NO: 707519 - DNA, 75 bp, synthetic construct
  source 1..75: mol_type = other DNA
tcaccggtatcgctaccaacgtctgcgtcgaatcgacgctacgcgatggcttttttctggagtatttcggcgtgg

SEQ ID NO: 707520 - DNA, 75 bp, synthetic construct
  source 1..75: mol_type = other DNA
gagacatcacgtactgtgtgcccggagttcagggtgagcagggatgctcaaatgaaccacgagtctgtctggaat

SEQ ID NO: 707521 - DNA, 75 bp, synthetic construct
  source 1..75: mol_type = other DNA
accggaagcctgacggctaacccggattgcgtgattaacaggaagttatcatggctacagtaccaacaaggtcag

SEQ ID NO: 707522 - DNA, 75 bp, synthetic construct
  source 1..75: mol_type = other DNA
cttcagtcagaattttctctgacatttatgcagattggcatgataaccctcaccttccagctcgcctcttcgcta

SEQ ID NO: 707523 - DNA, 75 bp, synthetic construct
  source 1..75: mol_type = other DNA
gagtgtcgctcatttagtgcagaagtaattaaacgggtgatggacagcctgaagagagaggggataacggtatga

SEQ ID NO: 707524 - DNA, 75 bp, synthetic construct
  source 1..75: mol_type = other DNA
cgctgcccgtgctgggcgtgcgggatgcggcgtgtcgcgtgaagccgaagcagggcgatattttcctcatcgtgc

SEQ ID NO: 707525 - DNA, 75 bp, synthetic construct
  source 1..75: mol_type = other DNA
atgcacagtgattattataatatggtttttggtgaaaaattggccaatattttatatgaagctaactctcaattt

SEQ ID NO: 707526 - DNA, 75 bp, synthetic construct
  source 1..75: mol_type = other DNA
taattaagttcttctatgacaaaaaacataagaatttagatactctcctggtgaacacagggcattcacgtttta

SEQ ID NO: 707527 - DNA, 75 bp, synthetic construct
  source 1..75: mol_type = other DNA
tgtgtattgcacttgaaattataaccggaacgggatggttactcttaatcagtcttggtgcattatcaagcgcca

SEQ ID NO: 707528 - DNA, 75 bp, synthetic construct
  source 1..75: mol_type = other DNA
tagcaacagtgaaagttctgcagccattcatgccacagctaaatggtctactgctcaattgaagaaaacgcaggc

SEQ ID NO: 707529 - DNA, 75 bp, synthetic construct
  source 1..75: mol_type = other DNA
accgcgaattgcgtcgggcgaaaagtcatgtccagaagtgggagcgagtctgcgccgcgctgcgggagctgaaca

SEQ ID NO: 707530 - DNA, 75 bp, synthetic construct
  source 1..75: mol_type = other DNA
ttttacgagagaaatgtcatagaagaggcagtcaacgctttattctgtgagcgtgaaataataaacaacaagaac

SEQ ID NO: 707531 - DNA, 75 bp, synthetic construct
  source 1..75: mol_type = other DNA
ttggcggccctatggccaaacattttggccgccactggcatctaaaggtgcgtaatacaaaacaggctctggatt

SEQ ID NO: 707532 - DNA, 75 bp, synthetic construct
  source 1..75: mol_type = other DNA
ggggaaccctgtacagcttatctatggtgaggaaattttagttggctcacaggtcgtgagttcttctatcaccat

SEQ ID NO: 707533 - DNA, 75 bp, synthetic construct
  source 1..75: mol_type = other DNA
gggcaaccctgtacagcttatctatggcgaggaaattttagttggctcgcaagttgtaagttcttctatcaccat

SEQ ID NO: 707534 - DNA, 75 bp, synthetic construct
  source 1..75: mol_type = other DNA
actcgcagatacaaaaaaacttcctggatgctcttgccgaggctgtaaaccctgtggccagagtcataatagtta

SEQ ID NO: 707535 - DNA, 75 bp, synthetic construct
  source 1..75: mol_type = other DNA
ggtaaagtcatcatgtcccgacaggaagaagaacaggacgacccggttatatcgcagtttctgacttttctcgaa

SEQ ID NO: 707536 - DNA, 75 bp, synthetic construct
  source 1..75: mol_type = other DNA
cttgaggatacgcagtttataccgttacttctgaacgtgttgcaaccgaatatgcgaacacgagtttgtacggtc

SEQ ID NO: 707537 - DNA, 75 bp, synthetic construct
  source 1..75: mol_type = other DNA
ctggcgttccagtgtggcacatgaatgaaagtgacgagcgatttattcatttgtgcaatgagtttccgcgagtgg

SEQ ID NO: 707538 - DNA, 75 bp, synthetic construct
  source 1..75: mol_type = other DNA
ttcgattcgcgtgataaaatcgtggcccagataaaactgctgacgccgcaaaaaattgctgatttcttccatcag

SEQ ID NO: 707539 - DNA, 75 bp, synthetic construct
  source 1..75: mol_type = other DNA
acttcaacgctgtcgctggctttcggctgatgtcattatggtgctggttggcctgatttgcggcatcacgctatt

SEQ ID NO: 707540 - DNA, 75 bp, synthetic construct
  source 1..75: mol_type = other DNA
gataatttacaggatgcaaatcagatccaactgtatcatggcgccccttatatttttacatttggggatgtggac

SEQ ID NO: 707541 - DNA, 75 bp, synthetic construct
  source 1..75: mol_type = other DNA
ccgtagactggaataaatattacagatttgttgaacgctggggtaatcaccctcgtttctcattcgcggttatcc

SEQ ID NO: 707542 - DNA, 75 bp, synthetic construct
  source 1..75: mol_type = other DNA
agaggaggaaaatgatgcgcttctgaatgagtggcctcacggaaaactagttggcgttccagtgtggcacatgaa

SEQ ID NO: 707543 - DNA, 75 bp, synthetic construct
  source 1..75: mol_type = other DNA
cgtattgccagagacatgaatgtccagggctgtcagggatggctctacaggcgtgtgggagctgatgaattatcc

SEQ ID NO: 707544 - DNA, 75 bp, synthetic construct
  source 1..75: mol_type = other DNA
ggtgtgtgggggtacgatgttccggccgattcagcctggtgcgaccacgctgttagagcaggcctgacttgtaaa

SEQ ID NO: 707545 - DNA, 75 bp, synthetic construct
  source 1..75: mol_type = other DNA
agcattaaatatcaaattaacactccgggaataccctaatcatcaaaaagcaatggacgcgctggaagaaggtga

SEQ ID NO: 707546 - DNA, 75 bp, synthetic construct
  source 1..75: mol_type = other DNA
acttcaacgctgtcgctggctttctgctgatgtcattatggtgctggttggcctgatttgcggcatcacgctttt

SEQ ID NO: 707547 - DNA, 75 bp, synthetic construct
  source 1..75: mol_type = other DNA
acttcaacgctgtcgctggctttcagctgatgtcattatggtgctggttggcctgatttgcggcatcacgctgtt

SEQ ID NO: 707548 - DNA, 75 bp, synthetic construct
  source 1..75: mol_type = other DNA
atgatctatctattaaagggggagtggaatcagtagtaacttcactagccaatgggttcattaaaaaaggagtaa

SEQ ID NO: 707549 - DNA, 75 bp, synthetic construct
  source 1..75: mol_type = other DNA
gagaatttacaggatgtaaatcagatccaactgtatcacggtgctccttatatctttacatttggggatgtggac

SEQ ID NO: 707550 - DNA, 75 bp, synthetic construct
  source 1..75: mol_type = other DNA
catgattttcctggattggctatcaacgataatttacaggatgcaaatcagatccaactgtatcatggcgcccct

SEQ ID NO: 707551 - DNA, 75 bp, synthetic construct
  source 1..75: mol_type = other DNA
gcttcaacttttttacccctgctggatactctgctgccgttgctcctaatcgtgctgaaaatgcctatgcggatt

SEQ ID NO: 707552 - DNA, 75 bp, synthetic construct
  source 1..75: mol_type = other DNA
actttgcccgcccggactcgttcatcgacaaaatttccgtttacagcgcccgcgtcaatatgggaacaaagcttg

SEQ ID NO: 707553 - DNA, 75 bp, synthetic construct
  source 1..75: mol_type = other DNA
gcctgcgcaggcttgctgatctctttcatcctgccgcaaaaatggaccagcgcggcggttgtcacgcctccagaa

SEQ ID NO: 707554 - DNA, 75 bp, synthetic construct
  source 1..75: mol_type = other DNA
tttaccgcgcccaccagtgaagaagcccagaccgttctggcagggtatatcgattatatctctacgttggtggtg

SEQ ID NO: 707555 - DNA, 75 bp, synthetic construct
  source 1..75: mol_type = other DNA
tgccgtaagctatggcattcataataaggaagtatacattggtagcattaaatacagaaacgaatacgaacgtaa

SEQ ID NO: 707556 - DNA, 75 bp, synthetic construct
  source 1..75: mol_type = other DNA
caatgacgatggttatacaattaacttttcttgtgatgctggagcaagggaaggttcagaagatcatatcgctgg

SEQ ID NO: 707557 - DNA, 75 bp, synthetic construct
  source 1..75: mol_type = other DNA
atcattcactctggatggtatttccagtatttatacagaagctaaaaatgacgggtgtttaaaacaagatgacgg

SEQ ID NO: 707558 - DNA, 75 bp, synthetic construct
  source 1..75: mol_type = other DNA
ccaattatataagaatcgctgatacaactacgccaggtaatgtgaaggcaatagcaacaattacattctcttatc

SEQ ID NO: 707559 - DNA, 75 bp, synthetic construct
  source 1..75: mol_type = other DNA
gtgttatgccggttaaccaatcgatttatgatgccttaacggtgcttcagcatcgcggtcaggatgccgccggca

SEQ ID NO: 707560 - DNA, 75 bp, synthetic construct
  source 1..75: mol_type = other DNA
gaatgtccagcacatcatacttcataaaattgtttaatagctattatggtgtcacaccaaagaagttttattttt

SEQ ID NO: 707561 - DNA, 75 bp, synthetic construct
  source 1..75: mol_type = other DNA
atggctttggcccgttcccggggcattgatattaccgtggtgacggataaaaactgcaatatagcgcatgtcgat

SEQ ID NO: 707562 - DNA, 75 bp, synthetic construct
  source 1..75: mol_type = other DNA
tcactccttaaatgtagtgaaatattataactcgccgcgtcaatataattttttcttgaccagaaaagaatctgt

SEQ ID NO: 707563 - DNA, 75 bp, synthetic construct
  source 1..75: mol_type = other DNA
atgtctgttgttgcacctgctgtatacgtcggaacctggcacaaatataactgcggaagcatcgccggccgctgg

SEQ ID NO: 707564 - DNA, 75 bp, synthetic construct
  source 1..75: mol_type = other DNA
attttttgacagtgcaatgttcaataccggtgagaatggttccgctaattcgatatttattcagtccatttcccc

SEQ ID NO: 707565 - DNA, 75 bp, synthetic construct
  source 1..75: mol_type = other DNA
tattgttggatgcaaagaggaagctaaaacaacaaaatggtatagggatcaccctgacgaattaaaactagttta

SEQ ID NO: 707566 - DNA, 75 bp, synthetic construct
  source 1..75: mol_type = other DNA
atggagactgtttttgacgcactgaaagcaatgggaaaagccacgtcggtagaactcgctgcgcgacttgatatc

SEQ ID NO: 707567 - DNA, 75 bp, synthetic construct
  source 1..75: mol_type = other DNA
agaaactgtggcggacattgagcagtcgttgtcattgcttaccgaaacgcgggcggatgacctgattttaccatc

SEQ ID NO: 707568 - DNA, 75 bp, synthetic construct
  source 1..75: mol_type = other DNA
agtgatacaggcctgctggctggcgtgccggagacggtggcgctctattttgactatgaggcgtatgcgcgggat

SEQ ID NO: 707569 - DNA, 75 bp, synthetic construct
  source 1..75: mol_type = other DNA
agttgatcattctcgcctatgtgctgggcaccgatctcgatacgccatcattagaacaacaaagccagatgctgc

SEQ ID NO: 707570 - DNA, 75 bp, synthetic construct
  source 1..75: mol_type = other DNA
aaagaagcgaaagcgatcgccgctgccgaaggccgtgagttgatcattctcgcctatgtgctgggcaccgatctt

SEQ ID NO: 707571 - DNA, 75 bp, synthetic construct
  source 1..75: mol_type = other DNA
attaacggcgcggcgctctgttttggtaacgccgtgcgtcgcggcaacatcggtattgttggcgcatccggcacc

SEQ ID NO: 707572 - DNA, 75 bp, synthetic construct
  source 1..75: mol_type = other DNA
gtaacgccgtgcgtcgcggcaacatcggtattgttggcgcatccggcaccggcagccaggagttgagcgtccgta

SEQ ID NO: 707573 - DNA, 75 bp, synthetic construct
  source 1..75: mol_type = other DNA
aggcgaaaaacggcgacctgatgattgtcatcaacggcaaagcgggcgcggacaacgagcagttgctggtggaga

SEQ ID NO: 707574 - DNA, 75 bp, synthetic construct
  source 1..75: mol_type = other DNA
cgttacgccactattgccagcgccaaaaagcatatcccggaaagtaacctggcggtgatttcggtcaacggtctg

SEQ ID NO: 707575 - DNA, 75 bp, synthetic construct
  source 1..75: mol_type = other DNA
ggcacaaatacaactgtggaagcatcgccggacgctggtttgacctgaccacgtttgatgatgagcgcgactttt

SEQ ID NO: 707576 - DNA, 75 bp, synthetic construct
  source 1..75: mol_type = other DNA
cgaaccgtgactcggcggcaagtattgttgcgcaagggaatttttacggcactgactgttctgcggaaggaataa

SEQ ID NO: 707577 - DNA, 75 bp, synthetic construct
  source 1..75: mol_type = other DNA
cataaaaaagtttcttcattactcgttcatcactgtagcagagatattcctgtttttcaggaagttgcgcaacta

SEQ ID NO: 707578 - DNA, 75 bp, synthetic construct
  source 1..75: mol_type = other DNA
tttcattatttctcccgatgctcaaggaggaggcattaaaacttcatgcacataaaaaagttccttcattactcg

SEQ ID NO: 707579 - DNA, 75 bp, synthetic construct
  source 1..75: mol_type = other DNA
aaaagaaaacagaacaatatatagccaagtttttgaaattaataatggtactgaaaaaagatgcattaatcattg

SEQ ID NO: 707580 - DNA, 75 bp, synthetic construct
  source 1..75: mol_type = other DNA
cagtatgatttcccgttattttactcactccttaaatgtagtgaagtattataactcaccgcgtcaatataactt

SEQ ID NO: 707581 - DNA, 75 bp, synthetic construct
  source 1..75: mol_type = other DNA
aatgggtcgatatccctactttagtccagaacacttgtcactctttcggtgcgattgctgcaagcaaatccatcg

SEQ ID NO: 707582 - DNA, 75 bp, synthetic construct
  source 1..75: mol_type = other DNA
agctgaacctgaagaagaaatcaatcttactgcagtacatgcagagttggtttctctggataatcagataaaatc

SEQ ID NO: 707583 - DNA, 75 bp, synthetic construct
  source 1..75: mol_type = other DNA
tgggcaaaatcctctgggccatcgccgataaactgcgtggcgctatgaacgcggacgatttccgcgattacatgc

SEQ ID NO: 707584 - DNA, 75 bp, synthetic construct
  source 1..75: mol_type = other DNA
gtgtcttcagggggttgttctcagaaatcaatcttgcctcagaaaaacttggcaaaacatatggtgagagaaatg

SEQ ID NO: 707585 - DNA, 75 bp, synthetic construct
  source 1..75: mol_type = other DNA
caatggcgcagccgtggtggaacacctaagcctatcaacatttgccgggtaactaaattcgatgggtatctggct

SEQ ID NO: 707586 - DNA, 75 bp, synthetic construct
  source 1..75: mol_type = other DNA
acaattcaaattagaaaagttaatcaacccaacgccaaaaggtcatgatagggtcatgaccgggtcatggcaggg

SEQ ID NO: 707587 - DNA, 75 bp, synthetic construct
  source 1..75: mol_type = other DNA
gttcagtcggcgctggcgtggggaaaaatgcactcctggcagacgcagccagcagttcagtgctcgcagtacgct

SEQ ID NO: 707588 - DNA, 75 bp, synthetic construct
  source 1..75: mol_type = other DNA
acgccgctggcgaactgtgtggcagatacgcaaggcggcatcggctatctgatccaacaggcgctgaataaccgg

SEQ ID NO: 707589 - DNA, 75 bp, synthetic construct
  source 1..75: mol_type = other DNA
aaaaggcaaaccctgactggcgttttgttgaagatgccggacggggctatcgccgcgtggtcgcctcgccggaac

SEQ ID NO: 707590 - DNA, 75 bp, synthetic construct
  source 1..75: mol_type = other DNA
atgaaagaacttgtggtcgttgccattggtggcaacagcattatcaaggataacgccagccagtcgattgagcat

SEQ ID NO: 707591 - DNA, 75 bp, synthetic construct
  source 1..75: mol_type = other DNA
gtcagttatgtgggtggcaacagcaaaagctcagtgttatttatcagtctgttgaaacacctgaagttgacgtac

SEQ ID NO: 707592 - DNA, 75 bp, synthetic construct
  source 1..75: mol_type = other DNA
cagccaccagcattacgctgactatcgtaatgggcctgatgttgctggtttactggcgcgcttctcgtctgctga

SEQ ID NO: 707593 - DNA, 75 bp, synthetic construct
  source 1..75: mol_type = other DNA
ccgaagctaacagagccaatacgcgtcttgatgctcaggactattttgattgcctgcgctgcttgcgtatgtatg

SEQ ID NO: 707594 - DNA, 75 bp, synthetic construct
  source 1..75: mol_type = other DNA
gccacgacagggatgagcggttggctgaagtggcaaactgatggcatgaacccctggagagctgaaaaggcgatt

SEQ ID NO: 707595 - DNA, 75 bp, synthetic construct
  source 1..75: mol_type = other DNA
aatgacagtagacgctatcgctacttttaccagtcagtatggcataacgtacttggtgatgctgccaacttactg

SEQ ID NO: 707596 - DNA, 75 bp, synthetic construct
  source 1..75: mol_type = other DNA
gccgtttggttatgtgatcagggtaaccgaatggtgggaaaccaacgaaacaccaggaacattccggctggatat

SEQ ID NO: 707597 - DNA, 75 bp, synthetic construct
  source 1..75: mol_type = other DNA
tcaccaccggcgtcgaaaaagtctgtatccactttggtaaaccgcagcagcaggcgctggatcgggtggatattg

SEQ ID NO: 707598 - DNA, 75 bp, synthetic construct
  source 1..75: mol_type = other DNA
gattgattgtatccggtgataaaaacccgaattggaagggtgggaaaatcgaaaaggtttgttccgtatgtggca

SEQ ID NO: 707599 - DNA, 75 bp, synthetic construct
  source 1..75: mol_type = other DNA
atggtctctcacgatctgcatctggtaatggcaaaaaccgatgaagtgctgtgcctgaatcaccacatttgttgt

SEQ ID NO: 707600 - DNA, 75 bp, synthetic construct
  source 1..75: mol_type = other DNA
atgagcactgctatcgctattgcaaaagaatatgccagtctgattgacctgttagaaaccgccgatgaactgacg

SEQ ID NO: 707601 - DNA, 75 bp, synthetic construct
  source 1..75: mol_type = other DNA
gtatacctataggctcagaatttagtcgggtctttgctgagttaatattccagcgtatcgattgtagtattgaat

SEQ ID NO: 707602 - DNA, 75 bp, synthetic construct
  source 1..75: mol_type = other DNA
gccatttggaaattgagagcgatctgcaatctatgctcaaaacttattggtttgtcaagtgggatgagttagatc

SEQ ID NO: 707603 - DNA, 75 bp, synthetic construct
  source 1..75: mol_type = other DNA
gaatacctattggttcagagtttagcagggtttttgcagaattaatatttcagcgaattgattgcaatattgagt

SEQ ID NO: 707604 - DNA, 75 bp, synthetic construct
  source 1..75: mol_type = other DNA
gcagtaaagaagtaatcgcgtttctggccgaacgttttccccactgtttcagtgcggaaggtgaagcgcgtccgc

SEQ ID NO: 707605 - DNA, 75 bp, synthetic construct
  source 1..75: mol_type = other DNA
cctgttcaattacaccgctagccgtacccaggaggtgccgcagcgcctcctggaggcagaaaggcgtcgagcgta

SEQ ID NO: 707606 - DNA, 75 bp, synthetic construct
  source 1..75: mol_type = other DNA
gcaaagggccgtgtggaacgcgcccacctgacacttcaggaccggctggttaaggagctcaggcttaaagggatc

SEQ ID NO: 707607 - DNA, 75 bp, synthetic construct
  source 1..75: mol_type = other DNA
agctgactgccgtgggtaaatacattcagttctggtatccggaaatcccaacctgggtttctgccgccgtgttct

SEQ ID NO: 707608 - DNA, 75 bp, synthetic construct
  source 1..75: mol_type = other DNA
atgaaaaagattttcaccgtgggagcactcattctggtagccggcttattaagtggttgcgtcaatgagcaaaag

SEQ ID NO: 707609 - DNA, 75 bp, synthetic construct
  source 1..75: mol_type = other DNA
ggaatgaatatcttgttcgtcagggagtctaccggcgaacgaggtgccaccggctactacatgctgacagactgg

SEQ ID NO: 707610 - DNA, 75 bp, synthetic construct
  source 1..75: mol_type = other DNA
attgatatattacgagttcaagaaaatgaagatgatgtagatgtaaaaaaaaggattaaggacttaattttcaca

SEQ ID NO: 707611 - DNA, 75 bp, synthetic construct
  source 1..75: mol_type = other DNA
ctggtaaaagaaggtgtaccacgttcaaaactggtcttcgctttaagccgggtaggtaccgaagcggaagagctg

SEQ ID NO: 707612 - DNA, 75 bp, synthetic construct
  source 1..75: mol_type = other DNA
ttcttgatggccctgctcgtgcaagtaaaggtacttcagaaattgctaaggtcgccgaccttatcgtccagccaa

SEQ ID NO: 707613 - DNA, 75 bp, synthetic construct
  source 1..75: mol_type = other DNA
gttccgtgtgaattacaggaacggcggtattttttatcgttcagcgcgtgatggttacggattcgaagctgactg

SEQ ID NO: 707614 - DNA, 75 bp, synthetic construct
  source 1..75: mol_type = other DNA
gacaaagctgttggatggaactcaaatagcggcgtttataatgcgactattagtggagcgtcaacattgattctt

SEQ ID NO: 707615 - DNA, 75 bp, synthetic construct
  source 1..75: mol_type = other DNA
ttatattaatcatggtgatgcttatgcccccggctggcgacgagactacagcacgaaaaatcaacaacctgcatt

SEQ ID NO: 707616 - DNA, 75 bp, synthetic construct
  source 1..75: mol_type = other DNA
ggctattctgcagaggagatggcaatacaaatattacagaggagcagacaggcatcgccccggaaaacgcatctg

SEQ ID NO: 707617 - DNA, 75 bp, synthetic construct
  source 1..75: mol_type = other DNA
gtcatctgttcagacatggaatggtcccggctggtctgacaggtcaggttatgtcgttacgggttcagttaacgg

SEQ ID NO: 707618 - DNA, 75 bp, synthetic construct
  source 1..75: mol_type = other DNA
ggtgtccgtttaggaggactgtcatctgttcagacatggaatggtcccggctggtctgacaggtcaggttatgtc

SEQ ID NO: 707619 - DNA, 75 bp, synthetic construct
  source 1..75: mol_type = other DNA
atgagaaaacaacttgcagtagtcttgttttctgtaatgacaggattgattacaacacctgctatttctggcgtt

SEQ ID NO: 707620 - DNA, 75 bp, synthetic construct
  source 1..75: mol_type = other DNA
cgatgggtacgctgcgcctgctggaggcgatccgcttcctcggtctggaaaagaaaacccgtttctatcaggctt

SEQ ID NO: 707621 - DNA, 75 bp, synthetic construct
  source 1..75: mol_type = other DNA
attcaatgatattttgaaagctgccattatatttgaagttcttggtttcaacagacttgcagatcagttacgtga

SEQ ID NO: 707622 - DNA, 75 bp, synthetic construct
  source 1..75: mol_type = other DNA
cctgaagggaacagcatccactggtgaaggcgagttgctcattggctggagtggcacaaatggcgctcatgcacc

SEQ ID NO: 707623 - DNA, 75 bp, synthetic construct
  source 1..75: mol_type = other DNA
tgataaagctgttggctggaactggaatagcggggtctataacgcaaatattggtggcgcatcgacattaatcct

SEQ ID NO: 707624 - DNA, 75 bp, synthetic construct
  source 1..75: mol_type = other DNA
ttccctggcggttgactgcccccctgccagcggagtgcgcgggggtaaatgccgcccgccccgtggaggctgccg

SEQ ID NO: 707625 - DNA, 75 bp, synthetic construct
  source 1..75: mol_type = other DNA
gtacctgcgccaggcaacgctgcacgcggccaacgactgcatcagcaacgccatcgccacgctaccgatcttccc

SEQ ID NO: 707626 - DNA, 75 bp, synthetic construct
  source 1..75: mol_type = other DNA
gcgatagactcccgtaaatatcaggttaccgagcttcctctaaaatctgctttgtctcttcaaggaagatactca

SEQ ID NO: 707627 - DNA, 75 bp, synthetic construct
  source 1..75: mol_type = other DNA
ggccaaaaaacttctggctgatgtacaggaaaaacaccgtcgtgaaacgtctaaaatcggtcgtctgttgtcact

SEQ ID NO: 707628 - DNA, 75 bp, synthetic construct
  source 1..75: mol_type = other DNA
caccgttcaccgtgtgagttcagacttaacatcatgtggtcagaatttgcggcgttcttgcagtgtaaaccgtaa

SEQ ID NO: 707629 - DNA, 75 bp, synthetic construct
  source 1..75: mol_type = other DNA
tgcaactgaccgccacaaccggaaccctgacagcatcagtggtatttctggaggattctttgaggattttttcat

SEQ ID NO: 707630 - DNA, 75 bp, synthetic construct
  source 1..75: mol_type = other DNA
tggcttgcggaaaagctgaacaaaatccccggtatcagtatcgacatgaagcccacggagcaggtgaacaccatg

SEQ ID NO: 707631 - DNA, 75 bp, synthetic construct
  source 1..75: mol_type = other DNA
atgatgctgtaccacgacgatgaaccgctgacgtttgagctggtctggcagcatggtggttggtacagtgcgacg

SEQ ID NO: 707632 - DNA, 75 bp, synthetic construct
  source 1..75: mol_type = other DNA
gcagctctccgacaacctggtcgatgcgatggcgtaccacatgaagcagttggaggacgaaagcagcgctggtgc

SEQ ID NO: 707633 - DNA, 75 bp, synthetic construct
  source 1..75: mol_type = other DNA
aattcagcgtcgaacggccgaccgtgaaggcgcgctattcgcgcaagtacttcgggcgcggcaagggcgtggtcg

SEQ ID NO: 707634 - DNA, 75 bp, synthetic construct
  source 1..75: mol_type = other DNA
gtggaaggcgcggcgcactatttacccgcctacgcgggcaacctcgacattatgacctccagcgcgctggcgacc

SEQ ID NO: 707635 - DNA, 75 bp, synthetic construct
  source 1..75: mol_type = other DNA
agtttctcgcgtggcaaaagtccattacgccgagattatcgcctcgatcgccagtaaatcggcggggccgggtac

SEQ ID NO: 707636 - DNA, 75 bp, synthetic construct
  source 1..75: mol_type = other DNA
aaatggattttatgttgatgataaggcgattaggccttcagagtttataagcttgtcagaaacggagattgctga

SEQ ID NO: 707637 - DNA, 75 bp, synthetic construct
  source 1..75: mol_type = other DNA
caagcccgttccgccggatacggatattgccgacccgcaggcagacaacttgccacccgccaaaccgttcgacca

SEQ ID NO: 707638 - DNA, 75 bp, synthetic construct
  source 1..75: mol_type = other DNA
taccccaaccgtaaactcgtcctcaaacccatcgccgggcgcgacccgcaaacggaagatctggcgcagacgcag

SEQ ID NO: 707639 - DNA, 75 bp, synthetic construct
  source 1..75: mol_type = other DNA
tgcgcaggctaccagctttaccgaatatctgccaatgagtgacagcgaatacgcgcaaaagcgggcgctgaaacc

SEQ ID NO: 707640 - DNA, 75 bp, synthetic construct
  source 1..75: mol_type = other DNA
ccttcttccgtgtttactccggtgtggttaactctggtgatatcgtactgaactccgtgaaagctgcacgtgagc

SEQ ID NO: 707641 - DNA, 75 bp, synthetic construct
  source 1..75: mol_type = other DNA
atggtggataaagacggtctcctgctaaaagacaatccgtcattgacagactttcaggccccctttgcctggcca

SEQ ID NO: 707642 - DNA, 75 bp, synthetic construct
  source 1..75: mol_type = other DNA
agggtaaaaattcagcttgatcgctttactactgatgaggcgcgacatgtttttttacgcaaccttcaggacaca

SEQ ID NO: 707643 - DNA, 75 bp, synthetic construct
  source 1..75: mol_type = other DNA
cttttttattgagcttagtgctgcctgcacaggccaccagctttaccgaatatctgccgatgagtgacagcgaat

SEQ ID NO: 707644 - DNA, 75 bp, synthetic construct
  source 1..75: mol_type = other DNA
aggccgtccctgtgtctttgaacccaggggattctacaccgcaagcaaaactggcgtagatgatttgctggattt

SEQ ID NO: 707645 - DNA, 75 bp, synthetic construct
  source 1..75: mol_type = other DNA
ttggcagttcacttggtcccttgctggcggcggtaattatcgcgccttatggcaaaggtaacgtggcgtggtttg

SEQ ID NO: 707646 - DNA, 75 bp, synthetic construct
  source 1..75: mol_type = other DNA
gagcaaaactggcattttagaaaagtgggcgttgctggcgtgacgcttgagaagatgccaaatgaagaggattac

SEQ ID NO: 707647 - DNA, 75 bp, synthetic construct
  source 1..75: mol_type = other DNA
tcgtttttaatcctgatgacctttaatcagcaaggtcgcccgtgtgttttccaggccgatggtttttacaccgca

SEQ ID NO: 707648 - DNA, 75 bp, synthetic construct
  source 1..75: mol_type = other DNA
caaacggaagatttggcgctgacgcagcgttgtttgataacgggggatgtgcttgatggggtgaatcagaactga

SEQ ID NO: 707649 - DNA, 75 bp, synthetic construct
  source 1..75: mol_type = other DNA
aactccgtgaaagctgcacgtgagcgtttcggccgtatcgttcagatgcatgctaacaaacgtgaagagatcaaa

SEQ ID NO: 707650 - DNA, 75 bp, synthetic construct
  source 1..75: mol_type = other DNA
aaaatatgtgatttggggctctatcctcggcgttgcgccgtttacgctgattttaccctacgccagcctgcactg

SEQ ID NO: 707651 - DNA, 75 bp, synthetic construct
  source 1..75: mol_type = other DNA
ggagagattaacggtaaacttatctggagcaataccggttatttgatcaactggtatctgactgagatgaaacag

SEQ ID NO: 707652 - DNA, 75 bp, synthetic construct
  source 1..75: mol_type = other DNA
ctggtgcgccggacctgctgccagcgttatcgcttaccggatgtgcagcaatgtggcgattgtacgctgaaatga

SEQ ID NO: 707653 - DNA, 75 bp, synthetic construct
  source 1..75: mol_type = other DNA
cagcaaagcgcaagccgcaacgtaataccctctaccttcctaccgaagtaagggatgaagttgaaagaatatctg

SEQ ID NO: 707654 - DNA, 75 bp, synthetic construct
  source 1..75: mol_type = other DNA
gaagctggcgcatggctggttaacttcaacaacacgccaattctgtgggctattccggcactgggtgtggttctg

SEQ ID NO: 707655 - DNA, 75 bp, synthetic construct
  source 1..75: mol_type = other DNA
cgacaccgagcgtcgaattatgattaactccattgcaccacactgggacggtaaccaggtttggctgatcaccgc

SEQ ID NO: 707656 - DNA, 75 bp, synthetic construct
  source 1..75: mol_type = other DNA
gaccgaattactcgaactgacgccgcagtcgcgggtgctggaaattggcaccggttcgggatatcaaacggcaat

SEQ ID NO: 707657 - DNA, 75 bp, synthetic construct
  source 1..75: mol_type = other DNA
ctctgcactggcgttcaaaattgctaccgacccgtttgttggtaacctgaccttcttccgtgtttactccggtgt

SEQ ID NO: 707658 - DNA, 75 bp, synthetic construct
  source 1..75: mol_type = other DNA
ttcttaccatgacgttgactcctctgaactggcgtttaaactggctgcttctatcgcctttaaagaaggctttaa

SEQ ID NO: 707659 - DNA, 75 bp, synthetic construct
  source 1..75: mol_type = other DNA
atggcctatcgttccgcaccgctctatgaagatgtcatctggcgaacgcatctccagccacaggatgctgggctt

SEQ ID NO: 707660 - DNA, 75 bp, synthetic construct
  source 1..75: mol_type = other DNA
gtttatccgcctggatgaacccgctccgcttaacgccatgacgctggcgcaatggtcatcaccgaatgcgctaag

SEQ ID NO: 707661 - DNA, 75 bp, synthetic construct
  source 1..75: mol_type = other DNA
gtgccgcctgtttctggatcgacgtgtgtgagaacaagaacgctccgcatttgccacagcagcgaatggaaaagt

SEQ ID NO: 707662 - DNA, 75 bp, synthetic construct
  source 1..75: mol_type = other DNA
gtctgccccgctgaaattcatggcggtgtccgattacaaaaagtgtgagcggttcctgacgggttttttcctgga

SEQ ID NO: 707663 - DNA, 75 bp, synthetic construct
  source 1..75: mol_type = other DNA
cttaatgtcctcgatcctgacaagaagaccattatccatatacccaacgtcaattcgcgcgagagcacgaaggat

SEQ ID NO: 707664 - DNA, 75 bp, synthetic construct
  source 1..75: mol_type = other DNA
gaacttgatgcggaagatcaggaggctatacgtcagcatgctatcgctgctcttaacctcacgcagcaggctaag

SEQ ID NO: 707665 - DNA, 75 bp, synthetic construct
  source 1..75: mol_type = other DNA
caagataagcccgccatcgaacgtggactgttcgacgaagagctcattcctgaagaattaacacaggttcgtatg

SEQ ID NO: 707666 - DNA, 75 bp, synthetic construct
  source 1..75: mol_type = other DNA
cctgaaaagcgtaatccgttgctggcctccagttttggtacgggggagttaattcgtcatgcgctggataacggc

SEQ ID NO: 707667 - DNA, 75 bp, synthetic construct
  source 1..75: mol_type = other DNA
cctttgtctctactggctcaaatgactttagcgatgcgctggcggaaaaagccatcgcgttgacctggcgctatc

SEQ ID NO: 707668 - DNA, 75 bp, synthetic construct
  source 1..75: mol_type = other DNA
gacggagtgcgtcgctttgcgatggacgtacgcgatttagacatagaccttatcgaccgcatcaatccctttggt

SEQ ID NO: 707669 - DNA, 75 bp, synthetic construct
  source 1..75: mol_type = other DNA
tggtggcaatcattgccggtacgctggtggcaggtttggcctatgctttcctgaaacgtccggaagtggacgctg

SEQ ID NO: 707670 - DNA, 75 bp, synthetic construct
  source 1..75: mol_type = other DNA
agcctttgcgctgatggtgccggtactggcaggttatattgccttctccattgccgatcgtccgggtctcacgcc

SEQ ID NO: 707671 - DNA, 75 bp, synthetic construct
  source 1..75: mol_type = other DNA
cgcgcaggaactggataaagcggttgctgaagcaacgccgtatgaaccggcgggcaaaactcaaacggcgaccac

SEQ ID NO: 707672 - DNA, 75 bp, synthetic construct
  source 1..75: mol_type = other DNA
aggaatggtcgccgtatggtgcttaccacggttgcacgcgatgatgcatcaaatgaaaaatccggtgctcgtgct

SEQ ID NO: 707673 - DNA, 75 bp, synthetic construct
  source 1..75: mol_type = other DNA
tgggctatcaattgtccagcgaatcgccaagctgcatgacatgaatgttgaatttgggaatgcggaacaaggtgg

SEQ ID NO: 707674 - DNA, 75 bp, synthetic construct
  source 1..75: mol_type = other DNA
tgggctatcaattgtccagcgaatcgccaagctgcatggcatgaatgttgagtttgggaatgcggaacaaggtgg

SEQ ID NO: 707675 - DNA, 75 bp, synthetic construct
  source 1..75: mol_type = other DNA
gcggcgctgcgggcggtatgggcattgcggcggcggtattcctcaatgcggatattaaaccgggtattgagattg

SEQ ID NO: 707676 - DNA, 75 bp, synthetic construct
  source 1..75: mol_type = other DNA
gcgggtgcgcgaactgatgcgccttgagcagacggtttccgatgcgcgcctgcgcaacgccatcaagaccggcat

SEQ ID NO: 707677 - DNA, 75 bp, synthetic construct
  source 1..75: mol_type = other DNA
ggctctcgaaaaccttggtttgggagaagcggcaaaacgaaatgtgggaacaggggaaaatcagataccggacat

SEQ ID NO: 707678 - DNA, 75 bp, synthetic construct
  source 1..75: mol_type = other DNA
atgaaaaatcgctcaacagctatccagttggagcctggtgaaacaattaaccttgatgacgggattctgaatgtt

SEQ ID NO: 707679 - DNA, 75 bp, synthetic construct
  source 1..75: mol_type = other DNA
gagttccgtgagcttcgcctgaaagagccggtgctgttccaggcggaggactttcaccgcaataccgcctcactg

SEQ ID NO: 707680 - DNA, 75 bp, synthetic construct
  source 1..75: mol_type = other DNA
tatcgatgagctgtggcgggacatgcgctggtctgtggcgcgtattcaggacaagccgcgctgtattgtcggcca

SEQ ID NO: 707681 - DNA, 75 bp, synthetic construct
  source 1..75: mol_type = other DNA
atggcaatgagtgaacaaacccagcctgtggcgggcgcggctgcgtcaaccactaaggcacgcacatcgtttggt

SEQ ID NO: 707682 - DNA, 75 bp, synthetic construct
  source 1..75: mol_type = other DNA
cgctgcgccatgccatcttttttgagaaaacgctcacgaacggtgaagataatccactctggcgtaccgtggtac

SEQ ID NO: 707683 - DNA, 75 bp, synthetic construct
  source 1..75: mol_type = other DNA
agtagttggcgtatatgaaaaaaacacccaggggggaagaacatggaatacaacagcggttctcaataagaaatt

SEQ ID NO: 707684 - DNA, 75 bp, synthetic construct
  source 1..75: mol_type = other DNA
attcgccatattattctcggcattggtggtagcgcgacggtcgacggcggtatgggcatggcgcaggcgctcggt

SEQ ID NO: 707685 - DNA, 75 bp, synthetic construct
  source 1..75: mol_type = other DNA
cagctcgccactgataacatcgatatttctccggtcagcgtgatcaaaggcgaatcaacaggtgtggcgctgatt

SEQ ID NO: 707686 - DNA, 75 bp, synthetic construct
  source 1..75: mol_type = other DNA
gcagcggcgaaaatcgcccatcaaaataagactatcgttgcgcttaacccggctccggctcgcgaacttcctgac

SEQ ID NO: 707687 - DNA, 75 bp, synthetic construct
  source 1..75: mol_type = other DNA
aaaactcaccgggattcgtgttgaaaatgatgaagatgcggcgaaggcggcacaggttctgcatgataaaggtat

SEQ ID NO: 707688 - DNA, 75 bp, synthetic construct
  source 1..75: mol_type = other DNA
atgcgcgtcttcggcgcgcgtttgcgtactgtccttagccggagcgtcgaaaaaaagccgctcgccttttgcgcg

SEQ ID NO: 707689 - DNA, 75 bp, synthetic construct
  source 1..75: mol_type = other DNA
cggaagacggcacgctggaaagcgaattttccggtaacctggtagagatttgcccgactggcgtattcaccgaca

SEQ ID NO: 707690 - DNA, 75 bp, synthetic construct
  source 1..75: mol_type = other DNA
ttgcccctaagtattcttggttttatgggaaaattcgcgggtgtcttaatggaaaataaaaacaaatccctgaat

SEQ ID NO: 707691 - DNA, 75 bp, synthetic construct
  source 1..75: mol_type = other DNA
ccttggttccggcttgctggcgatgctcaacaatagcgccgctaatgctgccgcacgtcgtgtcgcgttgggcag

SEQ ID NO: 707692 - DNA, 75 bp, synthetic construct
  source 1..75: mol_type = other DNA
gtcaccgttacttatttttatcggcgtgatttttttcctcggacgcaaacagtcacgcgccgggcaactgggccg

SEQ ID NO: 707693 - DNA, 75 bp, synthetic construct
  source 1..75: mol_type = other DNA
gggcattttcgcttgatggcttgaaggaactggatgcgctctatgagcaattgctcagtaatttaaaactggcaa

SEQ ID NO: 707694 - DNA, 75 bp, synthetic construct
  source 1..75: mol_type = other DNA
agttgcagattttgaatatgaaatgcaactggcgcatatgaatcgccacttaatgccggaactggaaagcgtctt

SEQ ID NO: 707695 - DNA, 75 bp, synthetic construct
  source 1..75: mol_type = other DNA
ggttatacccgaagggaggcctgtgaacgacatgaggtttctcagggatatttctctggtgctctcgggcgtatt

SEQ ID NO: 707696 - DNA, 75 bp, synthetic construct
  source 1..75: mol_type = other DNA
gcaagaagcacgggcgtgctttgtcgcccggaaaaatgtcagagagccagttctggttattagctgaaatatctc

SEQ ID NO: 707697 - DNA, 75 bp, synthetic construct
  source 1..75: mol_type = other DNA
ttccaggatttgtatctgaagttgcttttgatttattaattgaactctcttctgtgcacagtattaaaattatta

SEQ ID NO: 707698 - DNA, 75 bp, synthetic construct
  source 1..75: mol_type = other DNA
gtactttcgatcccattaccaatggtcatatcgatatcgtgacgcgcgccacgcagatgttcgatcacgttattc

SEQ ID NO: 707699 - DNA, 75 bp, synthetic construct
  source 1..75: mol_type = other DNA
agttgcagattttgaatatgaaatgcagttggcacatatgaatcgccacttaatgccagaactggaaagtgtatt

SEQ ID NO: 707700 - DNA, 75 bp, synthetic construct
  source 1..75: mol_type = other DNA
gcaattcaagcctgggactgatgactgcttttttcgaagcatacatgaacgcagactacaccgatcgcggtctgc

SEQ ID NO: 707701 - DNA, 75 bp, synthetic construct
  source 1..75: mol_type = other DNA
ggaataagcagcacgatgctgaaggatgcccgtatcagcctgatgtattaccacgggcggcacattgccggaact

SEQ ID NO: 707702 - DNA, 75 bp, synthetic construct
  source 1..75: mol_type = other DNA
cctccctcctctgttgaaaaccagtggagcacgggagcagcttctggatcaaattgaaactgtagacccagaact

SEQ ID NO: 707703 - DNA, 75 bp, synthetic construct
  source 1..75: mol_type = other DNA
tatcgacgaaaactccggtgaattttttgttcaggtctggggaaatggagccaacttcgacaacgtgattttacg

SEQ ID NO: 707704 - DNA, 75 bp, synthetic construct
  source 1..75: mol_type = other DNA
agaaaaacaggatgatgaagaaaaactgcaaccatcttgcgcaatggcagatgaacaggcaacggctgaaacagt

SEQ ID NO: 707705 - DNA, 75 bp, synthetic construct
  source 1..75: mol_type = other DNA
aaaagcaccgtccatcgcttattgcaggggttacagtcctgtggctatgtgaccaccgcgcccgcagcaggcagc

SEQ ID NO: 707706 - DNA, 75 bp, synthetic construct
  source 1..75: mol_type = other DNA
aaccattaacttctccagccgcgaagacgatcacgctattttgatttataagctggaacccacaaccgggatgct

SEQ ID NO: 707707 - DNA, 75 bp, synthetic construct
  source 1..75: mol_type = other DNA
cgatgccgcagcgagtaacagaagaaggaaaacaggacgatgaagaaaaaccacaaccatctggcgcaatggcag

SEQ ID NO: 707708 - DNA, 75 bp, synthetic construct
  source 1..75: mol_type = other DNA
ggtaacactggaggagtggcaaaaacgtcagcaagaagaaaacgccgggaaaacgtttatcagtccggatatgta

SEQ ID NO: 707709 - DNA, 75 bp, synthetic construct
  source 1..75: mol_type = other DNA
caacggaataagcagcacaatgctgaaggatgcccgcatcagcctgatgtattaccacggacggcacattgccgg

SEQ ID NO: 707710 - DNA, 75 bp, synthetic construct
  source 1..75: mol_type = other DNA
aatgatcgaccttgaaaccatgggaaaaaatcctgatgccccgatcatctcaataggtgcaatatttttcgatcc

SEQ ID NO: 707711 - DNA, 75 bp, synthetic construct
  source 1..75: mol_type = other DNA
atgaacaggcaacgactgaagcagtggaaccggatacaactgaacataatcaggactcgcagtcgatggatgctc

SEQ ID NO: 707712 - DNA, 75 bp, synthetic construct
  source 1..75: mol_type = other DNA
ttataaccttcatcccgcgcacgctaaacgcattgaggaaattatcgctgaaaataaaccgccattttctgtgtt

SEQ ID NO: 707713 - DNA, 75 bp, synthetic construct
  source 1..75: mol_type = other DNA
ctaagacccagggtgagtctctgatgccaggagaaatgccagagtttcagttttggttattggttgaaatatcgc

SEQ ID NO: 707714 - DNA, 75 bp, synthetic construct
  source 1..75: mol_type = other DNA
acgcgattttattcagttgtgcgcagtggctgtaaattttatgagcgagccagactctggcgcgaagagcgtgca

SEQ ID NO: 707715 - DNA, 75 bp, synthetic construct
  source 1..75: mol_type = other DNA
ggcagttgccctggtatatggttatcggtccggcgggcagtggcaaaacgacactgctgcgcgagggttttccgt

SEQ ID NO: 707716 - DNA, 75 bp, synthetic construct
  source 1..75: mol_type = other DNA
cggtggcgcgatgacctaccgtgtgcataccgacaccgaggataacccgttcagcggtgggttgttcagccagtt

SEQ ID NO: 707717 - DNA, 75 bp, synthetic construct
  source 1..75: mol_type = other DNA
attgatcaggctggatccctgcgtggtctgtcgctgtctgatgtgctgaatctgaaagcggataccatgttaaag

SEQ ID NO: 707718 - DNA, 75 bp, synthetic construct
  source 1..75: mol_type = other DNA
attgaacaggctggatccctgcgtggtctgtcgctgtctgatgtgctgaatctgaaagcggataccatgttaatg

SEQ ID NO: 707719 - DNA, 75 bp, synthetic construct
  source 1..75: mol_type = other DNA
tgattttattcagctgtgcggggtggcggttaattttttggccggtcaggactctggcgggaagagtggggcggc

SEQ ID NO: 707720 - DNA, 75 bp, synthetic construct
  source 1..75: mol_type = other DNA
ggcaactcccctggtatatggtcatcggccctgctggtagtggtaaaaccacgttactgcgggaaggttttccgt

SEQ ID NO: 707721 - DNA, 75 bp, synthetic construct
  source 1..75: mol_type = other DNA
aatgttttgcaccgccggttatgggaacatgccctgagctggctggtggagaagcgcgcccgccagccgctgaac

SEQ ID NO: 707722 - DNA, 75 bp, synthetic construct
  source 1..75: mol_type = other DNA
actcacccgtctcgggcatgagttcgccccggaaaacagtaccctggcagtacagaaagacaaagaaagcacgat

SEQ ID NO: 707723 - DNA, 75 bp, synthetic construct
  source 1..75: mol_type = other DNA
ctgttaccggaagtcaaacgggcgctgcataccgtactgtcgccaagagcggtcaatctgccgctgcatctgcgt

SEQ ID NO: 707724 - DNA, 75 bp, synthetic construct
  source 1..75: mol_type = other DNA
agcaggcaaaagtctttatggatgtgccgcctccgcagggggaagatgactatggcaacctgcaactgccgctac

SEQ ID NO: 707725 - DNA, 75 bp, synthetic construct
  source 1..75: mol_type = other DNA
acgcctgtacctcacgccccatgtcggtaaacaggcggtgatctttgatatcgacggcacactctgcgctcccgc

SEQ ID NO: 707726 - DNA, 75 bp, synthetic construct
  source 1..75: mol_type = other DNA
attgatcaggctggatccctgcgtggtctgtcgctgtctgatgtgctgaatctgaaagcggataccatgttcacg

SEQ ID NO: 707727 - DNA, 75 bp, synthetic construct
  source 1..75: mol_type = other DNA
ttaagaaacttggtgatgatagaggttcgctggtttcattagaacaaaataaaaatattccatttgaaattaaac

SEQ ID NO: 707728 - DNA, 75 bp, synthetic construct
  source 1..75: mol_type = other DNA
tagcagatgatttttacaatgagtctgattacatacgtgactataatgattttctaaaaatgattagcaaagatg

SEQ ID NO: 707729 - DNA, 75 bp, synthetic construct
  source 1..75: mol_type = other DNA
agcttatagttataagcggttttctcgagtctcgtcctgataacaatccaaggctcgattctgagggcagtgagg

SEQ ID NO: 707730 - DNA, 75 bp, synthetic construct
  source 1..75: mol_type = other DNA
cccaacgcaagacgccattaaccgaatatactttgcaatgtgaatatagtcagttaaccggcattgaagcgttgc

SEQ ID NO: 707731 - DNA, 75 bp, synthetic construct
  source 1..75: mol_type = other DNA
gcacataaaaacttaaaacaggttgcaatagctgttagaggaagttgtaagtttaaattagacaatggtaccgat

SEQ ID NO: 707732 - DNA, 75 bp, synthetic construct
  source 1..75: mol_type = other DNA
agtaaggactgtgttttaatggttcttgctgacatggaatatgatgaatctgattacattagagattattctatt

SEQ ID NO: 707733 - DNA, 75 bp, synthetic construct
  source 1..75: mol_type = other DNA
attgagcaggctggatccctgcgtggtctgtcgctgtctgatgtgctgaatctgaaagcggataccatgttgatg

SEQ ID NO: 707734 - DNA, 75 bp, synthetic construct
  source 1..75: mol_type = other DNA
attgaccaggctggatccctgcgtggtctgtcgctgtctgatgtgctgaatctgaaagcggataccatgttcatg

SEQ ID NO: 707735 - DNA, 75 bp, synthetic construct
  source 1..75: mol_type = other DNA
attgatcaggctggatccctgcgtggtctgtcgctgtctgatgtgctgaatctgaaagcggataccatgttgagg

SEQ ID NO: 707736 - DNA, 75 bp, synthetic construct
  source 1..75: mol_type = other DNA
catataacccgagtacctgctgatcccgataagggaatgactacgaacgaggttcctgcctattacaaacatctt

SEQ ID NO: 707737 - DNA, 75 bp, synthetic construct
  source 1..75: mol_type = other DNA
gaggcttttttaatgaaaaaaaccttggtcggctggttattttttatagcaaagtcaatgcggttgggatgggat

SEQ ID NO: 707738 - DNA, 75 bp, synthetic construct
  source 1..75: mol_type = other DNA
aagacgtactggacgaacaactggcaggactggcgaaagcgcatccatcgctgacactgcatcaggatccggtgt

SEQ ID NO: 707739 - DNA, 75 bp, synthetic construct
  source 1..75: mol_type = other DNA
cttaaagccagagctgtgctcgactatacaggggcggatgctctgatgataggccgtgcagctcagggaagaccc

SEQ ID NO: 707740 - DNA, 75 bp, synthetic construct
  source 1..75: mol_type = other DNA
gttcctgaacatgtggttaccacttctcacgaactgatcgccattatcaaaaaacacaatgccagtctgccagca

SEQ ID NO: 707741 - DNA, 75 bp, synthetic construct
  source 1..75: mol_type = other DNA
agaaaaacaggatgacgaagaaaaaccgcaaccatctggcgcaatggcatatgaacaggcaacggctgaaacagt

SEQ ID NO: 707742 - DNA, 75 bp, synthetic construct
  source 1..75: mol_type = other DNA
ttttgtgaattatggccaattcatcgcgatctgcaacagacacgcctgaagaatactgttttaccatccggttta

SEQ ID NO: 707743 - DNA, 75 bp, synthetic construct
  source 1..75: mol_type = other DNA
cgcgtacaaaaagttgcccgctttcttcagacagagataaggcaataactcagttccatgagctattattaaaat

SEQ ID NO: 707744 - DNA, 75 bp, synthetic construct
  source 1..75: mol_type = other DNA
taaagcaattgtacatcacctgatcactccacaaaaaatagaaaatatatactgcccaggaaattctgaagcaga

SEQ ID NO: 707745 - DNA, 75 bp, synthetic construct
  source 1..75: mol_type = other DNA
gctggatacgatgaagatgacttcaaaaaacctgttcgcgtcaatttgcctgttgttgatgacctcccgccagaa

SEQ ID NO: 707746 - DNA, 75 bp, synthetic construct
  source 1..75: mol_type = other DNA
aactgccctgactgtggtgcggtgatgggcgacgcaacataccaggaaacattcgatgaagagaatcaggttgaa

SEQ ID NO: 707747 - DNA, 75 bp, synthetic construct
  source 1..75: mol_type = other DNA
cttgctgcatcacgtggtgaatttgttgacggaattagcgacccgaacgatccgaaatgggtgaaggggattgaa

SEQ ID NO: 707748 - DNA, 75 bp, synthetic construct
  source 1..75: mol_type = other DNA
acacgccagaaactgtaaaaaccagcccggatgtgaaacaacctgagccagtagtgcaacagaaaccggaaatag

SEQ ID NO: 707749 - DNA, 75 bp, synthetic construct
  source 1..75: mol_type = other DNA
tggctcgttcaatggacgtggacatttataaccttcatccggcacacgctaaacgtgtcgaggaaattatcgctg

SEQ ID NO: 707750 - DNA, 75 bp, synthetic construct
  source 1..75: mol_type = other DNA
catcgcgattgcagtgatgaaactggtgaagcgtcagctcctgtagcaactgaaatcatgtggccgtcatatttc

SEQ ID NO: 707751 - DNA, 75 bp, synthetic construct
  source 1..75: mol_type = other DNA
cctgagttgttatgcggatatctatctgtgccgttaaaatatacagaagtaggcgaggatatttcaggggaaaat

SEQ ID NO: 707752 - DNA, 75 bp, synthetic construct
  source 1..75: mol_type = other DNA
tatctccgcgacatctatgcaatacgaacaccgcccgtatcggtaattcacattggctatgtccgcctgtccatc

SEQ ID NO: 707753 - DNA, 75 bp, synthetic construct
  source 1..75: mol_type = other DNA
ccgaaatgggttaaggggatccagactcgcgattctgtgtaccagaaccagccagaaacggaacaaaacacgcca

SEQ ID NO: 707754 - DNA, 75 bp, synthetic construct
  source 1..75: mol_type = other DNA
ggcaactgtcctgactgtggcgcggtgatgggcgacgcaacataccaggaaacattcggtgaagagaatcaggtt

SEQ ID NO: 707755 - DNA, 75 bp, synthetic construct
  source 1..75: mol_type = other DNA
cgataaagtcagcgcgctgcgcgggattttcagcgaatatggtttgctgaaattccgtgtacaagttgaagtacg

SEQ ID NO: 707756 - DNA, 75 bp, synthetic construct
  source 1..75: mol_type = other DNA
gcagtagaaactatgaaagcaaaccaacggctggttattgatataagcacccttaaagaggtgcaggatacgctt

SEQ ID NO: 707757 - DNA, 75 bp, synthetic construct
  source 1..75: mol_type = other DNA
aatagcctcagaagagtcaagcgatgctttggggggaatcctttgtgttgatcagggagatgagaaattaacacc

SEQ ID NO: 707758 - DNA, 75 bp, synthetic construct
  source 1..75: mol_type = other DNA
catacacctgggaagtgctggtccgccaactgaaaaaggcgcgtcagcagtatatcagcgcacagaacaaaagaa

SEQ ID NO: 707759 - DNA, 75 bp, synthetic construct
  source 1..75: mol_type = other DNA
aagccgcaatggcgacgcctcgcgctatgcggggtttcgagaagggcagaacgtcagactgcaccgaccggtcag

SEQ ID NO: 707760 - DNA, 75 bp, synthetic construct
  source 1..75: mol_type = other DNA
gttgttggtgatatgaactatattgtacctgtttcagaccctcagttgttggcaaataaaattaatgaagttatg

SEQ ID NO: 707761 - DNA, 75 bp, synthetic construct
  source 1..75: mol_type = other DNA
cccgaacgatccgaaatgggtaaaggggatccagactcgcgattgtgtgtaccagaaccagccagaaacggaaaa

SEQ ID NO: 707762 - DNA, 75 bp, synthetic construct
  source 1..75: mol_type = other DNA
tcttccgcgtgaaatcgagttgcgccagaaacaatacgaatactaccgtgatttactgttcagtttcccgaaacc

SEQ ID NO: 707763 - DNA, 75 bp, synthetic construct
  source 1..75: mol_type = other DNA
agagtatcacattgctgaggctcgttactggcgtaaagcgggagataaatcaaagaaacaactttgcttatggca

SEQ ID NO: 707764 - DNA, 75 bp, synthetic construct
  source 1..75: mol_type = other DNA
cgcgcaggcagacgcccacggggattgccaggattgcgaagtttctgtagccactttgcggttcacacagcgtct

SEQ ID NO: 707765 - DNA, 75 bp, synthetic construct
  source 1..75: mol_type = other DNA
caaacctccctcctctgttgaaaaccagtggatcacgggagcaacttctggagcaaattgaaactgtagatccag

SEQ ID NO: 707766 - DNA, 75 bp, synthetic construct
  source 1..75: mol_type = other DNA
cacgcgaagcacaatcctccattctgaccgatgaaatcccgttggatgatgcactgctgcaattacgggaattta

SEQ ID NO: 707767 - DNA, 75 bp, synthetic construct
  source 1..75: mol_type = other DNA
gtcagaatggctattccattcgaaggcgtaccccacaatgcgctggacgatgcccgtcaccaggcaaaacaagtt

SEQ ID NO: 707768 - DNA, 75 bp, synthetic construct
  source 1..75: mol_type = other DNA
tatgacaccggcttccgatggcacctttatttccattgacgacgaagaagcgaaacagttccgtgaaagtgtggt

SEQ ID NO: 707769 - DNA, 75 bp, synthetic construct
  source 1..75: mol_type = other DNA
tgacaaaagagtggatgaagggaaatcgtgtttcacgtatcacccgcacgccttccggtgctaatgctggcggcg

SEQ ID NO: 707770 - DNA, 75 bp, synthetic construct
  source 1..75: mol_type = other DNA
gccggggccgaagaaacaggcatcctttacggttcgcttccggaggaattccggcgtattcctgagggggaaaaa

SEQ ID NO: 707771 - DNA, 75 bp, synthetic construct
  source 1..75: mol_type = other DNA
cccggatccggaaatcgtggaaattgcctgcggtcgctcatcagccccgatgccgcagcgcggaacagcagaagg

SEQ ID NO: 707772 - DNA, 75 bp, synthetic construct
  source 1..75: mol_type = other DNA
ttgaagggattagcgacccgaacgatccaaaatgggttaaggggattgaaaccctcgactctgtgaaccagaacc

SEQ ID NO: 707773 - DNA, 75 bp, synthetic construct
  source 1..75: mol_type = other DNA
taaattactggctgcttctcacggagaatttgttgaagggattagcgatccgaatgatccgaaatgggtgaaggg

SEQ ID NO: 707774 - DNA, 75 bp, synthetic construct
  source 1..75: mol_type = other DNA
agattctgcctgttcgctggctggcgcaacacaacagcgaaaaaccggtcacgcacgtttcactggacaaactgc

SEQ ID NO: 707775 - DNA, 75 bp, synthetic construct
  source 1..75: mol_type = other DNA
atcacgcgaagcacaatccgctatttttaccgatgaaatctcgttagatgttgctctccggctattcatagaatt

SEQ ID NO: 707776 - DNA, 75 bp, synthetic construct
  source 1..75: mol_type = other DNA
tctatggtttgtgcgccaaccccgcatgtatagccacagcgccagcaatccctgatatcgccatcatgattgcca

SEQ ID NO: 707777 - DNA, 75 bp, synthetic construct
  source 1..75: mol_type = other DNA
ggagaacacttgcggcgatcaggatcacgccagcgataatgaaactggcgagacggcaaataccttaattaatat

SEQ ID NO: 707778 - DNA, 75 bp, synthetic construct
  source 1..75: mol_type = other DNA
cacgggagcagcttctggagcaaattgaaactgtagatccagaactggcaaaaaaagaacgtgctaaatcgttgc

SEQ ID NO: 707779 - DNA, 75 bp, synthetic construct
  source 1..75: mol_type = other DNA
ttacggttcgcttccggaggaatttcggcgtattcctgagggggaaaaacacaaagcatcagcaatgaaagcctg

SEQ ID NO: 707780 - DNA, 75 bp, synthetic construct
  source 1..75: mol_type = other DNA
gtaatgggcgacgcaacgtatcaggaaacctttaatgaagaaaatctggatgaatctcaggaaaaagatccggag

SEQ ID NO: 707781 - DNA, 75 bp, synthetic construct
  source 1..75: mol_type = other DNA
aggtgagatcgattttacgtggtgtgaacgctatcaactcggcaaggactccatcacctgggaactaaaaccggg

SEQ ID NO: 707782 - DNA, 75 bp, synthetic construct
  source 1..75: mol_type = other DNA
gcaagaacgactaaaagatcgcttacaccgtgaaattattgaacgtgattatcacttgagcgccgcaatgtactg

SEQ ID NO: 707783 - DNA, 75 bp, synthetic construct
  source 1..75: mol_type = other DNA
aaccgggctggaaatcagggtccgccctgatatcgaaatccgactgccatacgaaagcatctgcgccgacgtgaa

SEQ ID NO: 707784 - DNA, 75 bp, synthetic construct
  source 1..75: mol_type = other DNA
ggggataactgccctgactgtggtgcggtgatgggcgacgcaacatatcaggaaacattcgatgacgagaatcag

SEQ ID NO: 707785 - DNA, 75 bp, synthetic construct
  source 1..75: mol_type = other DNA
gatccagacccgcgactctatataccagaatcagccagaaacggaacagaacgaccagaaagcggaacagaacga

SEQ ID NO: 707786 - DNA, 75 bp, synthetic construct
  source 1..75: mol_type = other DNA
cagcaagaatcggaacagaacgaccagaaagcggaacaaaacagcccaaatgcgttacaaaacgagccagaaacg

SEQ ID NO: 707787 - DNA, 75 bp, synthetic construct
  source 1..75: mol_type = other DNA
accaattggtatcgaggtcatcactgcgcatgtcactgaatatctgaacaaggtacttattgaaaccgatcatgc

SEQ ID NO: 707788 - DNA, 75 bp, synthetic construct
  source 1..75: mol_type = other DNA
tattacggaatttcgaatgagaattaccacgcgggtcccggtgtcagtaagtctcagctcgacgacattgctgat

SEQ ID NO: 707789 - DNA, 75 bp, synthetic construct
  source 1..75: mol_type = other DNA
cgatgccgcagcgtgtaacagaagaagaagaaaaacaggatgatgaagaaaaactgcaaccatcttgcgcaatgg

SEQ ID NO: 707790 - DNA, 75 bp, synthetic construct
  source 1..75: mol_type = other DNA
gaagtgctaaaaggcccggcctccacgctgtatggcattctcgatcctggcggactgattaacgtcgtgaccaag

SEQ ID NO: 707791 - DNA, 75 bp, synthetic construct
  source 1..75: mol_type = other DNA
gcagaatatcatctcaatagccagtggacagcgcgctttgattacagctacagccaggataaatacagcgataat

SEQ ID NO: 707792 - DNA, 75 bp, synthetic construct
  source 1..75: mol_type = other DNA
cccaaactggggttagtctacaaactgacgccattgaaccgccccgggtttcctggagagtgttttatctgtgaa

SEQ ID NO: 707793 - DNA, 75 bp, synthetic construct
  source 1..75: mol_type = other DNA
aaacctgtggtacggggatttattgcagagcggtatgtacaaagtatgtttacaggtaccagccagatttgctct

SEQ ID NO: 707794 - DNA, 75 bp, synthetic construct
  source 1..75: mol_type = other DNA
aggcctgtggtacggggatctattccagagcggtatgtacaaagtatgtttacaggtaccagccagatttgctcc

SEQ ID NO: 707795 - DNA, 75 bp, synthetic construct
  source 1..75: mol_type = other DNA
ctgcataaaatgattcctgacaattcattgcgcatggtacagctctttttccctgacccgtggcacaaagcgcgc

SEQ ID NO: 707796 - DNA, 75 bp, synthetic construct
  source 1..75: mol_type = other DNA
acaaaggtaccggtaaatggactagccagagcgcactggatctcggcgaaccgctgtcgctgattaccgagtctg

SEQ ID NO: 707797 - DNA, 75 bp, synthetic construct
  source 1..75: mol_type = other DNA
cttcaagcaaattgccgatgactaccagcaggcgctgcgcgatgtcgtcgcttatgcggtacagaacggtatccc

SEQ ID NO: 707798 - DNA, 75 bp, synthetic construct
  source 1..75: mol_type = other DNA
atggctaagttcacaccttcattctcaggaatcaaaggtcgggcgctcttttcactgctctttgcagcaccaatg

SEQ ID NO: 707799 - DNA, 75 bp, synthetic construct
  source 1..75: mol_type = other DNA
ggatcacgccgggtgaacacattatcagtgccgactctgcgctcagcagaaatatccggcattgtttctgccttt

SEQ ID NO: 707800 - DNA, 75 bp, synthetic construct
  source 1..75: mol_type = other DNA
tgcgtctgaagagtacaactgggatctgaactacggcgaaatcgcgaagattttccgtgctggctgcatcatccg

SEQ ID NO: 707801 - DNA, 75 bp, synthetic construct
  source 1..75: mol_type = other DNA
atgaacggtctaaaaacggggctggggatcacgccgggtgagcacattatcagtgccgattctgcgctcagcaga

SEQ ID NO: 707802 - DNA, 75 bp, synthetic construct
  source 1..75: mol_type = other DNA
aactaatggcgacgctgaaccagacgaagctctcattgctgactcgcttacgcggcgatcgtggtcaacggggaa

SEQ ID NO: 707803 - DNA, 75 bp, synthetic construct
  source 1..75: mol_type = other DNA
tgcttttttatcgcctcggcctcagtagaattgctgtttccctggccctggctatttgcgattggcttaacgctc

SEQ ID NO: 707804 - DNA, 75 bp, synthetic construct
  source 1..75: mol_type = other DNA
tgtggtttgtgccatcactggaagggcagctggtgctgctggttattacccggcgttgctctttttttgccttcc

SEQ ID NO: 707805 - DNA, 75 bp, synthetic construct
  source 1..75: mol_type = other DNA
agctggcctgaaacagcggatgcagcaacttgaaccacgggcagacagcaaagaacctctggtcgtacaacaagt

SEQ ID NO: 707806 - DNA, 75 bp, synthetic construct
  source 1..75: mol_type = other DNA
tactgttccctgtccgcccattgcaggacaatctggcgcgttgctatgaacaactggcgcgttatctggaactga

SEQ ID NO: 707807 - DNA, 75 bp, synthetic construct
  source 1..75: mol_type = other DNA
gattgcattactgccagaaattggccgcctgcagcacaggattactcaagttccacaggaaactcctgctttggc

SEQ ID NO: 707808 - DNA, 75 bp, synthetic construct
  source 1..75: mol_type = other DNA
cagagcgacatgtacgaagtctgtttacaggtaccagccagatttgttccagaactgcggaggtgtgattactta

SEQ ID NO: 707809 - DNA, 75 bp, synthetic construct
  source 1..75: mol_type = other DNA
tgtggtacggggatttattgcagagcggtatgtacgaagtctgtttacagctaccagccagacttgtttcaggac

SEQ ID NO: 707810 - DNA, 75 bp, synthetic construct
  source 1..75: mol_type = other DNA
atgaacggtataaaaacggggctggggatcacgccgggtgagcacattattagtgccgactctgcgctcagcaga

SEQ ID NO: 707811 - DNA, 75 bp, synthetic construct
  source 1..75: mol_type = other DNA
tcaggcgaattaaatttcaacaaaatctgcggagatataaagagggacgaccttttaatagatatttacaataga

SEQ ID NO: 707812 - DNA, 75 bp, synthetic construct
  source 1..75: mol_type = other DNA
gaacaacgtgaaaaattgcgccgacttggcgtgattactaactgggggattaataaaacagcagacgggaagaat

SEQ ID NO: 707813 - DNA, 75 bp, synthetic construct
  source 1..75: mol_type = other DNA
ttttatcgaaaaatacaacaactgcatatcatcaggtgaattaagtttcgacaaagtctgtaaaaacataaaaag

SEQ ID NO: 707814 - DNA, 75 bp, synthetic construct
  source 1..75: mol_type = other DNA
gacagatgctcagggggcgtggtatgagcacgatttacatgccctgaccgcgcaacagaaggcagactgtgtggt

SEQ ID NO: 707815 - DNA, 75 bp, synthetic construct
  source 1..75: mol_type = other DNA
tacctgatggcgacccggggattaaaaaaaccacgtggtcgcactgtaacgctcgcgtttgatgaagggatcgtc

SEQ ID NO: 707816 - DNA, 75 bp, synthetic construct
  source 1..75: mol_type = other DNA
cttagtcggcgtcgtcgtacgcgatggtgcggccaactcccatgcggcgattatggtacgcgcgctgggtattcc

SEQ ID NO: 707817 - DNA, 75 bp, synthetic construct
  source 1..75: mol_type = other DNA
gtataaaagtcatgctcaatgccggtttaagcccggaacatgaagaaaaactgggcagccgtattgatggcatag

SEQ ID NO: 707818 - DNA, 75 bp, synthetic construct
  source 1..75: mol_type = other DNA
gcgaacgactgaccggggcgttggaagaggcggctaacgagtttcgccgctatagcaaacgctttgctgccggtg

SEQ ID NO: 707819 - DNA, 75 bp, synthetic construct
  source 1..75: mol_type = other DNA
ctggcgatgatcgccagagaggctgaaacgcagggcgttgatcttcgtttgtgcggtgaaatggcgggcgatcca

SEQ ID NO: 707820 - DNA, 75 bp, synthetic construct
  source 1..75: mol_type = other DNA
ttgttactacctgatggcgacccgggggctgaaaaaccacgcggtcgcactgtaacgctcgcgtttgatgaaggg

SEQ ID NO: 707821 - DNA, 75 bp, synthetic construct
  source 1..75: mol_type = other DNA
agatgaagacggtaactacctggttgatgtgattctggatgaagcggctaacaagggtaccggtaaatggaccag

SEQ ID NO: 707822 - DNA, 75 bp, synthetic construct
  source 1..75: mol_type = other DNA
cttatgcggtgcagaacggcattccagtacctaccttctctgcagcggttgcttattatgacagctatcgtgccg

SEQ ID NO: 707823 - DNA, 75 bp, synthetic construct
  source 1..75: mol_type = other DNA
tgctcagttcctgcagaaaatcacggatgcttacgccgaaaatccgaagattgctaacctgctgttagccccgta

SEQ ID NO: 707824 - DNA, 75 bp, synthetic construct
  source 1..75: mol_type = other DNA
gtggcagatgaactgtcagcgacaacgcttgctgagctgccccaggatcgcttagtcggtgttgtcgtgcgagat

SEQ ID NO: 707825 - DNA, 75 bp, synthetic construct
  source 1..75: mol_type = other DNA
ccgaccaactggagttactgtcgcgtagtaaaaccgtcaccgtgcctaaggtttgggcagtaggcgctgaccgtg

SEQ ID NO: 707826 - DNA, 75 bp, synthetic construct
  source 1..75: mol_type = other DNA
ttaatgtaaaggaaagtaacatcaagctcggtttaaaaggtgtggtgagtgcgacgtttgaggcgaatgtttttg

SEQ ID NO: 707827 - DNA, 75 bp, synthetic construct
  source 1..75: mol_type = other DNA
agtacaacgaaagcgaagaatccttcctggtgacgctcgccacccagatggccgccattctatcccagtcgcagt

SEQ ID NO: 707828 - DNA, 75 bp, synthetic construct
  source 1..75: mol_type = other DNA
agtggcgcgttttaagctactggatgatggttccggatgtgatggtataattaccattacctaccagtgcgataa

SEQ ID NO: 707829 - DNA, 75 bp, synthetic construct
  source 1..75: mol_type = other DNA
cagggtttacaaattttgcctgggtcaatacatctggtgatacttacgatatttacgttgcaatcggaaattatg

SEQ ID NO: 707830 - DNA, 75 bp, synthetic construct
  source 1..75: mol_type = other DNA
cgctgccgttggcttaggaagtatggctgtatctgctggaatggaaaaagcccgtgaacgtatggaattgcagaa

SEQ ID NO: 707831 - DNA, 75 bp, synthetic construct
  source 1..75: mol_type = other DNA
ttttttcatgggaagaaattctgtgaggcctgtggttgtcaacgacggatgaaaagtgatccacttatatctcca

SEQ ID NO: 707832 - DNA, 75 bp, synthetic construct
  source 1..75: mol_type = other DNA
aaacctgtggtacggggatttattgcagagcggcatgtacgaagtatgtttgtagtggtcaagtaatattggcca

SEQ ID NO: 707833 - DNA, 75 bp, synthetic construct
  source 1..75: mol_type = other DNA
gtggcattgtgtgatgtgcgggcagcattttcccgggaaaaagttctgcgaagcctgtggcacggggatctattc

SEQ ID NO: 707834 - DNA, 75 bp, synthetic construct
  source 1..75: mol_type = other DNA
gctgcaacaaatgatgagctggtggctgaatgcgccgccgcaaaataatgaaataacgctgcccaatacgttcag

SEQ ID NO: 707835 - DNA, 75 bp, synthetic construct
  source 1..75: mol_type = other DNA
gctgcaacaaatgatgagctggtggctgaatgcaccaccgcaaaataatgaaataacgctgcccaatacgttcag

SEQ ID NO: 707836 - DNA, 75 bp, synthetic construct
  source 1..75: mol_type = other DNA
ccggggcgctatgtggtcgcggtcggtgcactacatctgtatggagaagggaatttgccgcagatgttgcgctaa

SEQ ID NO: 707837 - DNA, 75 bp, synthetic construct
  source 1..75: mol_type = other DNA
gctgctacgcgtcgtaatgctgccgctgggggtgtatatccagttacttctaagaagctccacaaagaaggtgtt

SEQ ID NO: 707838 - DNA, 75 bp, synthetic construct
  source 1..75: mol_type = other DNA
ccgctgtcgctgattaccgagtctgtgtttgcacgttatatctcttctctgaaagatcagcgtgttgccgcgtct

SEQ ID NO: 707839 - DNA, 75 bp, synthetic construct
  source 1..75: mol_type = other DNA
taaaggcgacatcatcattgatggcggtaataccttctttcaggacacaattcgtcgtaatcgtgaactttccgc

SEQ ID NO: 707840 - DNA, 75 bp, synthetic construct
  source 1..75: mol_type = other DNA
tggccggataccgtcagcgtggagaacatgacgaaagcccaatgattttctacacattcccggccacatttgaaa

SEQ ID NO: 707841 - DNA, 75 bp, synthetic construct
  source 1..75: mol_type = other DNA
ggcgcataacgacagcctgttaccacttgatgaggtagggcagggcagcagtgctaaagatgtcgccacgtctgc

SEQ ID NO: 707842 - DNA, 75 bp, synthetic construct
  source 1..75: mol_type = other DNA
ggatacctcaaagctggatttgattctggtcgaagggtttaagcatgaagagatcgcaaagattgtgctgtttcg

SEQ ID NO: 707843 - DNA, 75 bp, synthetic construct
  source 1..75: mol_type = other DNA
gaaaaaatggcacatacacaggcttaccgcaaaatgcaaataccgcacaaaattctgaacaaccagaaccggtaa

SEQ ID NO: 707844 - DNA, 75 bp, synthetic construct
  source 1..75: mol_type = other DNA
tgcatcgcctgctaccgctgcgtgcgttactacaaagattacgctgacggtacagatctgggcgtttatggcgcg

SEQ ID NO: 707845 - DNA, 75 bp, synthetic construct
  source 1..75: mol_type = other DNA
gggctgacggcagggcaggtgggcttgccgatgggtatgtccggcattgctccggtgctggctggcgcgcatctt

SEQ ID NO: 707846 - DNA, 75 bp, synthetic construct
  source 1..75: mol_type = other DNA
gcgggaggcgaccgccgttacaagaaaaaggcgctcggcaggattggcgggaagcagcatattttttacgtgctg

SEQ ID NO: 707847 - DNA, 75 bp, synthetic construct
  source 1..75: mol_type = other DNA
cggtaaagagcattaccgcgtgatgcgctggaaaaaattagcaaaccatgaagtcatcacaatggcgatcccgtg

SEQ ID NO: 707848 - DNA, 75 bp, synthetic construct
  source 1..75: mol_type = other DNA
tacggtgaacctgatgccctgcgcctcacctggtacggtactgctttgggtatcgccaacgaagcggaagcgcat

SEQ ID NO: 707849 - DNA, 75 bp, synthetic construct
  source 1..75: mol_type = other DNA
agctgcgcaaggctggcgcggcgcaaaccatcgttgccagccagcaacgatgggctttgatgacggaaacaccag

SEQ ID NO: 707850 - DNA, 75 bp, synthetic construct
  source 1..75: mol_type = other DNA
atggcaggaaaaacgatgataccgttactcgcctttgccgcgtggagtggcaccggaaaaactacgcttttgaaa

SEQ ID NO: 707851 - DNA, 75 bp, synthetic construct
  source 1..75: mol_type = other DNA
taagcatacgcaccatgatatggatgttgataagccaggcaaagatagctatgagctgcgcaaggctggcgcggc

SEQ ID NO: 707852 - DNA, 75 bp, synthetic construct
  source 1..75: mol_type = other DNA
ttgttgacggaattagcgacccgaacgatccgaaatgggtaaaggggatccagactcgcgattgtgtgtaccaga

SEQ ID NO: 707853 - DNA, 75 bp, synthetic construct
  source 1..75: mol_type = other DNA
gcggcatttatacgccggctctgcgcgaaatcgaatcttacgatgcggtactggtgctgggcgaagacgttaccc

SEQ ID NO: 707854 - DNA, 75 bp, synthetic construct
  source 1..75: mol_type = other DNA
ccgtgattttattcagttatgtgtggttgccgtaaattttttgagcggtgcggactctggcgggaagagcgaaca

SEQ ID NO: 707855 - DNA, 75 bp, synthetic construct
  source 1..75: mol_type = other DNA
tggatgtatttgaaatggaattgagcgacaaagctgttcgccacgctgaattcctcgcccaggatgatggagtta

SEQ ID NO: 707856 - DNA, 75 bp, synthetic construct
  source 1..75: mol_type = other DNA
ccgcgcagtatcagcttcagcgggccgtgggcgcagttccgcctgttcggggccggacaactgaccggagtacag

SEQ ID NO: 707857 - DNA, 75 bp, synthetic construct
  source 1..75: mol_type = other DNA
aacggcggcgtgggggattattgccctggtgtggcttaccgtccgggtgatgaagcgcctgcaacagcttgaaaa

SEQ ID NO: 707858 - DNA, 75 bp, synthetic construct
  source 1..75: mol_type = other DNA
aagagcatttgcaacatgaggcggaagaacgcctgcagacaatggttggtcatttcaatattgatccctcccgta

SEQ ID NO: 707859 - DNA, 75 bp, synthetic construct
  source 1..75: mol_type = other DNA
ggtaaatgtcacgaccaaaagcagcctcagagcaatactggcagactggctacaacgcagtggctctcgtgaatt

SEQ ID NO: 707860 - DNA, 75 bp, synthetic construct
  source 1..75: mol_type = other DNA
gacgataaagaccagtatctcattcttcgctggctgtcgtttggttctgaaacgccgacaaccgctgccattcca

SEQ ID NO: 707861 - DNA, 75 bp, synthetic construct
  source 1..75: mol_type = other DNA
tgagttctatacttgtaatgtgtttatctaccagtcatatatctttggcttccggactggataaaaatatgcaga

SEQ ID NO: 707862 - DNA, 75 bp, synthetic construct
  source 1..75: mol_type = other DNA
gtcagccagcctgagcctgcaccgttttgccgctgatgtgcgtcgttttgaagagcatctgcaacatgaagcaga

SEQ ID NO: 707863 - DNA, 75 bp, synthetic construct
  source 1..75: mol_type = other DNA
tggatgttttcgaaatggaattgagcgacaaagcggttcgccacgctgaattcctcgcccaggatgacggagtta

SEQ ID NO: 707864 - DNA, 75 bp, synthetic construct
  source 1..75: mol_type = other DNA
ccgttttgcaccatttccatacagcccggcagatttgcccatcaaagatttagccggataccgtcagcgtggaga

SEQ ID NO: 707865 - DNA, 75 bp, synthetic construct
  source 1..75: mol_type = other DNA
gaacctccccgctgttgctatggcgatgcgtcagcgctacccgaacgcgcagatcatcattgccgcagataacga

SEQ ID NO: 707866 - DNA, 75 bp, synthetic construct
  source 1..75: mol_type = other DNA
tgcgttttaacctgcaggatggattcccgctggtgacaactaaacgttgccacctgcgttccatcatccatgaac

SEQ ID NO: 707867 - DNA, 75 bp, synthetic construct
  source 1..75: mol_type = other DNA
atgaaacagtatttagaactgatgcaaaaagtgctcgacgaaggcacacagaaaaacgaccgtaccggaaccgga

SEQ ID NO: 707868 - DNA, 75 bp, synthetic construct
  source 1..75: mol_type = other DNA
ggtgcgccaggcggtaaaaggtaaagcgcgcgaaatggcggcagcacagaaagtggctgactggcagattgcggc

SEQ ID NO: 707869 - DNA, 75 bp, synthetic construct
  source 1..75: mol_type = other DNA
tagctctttgtctgacagcatcggggcatgtcctggcccatgatgtctggattacaggtaaacaggcagagaaca

SEQ ID NO: 707870 - DNA, 75 bp, synthetic construct
  source 1..75: mol_type = other DNA
acgctttccatttttggtcatcagatgcgttttaacctgcaggatggattcccgttagtgacaaccaaacgttgc

SEQ ID NO: 707871 - DNA, 75 bp, synthetic construct
  source 1..75: mol_type = other DNA
gtaaacctgaatccatcttcgattaccgtttcgaagacttcgagattgaaggttacgatccgcacccgggcatta

SEQ ID NO: 707872 - DNA, 75 bp, synthetic construct
  source 1..75: mol_type = other DNA
ttggtcgtgatggccagcccgcgaccctggtggccagaaagtgtcgacattgcgctaagcagtcggcaactgacc

SEQ ID NO: 707873 - DNA, 75 bp, synthetic construct
  source 1..75: mol_type = other DNA
taccgatcataaatggggcgtctggagtggctcggcgaatctgaatgccgccgccgcgacgtttaatcgtgttga

SEQ ID NO: 707874 - DNA, 75 bp, synthetic construct
  source 1..75: mol_type = other DNA
ggcgcgatcgccgccggacgtgagcacctggggtacccggaactgccagcgactatcgcctcgaaacaactgctg

SEQ ID NO: 707875 - DNA, 75 bp, synthetic construct
  source 1..75: mol_type = other DNA
tcataatttcccctcaaagggcacaattcctgacagaaggaatttctttgaaaatccccggatttataacgggaa

SEQ ID NO: 707876 - DNA, 75 bp, synthetic construct
  source 1..75: mol_type = other DNA
cagttcaccagccgctgggaaggggggatggtcagaacgtcaggaaactggcagcgcgatggaaaaacgctgatc

SEQ ID NO: 707877 - DNA, 75 bp, synthetic construct
  source 1..75: mol_type = other DNA
ttgcagattggccgcctggaagtgatcgacgcccgcctgcaaggcccggactgggcggtgaccgatctcgatctc

SEQ ID NO: 707878 - DNA, 75 bp, synthetic construct
  source 1..75: mol_type = other DNA
attaccggtaaacaggcagagaacaacgttactgcagagattggttatggccataatttcccctcaaagggcacg

SEQ ID NO: 707879 - DNA, 75 bp, synthetic construct
  source 1..75: mol_type = other DNA
ccgctgtatccgcaaaacgtgccggatattctgaaactggtacaacgcatccgcgccgagtgtccgggtaaagac

SEQ ID NO: 707880 - DNA, 75 bp, synthetic construct
  source 1..75: mol_type = other DNA
attggagatatttatccaaataaaacatttgttcatgtgttagatgaattgtcattaaatctcttattgtcggag

SEQ ID NO: 707881 - DNA, 75 bp, synthetic construct
  source 1..75: mol_type = other DNA
agcatatttatgctgatttgctggctcagtatgaaaagaaacgcattgcaggctctctggcttatactccgccag

SEQ ID NO: 707882 - DNA, 75 bp, synthetic construct
  source 1..75: mol_type = other DNA
agcggggaaggatggcaaatcagaacaccacgccttaaacacatgaagggggcacgactaagggtgtacggcctt

SEQ ID NO: 707883 - DNA, 75 bp, synthetic construct
  source 1..75: mol_type = other DNA
ggtataccgtagcaggaacgcctgaaagctggcttaacagtgttgcgcggctggcatacggcaactacgcgatga

SEQ ID NO: 707884 - DNA, 75 bp, synthetic construct
  source 1..75: mol_type = other DNA
aagtgaccagcgccgccgctggtaaatggccttatgtgctggctggcctgtctatcgacgttcctgattcatcgc

SEQ ID NO: 707885 - DNA, 75 bp, synthetic construct
  source 1..75: mol_type = other DNA
gaataccgcagacggaatgcgctgctggacagtatccgttcaggcatccagactgctattggcattcagagagta

SEQ ID NO: 707886 - DNA, 75 bp, synthetic construct
  source 1..75: mol_type = other DNA
taatggagcttagtgaaagaaaaagcgacaacgcacaaagattgtctatcatcacgttgtttgtaaagttaatga

SEQ ID NO: 707887 - DNA, 75 bp, synthetic construct
  source 1..75: mol_type = other DNA
ttgtggcgcgttacagtgagtgctggatatcggcaggtggtgtgtatgacgaaagtggcgtttaccggctatctg

SEQ ID NO: 707888 - DNA, 75 bp, synthetic construct
  source 1..75: mol_type = other DNA
acagtatgaaaggaagagcatttcacattcattgaattacgtaccgccacctttaggtggcaggaaaaggctatg

SEQ ID NO: 707889 - DNA, 75 bp, synthetic construct
  source 1..75: mol_type = other DNA
caagtgcggcaaagaagcattcttctatcgctaccaacaagctctcagccgtgaaatgcctattagccttgagct

SEQ ID NO: 707890 - DNA, 75 bp, synthetic construct
  source 1..75: mol_type = other DNA
ctctgtgaggctgtggcagtactggcagaaatatgcgggctggacaccatcacggcagtcagtgaagacagacat

SEQ ID NO: 707891 - DNA, 75 bp, synthetic construct
  source 1..75: mol_type = other DNA
aaagcccgcctgaaagcgatgacgccggctaactatattggtcgagctatcaccatggttgatgagctgaaataa

SEQ ID NO: 707892 - DNA, 75 bp, synthetic construct
  source 1..75: mol_type = other DNA
gcgtcgccgggctattgatgcgctgctgcaggggctgtgttttcactatgacccgctggccaaccgcgtccagtg

SEQ ID NO: 707893 - DNA, 75 bp, synthetic construct
  source 1..75: mol_type = other DNA
caggaaaactctccatcacccgtgccacccgcgcactgacgttcctgtcagagctggggctgattagctaccaga

SEQ ID NO: 707894 - DNA, 75 bp, synthetic construct
  source 1..75: mol_type = other DNA
tgcgtcggcgcatgccaccggtgctgcgtcgacgggctattgatgcgctgctgcaggggctgtgttttcactatg

SEQ ID NO: 707895 - DNA, 75 bp, synthetic construct
  source 1..75: mol_type = other DNA
atcgtcagaaaatttacgatctggtggaagcgatcacgggtttccgtatgcacccggcgtggttccgtattggcg

SEQ ID NO: 707896 - DNA, 75 bp, synthetic construct
  source 1..75: mol_type = other DNA
tgtggcgcatgacctgccgcgaggctgggatcgcttgctgcgtgagttccttgactggatgccgaaacgtctggc

SEQ ID NO: 707897 - DNA, 75 bp, synthetic construct
  source 1..75: mol_type = other DNA
aaaacgcgaagtggagcgtcgtgtgaaggagcgcatgattctgtcacgtaaccgtaattacagccggctggccac

SEQ ID NO: 707898 - DNA, 75 bp, synthetic construct
  source 1..75: mol_type = other DNA
gaaaacagacagcgtaaaaagcagggactggataccctgggtatggatgaactgatagcgaaagcctggcgtttt

SEQ ID NO: 707899 - DNA, 75 bp, synthetic construct
  source 1..75: mol_type = other DNA
gggtggatgcgctgggtatggatgaactgatagcgaaggcctggcgttttgtgcgcgagcgtttccgcagttatc

SEQ ID NO: 707900 - DNA, 75 bp, synthetic construct
  source 1..75: mol_type = other DNA
ccgctggccaaccgcgtccagtgctccatcaccacgctggccattgagtgcggactggcgacagagtccggtgca

SEQ ID NO: 707901 - DNA, 75 bp, synthetic construct
  source 1..75: mol_type = other DNA
agacagagcttaagtcccggggaataaagcgtgcccgtgcgcgtcgtgatgcaggcagggaacgtcaggatatcg

SEQ ID NO: 707902 - DNA, 75 bp, synthetic construct
  source 1..75: mol_type = other DNA
gtgaagtggagcgtcgtgtgaaggagcgcatgattctgtcacgtaaccgcaattacagccggctggccacagctt

SEQ ID NO: 707903 - DNA, 75 bp, synthetic construct
  source 1..75: mol_type = other DNA
agcgtgcccgtgcgcgtcgtgatgcgaacagggaacgtcaggatatagtcaccctggtgaaacggcagctgacgc

SEQ ID NO: 707904 - DNA, 75 bp, synthetic construct
  source 1..75: mol_type = other DNA
cgcgctaccgaattctcgccgtttgagctgaccaaaaccaaacaggatctggagatggaagccctgaccttcaaa

SEQ ID NO: 707905 - DNA, 75 bp, synthetic construct
  source 1..75: mol_type = other DNA
cacccgtgccctgacgttcctgtcagagctgggactgattacctaccagacggaatatgacccgcttattggctg

SEQ ID NO: 707906 - DNA, 75 bp, synthetic construct
  source 1..75: mol_type = other DNA
ggaacgttgaagttctgcgaaaaactgatggaaaaagcggtgggcttcagctcccgttttgatttcgctattcat

SEQ ID NO: 707907 - DNA, 75 bp, synthetic construct
  source 1..75: mol_type = other DNA
gacccgcttatcgggtgctacattccgaccgatatcacgttcacatctgcactgtttgctgccctcgatgtatca

SEQ ID NO: 707908 - DNA, 75 bp, synthetic construct
  source 1..75: mol_type = other DNA
ggatcttctgtttcagcatgtcgcgctatagccagcatctggaaaaacgttttaacaccgggcgtacaccgcatt

SEQ ID NO: 707909 - DNA, 75 bp, synthetic construct
  source 1..75: mol_type = other DNA
tagaagagttacactggaaagccgaaaaagatttaagtgatatgttaaaagatgcttgggcttgggaaatccgag

SEQ ID NO: 707910 - DNA, 75 bp, synthetic construct
  source 1..75: mol_type = other DNA
gcgaacagggaacgtcaggatatcgtcaccctggtgaaacgacagctgacgcgtgaaatctcggaagggcgcttc

SEQ ID NO: 707911 - DNA, 75 bp, synthetic construct
  source 1..75: mol_type = other DNA
gtgactgatcttcaacaaacgtattaccgccaggtaaagaatccgaatccggtgttcaccccccgtgaaggtgcc

SEQ ID NO: 707912 - DNA, 75 bp, synthetic construct
  source 1..75: mol_type = other DNA
aaaacgtgcccgtgcgcgtcgtgatgcgggcagggaacgtcaggatatcgtcaccctggtgaaacggcagctgac

SEQ ID NO: 707913 - DNA, 75 bp, synthetic construct
  source 1..75: mol_type = other DNA
gcatttgcagcaaattccggcggcgatccgcggcagcctggtgtctgacctgattgtttatctgggcagtatcga

SEQ ID NO: 707914 - DNA, 75 bp, synthetic construct
  source 1..75: mol_type = other DNA
agacagagcttaagtcccggggaataaagcgtgcccgtgcgcgtcgtgatgcgggcagggaacgtcagaatatcg

SEQ ID NO: 707915 - DNA, 75 bp, synthetic construct
  source 1..75: mol_type = other DNA
tacactgtagtgaagctcattaccgtcaggtaaagaatccgaatccggtgttcactccccgtgaaggagccggaa

SEQ ID NO: 707916 - DNA, 75 bp, synthetic construct
  source 1..75: mol_type = other DNA
taaaaccgtcacgccagccagtttgtggcatcatccgggtttggtgttgattcatgcggagggagtagaaacgcc

SEQ ID NO: 707917 - DNA, 75 bp, synthetic construct
  source 1..75: mol_type = other DNA
tggacatccgggtaccggaccatctgatagttggtggcaaccaggttttctcctttgccgaacacggcctgcttt

SEQ ID NO: 707918 - DNA, 75 bp, synthetic construct
  source 1..75: mol_type = other DNA
gcggcacgaatgatcatgactggcgatgcgcaggcatgtctggtcggcggtgtggaacatatgggtcatgtacca

SEQ ID NO: 707919 - DNA, 75 bp, synthetic construct
  source 1..75: mol_type = other DNA
gcgtcgccgggctattgatgcgttgctgcaggggctgtgtttccactatgacccgctggccaaccgcgtccagtg

SEQ ID NO: 707920 - DNA, 75 bp, synthetic construct
  source 1..75: mol_type = other DNA
ttcgcgatggactgacgcttcctgtcgatgtgatcgccaatccgcagattttcagcgtcaaaactgtcgacgtcg

SEQ ID NO: 707921 - DNA, 75 bp, synthetic construct
  source 1..75: mol_type = other DNA
atggcgcagctgccatgctggtgatgagtgaaagccgcgcccatgaattaggtcttaagccgcgcgcccgcgtgc

SEQ ID NO: 707922 - DNA, 75 bp, synthetic construct
  source 1..75: mol_type = other DNA
caattcgcaccccgatgggccgttcgaagggcggtgcttttcgtaacgtgcgtgtggaagatctctccgctcatt

SEQ ID NO: 707923 - DNA, 75 bp, synthetic construct
  source 1..75: mol_type = other DNA
gcctgggccgccacgcagtcgggcgcatttaaaaatgaaatcatcccgaccggtggtcacgatgccgacggcgta

SEQ ID NO: 707924 - DNA, 75 bp, synthetic construct
  source 1..75: mol_type = other DNA
gcgcagtggcattgcacatattccacagttgagagattacccaacgcgcttcacatcgcctaccagcaggatgta

SEQ ID NO: 707925 - DNA, 75 bp, synthetic construct
  source 1..75: mol_type = other DNA
aactgactgttactcatggagtatcagcaaagacggttattttatctttggcggtgcctatccgatgaaagacgg

SEQ ID NO: 707926 - DNA, 75 bp, synthetic construct
  source 1..75: mol_type = other DNA
atggaacatttcgacgtggcgattattggcctcggcccggcagggtcggtgttggcacgaacgttagccagcaaa

SEQ ID NO: 707927 - DNA, 75 bp, synthetic construct
  source 1..75: mol_type = other DNA
ggatttatcagcgccagctcgctggaggggattagctatgcgctggatagcgcagacattctgcgttcggtgtta

SEQ ID NO: 707928 - DNA, 75 bp, synthetic construct
  source 1..75: mol_type = other DNA
cgatggtgcggcgacatctctacccggatcatcaaattcgtaaatatgtcgctatccagcagtggttcgcagaga

SEQ ID NO: 707929 - DNA, 75 bp, synthetic construct
  source 1..75: mol_type = other DNA
ttcagcgtcaaaaccgttgatgtcgccgcatcgctcacgcgtaactacccgcggagctatatcaatattaatcgc

SEQ ID NO: 707930 - DNA, 75 bp, synthetic construct
  source 1..75: mol_type = other DNA
tgattcgcccggaaaccaccgtggaagccctcgccacgctgcgtccggcttttgatcctgtcagcggtacggtaa

SEQ ID NO: 707931 - DNA, 75 bp, synthetic construct
  source 1..75: mol_type = other DNA
agcggcctgacctatcacgacgctttcgcgctggcgatgaacgacgtgctggacgaagcctgccgttcactggcg

SEQ ID NO: 707932 - DNA, 75 bp, synthetic construct
  source 1..75: mol_type = other DNA
atagtgggcaacaactgattatcccctggctccactggcataatcttgaaccggaaggcgttattttgagtcatg

SEQ ID NO: 707933 - DNA, 75 bp, synthetic construct
  source 1..75: mol_type = other DNA
accccggcactgtttgccgctctcgatgtgtctgaggtggcggtggcttccgcacgccgcagtcgtgtggaatgg

SEQ ID NO: 707934 - DNA, 75 bp, synthetic construct
  source 1..75: mol_type = other DNA
accagacagagcttaagtcccgtggaataaagcgtgcccgtgcgcgtcgtgatgcgaacagggaacgtcaggata

SEQ ID NO: 707935 - DNA, 75 bp, synthetic construct
  source 1..75: mol_type = other DNA
catcgttgccattaattcagcgagtgaatggaaaagtggcactcgcatcggcatcgcgctataacgcatggcgat

SEQ ID NO: 707936 - DNA, 75 bp, synthetic construct
  source 1..75: mol_type = other DNA
acatgcgcattagcccggaaaccgcagagccgatcccacgcctggctaccctgctgaacgatattcctccagcgc

SEQ ID NO: 707937 - DNA, 75 bp, synthetic construct
  source 1..75: mol_type = other DNA
aaaaccatcctggtcggcagtgtgacggggttttatctctggcaccactggccgcaaatgatgcgcttaatggca

SEQ ID NO: 707938 - DNA, 75 bp, synthetic construct
  source 1..75: mol_type = other DNA
gacccccatgttaaagggcggatccgtcagatgcagcgagctgccgcacggcgtcggatgatggccgatgtgccg

SEQ ID NO: 707939 - DNA, 75 bp, synthetic construct
  source 1..75: mol_type = other DNA
atgctttccgctctggcattattcacgcttattaccatttccaggattggcgacgtgtctgacgagagcgacgac

SEQ ID NO: 707940 - DNA, 75 bp, synthetic construct
  source 1..75: mol_type = other DNA
ctgcaggggctgtgttttcactatgatccgctggccaaccgtgtccagtgctccatcaccacgttggccattgag

SEQ ID NO: 707941 - DNA, 75 bp, synthetic construct
  source 1..75: mol_type = other DNA
tgcggactggcgacggagtctgctgccggaaaactctccatcacccgtgccacccgggccctgacgttcctgtca

SEQ ID NO: 707942 - DNA, 75 bp, synthetic construct
  source 1..75: mol_type = other DNA
agacagagcttaagtcccggggaataaagcgtgcccgtgcgcgtcgtgatgcaagcagggaacgtcaggaaattg

SEQ ID NO: 707943 - DNA, 75 bp, synthetic construct
  source 1..75: mol_type = other DNA
ggcaacggactgtttaatctcttcaaccttgtcaacggaattttgtggctgtcgctgatggttatctttttaaaa

SEQ ID NO: 707944 - DNA, 75 bp, synthetic construct
  source 1..75: mol_type = other DNA
cgtggtggaacagtatcgggcgggtattgattgggtcccgacgtcgatgaccgcctatctggctggtgggatgtt

SEQ ID NO: 707945 - DNA, 75 bp, synthetic construct
  source 1..75: mol_type = other DNA
ggtgaagacgccacgcgggtctttgtctcttatgtttctggtctgctgacactcgcgctggcggttgtgacggtt

SEQ ID NO: 707946 - DNA, 75 bp, synthetic construct
  source 1..75: mol_type = other DNA
acacctatcaggctgaacagcgcggtaacaccgttgttctgcaacagatggagctgaccgactacgctaacatgg

SEQ ID NO: 707947 - DNA, 75 bp, synthetic construct
  source 1..75: mol_type = other DNA
atctcttcaaccttgtcaacggaattttgtggctgtcgctgatggttatctttttaaaagataaacagatgggaa

SEQ ID NO: 707948 - DNA, 75 bp, synthetic construct
  source 1..75: mol_type = other DNA
cgtggtggaacaatatcaggcgggcattgattgggttcctacttcgatgaccgcgtatctggcgggcgggatgtt

SEQ ID NO: 707949 - DNA, 75 bp, synthetic construct
  source 1..75: mol_type = other DNA
ccagttgatattgcagtcagtgttcacaggacaatgcaggagtgtatgactgcagcaaccgaacagaaaattccc

SEQ ID NO: 707950 - DNA, 75 bp, synthetic construct
  source 1..75: mol_type = other DNA
tcgacatcggcattcatatgctggatgcggcgatgtatgtactgggctttccggcggtgaaaagcgtgaccgcgc

SEQ ID NO: 707951 - DNA, 75 bp, synthetic construct
  source 1..75: mol_type = other DNA
tacggtaatgcatccgtgtgggacgatccgcaggccatgctgctggcggtgaaacctgatgtggttagcgtctgc

SEQ ID NO: 707952 - DNA, 75 bp, synthetic construct
  source 1..75: mol_type = other DNA
cggtggggttgattggtctgattgtggtgaaagtgctggcgccgggcttttattctcgccaggacattaaaacgc

SEQ ID NO: 707953 - DNA, 75 bp, synthetic construct
  source 1..75: mol_type = other DNA
gcagtgctggtgatgtctggcgtacttttaggtatgttgcacatcatgccggactggtcattgggtactatgccc

SEQ ID NO: 707954 - DNA, 75 bp, synthetic construct
  source 1..75: mol_type = other DNA
ggccgttacggtcggcggtatcctgcaactggtgtatcagctaccgcacctgaagaaaattggtatgctggttct

SEQ ID NO: 707955 - DNA, 75 bp, synthetic construct
  source 1..75: mol_type = other DNA
tatgaactctgatggtcacctgactatcaacggtaacggcgacgtagacaacggtactgaactggataacagctc

SEQ ID NO: 707956 - DNA, 75 bp, synthetic construct
  source 1..75: mol_type = other DNA
ctgagagtctattttcttgcacacaccgaagaaacccctatggggcgcgtgaaaatgaaaactatcggcaaaatg

SEQ ID NO: 707957 - DNA, 75 bp, synthetic construct
  source 1..75: mol_type = other DNA
cagacaaacgggagtgattgttgtaaaagtccggttgggatgtttgatagtcagtttattgataatgatttgtac

SEQ ID NO: 707958 - DNA, 75 bp, synthetic construct
  source 1..75: mol_type = other DNA
aacaataacgggaacatatacagaacagataatactgaaaatattgtaagggcactaattaatgctccgcatgaa

SEQ ID NO: 707959 - DNA, 75 bp, synthetic construct
  source 1..75: mol_type = other DNA
atgcaaccgaatattctggtctttttcaccgatcaacagcgctgggacacggtgggctgctataaccctgctgtc

SEQ ID NO: 707960 - DNA, 75 bp, synthetic construct
  source 1..75: mol_type = other DNA
aaaggcaaagcgaagcagacactgaactttaaagcctggctggtcggcgcagctgatgcgccagatctgggtaat

SEQ ID NO: 707961 - DNA, 75 bp, synthetic construct
  source 1..75: mol_type = other DNA
catgttcagcgaattgccggaaggcatcgatatcgaaaactgcttcaacgtgcagcccgcccgctttccgctgtt

SEQ ID NO: 707962 - DNA, 75 bp, synthetic construct
  source 1..75: mol_type = other DNA
ttgctgggtaagatcagtttactggatattaatgtagaccagttcgatgataatccgttccagactgatactttg

SEQ ID NO: 707963 - DNA, 75 bp, synthetic construct
  source 1..75: mol_type = other DNA
gtgtgttcgatatcaacagcagcgattatgttctgaacgctgacctggtgaacgaccgtacttgggataccgctc

SEQ ID NO: 707964 - DNA, 75 bp, synthetic construct
  source 1..75: mol_type = other DNA
aagcaaccgcttcgtacttgatgcagacctgaccaacgaccgtaccaacgatactaccaagtcaaactacggtta

SEQ ID NO: 707965 - DNA, 75 bp, synthetic construct
  source 1..75: mol_type = other DNA
atgggaactgcgacattaatactcggtgagtctggcaccggaaaatcaaccagcatgagaaatatcaatccagag

SEQ ID NO: 707966 - DNA, 75 bp, synthetic construct
  source 1..75: mol_type = other DNA
cgaactatatctgtttgccgatagcggcgaaggaacggtggatgcgatggtcgccgcgacgggcggcaacatcgt

SEQ ID NO: 707967 - DNA, 75 bp, synthetic construct
  source 1..75: mol_type = other DNA
atgaaaaccagtattatcaacggctcggaagtgtctagattatccgtggcgattcacacctatcaggctgaacag

SEQ ID NO: 707968 - DNA, 75 bp, synthetic construct
  source 1..75: mol_type = other DNA
gacgctgatgcaacgggaaatggcagacgacaaccgccatttgcgcagtatggaagcctttatcaatcacgtaca

SEQ ID NO: 707969 - DNA, 75 bp, synthetic construct
  source 1..75: mol_type = other DNA
tggcgtgagcttttttatgcgcccgctcggtgggattatcgttggcgcctgggccgatcgtttcgggcgtaaacc

SEQ ID NO: 707970 - DNA, 75 bp, synthetic construct
  source 1..75: mol_type = other DNA
ctgatctgtagctggccgtcattctggctgttggtgaattacccaagcccaggcatgttgctgacggtggttttc

SEQ ID NO: 707971 - DNA, 75 bp, synthetic construct
  source 1..75: mol_type = other DNA
atattcatcacagaaacagttcgtaaggaaaaagaaccagacaaatatcagggataaatattataatcatggcga

SEQ ID NO: 707972 - DNA, 75 bp, synthetic construct
  source 1..75: mol_type = other DNA
ctggtcgctcttaacggtggtaaagcaagtgttgatctgagtaaaggccagacggttctctactttaccgccaac

SEQ ID NO: 707973 - DNA, 75 bp, synthetic construct
  source 1..75: mol_type = other DNA
cccggcgaaacctttcgaaatcaaactggaagattgcgataccaccacgatgaaaaaagccaatgtgagctttag

SEQ ID NO: 707974 - DNA, 75 bp, synthetic construct
  source 1..75: mol_type = other DNA
cgttgactctcagaaccaggaagttgtgttgggtcaggtacaaaaatctgtatttgctgcggttggtgacaaatc

SEQ ID NO: 707975 - DNA, 75 bp, synthetic construct
  source 1..75: mol_type = other DNA
gatgatgacatacaggaatgcatgcctgtcccggtggctctgactgatacgccagagccgaccagaccagttaca

SEQ ID NO: 707976 - DNA, 75 bp, synthetic construct
  source 1..75: mol_type = other DNA
ttgggccgttggtggagatataagtggatcacttttcatccgtcgttgacagaaggcacatggcgaaaagaacgg

SEQ ID NO: 707977 - DNA, 75 bp, synthetic construct
  source 1..75: mol_type = other DNA
acttagaggtagagcatcgcaacgtaaattaatccgtggttatctcagtgatgaagtaaaaagtggaataaagga

SEQ ID NO: 707978 - DNA, 75 bp, synthetic construct
  source 1..75: mol_type = other DNA
caggcgggtgatttttgcctcggcgtttggcaatgcgctcgaattttttgattttggcgtttacaacttttttgt

SEQ ID NO: 707979 - DNA, 75 bp, synthetic construct
  source 1..75: mol_type = other DNA
agggatttaccggggcgtattatcagttgaataatgacaactttgcaccaggaaaaacggcggctgattattcgt

SEQ ID NO: 707980 - DNA, 75 bp, synthetic construct
  source 1..75: mol_type = other DNA
ttcttatttgcctgatgctctgcgtttaagatttgaagataaactgaccatccgggccatcgctcagcgtctagg

SEQ ID NO: 707981 - DNA, 75 bp, synthetic construct
  source 1..75: mol_type = other DNA
aaaattgtgagggcggtcatggatagtgatgataagcttattgttgtagacgcaaccaataactcagcttattgg

SEQ ID NO: 707982 - DNA, 75 bp, synthetic construct
  source 1..75: mol_type = other DNA
ctgccgcagcggaacagaaaattcccggcaactgttatccggttgataaagttattcacatggacaataacgaaa

SEQ ID NO: 707983 - DNA, 75 bp, synthetic construct
  source 1..75: mol_type = other DNA
tgacggtttttcttaatacaggcgagccagtcgatcttgttattggtatacatgactcaatgaaagaatgcatgg

SEQ ID NO: 707984 - DNA, 75 bp, synthetic construct
  source 1..75: mol_type = other DNA
tgcgttttggtggcgaagtgatgaaaaacgttgccggatacgatctctcacggttaatggccggaagctacggtt

SEQ ID NO: 707985 - DNA, 75 bp, synthetic construct
  source 1..75: mol_type = other DNA
gtgaccaacggcgttttgggagagatttacgttaccaccgcccgcgccctgcgtcgctgcggcgttcccggctgg

SEQ ID NO: 707986 - DNA, 75 bp, synthetic construct
  source 1..75: mol_type = other DNA
tgggacccggcaacttacagcgtcgaagattcgctgtttggcaccattgaatttcataacggcggcattctgtgg

SEQ ID NO: 707987 - DNA, 75 bp, synthetic construct
  source 1..75: mol_type = other DNA
gatgcaacgggaactggcagacgacaaccgccatttgcgcagcatggaagcctttatcaatcacgtacagggcaa

SEQ ID NO: 707988 - DNA, 75 bp, synthetic construct
  source 1..75: mol_type = other DNA
cctcattcagcgggccctgaaaaccctggaccgtcatcttcatgagcccggcgtggccttcacctccacccgtgc

SEQ ID NO: 707989 - DNA, 75 bp, synthetic construct
  source 1..75: mol_type = other DNA
aacgaaaactcacgttaagcaacgttttctgcctctgacgcctcttttaatggtctcagatgtcctttggtcacc

SEQ ID NO: 707990 - DNA, 75 bp, synthetic construct
  source 1..75: mol_type = other DNA
atgaccttataaaaactaaagattacgcggctgttcatgcagccattaaaacgctgggtaactgggcaaaggcga

SEQ ID NO: 707991 - DNA, 75 bp, synthetic construct
  source 1..75: mol_type = other DNA
cgaccgccaccgcgttggggaggacgatgacattaccggcaatatgctgtgggccaggcgcggcaatgaatttgt

SEQ ID NO: 707992 - DNA, 75 bp, synthetic construct
  source 1..75: mol_type = other DNA
gccgagctgccaattggtgtagtcaccgctacgttgggcgcaccggtgtttatctggctattgttaaaagcagga

SEQ ID NO: 707993 - DNA, 75 bp, synthetic construct
  source 1..75: mol_type = other DNA
gtgtggccttcacctccacgcatgcggcacgggaatggctgatactgaacatggcgggactggagcgggaagagt

SEQ ID NO: 707994 - DNA, 75 bp, synthetic construct
  source 1..75: mol_type = other DNA
ggttataccgtctctattttcaaccgttcccgtgaaaagacggaagaagtgattgctgaaaatccaggcaagaaa

SEQ ID NO: 707995 - DNA, 75 bp, synthetic construct
  source 1..75: mol_type = other DNA
ttttccgcgctggctgtatcattcgtgcacagttcctgcagaagatcaccgatgcttatgcgcaaaacgctggca

SEQ ID NO: 707996 - DNA, 75 bp, synthetic construct
  source 1..75: mol_type = other DNA
gcctactacgacagctaccgttccgcggttctgccggctaacctgattcaggctcagcgtgattactttggtgcg

SEQ ID NO: 707997 - DNA, 75 bp, synthetic construct
  source 1..75: mol_type = other DNA
cgatgatactgccatcacagttgttggggcctttactgcaaatatggcgtttgatcgcaatgaaccgccccgggt

SEQ ID NO: 707998 - DNA, 75 bp, synthetic construct
  source 1..75: mol_type = other DNA
ctgatcagttcaagcaagcttttcgagcacttgcaaacgaggttgaggctgatcttggcgcactgtatttcggtg

SEQ ID NO: 707999 - DNA, 75 bp, synthetic construct
  source 1..75: mol_type = other DNA
atgtctaagcaacagatcggcgtagtcggtatggcagtgatggggcgcaacctggcgctcaacatcgaaagccgt

SEQ ID NO: 708000 - DNA, 75 bp, synthetic construct
  source 1..75: mol_type = other DNA
ggcaacaccttcttccaggacaccattcgtcgtaaccgtgaactctctgctgaaggtttcaacttcatcggtacc

SEQ ID NO: 708001 - DNA, 75 bp, synthetic construct
  source 1..75: mol_type = other DNA
atgtctaagcaacagatcggggttgtcggtatggcagttatggggcgtaatctagcgctcaacatcgaaagccgt

SEQ ID NO: 708002 - DNA, 75 bp, synthetic construct
  source 1..75: mol_type = other DNA
gcctattacgacagctaccgttccgcggttctgccggctaatctgatccaggctcagcgtgattactttggtgct

SEQ ID NO: 708003 - DNA, 75 bp, synthetic construct
  source 1..75: mol_type = other DNA
ctgaactacggtgaaatcgcgaagattttccgtgctggttgcattattcgtgcgcagttcttgcagaaaatcacc

SEQ ID NO: 708004 - DNA, 75 bp, synthetic construct
  source 1..75: mol_type = other DNA
ctgaactacggtgaaatcgcgaagatcttccgtgcaggttgcatcatccgcgcccagttcctgcagaaaatcacc

SEQ ID NO: 708005 - DNA, 75 bp, synthetic construct
  source 1..75: mol_type = other DNA
acctttccaacgaagaactcgcagagaccttcaccgagtggaacaaaggcgagctgaacagctatctgatcgaca

SEQ ID NO: 708006 - DNA, 75 bp, synthetic construct
  source 1..75: mol_type = other DNA
accttaacgctggaagtgtcgtcggtggaaatcatgttagccgacctgcttaacatcgacgacgacacggtgatt

SEQ ID NO: 708007 - DNA, 75 bp, synthetic construct
  source 1..75: mol_type = other DNA
tattaaacacagcggtattgccgctgggacgctggtggtgacatcggctgcaccgctacccgcatgggcagaaga

SEQ ID NO: 708008 - DNA, 75 bp, synthetic construct
  source 1..75: mol_type = other DNA
ccgctacccgcatgggcagaagagaagggcggcaaaattctcactgcgggccgttggggagcgatgaacgtagaa

SEQ ID NO: 708009 - DNA, 75 bp, synthetic construct
  source 1..75: mol_type = other DNA
aagctaccttgaaaacccgctgaagccggccaaagggcgtggcgaagatagctatgttcaggtgacctgggaaca

SEQ ID NO: 708010 - DNA, 75 bp, synthetic construct
  source 1..75: mol_type = other DNA
tgatcgtcgtttctgaatgctactggaccgcagcagccaaacacgcagatatcgtattaccgatcaccacatcgt

SEQ ID NO: 708011 - DNA, 75 bp, synthetic construct
  source 1..75: mol_type = other DNA
cccgtcactattcacactgaagatgccgcgcgattcggtattgcaagtggcgatctggtgcgtgtctggaacaaa

SEQ ID NO: 708012 - DNA, 75 bp, synthetic construct
  source 1..75: mol_type = other DNA
gcgtattcagcatccgatggtgagaaaaagctatctcgataatccactgcaaccggcgaaaggtcgtggcgaaga

SEQ ID NO: 708013 - DNA, 75 bp, synthetic construct
  source 1..75: mol_type = other DNA
ggttactccgcgattagctgggccataggcgcggttgtggttgtgacgctgatttatattcgtgcccgtaaagga

SEQ ID NO: 708014 - DNA, 75 bp, synthetic construct
  source 1..75: mol_type = other DNA
ccgttatatatttactgctggcaatgctggtcatgatctacatgccggagggttactccgcgattagctgggcca

SEQ ID NO: 708015 - DNA, 75 bp, synthetic construct
  source 1..75: mol_type = other DNA
accttaacgctggaagtatcgtcggtggagattatgttagccgacctgcttaatatcgacgacgacacggtgatt

SEQ ID NO: 708016 - DNA, 75 bp, synthetic construct
  source 1..75: mol_type = other DNA
tgattgccattgatcctatccgctccgaaaccatcgaattctttggcgataatgccacctggatcgcgccgaata

SEQ ID NO: 708017 - DNA, 75 bp, synthetic construct
  source 1..75: mol_type = other DNA
ttaaatacgaatcatcccgccagttctgttcaaaattcgtttttgatatttataaagaggcgctatgtatcccgg

SEQ ID NO: 708018 - DNA, 75 bp, synthetic construct
  source 1..75: mol_type = other DNA
atcttaatgagcgctttattgatgcagtatcgaatccggcaggtattattggtttgttttttggtttgcttaccg

SEQ ID NO: 708019 - DNA, 75 bp, synthetic construct
  source 1..75: mol_type = other DNA
tcttccgtgctggctgcatcattcgcgcgcagttcctgcagaagatcaccgatgcctacgctgaaaatgccggta

SEQ ID NO: 708020 - DNA, 75 bp, synthetic construct
  source 1..75: mol_type = other DNA
attcgtgatgagttcaaacaaagcgaaggcgaccccatgttaaagggcggatccgtcagatgcagcgagcggccg

SEQ ID NO: 708021 - DNA, 75 bp, synthetic construct
  source 1..75: mol_type = other DNA
tttgaaccggttcccggcacagggttgagtgtccgcataacttctgaaaactcagaaggtaaaggggctgcttca

SEQ ID NO: 708022 - DNA, 75 bp, synthetic construct
  source 1..75: mol_type = other DNA
gcagctcgaccatgtgattgacgctgttgtggcgaaaatcccggaactggcgggtatcaaagatgctgcgccgga

SEQ ID NO: 708023 - DNA, 75 bp, synthetic construct
  source 1..75: mol_type = other DNA
ctggttccttattacacggtgaaagagtttgtcgagtctcttgaaacccctcgtcgcatcctgttaatggtgaaa

SEQ ID NO: 708024 - DNA, 75 bp, synthetic construct
  source 1..75: mol_type = other DNA
atgtccaagcaacagatcggggttgtcggtatggcagtgatggggcgtaaccttgcgctgaacatcgaaagccgt

SEQ ID NO: 708025 - DNA, 75 bp, synthetic construct
  source 1..75: mol_type = other DNA
ccagagctcactggatctcggcgaacctttgtctctgatcaccgagtctgtatttgctcgctatatttcttcgct

SEQ ID NO: 708026 - DNA, 75 bp, synthetic construct
  source 1..75: mol_type = other DNA
aaagcccgcctgaaagcgatgacgccggctaactacattggtcgcgccatcaccatggttgatgagctgaaataa

SEQ ID NO: 708027 - DNA, 75 bp, synthetic construct
  source 1..75: mol_type = other DNA
caacgcggtattgcagcacctggcaagcaaactgccggtttcccgctggcagcgtgacctgaccgactctaccgt

SEQ ID NO: 708028 - DNA, 75 bp, synthetic construct
  source 1..75: mol_type = other DNA
tttcccctgtcgatggacgctactgcgataaagtcagcgcgctgcgcgggattttcagcgaatacggtttgctga

SEQ ID NO: 708029 - DNA, 75 bp, synthetic construct
  source 1..75: mol_type = other DNA
atgcgctggtatctgaggtgtctattacgcagcgtagcctggctgctaataacggtgcattgcagcagatgtttg

SEQ ID NO: 708030 - DNA, 75 bp, synthetic construct
  source 1..75: mol_type = other DNA
agtaatcgggtgctggatcagatgcacaaagaagtaacgaaagaatatcgtcttcttggcgtccatattgccgca

SEQ ID NO: 708031 - DNA, 75 bp, synthetic construct
  source 1..75: mol_type = other DNA
cgatatgcagctgattgctgaagcctattctctgctaaaaggtggcctgaacctcaccaacgaagaactggcgca

SEQ ID NO: 708032 - DNA, 75 bp, synthetic construct
  source 1..75: mol_type = other DNA
gcctattacgacagctaccgtgccgcagtactgcctgcgaacctgatccaggcacagcgtgactatttcggtgcg

SEQ ID NO: 708033 - DNA, 75 bp, synthetic construct
  source 1..75: mol_type = other DNA
ggctcagcgtgattactttggtgcgcacacctataagcgtaccgacaaggaaggagttttccatactgagtggtt

SEQ ID NO: 708034 - DNA, 75 bp, synthetic construct
  source 1..75: mol_type = other DNA
cctctgtcactgatcactgaatcagtgtttgcacgttacatctcttctctcaaagagcagcgtgttgcggcgtct

SEQ ID NO: 708035 - DNA, 75 bp, synthetic construct
  source 1..75: mol_type = other DNA
ggtaataccttcttccaggatactattcgtcgtaaccgtgagctttctgcagaaggttttaacttcattggtacc

SEQ ID NO: 708036 - DNA, 75 bp, synthetic construct
  source 1..75: mol_type = other DNA
cgctgaaaggtccttccattatgcctggtgggcagaaagaagcctatgaactggttgcaccgatcctgaccaaaa

SEQ ID NO: 708037 - DNA, 75 bp, synthetic construct
  source 1..75: mol_type = other DNA
ggcgcagcgcgatttttttggtgcgcatacttataagcgtactgacaaagatggtgtattccatacagaatggct

SEQ ID NO: 708038 - DNA, 75 bp, synthetic construct
  source 1..75: mol_type = other DNA
tattctctgcttaaaggcggccttaatctgtctaacgaagagctggcaaccacttttaccgagtggaatgaaggc

SEQ ID NO: 708039 - DNA, 75 bp, synthetic construct
  source 1..75: mol_type = other DNA
ggttataccgtctctatcttcaaccgctcccgtgaaaaaaccgaagaagttgtcgctgagaatccaggcaaaaag

SEQ ID NO: 708040 - DNA, 75 bp, synthetic construct
  source 1..75: mol_type = other DNA
atctcggcgaaccgctctccctgatcaccgaatccgtattcgcacgctatatctcgtcgctgaaagagcagcgcg

SEQ ID NO: 708041 - DNA, 75 bp, synthetic construct
  source 1..75: mol_type = other DNA
ccaggacaccattcgtcgtaaccgcgaactgtctgctgagggctttaactttatcggtaccggtgtgtccggtgg

SEQ ID NO: 708042 - DNA, 75 bp, synthetic construct
  source 1..75: mol_type = other DNA
tcgattccctgaagccttaccttgataaaggcgacatcatcattgatggcggcaacaccttcttccaggacacca

SEQ ID NO: 708043 - DNA, 75 bp, synthetic construct
  source 1..75: mol_type = other DNA
aattattcttttctattaataccaatatatctaattgaagataatgatatattccttactaacccaatcctttat

SEQ ID NO: 708044 - DNA, 75 bp, synthetic construct
  source 1..75: mol_type = other DNA
tgggtattggtaacactaaaaaacggtaaaaaatatggtggtttttatggaagtgactcatttgcatccaatagt

SEQ ID NO: 708045 - DNA, 75 bp, synthetic construct
  source 1..75: mol_type = other DNA
gcctttaacctttatctgtacgatcaatggcaggatctgagtacgctgcgacaggttccggtggaaaagatcttt

SEQ ID NO: 708046 - DNA, 75 bp, synthetic construct
  source 1..75: mol_type = other DNA
atgacgaagacttcacattcaaagatctattcaactgagagcggtatcaccgggggtgatttatttaaaattcct

SEQ ID NO: 708047 - DNA, 75 bp, synthetic construct
  source 1..75: mol_type = other DNA
aaaacctaataatgatattatttttaatgctcataaatataccggcgcttatgagcattgattctactaataagg

SEQ ID NO: 708048 - DNA, 75 bp, synthetic construct
  source 1..75: mol_type = other DNA
aaaacctaatgataatattatttttattgctcataaacatacttgcgtttatgagcgttgatactacggataatg

SEQ ID NO: 708049 - DNA, 75 bp, synthetic construct
  source 1..75: mol_type = other DNA
agccatcggcgtttttatagtcactaatgcattaattgtcctctgcggcataacgggactctttgctcgtctgat

SEQ ID NO: 708050 - DNA, 75 bp, synthetic construct
  source 1..75: mol_type = other DNA
tgtttcgccattaattgtatttactggattgctggcactggttttttcccctttcggcgtttattccgtcggtat

SEQ ID NO: 708051 - DNA, 75 bp, synthetic construct
  source 1..75: mol_type = other DNA
gattgcagggactaacacttaacgaagccatcggcgtttttattgtcaccaacgcgttaatagtcctctgcggca

SEQ ID NO: 708052 - DNA, 75 bp, synthetic construct
  source 1..75: mol_type = other DNA
cagttgcgcggatgtcatggcgaaagccgcatccatcacgctgattggccttgaaaaaacccatggttcaggatg

SEQ ID NO: 708053 - DNA, 75 bp, synthetic construct
  source 1..75: mol_type = other DNA
ttggttcggcgttttggggattaattgccggcggcgtctgttacgtggtgttgaatttaattgctgacagaaacc

SEQ ID NO: 708054 - DNA, 75 bp, synthetic construct
  source 1..75: mol_type = other DNA
agtatgttgctggtatggctggcaaccaaggccgttgcgccgcgctatgcggtaattgccgcgatgattattggg

SEQ ID NO: 708055 - DNA, 75 bp, synthetic construct
  source 1..75: mol_type = other DNA
aggaaaaataaccaacccagcactggttaatgcaaaagttttttacaacagacgaacaaagctggggatacctac

SEQ ID NO: 708056 - DNA, 75 bp, synthetic construct
  source 1..75: mol_type = other DNA
atgcccgttccatcagggcggtcacgaccagagtgcggggcgggcacaaccactcgcgactggtggccaaatcaa

SEQ ID NO: 708057 - DNA, 75 bp, synthetic construct
  source 1..75: mol_type = other DNA
ggaaatgactgcgctggtgggcgggatgcgcgtactgggtgccaacttcgatggcagcaaaaacggcgtcttcac

SEQ ID NO: 708058 - DNA, 75 bp, synthetic construct
  source 1..75: mol_type = other DNA
agcaactatttcttcgagaacctgttcaagtatgagtgggtacagacccgcagtccggctggcgcaatccagttc

SEQ ID NO: 708059 - DNA, 75 bp, synthetic construct
  source 1..75: mol_type = other DNA
acacctcaacaatggtgggctgtatggggccgacttcggtcgggctggtttcctctaacgccagttgtggtaacc

SEQ ID NO: 708060 - DNA, 75 bp, synthetic construct
  source 1..75: mol_type = other DNA
agagctggggctgattacctaccagacggaatatgacccgcttattggctgcaacattccgaccgatatcacatt

SEQ ID NO: 708061 - DNA, 75 bp, synthetic construct
  source 1..75: mol_type = other DNA
gcgaaagcaccgctgggtgcaaccgagatgggcctgatttacgttaacccggaaggcccggatcacagcggcgaa

SEQ ID NO: 708062 - DNA, 75 bp, synthetic construct
  source 1..75: mol_type = other DNA
ccgtgaaactggcgaagtgaaatacacagccagccgtgcggatctggtatttggttctaactcagtcctgcgtgc

SEQ ID NO: 708063 - DNA, 75 bp, synthetic construct
  source 1..75: mol_type = other DNA
cggcggcgcgggtcgtggtcagcaacgttttgcaccgctgaactcctggccggataacgtaagcctcgataaagc

SEQ ID NO: 708064 - DNA, 75 bp, synthetic construct
  source 1..75: mol_type = other DNA
acatcacgttcacactggctctgtttgctgcccttgatgtgtctgaggatgcagtggcagctgcgcgccgcagtc

SEQ ID NO: 708065 - DNA, 75 bp, synthetic construct
  source 1..75: mol_type = other DNA
gatgcccacgagaagtttgtgaaagactttgttgcggcatgggtgaaagtgatgaaccttgaccgtttcgacctg

SEQ ID NO: 708066 - DNA, 75 bp, synthetic construct
  source 1..75: mol_type = other DNA
gaaatcaacgaataccgcttctctggccgatgttatcgtactggcaggtgtggttggcgttgagaaagcggcaag

SEQ ID NO: 708067 - DNA, 75 bp, synthetic construct
  source 1..75: mol_type = other DNA
atcagctattcgtgcaacctttggcaacatggggatggacgatgaagagaccgtggcgctgatcgccggtggtca

SEQ ID NO: 708068 - DNA, 75 bp, synthetic construct
  source 1..75: mol_type = other DNA
cccggcactggcgggcatgattaccacgatggttacgcagggctatgagtatcgtcgtgatgacgatatggcatt

SEQ ID NO: 708069 - DNA, 75 bp, synthetic construct
  source 1..75: mol_type = other DNA
gttgaccgtaattgccataaatccatcgaacaaggcttgatgctgacaggcgcgaaaccagtctacatggtgcca

SEQ ID NO: 708070 - DNA, 75 bp, synthetic construct
  source 1..75: mol_type = other DNA
aaaaactaatccgcaataagaatgcggattattttttgtgcacagaaaacccccagctaggcagggggttccgga

SEQ ID NO: 708071 - DNA, 75 bp, synthetic construct
  source 1..75: mol_type = other DNA
aaacaccttgcggtctggcaactgcaagtgtcaaacaagaaatcaaaagggagtcccaatggggaacgaaaagag

SEQ ID NO: 708072 - DNA, 75 bp, synthetic construct
  source 1..75: mol_type = other DNA
gtgttggttaccgcttctaatcacttcggtgatataaaaaatccgcctctcggggcggattttttgttgtgcaca

SEQ ID NO: 708073 - DNA, 75 bp, synthetic construct
  source 1..75: mol_type = other DNA
aacaacgttgaactggtatccattgaaaacctgccgggacgtattgcggcgaactcagtcatcccatatccgccc

SEQ ID NO: 708074 - DNA, 75 bp, synthetic construct
  source 1..75: mol_type = other DNA
tgatgatggttttgccattctctcttcaaatgaagccattgattgtctgatgttcagttatcaaatggagcatcc

SEQ ID NO: 708075 - DNA, 75 bp, synthetic construct
  source 1..75: mol_type = other DNA
acaggatttagaggagatagatcataagttcaagggagatcgactcgctactgagctaatccgtgtaaatttctc

SEQ ID NO: 708076 - DNA, 75 bp, synthetic construct
  source 1..75: mol_type = other DNA
ttgcaagaatgccaacaagagcatcagcaagttacggacacgcaaccgtatcactgccctatcccgaaaaacgtg

SEQ ID NO: 708077 - DNA, 75 bp, synthetic construct
  source 1..75: mol_type = other DNA
ttgcataaagcgcaaactttactgcaacgttatatgaatctggcgggtggttattcaggacatagtggcgattac

SEQ ID NO: 708078 - DNA, 75 bp, synthetic construct
  source 1..75: mol_type = other DNA
ctgaccgacgcagaggtatgggtgttctggaatatctgggactacttcaatgtgtgcgcaggtacaaaatgggca

SEQ ID NO: 708079 - DNA, 75 bp, synthetic construct
  source 1..75: mol_type = other DNA
ggtcaacccactaatactggatggcaaaattgttatgggccgccgcgttttctctctgatgaagcagttccttag

SEQ ID NO: 708080 - DNA, 75 bp, synthetic construct
  source 1..75: mol_type = other DNA
tctctctgatgaaacagttccttagctggtgcgccttccaggggatgatagacgtgtcaccgttaaacgatatgt

SEQ ID NO: 708081 - DNA, 75 bp, synthetic construct
  source 1..75: mol_type = other DNA
cccttttgatttgttaaaacaccttgcggtctggcaactgcaagtgtcaaacaagaaatcaaaagggggtcccaa

SEQ ID NO: 708082 - DNA, 75 bp, synthetic construct
  source 1..75: mol_type = other DNA
tcaccggggggaaaaggttgtaaccaggcgctggcagcaagctttgccgatactgatgtttatttcataacaaaa

SEQ ID NO: 708083 - DNA, 75 bp, synthetic construct
  source 1..75: mol_type = other DNA
gcgcgcgaaatggcggcagcacagaaagtggctgactggcagattgcggcaatcctcaacattggccaacgtgcg

SEQ ID NO: 708084 - DNA, 75 bp, synthetic construct
  source 1..75: mol_type = other DNA
atgaaacacagggaaatacgggcggcgatactgtctgccctgaaagcaaatattgctgagcgggtgacctggttt

SEQ ID NO: 708085 - DNA, 75 bp, synthetic construct
  source 1..75: mol_type = other DNA
aacaggaactgcctgcggtggcggtttatctgacagatgcttctgcgacggaggagtttgttgacgaggggacct

SEQ ID NO: 708086 - DNA, 75 bp, synthetic construct
  source 1..75: mol_type = other DNA
cgcctttgcatccctggcggtggagacaagcaatgcttccgacatgcctgaacatgaatctgtgatacatcgaat

SEQ ID NO: 708087 - DNA, 75 bp, synthetic construct
  source 1..75: mol_type = other DNA
ttatcacgctcggtagcaagggctcactcgcatttgatggcaaaaaattcattcattcgccagcgtttccagcgg

SEQ ID NO: 708088 - DNA, 75 bp, synthetic construct
  source 1..75: mol_type = other DNA
aacagttccgcgatgcactgctcgccccgccagcctggcaggaaggcggcagcatggcgcacttgctgggcaccg

SEQ ID NO: 708089 - DNA, 75 bp, synthetic construct
  source 1..75: mol_type = other DNA
gtgggaaagctcgcaaatcccagccattataccgggatttttttgtgcacagaaaacccccagctaggctggggg

SEQ ID NO: 708090 - DNA, 75 bp, synthetic construct
  source 1..75: mol_type = other DNA
ctggtgctggtggctatcttcggcccgtcgattggtaacgccgcgctggcgctgaccttcgttgccttgccgcac

SEQ ID NO: 708091 - DNA, 75 bp, synthetic construct
  source 1..75: mol_type = other DNA
cgacgtgttgcagttcgcgcaaagcgcctggtgggtcgtgaccttccctggtctggcgatcctgttgacggtgct

SEQ ID NO: 708092 - DNA, 75 bp, synthetic construct
  source 1..75: mol_type = other DNA
gcggctgatgtacggcgcgcgcttgtcgctgctggttggctgtctggtggtggtgttatcgctgattatgggcgt

SEQ ID NO: 708093 - DNA, 75 bp, synthetic construct
  source 1..75: mol_type = other DNA
cagcaaaaaataatcctctggcgctgcggattaatggctggattaacatcgcttttggcgtcactggcattattg

SEQ ID NO: 708094 - DNA, 75 bp, synthetic construct
  source 1..75: mol_type = other DNA
atagcgcagcgggagcctgacttctggcactattttttctgggttgagcatattcaacgctttgcactggatgat

SEQ ID NO: 708095 - DNA, 75 bp, synthetic construct
  source 1..75: mol_type = other DNA
ttcttcgctactgctggatatgcctgcgcttatatcgtttccttggttctgttttgaccgattaccggatactga

SEQ ID NO: 708096 - DNA, 75 bp, synthetic construct
  source 1..75: mol_type = other DNA
cctcatctgttagggctacgttatttcgaaaaacccattgccggatactggattaacagcattgggcagtggtta

SEQ ID NO: 708097 - DNA, 75 bp, synthetic construct
  source 1..75: mol_type = other DNA
tacgccatcggcacttacgccgtgctcgatccgtttattgcattctggctggtgtcgggaatgtgtagcttctgg

SEQ ID NO: 708098 - DNA, 75 bp, synthetic construct
  source 1..75: mol_type = other DNA
gggcaggcgttatctttgcgaccctgttaactgccgcgctggtggcctggtttactctgcgcttatggcgcgata

SEQ ID NO: 708099 - DNA, 75 bp, synthetic construct
  source 1..75: mol_type = other DNA
ggcatttagcgcatggcagttcatttaatctcctggcgcttggtgtcgcgggttggatgcgttatgtcggcggtg

SEQ ID NO: 708100 - DNA, 75 bp, synthetic construct
  source 1..75: mol_type = other DNA
atgtttgagttttatatggcagaacttcttcgccaccgctggtggcgtctgcgcttatatcgtttccccggttct

SEQ ID NO: 708101 - DNA, 75 bp, synthetic construct
  source 1..75: mol_type = other DNA
atgtttgagtcttatatggcagaacgtcttcgccgccgctgggtgcgcctgcgcttatatcgttttcccggttct

SEQ ID NO: 708102 - DNA, 75 bp, synthetic construct
  source 1..75: mol_type = other DNA
ggtgatgatttgccagacaatagtttgtttactgcaaaagtgacggaagcgtacttgtctttattagcgcatggc

SEQ ID NO: 708103 - DNA, 75 bp, synthetic construct
  source 1..75: mol_type = other DNA
cgtcgtgaaaaaagccctgcatgtgcaaatggatggcttagaagccgtgttgatcgccatgtgcgaaccgcaaat

SEQ ID NO: 708104 - DNA, 75 bp, synthetic construct
  source 1..75: mol_type = other DNA
gggcgttgcctgtgaacctttccgccagtgggtaatagaagataactttgttgccggacgtccggaatgggaaaa

SEQ ID NO: 708105 - DNA, 75 bp, synthetic construct
  source 1..75: mol_type = other DNA
gacttaaggaaagtattaaggcgaatggtcagaactgaaggagatatccccctgagcgatgctaaacaaggcata

SEQ ID NO: 708106 - DNA, 75 bp, synthetic construct
  source 1..75: mol_type = other DNA
atgctcccgtccgcatgttccttcttcaccacccgcttcaggccaccctcgccttccgtgtacctgccctcgctg

SEQ ID NO: 708107 - DNA, 75 bp, synthetic construct
  source 1..75: mol_type = other DNA
cctgtaccagggaaatcggcgctgaaagccgtgcagttacggcttgatcagaacagcagcgatccgatattcgcc

SEQ ID NO: 708108 - DNA, 75 bp, synthetic construct
  source 1..75: mol_type = other DNA
tcgggcatgaattcgccccggaaaacagtaccctggcagtacagaaagacaaagaaagcacgatgcaggccgtgt

SEQ ID NO: 708109 - DNA, 75 bp, synthetic construct
  source 1..75: mol_type = other DNA
gaaattatcaacctgatgaaaacccagcaggaagaggcggttattaccgccgtgcgtgaatttgacggtgagctg

SEQ ID NO: 708110 - DNA, 75 bp, synthetic construct
  source 1..75: mol_type = other DNA
tatcaggaactgaacttcaaagctcgtatggaatccccgagcaaagatgctactccgggcaacgtttacgctcag

SEQ ID NO: 708111 - DNA, 75 bp, synthetic construct
  source 1..75: mol_type = other DNA
aatacagcactgcctgaaacgtgcaaaaatgaaatcacagagagcaaccagccccagcttctggccagccagtca

SEQ ID NO: 708112 - DNA, 75 bp, synthetic construct
  source 1..75: mol_type = other DNA
acaaatactcagagttctcgatattctttctgataagaatttgcgggatgagtggataatccagaccaaagacag

SEQ ID NO: 708113 - DNA, 75 bp, synthetic construct
  source 1..75: mol_type = other DNA
cgcaattcacctttcatttgacatatgggttacctgtccactcacctcacctgacgatataaaaaatttcagaaa

SEQ ID NO: 708114 - DNA, 75 bp, synthetic construct
  source 1..75: mol_type = other DNA
gcccgcaaaaaactctcgagggcaaaggtgaagaaaccatctgtggttgatccggaccttatctggtcattacct

SEQ ID NO: 708115 - DNA, 75 bp, synthetic construct
  source 1..75: mol_type = other DNA
gcctttgcagcgggcgctgaccgtcctgcgtgacaacacacagccaggcgtcttttctgaaaaactctctgccaa

SEQ ID NO: 708116 - DNA, 75 bp, synthetic construct
  source 1..75: mol_type = other DNA
acaactgtccatgcagggacatgccactgaacatgccatttatcgggatggtggttttgcgtgttcactacccgc

SEQ ID NO: 708117 - DNA, 75 bp, synthetic construct
  source 1..75: mol_type = other DNA
gaccaggataaagaagataacttggacaaaaccacacacataccgctggctacaggtttgctgggtggctttgat

SEQ ID NO: 708118 - DNA, 75 bp, synthetic construct
  source 1..75: mol_type = other DNA
tgacctgacgcgagatgttgacggtttctactgtcgtgaaattgtgaaacgaatgtttgaagtgtggtgtcactg

SEQ ID NO: 708119 - DNA, 75 bp, synthetic construct
  source 1..75: mol_type = other DNA
gcagccactgcgcgagaaattcctgcgcaatatgtcgcaacgtgccgccgatattctgcgcgacgatctcgccaa

SEQ ID NO: 708120 - DNA, 75 bp, synthetic construct
  source 1..75: mol_type = other DNA
actattttaagagccgtggataaagaagccgcgcaagagtttgtacaagaaacgcttcaaaatgtctgggaaaca

SEQ ID NO: 708121 - DNA, 75 bp, synthetic construct
  source 1..75: mol_type = other DNA
tctgttacgcgcaccgccgataaagattcaactaaaacttttgttcaggaaactctgaaagatacctgggagtct

SEQ ID NO: 708122 - DNA, 75 bp, synthetic construct
  source 1..75: mol_type = other DNA
atctggcaggacgatatgtcgggtcggttactgttttccgccctgttagccgcagcaaagcgtggcgttcgcgtc

SEQ ID NO: 708123 - DNA, 75 bp, synthetic construct
  source 1..75: mol_type = other DNA
tttgctgcacgatatcgtctggcagaaatggcggagcatacgctggatgttcagtattacatctggcaggacgat

SEQ ID NO: 708124 - DNA, 75 bp, synthetic construct
  source 1..75: mol_type = other DNA
atgagtaacctgacaggcaccgataaaagcatcatcctgctgatgaccattggcgaagaccgggcggcagaggtg

SEQ ID NO: 708125 - DNA, 75 bp, synthetic construct
  source 1..75: mol_type = other DNA
tatgtcaaacgatttgaaaggcggcatgaccaatctatcgggggtttatggcactctgctgccggataataacct

SEQ ID NO: 708126 - DNA, 75 bp, synthetic construct
  source 1..75: mol_type = other DNA
agatgttagcgcttaacgtcaatattcctttcagccactggctgcgttctgacagtaaatctcagtggcgacatg

SEQ ID NO: 708127 - DNA, 75 bp, synthetic construct
  source 1..75: mol_type = other DNA
ggaaaatgctcactgtatcgccaattatcaactgccaccagagagtcagcagcagttattaacccagctatcagc

SEQ ID NO: 708128 - DNA, 75 bp, synthetic construct
  source 1..75: mol_type = other DNA
aatggttctggttaaggctcctggtgctgataatgtcaaaatagagaaccagaccggaattcataccgactggcg

SEQ ID NO: 708129 - DNA, 75 bp, synthetic construct
  source 1..75: mol_type = other DNA
tgttacggccataccggcccggatgtgaaaccggggatgacaaaaactgatgaagaatgtctggagctgctggaa

SEQ ID NO: 708130 - DNA, 75 bp, synthetic construct
  source 1..75: mol_type = other DNA
gcagcattgtcgcggaaaatggtcaggtttatctgactggacttccacagtcagggaaattacaggtttcatggg

SEQ ID NO: 708131 - DNA, 75 bp, synthetic construct
  source 1..75: mol_type = other DNA
cgttcgcgtccgtttgttgctggatgataacaatacgccggggcttgatggcattttacgtttactcgatagcca

SEQ ID NO: 708132 - DNA, 75 bp, synthetic construct
  source 1..75: mol_type = other DNA
aacaaggtcagcggcgacatcatcacggcacgtagtgttgcgttccagaaacaaccggataatgccaacgctaaa

SEQ ID NO: 708133 - DNA, 75 bp, synthetic construct
  source 1..75: mol_type = other DNA
atgtctacctattcttttatggatgtcactgcgacgctgaccggcccgaccggttcgattgacctcgggtacggt

SEQ ID NO: 708134 - DNA, 75 bp, synthetic construct
  source 1..75: mol_type = other DNA
gaagcaacccgatcacgctaacgccaaagtcggcaatacggtttcctgggtctttgactgcggcaagattgatca

SEQ ID NO: 708135 - DNA, 75 bp, synthetic construct
  source 1..75: mol_type = other DNA
ggtttctactgccgtgaaattgtgaaacgaatgtttgaagtgtggtgccactgccgtgggctgagtgttgtgtga

SEQ ID NO: 708136 - DNA, 75 bp, synthetic construct
  source 1..75: mol_type = other DNA
gcagcgtgtaccgatgatgcaggcatgggcggattatgtgatgtctcaacttgctaaaaacactaaggaattcgc

SEQ ID NO: 708137 - DNA, 75 bp, synthetic construct
  source 1..75: mol_type = other DNA
gaagtgatgcacagcctgcacgctgataaaagcggcacggtaaccgtcaacctgctgaagacctcgccgacaaac

SEQ ID NO: 708138 - DNA, 75 bp, synthetic construct
  source 1..75: mol_type = other DNA
accattttaagagctgtagataaagaatccgcgcacgaatttgtacaggaaacgctgcaggaagcctgggaaacc

SEQ ID NO: 708139 - DNA, 75 bp, synthetic construct
  source 1..75: mol_type = other DNA
ataacgatgccatgacgcatcgttatttacgcaaaatggaatccagtccatttataaatcatctggttgatggaa

SEQ ID NO: 708140 - DNA, 75 bp, synthetic construct
  source 1..75: mol_type = other DNA
gtccgcttggttatctcactgacttctctcgcctcaatcgccgtatgcacaataaaagctttactgttgatggcg

SEQ ID NO: 708141 - DNA, 75 bp, synthetic construct
  source 1..75: mol_type = other DNA
gtgagtgttcagtttgacgcaaaagcgtttttaaaaaccgtaaccagccagcctggcgtttatcgcatgtatgat

SEQ ID NO: 708142 - DNA, 75 bp, synthetic construct
  source 1..75: mol_type = other DNA
attcgccagtgcgaaaacagtgtttatcgcaatcgctcgcgtccgtgtctgcaatatcagatagggcgctgtctg

SEQ ID NO: 708143 - DNA, 75 bp, synthetic construct
  source 1..75: mol_type = other DNA
accattttaagagccgtagataaagaaaacgctcagaagttcatacaggaaacgctgcaggaagtctgggaaact

SEQ ID NO: 708144 - DNA, 75 bp, synthetic construct
  source 1..75: mol_type = other DNA
tgaaaaatcgtggcagggatggcgaacgggtaatgctgaccgcactgaactgtacgcagggtgaccgttacctgg

SEQ ID NO: 708145 - DNA, 75 bp, synthetic construct
  source 1..75: mol_type = other DNA
gtcggtagcatcaaaaatgcttcagcgctggctgaatgtgtttaatcaaaaggggacgttatatccggatatgga

SEQ ID NO: 708146 - DNA, 75 bp, synthetic construct
  source 1..75: mol_type = other DNA
agccgtggcgtcaaaaatgcttcaacgctggcttaacgttttcaacctgcgcggaaaactgtatccggatatgga

SEQ ID NO: 708147 - DNA, 75 bp, synthetic construct
  source 1..75: mol_type = other DNA
cgaccaaatggggcattacggaaaaagtcgcccgtgcccacggataccgtggcgatatgcgcgatttaacccgcg

SEQ ID NO: 708148 - DNA, 75 bp, synthetic construct
  source 1..75: mol_type = other DNA
catgcagttcagcaccacagaggccgaactgtcccggcagcagaaaaaactgctctggcgggtgatcaaagggcg

SEQ ID NO: 708149 - DNA, 75 bp, synthetic construct
  source 1..75: mol_type = other DNA
gaccacttgagtcggttatttatcacgaacagcagataagggatgaacaggaaaggcaggcacgcctggaacggg

SEQ ID NO: 708150 - DNA, 75 bp, synthetic construct
  source 1..75: mol_type = other DNA
caaagagctattgcaggtgttgcaagtattttccggtaattcagcagaaaacaaagaaatgatggctttgtgtct

SEQ ID NO: 708151 - DNA, 75 bp, synthetic construct
  source 1..75: mol_type = other DNA
atcaattgcaaattatatcagcccaatggcccagctatgggagttagcttcatcacgttaccacgatgcgccaga

SEQ ID NO: 708152 - DNA, 75 bp, synthetic construct
  source 1..75: mol_type = other DNA
atggcccagctatgggaattagcttcatcacgttaccacgatgcgccagaaagggcgctctccccctggcgaggg

SEQ ID NO: 708153 - DNA, 75 bp, synthetic construct
  source 1..75: mol_type = other DNA
tcccctgatattgccgcagagctgtgtgataccggtgtgaatatggggccatccgtggcgtcaaaaatgctccaa

SEQ ID NO: 708154 - DNA, 75 bp, synthetic construct
  source 1..75: mol_type = other DNA
ttgaggcggattactggttcggaccacgctttgatcaggtggccgcattatcctctgatattgctgcagagttgt

SEQ ID NO: 708155 - DNA, 75 bp, synthetic construct
  source 1..75: mol_type = other DNA
ttatgtcaatcacccggatgataagggcggtccgaccaaatggggcattacggaaaaagtcgcccgcgcccacgg

SEQ ID NO: 708156 - DNA, 75 bp, synthetic construct
  source 1..75: mol_type = other DNA
gaccaggtcgccgcattatcccctgatattgccgcagaattgtgtgataccggtgtgaatatggggccaaccgtg

SEQ ID NO: 708157 - DNA, 75 bp, synthetic construct
  source 1..75: mol_type = other DNA
tgaaaaaacaccgggaaggggtgaaagaggcgatgatgcagcaccggaaggacgtgttaaagctggcagggagtt

SEQ ID NO: 708158 - DNA, 75 bp, synthetic construct
  source 1..75: mol_type = other DNA
gcgaacatgcgttatccctggcgcgtgagcgccagccggaaatacaggaacgcacactggatggcccttcgctgg

SEQ ID NO: 708159 - DNA, 75 bp, synthetic construct
  source 1..75: mol_type = other DNA
gaaaatcaaaggcgctatagcccagtttacggcctcgacggaggaatcgctgaaaaaacaccgggaaggggtgaa

SEQ ID NO: 708160 - DNA, 75 bp, synthetic construct
  source 1..75: mol_type = other DNA
aagggggcgctgtatgagcaatcttttacaaatgggaacagacttcgagaagaaactgaaagagcgagccgcttc

SEQ ID NO: 708161 - DNA, 75 bp, synthetic construct
  source 1..75: mol_type = other DNA
ggatacaggcgaacctggaagaaatcaggatacaggaagagacattgcagaaactgaacgcgaagacatggggcg

SEQ ID NO: 708162 - DNA, 75 bp, synthetic construct
  source 1..75: mol_type = other DNA
aaatcggcaacggtgattccctatcaggggaaggactgggtacaactgacggagtgacacagagtgacggagctg

SEQ ID NO: 708163 - DNA, 75 bp, synthetic construct
  source 1..75: mol_type = other DNA
agtcagcaggtgcagcacttgagcgagcggacagaacgcttgagccagttatacagcgagaacaggagataaggg

SEQ ID NO: 708164 - DNA, 75 bp, synthetic construct
  source 1..75: mol_type = other DNA
agaggcgatgatgcagcacaggaaggacgtgttaaagctggcagggaatacgggcatgatgttactggggatggt

SEQ ID NO: 708165 - DNA, 75 bp, synthetic construct
  source 1..75: mol_type = other DNA
tccctgataacctgccggaaacgaaacaggcgtttgctgagggcgtcacacgcgggatagatgctctttaccatg

SEQ ID NO: 708166 - DNA, 75 bp, synthetic construct
  source 1..75: mol_type = other DNA
tacagagacaatgctgaacgacgagttcagcaagctcgaaaaatctgtaagcaaggctgtgacatcaaacgagac

SEQ ID NO: 708167 - DNA, 75 bp, synthetic construct
  source 1..75: mol_type = other DNA
gcgcatggtcagccagacgtggctgaccatcgtcctggtctccgcgctgctgatcgcctcgagcgcgggcattct

SEQ ID NO: 708168 - DNA, 75 bp, synthetic construct
  source 1..75: mol_type = other DNA
ggttttgaggtggtccgcaccacaaaaagcagtatcagcattgccgacccggacggggggcgaaacatccgactg

SEQ ID NO: 708169 - DNA, 75 bp, synthetic construct
  source 1..75: mol_type = other DNA
tgcagacggacgcatcgggcctcgcaccatcagtgcattgcgcgccttcctgaataatcgcggtcaggacggtga

SEQ ID NO: 708170 - DNA, 75 bp, synthetic construct
  source 1..75: mol_type = other DNA
cagagagtttcaagacttatagcaagaatgccgcctctccggttgaattacggcaatacatcgaattactacgtt

SEQ ID NO: 708171 - DNA, 75 bp, synthetic construct
  source 1..75: mol_type = other DNA
gcatttaatcctggcaaactggagcgcatctttattagccatcttcatggcgatcatcttttcggcttgcctggt

SEQ ID NO: 708172 - DNA, 75 bp, synthetic construct
  source 1..75: mol_type = other DNA
tgacagcttatccgatggaacatccgctggaatgttacggctatcgtattgaagaacatgataaacctggcgcgc

SEQ ID NO: 708173 - DNA, 75 bp, synthetic construct
  source 1..75: mol_type = other DNA
actttaaagcccgtatggaatctctgggacgcaccgcgaccccgggtaacgtgcaggcacaggctaattacgtac

SEQ ID NO: 708174 - DNA, 75 bp, synthetic construct
  source 1..75: mol_type = other DNA
actttaaagcccgtatggaatctctgggacgcaccgcgaccccaggtaacgtgcaggcacaagctaattacgtac

SEQ ID NO: 708175 - DNA, 75 bp, synthetic construct
  source 1..75: mol_type = other DNA
catagccgcttatagcggaatgcgcatcaatgaaatagccagtttgaaatctgacaatatccgtgaagttgaggg

SEQ ID NO: 708176 - DNA, 75 bp, synthetic construct
  source 1..75: mol_type = other DNA
tcctgttcgaaaatctggtggatgtcgacgatcgcagtatccagcgtctgttgcaggaagtggattctgaaccac

SEQ ID NO: 708177 - DNA, 75 bp, synthetic construct
  source 1..75: mol_type = other DNA
aaagcgtcatcctgctgatgaccattggcgaagaccgggcggcagaagtgttcaagcacctctcccagcgcgagg

SEQ ID NO: 708178 - DNA, 75 bp, synthetic construct
  source 1..75: mol_type = other DNA
atgagtaacctgacaggcaccgataaaagcgtcatcctgctgatgaccattggcgaagaccgggcggcagaggta

SEQ ID NO: 708179 - DNA, 75 bp, synthetic construct
  source 1..75: mol_type = other DNA
aggtaaagcgctcgctattttcggcgataccggcccctgcgatgccgcacttgacctggctaaaggtgtcgatgt

SEQ ID NO: 708180 - DNA, 75 bp, synthetic construct
  source 1..75: mol_type = other DNA
agcacgcaaatcagcgatttccatgtagccactcactttaatgatgatttcagccgcgctgtactggaggcagac

SEQ ID NO: 708181 - DNA, 75 bp, synthetic construct
  source 1..75: mol_type = other DNA
ggcgctttgcctggtttccggcaccagaagcggtgccggaaagctggctggagtgcgatcttcctgaggccgata

SEQ ID NO: 708182 - DNA, 75 bp, synthetic construct
  source 1..75: mol_type = other DNA
atgtgaaagagatcgaaggtgtgctgtgttttgaaatcacacagggaaaaacgaaagctgcggcgcgtgttgttc

SEQ ID NO: 708183 - DNA, 75 bp, synthetic construct
  source 1..75: mol_type = other DNA
ttacgttaaccatcctgatgataaaggtgggccgacaaagtggggaattactgaaaaagttgccagggcgcatgg

SEQ ID NO: 708184 - DNA, 75 bp, synthetic construct
  source 1..75: mol_type = other DNA
acgcgtgggcaggccctcgaaattcttgaagcggactactggtacgggccacgttttcacaaggttgcgagcctg

SEQ ID NO: 708185 - DNA, 75 bp, synthetic construct
  source 1..75: mol_type = other DNA
aaaataatggcagtggtgaaaaacgtttctttgtgttgggttatgccgttaataagcgcgggttaaccaaacatg

SEQ ID NO: 708186 - DNA, 75 bp, synthetic construct
  source 1..75: mol_type = other DNA
tcgaggcggactactggtatggaccacgttttgaccaggtggcagcgttatcccctgatattgccgcagagttgt

SEQ ID NO: 708187 - DNA, 75 bp, synthetic construct
  source 1..75: mol_type = other DNA
cgctggctgaacgttttcaacctgcgcgggaaactgtatccggatatggatgcagacggacgtatcgggccgcgt

SEQ ID NO: 708188 - DNA, 75 bp, synthetic construct
  source 1..75: mol_type = other DNA
ttgaggcggactactggtacggaccacgttttgaccaggtggcaaacctgtctccggatattgccgcagaactgt

SEQ ID NO: 708189 - DNA, 75 bp, synthetic construct
  source 1..75: mol_type = other DNA
agccaattaaaacacctcaaatgctgttcggctctgacaacattaatgactttggtaaccgtgttaagagctgca

SEQ ID NO: 708190 - DNA, 75 bp, synthetic construct
  source 1..75: mol_type = other DNA
gttcggatctgacaacattaatgactttggcaaccgcgttcaaagctgccggatggaaggtgattcaatgcagcc

SEQ ID NO: 708191 - DNA, 75 bp, synthetic construct
  source 1..75: mol_type = other DNA
ttgtgcctgtacatagccttatcactccattggtgttatctcttcgtgaaaagcctcacaatggctttttgttct

SEQ ID NO: 708192 - DNA, 75 bp, synthetic construct
  source 1..75: mol_type = other DNA
gcacgctctatcccgatctgattgctgatggttttatcggtccgcgaactatcagcgcgttaaaaagctatcttt

SEQ ID NO: 708193 - DNA, 75 bp, synthetic construct
  source 1..75: mol_type = other DNA
cgccagcaggcgctggatatcctgactgctgactactggacagggccacgcttcgaccttgtttctgaggtatca

SEQ ID NO: 708194 - DNA, 75 bp, synthetic construct
  source 1..75: mol_type = other DNA
cgcgaacaggctctggaaatccttgaggctgattactggtacggcccacgttttgaccagatagcaactctgtcg

SEQ ID NO: 708195 - DNA, 75 bp, synthetic construct
  source 1..75: mol_type = other DNA
ggcatcgttgatcttgaacaagcgcgtgaaatggtacgcatcaatggcgaccttgggcgtcttggagggttgtta

SEQ ID NO: 708196 - DNA, 75 bp, synthetic construct
  source 1..75: mol_type = other DNA
gtggaatccatggtcgatattgaacaggttcaggagctgagtcgggtaaatggtgatttaggtcgacttggcgga

SEQ ID NO: 708197 - DNA, 75 bp, synthetic construct
  source 1..75: mol_type = other DNA
atcgctgatcaaaactcttttgggaaaaatcgagtcaacccaaaacgagctacgtacagtaatggacaggatact

SEQ ID NO: 708198 - DNA, 75 bp, synthetic construct
  source 1..75: mol_type = other DNA
ctattatgcagcgtcttcgtgacccggaaagtggttgcccgtgggataaagagcagacattttcttctattgcgc

SEQ ID NO: 708199 - DNA, 75 bp, synthetic construct
  source 1..75: mol_type = other DNA
tgggcgatctgctattccaggtggtgttttacgcgcaaatggctcaggaagaagggcgctttgactttaatgata

SEQ ID NO: 708200 - DNA, 75 bp, synthetic construct
  source 1..75: mol_type = other DNA
aaagcgcagcattcggcgctggacgatattcctcgtagtttaccggccttaatgcgtgcgcaaaaaatccagaaa

SEQ ID NO: 708201 - DNA, 75 bp, synthetic construct
  source 1..75: mol_type = other DNA
caggttaaatggctcgaagagggtaaacctgtcagttgtcttgcccattatcaacaaaatgcagagccagaaaaa

SEQ ID NO: 708202 - DNA, 75 bp, synthetic construct
  source 1..75: mol_type = other DNA
cagagcggttataagatctatgaaacaacagtaccaccaggcgcatttactattgatgatctcagtccatcaggc

SEQ ID NO: 708203 - DNA, 75 bp, synthetic construct
  source 1..75: mol_type = other DNA
gcgttggacgttgggatattagcggcggccaggtcttaaaagatgatattcaggatgagcctaatttatttcagg

SEQ ID NO: 708204 - DNA, 75 bp, synthetic construct
  source 1..75: mol_type = other DNA
ttgattccgtcagcattcgtggcgttcgcttatacagcgacagtcggatgcttccccctgcattagccagttttg

SEQ ID NO: 708205 - DNA, 75 bp, synthetic construct
  source 1..75: mol_type = other DNA
gaccaaggcaatgtcattggtaatgttggacagggtggacaggcttttgttcgtggtattgaacagcaaggaaat

SEQ ID NO: 708206 - DNA, 75 bp, synthetic construct
  source 1..75: mol_type = other DNA
gttggacagggtggacaagcatttgttcgtggtattgagcagcagggaaatatcagcattaaatggctcgaagaa

SEQ ID NO: 708207 - DNA, 75 bp, synthetic construct
  source 1..75: mol_type = other DNA
aacgggaagaagtaaaggcgcgtattgtggaactggtacgcagagatggtaggaaaacgcgtaaacaactggaaa

SEQ ID NO: 708208 - DNA, 75 bp, synthetic construct
  source 1..75: mol_type = other DNA
tcgacctgtatgcccgtgaaaacaagcgcggcggggcgtggatggatgactgcgtaggccagatgcgtaaagccg

SEQ ID NO: 708209 - DNA, 75 bp, synthetic construct
  source 1..75: mol_type = other DNA
gtggatgagttgcagccgtgggatatcgcgtactacagtgaaaaacaaaaacagcacctctacagcatcagtgac

SEQ ID NO: 708210 - DNA, 75 bp, synthetic construct
  source 1..75: mol_type = other DNA
ctgcaaaaaccggtcgcgtatctgacctgtaactttaaccgcccggtaaatggtaaaccggcgctgtttacccat

SEQ ID NO: 708211 - DNA, 75 bp, synthetic construct
  source 1..75: mol_type = other DNA
cagctggagttcggcctgttcgatttccgcctccatgccgagttccgcccggatcagggggcgaaaatcctcgaa

SEQ ID NO: 708212 - DNA, 75 bp, synthetic construct
  source 1..75: mol_type = other DNA
tcattacgccacgctgaacacggcacagaagaaagcggttgataacgcactgcgtgattttgaactgtcgggcat

SEQ ID NO: 708213 - DNA, 75 bp, synthetic construct
  source 1..75: mol_type = other DNA
gtcgatgagttgcagccgtgggatatcgcatactacagcgaaaaacagaaacagcacctctacagcatcagcgac

SEQ ID NO: 708214 - DNA, 75 bp, synthetic construct
  source 1..75: mol_type = other DNA
ccattcaactggacacccccatcatgcgcggtaaaacagaaattaccgaaattgtgctgcgtaaaccgcagtccg

SEQ ID NO: 708215 - DNA, 75 bp, synthetic construct
  source 1..75: mol_type = other DNA
ccattcaactggatacccccatcatgcgcggtaaaacagaaattaccgaaattgtgttgcgtaaaccgcagtccg

SEQ ID NO: 708216 - DNA, 75 bp, synthetic construct
  source 1..75: mol_type = other DNA
atgagcgataagcagactgaaaagaccattcaactggatactcccatcatgcgtggtaaaactgaaatcaccgaa

SEQ ID NO: 708217 - DNA, 75 bp, synthetic construct
  source 1..75: mol_type = other DNA
gcgtggtaaaacagaaattaccgaaattgtgctgcgtaaaccgcagtccggtgcgctgcgcggtacacgcctgca

SEQ ID NO: 708218 - DNA, 75 bp, synthetic construct
  source 1..75: mol_type = other DNA
atgagcgataagcagactgaaaagaccattcaactggacacccccatcatgcgcggtaaaacggaaatcaccgaa

SEQ ID NO: 708219 - DNA, 75 bp, synthetic construct
  source 1..75: mol_type = other DNA
gcgcggtaaaacagaaatcaccgaaattgtgctgcgtaaaccgcagtccggtgcgctgcgcggtacacgcctgca

SEQ ID NO: 708220 - DNA, 75 bp, synthetic construct
  source 1..75: mol_type = other DNA
ctcagtttcaccattcctattgaaaagcttctgggtacagaacaccgcgattctggctttcagactattgatact

SEQ ID NO: 708221 - DNA, 75 bp, synthetic construct
  source 1..75: mol_type = other DNA
gcgcagcgccgcgaactggcgagaaaatcgtcgctatccaaagatgattctctatcaacacgctgcccgctattt

SEQ ID NO: 708222 - DNA, 75 bp, synthetic construct
  source 1..75: mol_type = other DNA
tgcggtgggctcgcttctgctttcacagttgccaggcgtgccggtgctgatgttgttgggcgcgctcgtgggact

SEQ ID NO: 708223 - DNA, 75 bp, synthetic construct
  source 1..75: mol_type = other DNA
atggtggtaatggtttcgttattaatgatattgcaccttcgaataacattatatggtcatcaccaaatggctgga

SEQ ID NO: 708224 - DNA, 75 bp, synthetic construct
  source 1..75: mol_type = other DNA
tctgcgccggtggccgatttcgccgcgcaactgcatcaggaaagcggctggcgacctgatgcgatctcgccggct

SEQ ID NO: 708225 - DNA, 75 bp, synthetic construct
  source 1..75: mol_type = other DNA
gtcgtgggccatccgggcgctggtgcaatacgaccagtggttgtggcagcgcgtcagcgcccgcgatggttgcca

SEQ ID NO: 708226 - DNA, 75 bp, synthetic construct
  source 1..75: mol_type = other DNA
tgcggcgaaggcgcagctcgccgcagcggaatgagcgaacgtcgatatagcccgctcgcgacgctgttcgcggcg

SEQ ID NO: 708227 - DNA, 75 bp, synthetic construct
  source 1..75: mol_type = other DNA
ccgctggatcacgaatttatcaccggcggcgaatatcgtcgtatctgcacgctgggtgagaaactgcgtggcttg

SEQ ID NO: 708228 - DNA, 75 bp, synthetic construct
  source 1..75: mol_type = other DNA
ggaacagtatattaaagacgacgaagcgatggatcagtaccagatctctatcgcgctggatggcgcaacgctgca

SEQ ID NO: 708229 - DNA, 75 bp, synthetic construct
  source 1..75: mol_type = other DNA
ttgttcaccacactgatgggtgacgctgttgaaccgcgtcgtgcgtttatcgaagagaacgctctgaaagcggca

SEQ ID NO: 708230 - DNA, 75 bp, synthetic construct
  source 1..75: mol_type = other DNA
atgaagatgacagtttctacgctgccaacggcatctctaccgatgatatcgtcgctttaggtctggtttatcagt

SEQ ID NO: 708231 - DNA, 75 bp, synthetic construct
  source 1..75: mol_type = other DNA
tgataaagcagacgcgtggactgctgggctaaaatacgatgctaacaatatttacctggcaaccatgtattcaga

SEQ ID NO: 708232 - DNA, 75 bp, synthetic construct
  source 1..75: mol_type = other DNA
tatccgaaggcgatgctgaaagagcttatctatcagccgacgctgacggaagcggatctctctgacgagcaggtt

SEQ ID NO: 708233 - DNA, 75 bp, synthetic construct
  source 1..75: mol_type = other DNA
gcttctggtggcagctcgctggcaacctggtgattgcctggctgctctggtgtggcggtttcttcagtcaggccc

SEQ ID NO: 708234 - DNA, 75 bp, synthetic construct
  source 1..75: mol_type = other DNA
gtttaacagccattatctggcagatatgaaactgtgggtaacgcacagtcagtttattgttgagcatattaatgc

SEQ ID NO: 708235 - DNA, 75 bp, synthetic construct
  source 1..75: mol_type = other DNA
ctggcagcgaatgcgggtaaatcaggcgcataacactctgtataactcattgaatcaggcgatgcaggaaccggc

SEQ ID NO: 708236 - DNA, 75 bp, synthetic construct
  source 1..75: mol_type = other DNA
gggcgacggtcggttttactattaccgcagtgtataccctgcaactattgtggttgaacggcgagcaatacatcc

SEQ ID NO: 708237 - DNA, 75 bp, synthetic construct
  source 1..75: mol_type = other DNA
ccctgcgggcaggtaatgcattatggccaactggctgaacaatgtaagcgtcaacggagcaccgtattgacgctt

SEQ ID NO: 708238 - DNA, 75 bp, synthetic construct
  source 1..75: mol_type = other DNA
tgaaatcgccattcagcgttgtcagcagcgactggagtatgacgaaccgggtagttctggcgatgccaatatcat

SEQ ID NO: 708239 - DNA, 75 bp, synthetic construct
  source 1..75: mol_type = other DNA
ccatgatgccttagaaacttaccaggaggccattcgtctgatcctcagtaaagatccgcaacctacgccactagc

SEQ ID NO: 708240 - DNA, 75 bp, synthetic construct
  source 1..75: mol_type = other DNA
tgaatggggactgtctgcgccggtggccgatttcgccgcgcaactgcatcaggaaagcggctggcgacctgatgc

SEQ ID NO: 708241 - DNA, 75 bp, synthetic construct
  source 1..75: mol_type = other DNA
gacactgtcgggctataacggtggtctgggctgggtacaacgggacaggcggcttgcatcacagaaaggtctgga

SEQ ID NO: 708242 - DNA, 75 bp, synthetic construct
  source 1..75: mol_type = other DNA
gcagcgcagcctccgcaggcagcgctgcagtatcgcgatgatgtgatccgtaatgcccggcttgaatggggactg

SEQ ID NO: 708243 - DNA, 75 bp, synthetic construct
  source 1..75: mol_type = other DNA
attattgatacgcttcccactgccacggggggacgccatttcagcgcgaagtctggaaaacactgcgcactatcc

SEQ ID NO: 708244 - DNA, 75 bp, synthetic construct
  source 1..75: mol_type = other DNA
ccatgacactgtcgggctataacggtggtctgggttgggtacaacgggacaggcggctcgcatcacagaaaggtc

SEQ ID NO: 708245 - DNA, 75 bp, synthetic construct
  source 1..75: mol_type = other DNA
ctgggctgggtacaacgggacaggcagctagcatcacagaaaggcctggacagtacccgctggttcgggcatgtc

SEQ ID NO: 708246 - DNA, 75 bp, synthetic construct
  source 1..75: mol_type = other DNA
ctggctgaaactatccgcgtaagcgtggcaaaagttgagtatttcgggcttaccacgctttaccgtcagcattgg

SEQ ID NO: 708247 - DNA, 75 bp, synthetic construct
  source 1..75: mol_type = other DNA
ggaaatgaaagcatcgatgaactgtttaaacgcgttgatgatgctttgtatcgggcgaaaaatgatggacgcaac

SEQ ID NO: 708248 - DNA, 75 bp, synthetic construct
  source 1..75: mol_type = other DNA
accacgctgaatatcaaaggagagagttaccggttaaaagagaaacgtaaagcaggagtgctgaccaaaaacaca

SEQ ID NO: 708249 - DNA, 75 bp, synthetic construct
  source 1..75: mol_type = other DNA
gcaggaaacatcgtcgcccgttatgccaaactgcatctctatgatgcatttgccattcaggaatcacgccatgtt

SEQ ID NO: 708250 - DNA, 75 bp, synthetic construct
  source 1..75: mol_type = other DNA
cggaagtgacgcccgaacgtgtgcgtcaggtgcgcgcgcaactccccgtcttaaacaaccgacggtttgcgccgc

SEQ ID NO: 708251 - DNA, 75 bp, synthetic construct
  source 1..75: mol_type = other DNA
tggcaaaagtgagtatttcgggcttaccacgctttaccgtcagcattggtgtggcgcatcacgaaggaaatgaaa

SEQ ID NO: 708252 - DNA, 75 bp, synthetic construct
  source 1..75: mol_type = other DNA
gtggcaaaagtttttacacaagaagagcgggaaaaaattaaagggcaggttgttgaactggtacgccggagtggg

SEQ ID NO: 708253 - DNA, 75 bp, synthetic construct
  source 1..75: mol_type = other DNA
ttcgcagactggggagaaatgttcggagatcacgtgctggcaacagcgatactggatcggctgctacatcactca

SEQ ID NO: 708254 - DNA, 75 bp, synthetic construct
  source 1..75: mol_type = other DNA
gttcgtggagcgcagtgaaaacgtgatcctgctgggcccgccgggcgtggggaaaacgcatctggcggtcgctct

SEQ ID NO: 708255 - DNA, 75 bp, synthetic construct
  source 1..75: mol_type = other DNA
ccagattattcgcatcgcccgtgaatttgccgataacgctgataaaacgcacggtcgttcaatgattatcgtcgg

SEQ ID NO: 708256 - DNA, 75 bp, synthetic construct
  source 1..75: mol_type = other DNA
agacgcgtaccccggatgctcacttctttactgaagtgcgttacaaaggaaccaaaactgttgccgtcacaccag

SEQ ID NO: 708257 - DNA, 75 bp, synthetic construct
  source 1..75: mol_type = other DNA
tggtatctttacagcgctaaccgcctgaaatacccgatgatgcgcaaacgcctgatgaaaatgtggcgtgaagcg

SEQ ID NO: 708258 - DNA, 75 bp, synthetic construct
  source 1..75: mol_type = other DNA
ggcaggcgtgctgagcaagaatctggcgccagaaaacaacgaggcatcgctggagaaaagcggtcaacctggttg

SEQ ID NO: 708259 - DNA, 75 bp, synthetic construct
  source 1..75: mol_type = other DNA
ctatgttgattataaaattaacttgttggatgaagatgacagcttctacgctgccaacggtatctctaccgatga

SEQ ID NO: 708260 - DNA, 75 bp, synthetic construct
  source 1..75: mol_type = other DNA
gtcgcgacttatcgtaatactgatttcttcggtctggtaaatggtctgaacttcgcggtgcagtatcaaggtaac

SEQ ID NO: 708261 - DNA, 75 bp, synthetic construct
  source 1..75: mol_type = other DNA
gtatgggctttagtgcgggtgcagcatacacctcctcagaccgcaccaatgatcaggttaatcatactgtggcgg

SEQ ID NO: 708262 - DNA, 75 bp, synthetic construct
  source 1..75: mol_type = other DNA
attcaggttaagccgaaattcaccgactattacaacctcgcttataacaaacgcgggaaattacaactcaccgtt

SEQ ID NO: 708263 - DNA, 75 bp, synthetic construct
  source 1..75: mol_type = other DNA
agtcagggaaattacaggtttcatggggcaaagataaaaactcaaactgtattgtcgagtacaagcttcctgaag

SEQ ID NO: 708264 - DNA, 75 bp, synthetic construct
  source 1..75: mol_type = other DNA
aaaactcaaactgtattgtcgattacaagcttcctgaagtctctcctggaaccttgctgaaccagcagacagcaa

SEQ ID NO: 708265 - DNA, 75 bp, synthetic construct
  source 1..75: mol_type = other DNA
gggcgacacaatggttctggttaaggctcctggcgctgataatgtcaaaatagagaaccagaccggaattcatac

SEQ ID NO: 708266 - DNA, 75 bp, synthetic construct
  source 1..75: mol_type = other DNA
gatcctggatgaaataggctatctgccgatgaacagggaggaagccagcctgttcttccggctactgaaccgtcg

SEQ ID NO: 708267 - DNA, 75 bp, synthetic construct
  source 1..75: mol_type = other DNA
ttccagccgggcatcgaccgtaaggttgttcgggaactggctggtctggcgttcgtggagcgcagcgaaaacgtg

SEQ ID NO: 708268 - DNA, 75 bp, synthetic construct
  source 1..75: mol_type = other DNA
atgaaaagcaaagcactggcactcttaattccgtccctgcttgcagcaggtgctgcacatgcagccgaagtttat

SEQ ID NO: 708269 - DNA, 75 bp, synthetic construct
  source 1..75: mol_type = other DNA
cttcgctttgcaatatcagggtaacaacgaaggcgcgagcaatggtcaggaaggtactaataacggacgtgatgt

SEQ ID NO: 708270 - DNA, 75 bp, synthetic construct
  source 1..75: mol_type = other DNA
aaagtattaatgacgttgaagtacggtaataagagcgttccattcggtgcaattgtcacacacggagagaataaa

SEQ ID NO: 708271 - DNA, 75 bp, synthetic construct
  source 1..75: mol_type = other DNA
gtgacggagcaattagagttctttcccgtccagagcccgtgccggggaatttgccagtctgacgaacggggattt

SEQ ID NO: 708272 - DNA, 75 bp, synthetic construct
  source 1..75: mol_type = other DNA
tgcggtatcacaggtcgattatgacggtatcatcctcaagttgaatcaactttctaatcaggtagataacctgcg

SEQ ID NO: 708273 - DNA, 75 bp, synthetic construct
  source 1..75: mol_type = other DNA
ggcggtggagcgcgactaccctgctacgtatgaacgctttacctcgctcgggccattgatggacaaacttggcaa

SEQ ID NO: 708274 - DNA, 75 bp, synthetic construct
  source 1..75: mol_type = other DNA
gttaattgctttcaccttgcagcttttcttacccggctgggagattggtttttcaccgttggcgctgctgctggc

SEQ ID NO: 708275 - DNA, 75 bp, synthetic construct
  source 1..75: mol_type = other DNA
aaacgctggcaaaacagctggatgaagtccaacaaaaggtcgcgactatttccggcagcgatgctaaaacctggc

SEQ ID NO: 708276 - DNA, 75 bp, synthetic construct
  source 1..75: mol_type = other DNA
atgctggaaaaactgatgcagactcgcgtgcgtaacctgctggcacaaccggcagcagggacaacggaagctaaa

SEQ ID NO: 708277 - DNA, 75 bp, synthetic construct
  source 1..75: mol_type = other DNA
tccggaagcgatgctaaaacctggctgctggcgcaggcagattttctggtgaagctcgccggacgtaagctgtgg

SEQ ID NO: 708278 - DNA, 75 bp, synthetic construct
  source 1..75: mol_type = other DNA
gccaactggctgaacaattgggccgccctggcgcggcgcgtgccgttggtgcggcaaacggatcgaatcccatca

SEQ ID NO: 708279 - DNA, 75 bp, synthetic construct
  source 1..75: mol_type = other DNA
atgctgagattacttgaagaaaaaattgccacgccactgggtccactgtgggtgatttgcgatgagcaatttcgc

SEQ ID NO: 708280 - DNA, 75 bp, synthetic construct
  source 1..75: mol_type = other DNA
ctccccggtcagccatctgaactcggtgaaaaatagcccggaactgcgtgaagcgtacgaacaaaccctgccgct

SEQ ID NO: 708281 - DNA, 75 bp, synthetic construct
  source 1..75: mol_type = other DNA
tgtccgggcgagttatgggccagtcgtggctgaactccattactgtcagggtgaaagaaggatttgacagcgctg

SEQ ID NO: 708282 - DNA, 75 bp, synthetic construct
  source 1..75: mol_type = other DNA
agaaaaacagtcgatgtttggtagcagtaaagtgctgcgtgtctggctaccttacagcacgatgtccgggcgagt

SEQ ID NO: 708283 - DNA, 75 bp, synthetic construct
  source 1..75: mol_type = other DNA
attattgatacgcttcctaccgccacgggaggcacgccatttcagcgcgaagtctggaaggcactgcgcactatc

SEQ ID NO: 708284 - DNA, 75 bp, synthetic construct
  source 1..75: mol_type = other DNA
gcaatgctggaaaaactgatgcagactcgcgtgcgcaatctgctggcgcaaccagtaacaccagtagcggaggct

SEQ ID NO: 708285 - DNA, 75 bp, synthetic construct
  source 1..75: mol_type = other DNA
gcccgcaaaaaactatcgagggcaaaggtgaagaaaccagttgtggttgatccggaccttatttggtcattacca

SEQ ID NO: 708286 - DNA, 75 bp, synthetic construct
  source 1..75: mol_type = other DNA
tgggcgatctgctgttccaggtggtgttttacgcacaaatggctcaggaagaagggcgctttgactttaatgata

SEQ ID NO: 708287 - DNA, 75 bp, synthetic construct
  source 1..75: mol_type = other DNA
atgaatcaaatcgaccgtttgctcaccatcatgcagcgcctgcgcgatccggaaaacggctgcccgtgggataaa

SEQ ID NO: 708288 - DNA, 75 bp, synthetic construct
  source 1..75: mol_type = other DNA
cccgggtgttgatcctggatgaaataggctatctgccgatgaacagggaggaagccagcctgttcgtaagcgtac

SEQ ID NO: 708289 - DNA, 75 bp, synthetic construct
  source 1..75: mol_type = other DNA
gtggcaaaagtttttacacaagaagagcgggaaaaaattaaagggcaggttgttgagctagtacgccggagtggg

SEQ ID NO: 708290 - DNA, 75 bp, synthetic construct
  source 1..75: mol_type = other DNA
atgaaagcgaaacaggaaaaccggctggagcgtcagctacagcaactgagttatgcccgggtgttgatcctggat

SEQ ID NO: 708291 - DNA, 75 bp, synthetic construct
  source 1..75: mol_type = other DNA
caaaccggcgtaccttgatgccctgatcatgcattacgatggtacccggctcatacttgacggaaaatacaacaa

SEQ ID NO: 708292 - DNA, 75 bp, synthetic construct
  source 1..75: mol_type = other DNA
tgccaccaccaaagcgttcctcgacgaggtggaccagttaagccagcaaaatatctcgatggatcttccggaaac

SEQ ID NO: 708293 - DNA, 75 bp, synthetic construct
  source 1..75: mol_type = other DNA
aatcgtcagcaagaaacgctggcaaaacagttggatgaagtccaacaaaaggtcgccaccatttccggcagcgat

SEQ ID NO: 708294 - DNA, 75 bp, synthetic construct
  source 1..75: mol_type = other DNA
cgttgcgccaacgttggcttcgactggacgacgcttggcccggtggttgataaagtctacgaagagatcgacgag

SEQ ID NO: 708295 - DNA, 75 bp, synthetic construct
  source 1..75: mol_type = other DNA
agcaggtgtcgctttttgtgaacgccccaaagacaaagctaggtctgctatgccgtaatttggcggctttgttaa

SEQ ID NO: 708296 - DNA, 75 bp, synthetic construct
  source 1..75: mol_type = other DNA
attcaacaccattgatgaagcggctatagcttataaggcagcaaacatggttgctgaccatctgttgagtaggta

SEQ ID NO: 708297 - DNA, 75 bp, synthetic construct
  source 1..75: mol_type = other DNA
acgagtgggagagcgccttcgcggaattgcagaagatgcacgaggttacgcaacggaacaacgcgatactgaacg

SEQ ID NO: 708298 - DNA, 75 bp, synthetic construct
  source 1..75: mol_type = other DNA
atcggctccagcgaagggaagattacgtcgctggaagagaaggtgtttattgccgccgcgctggcacataaccag

SEQ ID NO: 708299 - DNA, 75 bp, synthetic construct
  source 1..75: mol_type = other DNA
ggatatcacgcgtcgctctcatttaaaagccaacggtggttatggctatgactatttatttaccacctttattcc

SEQ ID NO: 708300 - DNA, 75 bp, synthetic construct
  source 1..75: mol_type = other DNA
caatttcgcaatgggaaagagacgaaacccaaccagtcgggaagcggttgtttgctttagcggatgcgctgaagt

SEQ ID NO: 708301 - DNA, 75 bp, synthetic construct
  source 1..75: mol_type = other DNA
ggttaccgatcataaatggggcgtctggagtggctcggcgaatctgaatgccgccgccgcaacgtttaatcgtgt

SEQ ID NO: 708302 - DNA, 75 bp, synthetic construct
  source 1..75: mol_type = other DNA
acattgcgctaagcagtcgccaactgaccgaaccacgccatgtcgataccatcctgctggaaaacgggacgctga

SEQ ID NO: 708303 - DNA, 75 bp, synthetic construct
  source 1..75: mol_type = other DNA
atgaggatagtgtattttgtcaatgcagcgtggtacttcgaactgcattggttggaccggtcagaagcggcaatt

SEQ ID NO: 708304 - DNA, 75 bp, synthetic construct
  source 1..75: mol_type = other DNA
acctgttaaaagaagcagaagaggctttgaagcaggacgagctgcgtttcaacatcagcaaacagctgggcgcgg

SEQ ID NO: 708305 - DNA, 75 bp, synthetic construct
  source 1..75: mol_type = other DNA
gaaccccggaatgtgaaaactggtatcacgaacagcgtggatattcagatcctcgaaggtttaaatgtcggagaa

SEQ ID NO: 708306 - DNA, 75 bp, synthetic construct
  source 1..75: mol_type = other DNA
ctatggccctcacgaggaagtggtgtggtcaaaatatggctatatggaaagtcatgaagtgactgcgacatcttt

SEQ ID NO: 708307 - DNA, 75 bp, synthetic construct
  source 1..75: mol_type = other DNA
cggaagtccatccccgtgaagtgattaaacgtgccctgtatcacaatgccgctgctgtggtgctggcacacaatc

SEQ ID NO: 708308 - DNA, 75 bp, synthetic construct
  source 1..75: mol_type = other DNA
taagcgccacgccaatctggaatagtcgtcgccgttatttgctcgataccctacaggagaataaaaatgagcaaa

SEQ ID NO: 708309 - DNA, 75 bp, synthetic construct
  source 1..75: mol_type = other DNA
tgtgtctacggtttgtaccttggccctgcgggttatcttgccgggaactggaaaaacgatgagatcacaatgtct

SEQ ID NO: 708310 - DNA, 75 bp, synthetic construct
  source 1..75: mol_type = other DNA
ctgcgtgatatggcgtttaatagcccgaatagcgaatggaaactgagcgcgcagcgggtaaatggcggcgtggtt

SEQ ID NO: 708311 - DNA, 75 bp, synthetic construct
  source 1..75: mol_type = other DNA
tgctggtttatcgtccgccgatcgacacccgttcggtgaaagaggttatgggacagaaatccaacggtaacccgg

SEQ ID NO: 708312 - DNA, 75 bp, synthetic construct
  source 1..75: mol_type = other DNA
attccacctcgataatccaagccagtatttcactgactatgtgcgtcgctacaccgacatgccaatgctggtgat

SEQ ID NO: 708313 - DNA, 75 bp, synthetic construct
  source 1..75: mol_type = other DNA
ctgaactggcgcagccgctggatgtgaaagactggaaaaaaggcgaatgcgacctgatcccaggtaaaaccgcgc

SEQ ID NO: 708314 - DNA, 75 bp, synthetic construct
  source 1..75: mol_type = other DNA
gctggaaaatctacgttaaaaatggtctggtgacctgggaaaaccatcagactgactacccgcgcactcgcccgg

SEQ ID NO: 708315 - DNA, 75 bp, synthetic construct
  source 1..75: mol_type = other DNA
gctggaaaatctacgttaaaaaaggtctggtgacctgggaaaaccagcagactgactacccgcgcactcgcccgg

SEQ ID NO: 708316 - DNA, 75 bp, synthetic construct
  source 1..75: mol_type = other DNA
gctggaaaatctacgttaaaaaaggtctggtgacctgggaaaaccaccagactgactagccgcgcactcgcccgg

SEQ ID NO: 708317 - DNA, 75 bp, synthetic construct
  source 1..75: mol_type = other DNA
tgaaatacccgatgatgcgcaaacgcctgatgaaaatgtggcgtgaagcgaaggcgctgcatagcgatccggttg

SEQ ID NO: 708318 - DNA, 75 bp, synthetic construct
  source 1..75: mol_type = other DNA
tatataccctggaatacaggctctgctacagcaacttattattcgtgctcaggtccggaatttgcgagtggagtg

SEQ ID NO: 708319 - DNA, 75 bp, synthetic construct
  source 1..75: mol_type = other DNA
cttaaaattcctgctgatatcggcatcatggatgctcttaatagcgggaaatttaccggtttcgatctctcctta

SEQ ID NO: 708320 - DNA, 75 bp, synthetic construct
  source 1..75: mol_type = other DNA
tttccgttggggcgagaagggcaaatggaatcttgaacagcgcgacggcaaaactggtgaagaaaccgaactgca

SEQ ID NO: 708321 - DNA, 75 bp, synthetic construct
  source 1..75: mol_type = other DNA
aggcgcagccgcgtaaaattatctccagccccacctggtccggtctggaaagcgatcacgtatcctataacgcgg

SEQ ID NO: 708322 - DNA, 75 bp, synthetic construct
  source 1..75: mol_type = other DNA
tgctggtttatcgtccgccgatcgatacccgttcggtgaaagaagtgatgggccagaaatccaacggtaacccgg

SEQ ID NO: 708323 - DNA, 75 bp, synthetic construct
  source 1..75: mol_type = other DNA
acgggcaaccggggtcatccggctggctaccctgtgtgctcagtcgcagaaaagaatcctggagctggaaaggga

SEQ ID NO: 708324 - DNA, 75 bp, synthetic construct
  source 1..75: mol_type = other DNA
attgataaactggttacaaagtgctggcaggaagaagcatatgctgaggtgcaattaagaaaagtgacgagataa

SEQ ID NO: 708325 - DNA, 75 bp, synthetic construct
  source 1..75: mol_type = other DNA
gcaaaagcggcaaaggccgcgctcaagcgtgaaatgctgccgggttttgcaggctggatagacggcacgctggaa

SEQ ID NO: 708326 - DNA, 75 bp, synthetic construct
  source 1..75: mol_type = other DNA
tgtgtcgcttggtctgctgcgtgaagccatgcgcatcaatccggctgcgggcgtgaaacgtgaaatcgccacgct

SEQ ID NO: 708327 - DNA, 75 bp, synthetic construct
  source 1..75: mol_type = other DNA
gagcgatgacgcaccggcgacaggctcgggtggtttaacaattacggatgtaatggctgcgcaggggatggtgca

SEQ ID NO: 708328 - DNA, 75 bp, synthetic construct
  source 1..75: mol_type = other DNA
acactggcacgacgtcatgtccagaagctggttccagacctgactgattatcagtggtacaaaggatatgcagac

SEQ ID NO: 708329 - DNA, 75 bp, synthetic construct
  source 1..75: mol_type = other DNA
ctttttccgttctgtaccggcaaataccgctggcacggcagtgctgaagcgtataccggtcgtgaagtgcaggat

SEQ ID NO: 708330 - DNA, 75 bp, synthetic construct
  source 1..75: mol_type = other DNA
atccctgagcagctaaaaaataaaaaaaatgtatattttgtttcaaggcaaagtgatttatacatgcaatgtttg

SEQ ID NO: 708331 - DNA, 75 bp, synthetic construct
  source 1..75: mol_type = other DNA
ctgaattacggatgatacactgtgaacatcattatgttttttgtctgccacacgggagtgcgcctgcactggttg

SEQ ID NO: 708332 - DNA, 75 bp, synthetic construct
  source 1..75: mol_type = other DNA
acaccctactggcgctgggcaacaacgagcaacgtcccgattacgcgtggcacgaaggcacggcattccatctct

SEQ ID NO: 708333 - DNA, 75 bp, synthetic construct
  source 1..75: mol_type = other DNA
ggtacaaaggatatgcagacgtaattgataaactagtaacaaagtgctggcaggaagaagcatatgctgaaacac

SEQ ID NO: 708334 - DNA, 75 bp, synthetic construct
  source 1..75: mol_type = other DNA
ttcagcgcacgatggcacaacgcgccggactgaccgatgacagtcagtcacagacggtgcgcacggctcacgaac

SEQ ID NO: 708335 - DNA, 75 bp, synthetic construct
  source 1..75: mol_type = other DNA
gctgcgcaggggatggtgcagtcgaaagcaccgcttgggtttgccttattcctggcaaaagttggtgttcaggat

SEQ ID NO: 708336 - DNA, 75 bp, synthetic construct
  source 1..75: mol_type = other DNA
tcagtggtataaaggatatgcaaatgtcattgataaactggttacaaagtgctggcaggaggaatcttacgctga

SEQ ID NO: 708337 - DNA, 75 bp, synthetic construct
  source 1..75: mol_type = other DNA
acatggatgttatctcggattgtttgatttttacccaggccagtcaggtcagaataaatcatctgtaatttttga

SEQ ID NO: 708338 - DNA, 75 bp, synthetic construct
  source 1..75: mol_type = other DNA
ataactctgtgactgctgcttgggaacaaatatattatttcgtagagagaaattgtacatataaaaataaagagg

SEQ ID NO: 708339 - DNA, 75 bp, synthetic construct
  source 1..75: mol_type = other DNA
tgtatcttggaaaacctgagaaacataaggatgtgtataaaaaagtaaaagcactggagagtgatttttttaatc

SEQ ID NO: 708340 - DNA, 75 bp, synthetic construct
  source 1..75: mol_type = other DNA
caagatccggagggacaggctgtggcacgcaatgggtttccggttcccgccgggggaaaccagctcaatgccgct

SEQ ID NO: 708341 - DNA, 75 bp, synthetic construct
  source 1..75: mol_type = other DNA
aatgctttacatggtcggatcacgcagtgaagattctgactctgttagatttaatgatttatttttttattataa

SEQ ID NO: 708342 - DNA, 75 bp, synthetic construct
  source 1..75: mol_type = other DNA
actattgaagcaaaggaaatggatccatactggagataatgaattagctgatataaaaatggcaaagcgtgcagg

SEQ ID NO: 708343 - DNA, 75 bp, synthetic construct
  source 1..75: mol_type = other DNA
gacgctgaatctgcctgaaatgtgggaagtgtcgggttataaccgtgtcgcgccgcaatgggcgattcactatag

SEQ ID NO: 708344 - DNA, 75 bp, synthetic construct
  source 1..75: mol_type = other DNA
tcagagcgtgaaaattaacgaaggcccataccagttcgagtctgaaggtaaagcctggctgttcggtactaactt

SEQ ID NO: 708345 - DNA, 75 bp, synthetic construct
  source 1..75: mol_type = other DNA
ggataaaaacaaccgctacgcattgacctaccgctctgaagtgaaaattgacttcaagggtaactacagcagcga

SEQ ID NO: 708346 - DNA, 75 bp, synthetic construct
  source 1..75: mol_type = other DNA
cgcgaagtggtgaaacactccagaagcggggaatctgttatcaaggaagagtgggtgaaggaactatgtcagcat

SEQ ID NO: 708347 - DNA, 75 bp, synthetic construct
  source 1..75: mol_type = other DNA
ataaggtctgtgggcgttgtaatggacatcggtttagccgtttaccgaccacgctggcacgacgttatgtccaga

SEQ ID NO: 708348 - DNA, 75 bp, synthetic construct
  source 1..75: mol_type = other DNA
tggcagactcctcaggggcaagcattagcagctaccgccaacggcatcgacagtaataccaaaatcgctcacctg

SEQ ID NO: 708349 - DNA, 75 bp, synthetic construct
  source 1..75: mol_type = other DNA
gcactgactgaagctaacggcgacatcgagctggcaatcgaaaacatgcgtaagtctggtgctattaaagcagcg

SEQ ID NO: 708350 - DNA, 75 bp, synthetic construct
  source 1..75: mol_type = other DNA
atgaaccgacatacacaaatccgccaggccgtactggcacgccttcgggaacagtgtggagacagcgccacattt

SEQ ID NO: 708351 - DNA, 75 bp, synthetic construct
  source 1..75: mol_type = other DNA
ttggagaacaaacatttattttatcaatattttaaaatttcgaatacaggtattgatcatctcgaacaattgatt

SEQ ID NO: 708352 - DNA, 75 bp, synthetic construct
  source 1..75: mol_type = other DNA
gcgctgggccgcgaagtcgttaatgaaagtagtcggatgggactacctgatgaactcactctacagcgcgaattc

SEQ ID NO: 708353 - DNA, 75 bp, synthetic construct
  source 1..75: mol_type = other DNA
tatggtgtcggcgttgaaactcgtctgatgggtgcagctaccgccagttctccttcgccgcaatgggtcgcatgg

SEQ ID NO: 708354 - DNA, 75 bp, synthetic construct
  source 1..75: mol_type = other DNA
gaacttgttgaacaatatcctgacacttacgcgaacatggggattcacgatctgggtgacaccatgtttgcctag

SEQ ID NO: 708355 - DNA, 75 bp, synthetic construct
  source 1..75: mol_type = other DNA
ctggcccccgatcggattgacaagctggtggcaattgatattgctccggtcgattatcacgttcgccggcatgat

SEQ ID NO: 708356 - DNA, 75 bp, synthetic construct
  source 1..75: mol_type = other DNA
gtatttgattgccctgtttccgctggcaattattgttctggtatttcccatggcgctgcctgccgcgaatttttc

SEQ ID NO: 708357 - DNA, 75 bp, synthetic construct
  source 1..75: mol_type = other DNA
gtcatgcggacgtattagcccatcgtctgggtgaaccttacggctcgctcattcttagcctttctgttgtgattc

SEQ ID NO: 708358 - DNA, 75 bp, synthetic construct
  source 1..75: mol_type = other DNA
ccggtgttgtgggatcagtatccgcatattgtgggttgggagaaaatcccggcgtgggatcaccccgccctattt

SEQ ID NO: 708359 - DNA, 75 bp, synthetic construct
  source 1..75: mol_type = other DNA
catgtgattgcaggcgcgggtcactgggtccatgctgaaaaaccggatgcggtattacgcgctatccgtcgctat

SEQ ID NO: 708360 - DNA, 75 bp, synthetic construct
  source 1..75: mol_type = other DNA
ggcatgggatcaccctgccctgtttatccccggcggtaattcaccgtatgtcactgaacaatatcgtgatgattt

SEQ ID NO: 708361 - DNA, 75 bp, synthetic construct
  source 1..75: mol_type = other DNA
gcgacggttttgcgtcatgtaacgccggaatgatgcatgcctgtggtcatgatgggcataccgccattgggcttg

SEQ ID NO: 708362 - DNA, 75 bp, synthetic construct
  source 1..75: mol_type = other DNA
tcagtactgtttcaggaaaagttgaacgccttattagctttgatatcgccaaacgttggtatctgcgcgatatcg

SEQ ID NO: 708363 - DNA, 75 bp, synthetic construct
  source 1..75: mol_type = other DNA
agtcaccccccatgccgctggtgacggcgatttttgatagtttcaatgactccggggtaaattcaccgatactga

SEQ ID NO: 708364 - DNA, 75 bp, synthetic construct
  source 1..75: mol_type = other DNA
ctttataaacacatttcgacaatattatggtgtaacgccacatcagtttgcgcaacattcgccaggtaccttttc

SEQ ID NO: 708365 - DNA, 75 bp, synthetic construct
  source 1..75: mol_type = other DNA
ggatatctcaaagaagctggagtcaattgttaacgaaagagagaatgcggtttctttgttcaaagctggtcttga

SEQ ID NO: 708366 - DNA, 75 bp, synthetic construct
  source 1..75: mol_type = other DNA
gtctgggctgttggcgctgaccgcgactacagttttttggtgatggactatctcccgcctcgcccgttggatgca

SEQ ID NO: 708367 - DNA, 75 bp, synthetic construct
  source 1..75: mol_type = other DNA
atgactcatgtctgctcggtgatcctcattcgtcgttcattcgatatttatcatgaacagcaaaaaatatcgttg

SEQ ID NO: 708368 - DNA, 75 bp, synthetic construct
  source 1..75: mol_type = other DNA
caaagccaaagccagggacaaaatggagatttaccagttgttcctgcaacacatcattttctcgctgaaaccggg

SEQ ID NO: 708369 - DNA, 75 bp, synthetic construct
  source 1..75: mol_type = other DNA
tcttcgccaccaccggcaccaacgtgtcgatcctgtttattgacgccagcaacaaagagaaagtggtgctgatcg

SEQ ID NO: 708370 - DNA, 75 bp, synthetic construct
  source 1..75: mol_type = other DNA
tgggattaggcggcattgctcaaaaagcgtggttaccggtgctggcggcagcgtctgactggacgttacaaggag

SEQ ID NO: 708371 - DNA, 75 bp, synthetic construct
  source 1..75: mol_type = other DNA
ttgccgagaagatgaaaggatttactgacaatctggagagtttgtttagccagtcgctcgagctagaagcggaga

SEQ ID NO: 708372 - DNA, 75 bp, synthetic construct
  source 1..75: mol_type = other DNA
tacaccgatatgacgccggaacagtttgccgcgaagatgaacgggtttacggagaatctggagagtttgtttagc

SEQ ID NO: 708373 - DNA, 75 bp, synthetic construct
  source 1..75: mol_type = other DNA
ggagaatctggaaagtttgtttagccagtcgcgagagctggaagcagagattaagaagcagatggcggggctgaa

SEQ ID NO: 708374 - DNA, 75 bp, synthetic construct
  source 1..75: mol_type = other DNA
atattcttatgttatttaatcacgaattttttaatatgattatgtatcaatacgttatattacccgatgtgctac

SEQ ID NO: 708375 - DNA, 75 bp, synthetic construct
  source 1..75: mol_type = other DNA
aaagcttacacccctgcgtgggccgagcagattaccggcgtttctcgcagccagattatccgcattgcccgtgaa

SEQ ID NO: 708376 - DNA, 75 bp, synthetic construct
  source 1..75: mol_type = other DNA
agcgagtttaccggtcgtgaccatacgcatctggcgctgaataaagaagacgagaagatccgcttccgtgacatt

SEQ ID NO: 708377 - DNA, 75 bp, synthetic construct
  source 1..75: mol_type = other DNA
gcgggcatgaatccggtggattacaccgtgaaatccctgaaagagggttctatccgttttgcggcagaacagccg

SEQ ID NO: 708378 - DNA, 75 bp, synthetic construct
  source 1..75: mol_type = other DNA
ctttattaacactttccgccagtattatggcgtaacaccacaccagtttgcgcaacagtcaacagggactttttc

SEQ ID NO: 708379 - DNA, 75 bp, synthetic construct
  source 1..75: mol_type = other DNA
catcagcccggatgcagaaaacgcagcagttatttccaaaatgctgcgcgtgatgatgctggctccgttcctcat

SEQ ID NO: 708380 - DNA, 75 bp, synthetic construct
  source 1..75: mol_type = other DNA
gaagaaatgatgttagtaaaattattggccgtgttattggttacttgagaaaaaaaggttattctttaaataaga

SEQ ID NO: 708381 - DNA, 75 bp, synthetic construct
  source 1..75: mol_type = other DNA
gctggaaaatctacgttaaaaacggtctggtgacctgggaaaaccatcagactgactatccgcgcactcgcccgg

SEQ ID NO: 708382 - DNA, 75 bp, synthetic construct
  source 1..75: mol_type = other DNA
gctggaaaatctacgttaaaaacggtctggtgacctgggaaaaccaacagactgactagccgcgcactcgcccgg

SEQ ID NO: 708383 - DNA, 75 bp, synthetic construct
  source 1..75: mol_type = other DNA
gctggaaaatctacgttaaaaatggtctggtgacctgggaaaaccaccagactgactatccgcgcactcgcccgg

SEQ ID NO: 708384 - DNA, 75 bp, synthetic construct
  source 1..75: mol_type = other DNA
gctggaaaatctacgttaaaaagggtctggtgacctgggaaaaccaccagactgactaaccgcgcactcgcccgg

SEQ ID NO: 708385 - DNA, 75 bp, synthetic construct
  source 1..75: mol_type = other DNA
gctggaaaatctacgttaaaaagggtctggtgacctgggaaaaccaacagactgactacccgcgcactcgcccgg

SEQ ID NO: 708386 - DNA, 75 bp, synthetic construct
  source 1..75: mol_type = other DNA
gctggaaaatctacgttaaaaacggtctggtgacctgggaaaaccagcagactgactaaccgcgcactcgcccgg

SEQ ID NO: 708387 - DNA, 75 bp, synthetic construct
  source 1..75: mol_type = other DNA
tgagcctgaaatctggacggcactgaccgccagtatttacagcgtggatgaggccggtgcgccggtgggggatag

SEQ ID NO: 708388 - DNA, 75 bp, synthetic construct
  source 1..75: mol_type = other DNA
tgcgccaggaggaacaggaaagacggaaaaatatagaaaagttaattcagattgagcgtaacgcgaaagcgcgga

SEQ ID NO: 708389 - DNA, 75 bp, synthetic construct
  source 1..75: mol_type = other DNA
gaaaaatatagaaaagttaattcagattgagcgtaacgcgaaagcgcggatacgcagggtgacaaaatccagaac

SEQ ID NO: 708390 - DNA, 75 bp, synthetic construct
  source 1..75: mol_type = other DNA
gttaattttctctatgagccatcggaaagaccatactgccatcacgcttctgtccgggttgacgaaaaagagcgt

SEQ ID NO: 708391 - DNA, 75 bp, synthetic construct
  source 1..75: mol_type = other DNA
tgtggcgacccgcagcgtgcaggaactggcgcaggagatggtcgatgaaattgaacagggtatcgatggcacgga

SEQ ID NO: 708392 - DNA, 75 bp, synthetic construct
  source 1..75: mol_type = other DNA
accggacgcccgatctccacgcatacttcgttcagcaccatggggctggaacaactggctctgttgcaagcccac

SEQ ID NO: 708393 - DNA, 75 bp, synthetic construct
  source 1..75: mol_type = other DNA
gttaattttctttatgagccatcggaaagaccatactgccatcacgcctctgtccgggttgacgaaaaagagcgt

SEQ ID NO: 708394 - DNA, 75 bp, synthetic construct
  source 1..75: mol_type = other DNA
atactcgtcttgtggcgagaacatcggtagagatacaggagattattcaacgggcagccgactactgcggttcaa

SEQ ID NO: 708395 - DNA, 75 bp, synthetic construct
  source 1..75: mol_type = other DNA
aaagccagatgatacttaccgaatataagctagaccacaaaaccaataaatcacgctcagtatatttgctccggc

SEQ ID NO: 708396 - DNA, 75 bp, synthetic construct
  source 1..75: mol_type = other DNA
atatcagcgcatgggtttccgagaatagcgactatcatctggccttcggggcgatggatcaccgtttttccgcgc

SEQ ID NO: 708397 - DNA, 75 bp, synthetic construct
  source 1..75: mol_type = other DNA
cggggaatattgttttatttccggcgaaagaggatgacccgcgtaatcaggttaattttctttatgagccatcgg

SEQ ID NO: 708398 - DNA, 75 bp, synthetic construct
  source 1..75: mol_type = other DNA
gccatcggaaaaaccatattgccatcacgcctctgtcagggttgatgaaaaagagcgtcatgtccgttgtaaaat

SEQ ID NO: 708399 - DNA, 75 bp, synthetic construct
  source 1..75: mol_type = other DNA
agactggcagatgatgtaaaacaattgcgtcaggaggagcgggaaagacgtaaaaatatagaaaagttaattcag

SEQ ID NO: 708400 - DNA, 75 bp, synthetic construct
  source 1..75: mol_type = other DNA
tttagccaatggctaagattgatggatcttggaatgattaattccaaagcggtttatcaatttaatgttagctta

SEQ ID NO: 708401 - DNA, 75 bp, synthetic construct
  source 1..75: mol_type = other DNA
ttttaaattcgttcggattttttaatgataaaaatgaccaaattgaatgtttcacttgtaaaaactttagagcct

SEQ ID NO: 708402 - DNA, 75 bp, synthetic construct
  source 1..75: mol_type = other DNA
gtgctgtacaagggatcgcggatcgcaagccgtgcgaggattttgatacattcaaaccgctatttgaacaggtgc

SEQ ID NO: 708403 - DNA, 75 bp, synthetic construct
  source 1..75: mol_type = other DNA
gaagtgcgtattttcccgacggtagaagtgatcgccaatctgaagatgctcgacagctacgcaggtttaacgctg

SEQ ID NO: 708404 - DNA, 75 bp, synthetic construct
  source 1..75: mol_type = other DNA
tttacggctggaaccagtatttgtggccgttgttgattattaccgatgtggatctcggcaccaccgtggcaggga

SEQ ID NO: 708405 - DNA, 75 bp, synthetic construct
  source 1..75: mol_type = other DNA
aaaaattcagttatgtcaaaactattaaaacactttccgtcaaaattcgatgttaggtcagaaaggactaacagc

SEQ ID NO: 708406 - DNA, 75 bp, synthetic construct
  source 1..75: mol_type = other DNA
atgtacgagattcatattaaattgcgtaatgtggtaacaggagaggaagaaaacttctacacgatacgtaaatat

SEQ ID NO: 708407 - DNA, 75 bp, synthetic construct
  source 1..75: mol_type = other DNA
aactatgccgcctggctgttctggacgctgggcactatatcccttgtttggactggcgggaccttaatccttaaa

SEQ ID NO: 708408 - DNA, 75 bp, synthetic construct
  source 1..75: mol_type = other DNA
gtggcatattcgattggcattgattccggctcaaccgccaccaaagggatcttactggcagacggcgtgattacg

SEQ ID NO: 708409 - DNA, 75 bp, synthetic construct
  source 1..75: mol_type = other DNA
acctcatgggtacattgaaaaggtatctatagatagaattgagattcttccccttactcctgaagaagaagaaac

SEQ ID NO: 708410 - DNA, 75 bp, synthetic construct
  source 1..75: mol_type = other DNA
taaccgcccgtgcgctggatgaagaaggctggtattacagcggcgatctctgccgcatggatgaggctggctata

SEQ ID NO: 708411 - DNA, 75 bp, synthetic construct
  source 1..75: mol_type = other DNA
gtggaagatattttattgcagcatcctaaaattcacgatgcctgtgtggttgcaatgcccgatgaacgtttaggt

SEQ ID NO: 708412 - DNA, 75 bp, synthetic construct
  source 1..75: mol_type = other DNA
tctacggctggaaccagtatctgtggccgctgctgattattaccgacgttgatctcggcactaccgttgcaggga

SEQ ID NO: 708413 - DNA, 75 bp, synthetic construct
  source 1..75: mol_type = other DNA
ctggaggaagaaaacgatcagcgcctcaaggatattggtcagcagctctacgcctttacatcgaaggggagctac

SEQ ID NO: 708414 - DNA, 75 bp, synthetic construct
  source 1..75: mol_type = other DNA
agtgcgagcgcagtgtaaatgctgccgctggtcgcgagctttcttccgatgagatggagtcgctggtgcgtgaca

SEQ ID NO: 708415 - DNA, 75 bp, synthetic construct
  source 1..75: mol_type = other DNA
gacggagcgtgagttgagtcgagcatccgcgcttcgggcttctttctcgcaagcgctggcaacggttggttttcg

SEQ ID NO: 708416 - DNA, 75 bp, synthetic construct
  source 1..75: mol_type = other DNA
tgtcggcgaagttgatggcgatgatccggcagtattcagaccaatacaaaaatacattaatggcacatggtataa

SEQ ID NO: 708417 - DNA, 75 bp, synthetic construct
  source 1..75: mol_type = other DNA
actcccttcgaagtggtaaaacgcactgctttacccctgatagttggttttgtttttcactctgcgattatcggt

SEQ ID NO: 708418 - DNA, 75 bp, synthetic construct
  source 1..75: mol_type = other DNA
tgtactggagctcgatgaattgcaaggacgtaaacacctgcgtcaggttgttctcctccagctcatctaccagat

SEQ ID NO: 708419 - DNA, 75 bp, synthetic construct
  source 1..75: mol_type = other DNA
tattacttctttcattaagtaccgccttcacgatgaatgccgagccggttaatacaatggtactgccagatgcag

SEQ ID NO: 708420 - DNA, 75 bp, synthetic construct
  source 1..75: mol_type = other DNA
aattaatcagccgtgcatctgcttatgttctggctccggctatgagcgtttttgcggccagtccggccttcgctg

SEQ ID NO: 708421 - DNA, 75 bp, synthetic construct
  source 1..75: mol_type = other DNA
atggttttagccgggcaaataccatcatggagaaggtatccagcgggctgcatggtctggctgctatcacgatca

SEQ ID NO: 708422 - DNA, 75 bp, synthetic construct
  source 1..75: mol_type = other DNA
ccgtcacgggtgtctattccgaaattttctttattaccgagatgggcaccgggattggccgcctcatcgtcgatc

SEQ ID NO: 708423 - DNA, 75 bp, synthetic construct
  source 1..75: mol_type = other DNA
ggccagccgcgtcgaacgctgatagcattatcacgctgttccagcagacaacgcgcggcgatgcagacctgggtg

SEQ ID NO: 708424 - DNA, 75 bp, synthetic construct
  source 1..75: mol_type = other DNA
gtcacagggtgctgaagatgatgcgattgacccggccatctgctccatgatgggcaatgacccggaaagcgtcgc

SEQ ID NO: 708425 - DNA, 75 bp, synthetic construct
  source 1..75: mol_type = other DNA
tgcatctcctatattttctttattctttaagattggcgaaggatatcgttactgcggcgcagttcacaattttca

SEQ ID NO: 708426 - DNA, 75 bp, synthetic construct
  source 1..75: mol_type = other DNA
gggtgggcaagctggcggatcaggcctggcatgtggtgatggtggaagccgttcattacatggaagtggactggc

SEQ ID NO: 708427 - DNA, 75 bp, synthetic construct
  source 1..75: mol_type = other DNA
ctgacgcaaagcgtcgcctacagcgaggccgaccgtgaagagatccagcgccatatcaccgaacagtacatcagt

SEQ ID NO: 708428 - DNA, 75 bp, synthetic construct
  source 1..75: mol_type = other DNA
tgacgctcgatcttcccgatctgctgacggcggataaatcccgccgtgagacactggtacaaaatttgcgccagc

SEQ ID NO: 708429 - DNA, 75 bp, synthetic construct
  source 1..75: mol_type = other DNA
gcgcccatgaaaacgatgactggcgcagtgagctgagtgcgttctggcagacgtgggggcaacagatgaacctgg

SEQ ID NO: 708430 - DNA, 75 bp, synthetic construct
  source 1..75: mol_type = other DNA
tgttcctggaaaacgatctgacctttggcgacgacggcagagtgctgatccgtgaagatatccggcaacaactgg

SEQ ID NO: 708431 - DNA, 75 bp, synthetic construct
  source 1..75: mol_type = other DNA
tgctcgcacaaaccggtgctgctccccgcagcgctgtgttcagcttctcccgtcagatgcagggaacaggagaaa

SEQ ID NO: 708432 - DNA, 75 bp, synthetic construct
  source 1..75: mol_type = other DNA
tttacgttatccagacgtaaatccgccgcttgttgctgtcagtatgttaatgctaatgtatgtgtacattagcat

SEQ ID NO: 708433 - DNA, 75 bp, synthetic construct
  source 1..75: mol_type = other DNA
tcagcgatcgccgacgcacggatgacggctggggtggtaaacgctattgctgcatatcatccctcattaatgcta

SEQ ID NO: 708434 - DNA, 75 bp, synthetic construct
  source 1..75: mol_type = other DNA
gctggattagccctgccgatctgatgcatatgcgtattggtgatgtctctgcgtttaagccagaaacgcagttac

SEQ ID NO: 708435 - DNA, 75 bp, synthetic construct
  source 1..75: mol_type = other DNA
cagtgagtatgtaggtcactcgctgcctgatggaatgcatgagctttatgctgccccgccagcgcccgtagtgcc

SEQ ID NO: 708436 - DNA, 75 bp, synthetic construct
  source 1..75: mol_type = other DNA
tgttcttccataaaataggtgctgtgcttgtccttaatacagactacctgcttgtatcaaagtttctgacattaa

SEQ ID NO: 708437 - DNA, 75 bp, synthetic construct
  source 1..75: mol_type = other DNA
atcggggaccgaccagtaattatctttaatgcccggttcgatatccgcattctgggggaaccgcagaattcggaa

SEQ ID NO: 708438 - DNA, 75 bp, synthetic construct
  source 1..75: mol_type = other DNA
tgatattttcacgcagtccgccgcccgccagtacgggctgggtaacagctcgctggcaacctggcctctggtgga

SEQ ID NO: 708439 - DNA, 75 bp, synthetic construct
  source 1..75: mol_type = other DNA
tttttactcagcgcattgagcgcaataacctgacgctgagaacccgaatcaaacggctggcccgcaaaatgctct

SEQ ID NO: 708440 - DNA, 75 bp, synthetic construct
  source 1..75: mol_type = other DNA
gcactgcttacacccttcaacatcggcatgctcaccagcgatgactggggcagctatggccgggtggtgccgaag

SEQ ID NO: 708441 - DNA, 75 bp, synthetic construct
  source 1..75: mol_type = other DNA
gggtggtgccgaagaataagcatctgaccggcaaaatattcccccaacgcatcgagcgtaataatctgacgctac

SEQ ID NO: 708442 - DNA, 75 bp, synthetic construct
  source 1..75: mol_type = other DNA
aagtcatcggtgcttttatcgaaaatatatgttctactaattggagtcatcacccttctgataagctttccttgg

SEQ ID NO: 708443 - DNA, 75 bp, synthetic construct
  source 1..75: mol_type = other DNA
aaccgatcaaacgtgccgggagctactggcactgcttacacccttcaacatcggcatgctcaccagcgatgactg

SEQ ID NO: 708444 - DNA, 75 bp, synthetic construct
  source 1..75: mol_type = other DNA
ttaagcggttggctcgtaaaacaatctgcttctcacgctcagttgagatccacgaaaaagtgatcggagcgttta

SEQ ID NO: 708445 - DNA, 75 bp, synthetic construct
  source 1..75: mol_type = other DNA
acaataaaccttaaccttagcggagcctaccgccttaacaatagctggagttttggtcttggttttgatgctgta

SEQ ID NO: 708446 - DNA, 75 bp, synthetic construct
  source 1..75: mol_type = other DNA
ccggacattctaatttaaccggtcagagtgcaaatgctaaaaatatcgcaccgacagcgtgggtacctaacctgc

SEQ ID NO: 708447 - DNA, 75 bp, synthetic construct
  source 1..75: mol_type = other DNA
cgtcagtcgctggataacgtaaaagcgatcgtcgaagccgctggcctgaaagtgggcgatatcgttaaaaccacc

SEQ ID NO: 708448 - DNA, 75 bp, synthetic construct
  source 1..75: mol_type = other DNA
agtgatcagtctgcgttctgccggggtagcgccggaagcgattctcgccggagtgattaacgctatggcgcgccg

SEQ ID NO: 708449 - DNA, 75 bp, synthetic construct
  source 1..75: mol_type = other DNA
cgcggtttcttgcgccagcaacgcgcgcggtgatcgacatcggcggccaggacagcaaagtgattcaacttgatg

SEQ ID NO: 708450 - DNA, 75 bp, synthetic construct
  source 1..75: mol_type = other DNA
accgggcgtttcctggaggtgatctcgcgcacgcttggcaccagcgtcgagcaactcgacagcattaccgaaaat

SEQ ID NO: 708451 - DNA, 75 bp, synthetic construct
  source 1..75: mol_type = other DNA
tcttccggttcgtgacaacaccggggctatccgcgtacttgaagccggagccgttcctctgccaaaagagattct

SEQ ID NO: 708452 - DNA, 75 bp, synthetic construct
  source 1..75: mol_type = other DNA
gcattaagaagtccatcgaagccggaacatctaaactgaacggtttaccggtggttaaccacggtgtcgcagcgt

SEQ ID NO: 708453 - DNA, 75 bp, synthetic construct
  source 1..75: mol_type = other DNA
tggatgccgtaatacctagtgagggtgaaaagattgagcagtacctttgcaatggcttacatggtgtagatttgg

SEQ ID NO: 708454 - DNA, 75 bp, synthetic construct
  source 1..75: mol_type = other DNA
cgatgacccaatcgagcttgccagggcgattcgcaaaggtccggatattcctgaatttaagtcagtatctgttga

SEQ ID NO: 708455 - DNA, 75 bp, synthetic construct
  source 1..75: mol_type = other DNA
tggaacagcccttagcggtattgctacaaacttatatatgctcgcagcgtgccgttttattgttgggctgggtat

SEQ ID NO: 708456 - DNA, 75 bp, synthetic construct
  source 1..75: mol_type = other DNA
agagttgccgcttgattatctccaaggtcaaaaagatggtcttgaatgggctgcgcagcttgcagaagcaaatca

SEQ ID NO: 708457 - DNA, 75 bp, synthetic construct
  source 1..75: mol_type = other DNA
cagcagacaccagcgtttggtcgaagagtgtctgggatcatagaaattgccgatgggagccgccgccgtaaagct

SEQ ID NO: 708458 - DNA, 75 bp, synthetic construct
  source 1..75: mol_type = other DNA
cgagcagatggctgcattgtccagattgggtaatgattatcgcccaacaagtgcttatgaacgtggtcaacgtta

SEQ ID NO: 708459 - DNA, 75 bp, synthetic construct
  source 1..75: mol_type = other DNA
ttgaagtgctccggggtgatagtgttgagaagacctctcgggtatggtcaggtaatgaacgtgaccaggagctgc

SEQ ID NO: 708460 - DNA, 75 bp, synthetic construct
  source 1..75: mol_type = other DNA
aatacaactcagttgaaatttgaaataaaaaaccccaatgagccaccggtacattcatttgagcctgtgacaagt

SEQ ID NO: 708461 - DNA, 75 bp, synthetic construct
  source 1..75: mol_type = other DNA
ccaatgcgcccgtttactatgcattggtacaggtaaagtttactccaatagctgcaatgagtaagtatgttccag

SEQ ID NO: 708462 - DNA, 75 bp, synthetic construct
  source 1..75: mol_type = other DNA
tggtcctagaatgtgtgaaatgaaaaaagaaagcatatggaattgtatcaagtcaaatatggagaattcaaattc

SEQ ID NO: 708463 - DNA, 75 bp, synthetic construct
  source 1..75: mol_type = other DNA
atctgatgcatatgcgtagtggtgatgtctctgcatttaaaccagaaacgcagttacagtatattgggcacctga

SEQ ID NO: 708464 - DNA, 75 bp, synthetic construct
  source 1..75: mol_type = other DNA
ctgtaagtaatagtgatgagttaccgctggactatctgcaaggacacaaagacggcctggagtgggctgcacaat

SEQ ID NO: 708465 - DNA, 75 bp, synthetic construct
  source 1..75: mol_type = other DNA
attattgttgtttcggatggcattgtaatgtcagggatttcttattctcgtcgtgacgggttctatatagccgca

SEQ ID NO: 708466 - DNA, 75 bp, synthetic construct
  source 1..75: mol_type = other DNA
tcgaaaaacttaagcacagaatctctgtcgcttcggaatttcctgagtcagaaaaagctcaaatggatcttgatc

SEQ ID NO: 708467 - DNA, 75 bp, synthetic construct
  source 1..75: mol_type = other DNA
ccgcagaaaatgcataaccattatgcgtacatctacaacgaactggtatggaacgtgctcaaggacaccgttggt

SEQ ID NO: 708468 - DNA, 75 bp, synthetic construct
  source 1..75: mol_type = other DNA
ggatcattattgtcgaaaaagtttgttgatgagaatactattattgcgggtattcctgcaaaagtagtaaaaagg

SEQ ID NO: 708469 - DNA, 75 bp, synthetic construct
  source 1..75: mol_type = other DNA
aagtttccattgatgtaagcacttgtgatgctgatttaggtaatcgctatttcggcaccgtcaccgaggcgttag

SEQ ID NO: 708470 - DNA, 75 bp, synthetic construct
  source 1..75: mol_type = other DNA
agcccgtgggccagggatgaactggcgatcaaaccaggcctgtggctgtacgcgcaaattaaaagtgtgtcgata

SEQ ID NO: 708471 - DNA, 75 bp, synthetic construct
  source 1..75: mol_type = other DNA
actttcggcctgtaccgttgatatcagccagccagactcatcagccacagcggtagatgccgaggcgaaaacatg

SEQ ID NO: 708472 - DNA, 75 bp, synthetic construct
  source 1..75: mol_type = other DNA
ttgtcgaatttattccgtttatggtgacccgccagatgtgctcactgaatcctttttccgcagatttccgccaac

SEQ ID NO: 708473 - DNA, 75 bp, synthetic construct
  source 1..75: mol_type = other DNA
caaaaagggaggattgtcctcaatggtcgggtactaaatgacgccgataaaggtatctgcctgacgccagaaaag

SEQ ID NO: 708474 - DNA, 75 bp, synthetic construct
  source 1..75: mol_type = other DNA
ctgccgaaagagcaacaaagtagcattctgaaagtgacggtacttgagcatcatccgcattacgcgatgaccgcg

SEQ ID NO: 708475 - DNA, 75 bp, synthetic construct
  source 1..75: mol_type = other DNA
gcaagccgcgctacgcatccgcatccaggcttccgatgtttctctggttttacaaccgccgcaacaaaccagcat

SEQ ID NO: 708476 - DNA, 75 bp, synthetic construct
  source 1..75: mol_type = other DNA
gagtaggggctatggctcgcggcaatgcaattacattacccgtgtgtggtcgggaagtgaagtttaccctggagg

SEQ ID NO: 708477 - DNA, 75 bp, synthetic construct
  source 1..75: mol_type = other DNA
cagtagcgccaccaacagcgattctgaaacgcttgcagcaacgccaaaggcggttaagacagcgtatgaccttgc

SEQ ID NO: 708478 - DNA, 75 bp, synthetic construct
  source 1..75: mol_type = other DNA
cacaacaaaagacctgatgacgcttaagtctgatgcactacgggttaccgggcaggtgataccatcaaatttcag

SEQ ID NO: 708479 - DNA, 75 bp, synthetic construct
  source 1..75: mol_type = other DNA
cttgctctggcattatcaggcggaagcatgtcaggcagcataaaatttatcaatgatgccttcctgatttgggaa

SEQ ID NO: 708480 - DNA, 75 bp, synthetic construct
  source 1..75: mol_type = other DNA
gcagagctggttattccgccggaggtgggcggtttctggatgcgtgagcttggcctgtacgatgatgcgggaaca

SEQ ID NO: 708481 - DNA, 75 bp, synthetic construct
  source 1..75: mol_type = other DNA
accatctaactatagtaattttgattcacgctatgtccgggatatccggcttggtggtgctgccacatacaaacc

SEQ ID NO: 708482 - DNA, 75 bp, synthetic construct
  source 1..75: mol_type = other DNA
tcagtgctaatggtctgcgcattgcttatggcaattatggattctttatcaggaatgatggcggcagcacttatt

SEQ ID NO: 708483 - DNA, 75 bp, synthetic construct
  source 1..75: mol_type = other DNA
ggagatgttggtgcatatacgcaggcagaatgtaactcaaggtttattacaggtattcgccttggcggtctgtca

SEQ ID NO: 708484 - DNA, 75 bp, synthetic construct
  source 1..75: mol_type = other DNA
ctggtatcgcgcggtcgcgtaacagccttggaggcgaatgcacagggaacatccgggattcagctgtatgaggca

SEQ ID NO: 708485 - DNA, 75 bp, synthetic construct
  source 1..75: mol_type = other DNA
ggcgctacaagcgcgcaatttacttatattaaccacggggacaactatgctcctggctggcggcgtgactggaac

SEQ ID NO: 708486 - DNA, 75 bp, synthetic construct
  source 1..75: mol_type = other DNA
ctgtcgtgcttatagcggtgctttgagcactgaagccggaaactggacaaccgctcagtttattgactggctaga

SEQ ID NO: 708487 - DNA, 75 bp, synthetic construct
  source 1..75: mol_type = other DNA
gaaacgcttgcggcaacgccaaaggcggtaaaggccgcgtatgaccttgctaacgggaaatacactgcacaggac

SEQ ID NO: 708488 - DNA, 75 bp, synthetic construct
  source 1..75: mol_type = other DNA
aggaagccgcattcaatttgtggggaaactcaagtcgtccggtggtggctgaattaggtgatgatgcaggctggc

SEQ ID NO: 708489 - DNA, 75 bp, synthetic construct
  source 1..75: mol_type = other DNA
acctggctgaccggaccagtatcacaggtaagttcagtgatgccgaatgttttaagctggatgtggcatttccgc

SEQ ID NO: 708490 - DNA, 75 bp, synthetic construct
  source 1..75: mol_type = other DNA
ggcgccgtggcgctgaagtcttaccaggatcagctggcgaaagatcaacgcattgccgccaccatggataacgcc

SEQ ID NO: 708491 - DNA, 75 bp, synthetic construct
  source 1..75: mol_type = other DNA
accatcaacggcccgtgggcatggtccaacatcgacaccagtaaagtgaattatggtgtaacggtactgccgacc

SEQ ID NO: 708492 - DNA, 75 bp, synthetic construct
  source 1..75: mol_type = other DNA
gccaaaatcgaagaaggtaaactggtaatctggatcaacggcgataaaggctacaacggcctcgcagaagtgggt

SEQ ID NO: 708493 - DNA, 75 bp, synthetic construct
  source 1..75: mol_type = other DNA
ctcatcctggtgaactgtctgcccggtcaggtgaggcccttttgaaagcttttgcagataaagaggatttactga

SEQ ID NO: 708494 - DNA, 75 bp, synthetic construct
  source 1..75: mol_type = other DNA
tatcccttcttttctactgacaggtcagcagacaccagcatttggtcgaagagtgtctggggtcatagaaattgc

SEQ ID NO: 708495 - DNA, 75 bp, synthetic construct
  source 1..75: mol_type = other DNA
tgagtgccgccagagcgaagtcatgcagcgtgtgctggcgttctatcggggaaactttcaggaggtgatggagtg

SEQ ID NO: 708496 - DNA, 75 bp, synthetic construct
  source 1..75: mol_type = other DNA
tcaccctgtaccacaatggttttgcctgcgaagccgatacccttggcagttgcggctacgtatacatcgctgttt

SEQ ID NO: 708497 - DNA, 75 bp, synthetic construct
  source 1..75: mol_type = other DNA
gtcaccctgtactacaacggttttacttgcgaagccgatacccttggctgttgcggctatgtatacgtcgctgtt

SEQ ID NO: 708498 - DNA, 75 bp, synthetic construct
  source 1..75: mol_type = other DNA
gcatttccgcattttatcagtcagatggaattgatgctgaccaccggtgaaatgaacccttgccatgcccactgc

SEQ ID NO: 708499 - DNA, 75 bp, synthetic construct
  source 1..75: mol_type = other DNA
tcccgcagatgtccgctttctggtatgccgtgcgtactgcggtgatcaacgccgccagcggtcgtcagactgtcg

SEQ ID NO: 708500 - DNA, 75 bp, synthetic construct
  source 1..75: mol_type = other DNA
gatgatgttttctgcctcggctctcgccaaaatcgaagaaggtaaactggttatctggattaacggcgataaagg

SEQ ID NO: 708501 - DNA, 75 bp, synthetic construct
  source 1..75: mol_type = other DNA
agtcttacgaggaagagttggcgaaagatccacgtattgccgccaccatggaaaacgcccagaaaggtgaaatca

SEQ ID NO: 708502 - DNA, 75 bp, synthetic construct
  source 1..75: mol_type = other DNA
tggtgaagaagccacctggggcgggatggttgcctgcggactggcggggccgcgtcgcccgtggagcggatcggt

SEQ ID NO: 708503 - DNA, 75 bp, synthetic construct
  source 1..75: mol_type = other DNA
gctgaaggtctttggtgaaggcgaatggaaagtcagaaagcacggcaaagagcgccgtcgtatctggcgaaagtt

SEQ ID NO: 708504 - DNA, 75 bp, synthetic construct
  source 1..75: mol_type = other DNA
cgggagtaatgcgcagtggaaatggacaacagattacaaccgtcgctcgatagcggaaacggcgatgtaccgggt

SEQ ID NO: 708505 - DNA, 75 bp, synthetic construct
  source 1..75: mol_type = other DNA
gaatatgcagaccgtaaccgtgcagtggctaatcagcgaatgaccgggagtgatgcgcggtggaaatggacaaca

SEQ ID NO: 708506 - DNA, 75 bp, synthetic construct
  source 1..75: mol_type = other DNA
aaaaatcagggcagcatcggcagacggcgcttacgacacccggcgctgtcacgatgaactgcggcgtaagaaaat

SEQ ID NO: 708507 - DNA, 75 bp, synthetic construct
  source 1..75: mol_type = other DNA
gcggaagctatggccatggtgcgtgcgttgaacaggatgacaaaggctgggatgccagaaagcgtgcgtattgcc

SEQ ID NO: 708508 - DNA, 75 bp, synthetic construct
  source 1..75: mol_type = other DNA
catttacaaaaggaagcgacacaatatcaggcatcggaacacgttggaatttgaccgaaaacggcgtgttaccgg

SEQ ID NO: 708509 - DNA, 75 bp, synthetic construct
  source 1..75: mol_type = other DNA
caattaatcacggaacagattattcacctggctggcgaagggactataactccagaaataagccaacggcatcag

SEQ ID NO: 708510 - DNA, 75 bp, synthetic construct
  source 1..75: mol_type = other DNA
acgtccgagacgaacgccaggtcttctgaaacggcagcggaacagagcgcctcagctgcggcaggttcagaaact

SEQ ID NO: 708511 - DNA, 75 bp, synthetic construct
  source 1..75: mol_type = other DNA
cgtctgccagtgccgcgtcaacaagtgccgggcaggcctcagccagtgccaccgccgccggaaaatcggcagaaa

SEQ ID NO: 708512 - DNA, 75 bp, synthetic construct
  source 1..75: mol_type = other DNA
ccgtcacatgccgggaccatcaccgtgtatgaagattcccaacccggtacgctgaatgattttctcggtgccatg

SEQ ID NO: 708513 - DNA, 75 bp, synthetic construct
  source 1..75: mol_type = other DNA
aatgtcgcgtatgtcggctgattccaagtccatgcgcagttggttgaccgctctggatgatgtgacaatcgagcg

SEQ ID NO: 708514 - DNA, 75 bp, synthetic construct
  source 1..75: mol_type = other DNA
gaacaacgttacggactcagaggccttccccgggttaatccggcaaacccaccggaaaatcaggtcagccgccgc

SEQ ID NO: 708515 - DNA, 75 bp, synthetic construct
  source 1..75: mol_type = other DNA
tggatgttgacgatagtaaacaaattatattacttaatcaggcgctcgatcatgcaaacaacgcccaaaaactac

SEQ ID NO: 708516 - DNA, 75 bp, synthetic construct
  source 1..75: mol_type = other DNA
cagcatatcgatggtgcgtgcggtgctgttgtagcggatcaggcttttctggctgatcagtttgatgtgaccact

SEQ ID NO: 708517 - DNA, 75 bp, synthetic construct
  source 1..75: mol_type = other DNA
tacctcaaactttacgagatgaaatagcaaccttttgcttacaaaattatcaaaataacaagatgctagattata

SEQ ID NO: 708518 - DNA, 75 bp, synthetic construct
  source 1..75: mol_type = other DNA
atgattagatatagtggaatatttctatcgctgttaatgctttcaggttgtgcaactgaagcattgaagaatgaa

SEQ ID NO: 708519 - DNA, 75 bp, synthetic construct
  source 1..75: mol_type = other DNA
cggtgggtatggatgttgaggatagtaaacaaattatattacttaatcaggcgctcgatcacgcaaacaacgccc

SEQ ID NO: 708520 - DNA, 75 bp, synthetic construct
  source 1..75: mol_type = other DNA
aacgaaacagcagcaaatggattggaataattttgcgaacatcagcaataatttttattactataataaggcccg

SEQ ID NO: 708521 - DNA, 75 bp, synthetic construct
  source 1..75: mol_type = other DNA
tgaatgcgattgtggaccttaagaaggtccacccttttttcggaattactttccttgtatgcaaaaaaaacaatc

SEQ ID NO: 708522 - DNA, 75 bp, synthetic construct
  source 1..75: mol_type = other DNA
tagtggggatttctcatactaaagcgaagggagattatgagtggagaaacagtgtgggtgctgatgagtctgatg

SEQ ID NO: 708523 - DNA, 75 bp, synthetic construct
  source 1..75: mol_type = other DNA
ttcaacactggctgataatcatacgctatcggctggttatgctcagagtaaggtacaggactttaagaatattaa

SEQ ID NO: 708524 - DNA, 75 bp, synthetic construct
  source 1..75: mol_type = other DNA
caatttcaaccacaccagaaaacgaacacaatgaaataagtgaagaagaaaacaatttattaagtattagtgcat

SEQ ID NO: 708525 - DNA, 75 bp, synthetic construct
  source 1..75: mol_type = other DNA
agatataacagttagattgcgtaaatatctttcagccacagacaaattttggcctcgttggattatatttgctga

SEQ ID NO: 708526 - DNA, 75 bp, synthetic construct
  source 1..75: mol_type = other DNA
gtttcctcttggttaatgtccccaatttttgaattacgacaagcaagatcgcaagaaggcgaagcagctatcgag

SEQ ID NO: 708527 - DNA, 75 bp, synthetic construct
  source 1..75: mol_type = other DNA
aaaaacactaacgaagaagagcgaaaaattaactccagcaaaagacaccgcaccaaaacaagtgaatgtagatcc

SEQ ID NO: 708528 - DNA, 75 bp, synthetic construct
  source 1..75: mol_type = other DNA
ccagttgctggaaaaaccaggaatgccggccagcctggcaacagccgtgaataacgagtttgtgccggaagtgga

SEQ ID NO: 708529 - DNA, 75 bp, synthetic construct
  source 1..75: mol_type = other DNA
tggagttacattacttttactgacctttgcaatgagctgttatcgcctgagccatcgtcgcttgattgccagcta

SEQ ID NO: 708530 - DNA, 75 bp, synthetic construct
  source 1..75: mol_type = other DNA
catgacagcttcgtgctggaaaaccgtcgcggacgcacttcccatgaacattttccggcgctgattaccggcagc

SEQ ID NO: 708531 - DNA, 75 bp, synthetic construct
  source 1..75: mol_type = other DNA
ggcgcaggatgggcagaatttaaccatcatcagtgaagatgctcaggcaggcctgcggttatacagtgaaattca

SEQ ID NO: 708532 - DNA, 75 bp, synthetic construct
  source 1..75: mol_type = other DNA
atgatggttagaaatgaagtaatgaacctggactggcaccgcgagtacattgtcgcagctgtgcacaccaaaggt

SEQ ID NO: 708533 - DNA, 75 bp, synthetic construct
  source 1..75: mol_type = other DNA
ggcggtccgctctatctctaccgtctgctggcgaatcgcccggaaaacgcgctggcggtgacgctcgcacgtcag

SEQ ID NO: 708534 - DNA, 75 bp, synthetic construct
  source 1..75: mol_type = other DNA
actgaatgcactacgggaatgggcggcaaaccagaccgaattgcaggcgctatgtacacaatatggcgagctggc

SEQ ID NO: 708535 - DNA, 75 bp, synthetic construct
  source 1..75: mol_type = other DNA
ccatcgcccaggtcactggctcggcccatgtcggtaacttgtatgttaaccgcaatatggttggcgcggtggttg

SEQ ID NO: 708536 - DNA, 75 bp, synthetic construct
  source 1..75: mol_type = other DNA
atgacgacacagcagaaaaaagaaatggctgcattggtacagaagcaaattgaaagcctctgggctcaactggag

SEQ ID NO: 708537 - DNA, 75 bp, synthetic construct
  source 1..75: mol_type = other DNA
ctggcgcgtcagtacgatattggtatcaacattgacgccgaagaggccgatcgtctggagatctccctcgatctg

SEQ ID NO: 708538 - DNA, 75 bp, synthetic construct
  source 1..75: mol_type = other DNA
agagccgaaagatattgtgggctatgtgcgcgaagccacgccgagtgaagtagaacaggcgctggaaagtgcggt

SEQ ID NO: 708539 - DNA, 75 bp, synthetic construct
  source 1..75: mol_type = other DNA
gccgggtgagaaggctctcaggaagaatgaaaccctgtacaccccgtggctatatgcctgccactctgcggatgg

SEQ ID NO: 708540 - DNA, 75 bp, synthetic construct
  source 1..75: mol_type = other DNA
cgtttaaacgaaatgacgcaccagcttggcgctgcccgaactgtatgaatgaaacactggagattgtcgctgata

SEQ ID NO: 708541 - DNA, 75 bp, synthetic construct
  source 1..75: mol_type = other DNA
gtaaatgtttatcatttattacatgcaacacaggtattacatatgtccagtaatcacgaaacaaaagtacttggc

SEQ ID NO: 708542 - DNA, 75 bp, synthetic construct
  source 1..75: mol_type = other DNA
actggagaccggattgcgcgttgtgcagcaattaaaaaagcgcgaacaggaagaggaaaaaaatgatggattaac

SEQ ID NO: 708543 - DNA, 75 bp, synthetic construct
  source 1..75: mol_type = other DNA
gtattagttgaaaatcctatttgtgccggagggttaaccgcgattgtattaaatattattctccctggaggctac

SEQ ID NO: 708544 - DNA, 75 bp, synthetic construct
  source 1..75: mol_type = other DNA
ggtattgcaattacaaggctatcgcctctcggcatatgaagcgttttacctggccacgctcggcggagcgaaatc

SEQ ID NO: 708545 - DNA, 75 bp, synthetic construct
  source 1..75: mol_type = other DNA
tgaacaattgctggagtggttgaataaacacaccttccctactgaacgtcgttatgaggatttagagtacgcccg

SEQ ID NO: 708546 - DNA, 75 bp, synthetic construct
  source 1..75: mol_type = other DNA
cacagacccgtcagttctatcgattgcttgatctcctccgtgaacgttttccacatgttgagtttgagtcctgtg

SEQ ID NO: 708547 - DNA, 75 bp, synthetic construct
  source 1..75: mol_type = other DNA
atctggtggggctctgcactgaaacatttctcaccggatgactgtgccagcctggaaagaccggttgcgaatggt

SEQ ID NO: 708548 - DNA, 75 bp, synthetic construct
  source 1..75: mol_type = other DNA
tcgtcagccctgatcagtctcaggcactttttatgatcagccagcttgcaatgccggattacaccttaccaggca

SEQ ID NO: 708549 - DNA, 75 bp, synthetic construct
  source 1..75: mol_type = other DNA
aaatcggattcgcgtcataactaccatgaactgatttctaagtttaagcaggaaattagagaatcgctgctggag

SEQ ID NO: 708550 - DNA, 75 bp, synthetic construct
  source 1..75: mol_type = other DNA
cttctggaagaatgtatgaagagtcgccttaccactcaggctattcttaattgtatgtttgatttaacagaaata

SEQ ID NO: 708551 - DNA, 75 bp, synthetic construct
  source 1..75: mol_type = other DNA
tggcatgagttactttttccctccggaggtgatgggggctcatattggctatcgtcgctgccatgcaactttccg

SEQ ID NO: 708552 - DNA, 75 bp, synthetic construct
  source 1..75: mol_type = other DNA
ttcatgcgagtataataaagtaaaacataatggttcattatttaagtttattttatggaaagaagggttagaacc

SEQ ID NO: 708553 - DNA, 75 bp, synthetic construct
  source 1..75: mol_type = other DNA
tagatgatatatataataagttacaggaaagtacaggatttacagatgatgtaataagtaaaataaaaaatattg

SEQ ID NO: 708554 - DNA, 75 bp, synthetic construct
  source 1..75: mol_type = other DNA
aaatatgatctccctggaaatgatgataatgaattagaagtctggaagaaagaaccatttttaagttctgtaaaa

SEQ ID NO: 708555 - DNA, 75 bp, synthetic construct
  source 1..75: mol_type = other DNA
tttgcagtaatactacagaccaattgttattaaatcagtatgtcgctgacgaccctctatatgaggataaacatt

SEQ ID NO: 708556 - DNA, 75 bp, synthetic construct
  source 1..75: mol_type = other DNA
attaactctcaaatcgcaagtatatatgaaagagttttgtaaggattatatttcgctatttaaagataaatggga

SEQ ID NO: 708557 - DNA, 75 bp, synthetic construct
  source 1..75: mol_type = other DNA
atgattgctaataagatttttgataacccatttattcaatttgatcaaaaatcatctatcaacaactcaagtgca

SEQ ID NO: 708558 - DNA, 75 bp, synthetic construct
  source 1..75: mol_type = other DNA
aaaaagacctggtgcaaacgataacagaacgtcaaaaccagccgctgcgtgaagtggatctcaatcagtatctgt

SEQ ID NO: 708559 - DNA, 75 bp, synthetic construct
  source 1..75: mol_type = other DNA
accctgaagacagccctgatggttgacggaaagaaagtggcactcagtgccagacagcagggtgaggatgtggtg

SEQ ID NO: 708560 - DNA, 75 bp, synthetic construct
  source 1..75: mol_type = other DNA
accctgaagacggccctgatggttgacggaaagagagtggcactcagtgccagacagcagggtgaggatgtggtg

SEQ ID NO: 708561 - DNA, 75 bp, synthetic construct
  source 1..75: mol_type = other DNA
tgttttgatcattgcatcatttatttactatctgcttgaggtgggaaccaaaaaggatttatatctgtttgtttt

SEQ ID NO: 708562 - DNA, 75 bp, synthetic construct
  source 1..75: mol_type = other DNA
ttctgtatttttgtttttctgcactgactgaccggcagaaacctgatgaaagaaaacgtgatgaaaggaatgaag

SEQ ID NO: 708563 - DNA, 75 bp, synthetic construct
  source 1..75: mol_type = other DNA
atgaaagttatattcacttctaatcgtcttgttgattttcttatccggctttcgattacagcgattgtcatttct

SEQ ID NO: 708564 - DNA, 75 bp, synthetic construct
  source 1..75: mol_type = other DNA
atacgattttctatcatctaatacatcacttccatctgattatatcgatattagcaatagaataataaaatatgt

SEQ ID NO: 708565 - DNA, 75 bp, synthetic construct
  source 1..75: mol_type = other DNA
aacgattgtccagctgatagaagatgcggaaaacaaagagaaatatgcaaataaaatgtcttctttgaagcagga

SEQ ID NO: 708566 - DNA, 75 bp, synthetic construct
  source 1..75: mol_type = other DNA
actacgcgcggcggggtatcataaaaatggaaagggtgacaattgacaggttattggcctgcatttatgtcgccg

SEQ ID NO: 708567 - DNA, 75 bp, synthetic construct
  source 1..75: mol_type = other DNA
ctaaacgctggcctgcaaatatagcgtccgccattggcgatgcgttaattttcccaacgctatcgtttatggcat

SEQ ID NO: 708568 - DNA, 75 bp, synthetic construct
  source 1..75: mol_type = other DNA
catcctcagcactcgtcctttctgcaagggcgtcgtgacagccaatacctctgaacagcttcgcaccaaaacatg

SEQ ID NO: 708569 - DNA, 75 bp, synthetic construct
  source 1..75: mol_type = other DNA
gattggggagacgcaatcaggactaataacttcgacggtgttaaacctgttgaagcctatcgttgcgctaccagc

SEQ ID NO: 708570 - DNA, 75 bp, synthetic construct
  source 1..75: mol_type = other DNA
gctgacgccttccgcgagatacgcgatcacctccagaacccagcgacgcgtcaccagcctttgatgctggcgcgc

SEQ ID NO: 708571 - DNA, 75 bp, synthetic construct
  source 1..75: mol_type = other DNA
tcttatcgttgccattggcctgtgttgcctgatgctggtaggcggttggtttttaggcggtcgcgcacgcgcgag

SEQ ID NO: 708572 - DNA, 75 bp, synthetic construct
  source 1..75: mol_type = other DNA
tatctttcttatcgttgccattggcctgtgttgcctgatgctggtaggcggttggtttttaggcggtcgcgcacg

SEQ ID NO: 708573 - DNA, 75 bp, synthetic construct
  source 1..75: mol_type = other DNA
cgagtaattcacccttcattctatgaagtgctactatcggatgctttaacttctacttgttatggttatgaaaaa

SEQ ID NO: 708574 - DNA, 75 bp, synthetic construct
  source 1..75: mol_type = other DNA
gcccttatggatgtcagcgaaatatgggggattggcaaacgtctggcgtcccggttacaggctgttggcataaca

SEQ ID NO: 708575 - DNA, 75 bp, synthetic construct
  source 1..75: mol_type = other DNA
cctgcggtatcggtatcgcaccgacaaaaacactctgcaaagcagctaccgcagcagcaaaaaaataccctcaaa

SEQ ID NO: 708576 - DNA, 75 bp, synthetic construct
  source 1..75: mol_type = other DNA
cctcacataacatcgtgctgctgcaaaccatgcgcggtttcttcgatgccctgcaatcctcagtgaagcatagcc

SEQ ID NO: 708577 - DNA, 75 bp, synthetic construct
  source 1..75: mol_type = other DNA
ggctttcagtaaagctattttctggattggtggcctgctctgtgttgttacatggttccaccttgagcgccagtt

SEQ ID NO: 708578 - DNA, 75 bp, synthetic construct
  source 1..75: mol_type = other DNA
tcggaattcggaggtcagtgtatcgggggctctccgtcatcggttccctggatttgtggcgacacgacctactac

SEQ ID NO: 708579 - DNA, 75 bp, synthetic construct
  source 1..75: mol_type = other DNA
atgcagagcagtctgcgtttgacctggtgatgtggacaaatgatggctttacagcagatacgctgacgctgacag

SEQ ID NO: 708580 - DNA, 75 bp, synthetic construct
  source 1..75: mol_type = other DNA
attgctttcgttgagagtgaaattgacgagtggattaatcagcgtattgcggaatcacgtggaacagctacctga

SEQ ID NO: 708581 - DNA, 75 bp, synthetic construct
  source 1..75: mol_type = other DNA
tcagggcagtgtcgccgtcagacctggcggagcgcctgacggaaaaactgaaggaaggctggcagccattcggca

SEQ ID NO: 708582 - DNA, 75 bp, synthetic construct
  source 1..75: mol_type = other DNA
cccacgcattaagcaactggcccgtcgcaacacagtgactcccggtggtaaagcatgcgcatttaacgacatcat

SEQ ID NO: 708583 - DNA, 75 bp, synthetic construct
  source 1..75: mol_type = other DNA
ggctttacagcagatacgctgacgctgacagatatcacgggggcaaaagcgacgtatcctgtactgcttgatacg

SEQ ID NO: 708584 - DNA, 75 bp, synthetic construct
  source 1..75: mol_type = other DNA
acagccatgctgacacagtttcgtgctgacctctccgtgtttaacgcgcagtgccatggtggcagcgctgcagat

SEQ ID NO: 708585 - DNA, 75 bp, synthetic construct
  source 1..75: mol_type = other DNA
tccatgagcgtggagccatgggtgtttcaaacattggcatagcccccgtcatgtcagagttattcaataggcaag

SEQ ID NO: 708586 - DNA, 75 bp, synthetic construct
  source 1..75: mol_type = other DNA
catctaaaaactcaaggaatacagagtttaatactctgaaaaacaggaaagagtttctaagctcagtaatcaatg

SEQ ID NO: 708587 - DNA, 75 bp, synthetic construct
  source 1..75: mol_type = other DNA
gaattcattaccggaaaacagcctgatacggtgaagcccaccggaccttccggtgaaggcccggagagagagccg

SEQ ID NO: 708588 - DNA, 75 bp, synthetic construct
  source 1..75: mol_type = other DNA
tgacagatatcacgggggcaaaagcgacgtatccggtactgcttgatacggtcacagtcaaagttaacgaaagcc

SEQ ID NO: 708589 - DNA, 75 bp, synthetic construct
  source 1..75: mol_type = other DNA
tgccggaagtgatgaataaaacaggatatagcaaagcatggatttatcgacttattagcagaggtgtattcccag

SEQ ID NO: 708590 - DNA, 75 bp, synthetic construct
  source 1..75: mol_type = other DNA
atgaatttgacgaactggcaggtgaccgcgcgtatgcagatgacaaagctatcgttggtggtatcgcccgtctcg

SEQ ID NO: 708591 - DNA, 75 bp, synthetic construct
  source 1..75: mol_type = other DNA
gcgcgtgcagagctgaatcaggcaaatgaagatgttgccagaaatcaggagcgacaggctaaagctgttcaggtt

SEQ ID NO: 708592 - DNA, 75 bp, synthetic construct
  source 1..75: mol_type = other DNA
ggtgttccgatgagtgttccggtggttgatgcaaaacctaccgaacgtccaggtgtttttacggcatcaattcca

SEQ ID NO: 708593 - DNA, 75 bp, synthetic construct
  source 1..75: mol_type = other DNA
aattcatccgtagcagcagtggcatttggttttcctgctttggcaactcctggtgccggaacgctgggtatcgcc

SEQ ID NO: 708594 - DNA, 75 bp, synthetic construct
  source 1..75: mol_type = other DNA
ggagctgcttaacaaaaaaatgccgtggtatcgccttctggttcctgatgcaaagcataccagcactgaggcaac

SEQ ID NO: 708595 - DNA, 75 bp, synthetic construct
  source 1..75: mol_type = other DNA
ccagtaatcgtaacgctgtggggattaagtttgtttgccactcccctgatggagctgcttaacaaaaaaatgccg

SEQ ID NO: 708596 - DNA, 75 bp, synthetic construct
  source 1..75: mol_type = other DNA
tcctcctgaatacgttgagtttgaaacgacaattaaagccgacaaactggcaatcaaacaccaactaaaagcagg

SEQ ID NO: 708597 - DNA, 75 bp, synthetic construct
  source 1..75: mol_type = other DNA
ataacaagagacttggccatgtgttggatgttgcccgtcaggtccagagaaaacgggacaataatcgctcacaat

SEQ ID NO: 708598 - DNA, 75 bp, synthetic construct
  source 1..75: mol_type = other DNA
aacaacacttgagaacacgattaatattcctccaactgcatatattaatcagggaactgttttatcagtgattgt

SEQ ID NO: 708599 - DNA, 75 bp, synthetic construct
  source 1..75: mol_type = other DNA
tgacgataacgatgttgctgcgctggaaaggatggtggctgaaataaataaagaagctatcgagaagagcgaacc

SEQ ID NO: 708600 - DNA, 75 bp, synthetic construct
  source 1..75: mol_type = other DNA
cagggaggtgaggtctatgatatggataatatcagagtgacaacgcctaaacgtcatattgatattcacagggga

SEQ ID NO: 708601 - DNA, 75 bp, synthetic construct
  source 1..75: mol_type = other DNA
gctggaccaggcaactgtcagcgtgacgaaacgtgtgacagatgttgtgaaggacacacgacagcatattgccgt

SEQ ID NO: 708602 - DNA, 75 bp, synthetic construct
  source 1..75: mol_type = other DNA
ccaaagaacccttgcatgattttaacgcgcaccggccgctggcattagacgatgaccttgatgcagaatttacct

SEQ ID NO: 708603 - DNA, 75 bp, synthetic construct
  source 1..75: mol_type = other DNA
ccatcaccgacgatcagcgtttgcaggtgttactgattggtttctcctttggtgcgttattcgccgtgctcaggt

SEQ ID NO: 708604 - DNA, 75 bp, synthetic construct
  source 1..75: mol_type = other DNA
gatcgatttactgctgatagccgatgacgaacaggccgataaacacggttatatgcgtatggtgcagagtcgtcg

SEQ ID NO: 708605 - DNA, 75 bp, synthetic construct
  source 1..75: mol_type = other DNA
atagccagcatggttcgccgcttaatcgccggcgacgatcttgcctctctccaggtgctctggcagcctgaattt

SEQ ID NO: 708606 - DNA, 75 bp, synthetic construct
  source 1..75: mol_type = other DNA
atgaacttcagagcacgtcttttttattatttttctttaaaaaaagagaaagaggaggataaaggtttaacctta

SEQ ID NO: 708607 - DNA, 75 bp, synthetic construct
  source 1..75: mol_type = other DNA
tgaaaaacctgcagaccattgcaaccaaaatgaagcagtacaagttccagggacaatataccagcagtgattata

SEQ ID NO: 708608 - DNA, 75 bp, synthetic construct
  source 1..75: mol_type = other DNA
tcatccagtgataaccagcgtgaactgaaaaacctgcagactattgcaacaaaaatgaagcagtacaagttccag

SEQ ID NO: 708609 - DNA, 75 bp, synthetic construct
  source 1..75: mol_type = other DNA
tatccgtcaggcgtgatccctgatatgcgtggctggacgattaagggcaaacctgccagtggtcgggccgtattg

SEQ ID NO: 708610 - DNA, 75 bp, synthetic construct
  source 1..75: mol_type = other DNA
tggctatggttttgaggaagactgggcagaagtttatacctcgaaaaatcttccaccagaaagctacccagtcgg

SEQ ID NO: 708611 - DNA, 75 bp, synthetic construct
  source 1..75: mol_type = other DNA
aagtaactcataccaggtacaaggggtggttggtctgggcattggcacgatggcgaatacgaactctgctggcgc

SEQ ID NO: 708612 - DNA, 75 bp, synthetic construct
  source 1..75: mol_type = other DNA
gatcaattgccgaaagtggttaacctacaacaggcgattgcgaaagaactggagctgaccgcatcagcggaaatt

SEQ ID NO: 708613 - DNA, 75 bp, synthetic construct
  source 1..75: mol_type = other DNA
atggtgaattactgtcttatatcattggcgctgacacttacaatgtcacccgctctggcgacagctatattctgg

SEQ ID NO: 708614 - DNA, 75 bp, synthetic construct
  source 1..75: mol_type = other DNA
atgtctaacactagttctaattttgagattactggcgttttgttaggaaaagaggtgcgtaaacgtaaaacacct

SEQ ID NO: 708615 - DNA, 75 bp, synthetic construct
  source 1..75: mol_type = other DNA
gctcaggggaaaaccgttgataacattatggtgcagatcgagtcatggcgacgaaatttggttaacgaacgtagt

SEQ ID NO: 708616 - DNA, 75 bp, synthetic construct
  source 1..75: mol_type = other DNA
tactggtaatgccaaatttgcggtggatgtttttaaggaacaaaagcagttattttcacagaatgagaggcttat

SEQ ID NO: 708617 - DNA, 75 bp, synthetic construct
  source 1..75: mol_type = other DNA
gttgagtttcaacaggatcatggtggattcaaaaaaggcgagttttggaatgtggtttcccgtgaggggggaaaa

SEQ ID NO: 708618 - DNA, 75 bp, synthetic construct
  source 1..75: mol_type = other DNA
gagcgttgtaatctgacgctggtaggtttttgtaaaccaggtcgggcaaccgtttatacccatccgcagcgtttg

SEQ ID NO: 708619 - DNA, 75 bp, synthetic construct
  source 1..75: mol_type = other DNA
gagcgctgtaatctgacgctggtgggcttttgtaaaccgggtcgggcgacggtttatacgcatccgcagcgtttg

SEQ ID NO: 708620 - DNA, 75 bp, synthetic construct
  source 1..75: mol_type = other DNA
aactggcgaagatggaaccgttcttcccgtcgggtctgaaaattgtttacccgtacgacaccacgccgttcgtga

SEQ ID NO: 708621 - DNA, 75 bp, synthetic construct
  source 1..75: mol_type = other DNA
atcgcttccggtggagaacggttgttgtttaagatttccgggccaatggtagtggtcaaagtgggcattattgtg

SEQ ID NO: 708622 - DNA, 75 bp, synthetic construct
  source 1..75: mol_type = other DNA
tgcataggaatggcaattggtgccggaacggtgctgatgccagtacaaattgggctgaagggaatttgggtattt

SEQ ID NO: 708623 - DNA, 75 bp, synthetic construct
  source 1..75: mol_type = other DNA
atattgcctatcgtaaacgggaagcggataaagtactggcaacccggctcgcgctgcgtacccaccgaattagtt

SEQ ID NO: 708624 - DNA, 75 bp, synthetic construct
  source 1..75: mol_type = other DNA
actctttgataacctgcgtattacgcccggattccggcaaactgcgcttcaggaccgaaaagtttcgatgaccaa

SEQ ID NO: 708625 - DNA, 75 bp, synthetic construct
  source 1..75: mol_type = other DNA
ttacgcttattgcggtgatcttgttttttgccttttcatttaccttttcgattagccatgaagaggcagtttctg

SEQ ID NO: 708626 - DNA, 75 bp, synthetic construct
  source 1..75: mol_type = other DNA
aaaccttcggtttaaccgataccgatctttcgcaatcactactctataaagtggctattttcgccatactggtgg

SEQ ID NO: 708627 - DNA, 75 bp, synthetic construct
  source 1..75: mol_type = other DNA
atgaaattaaaaaaatgtcttctgcctgtggcaatgttagcgtcattcactctggcaggatgccagtcaaatgct

SEQ ID NO: 708628 - DNA, 75 bp, synthetic construct
  source 1..75: mol_type = other DNA
atcattgcagcggttgagctggacgaccgctctcatcaggcaccgaaacgtcagcggcgtgacctgctgctggaa

SEQ ID NO: 708629 - DNA, 75 bp, synthetic construct
  source 1..75: mol_type = other DNA
aagccacgatgccagaaaactgctacagatgaccggagaatggctgaatacaacaggaactgatcagcagtcacc

SEQ ID NO: 708630 - DNA, 75 bp, synthetic construct
  source 1..75: mol_type = other DNA
ctcagaagccacgatgccagaaaactgctgcagatgaccggagaatggctgaatacaacaggggctgatcagcag

SEQ ID NO: 708631 - DNA, 75 bp, synthetic construct
  source 1..75: mol_type = other DNA
gaaaatcacgcgtacatttagtaccaacaagccaggtacatacacattcacattcaactctttgacatatggagg

SEQ ID NO: 708632 - DNA, 75 bp, synthetic construct
  source 1..75: mol_type = other DNA
ttcagccacggttgagcatggaaaatactacggtaactgctgataataacgtggagaaaaatgtcgcgtcgcttg

SEQ ID NO: 708633 - DNA, 75 bp, synthetic construct
  source 1..75: mol_type = other DNA
ctcgctttggcctggaagttaattatcggattggcgaacctctggaaaaacaactcgatacagacagcattcgcg

SEQ ID NO: 708634 - DNA, 75 bp, synthetic construct
  source 1..75: mol_type = other DNA
gatattaggaaaatcgaacctcaagatatctccgacatcattgatattaaagctaaacggcctttgttactgagt

SEQ ID NO: 708635 - DNA, 75 bp, synthetic construct
  source 1..75: mol_type = other DNA
ctggaccgccatcttcatgaacccggagtggccttcacctccacccgtgcggcacgagaatggctgattctgaac

SEQ ID NO: 708636 - DNA, 75 bp, synthetic construct
  source 1..75: mol_type = other DNA
ccagctgtaacttcaatgtcatcactgggagaagttggtgatactgacttattcagtgcggtcatgagtgcctac

SEQ ID NO: 708637 - DNA, 75 bp, synthetic construct
  source 1..75: mol_type = other DNA
ttgttctgattattgtagcgttacttatccggattatcctcagaagtgtaaatcagcattctcctttgctgatgc

SEQ ID NO: 708638 - DNA, 75 bp, synthetic construct
  source 1..75: mol_type = other DNA
tcaaagtttatttgggaaaaataccgcaagctgtctcccaccgctcgccgtttgtttgactatttcagttcacac

SEQ ID NO: 708639 - DNA, 75 bp, synthetic construct
  source 1..75: mol_type = other DNA
gactatgatgcgattccagaggtaaagaagatcgcatttaggtttcacactgtttattacgttataagagtcgat

SEQ ID NO: 708640 - DNA, 75 bp, synthetic construct
  source 1..75: mol_type = other DNA
cgacaaatatgttgttcactcagggggcaatacatcgtaccgacgatcgtactcagtcaaatattggttttggct

SEQ ID NO: 708641 - DNA, 75 bp, synthetic construct
  source 1..75: mol_type = other DNA
gtggcagcacgaatgcagctggtaatcacagccatagagatggccgtcgatttaaccccagtgtttttaaagata

SEQ ID NO: 708642 - DNA, 75 bp, synthetic construct
  source 1..75: mol_type = other DNA
tgcaggtgcacacgcacatactgtcggtattggtgctcatacgcactcggttgcgattggctcacatggacacac

SEQ ID NO: 708643 - DNA, 75 bp, synthetic construct
  source 1..75: mol_type = other DNA
ggtgagggcgagttgcttattggctggaggggtacgagcggtgcacatgcgccagttttcattcgctcacgaaga

SEQ ID NO: 708644 - DNA, 75 bp, synthetic construct
  source 1..75: mol_type = other DNA
cctccacccaggtgggtaaagagtgccagttcacgacgggtttagccgttgttattaccactacgtataacgaaa

SEQ ID NO: 708645 - DNA, 75 bp, synthetic construct
  source 1..75: mol_type = other DNA
gccacaacgtcgggtctggcagcaattccggaacgacggcaggtgatcctacccacgtaatatggacacaggcct

SEQ ID NO: 708646 - DNA, 75 bp, synthetic construct
  source 1..75: mol_type = other DNA
cctccacccaagtgggtaaagaatgccagttcacaacgggtttagccgttgttattaccaccacttataacgaaa

SEQ ID NO: 708647 - DNA, 75 bp, synthetic construct
  source 1..75: mol_type = other DNA
tgtccacaacgcctgcccgaaagtgagtctttgcccgatgccgggcagcgacccgcagacgaacggcgatttaag

SEQ ID NO: 708648 - DNA, 75 bp, synthetic construct
  source 1..75: mol_type = other DNA
gcaatggctgaactcattgtggcaggaaaaagaccggcttctgacgtctctcatgtcatcacagcgtcagaataa

SEQ ID NO: 708649 - DNA, 75 bp, synthetic construct
  source 1..75: mol_type = other DNA
ttgtgttgttatcgctggcggtggcggcgctgtttctggtgaagcatgaaaacgccagcctgcgcgcctcgctgg

SEQ ID NO: 708650 - DNA, 75 bp, synthetic construct
  source 1..75: mol_type = other DNA
acttcttccagtagatcgtattatcaacgtattcagacacagtcagcaggtgctcatacccactcgctgtctggt

SEQ ID NO: 708651 - DNA, 75 bp, synthetic construct
  source 1..75: mol_type = other DNA
aggacaattaacggcgtaaaatttgacggctcggcaaatattgaagcgtttccgccaggtgttccgctgccgtgg

SEQ ID NO: 708652 - DNA, 75 bp, synthetic construct
  source 1..75: mol_type = other DNA
ctcataaatcccttaatgggttatacattgataaccatttatcaggtcctgtctctgatttagaccagcgtgttt

SEQ ID NO: 708653 - DNA, 75 bp, synthetic construct
  source 1..75: mol_type = other DNA
tcaccgccctgaaactgagtgacctagctgactttttcggggaaccagaccagatcagagaacgcattgaaaaca

SEQ ID NO: 708654 - DNA, 75 bp, synthetic construct
  source 1..75: mol_type = other DNA
ctggaagacatcgatccgcttatggttaagtgctgcatgatccagctattccattacttcgagtcccgtaatacc

SEQ ID NO: 708655 - DNA, 75 bp, synthetic construct
  source 1..75: mol_type = other DNA
ccgatcgcgtttcgctgacgttacgggatgttcagttcacttatccggagcaatcccaacaggcacttaaaggga

SEQ ID NO: 708656 - DNA, 75 bp, synthetic construct
  source 1..75: mol_type = other DNA
acgacgacaaactgggtgtcgaatatgattatcggcgcgaccttcctgacactgcttgatagcattggcgctgcc

SEQ ID NO: 708657 - DNA, 75 bp, synthetic construct
  source 1..75: mol_type = other DNA
actatttgattcaggtatcgaaatctacaaaatgaagtgccctccaggatcgtataagctggaaaaaataagatt

SEQ ID NO: 708658 - DNA, 75 bp, synthetic construct
  source 1..75: mol_type = other DNA
tagagaatggcaaatatgttttcgatatgttcttggatactggtgaattttactatacaagtcatgcctttgaca

SEQ ID NO: 708659 - DNA, 75 bp, synthetic construct
  source 1..75: mol_type = other DNA
ccggcaactctaccaatttctccttgtcgccatcagacgcatcaaatgcatgtgaaagcgctgggaaaaataaaa

SEQ ID NO: 708660 - DNA, 75 bp, synthetic construct
  source 1..75: mol_type = other DNA
aacaccgttgaggcgatttctgctattactggcatttcgacaataatggtaaacgatttaaagatgttttccacc

SEQ ID NO: 708661 - DNA, 75 bp, synthetic construct
  source 1..75: mol_type = other DNA
atgcaaacctgaaagccctgcaaaaacagctggatgagatgtatacctacatccgtaataatcagatgatgatcc

SEQ ID NO: 708662 - DNA, 75 bp, synthetic construct
  source 1..75: mol_type = other DNA
tggcgcagcaatcacccgtactgccgggcgttattttgaacgtctggtaagtcacgacgcgactttccgcgtgtt

SEQ ID NO: 708663 - DNA, 75 bp, synthetic construct
  source 1..75: mol_type = other DNA
tctcctcatgcatatcatatgcaacattaaacatgggtacaataatggcgggaaaaactaaaattcttatagaca

SEQ ID NO: 708664 - DNA, 75 bp, synthetic construct
  source 1..75: mol_type = other DNA
cacaaaaaggtttaagtctgattgaatcggcaatggtcttagctatcagtgcggtcattgtttctggtgttttgt

SEQ ID NO: 708665 - DNA, 75 bp, synthetic construct
  source 1..75: mol_type = other DNA
aaatgcaaaatggaattttaataataatataagcgtttcaattaatgatattctttatgatactaataaatttat

SEQ ID NO: 708666 - DNA, 75 bp, synthetic construct
  source 1..75: mol_type = other DNA
cgcctgaccaccgatatcggtccggtgattgatagcgaagcgaaagccaatatcgagcgtcatattcagactatg

SEQ ID NO: 708667 - DNA, 75 bp, synthetic construct
  source 1..75: mol_type = other DNA
ggaaccgaaagatattgtgggctatgtgcgcgaagccacgccgagtgaagtagaacaggcgctggaaagtgcggt

SEQ ID NO: 708668 - DNA, 75 bp, synthetic construct
  source 1..75: mol_type = other DNA
aaattttgccacagtcggtttcccgcgccgccatcaccgccgcgtatcgccgcccggaaacagaagctgtttcta

SEQ ID NO: 708669 - DNA, 75 bp, synthetic construct
  source 1..75: mol_type = other DNA
actgaatgcactacgggaatgggcagcaaaccgaacagaattgcagacgttatgtgcgcaatatggtgagctggc

SEQ ID NO: 708670 - DNA, 75 bp, synthetic construct
  source 1..75: mol_type = other DNA
gattaccgcatccgaaaattcccctgccgcgcgatctttacggtcacgggcgcgacaactcggcagggctggatc

SEQ ID NO: 708671 - DNA, 75 bp, synthetic construct
  source 1..75: mol_type = other DNA
ccagggccgacgggtgaacgcaacacctggacgctgctgccgcgtgagcgcgtgttgtgtattgcggatgatgaa

SEQ ID NO: 708672 - DNA, 75 bp, synthetic construct
  source 1..75: mol_type = other DNA
caacttggcattgcgttaaccgactgcatcactatggatgctttcctgcgtgatttcggtgtcgagttcgccagt

SEQ ID NO: 708673 - DNA, 75 bp, synthetic construct
  source 1..75: mol_type = other DNA
attttatccgaccgttttgatgcaagattgtcggagacggaaatgtccaagctggtggaacggcgcgatgaagtt

SEQ ID NO: 708674 - DNA, 75 bp, synthetic construct
  source 1..75: mol_type = other DNA
atgggtgagttttccataaacgcaacgcttgctggctacaatgttctgtatctctcgctggaggttcacaccacc

SEQ ID NO: 708675 - DNA, 75 bp, synthetic construct
  source 1..75: mol_type = other DNA
cgcccggaaaccgaagcggtttctatgttgctggaacaagctcgcctgccgcagccgattgctgaacaggcgcat

SEQ ID NO: 708676 - DNA, 75 bp, synthetic construct
  source 1..75: mol_type = other DNA
gcaaaaccggcagaacaaacgccgctgattgccgcgcaagggattgccattttgctggaagcgggtgtaccgcca

SEQ ID NO: 708677 - DNA, 75 bp, synthetic construct
  source 1..75: mol_type = other DNA
caagatgaaattgccgaccacacgttaaaaatgctgcgcggtgcaatggccgaatgccggatgggtaatccgggt

SEQ ID NO: 708678 - DNA, 75 bp, synthetic construct
  source 1..75: mol_type = other DNA
gctgttgctgaatacggtccagcagtcggtggtccagctgcaggcagacgaatatactcaacaccatatccggtg

SEQ ID NO: 708679 - DNA, 75 bp, synthetic construct
  source 1..75: mol_type = other DNA
gccgctgcatcatcgtcccgtgaggcatcagttaaagcggaggaggcctcagccagtgccaccgccgccggaaaa

SEQ ID NO: 708680 - DNA, 75 bp, synthetic construct
  source 1..75: mol_type = other DNA
ccgtctggctatgccctgatgcaggggcagacttttgacaaatctgcatacccgaaacttgcagccgcttatccg

SEQ ID NO: 708681 - DNA, 75 bp, synthetic construct
  source 1..75: mol_type = other DNA
atatagcaataattacccaacatcattcggcaatgttctgcatatgaaaggggcgagtgctgctggtgagggcga

SEQ ID NO: 708682 - DNA, 75 bp, synthetic construct
  source 1..75: mol_type = other DNA
gtctgcttcaaaagatgaggcgaccagacaagcgtcagcagcgaatggcagggccacgactgcagcgacgaaggc

SEQ ID NO: 708683 - DNA, 75 bp, synthetic construct
  source 1..75: mol_type = other DNA
gtctgcttcaaaagatgaggcgaccagacaagcgtcagcagcgaatggcagtgccacgaccgcaccgacgaaggc

SEQ ID NO: 708684 - DNA, 75 bp, synthetic construct
  source 1..75: mol_type = other DNA
attgtccagctcagtagtgcaaccaacagcgcatctgaaacgcttgccgcgacaccgaaagcagtgaaagcagct

SEQ ID NO: 708685 - DNA, 75 bp, synthetic construct
  source 1..75: mol_type = other DNA
aatgcagctggtaatcacagccatagagatggccgtcgatttaaccccagtgtttttaaagatacttatcaatat

SEQ ID NO: 708686 - DNA, 75 bp, synthetic construct
  source 1..75: mol_type = other DNA
ctgagacggcagcagcacagagtgcctccgcagcagcagactcaaaaacagcggctgcctcatctgccagcgccg

SEQ ID NO: 708687 - DNA, 75 bp, synthetic construct
  source 1..75: mol_type = other DNA
tcataaatgtgacaaatgtcacaggcgttcgccaaattgaggtatggcggcgtgatgatttacaacatccgcgac

SEQ ID NO: 708688 - DNA, 75 bp, synthetic construct
  source 1..75: mol_type = other DNA
cttcggcggcgtcatcggcatcatctgcgtctgcttcaaaagatgaggcgaccagacaggcgtcagcagcgaatg

SEQ ID NO: 708689 - DNA, 75 bp, synthetic construct
  source 1..75: mol_type = other DNA
atgaaggcttatgcctggcaccggattcctttgcaaacaatatccataatttattatgcgcagttatcgtattac

SEQ ID NO: 708690 - DNA, 75 bp, synthetic construct
  source 1..75: mol_type = other DNA
gtctgcttcaaaagatgaggcgaccagacaagcgtcagcagcgaatggcagggccacgacggcatcgacgaaggc

SEQ ID NO: 708691 - DNA, 75 bp, synthetic construct
  source 1..75: mol_type = other DNA
gctccgggaagtggatcacctgattattctaaatacagtgttaacacttcttctgcaggcgctcatacgcactct

SEQ ID NO: 708692 - DNA, 75 bp, synthetic construct
  source 1..75: mol_type = other DNA
cgcgaagtgataaaggtgctacgactactagttcatcaggcaatcatgcacatacagtcgacattggagcacata

SEQ ID NO: 708693 - DNA, 75 bp, synthetic construct
  source 1..75: mol_type = other DNA
aaccaggtgaaaaggcaagcgcatgccatccccgaaccggtacgctttccacagcttcccaggtaagaaaacttc

SEQ ID NO: 708694 - DNA, 75 bp, synthetic construct
  source 1..75: mol_type = other DNA
gtgaagcaatggatttgatgataaatgatttacaacaccgacaggcaaaagaaaaaagtcataaatggctgtccg

SEQ ID NO: 708695 - DNA, 75 bp, synthetic construct
  source 1..75: mol_type = other DNA
cagcgaagaccagcgaaacgaatgccaaagccagcgaaactgcggcgaaaaacagtcaggatgcagcagcccaaa

SEQ ID NO: 708696 - DNA, 75 bp, synthetic construct
  source 1..75: mol_type = other DNA
tgccgcggaatccgcggcaacgcgcgccgagacagcagcaaaacgggcagaggatattgcatccgccgtggcgct

SEQ ID NO: 708697 - DNA, 75 bp, synthetic construct
  source 1..75: mol_type = other DNA
ttctgccgaatccgcggcaacgcgcgccgagacagcagcaaaacgggcagaggatattgcatccgccgtggcgct

SEQ ID NO: 708698 - DNA, 75 bp, synthetic construct
  source 1..75: mol_type = other DNA
tacggcagaatccgcggcaacgcgcgccgagacagcagcaaaacgggcagaggatattgcatccgccgtggcgct

SEQ ID NO: 708699 - DNA, 75 bp, synthetic construct
  source 1..75: mol_type = other DNA
accgcacaggatgcaacgacagcacagaaagggataatccagctaagcagcgcgaccaacagcacgtctgaaacg

SEQ ID NO: 708700 - DNA, 75 bp, synthetic construct
  source 1..75: mol_type = other DNA
agtccagccagacggcagcgaagaccagcgaaacgaatgctaaagccagcgaaactgcggcgaaaaacagccagg

SEQ ID NO: 708701 - DNA, 75 bp, synthetic construct
  source 1..75: mol_type = other DNA
caaaatacttggggtgtacaaggctcagtaggtatgtctacggggtggttagctaataccagtacagatggtaat

SEQ ID NO: 708702 - DNA, 75 bp, synthetic construct
  source 1..75: mol_type = other DNA
ttgggggtgaatccaaagaccccggcatgctgaacaagcgcggtgagatgtggaactcaatgaagtcatggctca

SEQ ID NO: 708703 - DNA, 75 bp, synthetic construct
  source 1..75: mol_type = other DNA
cgatgataccggaaaatggctggcatccgtggcggccagtgaaagccggaagacagcgcatgatgtgctggacgt

SEQ ID NO: 708704 - DNA, 75 bp, synthetic construct
  source 1..75: mol_type = other DNA
tgtttcttgacagtaaaaaccgcagactgacggacagctaccgggaaggacagatactggagcggtatgatgcag

SEQ ID NO: 708705 - DNA, 75 bp, synthetic construct
  source 1..75: mol_type = other DNA
ggcgacacagcgggagcagatacaggctgttgtggcgatggcagaaggtcagggacggcaggtgcaggtgatggc

SEQ ID NO: 708706 - DNA, 75 bp, synthetic construct
  source 1..75: mol_type = other DNA
ccggcgtcagacgctgattgtcacccagacaaacgcggatgcaatggccatcaatgccggcattcatgaccgtct

SEQ ID NO: 708707 - DNA, 75 bp, synthetic construct
  source 1..75: mol_type = other DNA
cttgctgatacactgccagcggtggccattatcagctccgggcggggaatggcggcacagcgggagcagatacag

SEQ ID NO: 708708 - DNA, 75 bp, synthetic construct
  source 1..75: mol_type = other DNA
ggacagagaagagctgctgacagagtggcatgagcgtattgaccggacaggattcagttatcaggcattgcggga

SEQ ID NO: 708709 - DNA, 75 bp, synthetic construct
  source 1..75: mol_type = other DNA
tgaaatcaagacaatcacacatccacacttcggtgataaaccggtaaaggtgttcgcgataaaagtgaagattaa

SEQ ID NO: 708710 - DNA, 75 bp, synthetic construct
  source 1..75: mol_type = other DNA
cgtacgattgatgaagtccttgaagactatgcaaagcaccagcagatgggctttaaggcgattcgtgtgcagtgc

SEQ ID NO: 708711 - DNA, 75 bp, synthetic construct
  source 1..75: mol_type = other DNA
attaacggagcgggaggaagaacaaagaaagaaacaggctgtttttgatatgccgttaaattgcggctgtaagaa

SEQ ID NO: 708712 - DNA, 75 bp, synthetic construct
  source 1..75: mol_type = other DNA
gatgagctgattgccggacgcctgcccaacggcgtcagcctggagagaatggaaggtggcattaatgtgcatcgc

SEQ ID NO: 708713 - DNA, 75 bp, synthetic construct
  source 1..75: mol_type = other DNA
tcgtggagagaaaacggaagagtatcgcttgtgtaatgactactggaataagcgaattatgttccgcgagtacga

SEQ ID NO: 708714 - DNA, 75 bp, synthetic construct
  source 1..75: mol_type = other DNA
gaattgatgttccgtatgacggatatgaaatcaagacaatcacacatccccacttcggcgataaaccggtaaagg

SEQ ID NO: 708715 - DNA, 75 bp, synthetic construct
  source 1..75: mol_type = other DNA
gtctgcagttacagccggtggccagtggtgcgccttttaccctgatgcagcagcgcagcgccatcgatgtggcgg

SEQ ID NO: 708716 - DNA, 75 bp, synthetic construct
  source 1..75: mol_type = other DNA
ccgcatataaaaaattggccgccgccggtgggatgaaaacacctggtgccataacatcggcacgaaacagtgcta

SEQ ID NO: 708717 - DNA, 75 bp, synthetic construct
  source 1..75: mol_type = other DNA
gtggctaaccttcaactggcagttaacggtgaatatttcgaccagatgaagtcaggcgagaaaacggaagagtat

SEQ ID NO: 708718 - DNA, 75 bp, synthetic construct
  source 1..75: mol_type = other DNA
tgaaattaagataatcacacacccgcacttcggcgataaaccggtaaaggtgttcgcgataaaggtaaatatcga

SEQ ID NO: 708719 - DNA, 75 bp, synthetic construct
  source 1..75: mol_type = other DNA
cccgatgttaagtctgaattttgtctgggtgacgctggctgcagtaaaactgtggcacgagccggtatcgctgcg

SEQ ID NO: 708720 - DNA, 75 bp, synthetic construct
  source 1..75: mol_type = other DNA
gtggctaacctgcaacttgccgtcaaaggtgaatacttcgatgccattattcgcggagagaaaactgaagagtat

SEQ ID NO: 708721 - DNA, 75 bp, synthetic construct
  source 1..75: mol_type = other DNA
accggattaattctggatacaattgtctatcccgacactattaccagctatgtttcaacgatcagaacaaccaca

SEQ ID NO: 708722 - DNA, 75 bp, synthetic construct
  source 1..75: mol_type = other DNA
atcacacatccgcactttggcgataaaccggtaacggtgttcgctcttaaggtaaataccagcactgaatgtcaa

SEQ ID NO: 708723 - DNA, 75 bp, synthetic construct
  source 1..75: mol_type = other DNA
atcacacatccgcactttggcgataaaccggtaatggtgttcgctcttatggtaaatagcagcactgaatgtcaa

SEQ ID NO: 708724 - DNA, 75 bp, synthetic construct
  source 1..75: mol_type = other DNA
atcacacatccgcactttggcgataaaccggtaaaggtgttcgctcttacggtaaataccagcactgaatgtcaa

SEQ ID NO: 708725 - DNA, 75 bp, synthetic construct
  source 1..75: mol_type = other DNA
gatatgaaatcaagacaatcacacatccgcacttcggcgataaaccggtaaaggtatacgcgataaaggtaaata

SEQ ID NO: 708726 - DNA, 75 bp, synthetic construct
  source 1..75: mol_type = other DNA
atcacacatccgcactttggcgataaaccggtaagggtgttcgctcttatggtaaatatcagcactgaatgtcaa

SEQ ID NO: 708727 - DNA, 75 bp, synthetic construct
  source 1..75: mol_type = other DNA
atcacacatccgcactttggcgataaaccggtaacggtgttcgctcttacggtaaataacagcactgaatgtcaa

SEQ ID NO: 708728 - DNA, 75 bp, synthetic construct
  source 1..75: mol_type = other DNA
aacatctgttgcatgacatgcaccatcgcctgacccccatcgaagcggcgcgctttgggaggagcattgaggatt

SEQ ID NO: 708729 - DNA, 75 bp, synthetic construct
  source 1..75: mol_type = other DNA
ctttaaggcgattcgtgtgcagtgcggtgtgcctgggatgcaaaccacctatggcctggcgaagggcaaagggct

SEQ ID NO: 708730 - DNA, 75 bp, synthetic construct
  source 1..75: mol_type = other DNA
acattatctgtcagcgccacgccatcaacggacccgatcaaaaaattagattacacagcggttactttactgaat

SEQ ID NO: 708731 - DNA, 75 bp, synthetic construct
  source 1..75: mol_type = other DNA
ggccagtttctctaatgaattcgattttgatccgctgcgtggtcccgtaaaagatttcactcagacattaatgga

SEQ ID NO: 708732 - DNA, 75 bp, synthetic construct
  source 1..75: mol_type = other DNA
catgggttattccgaacaaatgcttgaagtcttcccgcacaactggactttcgataacggctatatgcatccggg

SEQ ID NO: 708733 - DNA, 75 bp, synthetic construct
  source 1..75: mol_type = other DNA
tggcgtcgcggcccggtgacgatgtcggccatttcagcggttgatatggcgctgtgggatattaaagccaaagct

SEQ ID NO: 708734 - DNA, 75 bp, synthetic construct
  source 1..75: mol_type = other DNA
atcgaagagcagttaattgactatattcgcacgacgataacccatgcaggcggcattaccgggatgcggcggatt

SEQ ID NO: 708735 - DNA, 75 bp, synthetic construct
  source 1..75: mol_type = other DNA
tgatctgtgggtccccaatttcggtgtccaggagtacatgggttattccgaacaaatgcttgaagtcttcccgca

SEQ ID NO: 708736 - DNA, 75 bp, synthetic construct
  source 1..75: mol_type = other DNA
aacacccattgaggcggcacgttttggcaaaagtattgaagattatcgcctgttctggatgaaagatccgacacc

SEQ ID NO: 708737 - DNA, 75 bp, synthetic construct
  source 1..75: mol_type = other DNA
tcggtacgggttctttaaccggcggcaaaacaaccacaccaaaagatttccagattcgtttacaggactgtaatt

SEQ ID NO: 708738 - DNA, 75 bp, synthetic construct
  source 1..75: mol_type = other DNA
aaactgaaaggcggcaaatcaaccaccccgaaagagttccagatccgcctgcaggactgtgtgtttgatacccag

SEQ ID NO: 708739 - DNA, 75 bp, synthetic construct
  source 1..75: mol_type = other DNA
tcgatgaaaagctggcggcgaaatatccctatgaacctgcttatctaccagtcgcacgtctggaagatggcacgc

SEQ ID NO: 708740 - DNA, 75 bp, synthetic construct
  source 1..75: mol_type = other DNA
gaagactatgcaaagcaccagcagatgggctttaaggcgattcgtgtgcagtgtggtgtaccgggtatgcaaacc

SEQ ID NO: 708741 - DNA, 75 bp, synthetic construct
  source 1..75: mol_type = other DNA
gttataggcacggtctttggcgttgcgacatcactgggttacggtgttttgcaggtgaatgccggtttgaaccat

SEQ ID NO: 708742 - DNA, 75 bp, synthetic construct
  source 1..75: mol_type = other DNA
agaagtctacaagccagattaacaaagcggtattctttacatctgctttgctaattttccttcttgtcgcctttg

SEQ ID NO: 708743 - DNA, 75 bp, synthetic construct
  source 1..75: mol_type = other DNA
cgaaaagaagaaaaatcagcgccaaaaatagcaaatatttacaacgctaagaaggggacaaatttaaccccgctt

SEQ ID NO: 708744 - DNA, 75 bp, synthetic construct
  source 1..75: mol_type = other DNA
tcggcctgatgttctttggcgttgctgaacctgtgatgcattatctttcacctcctgtcggcactccagagaccg

SEQ ID NO: 708745 - DNA, 75 bp, synthetic construct
  source 1..75: mol_type = other DNA
attaaacgatcaggaggaagaacggaagaaaaaacagttcactgccgccaatattaatgatggaataataaatga

SEQ ID NO: 708746 - DNA, 75 bp, synthetic construct
  source 1..75: mol_type = other DNA
aaaattatgatgtaatgggctggaatcaggaacagctgattaatgacatactggaccagtacgaaaaacacctgc

SEQ ID NO: 708747 - DNA, 75 bp, synthetic construct
  source 1..75: mol_type = other DNA
tctacatccttgctgtggccctgattttactgagtgtcacgttcctgggactctcacgctacggtgatatcaagc

SEQ ID NO: 708748 - DNA, 75 bp, synthetic construct
  source 1..75: mol_type = other DNA
acaaaagtggtctgcctatcgaacagctgcttactatagataccagcacttctaaaggtaaatctacccagacgc

SEQ ID NO: 708749 - DNA, 75 bp, synthetic construct
  source 1..75: mol_type = other DNA
gtgaaagcctgagcatggcaaccattgctccaacagcagcacgtaatccaataccatggcaaagacgcttacgca

SEQ ID NO: 708750 - DNA, 75 bp, synthetic construct
  source 1..75: mol_type = other DNA
gaattcgcatcctgtcagaactcaaccttggtctggctgttttactcctgtccctggttttatgtctggggccga

SEQ ID NO: 708751 - DNA, 75 bp, synthetic construct
  source 1..75: mol_type = other DNA
tttaatttcctggagcatttcccgttctcttctgtgctgtcattcattgcaatgaaccgccccgggaatcctgga

SEQ ID NO: 708752 - DNA, 75 bp, synthetic construct
  source 1..75: mol_type = other DNA
aggccatgcggttgatattttcgccgttattggcaccgtctttggcgttgcgacatcgctggggtacggtgtttt

SEQ ID NO: 708753 - DNA, 75 bp, synthetic construct
  source 1..75: mol_type = other DNA
tatttatgaaatcagacttcgcggatataacacgcccacctttgctttgacttcaattgataatgatgagcagct

SEQ ID NO: 708754 - DNA, 75 bp, synthetic construct
  source 1..75: mol_type = other DNA
tccattgtggccctggcccccttccggaaagcctttaagcaggtgatgtcggaggcagaaccacgcaataaacgc

SEQ ID NO: 708755 - DNA, 75 bp, synthetic construct
  source 1..75: mol_type = other DNA
ttccttatcctgacccgatacctggtgattctgttccggttcccgaccccatccctcgtccacaacccatgcccg

SEQ ID NO: 708756 - DNA, 75 bp, synthetic construct
  source 1..75: mol_type = other DNA
ctactaccgacgaacaaggggtaatgacagagacagaatttctattttgtcgtgagggagacttaaatcagggtg

SEQ ID NO: 708757 - DNA, 75 bp, synthetic construct
  source 1..75: mol_type = other DNA
cgacaatgagtagcctagatattgcagagttagttggtagtcgtcacggcaatgttttacgtaccattcgcaata

SEQ ID NO: 708758 - DNA, 75 bp, synthetic construct
  source 1..75: mol_type = other DNA
tgaaagtccaaaggcaaacctgtcgttgcataccgccagagagaggattaaaacagggtatgcaatcgtatgccg

SEQ ID NO: 708759 - DNA, 75 bp, synthetic construct
  source 1..75: mol_type = other DNA
tgcgagacgctccattgtggccctggcccccttccggaaagcctttaagcaggtgatgtcggaggcagaaccacg

SEQ ID NO: 708760 - DNA, 75 bp, synthetic construct
  source 1..75: mol_type = other DNA
gggggaatggctccgattaaaagccgtaagatctgcattattgccgggatgttctgttctgccgcctttacgctg

SEQ ID NO: 708761 - DNA, 75 bp, synthetic construct
  source 1..75: mol_type = other DNA
ctaatcatctgcggttgcgtcaccgcggcgggtgcactggcgtacatcttcctggttcgtcagccgatcaacgac

SEQ ID NO: 708762 - DNA, 75 bp, synthetic construct
  source 1..75: mol_type = other DNA
ctaacaaaacgtgtcctcctaatcattctgggtgcaaaggttaagttaattcctatgaatgaaattcatgaaaca

SEQ ID NO: 708763 - DNA, 75 bp, synthetic construct
  source 1..75: mol_type = other DNA
aaagtggcgctggcattaatcagcagatcgtaaaagatactgcaacctccaaaggcaaaccgaaacaaactttaa

SEQ ID NO: 708764 - DNA, 75 bp, synthetic construct
  source 1..75: mol_type = other DNA
ccagggttggccgtcgcgcgcaatattcgacaaaagctgtgaggtgggcacatctgactgcccggtctatctgag

SEQ ID NO: 708765 - DNA, 75 bp, synthetic construct
  source 1..75: mol_type = other DNA
ttgcgccgatcattactggttttattgttgataccacccactcattccgtctggcactaatcatctgcggttgcg

SEQ ID NO: 708766 - DNA, 75 bp, synthetic construct
  source 1..75: mol_type = other DNA
atgttgcaacattattcagcgtcatggaaaaaaggactggctgcactgtgtttactggcagccgcagggcttagt

SEQ ID NO: 708767 - DNA, 75 bp, synthetic construct
  source 1..75: mol_type = other DNA
ttcgtgctggtcttaaaatcatgttagacggcgaaccttacgcggttgaagcgagtgaattcgtaaaaccgggta

SEQ ID NO: 708768 - DNA, 75 bp, synthetic construct
  source 1..75: mol_type = other DNA
aaccgaagcggaatatcgcaaccgcattcgtcaggatgccgtaaaaatgaccgaaaagttgaaagcaaatgctgg

SEQ ID NO: 708769 - DNA, 75 bp, synthetic construct
  source 1..75: mol_type = other DNA
gtgttgcatggcaattaaagactcgtgccggagtggccgtttacgcctggatgccggtattgagttgggatttag

SEQ ID NO: 708770 - DNA, 75 bp, synthetic construct
  source 1..75: mol_type = other DNA
ttttgccgggatgccgggagcgcaggccacggcgcgacaagggtggcgcgaccggaacggtcgctgcaagcccgg

SEQ ID NO: 708771 - DNA, 75 bp, synthetic construct
  source 1..75: mol_type = other DNA
ggcaaaccagctaccctgtctactggcgctgtggttaaagttccgctgttcgtgcagatcggcgaagtcatcaaa

SEQ ID NO: 708772 - DNA, 75 bp, synthetic construct
  source 1..75: mol_type = other DNA
ccgctgttcgtacaaatcggcgaagtcatcaaagtggatacccgctctggtgaatacgtctctcgcgtgaagtaa

SEQ ID NO: 708773 - DNA, 75 bp, synthetic construct
  source 1..75: mol_type = other DNA
cggctgcgatcaaaaagagaatgcggcggcaaaagtggaatacgacggactttcgaacagccaaccgctgcgcgt

SEQ ID NO: 708774 - DNA, 75 bp, synthetic construct
  source 1..75: mol_type = other DNA
taaagaaacgactcatgtcacaggcagcaaactggatatttcggtcaactggcaagggcggcaaaagcgtattcc

SEQ ID NO: 708775 - DNA, 75 bp, synthetic construct
  source 1..75: mol_type = other DNA
tgccgacccgaaagcgttatatgaagcgctaaaacaggcgggcggtacgccgggcgaaaatatgaccatggagaa

SEQ ID NO: 708776 - DNA, 75 bp, synthetic construct
  source 1..75: mol_type = other DNA
caacatcatcagtaacagacaaatgaccgttctgaaaagacagaagcccacagcagaacgtccgcgtaataaaag

SEQ ID NO: 708777 - DNA, 75 bp, synthetic construct
  source 1..75: mol_type = other DNA
ccttttgccgggatgccaggagcgcaggtcacggcgcaacagaggcggcgcgaccggaacggtcgctgcaagcca

SEQ ID NO: 708778 - DNA, 75 bp, synthetic construct
  source 1..75: mol_type = other DNA
tgtatcagcccccggcgacaggggcttaaacaggtgtatggcaccggacacaacaacgggcaggcacccgccgca

SEQ ID NO: 708779 - DNA, 75 bp, synthetic construct
  source 1..75: mol_type = other DNA
catcatgatcacgcccggtatttccgtttccggcaagctggtactcctcgaacctaaagatgacgcagcgccgca

SEQ ID NO: 708780 - DNA, 75 bp, synthetic construct
  source 1..75: mol_type = other DNA
atcagcctgcggaagttggtccagaagcaccagtgatggttagaaaaattggtgcaggttttcagtggtacgggg

SEQ ID NO: 708781 - DNA, 75 bp, synthetic construct
  source 1..75: mol_type = other DNA
atcgggccagttgtgagcaaaagcctggtgattacggtttgtggtcgatacccgatgatgccgactggaaacctc

SEQ ID NO: 708782 - DNA, 75 bp, synthetic construct
  source 1..75: mol_type = other DNA
ctactggaataagcgaattatgttccgggagtatgaccgcctgattatcacaaagggatatccgaagcgcgacga

SEQ ID NO: 708783 - DNA, 75 bp, synthetic construct
  source 1..75: mol_type = other DNA
gcaagcatgactagtggtgattcacgcatattgctcacttcaattccgtcaccagaggaaataggatttttttat

SEQ ID NO: 708784 - DNA, 75 bp, synthetic construct
  source 1..75: mol_type = other DNA
ggaaacactgctggatatcatgcaaaaagagcagtgtgacctccttgtttgcggtcatcaccactcatttatcaa

SEQ ID NO: 708785 - DNA, 75 bp, synthetic construct
  source 1..75: mol_type = other DNA
taacaagctgtataaactgacgaaaaatattcaatggccgaagacaaaactgcgtattgaacgcggagaaatgcc

SEQ ID NO: 708786 - DNA, 75 bp, synthetic construct
  source 1..75: mol_type = other DNA
ccgaagcgcgacgactccagtcgcagaattgatgttccgtatggaggatatgaaatcaagacaatcacacatcca

SEQ ID NO: 708787 - DNA, 75 bp, synthetic construct
  source 1..75: mol_type = other DNA
cgagcctgcttagcgttgccgggcaactctgccagaaacaggcgactcgctttgtggcgataagtaaacggcgcc

SEQ ID NO: 708788 - DNA, 75 bp, synthetic construct
  source 1..75: mol_type = other DNA
tgtggcacgaaccggtatcgccgcgtcactggtgtggggtggcgttcattattggcggcattgtgatcctcggga

SEQ ID NO: 708789 - DNA, 75 bp, synthetic construct
  source 1..75: mol_type = other DNA
ccgaagcgcgacgattccagccgcagagttgatgttccgtatgacggatatgaagtgaagacaatcacacatccg

SEQ ID NO: 708790 - DNA, 75 bp, synthetic construct
  source 1..75: mol_type = other DNA
aaggtgaatacttcgatgccatgattcgtggagagaaaacagaagaatatcgcctgtgtaatgactactggaata

SEQ ID NO: 708791 - DNA, 75 bp, synthetic construct
  source 1..75: mol_type = other DNA
acaatcacacatccacacttcggtgataaaccggtaaaggtgttcgcgataaaggtgaatatcggcaatgaataa

SEQ ID NO: 708792 - DNA, 75 bp, synthetic construct
  source 1..75: mol_type = other DNA
aggtgactgatgtgaatgccaaattactgccatgtttgctcgcgataacgcttacaggatgtgaccgcacagaag

SEQ ID NO: 708793 - DNA, 75 bp, synthetic construct
  source 1..75: mol_type = other DNA
cttacgggtcagcttactgggaagccacgaagccttacaggacaggtttttatgtccctggctcatccccttcaa

SEQ ID NO: 708794 - DNA, 75 bp, synthetic construct
  source 1..75: mol_type = other DNA
aggcgtaaacggcgaaaaggcttctggtctggttggccgtgtggcaagcgcatcggaggggtcagtgtcagtatc

SEQ ID NO: 708795 - DNA, 75 bp, synthetic construct
  source 1..75: mol_type = other DNA
cgctcaatgctgctgaatatgctggttgcccatatcgcctgtttgtattcaggagcgaatgggcagtctccatcc

SEQ ID NO: 708796 - DNA, 75 bp, synthetic construct
  source 1..75: mol_type = other DNA
actatgcaaagcaccagcagatgggctttaaggcgattcgtgtgcagtgcggtgtaccgggtatgcaaactactt

SEQ ID NO: 708797 - DNA, 75 bp, synthetic construct
  source 1..75: mol_type = other DNA
cgattgcggtcggtgaagtgtttaacagtatctgggactgcaagcagttaatcgaagagcagctgattgactata

SEQ ID NO: 708798 - DNA, 75 bp, synthetic construct
  source 1..75: mol_type = other DNA
cacgaagccttacaggacaggtttttatgtccctggctcatccccttcaatgtacccgggccattataaccgtcg

SEQ ID NO: 708799 - DNA, 75 bp, synthetic construct
  source 1..75: mol_type = other DNA
gaaagaaattattaaggctattaaaaaactatttggattccttgaacagtgtgaaaggaataatgcgccaggtga

SEQ ID NO: 708800 - DNA, 75 bp, synthetic construct
  source 1..75: mol_type = other DNA
cacggataaaggttctaaagataagtccgtagttactgaattatggaaatttgaggacaaggatcgctttgcaag

SEQ ID NO: 708801 - DNA, 75 bp, synthetic construct
  source 1..75: mol_type = other DNA
atgtcgaatgagaaaagaaaaaccattggtagacagttaaatactcaggcgttaatggtcgagatgactgacacc

SEQ ID NO: 708802 - DNA, 75 bp, synthetic construct
  source 1..75: mol_type = other DNA
tgcactctttgtttagttttgatatctatcctggtgcatcatcagaacagaatactggagttaagttggctatgg

SEQ ID NO: 708803 - DNA, 75 bp, synthetic construct
  source 1..75: mol_type = other DNA
atgtctcagcaatttaaagatatttttactggtggtctggtaagtctgttctatcacgcggataccactaatacc

SEQ ID NO: 708804 - DNA, 75 bp, synthetic construct
  source 1..75: mol_type = other DNA
atgccgttaaagtgccctaagtgcggtagtcggaatacagtcacagaaactgccggaaagatagcagaagtgact

SEQ ID NO: 708805 - DNA, 75 bp, synthetic construct
  source 1..75: mol_type = other DNA
ccgcgtgcaaactcaggagcacgccatttacccactggtgattagctggtttgtcgatggtcgcctgaaaatgaa

SEQ ID NO: 708806 - DNA, 75 bp, synthetic construct
  source 1..75: mol_type = other DNA
ggaatgaaaaatgttcatcccgcaatctcgtgcttcattctgataacggaggaccaatgcgcagttgtacgttac

SEQ ID NO: 708807 - DNA, 75 bp, synthetic construct
  source 1..75: mol_type = other DNA
gttggttaagcaggttcacgcgatggtacaacctggaacacaagcacagcggtattaagtatgttactccggatg

SEQ ID NO: 708808 - DNA, 75 bp, synthetic construct
  source 1..75: mol_type = other DNA
aatcagcatcatgccagcgatagtgaaactggcgaggcgtcagatcccttaattaaggcgaacggtcatcataat

SEQ ID NO: 708809 - DNA, 75 bp, synthetic construct
  source 1..75: mol_type = other DNA
tctgctgattaatatcggctatggcgatagcagcaaactttttgcgcgcctgccacgtctgtcctttgaagaagc

SEQ ID NO: 708810 - DNA, 75 bp, synthetic construct
  source 1..75: mol_type = other DNA
tggcaaaaatgtacgctcttggcgtattaagttcttattcccgtcccctggtcagcaatgataacccttattccg

SEQ ID NO: 708811 - DNA, 75 bp, synthetic construct
  source 1..75: mol_type = other DNA
gcggaagaagtgttgcgtatgctgcgcgatacgtcggaaaaagcgcgagaagaactcaacgaaattcgtgaaagc

SEQ ID NO: 708812 - DNA, 75 bp, synthetic construct
  source 1..75: mol_type = other DNA
caaaaggggatgataagtttatcaccaccgactatttgcaacagtgcctgaataaatcgctcatcattttcggca

SEQ ID NO: 708813 - DNA, 75 bp, synthetic construct
  source 1..75: mol_type = other DNA
cgggacactgcatgactatgtgccgttttattttacccccttctcgccaatgctgatgaacatccacagcgggcg

SEQ ID NO: 708814 - DNA, 75 bp, synthetic construct
  source 1..75: mol_type = other DNA
tgaatattgcgtttgtgggtattaccttctggctcattccggaaaccaagaatgtcacgctggagcatatcgaac

SEQ ID NO: 708815 - DNA, 75 bp, synthetic construct
  source 1..75: mol_type = other DNA
tggcgttaggcactctggtgctgggctattgcctgatgcagtttgataacggtacggcttccagtggcttgtcct

SEQ ID NO: 708816 - DNA, 75 bp, synthetic construct
  source 1..75: mol_type = other DNA
catgacggcggcgatgttcagcagcaccttcgaaaaactctgcgatggctttggcgcgactgatggcgagctgac

SEQ ID NO: 708817 - DNA, 75 bp, synthetic construct
  source 1..75: mol_type = other DNA
tggcatcacaatggtatttattgcgccctcgccctctgttcaggataaaccagccagcactgacaataccaacat

SEQ ID NO: 708818 - DNA, 75 bp, synthetic construct
  source 1..75: mol_type = other DNA
aaaactggatgctccgctgatcgtcgtagcaactcagggcggtaaatctgctcgtgcagtgcgtaaatacttccc

SEQ ID NO: 708819 - DNA, 75 bp, synthetic construct
  source 1..75: mol_type = other DNA
aaatcaatttatttaacctgatacaaacaataatttttgaaacaaagcaccaatatgttatcaatttaatgcttg

SEQ ID NO: 708820 - DNA, 75 bp, synthetic construct
  source 1..75: mol_type = other DNA
cgttaacaacgcccgctaccttgagtttctcgaagaagcccgctgggatgggctggaaaatagcgacagctttca

SEQ ID NO: 708821 - DNA, 75 bp, synthetic construct
  source 1..75: mol_type = other DNA
gtggtcaatatcaatattaactatcgtcgcccagcggtattaagcgacctgttaactattaccagtcagttgcag

SEQ ID NO: 708822 - DNA, 75 bp, synthetic construct
  source 1..75: mol_type = other DNA
atcaaagcgttatggctttgccgctggggcaatggcttgttgaaagcgccggacacgctgaatcatcaatttact

SEQ ID NO: 708823 - DNA, 75 bp, synthetic construct
  source 1..75: mol_type = other DNA
tggaaatcagtctgccgctggttgatcccatcaccctggttgaggatgaaaacggccccatccccagaggcggga

SEQ ID NO: 708824 - DNA, 75 bp, synthetic construct
  source 1..75: mol_type = other DNA
gacatggatgacataacgctccttccgtttacgaagtcgctggggcacgggcagttatgtacgcaggtccgaaaa

SEQ ID NO: 708825 - DNA, 75 bp, synthetic construct
  source 1..75: mol_type = other DNA
ggacgatttgctttacctgccgcagcttaacaagcaccagatacagacgctggccaccatgacggcggcgatgtt

SEQ ID NO: 708826 - DNA, 75 bp, synthetic construct
  source 1..75: mol_type = other DNA
tcactggatgccgctaccggaaccgccgcaggaggtgaagtgatgaacaacttaatgatcgaccttgagacgatg

SEQ ID NO: 708827 - DNA, 75 bp, synthetic construct
  source 1..75: mol_type = other DNA
cgcacgatcgttacgcttgggcgttccatcggattcgaccccaaaatggacatgcctttcgatggcgaacggcac

SEQ ID NO: 708828 - DNA, 75 bp, synthetic construct
  source 1..75: mol_type = other DNA
atgaacaacttaatgatcgaccttgagacgatggggaaaaataaggatgcgccgatcgtttctattggcgcagtg

SEQ ID NO: 708829 - DNA, 75 bp, synthetic construct
  source 1..75: mol_type = other DNA
gtctgatgcggtaactgccggattacgcggacaaaaaccgggggaaggctacaatattcagcaaatgctcgagat

SEQ ID NO: 708830 - DNA, 75 bp, synthetic construct
  source 1..75: mol_type = other DNA
tgttcatcgacttcggttacggaaccggtttgaagtcaatcggtgatggctggggacgtacatggcaacttgttc

SEQ ID NO: 708831 - DNA, 75 bp, synthetic construct
  source 1..75: mol_type = other DNA
cagcattcatctcaatgctgatcaactggggcatgtccacttgcgaggattgtaaggtcgtggtgaccgccaaca

SEQ ID NO: 708832 - DNA, 75 bp, synthetic construct
  source 1..75: mol_type = other DNA
aagagcagttaatcgaggatattgcagggttcactcacgatccgcttggctatgccctctatgcgttcccgtggg

SEQ ID NO: 708833 - DNA, 75 bp, synthetic construct
  source 1..75: mol_type = other DNA
ctgggggaaatcccctggctccaggaaaatccagaaagtgcgctaaccggaaaatatataaatctcacatcactg

SEQ ID NO: 708834 - DNA, 75 bp, synthetic construct
  source 1..75: mol_type = other DNA
ctgggggaaattccctggcttcaggaaaatccagaaagtgcgctaaccggaaaatatataaatctcacatcgctg

SEQ ID NO: 708835 - DNA, 75 bp, synthetic construct
  source 1..75: mol_type = other DNA
gtcgaagcgcctgcgacttcccgggcagcagaaccagcaaggcaaggccatcacagattatgacccgtatgctta

SEQ ID NO: 708836 - DNA, 75 bp, synthetic construct
  source 1..75: mol_type = other DNA
ctccccgatattctgcgcttgctttccccggaatacgcatcggaaattgtacatagcaccgtcctacccgatctg

SEQ ID NO: 708837 - DNA, 75 bp, synthetic construct
  source 1..75: mol_type = other DNA
ctcgaaacgcataaatatacctggacagcaaagccagcagggaagggccataacggattatgacccttatgctta

SEQ ID NO: 708838 - DNA, 75 bp, synthetic construct
  source 1..75: mol_type = other DNA
aaccaccggtatgaaccagattggtgcgcactatgaaggccacaagattattgagattggtgccgttgaagtggt

SEQ ID NO: 708839 - DNA, 75 bp, synthetic construct
  source 1..75: mol_type = other DNA
tcctggacgccaccggcgaaggggaaaccgcctggcctgccgaaaagacgcccccagatatcctgcacctgctat

SEQ ID NO: 708840 - DNA, 75 bp, synthetic construct
  source 1..75: mol_type = other DNA
gtatgcgtctgaatgaaggcgacctgatagaatgggggttatcttcatggtgccttgtgcatggcaatccatcat

SEQ ID NO: 708841 - DNA, 75 bp, synthetic construct
  source 1..75: mol_type = other DNA
tttgcgcatgctggagcagggctttgaacgtgagattgtgctggcgacaacccaactcactgatgctgatattcc

SEQ ID NO: 708842 - DNA, 75 bp, synthetic construct
  source 1..75: mol_type = other DNA
tacagcgcaacagcagcctgcagctggattacgcaacggtaaatccttacaccttcgcagaacccacctcaccgc

SEQ ID NO: 708843 - DNA, 75 bp, synthetic construct
  source 1..75: mol_type = other DNA
tggcggcaataaagggattgatatctcagctccacgaggtacacctatttacgccgcgggtgcaggaaaggtggt

SEQ ID NO: 708844 - DNA, 75 bp, synthetic construct
  source 1..75: mol_type = other DNA
tcgatctgattgagattttattttatctgaagaaaaagattcgtgttatcctttttattatggctatatgtatag

SEQ ID NO: 708845 - DNA, 75 bp, synthetic construct
  source 1..75: mol_type = other DNA
cctctatctcgatagatttgaacaggcgcttccatatgagatacaggacctcaccgatcagcctgtagctattga

SEQ ID NO: 708846 - DNA, 75 bp, synthetic construct
  source 1..75: mol_type = other DNA
atgcggtcacagcatctgcgtctgttcctgatgtctgatgcggtcacagccgggttgcgcgggcaaaaaccaggg

SEQ ID NO: 708847 - DNA, 75 bp, synthetic construct
  source 1..75: mol_type = other DNA
acccgtccggtgaagtcacacccagtaaggcagaccggcttatcaccgaacgtctggtacaggctctgggcctgg

SEQ ID NO: 708848 - DNA, 75 bp, synthetic construct
  source 1..75: mol_type = other DNA
gatgttgatattccgttacaattaaaggggatttctgtggatcagttaggctttgtacgtatccacgacattcaa

SEQ ID NO: 708849 - DNA, 75 bp, synthetic construct
  source 1..75: mol_type = other DNA
acggaagcaagtaagctttacagactcgttcataaaacgctgtgtaaggaatatggtgtattctctctcaaacag

SEQ ID NO: 708850 - DNA, 75 bp, synthetic construct
  source 1..75: mol_type = other DNA
tacagcgcaacagcagcctgcagctggattacgcaacagtaaatccttacaccttcgcagaacccacctcgccgc

SEQ ID NO: 708851 - DNA, 75 bp, synthetic construct
  source 1..75: mol_type = other DNA
ggacggacaccgaagtggggaaaactgttgccagttgtgcgcttttacaggccgctaaggctgcaggctaccgga

SEQ ID NO: 708852 - DNA, 75 bp, synthetic construct
  source 1..75: mol_type = other DNA
ggggcatgtgagctttagagatgtttttgacgcctatgagtgcgaagaattatccgaacaagaacaacaggtttg

SEQ ID NO: 708853 - DNA, 75 bp, synthetic construct
  source 1..75: mol_type = other DNA
ttgtcgaaaaggaaatcgatggtctcattgcacgcctgttggctccccgaagacaggatgatgatcggcacattc

SEQ ID NO: 708854 - DNA, 75 bp, synthetic construct
  source 1..75: mol_type = other DNA
atgtcgctagggtttttggagcaggctcgtaatgaatcaatggcacgtcgtgagctgtctattcagtctcacgcc

SEQ ID NO: 708855 - DNA, 75 bp, synthetic construct
  source 1..75: mol_type = other DNA
ttgctttacctgccgcagctcaacaaacaccagatacagacgctggccaccatgacggcggcgatgttcagcagc

SEQ ID NO: 708856 - DNA, 75 bp, synthetic construct
  source 1..75: mol_type = other DNA
gcgttatcgccagcagcccgccagcaattagcggtcttggtagttctgcgggttttgatatggagttgcaggacc

SEQ ID NO: 708857 - DNA, 75 bp, synthetic construct
  source 1..75: mol_type = other DNA
gcgaacgcgacagtaagaccggcacctcgtttgccattatcgagcgtgcaacaaaggcgtttaacaagattaaag

SEQ ID NO: 708858 - DNA, 75 bp, synthetic construct
  source 1..75: mol_type = other DNA
atgggaatgattggctattttgcagaaattgactcagaaaagattaaccaacttcttgagtctactcaaaaacct

SEQ ID NO: 708859 - DNA, 75 bp, synthetic construct
  source 1..75: mol_type = other DNA
atgatgaaatcactggttgcaggaaaaacggttaccgtcacatattttcagcgagatcgctatggtcgtattctc

SEQ ID NO: 708860 - DNA, 75 bp, synthetic construct
  source 1..75: mol_type = other DNA
ctggctgacaccgggttatcgctcccttgccggacgcgaacgcctggacgatttgctttacctgccgcagctcaa

SEQ ID NO: 708861 - DNA, 75 bp, synthetic construct
  source 1..75: mol_type = other DNA
tgcaaattaaagatgtcgatttaacacaatatgcggataagttaattgcacgttttgctaatccggcgctgaaac

SEQ ID NO: 708862 - DNA, 75 bp, synthetic construct
  source 1..75: mol_type = other DNA
tgtgcaggccatcgaacaagcctggcaacaaatcgcacaattcggcgcgcatcaggcgctattaaacaccctcaa

SEQ ID NO: 708863 - DNA, 75 bp, synthetic construct
  source 1..75: mol_type = other DNA
gccctgatatttatcctaacccaaccgacggtttacctgttggattcaaggttaacacatcaaatgcaccggagt

SEQ ID NO: 708864 - DNA, 75 bp, synthetic construct
  source 1..75: mol_type = other DNA
cagcgtaaagctcaggcgctgggcgttgctatcgacgatattaacgacacactgcaaaccgcctggggttcgagc

SEQ ID NO: 708865 - DNA, 75 bp, synthetic construct
  source 1..75: mol_type = other DNA
ttattctttaaatgacttactcgacaattctgtgtttatggtttgtttcttttccttctgggtgataacgattca

SEQ ID NO: 708866 - DNA, 75 bp, synthetic construct
  source 1..75: mol_type = other DNA
taccctatccggctggtcactggttttattctttaaatgacttactcgacaattctgtgtttatggtttgtttct

SEQ ID NO: 708867 - DNA, 75 bp, synthetic construct
  source 1..75: mol_type = other DNA
atgggaatgattggctattttgcggaaatcaattcagaaaagattaaccaactgcttgaatctgctgaaaaaccc

SEQ ID NO: 708868 - DNA, 75 bp, synthetic construct
  source 1..75: mol_type = other DNA
tccgaaccccaaatggaacggggctaccatgcgcgattccagtgattatctggttaacactttttttaaagccgt

SEQ ID NO: 708869 - DNA, 75 bp, synthetic construct
  source 1..75: mol_type = other DNA
aatccaccgtgggtaaaaaactcatggcatcccttgaggaagccggacagcgtgaaaagctggcacagagcatca

SEQ ID NO: 708870 - DNA, 75 bp, synthetic construct
  source 1..75: mol_type = other DNA
atgaaatctctggttgcgggaaaaacggttactgtcacatattttcagcgagatcgttatggtcgtattctcggg

SEQ ID NO: 708871 - DNA, 75 bp, synthetic construct
  source 1..75: mol_type = other DNA
tctggcagatgtccccgcgcataccagctttactaacgcgcaactgctggaaatcatgatggcgcaggattttca

SEQ ID NO: 708872 - DNA, 75 bp, synthetic construct
  source 1..75: mol_type = other DNA
acgttgggatgactggtttgccgatccgattgaccttgccgacgcccgtgaactggtaacagatacgcggcaatt

SEQ ID NO: 708873 - DNA, 75 bp, synthetic construct
  source 1..75: mol_type = other DNA
atgaccctgactgaagccctgggcaatgctgaaggcatcgacatgaccacctccaacgccagcggcatctttgtc

SEQ ID NO: 708874 - DNA, 75 bp, synthetic construct
  source 1..75: mol_type = other DNA
aaattaactcagaaaaggccaacaaattgattgagtctaatgagaaatctttaatggtcgatattcatgaaacga

SEQ ID NO: 708875 - DNA, 75 bp, synthetic construct
  source 1..75: mol_type = other DNA
tttcaggattacgccgactggatattgataaacgctgggattttttacattttggcctgacaggcacctctgctt

SEQ ID NO: 708876 - DNA, 75 bp, synthetic construct
  source 1..75: mol_type = other DNA
tccttggattgacgtggaatcaggagttagccgccaccatcgaacgcctggaggcacttgaccggaatgtgctgc

SEQ ID NO: 708877 - DNA, 75 bp, synthetic construct
  source 1..75: mol_type = other DNA
atggccggtattgtctgcagatattcatggacgggttgttcgtgtactggacggtgataccatcgaggtaatgga

SEQ ID NO: 708878 - DNA, 75 bp, synthetic construct
  source 1..75: mol_type = other DNA
tgttcttcccgtcctgcagggagaagctcgacagcagaaacgtggtctgtgggcagacagcgctcctgttccgcc

SEQ ID NO: 708879 - DNA, 75 bp, synthetic construct
  source 1..75: mol_type = other DNA
cagaacgaagccagacaacaaaaacgtgggctctggtcagatgctgatccggttcccccctggatatggaggcac

SEQ ID NO: 708880 - DNA, 75 bp, synthetic construct
  source 1..75: mol_type = other DNA
cacggcttgcagttaaacagccgcgaattgccggatcatctgccgctgtatctggagtacctggcgcagctgccg

SEQ ID NO: 708881 - DNA, 75 bp, synthetic construct
  source 1..75: mol_type = other DNA
cttcaacatgcccatcctctataacgcgcgccgccaccataaagaagcagaagaacgcttcaacgcccgctactg

SEQ ID NO: 708882 - DNA, 75 bp, synthetic construct
  source 1..75: mol_type = other DNA
cgttcaccataaaacactgggcattgtcgggatgggacggatcggtatggcgctggcacaacgtgcgcactttgg

SEQ ID NO: 708883 - DNA, 75 bp, synthetic construct
  source 1..75: mol_type = other DNA
ctatttgattcgccgctacatcgacagcgtgccgtggggtaattgtgtcgataaacgtatctggagcatcttttg

SEQ ID NO: 708884 - DNA, 75 bp, synthetic construct
  source 1..75: mol_type = other DNA
gacgcgttatggcatggctgcctgtgccgtggataatttgattaatgcgttgcagaggaaggttgagaagaactg

SEQ ID NO: 708885 - DNA, 75 bp, synthetic construct
  source 1..75: mol_type = other DNA
ggctggatgtattcgaacaagagccactggccgtagattctccgttgctctcaatggccaacgtcgtcgccgtac

SEQ ID NO: 708886 - DNA, 75 bp, synthetic construct
  source 1..75: mol_type = other DNA
cagaatggagaaattcatgccgccggactggatgtttttgaacaggagccgctaccaattgattctccattgctc

SEQ ID NO: 708887 - DNA, 75 bp, synthetic construct
  source 1..75: mol_type = other DNA
caccaacccggatactcacgggcgcggtttttatccggcctgtggcgcgttgtgtgcagggattgagaaaatctc

SEQ ID NO: 708888 - DNA, 75 bp, synthetic construct
  source 1..75: mol_type = other DNA
tcgctcgacgatatcgacagtatgccgttccgcccaagttggatttacccatcggtcgctgaaatcgacgttatc

SEQ ID NO: 708889 - DNA, 75 bp, synthetic construct
  source 1..75: mol_type = other DNA
gatgcgctcatcacctttgtttgtattgatctcaaaacgcagaaagcattagccctggaaggggaactgcgcgaa

SEQ ID NO: 708890 - DNA, 75 bp, synthetic construct
  source 1..75: mol_type = other DNA
aacactagtcctttatttttcaaacaatgacattgaatgtttcgtctttgaaagagatattccgagccagtatcg

SEQ ID NO: 708891 - DNA, 75 bp, synthetic construct
  source 1..75: mol_type = other DNA
gtaaccagtgtggggcctgttgtcgtcatgtcaacagggcgggtgaaacgcaatgtctggatcgtggtgacggta

SEQ ID NO: 708892 - DNA, 75 bp, synthetic construct
  source 1..75: mol_type = other DNA
gcggatagtgttcaagcagttatagaccatacccaggctatcagggcccaaagtaataactctgaagctgtcaac

SEQ ID NO: 708893 - DNA, 75 bp, synthetic construct
  source 1..75: mol_type = other DNA
acccgccgacgtttttcccgcgaagtccaggaaaccatcgttcaacgtttgcaacaagaatcctggttcgttggc

SEQ ID NO: 708894 - DNA, 75 bp, synthetic construct
  source 1..75: mol_type = other DNA
tggcgttatccggtaacaatcgaagatgtttctccacgttaccttgaagcgctgatcaattatgaagatcgctgg

SEQ ID NO: 708895 - DNA, 75 bp, synthetic construct
  source 1..75: mol_type = other DNA
caatgacagccgatgcggaagccgctgtcagcgaagccctgcgcgacctggccttctggttgtaccgtcaactgg

SEQ ID NO: 708896 - DNA, 75 bp, synthetic construct
  source 1..75: mol_type = other DNA
catcaacgaatataccttcaccgaagccggtctgcgcgccggctgccccgtcatcgttaaactatcattcaccga

SEQ ID NO: 708897 - DNA, 75 bp, synthetic construct
  source 1..75: mol_type = other DNA
aaattgcgcttacagcctgacgatccgctgcttgaacggcctttaatgtcgtcgggggctgcgtggatcattcgc

SEQ ID NO: 708898 - DNA, 75 bp, synthetic construct
  source 1..75: mol_type = other DNA
gctgtgcaggtgctggaagcctatggaccgaaacggtttgcggcaaagttacgcaatgttggattgccgttatat

SEQ ID NO: 708899 - DNA, 75 bp, synthetic construct
  source 1..75: mol_type = other DNA
gctgtgcaggtgctggaagcctatggaccgaaacggtttgcggcaaaattacgcaatgttggattgccgttgtat

SEQ ID NO: 708900 - DNA, 75 bp, synthetic construct
  source 1..75: mol_type = other DNA
tgtataacttctatcttggctattacgacggtaacccggctaacctgcatccgtatggtcaggtggagatgggta

SEQ ID NO: 708901 - DNA, 75 bp, synthetic construct
  source 1..75: mol_type = other DNA
ctggggcaataagcatatcaatgattatattggtaaatatcgcgatactatcaagtacattcacgaccagaccct

SEQ ID NO: 708902 - DNA, 75 bp, synthetic construct
  source 1..75: mol_type = other DNA
acgggtaatatagccgataatgcgctgaatcagtggctacatcgtatacgtaaaacagatatcattgttctgtct

SEQ ID NO: 708903 - DNA, 75 bp, synthetic construct
  source 1..75: mol_type = other DNA
ctgaactgatgttccgtcacccggaaaacgagtacgactggcagagctcagacgccgctgtggatgaggtcctgc

SEQ ID NO: 708904 - DNA, 75 bp, synthetic construct
  source 1..75: mol_type = other DNA
gtaaagataatgcgatagcgtttcttctacttgttgttatatcaacagttgtgatattcacaccggcattcacca

SEQ ID NO: 708905 - DNA, 75 bp, synthetic construct
  source 1..75: mol_type = other DNA
ggtttctacctgaccggcgcgaaagagctgcgcgaaggggtgcataagttcagccacggcaccaccggttccccg

SEQ ID NO: 708906 - DNA, 75 bp, synthetic construct
  source 1..75: mol_type = other DNA
tttaatctgcggcctgttttcattttttattctgcgtgcattgggcgagctggtattacatcgtccttccagcgg

SEQ ID NO: 708907 - DNA, 75 bp, synthetic construct
  source 1..75: mol_type = other DNA
atcaggccggtcaaagtccttttgtgaccttcttctctaaactcggtgtgccgtacattggtagcatcatgaata

SEQ ID NO: 708908 - DNA, 75 bp, synthetic construct
  source 1..75: mol_type = other DNA
cgcgattggcaccggcttgtttttaggtacaggagcccgactgcaaatggcgggtccagcactggcactggttta

SEQ ID NO: 708909 - DNA, 75 bp, synthetic construct
  source 1..75: mol_type = other DNA
tcaaactggcaacgccagaccctgacatgatggattatggtccggttaaagtctggctggaagtcgtgcagcgcc

SEQ ID NO: 708910 - DNA, 75 bp, synthetic construct
  source 1..75: mol_type = other DNA
gtgttatttggcgtatcggtctgttctatgtgggttcggtggttctgctggtgctattgctgccgtggaatgcat

SEQ ID NO: 708911 - DNA, 75 bp, synthetic construct
  source 1..75: mol_type = other DNA
cgagatggagttctggtttgcgctcattaaagtactcgccattgttactttcctggtggtaggtacggtgtttct

SEQ ID NO: 708912 - DNA, 75 bp, synthetic construct
  source 1..75: mol_type = other DNA
ggcgcacaccgtgaaagtggagatcctgtcaaaccagatcaccgatgcgacagcccctgacagggtcgccaccat

SEQ ID NO: 708913 - DNA, 75 bp, synthetic construct
  source 1..75: mol_type = other DNA
gattgagcgggataaacgcgccacaaaagccggttttgttgttggcggtgtgggtctgctgattgcggtactggc

SEQ ID NO: 708914 - DNA, 75 bp, synthetic construct
  source 1..75: mol_type = other DNA
attcccgctcgtttgagcagcaaatgattgacagggataaacgcgccacaaaggcaggctttctggtcggtggag

SEQ ID NO: 708915 - DNA, 75 bp, synthetic construct
  source 1..75: mol_type = other DNA
aaatccgcgcgagacgcagccgcatttcttcgaatcccgattccctgagctgttaaagctgctcgataccgttca

SEQ ID NO: 708916 - DNA, 75 bp, synthetic construct
  source 1..75: mol_type = other DNA
caccagatggtgaagctggggatcgtcgaacagcgcgaacgatacagccgtaccgcgattaacaacatcaaaaaa

SEQ ID NO: 708917 - DNA, 75 bp, synthetic construct
  source 1..75: mol_type = other DNA
ttgattgaacaacttttcaccgagggtggaattccgcctctggaacaaaatcaaccagttagcgtcattaatggc

SEQ ID NO: 708918 - DNA, 75 bp, synthetic construct
  source 1..75: mol_type = other DNA
cctgttgcctggcgatgtgacgtacctcgacgtgttgaccggtcaggatggtttcaaacctgcatacctggtaaa

SEQ ID NO: 708919 - DNA, 75 bp, synthetic construct
  source 1..75: mol_type = other DNA
tgacgaacgcgttgcgggttggtctggccccctgccctgtctccgtggagtctgttgtcgggaacacgatttttc

SEQ ID NO: 708920 - DNA, 75 bp, synthetic construct
  source 1..75: mol_type = other DNA
gcttaaacacgaattaaagccactggtaatactcgactataacgaccctgaacagcttgagcagggaattaagct

SEQ ID NO: 708921 - DNA, 75 bp, synthetic construct
  source 1..75: mol_type = other DNA
accagactcaatttaaacgggcctatgaactcattaagaattgggggaagaatgaagaaagtattcaccctcaaa

SEQ ID NO: 708922 - DNA, 75 bp, synthetic construct
  source 1..75: mol_type = other DNA
aaactcaacgttgatcaggcgatcgatgcattcgctgatatgtccggagtgtctccaaccgtcattgttccgcag

SEQ ID NO: 708923 - DNA, 75 bp, synthetic construct
  source 1..75: mol_type = other DNA
ggattcgatgagtttccaattatggctccgcgctgggaagttaatggcgaagatgtttatggatcatcatgcccg

SEQ ID NO: 708924 - DNA, 75 bp, synthetic construct
  source 1..75: mol_type = other DNA
tctatgactgttcgtcagcttgttcaggagttcgggctaaataacgtcagcgaatccgtaaaaagcatgtgggaa

SEQ ID NO: 708925 - DNA, 75 bp, synthetic construct
  source 1..75: mol_type = other DNA
caacccaccgttccacgatggaatgcaaaccagccttgatgctgcgcaaacgttgattcgcggcgcggtacgtca

SEQ ID NO: 708926 - DNA, 75 bp, synthetic construct
  source 1..75: mol_type = other DNA
tgcgatgtctccgcaccggcagtagaagccagtcgcgcgacactttccgctaacggtgttgaaggtgaagtcttt

SEQ ID NO: 708927 - DNA, 75 bp, synthetic construct
  source 1..75: mol_type = other DNA
atgaatctaggcgccgcgctgttccgactggaacgtccgtttgcctatcttgatacggataacgtgtataaagag

SEQ ID NO: 708928 - DNA, 75 bp, synthetic construct
  source 1..75: mol_type = other DNA
ggaaaaacaatctctggaaggaagtctcactgctgttgcttcaggagagggtgtcgttcctgcctcagaactgcc

SEQ ID NO: 708929 - DNA, 75 bp, synthetic construct
  source 1..75: mol_type = other DNA
agatgactggaactttgccggggctggagcttcgtaaacgtaaaactcctcaggaaaaaattggcattattcagc

SEQ ID NO: 708930 - DNA, 75 bp, synthetic construct
  source 1..75: mol_type = other DNA
tgctccttcttgaaaatcaccaggcaaaattaactgaatccccggcgccatggtggaaattctggaaaaaatcct

SEQ ID NO: 708931 - DNA, 75 bp, synthetic construct
  source 1..75: mol_type = other DNA
cggccagtgtctgctactcctggtttggtctacagatggtgaagaaaaccggtcgtagcgatgtaacggcgctgc

SEQ ID NO: 708932 - DNA, 75 bp, synthetic construct
  source 1..75: mol_type = other DNA
gagttttgtgcccgcaattttgcggagacatcaattttggtacgccagcccaacggcggtactcgcaaacttcct

SEQ ID NO: 708933 - DNA, 75 bp, synthetic construct
  source 1..75: mol_type = other DNA
catgaatgcagattaccaaatctcctggctgtaagtaaccacagagaactttacctgactgtggggggcgagttg

SEQ ID NO: 708934 - DNA, 75 bp, synthetic construct
  source 1..75: mol_type = other DNA
agaacatcgtcgacaaaatcgagtatctgaactgctcacgtgaattcttctcccgtaatttcattccgggcactt

SEQ ID NO: 708935 - DNA, 75 bp, synthetic construct
  source 1..75: mol_type = other DNA
tatacgccagacaatgtagatgtgaagtaccgcgtctggaaggcggaagagaaaattgacaacgcggtagttcgc

SEQ ID NO: 708936 - DNA, 75 bp, synthetic construct
  source 1..75: mol_type = other DNA
ccggtctgcatgcggcgggtaaaggcatcaacgtggccaaagtattaaaagacctggggattgatgtcaccgttg

SEQ ID NO: 708937 - DNA, 75 bp, synthetic construct
  source 1..75: mol_type = other DNA
cccctgtacgtctcaccacctattgccgtgagaagccttggtggtgagttattaaaaatcaccaaagaggctgcc

SEQ ID NO: 708938 - DNA, 75 bp, synthetic construct
  source 1..75: mol_type = other DNA
ctgcaatttcgggacgttacactgttccagcaccttataaagcgggtgccgggattggaaccccggaattgatcg

SEQ ID NO: 708939 - DNA, 75 bp, synthetic construct
  source 1..75: mol_type = other DNA
atgacgatgttctgaaaaagattcgcattttggattgttctccagagttttgtgcccgcaattttgcggagacat

SEQ ID NO: 708940 - DNA, 75 bp, synthetic construct
  source 1..75: mol_type = other DNA
aaatctggacaagccagctttatccaatgcttaaggccgttgaatctccgctggctagcaaactgtacgaccgtg

SEQ ID NO: 708941 - DNA, 75 bp, synthetic construct
  source 1..75: mol_type = other DNA
agaaacaaggctggactcttgtaaaccggagcgcaattaaaaatatgactgtggagcaattactaaaaattcatt

SEQ ID NO: 708942 - DNA, 75 bp, synthetic construct
  source 1..75: mol_type = other DNA
taaagaagcctacatcgctgagttcgatcgcatggagaaagaactgcgccagaataacgccccgtctcccgacaa

SEQ ID NO: 708943 - DNA, 75 bp, synthetic construct
  source 1..75: mol_type = other DNA
aagcgcacaaccgcgctcttgcggtttttttgtgtcatgagcagcattacgcccaaattatggtggggcgtgcag

SEQ ID NO: 708944 - DNA, 75 bp, synthetic construct
  source 1..75: mol_type = other DNA
gcttgctaccgaggctgccattatggctacgatcccaacctttgttcaccctgaaatcacgatcatcaatggtcg

SEQ ID NO: 708945 - DNA, 75 bp, synthetic construct
  source 1..75: mol_type = other DNA
gacagacaggcacgtcagcaccgcactgaccgccttgctgtgaacgaccagtggacacgggcgctcgatgccctg

SEQ ID NO: 708946 - DNA, 75 bp, synthetic construct
  source 1..75: mol_type = other DNA
caagatgcaggctggtgtgattctgctggactttatgcgccgggaattaaacctgtctaactcatcagtgcttgg

SEQ ID NO: 708947 - DNA, 75 bp, synthetic construct
  source 1..75: mol_type = other DNA
gtgatccgtactttcgatatggtaaccagcgcgccggaaaagttatccggacaggctgctgacaagatgcaggct

SEQ ID NO: 708948 - DNA, 75 bp, synthetic construct
  source 1..75: mol_type = other DNA
agccacgtctgcggtggcagcaacgccggtgaaaacaacgccctctcccgcgccggtcagccccttccgtaacag

SEQ ID NO: 708949 - DNA, 75 bp, synthetic construct
  source 1..75: mol_type = other DNA
ctacagtcgcgccaacacgccactgatggggacgctgtttgagaaacagtgcatcctcagcgtccgcgaccggaa

SEQ ID NO: 708950 - DNA, 75 bp, synthetic construct
  source 1..75: mol_type = other DNA
actgaaaacgcagccactgcactggtctttgtcgacgggcaaatcagcgaaagcagctcgctcctggcacagaca

SEQ ID NO: 708951 - DNA, 75 bp, synthetic construct
  source 1..75: mol_type = other DNA
gattggcgtcccatgtggtgagttttctgaaaaactgactaccggggctgtcaccatgactactctcccaaccct

SEQ ID NO: 708952 - DNA, 75 bp, synthetic construct
  source 1..75: mol_type = other DNA
actctacgactacatcaacgatggtgtattcgttgccgggctggtggactcggaactgaacgaaaagcataagga

SEQ ID NO: 708953 - DNA, 75 bp, synthetic construct
  source 1..75: mol_type = other DNA
gttgccaacttcttctccaagcgtcatgacgatgtactgaaaaagatccgcacgcttgaatgctccgcatcattc

SEQ ID NO: 708954 - DNA, 75 bp, synthetic construct
  source 1..75: mol_type = other DNA
gaacggggaacgtatgtctgcaaggaactggtgtatgcctatgcaatgtggatcagcccgtcattccatctgaag

SEQ ID NO: 708955 - DNA, 75 bp, synthetic construct
  source 1..75: mol_type = other DNA
aagggcggaatggcggaacatatgtctgtaaggaactggtgtatgcctatgcaatgtggatcagcccgtcattcc

SEQ ID NO: 708956 - DNA, 75 bp, synthetic construct
  source 1..75: mol_type = other DNA
acactgtcgctgagtgcactgctgaagcagtatggtatccgcctgacggctaatcaggcatatcaccagatggcg

SEQ ID NO: 708957 - DNA, 75 bp, synthetic construct
  source 1..75: mol_type = other DNA
atcaggctgtttccagaaacatgctaattaaaggcaggcatattttaaaaataatcaactcatcactaaaaagat

SEQ ID NO: 708958 - DNA, 75 bp, synthetic construct
  source 1..75: mol_type = other DNA
atcattcaactacccctataatacacgatatatcagcagacatattttactcgcagagataaaaaacaaaattta

SEQ ID NO: 708959 - DNA, 75 bp, synthetic construct
  source 1..75: mol_type = other DNA
attagaaaaaacaaaaagaataacaaaatcactttgtggggatacaagctaagagataagcacactggggtatgg

SEQ ID NO: 708960 - DNA, 75 bp, synthetic construct
  source 1..75: mol_type = other DNA
caccgactatttgcaacagtgcctgctgagcttcgtccgcgaaggcgatacagtggtggtgcacagcatggatcg

SEQ ID NO: 708961 - DNA, 75 bp, synthetic construct
  source 1..75: mol_type = other DNA
cttagttatggtgagttcagaagtttacgacatgttagtttatcattagtatatgctttaatttataaccatgat

SEQ ID NO: 708962 - DNA, 75 bp, synthetic construct
  source 1..75: mol_type = other DNA
tcgtattcttatggaagatatggcattattcattgccttggtaaaacagcatcattcaactaccccgataacgta

SEQ ID NO: 708963 - DNA, 75 bp, synthetic construct
  source 1..75: mol_type = other DNA
catgacggaggatgatgcccgtccggaggcactgcgccgttttgagctgatggtggaagaggtggcgcgtaacac

SEQ ID NO: 708964 - DNA, 75 bp, synthetic construct
  source 1..75: mol_type = other DNA
atgataatgaatttcagacacaagggattgcgtgacttgtttcttctcggcaaaacctccggcgttataccgacg

SEQ ID NO: 708965 - DNA, 75 bp, synthetic construct
  source 1..75: mol_type = other DNA
caggtttccgtattttacggggaatgatgttgccagtctggcaaccctgacaaaagttgggcgggatattcttgc

SEQ ID NO: 708966 - DNA, 75 bp, synthetic construct
  source 1..75: mol_type = other DNA
gaagttgcatggataaataataattgccgctcaagtgattcaagcactgatattattatccttccgaggatgata

SEQ ID NO: 708967 - DNA, 75 bp, synthetic construct
  source 1..75: mol_type = other DNA
ctggctgatgctgagcagtcatggagaattgaaacttgtttaaaactttggcagcctactgtttttaatacaccc

SEQ ID NO: 708968 - DNA, 75 bp, synthetic construct
  source 1..75: mol_type = other DNA
gtcagctacgatgttccggggactgctgatcagcccctgttgtattcagccattctccggtcatctgcagcagtt

SEQ ID NO: 708969 - DNA, 75 bp, synthetic construct
  source 1..75: mol_type = other DNA
cagcatgggagtaaaaatcgcctgggcgttcggtacttacctgctcctttcagtcggttataccgccatcaacgt

SEQ ID NO: 708970 - DNA, 75 bp, synthetic construct
  source 1..75: mol_type = other DNA
tggcccgattggtatctggatcggtagcgccatttcggcgctggtttacaccattcatggttatctgggctggct

SEQ ID NO: 708971 - DNA, 75 bp, synthetic construct
  source 1..75: mol_type = other DNA
gaagatgcaactgtcaaagccccgctacgccacaacgcagtagaaatttttgacgaagtgaacaccggcaaaaat

SEQ ID NO: 708972 - DNA, 75 bp, synthetic construct
  source 1..75: mol_type = other DNA
tctcgcgtaaagccattttgcgtccgattggcagccgccatcccaatccaaaagcggcagagctggagctacgcc

SEQ ID NO: 708973 - DNA, 75 bp, synthetic construct
  source 1..75: mol_type = other DNA
gatcccggcgattatcggcggagcgatggtcaaactgctggcaatgatcctcgagatgagcggcgtgctgacaaa

SEQ ID NO: 708974 - DNA, 75 bp, synthetic construct
  source 1..75: mol_type = other DNA
gctttcttcttcctgccgctgatggtcgcggcttctgccgccatcaaatttaaaaccaatatgtcgctggcgatt

SEQ ID NO: 708975 - DNA, 75 bp, synthetic construct
  source 1..75: mol_type = other DNA
aaagaagggatggtcatgccgtcagagatcggcgctaatctgtcgctgggcggttcatcactggcggtggcgtgg

SEQ ID NO: 708976 - DNA, 75 bp, synthetic construct
  source 1..75: mol_type = other DNA
ccgcttttgcaaactcaataaccctatgatgtcacgcattgctaccgacctgcgtcagcgtcatgtacagcctta

SEQ ID NO: 708977 - DNA, 75 bp, synthetic construct
  source 1..75: mol_type = other DNA
atgtggttcctgccttctggcccggcttatcaaacgctgtggctggcggtgatcctcggtaatggcgtgattctt

SEQ ID NO: 708978 - DNA, 75 bp, synthetic construct
  source 1..75: mol_type = other DNA
cctccattatcggctcggtgattgtcagcccgttaacgcggcgtttcgataccgtcaaaatttattactacacca

SEQ ID NO: 708979 - DNA, 75 bp, synthetic construct
  source 1..75: mol_type = other DNA
tcgtcctgcctgtcaggacaccggggagattatgttcttcgttaaagtcggttcccgcttcccactgcttggcga

SEQ ID NO: 708980 - DNA, 75 bp, synthetic construct
  source 1..75: mol_type = other DNA
gagattatgttcttcgttaaagtcggttcccgtttcccgctgcttggcgagctgcaaagcattcttaagcaagct

SEQ ID NO: 708981 - DNA, 75 bp, synthetic construct
  source 1..75: mol_type = other DNA
tctctgcggcgtagcgggatttctggtttcggttggcctgccgtggatggtggatctcttcggtcagggtaatgc

SEQ ID NO: 708982 - DNA, 75 bp, synthetic construct
  source 1..75: mol_type = other DNA
actggcttccgccggatttggcgtcatcgccacctttatcacgctgttttatgacgctaaaaggttgggacggtg

SEQ ID NO: 708983 - DNA, 75 bp, synthetic construct
  source 1..75: mol_type = other DNA
tcgagagaggaattgcttaagagaaagagtttcggttctgttaacgacaacagatatctgaatgcgacgtggcgc

SEQ ID NO: 708984 - DNA, 75 bp, synthetic construct
  source 1..75: mol_type = other DNA
tcgagagaggaattgcttaagagaaattcttttccgtcagtgaatcaaaacaaatatctgaatgcgatgtggcgg

SEQ ID NO: 708985 - DNA, 75 bp, synthetic construct
  source 1..75: mol_type = other DNA
tcgagagaggaattgcttaaaagaaatagtttcggttctgttaatgacaacaaatatctgaatgcgatgttgcgg

SEQ ID NO: 708986 - DNA, 75 bp, synthetic construct
  source 1..75: mol_type = other DNA
atttcggggctgtcgggatcaaagtcccgcatcctgtcatgctgatttccggttccgaaaatatcgtgaaagaaa

SEQ ID NO: 708987 - DNA, 75 bp, synthetic construct
  source 1..75: mol_type = other DNA
actgaatttttgacccgcatgtcaccgttggctccgcgcattggacaatactggctgcaactgcctgccacattc

SEQ ID NO: 708988 - DNA, 75 bp, synthetic construct
  source 1..75: mol_type = other DNA
cttaagagaaagagtttcggttctgttaatgacaacaaatatctgaatgcgatgttgcggagtgggaagaaatga

SEQ ID NO: 708989 - DNA, 75 bp, synthetic construct
  source 1..75: mol_type = other DNA
tacagactgccataatatccgtgattataaaaagggcgttgttccggctcttggggagctttatcaggaagatgt

SEQ ID NO: 708990 - DNA, 75 bp, synthetic construct
  source 1..75: mol_type = other DNA
tgctgaagcagctcgcacagctgaagagtgagcgcacatcgttcgagtcacactggcgtgacctgagcgatttta

SEQ ID NO: 708991 - DNA, 75 bp, synthetic construct
  source 1..75: mol_type = other DNA
tcgccaacgcgtaaagccaatgccatcgagagaggaattacttaagagaaattcttttccttcagtgaatcaaaa

SEQ ID NO: 708992 - DNA, 75 bp, synthetic construct
  source 1..75: mol_type = other DNA
cgatcccattaattaccgggcttgattttggacatgaacaacgcacggtcacactgccgttaggcgctcatgcca

SEQ ID NO: 708993 - DNA, 75 bp, synthetic construct
  source 1..75: mol_type = other DNA
acggagcgtctggaagatattaattcccttgccagactgacttcgcccaacactatcgtgctggcagtacgcggt

SEQ ID NO: 708994 - DNA, 75 bp, synthetic construct
  source 1..75: mol_type = other DNA
cagtatcacaatcttttccggcctctccgactctggttccagtggaacttatcgacaccccgcgctgtgctacag

SEQ ID NO: 708995 - DNA, 75 bp, synthetic construct
  source 1..75: mol_type = other DNA
gtgacaacaggattgcaaattattggtgaggttgatggagatgactggatggtgtcacgaccactacaaaaatac

SEQ ID NO: 708996 - DNA, 75 bp, synthetic construct
  source 1..75: mol_type = other DNA
tcgtggtctcccggttcgcggtcagcgtaccaagaccaacgcacgtacccgtaaggtccgcgcaaaccgatcaag

SEQ ID NO: 708997 - DNA, 75 bp, synthetic construct
  source 1..75: mol_type = other DNA
gttcaggtaacgggctatggcagccgtggcgaacgctggattattgatcgttacaacatcacgcagtcattgcgc

SEQ ID NO: 708998 - DNA, 75 bp, synthetic construct
  source 1..75: mol_type = other DNA
tgtcgtcttcggtttatgcggctgctttttgagcggtctgggatatctgacggcaggattaaccgccagtctgcc

SEQ ID NO: 708999 - DNA, 75 bp, synthetic construct
  source 1..75: mol_type = other DNA
aatcgcgttattgctgacgtggcgattaaaaaaacggcctccggagcaagtaccggaggccgtttcatcatctta

SEQ ID NO: 709000 - DNA, 75 bp, synthetic construct
  source 1..75: mol_type = other DNA
cggaaccggctcgacactgtggggcgttggcgtggttggttcgctgcatatcgggcgagtcatttcctggaacgg

SEQ ID NO: 709001 - DNA, 75 bp, synthetic construct
  source 1..75: mol_type = other DNA
gccctgctacgcttcgattttccagcactcaatgctgaatttgtgcattatcataacaatgcatacaaaagctgg

SEQ ID NO: 709002 - DNA, 75 bp, synthetic construct
  source 1..75: mol_type = other DNA
atctctggtaacagaaaggaggcaagagggggcgacggaaaacgatgctacggtatcgtctgttacttcaatgct

SEQ ID NO: 709003 - DNA, 75 bp, synthetic construct
  source 1..75: mol_type = other DNA
gagggggcgacggaaaacgatgctacggtatcgtctgttacttcaatgctcatagaactcggtctcagagtatac

SEQ ID NO: 709004 - DNA, 75 bp, synthetic construct
  source 1..75: mol_type = other DNA
actggtttacaaattactgactgcagaacaggagtatgaagcgacaggaagcgaagaaacactcagggcggttat

SEQ ID NO: 709005 - DNA, 75 bp, synthetic construct
  source 1..75: mol_type = other DNA
ggctatgtgccagcgcagacgctggacggcagagcagttccgcctgtttctggtggagcatccgctggtacgtca

SEQ ID NO: 709006 - DNA, 75 bp, synthetic construct
  source 1..75: mol_type = other DNA
tggctccagatttagggcttgatagcagtggctcgctgatactggatttcggcccccgcaaattcaccgttggtt

SEQ ID NO: 709007 - DNA, 75 bp, synthetic construct
  source 1..75: mol_type = other DNA
tgaccaaaaagcgatgtaacaccggcttgaaaagcacaaaagccagtctggaaacaggctggcttttttttacgc

SEQ ID NO: 709008 - DNA, 75 bp, synthetic construct
  source 1..75: mol_type = other DNA
attcagggtgtagtgtttgcttttgcctccattgaaatggtgggtacagctgccggagaatgtaaagatccgcag

SEQ ID NO: 709009 - DNA, 75 bp, synthetic construct
  source 1..75: mol_type = other DNA
cgatgggcggttccgcaccgagttttatggcgaaaatgagtcgtcagcatgtgccgtatgccgggattctggcga

SEQ ID NO: 709010 - DNA, 75 bp, synthetic construct
  source 1..75: mol_type = other DNA
tgtttagtgccagtgatagtaatggacgaaaattaaacttccaaataaccagactgtatggaagtttacacacca

SEQ ID NO: 709011 - DNA, 75 bp, synthetic construct
  source 1..75: mol_type = other DNA
gggatgataagtttatcaccaccgactatttgcaacagtgcctctcaaaatcggtggagctgcatgacaaagtca

SEQ ID NO: 709012 - DNA, 75 bp, synthetic construct
  source 1..75: mol_type = other DNA
ctctggtctggtcgagaaaatccaggtaacgggtagcgaaggtgaactgggaatttacccgggccacgcgccgct

SEQ ID NO: 709013 - DNA, 75 bp, synthetic construct
  source 1..75: mol_type = other DNA
aggtacaaatcctggtatactggctacatacggggatggagggatagttaaaacagatgagtcaggcgtaaaggt

SEQ ID NO: 709014 - DNA, 75 bp, synthetic construct
  source 1..75: mol_type = other DNA
cgcattatgggggattagtcagatggaggttaatgctcagctagttgataattttaaggtattatgtacatcata

SEQ ID NO: 709015 - DNA, 75 bp, synthetic construct
  source 1..75: mol_type = other DNA
catcagatactattgatgagattgaaaatattgatggtatagcgatattacattggtttactgggactccaaagc

SEQ ID NO: 709016 - DNA, 75 bp, synthetic construct
  source 1..75: mol_type = other DNA
ccatatatcggcagcattatgaacattgtggtgctgaccgctgccctctccagcctgaactcaggtctgtactgc

SEQ ID NO: 709017 - DNA, 75 bp, synthetic construct
  source 1..75: mol_type = other DNA
aggtacagatgatcgccattggcggcgcgattggcaccggcttgtttttaggcgcgggagcccgactgcaaatgg

SEQ ID NO: 709018 - DNA, 75 bp, synthetic construct
  source 1..75: mol_type = other DNA
attaccgccgtcgctctgtatatgcattactggggcgcgtttggcggagtgccgcagtgggtctttgcgctcgct

SEQ ID NO: 709019 - DNA, 75 bp, synthetic construct
  source 1..75: mol_type = other DNA
atctggcatggtgtgcactggtcgcgctggcactggccagacaggagcagggagaactctctcccgcacaggaaa

SEQ ID NO: 709020 - DNA, 75 bp, synthetic construct
  source 1..75: mol_type = other DNA
tttcgtcagcggaattagctatgctggataaggcatatccggcaccaaaaggaaaaactgcgctggatatggtgt

SEQ ID NO: 709021 - DNA, 75 bp, synthetic construct
  source 1..75: mol_type = other DNA
ctcgattaccacaattgcccggtgaaatggggcaaatcagtcagagtgttaataacctcgcccaggcactggcgt

SEQ ID NO: 709022 - DNA, 75 bp, synthetic construct
  source 1..75: mol_type = other DNA
aaagtgcacagttgacaggaatgactgtaacaatcaaatctattacctgtgattcaggctccggatttgctgaag

SEQ ID NO: 709023 - DNA, 75 bp, synthetic construct
  source 1..75: mol_type = other DNA
tatcgtccggtcaaatcttttgctattcgcattcctgccagttacaccattcatggtattgatgtttcacgctgg

SEQ ID NO: 709024 - DNA, 75 bp, synthetic construct
  source 1..75: mol_type = other DNA
ttctgtcagaggtacctgatactgttgcacgctattttgattatgaggcttttgcgcgcgatttgttcatggaac

SEQ ID NO: 709025 - DNA, 75 bp, synthetic construct
  source 1..75: mol_type = other DNA
catgttcagaaaaaattaaagatttaccctccgatgaatttaataaaattcgacaactatttgtggatagaaaac

SEQ ID NO: 709026 - DNA, 75 bp, synthetic construct
  source 1..75: mol_type = other DNA
aaggcattgatgagttttacgcccagtgcgagaaagtcggcgtcgattcggtgctggttgccgatgtgccagttg

SEQ ID NO: 709027 - DNA, 75 bp, synthetic construct
  source 1..75: mol_type = other DNA
ttagtcgaagcgccgacactgccaccgctggctgcaaactataacaaagaaggttatatcaagcgtctgcccgcc

SEQ ID NO: 709028 - DNA, 75 bp, synthetic construct
  source 1..75: mol_type = other DNA
aaccacaaatcaggggcttgaatccttagtcgaagcgccgacactgccaccgctggctgcaaactataacaagga

SEQ ID NO: 709029 - DNA, 75 bp, synthetic construct
  source 1..75: mol_type = other DNA
ggctgcacaccgtcgggcgcggttcagaacgttctccggtattgctggcgctggattacaacccaactggcgata

SEQ ID NO: 709030 - DNA, 75 bp, synthetic construct
  source 1..75: mol_type = other DNA
ctggcgtctgccgctggcggaattccaccgcagccagctgccgtctaactttgccgaactgaacaataccggaag

SEQ ID NO: 709031 - DNA, 75 bp, synthetic construct
  source 1..75: mol_type = other DNA
agaacgttctccggtattgctggcgctggattacaacccaactggcgataaagaagcgccagtgtacgcgtgcct

SEQ ID NO: 709032 - DNA, 75 bp, synthetic construct
  source 1..75: mol_type = other DNA
atgagcatcgatatgcactgtcatctagacttatatcctcggccagacctcgtggctgaagaaagtaaacgtcga

SEQ ID NO: 709033 - DNA, 75 bp, synthetic construct
  source 1..75: mol_type = other DNA
gcgccggtgtgggacggtaatgaaacctggctggtgctgggcggcgcggggctgtttggggctttcccgatggcc

SEQ ID NO: 709034 - DNA, 75 bp, synthetic construct
  source 1..75: mol_type = other DNA
tgtagccactcttttggttggaacagggaagttttttacactaacggaagtgggggcatgggggcttgaaaacga

SEQ ID NO: 709035 - DNA, 75 bp, synthetic construct
  source 1..75: mol_type = other DNA
ttaccagactgacagaccatcatgatactggccttctgttgctaagactaacgtttggtatattgatgcttttcc

SEQ ID NO: 709036 - DNA, 75 bp, synthetic construct
  source 1..75: mol_type = other DNA
gagtttgccagcaggtgggattttcaccggttgttattcgcgaagttaatgaaccgcaaacggtactcgccatgg

SEQ ID NO: 709037 - DNA, 75 bp, synthetic construct
  source 1..75: mol_type = other DNA
ctgattacgtatacaggttcggccaaaagaaagccgctaaggactttggcgtggcgcagagtgcaatcagtaaag

SEQ ID NO: 709038 - DNA, 75 bp, synthetic construct
  source 1..75: mol_type = other DNA
tccctctgttctgcggattgggactggtactggcctatgccctgctgggttgcacctggctgattatgaaaacag

SEQ ID NO: 709039 - DNA, 75 bp, synthetic construct
  source 1..75: mol_type = other DNA
atggaaacgttattaccaaacgttaatacgtctgaaggctgttttgaaattggtgtcactatcagcaactctgta

SEQ ID NO: 709040 - DNA, 75 bp, synthetic construct
  source 1..75: mol_type = other DNA
ttaacaagagaaaacacgaacgggagttattaaataaaatatgcattctttcaatgctggcccgtttacgtccga

SEQ ID NO: 709041 - DNA, 75 bp, synthetic construct
  source 1..75: mol_type = other DNA
cttccctgcgagccgccgcattatggtgaagaagccacctggggcgggatggtcgcctgcgggctggcggggccg

SEQ ID NO: 709042 - DNA, 75 bp, synthetic construct
  source 1..75: mol_type = other DNA
aaataccaatctccggcggcatcgacgctggtggttatgagagataaaagcatggtgggcgccggttgcgacgca

SEQ ID NO: 709043 - DNA, 75 bp, synthetic construct
  source 1..75: mol_type = other DNA
tgaccgttattcttaatacgggcgaaccagctgaactggttaccggagtatacaactccatgaaagaatgcgtgg

SEQ ID NO: 709044 - DNA, 75 bp, synthetic construct
  source 1..75: mol_type = other DNA
cccagtaaggcagaccggcttatcaccgaacgtctggtacaggcactgggcctggtggatatccgggtgccggac

SEQ ID NO: 709045 - DNA, 75 bp, synthetic construct
  source 1..75: mol_type = other DNA
tcctgttgaggaagcggctgcccaggcgcgaaagtatcagagcgtacaaccgaccgtcgccaaagaagtaagtct

SEQ ID NO: 709046 - DNA, 75 bp, synthetic construct
  source 1..75: mol_type = other DNA
ctgtcgaattacagtatatgctggaaatgtttttccgtgccgatatcgctcttgcgccattgctggatgccatta

SEQ ID NO: 709047 - DNA, 75 bp, synthetic construct
  source 1..75: mol_type = other DNA
gataccgttgggtttattcgccatttgcctcacgatctggtggcggcgtttaaagccacgttgcaagagacgcgg

SEQ ID NO: 709048 - DNA, 75 bp, synthetic construct
  source 1..75: mol_type = other DNA
gtggatcgcgaactggaaagtttgctggtcgcgcaatatcaactaatgcagttgtgcatcaaacatggcgatggc

SEQ ID NO: 709049 - DNA, 75 bp, synthetic construct
  source 1..75: mol_type = other DNA
aggtacagatgatcgccattggcggcgcgattggtacgggtttgtttttaggcgcgggagcgcgactgcaaatgg

SEQ ID NO: 709050 - DNA, 75 bp, synthetic construct
  source 1..75: mol_type = other DNA
attcccgcttatttgctgagcgtattggcataaagcacaaaaacctttattcgctcattcagaagcacaaaaccg

SEQ ID NO: 709051 - DNA, 75 bp, synthetic construct
  source 1..75: mol_type = other DNA
aagaaatcaccttgattctgactgtgctactgggtggtatagttggtgctgggattgtgctggggcgtaattaca

SEQ ID NO: 709052 - DNA, 75 bp, synthetic construct
  source 1..75: mol_type = other DNA
tgtggcagggaaaaaccagaagaaggcgatcgtgatttatcaccattgaagttgctcactttctgcgtactggtg

SEQ ID NO: 709053 - DNA, 75 bp, synthetic construct
  source 1..75: mol_type = other DNA
tcagtcgccattatgggcgcgctgtggcctctgctggtaatgaccgggatgcaccgcgtctttacgccaaccatc

SEQ ID NO: 709054 - DNA, 75 bp, synthetic construct
  source 1..75: mol_type = other DNA
aaccaatgctgattgtgttgattgccgcaccgctggcaatcctgctgattggcccgattggtatctggatcggta

SEQ ID NO: 709055 - DNA, 75 bp, synthetic construct
  source 1..75: mol_type = other DNA
gtaaagagaaccacctcccggcactttatcagcagctgtttttgctgatgaataagttcccaggggatttgccga

SEQ ID NO: 709056 - DNA, 75 bp, synthetic construct
  source 1..75: mol_type = other DNA
atctgggccggtttttgtacctggatatcctcgctggtacgaatagaaaactcgtacgcgtgggggctggccggt

SEQ ID NO: 709057 - DNA, 75 bp, synthetic construct
  source 1..75: mol_type = other DNA
taggccgtcgcgactcgctggcgatttttggtaacgattatccgaccgaagacggtactggcgtgcgcgattaca

SEQ ID NO: 709058 - DNA, 75 bp, synthetic construct
  source 1..75: mol_type = other DNA
ctgtgttgaaagagctttcagaagatgacactcgtcagcaggacgagctgaacgatctggatgattttaaaacgc

SEQ ID NO: 709059 - DNA, 75 bp, synthetic construct
  source 1..75: mol_type = other DNA
tgaaaaccgggtggcaggcgcggcccagttcaaaaatctgccggaggtcggaaagctgaaactcccggcggcgta

SEQ ID NO: 709060 - DNA, 75 bp, synthetic construct
  source 1..75: mol_type = other DNA
tgtctcgggcaactggcggataacgttcgagttcgtcaatggcgatgcatacatactggattacgaggactatca

SEQ ID NO: 709061 - DNA, 75 bp, synthetic construct
  source 1..75: mol_type = other DNA
cttggatggatgccggatccgcagggggggcgagattgtttatgccggtggcaccctgctggatctgaaccgtta

SEQ ID NO: 709062 - DNA, 75 bp, synthetic construct
  source 1..75: mol_type = other DNA
ggaacaggtaaaagcggcgattgaggcaggcgctgcgggggctatttctgggtcagcaattgtgaaaatcattga

SEQ ID NO: 709063 - DNA, 75 bp, synthetic construct
  source 1..75: mol_type = other DNA
tggcgattgatgttgattttatcgatccgggacatggccccgacgggaagcccgagcatcacacagagataactc

SEQ ID NO: 709064 - DNA, 75 bp, synthetic construct
  source 1..75: mol_type = other DNA
ctggcgctggggaaataccctgaagtctcgctggtcgatgccagaggtcgccgggatgaagcccgtaagtgtcac

SEQ ID NO: 709065 - DNA, 75 bp, synthetic construct
  source 1..75: mol_type = other DNA
ttattcgtgacgaggctaacattacgctggttgctgattccccactgcgcgctttactgatagatttacctgtct

SEQ ID NO: 709066 - DNA, 75 bp, synthetic construct
  source 1..75: mol_type = other DNA
cgtgcacgcctcaatctgaagtctcctgtattttcccagaaccagacggtcagacgggcaatggagcagttgcgc

SEQ ID NO: 709067 - DNA, 75 bp, synthetic construct
  source 1..75: mol_type = other DNA
tgacatgaatcataggcactgttgcaaagttagcgatgaggcagccttttgtcttattcaaaggccttacgtttc

SEQ ID NO: 709068 - DNA, 75 bp, synthetic construct
  source 1..75: mol_type = other DNA
ggtattgccctgcaaatcgggtgtgtgcgttttctgggcacttttcttactgacatgaatcataggcactgttgc

SEQ ID NO: 709069 - DNA, 75 bp, synthetic construct
  source 1..75: mol_type = other DNA
tgtatcaggcaactggcgaatcacgtttgagttcgtcaatggcgatgcatacatactggactacgaggactatca

SEQ ID NO: 709070 - DNA, 75 bp, synthetic construct
  source 1..75: mol_type = other DNA
ctggctggttcctgaaggacagtacccggcacgaatggaagccattaagggatatttccccggcgacctcgttcc

SEQ ID NO: 709071 - DNA, 75 bp, synthetic construct
  source 1..75: mol_type = other DNA
ggtaactgaagagcgccgctcaacgggaatttatgcctatctggatatcggttttaactcgttaatttccaatat

SEQ ID NO: 709072 - DNA, 75 bp, synthetic construct
  source 1..75: mol_type = other DNA
ttattattatctcctctgaaatgcctgagttgttagggataacagaccgtattctggtcatgagcaatggtctcg

SEQ ID NO: 709073 - DNA, 75 bp, synthetic construct
  source 1..75: mol_type = other DNA
cagtggattgccaccgaaccgctggcagggctgacaatggacaagatcatcgccatgatggttgggcgctctctt

SEQ ID NO: 709074 - DNA, 75 bp, synthetic construct
  source 1..75: mol_type = other DNA
gggcgtgatgagcgcggtcagtttgcctcgtatgatgtggtggacgatgtccggcagatgctctttaaggccctg

SEQ ID NO: 709075 - DNA, 75 bp, synthetic construct
  source 1..75: mol_type = other DNA
ttacagcgttcggtcatggacaacatgtggttggggcgatatcccaccaaagggatgtttgtcgaccaggataaa

SEQ ID NO: 709076 - DNA, 75 bp, synthetic construct
  source 1..75: mol_type = other DNA
gcgatacccagtgggtgattgattcgatgcgggtaaaaacaccggggcatcggacgcaaattggttcgctctccg

SEQ ID NO: 709077 - DNA, 75 bp, synthetic construct
  source 1..75: mol_type = other DNA
aactatttctgctggtggcatcaccacccagcaagaagaaatcgaccttgaagcagccgacttttcagacgcgct

SEQ ID NO: 709078 - DNA, 75 bp, synthetic construct
  source 1..75: mol_type = other DNA
tgcacaaaatatggacagcgtttggttgccgtctgtggatgatttactggcctgtgactggtttgttgtggagtg

SEQ ID NO: 709079 - DNA, 75 bp, synthetic construct
  source 1..75: mol_type = other DNA
aagaaatcgaccttgaagcagccgacttctctgacgcgctaatgtggttgaaggaaggcaagaaagttgcccgac

SEQ ID NO: 709080 - DNA, 75 bp, synthetic construct
  source 1..75: mol_type = other DNA
ctcggtattgccggtctggtgggggcgaaacgtaccgatattgttgagacgttatttggtattcgcgagaaatcg

SEQ ID NO: 709081 - DNA, 75 bp, synthetic construct
  source 1..75: mol_type = other DNA
caggtgaatacttgttggaaatgagtggtatcaacaagtcttttcctggcgttaaggcgcttgataacgtcaatt

SEQ ID NO: 709082 - DNA, 75 bp, synthetic construct
  source 1..75: mol_type = other DNA
tgtcaacggcgatatatgacgcgccagcgtcttttttatcgtccgcgctcacgcacgccagaattatggtgggct

SEQ ID NO: 709083 - DNA, 75 bp, synthetic construct
  source 1..75: mol_type = other DNA
ggctattaatgccctgaagcgacgggagtccgcccaggcactctacacctttatagagagcctgccccgggatcc

SEQ ID NO: 709084 - DNA, 75 bp, synthetic construct
  source 1..75: mol_type = other DNA
atggcaggactggagcgtgaagaattccgggtgctgtatctgaacaaccagaataagctgattgccggtgaaacc

SEQ ID NO: 709085 - DNA, 75 bp, synthetic construct
  source 1..75: mol_type = other DNA
gtattacatcgcttataaccaggacatgaccgtcgaatacattcaggcgtgtgcgatgtgggcacgggcattcaa

SEQ ID NO: 709086 - DNA, 75 bp, synthetic construct
  source 1..75: mol_type = other DNA
aaaataatatcagtattttggcttgtattacttatcagctcatgcatcagcatacgtaattactcaaaaatatgg

SEQ ID NO: 709087 - DNA, 75 bp, synthetic construct
  source 1..75: mol_type = other DNA
tccacgcatgatggcgacgataacccctttaacgaactgattaacgatatccgcgccgggcgtcgggcgggcagt

SEQ ID NO: 709088 - DNA, 75 bp, synthetic construct
  source 1..75: mol_type = other DNA
tgccggcgcatccgaagagcttgactgtattccggccaacggtggcggtgcctggctgtcccgtgccctgataga

SEQ ID NO: 709089 - DNA, 75 bp, synthetic construct
  source 1..75: mol_type = other DNA
agcaggagcaaatcacctggtatctgatggatggcctgcccggtctgctgggtgcagcgtttgatgcccgtggta

SEQ ID NO: 709090 - DNA, 75 bp, synthetic construct
  source 1..75: mol_type = other DNA
tgagtcaatgctggaagtaacagaagataagcgtcatcctggttgtccggtatttgccggtatggaattaccgga

SEQ ID NO: 709091 - DNA, 75 bp, synthetic construct
  source 1..75: mol_type = other DNA
tcgaaaaacgcacgggaaaaaagccgattatttactcaggagccgttttttatcactcgaatctggcgggctatt

SEQ ID NO: 709092 - DNA, 75 bp, synthetic construct
  source 1..75: mol_type = other DNA
caggagcggatcgactggcagcgggtggcaaaaatgcgcgataacggtattcgcttacaatttgcctttattaag

SEQ ID NO: 709093 - DNA, 75 bp, synthetic construct
  source 1..75: mol_type = other DNA
gttttacttcaaaagagaataatctcagtccatctgaaatgttagtcaatgccgataaagcgttatatcaagcca

SEQ ID NO: 709094 - DNA, 75 bp, synthetic construct
  source 1..75: mol_type = other DNA
cattaaaggtaatactcaaaatctcttgctatcaattgcagagcgaatcagaaaaaacattgaagagcaatgctc

SEQ ID NO: 709095 - DNA, 75 bp, synthetic construct
  source 1..75: mol_type = other DNA
atcaatgacaaatgggggcatcatatgggtgatcaagtcatagtaatggttgccagcataataaaaaaatccatc

SEQ ID NO: 709096 - DNA, 75 bp, synthetic construct
  source 1..75: mol_type = other DNA
tcgtcagaagttgaaaaactaatgatggatctgccttcaacagataatggcagattcagaaggaatgacacaggc

SEQ ID NO: 709097 - DNA, 75 bp, synthetic construct
  source 1..75: mol_type = other DNA
cccgaacggtatcccgaacccgctgctgccggagtgccgccaggacaccgccgacgcggtgcgtgcgcatcaggc

SEQ ID NO: 709098 - DNA, 75 bp, synthetic construct
  source 1..75: mol_type = other DNA
cgccatgcagcgttacggtgccagccgggtaaaacaggtgatgccaaccgaaggctggtaccgtgagcatatgcc

SEQ ID NO: 709099 - DNA, 75 bp, synthetic construct
  source 1..75: mol_type = other DNA
catgcagcgctacggctccggccggattcagcaggtgatgccaaccgaaggctggtaccgggagcatatgcctcc

SEQ ID NO: 709100 - DNA, 75 bp, synthetic construct
  source 1..75: mol_type = other DNA
aaatatagtgtcaagcacgatacggtcgaactgaaagcagatcccaagattttcgaactctaccagttcgacaaa

SEQ ID NO: 709101 - DNA, 75 bp, synthetic construct
  source 1..75: mol_type = other DNA
atcagccagagcaggagacgctctttttaaagcatatcagggacaggaagcagccatgaaaaatgctgcatctca

SEQ ID NO: 709102 - DNA, 75 bp, synthetic construct
  source 1..75: mol_type = other DNA
agtcaatctgaagaactacaaactggtgttgttcatgcagtcacgctgtggttactgccagcagtttgacccgtt

SEQ ID NO: 709103 - DNA, 75 bp, synthetic construct
  source 1..75: mol_type = other DNA
gagaaaaccgccgaagatacaggctgttcttaacacccgatactggaaaaatacagaaaaaacgataaaaagaac

SEQ ID NO: 709104 - DNA, 75 bp, synthetic construct
  source 1..75: mol_type = other DNA
tctctgatgggggattcagaacttcgttatgtgtattcatttcccggtagtttatattcttatcttcttgagaaa

SEQ ID NO: 709105 - DNA, 75 bp, synthetic construct
  source 1..75: mol_type = other DNA
taaattattcatatactctagttccagcctatataaggaaaaaagtctcatctctgatgggggattcagaacttc

SEQ ID NO: 709106 - DNA, 75 bp, synthetic construct
  source 1..75: mol_type = other DNA
acaattttgtcattttcctgtcaccggaaaatcagagcctggcgagtaaagttggcggcataaaatcaccagaaa

SEQ ID NO: 709107 - DNA, 75 bp, synthetic construct
  source 1..75: mol_type = other DNA
agaacgcgttgcgcagtgcctatgacaatgacaccacgtatggctttaaagttatttttccgtcaggcaacggat

SEQ ID NO: 709108 - DNA, 75 bp, synthetic construct
  source 1..75: mol_type = other DNA
ctgcttctcagaatatccctcgtttttttgctgactctgaacctgatactataatttttcctgaaattataagaa

SEQ ID NO: 709109 - DNA, 75 bp, synthetic construct
  source 1..75: mol_type = other DNA
ttaaccggcgcgaaagacccggcacaacgccagattccgctactgaaaaccctggtcgccggcgtgaacgtgccg

SEQ ID NO: 709110 - DNA, 75 bp, synthetic construct
  source 1..75: mol_type = other DNA
cagtaccggtcaggcgagcctggaggtagacgccgctgctcaaaaagtggcaaacggcaaagatgcctttacgct

SEQ ID NO: 709111 - DNA, 75 bp, synthetic construct
  source 1..75: mol_type = other DNA
agttggaccgaaaaaggtgacggttcctatgttgctacgttgactacaggcggaaagacgggcgagcttcgcgtc

SEQ ID NO: 709112 - DNA, 75 bp, synthetic construct
  source 1..75: mol_type = other DNA
ccggtcagggtagtcagtggcaagtaacgctcccggcttatcgtccaggcaaagacaattattatgcggtttcag

SEQ ID NO: 709113 - DNA, 75 bp, synthetic construct
  source 1..75: mol_type = other DNA
accgctaaagctaaccaggaaatacaggagtggctcgggaaatatggtactgcgcgcgtcaaactgaatgtcgat

SEQ ID NO: 709114 - DNA, 75 bp, synthetic construct
  source 1..75: mol_type = other DNA
aacaagccaggtacatacacattcacattcaactctttgacatatggagggtatgaaatgaaaccagtgactgtg

SEQ ID NO: 709115 - DNA, 75 bp, synthetic construct
  source 1..75: mol_type = other DNA
gagaaggattatcaattcctgccgtcgaaaaatgaccatttcgtgagcggaaaaatcacgcgtacatttagtacc

SEQ ID NO: 709116 - DNA, 75 bp, synthetic construct
  source 1..75: mol_type = other DNA
ccctgaccgtcgtggacagctatggtaacccgttgcaggggcaagaagttacgctgactttaccgcagggtgtga

SEQ ID NO: 709117 - DNA, 75 bp, synthetic construct
  source 1..75: mol_type = other DNA
gacgctcccggcttatcaggcaggcaaagacaattattatgcgatttcagcgattgcctacgataacaaaggcaa

SEQ ID NO: 709118 - DNA, 75 bp, synthetic construct
  source 1..75: mol_type = other DNA
ggcaaccttctgcctggcgctgtggtcgtctttaatctgcctcggggcgtcaaaccgcttgcagacggtaatatc

SEQ ID NO: 709119 - DNA, 75 bp, synthetic construct
  source 1..75: mol_type = other DNA
cagcttggcgcaagcctgatgtatgaacagtattatggcgatgaagtcgggctgtttggtaaagataaacgccag

SEQ ID NO: 709120 - DNA, 75 bp, synthetic construct
  source 1..75: mol_type = other DNA
aaaaacgcggtgctcgccgcatcatctgatgtgcaatcgctggtggcggatgggaaatcgactgcgaagctggag

SEQ ID NO: 709121 - DNA, 75 bp, synthetic construct
  source 1..75: mol_type = other DNA
cgtataaagttacggtgactgatgccaataacaacctgttgaaggatagcgacgtgacgctgactgccagctcgg

SEQ ID NO: 709122 - DNA, 75 bp, synthetic construct
  source 1..75: mol_type = other DNA
aactcaccttcaccgtgaaggatgcgtatgggaaccttgtcaccgggctgaagccagatgcaccgcagtttagtg

SEQ ID NO: 709123 - DNA, 75 bp, synthetic construct
  source 1..75: mol_type = other DNA
tggatgttctgataccaggaaggcttcagacaaaaagccgggtgcagccgctgtcctctggatcaagcgtggtga

SEQ ID NO: 709124 - DNA, 75 bp, synthetic construct
  source 1..75: mol_type = other DNA
tggatgttctgataccaggaaggcttcagacaaaaagccgggtgcagccgctgtactctggctcaagcgtggtga

SEQ ID NO: 709125 - DNA, 75 bp, synthetic construct
  source 1..75: mol_type = other DNA
tggatgttctgataccaggaaggcttcagacaaaaagccgggtgtagccgctgtactctggttcaagcgtggtga

SEQ ID NO: 709126 - DNA, 75 bp, synthetic construct
  source 1..75: mol_type = other DNA
gtggaagcgatgcagaaagccatggagagagcccgttatctcgtgaagtatgagacgaagcagcatgacggttct

SEQ ID NO: 709127 - DNA, 75 bp, synthetic construct
  source 1..75: mol_type = other DNA
tggatgttctgataccaggaaggcttcagacaaaaagccgggtggagccgctgtgctctggatcaagcgtggtga

SEQ ID NO: 709128 - DNA, 75 bp, synthetic construct
  source 1..75: mol_type = other DNA
tggatgttctgataccaggaaggcttcagacaaaaagccgggtggagccgctgtactctgggtcaagcgtggtga

SEQ ID NO: 709129 - DNA, 75 bp, synthetic construct
  source 1..75: mol_type = other DNA
tctcaacagtgccctggtgcaacaccgtgccgtctcgttaatctgggtggatttacgtttccctgagcatatgcc

SEQ ID NO: 709130 - DNA, 75 bp, synthetic construct
  source 1..75: mol_type = other DNA
gaatcctgataaaccggtggttggcggtacagttacggcaatctggacggcaaaagatgctaatgacaaccctgt

SEQ ID NO: 709131 - DNA, 75 bp, synthetic construct
  source 1..75: mol_type = other DNA
tctgaccctgagcgccgggcataagcagggcaagagtggtgagaatgacactcgctttggcctggaagttaatta

SEQ ID NO: 709132 - DNA, 75 bp, synthetic construct
  source 1..75: mol_type = other DNA
tggatgttctgataccaggaaggcttcagacaaaaagccgggtgaagccgctgtactctggatcaagcgtggtga

SEQ ID NO: 709133 - DNA, 75 bp, synthetic construct
  source 1..75: mol_type = other DNA
tgagacgaagcagcatgacggttctggtcaacgtaattatggttgcagtcgtgggccggggcgtctactggatgg

SEQ ID NO: 709134 - DNA, 75 bp, synthetic construct
  source 1..75: mol_type = other DNA
tccaggcggacgcctttccgtaaaccggtatcatctgatgctcgcccttcttccgatgatacgcctttgtcgggt

SEQ ID NO: 709135 - DNA, 75 bp, synthetic construct
  source 1..75: mol_type = other DNA
gcaattatggttcatgcacttacggaaaacgcaaaacagttttatattcaccatggttttaagccatcaaaaagc

SEQ ID NO: 709136 - DNA, 75 bp, synthetic construct
  source 1..75: mol_type = other DNA
cgcagcccataacccgctggcaaaccgcaagcagaatcccgccaatctctttaccgccgcagaggaaacggtgat

SEQ ID NO: 709137 - DNA, 75 bp, synthetic construct
  source 1..75: mol_type = other DNA
caggaagaacgcctgtctgagctggaggcagccctgcaggcacaacaggccgcctttaacgaactggtggacaag

SEQ ID NO: 709138 - DNA, 75 bp, synthetic construct
  source 1..75: mol_type = other DNA
caggttaaaaaactggcaactaaaccgctcgactgtcatctgatggtgacgcggccgcaggattacattgctcaa

SEQ ID NO: 709139 - DNA, 75 bp, synthetic construct
  source 1..75: mol_type = other DNA
tattccccggacagtgccttcaatcgttacggcaaagtgactgcgctggttgcagaagaaatccaggacggtccg

SEQ ID NO: 709140 - DNA, 75 bp, synthetic construct
  source 1..75: mol_type = other DNA
cggcgctgtttaccaaaaaagagcagtccgatgacgcccggttctctgatgtacataaggccgtggagctggtcg

SEQ ID NO: 709141 - DNA, 75 bp, synthetic construct
  source 1..75: mol_type = other DNA
gcatcggggtggaaggtgccaccaccgacggacgcgaaatccagcgagaatggctggaacagatggcagccagct

SEQ ID NO: 709142 - DNA, 75 bp, synthetic construct
  source 1..75: mol_type = other DNA
acatttactaaacaagcacatcgattagtagcacgagatcgaggttatcaggtttatgatagaaggttgcttaaa

SEQ ID NO: 709143 - DNA, 75 bp, synthetic construct
  source 1..75: mol_type = other DNA
tacattagtgcattagcccagatttgggatcttgctcgtaaccgctaccacgatgcaccacaagataacccttgg

SEQ ID NO: 709144 - DNA, 75 bp, synthetic construct
  source 1..75: mol_type = other DNA
agcctacctggtcgggctggctgccactgatgatcctgccagtctgggtacggaaatgctgacattcagcgccag

SEQ ID NO: 709145 - DNA, 75 bp, synthetic construct
  source 1..75: mol_type = other DNA
cgcctttaacgaactggtgaataagctgagccatgaagacagccgccaggactaccgccagcgtgcaacgggcgg

SEQ ID NO: 709146 - DNA, 75 bp, synthetic construct
  source 1..75: mol_type = other DNA
agtctgctctgcagaagcagcaaaccgcctttaacgaactggtgaataagctgagccatgaagacagccgccagg

SEQ ID NO: 709147 - DNA, 75 bp, synthetic construct
  source 1..75: mol_type = other DNA
gcgcaccgaaaaatccctgtctgaacaggaagaacgcctgtctgagctggaggcagccctgcaggcacagctgac

SEQ ID NO: 709148 - DNA, 75 bp, synthetic construct
  source 1..75: mol_type = other DNA
acgcaccgaaaaatccctttctgagcaggaagaacgtctgtctgagctggagactgccctgcaggcacagcagac

SEQ ID NO: 709149 - DNA, 75 bp, synthetic construct
  source 1..75: mol_type = other DNA
agtctgctctgcagaagcagcaaaccgcctttaatgaactggtgaataagctgagtcatgaagacagccgccagg

SEQ ID NO: 709150 - DNA, 75 bp, synthetic construct
  source 1..75: mol_type = other DNA
cggcgctgtttaccaaaaaagagcagtccgatgacgcccgattctctgatgtgcataaggccgtggagctggtcg

SEQ ID NO: 709151 - DNA, 75 bp, synthetic construct
  source 1..75: mol_type = other DNA
agcctccctggttggcctggccgccactgatgatcccgccagtctgggtactgaaatgctgacattcagcgccag

SEQ ID NO: 709152 - DNA, 75 bp, synthetic construct
  source 1..75: mol_type = other DNA
gctgggtaatggactggttcattttgccaggtggactccttcccgtaaaccagcatcggctgatgcccccccttc

SEQ ID NO: 709153 - DNA, 75 bp, synthetic construct
  source 1..75: mol_type = other DNA
gcctgcgttatttctggtgtcgggagttcggcaaggaaaaaggcaggaaacattatcacgtgatattactgctca

SEQ ID NO: 709154 - DNA, 75 bp, synthetic construct
  source 1..75: mol_type = other DNA
aaaaaagagcagtccgatgacgcccggttctctgatgtgcataaggccgtggaacaactggcaggggatcgttga

SEQ ID NO: 709155 - DNA, 75 bp, synthetic construct
  source 1..75: mol_type = other DNA
cattcaaaaaggaattggacatggttcaattgttaaaccattactcatcagataacgcactcaatttcagtgatt

SEQ ID NO: 709156 - DNA, 75 bp, synthetic construct
  source 1..75: mol_type = other DNA
gatgctgacgcatcttatccgacctccgttcgcgccgcatccggcaacagaacccgtaaacaagcttataaaccg

SEQ ID NO: 709157 - DNA, 75 bp, synthetic construct
  source 1..75: mol_type = other DNA
acctggcgcactttgctgacgctgctgtcggtgcgtaacggcaaacgtctggctgatggtattcgggggcgctaa

SEQ ID NO: 709158 - DNA, 75 bp, synthetic construct
  source 1..75: mol_type = other DNA
tggctggaacagatggcagccagctacaacccggcggtgtataccgcgctgattaatcttgagcacatcaagtct

SEQ ID NO: 709159 - DNA, 75 bp, synthetic construct
  source 1..75: mol_type = other DNA
cgaactggaagaaatccaggaggacaagccgtccctgtttgcccgtgtcacggcgctgtttaccaaaaaagagta

SEQ ID NO: 709160 - DNA, 75 bp, synthetic construct
  source 1..75: mol_type = other DNA
aaagcgcaaaacagttttatatccatcatggctttacaccatcaaaaactcagctgcagacattgtttcttaaac

SEQ ID NO: 709161 - DNA, 75 bp, synthetic construct
  source 1..75: mol_type = other DNA
gcaggaaaatacctgattgatgaaaaaatgaaaaagcgccgtactgaagcagctgccgaacgtgcattgccaaac

SEQ ID NO: 709162 - DNA, 75 bp, synthetic construct
  source 1..75: mol_type = other DNA
tttattccgctgattgtcactaactgtatcgttgtgggccgcgctgaagccttcgccgccaaaaaaggtccggcg

SEQ ID NO: 709163 - DNA, 75 bp, synthetic construct
  source 1..75: mol_type = other DNA
ctggacagcgcggcgcaggaatttgtgtcggcataccggacccggcgcgacacgggtaacggcaacctgccggat

SEQ ID NO: 709164 - DNA, 75 bp, synthetic construct
  source 1..75: mol_type = other DNA
actggcattattagcattgtcggattcttgatgatctatgcccgaatgtgtaccacaatggtaaccaatatcttt

SEQ ID NO: 709165 - DNA, 75 bp, synthetic construct
  source 1..75: mol_type = other DNA
cggagaaaagcactgacctgtcccgtcaggcgctggtcaccatattcggagacgtggtgaccaacccgttcagct

SEQ ID NO: 709166 - DNA, 75 bp, synthetic construct
  source 1..75: mol_type = other DNA
ggtaacgcttggcgcgtggtatcagacctttgccactgctaaccagcgtctggcagagctggctgacagagctcc

SEQ ID NO: 709167 - DNA, 75 bp, synthetic construct
  source 1..75: mol_type = other DNA
tagtccctctcttaccgtcgtctggaaccgtatcaccctttgcgaacgtgaagcatcagacagggaggcacggca

SEQ ID NO: 709168 - DNA, 75 bp, synthetic construct
  source 1..75: mol_type = other DNA
cagtccttctctgaccgttgtctggaactgcatcatgcattacgaaagggaagcagcagtaaggagaatacggcg

SEQ ID NO: 709169 - DNA, 75 bp, synthetic construct
  source 1..75: mol_type = other DNA
agctgccatatcggcgaactacggtttcagagcggtgtttctcgtcaccgctggcgtagtgttattcaatgcagt

SEQ ID NO: 709170 - DNA, 75 bp, synthetic construct
  source 1..75: mol_type = other DNA
taccagagacgattcattctcagacgtatctggaaacgccttaaaaccggccaagccggttcttctaacagcatt

SEQ ID NO: 709171 - DNA, 75 bp, synthetic construct
  source 1..75: mol_type = other DNA
gtgggtaataatttaatgcagacggatctttccgtctggggtatgtatcagcacgccgatattgtcgttaagtgc

SEQ ID NO: 709172 - DNA, 75 bp, synthetic construct
  source 1..75: mol_type = other DNA
ggcatcatgaacagttttatcggtattgcgcaaacgcagaccaccaacctggcggtggttgcgccgggtatcgca

SEQ ID NO: 709173 - DNA, 75 bp, synthetic construct
  source 1..75: mol_type = other DNA
ggaccccaacacactaatatccaagttattagaacagtcatttggaattagcatgatccaaggtttcataaatac

SEQ ID NO: 709174 - DNA, 75 bp, synthetic construct
  source 1..75: mol_type = other DNA
ggattacctaaaggattagttgctctgctggatgctgcagctcccccaatatatttcttgttgttcctgttgttt

SEQ ID NO: 709175 - DNA, 75 bp, synthetic construct
  source 1..75: mol_type = other DNA
gctgccagtgagtttgtgacaacatttctggaaaaaagaaattctggcaacggaatattgccggatatcgagaca

SEQ ID NO: 709176 - DNA, 75 bp, synthetic construct
  source 1..75: mol_type = other DNA
cttgaggatatacgaactaatggcagagagcttaatgattctattatgcatgtgaatcaagcaggagttaaaggc

SEQ ID NO: 709177 - DNA, 75 bp, synthetic construct
  source 1..75: mol_type = other DNA
aacgaatggctaatgcgcaagatccaaacgctgcaatatctgcaatattaggcagaaacatggtgtattacacaa

SEQ ID NO: 709178 - DNA, 75 bp, synthetic construct
  source 1..75: mol_type = other DNA
atgtcgccatcccccttaattaaatcctgtgtggcctttgcccatacgcaattctattccggagttactgtgaaa

SEQ ID NO: 709179 - DNA, 75 bp, synthetic construct
  source 1..75: mol_type = other DNA
catccagtgaacaacgcatggcaaatgcacaagatccgaaatctgccttgtctgaaattatgggcccccttgtta

SEQ ID NO: 709180 - DNA, 75 bp, synthetic construct
  source 1..75: mol_type = other DNA
tgagcttaccatgcgtaaaaaacagtacaactactatcgcgagcagttgctttgttttgacgaggccgaagttga

SEQ ID NO: 709181 - DNA, 75 bp, synthetic construct
  source 1..75: mol_type = other DNA
gtatctgcatctgatatggcgaaaattgctatcccaatcccctgcccggataacccggaaaaatcccttgccatc

SEQ ID NO: 709182 - DNA, 75 bp, synthetic construct
  source 1..75: mol_type = other DNA
cagtagaaggaaacggaacaacagatcaatcgacgattggaaaattctttaatcctttcagtaaaaacgaataca

SEQ ID NO: 709183 - DNA, 75 bp, synthetic construct
  source 1..75: mol_type = other DNA
tggggaacatctattaatagggcgacaaggtgctctgtgtggcaatgtccaaagaatgaaaggtcagttctacgc

SEQ ID NO: 709184 - DNA, 75 bp, synthetic construct
  source 1..75: mol_type = other DNA
aattgctggatggggttgaggttgagtggttgtcactgggagagcttggcgatttcatacgtggcaatggactac

SEQ ID NO: 709185 - DNA, 75 bp, synthetic construct
  source 1..75: mol_type = other DNA
agcaaaaatgccgcgtggcagtaaagaggatataatgaaatacccaatccctgtaccgccactcacctggcaagc

SEQ ID NO: 709186 - DNA, 75 bp, synthetic construct
  source 1..75: mol_type = other DNA
tacaaccagtcatttcgcgacattggcaacgtcacgggaccgttgatgggcgcggctatctcagcaaattatggt

SEQ ID NO: 709187 - DNA, 75 bp, synthetic construct
  source 1..75: mol_type = other DNA
ttacccgcattaactggtcgggagcggctgcggtcaatatcgaaacgctgcgcgcattacacctgaaacacaatt

SEQ ID NO: 709188 - DNA, 75 bp, synthetic construct
  source 1..75: mol_type = other DNA
atgacgcccattctgaatcattattttgctcgcattaactggtcgggagctgctgcggtcaatatcgatacgctt

SEQ ID NO: 709189 - DNA, 75 bp, synthetic construct
  source 1..75: mol_type = other DNA
tgctgcggtcaatatcgatacgcttcgtgcattacacctgaaacacaattgcaccattccgtttgaaaacctcga

SEQ ID NO: 709190 - DNA, 75 bp, synthetic construct
  source 1..75: mol_type = other DNA
cttggtcacaaaacgcaacaacaaaccgatcgttatcacgatgaccgcggcaaaggatggagcaaagtagcgttg

SEQ ID NO: 709191 - DNA, 75 bp, synthetic construct
  source 1..75: mol_type = other DNA
aattggtgttcgcccggcgtggcggttactgctttgaacagaatggtgtgtttgagcgggtattacgcgagctgg

SEQ ID NO: 709192 - DNA, 75 bp, synthetic construct
  source 1..75: mol_type = other DNA
ttgcccgcataaactggtcgggagcagcagcggccaatatcgacacgctgcgtgcattacaccttaaacataatt

SEQ ID NO: 709193 - DNA, 75 bp, synthetic construct
  source 1..75: mol_type = other DNA
ttgcatccctgaaagcaaaaattcaggcttaccagcggaaaaaacgacgtgccaacaagcgtgtgcgtgcaacca

SEQ ID NO: 709194 - DNA, 75 bp, synthetic construct
  source 1..75: mol_type = other DNA
gcagcgccctgcgtattgagccctggctgggtgatgggctggtccatttttccaggtggactccttcccgtaaac

SEQ ID NO: 709195 - DNA, 75 bp, synthetic construct
  source 1..75: mol_type = other DNA
gaagctctgttagcaacggcaatcggcctcgtggcagcgattcctgcggtcgttatctataacgtatttgcacgc

SEQ ID NO: 709196 - DNA, 75 bp, synthetic construct
  source 1..75: mol_type = other DNA
gcgcgtagtgttatcaaatccgccagcattaccgccgcgcacccatcgtttgttgttggtggaactggaagggga

SEQ ID NO: 709197 - DNA, 75 bp, synthetic construct
  source 1..75: mol_type = other DNA
acaatggattgccgacgtcggttttggtggtcagacgctgaccgcgccaatccgtttagtgccggatatcgcgca

SEQ ID NO: 709198 - DNA, 75 bp, synthetic construct
  source 1..75: mol_type = other DNA
tctcaacagtgccctggtgcaacaccgtgccgtctcgttaatccgggtggatttacgtttccctgagtatatgcc

SEQ ID NO: 709199 - DNA, 75 bp, synthetic construct
  source 1..75: mol_type = other DNA
cttggccataaaacgcaacaacaaaccgatcgttatcatgacgatcgaggcaaaggatggagcaaggtagcgtgg

SEQ ID NO: 709200 - DNA, 75 bp, synthetic construct
  source 1..75: mol_type = other DNA
gggagcaaaatcgcaattcctctttctcttcgtctcaacgcgattaactggagtttacgcgatgtagtcgctcgc

SEQ ID NO: 709201 - DNA, 75 bp, synthetic construct
  source 1..75: mol_type = other DNA
gttacagccaatacattgacgatgaattttagtaaagcgagagatttagcaggaattgattggggtgatggtact

SEQ ID NO: 709202 - DNA, 75 bp, synthetic construct
  source 1..75: mol_type = other DNA
cccttcgtctcaacgcgattagctggagtttacgcgatgtagtagtccgctgccgtgattatgcagtcagtccat

SEQ ID NO: 709203 - DNA, 75 bp, synthetic construct
  source 1..75: mol_type = other DNA
ccataaactggaaacgaaacctgatcgttgcctggctaggctgttttctcactggtgccgccttcagcctggtaa

SEQ ID NO: 709204 - DNA, 75 bp, synthetic construct
  source 1..75: mol_type = other DNA
ctgttgatcccaatgtcttatgtccagacgccattgcaactggggattttacggtttttactcggtgctgcagat

SEQ ID NO: 709205 - DNA, 75 bp, synthetic construct
  source 1..75: mol_type = other DNA
tcagcgggatgatcgcctcagtccccggcgtggcagctctacttagcgcaccacgactcggcaaacttggcgatc

SEQ ID NO: 709206 - DNA, 75 bp, synthetic construct
  source 1..75: mol_type = other DNA
ctttatctgaacgtctgtataaagaacaggggttagacacacaaaaactacttggtcataaaacacaacaacaaa

SEQ ID NO: 709207 - DNA, 75 bp, synthetic construct
  source 1..75: mol_type = other DNA
atttagtgcattttttccgtgcaacatcacaggcagaacgtggcgcacaagttaaatccaatacattgacgatga

SEQ ID NO: 709208 - DNA, 75 bp, synthetic construct
  source 1..75: mol_type = other DNA
ctttacgtttgaatgctatcaactggtgtttacgtgatgtagtagctcgctgccgtgactacgcagtcagcccat

SEQ ID NO: 709209 - DNA, 75 bp, synthetic construct
  source 1..75: mol_type = other DNA
aacccagaagaaaaattacccgacaacggttaagtcttgaagaatggcaaaaaatttttgatatcgcagatgcca

SEQ ID NO: 709210 - DNA, 75 bp, synthetic construct
  source 1..75: mol_type = other DNA
cacaaacgaagcggaagccattgctattgccactgaggccaatacacgcctggctgagcaaagaacccggcagat

SEQ ID NO: 709211 - DNA, 75 bp, synthetic construct
  source 1..75: mol_type = other DNA
cttggccataaaacacagcgacagacagatcgataccatgacgaccgaggcaaaggatggaacaagatagcgttg

SEQ ID NO: 709212 - DNA, 75 bp, synthetic construct
  source 1..75: mol_type = other DNA
caattcggcaaacgtgcatatcccgccagtcacaaaagaaagtatcccttctgaagttaaaactgctgttgtaag

SEQ ID NO: 709213 - DNA, 75 bp, synthetic construct
  source 1..75: mol_type = other DNA
actgattaccgccacgccagagttagtcactgacgtcattcccagggttaatgctaaagcggcaggcatcttatc

SEQ ID NO: 709214 - DNA, 75 bp, synthetic construct
  source 1..75: mol_type = other DNA
gacgtcaccaccattattccccctgatctcaaagcagaatcactaccgaactggcatcaacgtctatgtcatcat

SEQ ID NO: 709215 - DNA, 75 bp, synthetic construct
  source 1..75: mol_type = other DNA
gaacttgaaacagaacatttttcattaatttatggcgaaacggggtatagcgacctgctgcctgtcgaaagcgta

SEQ ID NO: 709216 - DNA, 75 bp, synthetic construct
  source 1..75: mol_type = other DNA
atcacgaagcagaatcgctaccgagttggcatcaacgtctatgtcatcatctttcactcgcttcagaagatgagt

SEQ ID NO: 709217 - DNA, 75 bp, synthetic construct
  source 1..75: mol_type = other DNA
cgcgacattaccgcctacgctgggctggcgaccatcaaagagaccttcacccgcgaatcactggctgactttggc

SEQ ID NO: 709218 - DNA, 75 bp, synthetic construct
  source 1..75: mol_type = other DNA
taccatcacgccagagttagtatgcgacgtcattccctgggttaatgccaaagccgctggcatcttatctgaatg

SEQ ID NO: 709219 - DNA, 75 bp, synthetic construct
  source 1..75: mol_type = other DNA
aagcgcagttgatgccctgttacgtttcgatttccccgcgctgaaagccgagtttgcgcaataccataacaaagg

SEQ ID NO: 709220 - DNA, 75 bp, synthetic construct
  source 1..75: mol_type = other DNA
tgatccctgaacgcccggatattgccaatgctatggcgctacgttatgcagatcaaaacgttccggcgatgacct

SEQ ID NO: 709221 - DNA, 75 bp, synthetic construct
  source 1..75: mol_type = other DNA
tgacagcatccgcattacattccacctgtacggaaaaaatggcgtcatgggagttcatgaacccacgcaaactgc

SEQ ID NO: 709222 - DNA, 75 bp, synthetic construct
  source 1..75: mol_type = other DNA
tctgaataatcaacaaacaggaagtatacaatctgatgcggcattgctctggaatttatggaactcttactctac

SEQ ID NO: 709223 - DNA, 75 bp, synthetic construct
  source 1..75: mol_type = other DNA
tatactgaggaaaacacgctgattgcctgcttccgggtcgcagaagacagcacttacagcgatgcgcaggatgag

SEQ ID NO: 709224 - DNA, 75 bp, synthetic construct
  source 1..75: mol_type = other DNA
tatggaagcgcatcgcagataacaccaatatgtatcttccctataaacggtacacttcttatcctgaaaactggc

SEQ ID NO: 709225 - DNA, 75 bp, synthetic construct
  source 1..75: mol_type = other DNA
ctggatgtcggctgtggcgcgggcgtactttcggttgcctttgcgcgccattcgccgaaaattcgtctcactctg

SEQ ID NO: 709226 - DNA, 75 bp, synthetic construct
  source 1..75: mol_type = other DNA
tttcgaacaaagccgtattctgtttgccggagacttacaggatgacctgcccgcgcgtttagataccgcggccag

SEQ ID NO: 709227 - DNA, 75 bp, synthetic construct
  source 1..75: mol_type = other DNA
gcttgaacagttcaccaaagaaaccggtattaaggttatctattcgacttacgagtcgaacgaaaccatgtacgc

SEQ ID NO: 709228 - DNA, 75 bp, synthetic construct
  source 1..75: mol_type = other DNA
tcgtcaacctgtctgtagatgaggattccggcctgctttatatgcgccgaccaaaagcggtcctcggtaaaagcc

SEQ ID NO: 709229 - DNA, 75 bp, synthetic construct
  source 1..75: mol_type = other DNA
atgtctgcatttaccccggcaagtgaagtcttgctgcgtcacagtgatgatttcgaaaaaagccgtattctgttt

SEQ ID NO: 709230 - DNA, 75 bp, synthetic construct
  source 1..75: mol_type = other DNA
tggacagcgcccgtcgctgtggcctctattttggtcgtctggaaaagcagccggtatttgatgccaataaattct

SEQ ID NO: 709231 - DNA, 75 bp, synthetic construct
  source 1..75: mol_type = other DNA
caacaccatgtgtgaccttcgggctaggctgaacgatatggagcatcgctgtcgctttgattccgatgtgcttgt

SEQ ID NO: 709232 - DNA, 75 bp, synthetic construct
  source 1..75: mol_type = other DNA
gtaattgtcggtcgcgcattactggaaggtaaattcaccgtgaaggaggccatcgcatgctggcaaaacgcataa

SEQ ID NO: 709233 - DNA, 75 bp, synthetic construct
  source 1..75: mol_type = other DNA
taagccgaattcttctcaagctacctgtcgagtatcccgtaaaatacacagaccttttcactcacatacatgcca

SEQ ID NO: 709234 - DNA, 75 bp, synthetic construct
  source 1..75: mol_type = other DNA
gcatctataaacgtaaagatgagctgccgaaagttatggcgggtctgggggtcgcagttgttttttcctctaaag

SEQ ID NO: 709235 - DNA, 75 bp, synthetic construct
  source 1..75: mol_type = other DNA
tcaggccgcgaacaaagctgcggtcaccatgccttcatccaagctgaaagtggcaatcgccaacgtgctgaagga

SEQ ID NO: 709236 - DNA, 75 bp, synthetic construct
  source 1..75: mol_type = other DNA
atgaactatgccggacacgaaaaacttcgcgccgaagtggcggaggtggccaatgccatgtgcgaccttcgggcc

SEQ ID NO: 709237 - DNA, 75 bp, synthetic construct
  source 1..75: mol_type = other DNA
ccagaaaactggcagcaggcttttgctgagttacaaatgcgagttcagggtaatcaaccgacagggagtgcgcaa

SEQ ID NO: 709238 - DNA, 75 bp, synthetic construct
  source 1..75: mol_type = other DNA
cgcctgacacgccagacgctgtatcgcgccaatcgcctgttcatggaggcgtataccgaaattctggaactggat

SEQ ID NO: 709239 - DNA, 75 bp, synthetic construct
  source 1..75: mol_type = other DNA
gttttattcccggtatcgatttctcagaccatctcaattactggcagaaagatattcccgccgtcatgattacag

SEQ ID NO: 709240 - DNA, 75 bp, synthetic construct
  source 1..75: mol_type = other DNA
agccctgagaagctagaaaaaacggtacgttatctttcacaaacagagtatccacgcagtgctgatcatattgat

SEQ ID NO: 709241 - DNA, 75 bp, synthetic construct
  source 1..75: mol_type = other DNA
acactgccgctgggtgcacatgctatcctcaaaaacgacaaaaacggcacacaattgacgattagcggtcatcct

SEQ ID NO: 709242 - DNA, 75 bp, synthetic construct
  source 1..75: mol_type = other DNA
ggcaaggggaaggcccgacatgtcagaccgaaggcacgttgtggggaggcaatcttgcgatgctgatttcactga

SEQ ID NO: 709243 - DNA, 75 bp, synthetic construct
  source 1..75: mol_type = other DNA
aacctcgcgatgctgatttcgcttatcggtacgccgtggatgccacaaattgagaacggtattctggtactggaa

SEQ ID NO: 709244 - DNA, 75 bp, synthetic construct
  source 1..75: mol_type = other DNA
atgtgagaatgcgattgcgcaaagcgaactactcaaaccactgcaacaccacgacgtagaggcaatctggctggg

SEQ ID NO: 709245 - DNA, 75 bp, synthetic construct
  source 1..75: mol_type = other DNA
atgagcatgaaccttgcataccgcaaagcagttgctgcgtgattgctgtgatgagcgggctcttactgggcgaga

SEQ ID NO: 709246 - DNA, 75 bp, synthetic construct
  source 1..75: mol_type = other DNA
cggcgtgcgcggcgtaattgtcggccgcgcgctgctggaaggtaaattcaacgtaacggaggccatccaatgctg

SEQ ID NO: 709247 - DNA, 75 bp, synthetic construct
  source 1..75: mol_type = other DNA
actgagtatccacgcagtgccgaccatattgataaactgaatatgtctgccagctatattaaaaatattttcaca

SEQ ID NO: 709248 - DNA, 75 bp, synthetic construct
  source 1..75: mol_type = other DNA
agcgacgcaggggaaagccaaaggatttgcaccagaggccattgatgcgctgacacagcgcccggaatgtgacgt

SEQ ID NO: 709249 - DNA, 75 bp, synthetic construct
  source 1..75: mol_type = other DNA
atgagcacgaaccttgcatacctaaaagcagttgctgcgtgattgctgtgatgggagggcatattttgggcacta

SEQ ID NO: 709250 - DNA, 75 bp, synthetic construct
  source 1..75: mol_type = other DNA
gcgcggatgagttgaacgcctttaccgagcaccatttctggctggcgttacgtaatgaaacgttcgccattgaat

SEQ ID NO: 709251 - DNA, 75 bp, synthetic construct
  source 1..75: mol_type = other DNA
tcgtggttattaccaccttactgataatgaacgtgatacccatgaattgatacgctggcaaggacgtctttgcca

SEQ ID NO: 709252 - DNA, 75 bp, synthetic construct
  source 1..75: mol_type = other DNA
gaaatatcacaacaatgccaacaaaagctggaatctatctgcgctttgttacttaccgggacaacaggcgatttc

SEQ ID NO: 709253 - DNA, 75 bp, synthetic construct
  source 1..75: mol_type = other DNA
aaaaaaatggcttacaaggatgccgttaattggctggcaaataacccgcgccatgccgccgccgggctactgcct

SEQ ID NO: 709254 - DNA, 75 bp, synthetic construct
  source 1..75: mol_type = other DNA
aatcaatatggtcgccgaaaatcgcggactgacaatggccgaactggaagatcgcctggcaccggatttagggct

SEQ ID NO: 709255 - DNA, 75 bp, synthetic construct
  source 1..75: mol_type = other DNA
attgtcggactggaacgcagaggctggcaacgcctggaagaaagcggcagcgtctatgcaatgcgcaaatctacc

SEQ ID NO: 709256 - DNA, 75 bp, synthetic construct
  source 1..75: mol_type = other DNA
aagagcaataagtaaaaaagaggtgaattcaattttttatactttgcgaaaaactcacgtggcattatggctgca

SEQ ID NO: 709257 - DNA, 75 bp, synthetic construct
  source 1..75: mol_type = other DNA
agaaatcacataaattctgggcggtggcgcagcaggaaaacgaactgcatattagctggggaaaagtcgacacca

SEQ ID NO: 709258 - DNA, 75 bp, synthetic construct
  source 1..75: mol_type = other DNA
gtgacagaagaatatgaatatgcaaccgcgaatatgttgccgcaactactcgtcgctcctccgtggatactcaat

SEQ ID NO: 709259 - DNA, 75 bp, synthetic construct
  source 1..75: mol_type = other DNA
cgcaataaaacgttcaccattgaatggcaagggaaggcccgacatgtcagaccgaaggcacgctgtggggaggca

SEQ ID NO: 709260 - DNA, 75 bp, synthetic construct
  source 1..75: mol_type = other DNA
tttttggtagtacggccattcctgcgtttatgacctgcttgcaacgagatcatcaacgactgtggatattcaccc

SEQ ID NO: 709261 - DNA, 75 bp, synthetic construct
  source 1..75: mol_type = other DNA
agcggaagataacagctacagcaccgctgacgatgatcttttcaccctgccggaaggcgatatctctgttggtat

SEQ ID NO: 709262 - DNA, 75 bp, synthetic construct
  source 1..75: mol_type = other DNA
ttatggcgcagaccacggcttaaaagtaacaaccagcctctgccagatgacgctatgcgccacctcggcataatg

SEQ ID NO: 709263 - DNA, 75 bp, synthetic construct
  source 1..75: mol_type = other DNA
tgatcctgatgctgtggatggcgtccggcggcgttggcggcaatgctcaacccggcgcgttaattgccctgtttg

SEQ ID NO: 709264 - DNA, 75 bp, synthetic construct
  source 1..75: mol_type = other DNA
tggtgtgcgcggcgtaatagttggtcgtgcattactggaaggcaaattcaccgtgaaggaggccattgcatgttg

SEQ ID NO: 709265 - DNA, 75 bp, synthetic construct
  source 1..75: mol_type = other DNA
cagaaatggtgaaaggctggtttgaacgttttggtgccgatgccttagtgctggcgctggatgtccgtattgacg

SEQ ID NO: 709266 - DNA, 75 bp, synthetic construct
  source 1..75: mol_type = other DNA
ctgctcattaccggcctgagtgggcacggttttaaatttgcgtcagttttaggggaaatagctgccgattttgcg

SEQ ID NO: 709267 - DNA, 75 bp, synthetic construct
  source 1..75: mol_type = other DNA
attacatcggcttgtttgaggctgattctggctttctgcgcagcgaactggcaattaaaacctggatccaactgg

SEQ ID NO: 709268 - DNA, 75 bp, synthetic construct
  source 1..75: mol_type = other DNA
cggcccagccgactccgaattcctcgccaatgtcgcccacagcgcggaacaatggcaactcaacgtcgaaaaact

SEQ ID NO: 709269 - DNA, 75 bp, synthetic construct
  source 1..75: mol_type = other DNA
ggcagagttctgtcgtcagaagcgccctgcagcctgggaagcgcatcacccgcttgaacgcgcgttgcatgccct

SEQ ID NO: 709270 - DNA, 75 bp, synthetic construct
  source 1..75: mol_type = other DNA
ttaattgagcacacagtaaaactgaaaagttctgatgccaataagctgattagttacgctgcttcacaaggttat

SEQ ID NO: 709271 - DNA, 75 bp, synthetic construct
  source 1..75: mol_type = other DNA
ataatattcattcaaggaatcaggacagaatccatgtaaaaagagtctttgatgatattagtaataaagcaaaca

SEQ ID NO: 709272 - DNA, 75 bp, synthetic construct
  source 1..75: mol_type = other DNA
cgatatctcgcgcgacggcacgctggcaggttctaacgtctctttatatgaagaagtgtgcgccagatatccgca

SEQ ID NO: 709273 - DNA, 75 bp, synthetic construct
  source 1..75: mol_type = other DNA
atggctgaaatgactgttttaaataatgtcatggcaacgtctgcgaaaaaacgtaagccgggtttgttgtcacgt

SEQ ID NO: 709274 - DNA, 75 bp, synthetic construct
  source 1..75: mol_type = other DNA
atggctgaaatggcggttttaaataatgtcatggcaacgtctgcgaaaaaacgtaagccggggttgttgtcacgt

SEQ ID NO: 709275 - DNA, 75 bp, synthetic construct
  source 1..75: mol_type = other DNA
gcgcaatgtgttgccgggtatcggttgctgtctgtacggagcagcctgcacttatgataattcgcctgacgaaga

SEQ ID NO: 709276 - DNA, 75 bp, synthetic construct
  source 1..75: mol_type = other DNA
tgcagcccataacccgctggcaaaccgcaagcagaatcccgccaatctctttaccgctgcagaggaaacggtgat

SEQ ID NO: 709277 - DNA, 75 bp, synthetic construct
  source 1..75: mol_type = other DNA
acccacctgaaaaagaaagatattcagttgcgggatattaaccgaaccatagttacaggctggttagataagctc

SEQ ID NO: 709278 - DNA, 75 bp, synthetic construct
  source 1..75: mol_type = other DNA
cggcagcaaatgcggcaaaagtaaccgtggtggctgatgcgttatcttcaaaccagtcgaaagtctctgtcgcag

SEQ ID NO: 709279 - DNA, 75 bp, synthetic construct
  source 1..75: mol_type = other DNA
aaattattcacatctatggaagtcagtccgaagtttgctgatacgggcaaagcctacttggtcggcctggctgcc

SEQ ID NO: 709280 - DNA, 75 bp, synthetic construct
  source 1..75: mol_type = other DNA
tatgccaaggaagcccccgcatcatttggcgcatcggttcaggcttgcccttccctacttaaaatgcgcgatctg

SEQ ID NO: 709281 - DNA, 75 bp, synthetic construct
  source 1..75: mol_type = other DNA
cgcctttaacgaactggtggacaagctgagtcatgaagacagccggcaggactaccgccagcgtgcaacaggcgg

SEQ ID NO: 709282 - DNA, 75 bp, synthetic construct
  source 1..75: mol_type = other DNA
gcctgagtgggcacggctttaaatttgcgtcggttttaggggaaatagccgctgactttgcacaagacaaaaaaa

SEQ ID NO: 709283 - DNA, 75 bp, synthetic construct
  source 1..75: mol_type = other DNA
tggccggaaatacgcgtcccggacaactacatcggcttatttgaagctgattccggctttttgcgcagtgaactg

SEQ ID NO: 709284 - DNA, 75 bp, synthetic construct
  source 1..75: mol_type = other DNA
cgccatgcttatggtgaaggcgaaaaatatgttccgttagtgcttcgcgcgcaaacgttgtgggatgaactctcc

SEQ ID NO: 709285 - DNA, 75 bp, synthetic construct
  source 1..75: mol_type = other DNA
ggcatcaacagaaaatgagcagccttcagataccaagacgattacgtttgtggctgacaaagctacagcaaccat

SEQ ID NO: 709286 - DNA, 75 bp, synthetic construct
  source 1..75: mol_type = other DNA
ccgttggcactatttcggagataaaacctgggatttacagcgccacggtttcttcgaccagtgccggagatgttg

SEQ ID NO: 709287 - DNA, 75 bp, synthetic construct
  source 1..75: mol_type = other DNA
gattttgaagctgaactggttgaaatggatggcgaaccagatcacgtccatttgttaattaactatcctcccaaa

SEQ ID NO: 709288 - DNA, 75 bp, synthetic construct
  source 1..75: mol_type = other DNA
ccacgtagtgccgacaatattgataatctgaataagtccgcagagtatataaaagaggcctttatcagtagcgga

SEQ ID NO: 709289 - DNA, 75 bp, synthetic construct
  source 1..75: mol_type = other DNA
atgagttcggttgaaaatgtaatgacaaatgatgatctggacgagctgacagccatgttgcaatcacttgatgaa

SEQ ID NO: 709290 - DNA, 75 bp, synthetic construct
  source 1..75: mol_type = other DNA
gatcaagcgctggtcgctgatgcactctgttcaaccagagtctgtgttggagcacagtgctgttgttaccctgct

SEQ ID NO: 709291 - DNA, 75 bp, synthetic construct
  source 1..75: mol_type = other DNA
aatggcattgagttccaggatgctctaagcaaaatggagcgtattgttgctcaggtgaaattggacttcccggaa

SEQ ID NO: 709292 - DNA, 75 bp, synthetic construct
  source 1..75: mol_type = other DNA
cgcaataaacgcatgacatggcgcactttgttgacgttgctgtcggtgcgtaacggcaaacgtctggctgatgga

SEQ ID NO: 709293 - DNA, 75 bp, synthetic construct
  source 1..75: mol_type = other DNA
ataaattaatgtttgtattggtctatgataagcctcagtcagtattaatagacagaaaaaatgaaacatatgtag

SEQ ID NO: 709294 - DNA, 75 bp, synthetic construct
  source 1..75: mol_type = other DNA
atgaacagaatagttgttgttggccacccaaattcaaaatttgaggaagttgaggatattcttagacaaagagga

SEQ ID NO: 709295 - DNA, 75 bp, synthetic construct
  source 1..75: mol_type = other DNA
atatattctttggacaaggttttacgcccaaattacaaatagcaacgagtcgaacaagaggtgcgactgtttttg

SEQ ID NO: 709296 - DNA, 75 bp, synthetic construct
  source 1..75: mol_type = other DNA
ataattaccacaccagaagatcaggctggctttatccgtttgctcggggatggcagccaatttggtatagaaatc

SEQ ID NO: 709297 - DNA, 75 bp, synthetic construct
  source 1..75: mol_type = other DNA
tatgataatacagttgtggatatagcgaagaatgtaaaaccttcagaaagaggtgagttagaaataacctcgatt

SEQ ID NO: 709298 - DNA, 75 bp, synthetic construct
  source 1..75: mol_type = other DNA
ttttaactgttgaattactaggccgaggttttgcatggcttgatacaggaactcatgacagtttgattgaagctg

SEQ ID NO: 709299 - DNA, 75 bp, synthetic construct
  source 1..75: mol_type = other DNA
gttggttaagcaaagaagaagcaataaaaaatgcactacctatgaagaaaaatgattatggtcaatacattatag

SEQ ID NO: 709300 - DNA, 75 bp, synthetic construct
  source 1..75: mol_type = other DNA
acacatgatagcctgattgaagcgggcagttttgttgaaactgtgcaaaaacgtcaaggaatgatggtcgcttgt

SEQ ID NO: 709301 - DNA, 75 bp, synthetic construct
  source 1..75: mol_type = other DNA
acctcagtccggaaggatcttgatattaagctgatgaattgtgatgttgcggtagggaaaaatgtcagcgttact

SEQ ID NO: 709302 - DNA, 75 bp, synthetic construct
  source 1..75: mol_type = other DNA
tcgcaatgggcttgatagtatttggcgtgcacgctgcggattgggactggagcgcaatagctgagaatatggcgc

SEQ ID NO: 709303 - DNA, 75 bp, synthetic construct
  source 1..75: mol_type = other DNA
gcggtgacggatatgtcgaacgcggttgacggtgatttacaggcccgcgtcgagccctggaaatcgaagtggcag

SEQ ID NO: 709304 - DNA, 75 bp, synthetic construct
  source 1..75: mol_type = other DNA
gcctataacgtaggcgctaccaacttcaaaacatccacactgttaaaactactcaatgacggcaagaaatccgaa

SEQ ID NO: 709305 - DNA, 75 bp, synthetic construct
  source 1..75: mol_type = other DNA
taattattggcaacacgatattcccgccgtaatgattactgacaccgctttttatcgtaataaacaataccactt

SEQ ID NO: 709306 - DNA, 75 bp, synthetic construct
  source 1..75: mol_type = other DNA
actctgcgcctggaagccagaattacccttacccggcaatgtcctggctttatcccgatcggggagactttattg

SEQ ID NO: 709307 - DNA, 75 bp, synthetic construct
  source 1..75: mol_type = other DNA
ggtcctgccgatggatcgctgattattattggggcgcactatgattccgcaaccagttatgaaaacgaccaatta

SEQ ID NO: 709308 - DNA, 75 bp, synthetic construct
  source 1..75: mol_type = other DNA
tctgcactacagtgcttgggtcaaaaaatccagtgctgcaggcgcagttcttaaagaaggtgagtttacttctgt

SEQ ID NO: 709309 - DNA, 75 bp, synthetic construct
  source 1..75: mol_type = other DNA
atctggaggctaatggtatttctgtgaaaaaggatctggatattaaactggttaattgtgtgatcggccaagata

SEQ ID NO: 709310 - DNA, 75 bp, synthetic construct
  source 1..75: mol_type = other DNA
aaaaaactggtagtgtaaaagtcgcgtttactggtaccacttttggcaatatcgcaaatgaactgggtactgcag

SEQ ID NO: 709311 - DNA, 75 bp, synthetic construct
  source 1..75: mol_type = other DNA
ggcgatcgctattgcggcggtgatggttaaaccattagagggcgtggagtacgatccctatcgtgatgttatcgg

SEQ ID NO: 709312 - DNA, 75 bp, synthetic construct
  source 1..75: mol_type = other DNA
ggcgatcgctattgcggctgtgatggttaaaccattagaaggcgtggagtacgatccgtatcgtgatgctatcgg

SEQ ID NO: 709313 - DNA, 75 bp, synthetic construct
  source 1..75: mol_type = other DNA
gtcggtgtgataatgacgttaccgctctttttcccttttctctggttcgctttgtggcgaaaaaaacgcggctgg

SEQ ID NO: 709314 - DNA, 75 bp, synthetic construct
  source 1..75: mol_type = other DNA
ggactgctgctgtatccgcgtctcggtgaagtccgccgtgagcaggatgtgctcatattgcgtattgaactggca

SEQ ID NO: 709315 - DNA, 75 bp, synthetic construct
  source 1..75: mol_type = other DNA
agaaaatctgcaagttctgagcgaaaaactggaatttgacgcctatctggcgctacttcgccagtgcgatctcgg

SEQ ID NO: 709316 - DNA, 75 bp, synthetic construct
  source 1..75: mol_type = other DNA
ggacccttctctcaatacgatggcgaacgatcggcaacgtgaagggaaaatgaccattctggtggggaactccgg

SEQ ID NO: 709317 - DNA, 75 bp, synthetic construct
  source 1..75: mol_type = other DNA
gtacgcggaaatcctgaagaaagttttccgcccgacgtcgtggctggcattcatatgcatcggcgtatcgacgta

SEQ ID NO: 709318 - DNA, 75 bp, synthetic construct
  source 1..75: mol_type = other DNA
taagtgatagctgtccggcgctttctgtgcaatttttccctgggaaaaaatcgctggcggaagcggtcatcgcga

SEQ ID NO: 709319 - DNA, 75 bp, synthetic construct
  source 1..75: mol_type = other DNA
accacattgccttctttagtccaaactatctgcaaggctggcatcgggcgctggcaattgccgctggggaggtcg

SEQ ID NO: 709320 - DNA, 75 bp, synthetic construct
  source 1..75: mol_type = other DNA
cgccagttggcgtcggtggataaaaacaccattgccttctttagcccgaactatctgcaaggctggcagcgggcg

SEQ ID NO: 709321 - DNA, 75 bp, synthetic construct
  source 1..75: mol_type = other DNA
gcgtggtattaagtgccggagcgcgaaatttactgcaacactacaattttccggggaacgttcgtgaactggaac

SEQ ID NO: 709322 - DNA, 75 bp, synthetic construct
  source 1..75: mol_type = other DNA
tttattccgcttgccatcgacgggctggcgaaggatgtactcggtagacgctttgcgctggaagggcatccacgg

SEQ ID NO: 709323 - DNA, 75 bp, synthetic construct
  source 1..75: mol_type = other DNA
gtctgcaaatgcaacagctacagcagaataatatcgtttacttcgatctggacaaatacgatatccgttctgatt

SEQ ID NO: 709324 - DNA, 75 bp, synthetic construct
  source 1..75: mol_type = other DNA
tagacacccattacgacgcgctcgaaagccgcttctggcagttttatccgcggatgatggcgcaggcttcacgca

SEQ ID NO: 709325 - DNA, 75 bp, synthetic construct
  source 1..75: mol_type = other DNA
cgctcattatgacgccctcgaaacccgcttctggcagttttatccgcggatgatggcgcaggcgtcacacaaggc

SEQ ID NO: 709326 - DNA, 75 bp, synthetic construct
  source 1..75: mol_type = other DNA
agttttccacccgacgtcgtggctggcattcatatgcatcggcgtatcgacgttttgaccgacaatctgccggaa

SEQ ID NO: 709327 - DNA, 75 bp, synthetic construct
  source 1..75: mol_type = other DNA
atggtctgcgtcataagatccgtttgcaggtcgatggcggcctgaaaaccggtgttgatatcatcaaagcggcga

SEQ ID NO: 709328 - DNA, 75 bp, synthetic construct
  source 1..75: mol_type = other DNA
ggagctgtatctgacgggcgatgccaacgactatgtcggtaaaggcatggcgggcggcttaatcgccattcgtcc

SEQ ID NO: 709329 - DNA, 75 bp, synthetic construct
  source 1..75: mol_type = other DNA
tatcgctaaagatcgcctgccggttccggctccaatggcggttggcgcgatccagacccgtctggtcgatcaaag

SEQ ID NO: 709330 - DNA, 75 bp, synthetic construct
  source 1..75: mol_type = other DNA
gatcttgcggacctgcgtctggaatcggccatttgcctgttccaccagcgcttctccactaacaccgtaccgcgc

SEQ ID NO: 709331 - DNA, 75 bp, synthetic construct
  source 1..75: mol_type = other DNA
aatacttgcgaatttgtcatctgaacaactgcgcgacgggcgtggcaactcaggacgacaaactgcgtaaaaacc

SEQ ID NO: 709332 - DNA, 75 bp, synthetic construct
  source 1..75: mol_type = other DNA
aagacttagcgcagcttattttcgacctcaagcaggttaacccgaaagcgatgatctccgtgaagctggtgtccg

SEQ ID NO: 709333 - DNA, 75 bp, synthetic construct
  source 1..75: mol_type = other DNA
ctgactccagctcgatggataacatgctggaactcctgctggcgggtgggatggatatcatccgcgctatgcgtc

SEQ ID NO: 709334 - DNA, 75 bp, synthetic construct
  source 1..75: mol_type = other DNA
tgaaaacggtcaggaagcggtcggttcgatgggcgacgacaccccattcgccgtgctctccagccagccgcgcat

SEQ ID NO: 709335 - DNA, 75 bp, synthetic construct
  source 1..75: mol_type = other DNA
gaaaagcgtctcgaagccgacaaagacttctacgtctgtagcctgtcgaatctggtcaatatttataaaggtctg

SEQ ID NO: 709336 - DNA, 75 bp, synthetic construct
  source 1..75: mol_type = other DNA
aagaatcactatcacggcctgccgttcaaagtgactaattactttgagtttatcgcccgtgaaacccgtgagctg

SEQ ID NO: 709337 - DNA, 75 bp, synthetic construct
  source 1..75: mol_type = other DNA
aagcgaactgtttaaacgcttcgataccgccgcgatgtctatcggcgcgttaagcccggaagcccacgaggcgct

SEQ ID NO: 709338 - DNA, 75 bp, synthetic construct
  source 1..75: mol_type = other DNA
cgcgggcatgaccggcggcttcgcttacgttctcgacgaaagtggtgatttccgcaaacgcgttaacccggaact

SEQ ID NO: 709339 - DNA, 75 bp, synthetic construct
  source 1..75: mol_type = other DNA
ctgctggcaggcgggatggatatcatccgcgccatgcgtctgttagtgccacccgcctggcagaacaacccggat

SEQ ID NO: 709340 - DNA, 75 bp, synthetic construct
  source 1..75: mol_type = other DNA
ttgaagcggcagaactttgccaccagaccagttccttaccagaaatctattgaaatggtcactttacttaacacg

SEQ ID NO: 709341 - DNA, 75 bp, synthetic construct
  source 1..75: mol_type = other DNA
ctggccctgccgccgcaggggcgggcagagttaactctcagcagcaacctggcactgccgcgcggtgcccgcgat

SEQ ID NO: 709342 - DNA, 75 bp, synthetic construct
  source 1..75: mol_type = other DNA
cggcgatttcggcgatacgcctaatgaccggcagttctgtatgaatggactggtattccccgaccgccgcgccca

SEQ ID NO: 709343 - DNA, 75 bp, synthetic construct
  source 1..75: mol_type = other DNA
atgaaccggctgtctgacgatccggactggctcgccgcttacagcgcacgtatcacacgtatggtccagagcaac

SEQ ID NO: 709344 - DNA, 75 bp, synthetic construct
  source 1..75: mol_type = other DNA
ggctgcagacggtacgtgggcgtttaacaatatgcagatggagaacgtctccggttttaaatgggacaccaacca

SEQ ID NO: 709345 - DNA, 75 bp, synthetic construct
  source 1..75: mol_type = other DNA
cggtattgataccaggaaaaatattctcggaaaagctgttgagttaacaaccggggccagtgccagtggaaagct

SEQ ID NO: 709346 - DNA, 75 bp, synthetic construct
  source 1..75: mol_type = other DNA
attaaactcatgtctgattatttggggtacagtgaagatgagatcttacgacgctatccatacccgttctttaat

SEQ ID NO: 709347 - DNA, 75 bp, synthetic construct
  source 1..75: mol_type = other DNA
atcctcgcggggtatcatgacgtcgaaacctgccgtgactatggtgataacgagcgcgtaacgctcggccgctat

SEQ ID NO: 709348 - DNA, 75 bp, synthetic construct
  source 1..75: mol_type = other DNA
caggcactggcgcggttgcctgaacaaccttgccgtattcttgatctcgggacgggtaccggggcgattgcgctt

SEQ ID NO: 709349 - DNA, 75 bp, synthetic construct
  source 1..75: mol_type = other DNA
gagttttccgccagtcgggtaaaagtgttacatgccaatatcagccgctgtggcatcagtaatgttgcgctcacg

SEQ ID NO: 709350 - DNA, 75 bp, synthetic construct
  source 1..75: mol_type = other DNA
tgtactttattgtttatcttcttatattgctttattctatcaaatacctctgctggaatctttacttgatatttt

SEQ ID NO: 709351 - DNA, 75 bp, synthetic construct
  source 1..75: mol_type = other DNA
tccggacaccgaatgtctggtagaacaggcgctgacacgcttgcctgaacggccttgtcgcattctcgatcttgg

SEQ ID NO: 709352 - DNA, 75 bp, synthetic construct
  source 1..75: mol_type = other DNA
gcgaaattaccgctgtagatcgtatgccagatgctgtctctctggcgcaacgtaatgcccagaatctggcgatca

SEQ ID NO: 709353 - DNA, 75 bp, synthetic construct
  source 1..75: mol_type = other DNA
gggctgtcggtgccgttccggtttatcaccggtattggtggctccctgacgaaaatttatgactccgtgttccat

SEQ ID NO: 709354 - DNA, 75 bp, synthetic construct
  source 1..75: mol_type = other DNA
attaccagagatgatagatttctcatcagaaaaaatacatgattatatcgacataatcattgaagattatgaaaa

SEQ ID NO: 709355 - DNA, 75 bp, synthetic construct
  source 1..75: mol_type = other DNA
actcaacaaattttactaatgccaacatgtttcaggttaattttgttagttcaacacaaaacgccacaatctcct

SEQ ID NO: 709356 - DNA, 75 bp, synthetic construct
  source 1..75: mol_type = other DNA
ttaatgaaccattaaagaaccagaaaatatccacaggcagtatcaatgttaattgtccattgaaatatatttaca

SEQ ID NO: 709357 - DNA, 75 bp, synthetic construct
  source 1..75: mol_type = other DNA
ccgccccgggtttcctggagagtattttatctgtgaactcaggctgccagatcattatttccgatggaagcataa

SEQ ID NO: 709358 - DNA, 75 bp, synthetic construct
  source 1..75: mol_type = other DNA
tttacaatgaaatcaggaggttgaacgtaatctttagttgtgggactggagatatagttgatctatcctctctgg

SEQ ID NO: 709359 - DNA, 75 bp, synthetic construct
  source 1..75: mol_type = other DNA
tttaggttataacgcccaaattattcaacgatcggacaatacctgcgaacttaccattaatgaaccgttaaaaaa

SEQ ID NO: 709360 - DNA, 75 bp, synthetic construct
  source 1..75: mol_type = other DNA
tgaatttctccctgtcgaatctgaacaccatccagcagactcacagtgatatcgggttgatggcagcctggctgt

SEQ ID NO: 709361 - DNA, 75 bp, synthetic construct
  source 1..75: mol_type = other DNA
gaacagcgtggctgattcactggcaaaacgtgcaggtatcagtacgtctgaagcggttacggaggtgctggataa

SEQ ID NO: 709362 - DNA, 75 bp, synthetic construct
  source 1..75: mol_type = other DNA
cttagcgccaaagctaatactgatttcagctataaaggttcggaccagtcatcgcatggtattaattcagatatc

SEQ ID NO: 709363 - DNA, 75 bp, synthetic construct
  source 1..75: mol_type = other DNA
agcgcagtttaattatggggtctttttatcagatacaaatccaacattatcagaatattataatttgaatagagc

SEQ ID NO: 709364 - DNA, 75 bp, synthetic construct
  source 1..75: mol_type = other DNA
gcagtttaattatgggttttttttatcggatacaaatccaatattatcagaacattataatttgaataaagctat

SEQ ID NO: 709365 - DNA, 75 bp, synthetic construct
  source 1..75: mol_type = other DNA
tgcagatggagaatgtctccggctttaaatgggataccaaccagtccgtgcgtgacggtcagatgctgacccagc

SEQ ID NO: 709366 - DNA, 75 bp, synthetic construct
  source 1..75: mol_type = other DNA
tgttcacccgctgcgtgctcggcatggtcgtcacgctggaagcgccgtctgccgtttcggttggcctgtgcctcg

SEQ ID NO: 709367 - DNA, 75 bp, synthetic construct
  source 1..75: mol_type = other DNA
gccgaatatcaggaaatacagatttgagaaaattcctgtatctgaaaaggagtccattcttgcccgtattgacaa

SEQ ID NO: 709368 - DNA, 75 bp, synthetic construct
  source 1..75: mol_type = other DNA
atggaaatcaaacttgccgttcagttcggacgattgtttgaggcatggctgaagtcagagcgcgagtctccggaa

SEQ ID NO: 709369 - DNA, 75 bp, synthetic construct
  source 1..75: mol_type = other DNA
ctatcagccgggcgatgcgctgggcgtctggtatcagaacgatccggcactggtaaaagagattgtcgaactgct

SEQ ID NO: 709370 - DNA, 75 bp, synthetic construct
  source 1..75: mol_type = other DNA
gcccaggcaccggcatcgcgccgttccgcgcctttatgcagcaacgcgccgccgacgaagcgccggggaaaaact

SEQ ID NO: 709371 - DNA, 75 bp, synthetic construct
  source 1..75: mol_type = other DNA
attccctgcaggccacacagcttcagtcggccattgtgaaggcgatgtatgctgccacgatcgaaagtgaacttg

SEQ ID NO: 709372 - DNA, 75 bp, synthetic construct
  source 1..75: mol_type = other DNA
catccagtggctgacagataacggttcagcgtacagagcgcatgaaacacggcagttcgccagagagttgaatct

SEQ ID NO: 709373 - DNA, 75 bp, synthetic construct
  source 1..75: mol_type = other DNA
cacgcgcccttgttgccggggtgatgcactgggcggtcactaccggcggcttcaacagtgaaacagcacaggacg

SEQ ID NO: 709374 - DNA, 75 bp, synthetic construct
  source 1..75: mol_type = other DNA
ccgattctttccgccatttttgtcatgctggcgatgtactacgtcatcacccctttggtggctggatcaacggcg

SEQ ID NO: 709375 - DNA, 75 bp, synthetic construct
  source 1..75: mol_type = other DNA
aatctgtgatgaaaatggtgcacctgttttcactgtcgccgatatcactggtgaagcagaccctgagcgcggcgc

SEQ ID NO: 709376 - DNA, 75 bp, synthetic construct
  source 1..75: mol_type = other DNA
acccgattgctgagcgcattgcggcgcatatttgcgatcagcacggcgccccagtgtttaccgcagcagacattc

SEQ ID NO: 709377 - DNA, 75 bp, synthetic construct
  source 1..75: mol_type = other DNA
gagcgcatgaaacacggcagttcgccagagagctgaatctgaagccctgcacaacggcaatcagtagccctcaga

SEQ ID NO: 709378 - DNA, 75 bp, synthetic construct
  source 1..75: mol_type = other DNA
actgctgtggctgaaaggtgatgaacctgtcaacgttgagggcaaaaccctgccgctgaacgaagcgctacagtg

SEQ ID NO: 709379 - DNA, 75 bp, synthetic construct
  source 1..75: mol_type = other DNA
gtattaagccagtcaggatcgtactggtggccgcatcggggcgggcagcaagaaggtgttttacttgagcaactt

SEQ ID NO: 709380 - DNA, 75 bp, synthetic construct
  source 1..75: mol_type = other DNA
gctaatcaggcgctgtatacgcaattacaagctacaaaagaatccattttctggcgtcaggttgacggcggacat

SEQ ID NO: 709381 - DNA, 75 bp, synthetic construct
  source 1..75: mol_type = other DNA
ttttagcgatcgcgccgatcgtactgttgttgccgggcaaagctttggggggctttccgcgctgtatgccggact

SEQ ID NO: 709382 - DNA, 75 bp, synthetic construct
  source 1..75: mol_type = other DNA
tggatcacccactccccaatggggcacgttcgctatcttaaagaaaataatattcgctatcgcaccctttctgac

SEQ ID NO: 709383 - DNA, 75 bp, synthetic construct
  source 1..75: mol_type = other DNA
gatggcgaattttgggcgcaaagtatgcccgtctggcctgtgctgacttcgctgacccatcgtcagcaacttcct

SEQ ID NO: 709384 - DNA, 75 bp, synthetic construct
  source 1..75: mol_type = other DNA
agagctggtggcagtcgaaacatggcccggaatggcaacgtctgaatgacgaaatgtttgaggtcactttctggt

SEQ ID NO: 709385 - DNA, 75 bp, synthetic construct
  source 1..75: mol_type = other DNA
ccggaaaccccggtgatcatgattggccctggcaccggcatcgcgccgttccgtgcctttatgcagcagcgtgct

SEQ ID NO: 709386 - DNA, 75 bp, synthetic construct
  source 1..75: mol_type = other DNA
acgcgccgctggcggccagcctttcggttaaccagaaaattaccgggcgtaactctgaaaaagacgttcgtcaca

SEQ ID NO: 709387 - DNA, 75 bp, synthetic construct
  source 1..75: mol_type = other DNA
gcccaggcaccggcatcgcgccgttccgcgcctttatgcagcaacgcgccgctgacgaagcgccaggtaaaaact

SEQ ID NO: 709388 - DNA, 75 bp, synthetic construct
  source 1..75: mol_type = other DNA
atccattttctggcgtcaggttgacggcggacatgatgcgctttgttggcgcggtggcttgatgcaggggctaat

SEQ ID NO: 709389 - DNA, 75 bp, synthetic construct
  source 1..75: mol_type = other DNA
atagctggtggctgtcgaaacatggcccggaatggcaacgttttggtgataaaacttatcaggtgactttctggt

SEQ ID NO: 709390 - DNA, 75 bp, synthetic construct
  source 1..75: mol_type = other DNA
gggcgtaactctgaaaaagacgttcgccatatcgaaattgacctgggcgactctggcctgcgttaccagcctggc

SEQ ID NO: 709391 - DNA, 75 bp, synthetic construct
  source 1..75: mol_type = other DNA
tgggcgtctatatggcggggatcgcgctgggggcagtcataactgcgctgatggtggtgttcctgcgtctgatga

SEQ ID NO: 709392 - DNA, 75 bp, synthetic construct
  source 1..75: mol_type = other DNA
aaataccaaatatggtttatccgtgccaattgaaaacattaacgttgattcattcctgaaagtacgttctcaagt

SEQ ID NO: 709393 - DNA, 75 bp, synthetic construct
  source 1..75: mol_type = other DNA
gtcgagattctccagcctaatagccagatcgcggtcgatgtatccggcctcaagattcgtaaccttgaaaccaat

SEQ ID NO: 709394 - DNA, 75 bp, synthetic construct
  source 1..75: mol_type = other DNA
aaagtcgcagagcgtgtggtgacgctggtatcaatggaattaccggacaacgtgcggttgattcgtgattacgac

SEQ ID NO: 709395 - DNA, 75 bp, synthetic construct
  source 1..75: mol_type = other DNA
ggtgtctgtgtggaaacggtgcattgatggtattgaggttgtaagtatcgaacggtatttaggcacgtttgatta

SEQ ID NO: 709396 - DNA, 75 bp, synthetic construct
  source 1..75: mol_type = other DNA
aatataatctggcagttaatgcagatggtcgcgtggctggtattcacatgagcgcaaccaacgatccggcacaac

SEQ ID NO: 709397 - DNA, 75 bp, synthetic construct
  source 1..75: mol_type = other DNA
ttaaagagaacttgaccggattgatgcagactttcggtggggtgatgtttgaatccttcgggcgtattactctga

SEQ ID NO: 709398 - DNA, 75 bp, synthetic construct
  source 1..75: mol_type = other DNA
aaggcggcaccgggcttggtttatccattgcccgtaatttgattgatcagcattcaggcaaaattgaatttacca

SEQ ID NO: 709399 - DNA, 75 bp, synthetic construct
  source 1..75: mol_type = other DNA
aaatccgcttggcggtttacgtggcgcggcgcagctgctcagcaaagcattacctgacccgtcactgctggaata

SEQ ID NO: 709400 - DNA, 75 bp, synthetic construct
  source 1..75: mol_type = other DNA
accggaatacagaccgtctgctctgtttactgacgttactgctggtgctgattctggttaccgtttcaggcgtca

SEQ ID NO: 709401 - DNA, 75 bp, synthetic construct
  source 1..75: mol_type = other DNA
ttctgtgacggctcagcgtatgccagatggcatgatcctgctggagatggcaccaatggataatcagcgccgctt

SEQ ID NO: 709402 - DNA, 75 bp, synthetic construct
  source 1..75: mol_type = other DNA
gtttcaactgaccttgcatggcgaacgctatcggctggcagcacgaattgatgtggaagataacgggcctggtat

SEQ ID NO: 709403 - DNA, 75 bp, synthetic construct
  source 1..75: mol_type = other DNA
gctgaatattgtgcgcaatgcgctacaggcgctggggccggaaggcggtgaaatcattctgcgtacccgcaccgc

SEQ ID NO: 709404 - DNA, 75 bp, synthetic construct
  source 1..75: mol_type = other DNA
tgctacgttatccggctgatgctgaaaacgatgctactgttcgcgcagatggtcgaattattgctaaggatgtag

SEQ ID NO: 709405 - DNA, 75 bp, synthetic construct
  source 1..75: mol_type = other DNA
gatttcacgcatggtgccgaccttaattatgggcggtgtgatcctcgctttcagccagctgattgcttatagctg

SEQ ID NO: 709406 - DNA, 75 bp, synthetic construct
  source 1..75: mol_type = other DNA
aacttaaggcgtatgccatgctgactatggcaccatccaacccggtcgttaacgaagccaatgaggcaagggaat

SEQ ID NO: 709407 - DNA, 75 bp, synthetic construct
  source 1..75: mol_type = other DNA
agacgaataccgcaaagttttagaagttgagtttcgcacgggtaagaatcctaacaccgcattgtcactggctaa

SEQ ID NO: 709408 - DNA, 75 bp, synthetic construct
  source 1..75: mol_type = other DNA
cagctttaccactgaccacgtattaccggtcaccgcacgttctatcgctatcgttattccgccgattggtctggg

SEQ ID NO: 709409 - DNA, 75 bp, synthetic construct
  source 1..75: mol_type = other DNA
agcgttcaaaaccacatttttgctaccgattctttccgccatttttgtcatgctggcgatgtactacgtcatcac

SEQ ID NO: 709410 - DNA, 75 bp, synthetic construct
  source 1..75: mol_type = other DNA
aaatccagttaccggatttcctgttagcgttcaaaaccacatttttgctaccgattctttccgccatttttgtca

SEQ ID NO: 709411 - DNA, 75 bp, synthetic construct
  source 1..75: mol_type = other DNA
aaattgatgcaatgcataagcaaatcactacagaaacagggcagacggtgcaagcctcagccgatactctcaaga

SEQ ID NO: 709412 - DNA, 75 bp, synthetic construct
  source 1..75: mol_type = other DNA
ccatcaatcgactattcagagcaaatgctacgttatccggctgatgctgaaaacgatgctactattcgtcaagat

SEQ ID NO: 709413 - DNA, 75 bp, synthetic construct
  source 1..75: mol_type = other DNA
aaaaatccgtaaccttgaaaccaatgctattgaggctagcactaacggcgtggatcagattttccactacctaac

SEQ ID NO: 709414 - DNA, 75 bp, synthetic construct
  source 1..75: mol_type = other DNA
agcaaatgctacgttatccggctgatgctgaaaatgatgctactatccgtcaagatgggcgcattattgctaaag

SEQ ID NO: 709415 - DNA, 75 bp, synthetic construct
  source 1..75: mol_type = other DNA
gatggctgctgctgcaacattttctgttatgaccgcagtcgctatcggtatggctgctggtgcaatgaccttgat

SEQ ID NO: 709416 - DNA, 75 bp, synthetic construct
  source 1..75: mol_type = other DNA
ctggtgctatctgtgtttacaaagcaatttctaagaaagaaaacaataagttagtgcaaatcttcgcaattgccg

SEQ ID NO: 709417 - DNA, 75 bp, synthetic construct
  source 1..75: mol_type = other DNA
gcggaatattgcgggaaagtgaagcagactattttgcagatcgccacaatcgatgccctagaaattctcgaatct

SEQ ID NO: 709418 - DNA, 75 bp, synthetic construct
  source 1..75: mol_type = other DNA
atacacgacgcgtaccagccaaagaggggaccgagtgggtattaaaaaatatcatcaacccgcttaaagaaacta

SEQ ID NO: 709419 - DNA, 75 bp, synthetic construct
  source 1..75: mol_type = other DNA
taccgtaggccgtatttatgttgttaatccggcataccatgaaggattaggcattgaagatgcgatcccggttgg

SEQ ID NO: 709420 - DNA, 75 bp, synthetic construct
  source 1..75: mol_type = other DNA
gttatgtgaaacgctggaacatctgattcgtgagaaggatgttccaggaatagaaaaatacatcagcgacattga

SEQ ID NO: 709421 - DNA, 75 bp, synthetic construct
  source 1..75: mol_type = other DNA
gccggattttgtggtgatgtacgccagaccatgatgcaggtggcgacggtagacactctaaaaattatggaagct

SEQ ID NO: 709422 - DNA, 75 bp, synthetic construct
  source 1..75: mol_type = other DNA
cttctatcagggaacaaatcgacgtagaaaaattacgccgtgagagagcattagcggatgcagccgaacgagaga

SEQ ID NO: 709423 - DNA, 75 bp, synthetic construct
  source 1..75: mol_type = other DNA
cggtggcgatggtcaatatgaaggtcataaaggctatcagttttggccgaccgatatttccagcgccaaagaggt

SEQ ID NO: 709424 - DNA, 75 bp, synthetic construct
  source 1..75: mol_type = other DNA
tgaagagtgggggaatccgcaggatccgcaatattacgagtatatgaaaagctacagcccgtatgacaacgtcac

SEQ ID NO: 709425 - DNA, 75 bp, synthetic construct
  source 1..75: mol_type = other DNA
tccaagactgatccggaaagtgcgggttgttgaggtggcctcgttagaagggcccaaaggcatccttatcgaaaa

SEQ ID NO: 709426 - DNA, 75 bp, synthetic construct
  source 1..75: mol_type = other DNA
aaccctgctttccatgaaggcaaaaccatcgccgatgccatcgcaacgaatgaaaccgttgttgctgactacttt

SEQ ID NO: 709427 - DNA, 75 bp, synthetic construct
  source 1..75: mol_type = other DNA
gctcaatagcttcacgcgctcctggtcgaaagagctgggtaaacacggtatccgtgtggtcggtatcgcgccggg

SEQ ID NO: 709428 - DNA, 75 bp, synthetic construct
  source 1..75: mol_type = other DNA
gctgctacgccgccactaaagctgcgcttaatagcttcacgcgatcctggtcgaaagaattgggtaagcacggta

SEQ ID NO: 709429 - DNA, 75 bp, synthetic construct
  source 1..75: mol_type = other DNA
ggggtaatgcccgacgcctgtttaaacttgtgcgtggggtctaccggatttgtgatatcagcgatgccccggtca

SEQ ID NO: 709430 - DNA, 75 bp, synthetic construct
  source 1..75: mol_type = other DNA
aaaccagaacgaatactattatggcgtatcgcgcaaagagtccgctcgcagcggtctgcgtggctataacccgaa

SEQ ID NO: 709431 - DNA, 75 bp, synthetic construct
  source 1..75: mol_type = other DNA
atgcgtttgaatcgtctcaagaccaaagagaaatctttatccaagagcgctgagacacgcctgaagatcatcctt

SEQ ID NO: 709432 - DNA, 75 bp, synthetic construct
  source 1..75: mol_type = other DNA
ataaaaattttaaaagagaatgagtctgtatatattcctgcaggtattaagcatagtttggaaaatattgggaca

SEQ ID NO: 709433 - DNA, 75 bp, synthetic construct
  source 1..75: mol_type = other DNA
ccgaatgtgcgccgacgtttgcctgcttcggcaaccacgatcgccctgttggtacagaaaaaaatcacttaattg

SEQ ID NO: 709434 - DNA, 75 bp, synthetic construct
  source 1..75: mol_type = other DNA
tttagtaacgtactctctccccttgccgaatgtgcgccgacgtttgcctgcttcggcaaccacgatcgccctgtt

SEQ ID NO: 709435 - DNA, 75 bp, synthetic construct
  source 1..75: mol_type = other DNA
aaccacgaagaaatagacgaccatgacctttctgttattgcaggacttatcaaacaactttccagcaatgtggcg

SEQ ID NO: 709436 - DNA, 75 bp, synthetic construct
  source 1..75: mol_type = other DNA
aattagcgtgttgtatggcgcggcaggtcttggcaaaacaatgattttgcgcgaatacgccgccagaaaccggga

SEQ ID NO: 709437 - DNA, 75 bp, synthetic construct
  source 1..75: mol_type = other DNA
gctggcgcgcggtgtgtaccggatttgtgatatcagcgatgcaccggtcagtgtgcaggccattgataaatattc

SEQ ID NO: 709438 - DNA, 75 bp, synthetic construct
  source 1..75: mol_type = other DNA
ggcgatacgctgacgcaggaagattttaacaagattgccacagacatgatgccggaagcggcggacccggaaatt

SEQ ID NO: 709439 - DNA, 75 bp, synthetic construct
  source 1..75: mol_type = other DNA
gcgttattggcgctgactgccatgcagtaggcaataaagttctggatcgtgtttttaccacccatgacttcaggg

SEQ ID NO: 709440 - DNA, 75 bp, synthetic construct
  source 1..75: mol_type = other DNA
tcattaatctgggcgtaatggtcagccaggacgaatatattgatgctgccattgaaactggcgctgacgcgattg

SEQ ID NO: 709441 - DNA, 75 bp, synthetic construct
  source 1..75: mol_type = other DNA
aaaaatgtaatactttataataactcgtctcttcgcatagactttttaggttataatgcccaaataacgcaacga

SEQ ID NO: 709442 - DNA, 75 bp, synthetic construct
  source 1..75: mol_type = other DNA
tgcgatcgcactcggtcacccgataggcgcttccggttgccgaatcctggtttctcttgttcatgaaatggtgaa

SEQ ID NO: 709443 - DNA, 75 bp, synthetic construct
  source 1..75: mol_type = other DNA
gggcggcggcatttgcggcagcggctggaattaatacaaacgccaaaaaattaatgagtgttagagaaaacgatg

SEQ ID NO: 709444 - DNA, 75 bp, synthetic construct
  source 1..75: mol_type = other DNA
cagcctgggcaaacgaaattcgcctgatgtgtgtgcaggatggtcgtactcacaaacaaatctgcgagatgtaca

SEQ ID NO: 709445 - DNA, 75 bp, synthetic construct
  source 1..75: mol_type = other DNA
caaaaccatgcaccttatggatgcatggtttttttcgggaaaaatagcggaattttcggggatttttttgcgtgc

SEQ ID NO: 709446 - DNA, 75 bp, synthetic construct
  source 1..75: mol_type = other DNA
cttcatccccagaagccatgatgtcatggttgcagaacaactcatctgagcttactcgtgccggagtagaccctc

SEQ ID NO: 709447 - DNA, 75 bp, synthetic construct
  source 1..75: mol_type = other DNA
aaggcaagcgacattaacgcaacgcttggtctgatccgcgaaaacaatgaattggctcgatcaggtgcaaataac

SEQ ID NO: 709448 - DNA, 75 bp, synthetic construct
  source 1..75: mol_type = other DNA
ctgggtaagcatggtatccgtgtggtcggtattgcgccggggattctggaaaaaaccggactacgtacccccgaa

SEQ ID NO: 709449 - DNA, 75 bp, synthetic construct
  source 1..75: mol_type = other DNA
taaccagatggcggacaatatcaacgccttgattgccagcaaaaaacagcttattgacggtatcgctcacgaact

SEQ ID NO: 709450 - DNA, 75 bp, synthetic construct
  source 1..75: mol_type = other DNA
catcttagcgaaccagacctgccgttgtggctgtcaacgcatctggcagatattcaggcagtaacgcccgataaa

SEQ ID NO: 709451 - DNA, 75 bp, synthetic construct
  source 1..75: mol_type = other DNA
actgccattcaacggttgaaaccagcctgctgctgtcaggaaacagagcaacattaattgttgaagatgatggct

SEQ ID NO: 709452 - DNA, 75 bp, synthetic construct
  source 1..75: mol_type = other DNA
gacaacctggcagcgggttcaggagaatatgataaaaggtggattatcggggcgaagtgcctccggtaaaaatac

SEQ ID NO: 709453 - DNA, 75 bp, synthetic construct
  source 1..75: mol_type = other DNA
tattgtcgggcaggttattgagggagcgtatgaagtgctcggtgtctttgataaagtcactgaaaatatggaggc

SEQ ID NO: 709454 - DNA, 75 bp, synthetic construct
  source 1..75: mol_type = other DNA
gcgaggaactggcgcaatataattcgtggctggattatctggacgcactggagctggtcgatacttccggtgcgc

SEQ ID NO: 709455 - DNA, 75 bp, synthetic construct
  source 1..75: mol_type = other DNA
ccatcctcagccgaaacctccagcgcctccggcatgggcaatgatgccaccgtcgaactctctccagttgctgga

SEQ ID NO: 709456 - DNA, 75 bp, synthetic construct
  source 1..75: mol_type = other DNA
gccctgaatttatctggcgcttttactcctgccaaaaacgtcactatcacttcgttattgcaccaacagaagatg

SEQ ID NO: 709457 - DNA, 75 bp, synthetic construct
  source 1..75: mol_type = other DNA
ggtgtcgcgggacagttactggatattacgtatgaagggatttgtcgtatcttcagaaaattgagggcaaaacag

SEQ ID NO: 709458 - DNA, 75 bp, synthetic construct
  source 1..75: mol_type = other DNA
tataaagagggactccagaaggtaagactggccctgcgtcttctgagtaaaggaatgtctcgggaagacgttgca

SEQ ID NO: 709459 - DNA, 75 bp, synthetic construct
  source 1..75: mol_type = other DNA
gagcgtgttggctggcagttggctgatgtcgatcttatcgaggctaatgaagcgtttgctgcacaggcgctttcg

SEQ ID NO: 709460 - DNA, 75 bp, synthetic construct
  source 1..75: mol_type = other DNA
atggtcggcggctggggaggcaaagtgaaccgccccgggtttcctggagagtgttttatctgtgaactcaggctg

SEQ ID NO: 709461 - DNA, 75 bp, synthetic construct
  source 1..75: mol_type = other DNA
tccctgtattttctctgcccgtttttcaaccgacttgcgcaattctctcagttattggtgtctccctgttaacgc

SEQ ID NO: 709462 - DNA, 75 bp, synthetic construct
  source 1..75: mol_type = other DNA
ggttgtcgtttgcgtttcccgcgtccaaatccgttaccgatttcctgtttccctggttccagcaaggtaggttaa

SEQ ID NO: 709463 - DNA, 75 bp, synthetic construct
  source 1..75: mol_type = other DNA
tggctttcgcgatcgcgatggctatcgctgttaacgtgatgctgttcggcgggttgtacctgcttgcgcatccat

SEQ ID NO: 709464 - DNA, 75 bp, synthetic construct
  source 1..75: mol_type = other DNA
atgtcaataaagaaaacactcataaaaaaaacgcaagacatttatttttctagatatagtatttatgacaagcta

SEQ ID NO: 709465 - DNA, 75 bp, synthetic construct
  source 1..75: mol_type = other DNA
gcccgtatggcgcaccgcagtacaacgcaaccaaaggtcatatgaccaaatgtgatggttgctatgaccgtgttg

SEQ ID NO: 709466 - DNA, 75 bp, synthetic construct
  source 1..75: mol_type = other DNA
actaaagtctgcccgagcggtgcgatgcataaacgtgaagatggttttgttgtggtcgatgaagatgtgtgcatt

SEQ ID NO: 709467 - DNA, 75 bp, synthetic construct
  source 1..75: mol_type = other DNA
aatccttgctgacgtttgccaatggcaatatcgcggcgacggttgcggatacagtggcggccctgtagctactga

SEQ ID NO: 709468 - DNA, 75 bp, synthetic construct
  source 1..75: mol_type = other DNA
taaaaaccgcactatctctcagttgtacgacccggaaaaaggcatgttcctgccggatcgttttgtgaaaggcac

SEQ ID NO: 709469 - DNA, 75 bp, synthetic construct
  source 1..75: mol_type = other DNA
tggctggacgcgccgattggctacatgggttccttcaagaatctgtgcgacaagcgcggcgataccaccagcttc

SEQ ID NO: 709470 - DNA, 75 bp, synthetic construct
  source 1..75: mol_type = other DNA
caacgttttggctggggcgatgacgtgggctggagccagggttggcgtggcggtgaatggggcgctggcgggcgg

SEQ ID NO: 709471 - DNA, 75 bp, synthetic construct
  source 1..75: mol_type = other DNA
aatcgattcactacacgttgatgaagtgattatgggtaacgtgctacaagccgggctggggcaaaatccggcgcg

SEQ ID NO: 709472 - DNA, 75 bp, synthetic construct
  source 1..75: mol_type = other DNA
tggcttgatgaacgtcaggcagcaagcccggcagagttccagggtaaaaaacctcctgttcagcaacgtgtatat

SEQ ID NO: 709473 - DNA, 75 bp, synthetic construct
  source 1..75: mol_type = other DNA
gacgaatactggaagaaagactccaccgccgagctgtaccacttcatcggtaaagatatcgtttacttccacagc

SEQ ID NO: 709474 - DNA, 75 bp, synthetic construct
  source 1..75: mol_type = other DNA
tacttcaacctctggggcctgcaaaacacctccgacgatctgattgtaaatatcattatgggcgtgatgttcctg

SEQ ID NO: 709475 - DNA, 75 bp, synthetic construct
  source 1..75: mol_type = other DNA
acactattcactttctcgttattgatgtattcattgtggctattagttaccgcatttgcatcgcttccagtgaag

SEQ ID NO: 709476 - DNA, 75 bp, synthetic construct
  source 1..75: mol_type = other DNA
gatgagtagtggtctggctatcatgctcgctgaacagctatggttgttttacctaggctgtgcagtgctgtcatt

SEQ ID NO: 709477 - DNA, 75 bp, synthetic construct
  source 1..75: mol_type = other DNA
tgcggtggccttcccggcgtttgacagcgtgcgtcaggctctgccgatggtacaggcgttgctgcaaatggcgct

SEQ ID NO: 709478 - DNA, 75 bp, synthetic construct
  source 1..75: mol_type = other DNA
cagcgccgccgtcgcggtgctcccctgtaagccggaccttcgtcagctgcgctttgaagtacagcacacccggat

SEQ ID NO: 709479 - DNA, 75 bp, synthetic construct
  source 1..75: mol_type = other DNA
ggcagcgcggtcggcgatatccgcagcgctggtgaacaggtcgggaaaatgatcgtcagtaaaacacgcattccc

SEQ ID NO: 709480 - DNA, 75 bp, synthetic construct
  source 1..75: mol_type = other DNA
cgaattcccgaaagcgaattcaacggctgaagcgttaggtgcattgcgcccggccttcgataaagcaggaacagt

SEQ ID NO: 709481 - DNA, 75 bp, synthetic construct
  source 1..75: mol_type = other DNA
tccgctggtacatacttgtggctcaacacaccgtttatttcccggacgcctttttgacgcaaatgcgcgaagcga

SEQ ID NO: 709482 - DNA, 75 bp, synthetic construct
  source 1..75: mol_type = other DNA
agaaagcaatcaggaaatcgcagctacccaacgggaactgatcgacagcgcctttcatgcattacgccctggcgg

SEQ ID NO: 709483 - DNA, 75 bp, synthetic construct
  source 1..75: mol_type = other DNA
cattcgcgttaatacgctgaaaatctccgttgctgatttcctgcaattaaccgctccttatggctggacgcttac

SEQ ID NO: 709484 - DNA, 75 bp, synthetic construct
  source 1..75: mol_type = other DNA
cacgctggtttactcgacctgtactttaaaccgggaagagaacgaagccgtttgcctgtggctgaaagagactta

SEQ ID NO: 709485 - DNA, 75 bp, synthetic construct
  source 1..75: mol_type = other DNA
gtgggcaatttcccgttcagcccggtgaaagatcgcgaagccggtcaaattcgtcaggcggctgcaagtgttggc

SEQ ID NO: 709486 - DNA, 75 bp, synthetic construct
  source 1..75: mol_type = other DNA
ccgatgcgctaaaaaactggtcaccagaaagcaatcaggaaatcgcagctacacaacgggagcttatcgacagcg

SEQ ID NO: 709487 - DNA, 75 bp, synthetic construct
  source 1..75: mol_type = other DNA
atcggcgccagcggtgcgcgtattctggtcacactattacatgcaatgcaggcacgcgataaaacgctgggtctg

SEQ ID NO: 709488 - DNA, 75 bp, synthetic construct
  source 1..75: mol_type = other DNA
gtccggtgcttttacagccgaaatcgtcccggtaaatgttgtcacccggaagaaaaccctcgtcttcagtcaaga

SEQ ID NO: 709489 - DNA, 75 bp, synthetic construct
  source 1..75: mol_type = other DNA
gctgaagcgttaggcgcattgcgcccggccttcgataaagcaggaacagtcaccgccgggaacgcgtctggtatt

SEQ ID NO: 709490 - DNA, 75 bp, synthetic construct
  source 1..75: mol_type = other DNA
ttacagtggggtaacaatctgcgcctttggcaacgagataaagaagtctggttattcccggttggcatcgaagtg

SEQ ID NO: 709491 - DNA, 75 bp, synthetic construct
  source 1..75: mol_type = other DNA
ggcacgcgataaaacgctggggctggcaacactgtgcattggcggcggtcagggaattgcgatggtgattgaacg

SEQ ID NO: 709492 - DNA, 75 bp, synthetic construct
  source 1..75: mol_type = other DNA
ggcacgcgataaaacgctgggtctggcaacgttgtgcattggcggcggtcaaggaattgcgatggtgattgaacg

SEQ ID NO: 709493 - DNA, 75 bp, synthetic construct
  source 1..75: mol_type = other DNA
atgcagcgacgattgaaagtgaacttgataccgaaaaggcctttgaatatatcgccggcgcgccacagggagcag

SEQ ID NO: 709494 - DNA, 75 bp, synthetic construct
  source 1..75: mol_type = other DNA
gtattttagcgatgaagagcgcgccagccagcagagtatgttgatctgttgttcgcgcgcgaagggtaaacgact

SEQ ID NO: 709495 - DNA, 75 bp, synthetic construct
  source 1..75: mol_type = other DNA
acacgtttatacctgtggccccgaggcgctaaatgaagcggtaagaagtgaagctgcgcgtctggacatcgccgc

SEQ ID NO: 709496 - DNA, 75 bp, synthetic construct
  source 1..75: mol_type = other DNA
gaggaagtcacgtcattgtgcagatgagcgatggtgataaccagtacagcaatgcgtattcactactgagttcgc

SEQ ID NO: 709497 - DNA, 75 bp, synthetic construct
  source 1..75: mol_type = other DNA
agagtaataaagcggcaaaagtagaatgtttatgtcgtgaaggagtatgtggtacttgtgaaacggcaattctgg

SEQ ID NO: 709498 - DNA, 75 bp, synthetic construct
  source 1..75: mol_type = other DNA
tatcgcgggcggtattggtatcacccctttcctgtcgcacatggcagagttgcaatacagcgacgtcgactggca

SEQ ID NO: 709499 - DNA, 75 bp, synthetic construct
  source 1..75: mol_type = other DNA
tacaacaaagcaacatcgactggcggttacattactgttcgcggagcccggagagttgtgcattccgtgatgaat

SEQ ID NO: 709500 - DNA, 75 bp, synthetic construct
  source 1..75: mol_type = other DNA
ccggtaacatgggatatctcattttcctccagcctgtcaccagcgaaaaattcgaacgcaaaccaaaagtgagta

SEQ ID NO: 709501 - DNA, 75 bp, synthetic construct
  source 1..75: mol_type = other DNA
gcgaactcacttcccgcgcaattgccatgctacccatccttacgggcaatgttggagttaatggcggtaatagcg

SEQ ID NO: 709502 - DNA, 75 bp, synthetic construct
  source 1..75: mol_type = other DNA
attctttttctggccgatctccattactcccgctttgttccgcttaccttgatttcagacgccattaatcttgga

SEQ ID NO: 709503 - DNA, 75 bp, synthetic construct
  source 1..75: mol_type = other DNA
ccattacaaatcccgtactcactcgacctacggcaacattgatgtcctgaaggcagcctgccgtcaggaagtgtg

SEQ ID NO: 709504 - DNA, 75 bp, synthetic construct
  source 1..75: mol_type = other DNA
ccttcccactgcaactgtttggtttccattacaaatcccgtactcactcgacctacggcaacattgatgtcctga

SEQ ID NO: 709505 - DNA, 75 bp, synthetic construct
  source 1..75: mol_type = other DNA
gaccatggcggctgtgtgaatacgctaaccactctgcgcccttcaccactggcgaagggaaacccgcagcacact

SEQ ID NO: 709506 - DNA, 75 bp, synthetic construct
  source 1..75: mol_type = other DNA
gcgctaaatgaggcggtaagaagtgaagctgcgcgtctggacatcgccgccgatacgctgcactttgaacaattt

SEQ ID NO: 709507 - DNA, 75 bp, synthetic construct
  source 1..75: mol_type = other DNA
cgccacgatgaaagcaattgtcgaagtgatggctccccggcaagttcaaaacgtaacgctttcaactccgggaca

SEQ ID NO: 709508 - DNA, 75 bp, synthetic construct
  source 1..75: mol_type = other DNA
tacggaagatttcctctaccaggtggagtggcagcgctacgtcaaagagggtgtgctgacgcggatcgatctcgc

SEQ ID NO: 709509 - DNA, 75 bp, synthetic construct
  source 1..75: mol_type = other DNA
gttcaagtacctaatggtgatcaacgatgacaacaagaagcgcgttctcgtgacggtgtttgagcgcaatgaatg

SEQ ID NO: 709510 - DNA, 75 bp, synthetic construct
  source 1..75: mol_type = other DNA
gtgcaaataaccaaagccttactttcagaaccggaggaaatccggcgttttgttcagcaggcgggggaccactgg

SEQ ID NO: 709511 - DNA, 75 bp, synthetic construct
  source 1..75: mol_type = other DNA
gtggctgagttaattttctctgcattgaggattctcggtgctatgtggatggtgtcgacgttcatcgtggttgcc

SEQ ID NO: 709512 - DNA, 75 bp, synthetic construct
  source 1..75: mol_type = other DNA
atgaatactttaacactgataaacgataccaagcaaccaatgatgggcagccggaaaattgcagaagtcactggc

SEQ ID NO: 709513 - DNA, 75 bp, synthetic construct
  source 1..75: mol_type = other DNA
taccgtcgtcctgagccttataaaggcaagggtgttcgttacgccgacgaagtcgtgcgtaccaaagaggctaag

SEQ ID NO: 709514 - DNA, 75 bp, synthetic construct
  source 1..75: mol_type = other DNA
tgggatgagcaggcaatctccatccacgctgacagcgacagcgaagtgttactgttcgatctgcctccggtttaa

SEQ ID NO: 709515 - DNA, 75 bp, synthetic construct
  source 1..75: mol_type = other DNA
actctgtaaatcaagataccctaacgaaagggcagcaaaatgattttgtcaccttagaaaatatttcaatactgg

SEQ ID NO: 709516 - DNA, 75 bp, synthetic construct
  source 1..75: mol_type = other DNA
cagcaaaagaacgccacccagactgtcagattgtgaagcgaaaaggacggctatatgtcatttgtaaatctaatc

SEQ ID NO: 709517 - DNA, 75 bp, synthetic construct
  source 1..75: mol_type = other DNA
ggcggtagtaacagcaacggggcgcctggtgcgcgtgtctatcaagggaaaattccgttataaagtgcctggcgt

SEQ ID NO: 709518 - DNA, 75 bp, synthetic construct
  source 1..75: mol_type = other DNA
tgtacttccttttatgaacgtattactgagcgtaatcacacgaccagtccatcatcgccggtggtattacgctgg

SEQ ID NO: 709519 - DNA, 75 bp, synthetic construct
  source 1..75: mol_type = other DNA
gcaacaaatcacttcaccaacttccacatcccctcacgggttgtcaggaataccgtgatattcactgccaaaacc

SEQ ID NO: 709520 - DNA, 75 bp, synthetic construct
  source 1..75: mol_type = other DNA
aactggcaaaaaagaacggggcaaagattatttgtataacgcatagctaccattcaccaatagcgaaactggccg

SEQ ID NO: 709521 - DNA, 75 bp, synthetic construct
  source 1..75: mol_type = other DNA
ggaaaacgggtaactcctgtttatatccaggaaggcggcgagctactgcttaataacgacgaaattcactaccaa

SEQ ID NO: 709522 - DNA, 75 bp, synthetic construct
  source 1..75: mol_type = other DNA
aaattcagtgggcaaaggacggcagcctgacgccggaagaggtagatcatgtcattgcgctggcgcagaaactga

SEQ ID NO: 709523 - DNA, 75 bp, synthetic construct
  source 1..75: mol_type = other DNA
atccacgctgcaaagcggtgtacgacgcctgcacacagctgccagcgttcattgctgcagcgccagaaaatcaac

SEQ ID NO: 709524 - DNA, 75 bp, synthetic construct
  source 1..75: mol_type = other DNA
cgcatgaactgcgatttgagcgggtatccacgctgcaaagcggtgtacgacgcctgcacacagctgccagcgttc

SEQ ID NO: 709525 - DNA, 75 bp, synthetic construct
  source 1..75: mol_type = other DNA
ggtgctggaaattgtctatgccatcgcttgtgatattcatccattaaataacttgcgcgtgctgcgctacctgac

SEQ ID NO: 709526 - DNA, 75 bp, synthetic construct
  source 1..75: mol_type = other DNA
ttgaagcatccaataagttaaattttgagcaatggctggggcaacaacgcgaaaaaatcgacttggactgcggtt

SEQ ID NO: 709527 - DNA, 75 bp, synthetic construct
  source 1..75: mol_type = other DNA
cattgctctatttggcctttaactacgccgatcctgtcactcgtgaagggtgggcaatcccggcggcgactgata

SEQ ID NO: 709528 - DNA, 75 bp, synthetic construct
  source 1..75: mol_type = other DNA
tgagacgccggttcagctgcgggtaggttctcttgaaatcaataaaaacatgctgttatggataaatgacgcgct

SEQ ID NO: 709529 - DNA, 75 bp, synthetic construct
  source 1..75: mol_type = other DNA
tgattatcgcactcttagcaccaggcacggcggcgcataatttcatcaatgggaagcaggttacgcctgtttata

SEQ ID NO: 709530 - DNA, 75 bp, synthetic construct
  source 1..75: mol_type = other DNA
atgccatttcgtcggattgtcgcgctgatcattgcgctcttagcgccagtcgtggcggcgcataattttgtcact

SEQ ID NO: 709531 - DNA, 75 bp, synthetic construct
  source 1..75: mol_type = other DNA
atgtcatctcgtttgattattgcgctgattatcatgctcttagccccgggtgtgcaggcacacaatttcgtcact

SEQ ID NO: 709532 - DNA, 75 bp, synthetic construct
  source 1..75: mol_type = other DNA
gacattgatatgaatagtaaaaagattaccatttcgcacgaagcaatccctgctgtgggctggcctgcaatgacc

SEQ ID NO: 709533 - DNA, 75 bp, synthetic construct
  source 1..75: mol_type = other DNA
acaactgctataccgcagatagcggcctgccggatacgctgacggcccgcctgcatagcgacccgcgccctaaag

SEQ ID NO: 709534 - DNA, 75 bp, synthetic construct
  source 1..75: mol_type = other DNA
gcgatgcctcgatcctaaccggcagcccggtgatccgcagcaacgagcagctgctgtgggcggtacgcgccgccc

SEQ ID NO: 709535 - DNA, 75 bp, synthetic construct
  source 1..75: mol_type = other DNA
gttcgaagcgctggtgcagggggtgaaggtcaccacctggggccagccgttctacagcggctgggggctgaccga

SEQ ID NO: 709536 - DNA, 75 bp, synthetic construct
  source 1..75: mol_type = other DNA
aatagcaatcgttaagggtttcgacgacgcattcaaatacggtcaattcatgatgaatgcgaaagaagatgaata

SEQ ID NO: 709537 - DNA, 75 bp, synthetic construct
  source 1..75: mol_type = other DNA
taaacaacgcattcgagcaagtggaagtagcaattgttaagggtttcgacgacgcattcaaatacggtcaattca

SEQ ID NO: 709538 - DNA, 75 bp, synthetic construct
  source 1..75: mol_type = other DNA
cccctaacgacggacgtgagttgattctagtggttggtcaggttgatggtgatgcatccattttgtgtggtagcc

SEQ ID NO: 709539 - DNA, 75 bp, synthetic construct
  source 1..75: mol_type = other DNA
acttgcgcgtgctgcgctacctgaccgaagaactgaacgtcagtgaagaagaaaaaaacgttggtatgcgcactg

SEQ ID NO: 709540 - DNA, 75 bp, synthetic construct
  source 1..75: mol_type = other DNA
atccgcgctgtaaagtggtgtacgacgcctgcacgcagctgccagcatttatagctgccgcgccagaaaatcaac

SEQ ID NO: 709541 - DNA, 75 bp, synthetic construct
  source 1..75: mol_type = other DNA
tttcgggcttaaagccggtgtgacgctgctggttctctggggggctggtgcggcttttgccagccgctaccgtat

SEQ ID NO: 709542 - DNA, 75 bp, synthetic construct
  source 1..75: mol_type = other DNA
gcgatgcctcgatcctcaccggcagcccggccattcgcagcaatgaacagctgctgtgggccgtgcgtgccgccc

SEQ ID NO: 709543 - DNA, 75 bp, synthetic construct
  source 1..75: mol_type = other DNA
gccagcaatgacgattttgtggcgatggtcgcggcggcgcggcgtaaccatcctggcgctcgtctgctgctgcgc

SEQ ID NO: 709544 - DNA, 75 bp, synthetic construct
  source 1..75: mol_type = other DNA
ggaacagctactgcgccagagccagtcggggcaattttgtgtgggtgagacgccgacgctggcagactgctgcct

SEQ ID NO: 709545 - DNA, 75 bp, synthetic construct
  source 1..75: mol_type = other DNA
gcttctttattccgttaaaagagaaacatgggcgttctccggcgaagcgcctggagcatgtattgcatccgtggg

SEQ ID NO: 709546 - DNA, 75 bp, synthetic construct
  source 1..75: mol_type = other DNA
aaaaagccgttatccccgttgcgggattaggaaccaggatgttgccggcgacgaaagccatcccgaaagagatgc

SEQ ID NO: 709547 - DNA, 75 bp, synthetic construct
  source 1..75: mol_type = other DNA
atcgtatccagttaaccgatgcgatcgccgagctggcgaaaaagcagtctgttgacgcgatgctgatgaccggtg

SEQ ID NO: 709548 - DNA, 75 bp, synthetic construct
  source 1..75: mol_type = other DNA
gaactggagcgtaccgaaccgggtgcctggggccgtatccagctgaccgacgccattgccgaactggcgaaaaag

SEQ ID NO: 709549 - DNA, 75 bp, synthetic construct
  source 1..75: mol_type = other DNA
ttcatgtcgatttgctggaaggcgcgtcaaataaagaagtagtaattcagtttctgaaactggtgaccgaggcgg

SEQ ID NO: 709550 - DNA, 75 bp, synthetic construct
  source 1..75: mol_type = other DNA
ttcatgttgatttgctggaaggcgcgtcaaataaagaagtcgtgattcagtttttgaaactggtgaccgaggcgg

SEQ ID NO: 709551 - DNA, 75 bp, synthetic construct
  source 1..75: mol_type = other DNA
tttgtcgaatacggtattcggcataatacgctgggtactgaatttaaagcctggcttgaagaagagatgggcatt

SEQ ID NO: 709552 - DNA, 75 bp, synthetic construct
  source 1..75: mol_type = other DNA
tgaccagtattaagataaaggaaattattggccaattttcggaggatctgattgaattaataaaaatagttttct

SEQ ID NO: 709553 - DNA, 75 bp, synthetic construct
  source 1..75: mol_type = other DNA
ggcgtatctataataaagcgcttgaacaaaaagtcagtggtacgtggaatcgttctgaggtcgagcttaaagggg

SEQ ID NO: 709554 - DNA, 75 bp, synthetic construct
  source 1..75: mol_type = other DNA
attaaagcaggagatgtacacgtttggttcccggcaatcgcgtgtttactggcgtatctataataaagcgcttga

SEQ ID NO: 709555 - DNA, 75 bp, synthetic construct
  source 1..75: mol_type = other DNA
tgacccgctgcgctataacctcgcggctttgatcgcccgctttaacgaaaccggccgcagccaggtgctggcgaa

SEQ ID NO: 709556 - DNA, 75 bp, synthetic construct
  source 1..75: mol_type = other DNA
aacgtgcgacaggcgcagccgctgggcctgggccactccattttgtgcgcgcgtccgatcgttggcgataacccg

SEQ ID NO: 709557 - DNA, 75 bp, synthetic construct
  source 1..75: mol_type = other DNA
ccggacgaaccacagaccctggactccgacctgatggcggtgggccgctacgtgttgtcggcagatatctgggct

SEQ ID NO: 709558 - DNA, 75 bp, synthetic construct
  source 1..75: mol_type = other DNA
atgtcgcaaaaatcgctcatcaccgtcacaatttgcatgacggttatcttcaccatctggatgttgcacggttca

SEQ ID NO: 709559 - DNA, 75 bp, synthetic construct
  source 1..75: mol_type = other DNA
ttggtgtcgcggctgtagcaattgcggtactcgcggtattgaatctgtgtggtgtacgccgcacgggcgtctata

SEQ ID NO: 709560 - DNA, 75 bp, synthetic construct
  source 1..75: mol_type = other DNA
ggttcgcttgagatcaacaaaaacatgctgttatggataaatgacgctctgatggcagtatttttcctgctggtc

SEQ ID NO: 709561 - DNA, 75 bp, synthetic construct
  source 1..75: mol_type = other DNA
ggtgctcgcggtgctgaacatttgtggtgttcgccgcacgggagtttatattctggtcggcgtggtgttgtggac

SEQ ID NO: 709562 - DNA, 75 bp, synthetic construct
  source 1..75: mol_type = other DNA
gcaggctgcgtttccggtcattgccgctatcggcgggatgattgtcccggcattgctctatctggcttttaacta

SEQ ID NO: 709563 - DNA, 75 bp, synthetic construct
  source 1..75: mol_type = other DNA
gcatgggcgttctccagcgaagcgactggagcatgtgttgcacccgtgggtggcgtatttgattttgccactgtt

SEQ ID NO: 709564 - DNA, 75 bp, synthetic construct
  source 1..75: mol_type = other DNA
attctggttggctcaatctcttcggcggtaattggatatagctggttacgcattcgtttacgtccatcagtttga

SEQ ID NO: 709565 - DNA, 75 bp, synthetic construct
  source 1..75: mol_type = other DNA
agtatcgctccgcaatttacccactgacgcctgagcaagataccgccgcccgcgccagtctgaatcgttttcaag

SEQ ID NO: 709566 - DNA, 75 bp, synthetic construct
  source 1..75: mol_type = other DNA
gagaccgcaggaactgagttgtttcggcttcaagtgggtagccacggcggaagcagtgtctttttcaatcgtaat

SEQ ID NO: 709567 - DNA, 75 bp, synthetic construct
  source 1..75: mol_type = other DNA
ggggcctataccagtttgttggggcgtagctattccggtggtggtgctggtggcggtgcaggtggcggaggcggc

SEQ ID NO: 709568 - DNA, 75 bp, synthetic construct
  source 1..75: mol_type = other DNA
cgatgtggactgtggttgtgtgtccactgaaacattcatgcactggctgcgggtagcttacgaggctggcaacta

SEQ ID NO: 709569 - DNA, 75 bp, synthetic construct
  source 1..75: mol_type = other DNA
ttgagcttccaattggtgaccttgatagcgatgaataccagtcagttgtcactcgcgaacaatacgaatcagctc

SEQ ID NO: 709570 - DNA, 75 bp, synthetic construct
  source 1..75: mol_type = other DNA
ttgatgcactgttggttcataagatggccatggctttattgtcgttggtggacgctggtgatacaagcgagggtg

SEQ ID NO: 709571 - DNA, 75 bp, synthetic construct
  source 1..75: mol_type = other DNA
cgcgtacttcatcctgcgtgacagcatcacggtgcaaactccgtccactgacgccttcctggctgaagtgcgggc

SEQ ID NO: 709572 - DNA, 75 bp, synthetic construct
  source 1..75: mol_type = other DNA
atgctatccgtagcgcacaccctcaaccacttggccctgtaatggatgctgcaatcgatgcatttaatgcagagg

SEQ ID NO: 709573 - DNA, 75 bp, synthetic construct
  source 1..75: mol_type = other DNA
gggcttaaggccttcaaaaccgccgtttatcagcagatgggcgtcggatgtgatgctcctgaattctccattacg

SEQ ID NO: 709574 - DNA, 75 bp, synthetic construct
  source 1..75: mol_type = other DNA
atggaaagtaatatcaaagagttagttgccgccgggcatgagatggattcggaactgaaagcagaatgtggtgcc

SEQ ID NO: 709575 - DNA, 75 bp, synthetic construct
  source 1..75: mol_type = other DNA
ggcacacgctacagctacatcgtatggatggacaccgaatcgaaattaccgatgcgggtagatctccttgatcgc

SEQ ID NO: 709576 - DNA, 75 bp, synthetic construct
  source 1..75: mol_type = other DNA
aaggctcttgatgcgtatgagaagtatcaggatgaagtgccggagactgggatgctcaatgcatttttcatcttg

SEQ ID NO: 709577 - DNA, 75 bp, synthetic construct
  source 1..75: mol_type = other DNA
ggcgtgcagcttggttttatcaaagtgccaacagtggaaatagatccagctcttgaaacaattcgtatcgcccta

SEQ ID NO: 709578 - DNA, 75 bp, synthetic construct
  source 1..75: mol_type = other DNA
aggcgattttgaccgctcattctctgatggcgttctcgaagatatcgctgaacagcttcgcaaaggaggcggcca

SEQ ID NO: 709579 - DNA, 75 bp, synthetic construct
  source 1..75: mol_type = other DNA
cgtgcggaagcacgcaacgaggggattaactataccgcaagccgtcttgctgctgctttcaatcacggatttatc

SEQ ID NO: 709580 - DNA, 75 bp, synthetic construct
  source 1..75: mol_type = other DNA
caaagcggcgcagagtgattgctgtatgcaccctggttcagacctggtagggaaggttgaaatgactgagtggtt

SEQ ID NO: 709581 - DNA, 75 bp, synthetic construct
  source 1..75: mol_type = other DNA
agtataaggctttcaaagcggcgcagagtgattgctgtatgcaccctggttcagacctggtagggaaggttgaaa

SEQ ID NO: 709582 - DNA, 75 bp, synthetic construct
  source 1..75: mol_type = other DNA
gtctggcgctatggacgaaatcaaggttatcaaccgtggagggcaggcatattgcgtaaaagatggagtgcaagt

SEQ ID NO: 709583 - DNA, 75 bp, synthetic construct
  source 1..75: mol_type = other DNA
cagaaagcgattgagtcaattaagcaggctgattcggctgttaagttggcacacgagaagttttcggcactggca

SEQ ID NO: 709584 - DNA, 75 bp, synthetic construct
  source 1..75: mol_type = other DNA
aaagtctctgcaatcagacaccccagccaccgatgctttcctggctgaagtccgggcgcagggggtggatgctgc

SEQ ID NO: 709585 - DNA, 75 bp, synthetic construct
  source 1..75: mol_type = other DNA
gcggggctgaagtctggcgatatggacgaaatcaatgttatcaaccgtggagggcaggcatattgcgtaaaagat

SEQ ID NO: 709586 - DNA, 75 bp, synthetic construct
  source 1..75: mol_type = other DNA
gcacgcttgagcaacgtggatttgtcggctgtgcgcggcacttcattgaatgcgtgcaaaatcagacagttccgc

SEQ ID NO: 709587 - DNA, 75 bp, synthetic construct
  source 1..75: mol_type = other DNA
cccggtggtggacagcgtacagtggatcgaacgtctgttggatgcaggcgtacgtactctccagctacgcatcaa

SEQ ID NO: 709588 - DNA, 75 bp, synthetic construct
  source 1..75: mol_type = other DNA
atctggggcaggaagatttgcaagccaccgatctcagcgccatccgcgcggcaggtctgcggctgggcgtttcga

SEQ ID NO: 709589 - DNA, 75 bp, synthetic construct
  source 1..75: mol_type = other DNA
gtctctgcaatcagacaccccagccaccgatgctttcctggctgaagtacgggcgcagggcgtggatgctgctat

SEQ ID NO: 709590 - DNA, 75 bp, synthetic construct
  source 1..75: mol_type = other DNA
cattaacagcattgaatacatcctgcgtgacaagttgtcaccgtatgacaccaaagagatgcttgaggctatgcg

SEQ ID NO: 709591 - DNA, 75 bp, synthetic construct
  source 1..75: mol_type = other DNA
gccggactgaaacacgcaatggccgtaactcttgagcatgtgtcggtaacggatgcagggcaggccggagttgct

SEQ ID NO: 709592 - DNA, 75 bp, synthetic construct
  source 1..75: mol_type = other DNA
tggatggatttctgaaaggtaaatgcatcccacgagatttaaaggtgaacgaaacaaacactgaatatctggtgc

SEQ ID NO: 709593 - DNA, 75 bp, synthetic construct
  source 1..75: mol_type = other DNA
caaaccgccggcgaacaggcagtgctggcgcaacgtatcgttgacaagatctggcgcgatgcgatgagtgaataa

SEQ ID NO: 709594 - DNA, 75 bp, synthetic construct
  source 1..75: mol_type = other DNA
atgctgaacggctggtggaactggcggcgcggaaaaaaactgacgttgatggtcggttttaaccgtcgtttcgca

SEQ ID NO: 709595 - DNA, 75 bp, synthetic construct
  source 1..75: mol_type = other DNA
gtagagatgatgcgcgaacatccatcaatcaaactttgctctttgacgcacatatgtgacgagttagccgcccag

SEQ ID NO: 709596 - DNA, 75 bp, synthetic construct
  source 1..75: mol_type = other DNA
cgactgagtcaattaagcaggctgattcggctgttaagttggcgcacgagaagttttcggtgctggcggcggaga

SEQ ID NO: 709597 - DNA, 75 bp, synthetic construct
  source 1..75: mol_type = other DNA
ggctttatcgctgggcgtctcactcgtgaactgttggcaagcgttcctgacctggcttcgcgtactctgatgacc

SEQ ID NO: 709598 - DNA, 75 bp, synthetic construct
  source 1..75: mol_type = other DNA
gtacttacgttcagatcgttgctcgtgatggtgcttatgtcaccctgcgtttgcgttctggtgaaatgcgtaaag

SEQ ID NO: 709599 - DNA, 75 bp, synthetic construct
  source 1..75: mol_type = other DNA
cgatagcgcattgccggaaggctctgtgcgcgaactaaatcccgccggtcgtcgccggatagtcattctggtcac

SEQ ID NO: 709600 - DNA, 75 bp, synthetic construct
  source 1..75: mol_type = other DNA
tggaggcgctggaaagcaataaagttccggttgtcgctgcctgccgtgcgggtgtttgcggctgctgtaagacga

SEQ ID NO: 709601 - DNA, 75 bp, synthetic construct
  source 1..75: mol_type = other DNA
tgtggcccggcgccgtatatggattgggtggaacaggaagtgaagacgcttggcgtgacacgtttctttaaagag

SEQ ID NO: 709602 - DNA, 75 bp, synthetic construct
  source 1..75: mol_type = other DNA
tacgcccccgttggcaccacattgttggaagcgctggaaagcaataaagttccggttgtcgccgcgtgccgtgca

SEQ ID NO: 709603 - DNA, 75 bp, synthetic construct
  source 1..75: mol_type = other DNA
gtgaagtatgggctgcgcaacctgaaagaaggggcgaagttccgtaaaggcattgagaagctgttaagcgaataa

SEQ ID NO: 709604 - DNA, 75 bp, synthetic construct
  source 1..75: mol_type = other DNA
gtcatccagaccaaagaaccgctggatcgtgaaggtaaagtcagccgcattgttgaatttatcgaaaaaccggat

SEQ ID NO: 709605 - DNA, 75 bp, synthetic construct
  source 1..75: mol_type = other DNA
ctgtccgccgggcgtgaccattatgaacgtgcgtcagggtgaacctttaggtttaggccactccattttatgtgc

SEQ ID NO: 709606 - DNA, 75 bp, synthetic construct
  source 1..75: mol_type = other DNA
ctgtccgccgggcgtgaccattatgaacgtgcgtcagggcgaacctttaggtttaggtcactccattttgtgtgc

SEQ ID NO: 709607 - DNA, 75 bp, synthetic construct
  source 1..75: mol_type = other DNA
acagttacgactgcggcaaaaaaatgggctatatgcaggcgtttgtgaagtatggtttgagaaacattatgctag

SEQ ID NO: 709608 - DNA, 75 bp, synthetic construct
  source 1..75: mol_type = other DNA
gggctatatgcaggcgttcgtgaagtatgggctgcgcaacctaaaggaaggtgcgaaatttctcaagaatattga

SEQ ID NO: 709609 - DNA, 75 bp, synthetic construct
  source 1..75: mol_type = other DNA
cctggctgaaattgaacgcaaagcaatccgcaagttcattaacagcattgaacacatcctgcgtgacaagctgtc

SEQ ID NO: 709610 - DNA, 75 bp, synthetic construct
  source 1..75: mol_type = other DNA
attgcacgcttcaacgaaacgggccgtagccaggtgctggcaaaacgtatgccgggcgatctctctgaatactct

SEQ ID NO: 709611 - DNA, 75 bp, synthetic construct
  source 1..75: mol_type = other DNA
gtcatccagactaaagagccgctggatcgcgaaggtaaagtcagccgcattgttgaatttatcgaaaaacccgat

SEQ ID NO: 709612 - DNA, 75 bp, synthetic construct
  source 1..75: mol_type = other DNA
gtcatccagaccaaagaaccgctggaccgtgaaggcaaagtcagccgcattgttgaatttatcgaaaaaccggat

SEQ ID NO: 709613 - DNA, 75 bp, synthetic construct
  source 1..75: mol_type = other DNA
gaaatacgtgcggaggcgcgcaacgaggggattaactataccgcaagccgtcttgctgctgctttcaaccacgga

SEQ ID NO: 709614 - DNA, 75 bp, synthetic construct
  source 1..75: mol_type = other DNA
cggttcgttaacatttggagattgctacatatcacttaacgagttcgccgcagagcttcgcaaaggaggcagcca

SEQ ID NO: 709615 - DNA, 75 bp, synthetic construct
  source 1..75: mol_type = other DNA
gggttatatgcaggcgtttgtgaagtatggactacgcaacctgaaagaaggggcgaagttccgtaaaggtattga

SEQ ID NO: 709616 - DNA, 75 bp, synthetic construct
  source 1..75: mol_type = other DNA
ccaagaacgcggtcgaaaaccacttcgacacctcttatgaattagaatctcttcttgagcagcgtgtgaagcgtc

SEQ ID NO: 709617 - DNA, 75 bp, synthetic construct
  source 1..75: mol_type = other DNA
gtgaagtatggactgcgcaacctgaaggaagggccaaagttccgtaagagcattgagaagttgctcggggaatag

SEQ ID NO: 709618 - DNA, 75 bp, synthetic construct
  source 1..75: mol_type = other DNA
cttttgtgaagtacgggcttcgcaatctcaaggaaggagcgaagttcagaaatagtattgtaaaacttctcgatt

SEQ ID NO: 709619 - DNA, 75 bp, synthetic construct
  source 1..75: mol_type = other DNA
gggctatatgcaggcattcgtgaagtatggattacgcaacctgaaagaaggggcgaagttccgtaaagggattga

SEQ ID NO: 709620 - DNA, 75 bp, synthetic construct
  source 1..75: mol_type = other DNA
gggctatatgcaggcgtttgtgaagtacggactgcgtaacctgaaagaaggggcgaagttccgcaaaggtattga

SEQ ID NO: 709621 - DNA, 75 bp, synthetic construct
  source 1..75: mol_type = other DNA
gggctatatgcaggcgtttgtgaagtatggactacgcaacctgaaagaaggggcgaagttccgtaagggtatcga

SEQ ID NO: 709622 - DNA, 75 bp, synthetic construct
  source 1..75: mol_type = other DNA
taaaagctgtatgctggcttgcccgtttggtgcgatggaggtcgtttcttcgcgcaaaaaggcgagggcgattaa

SEQ ID NO: 709623 - DNA, 75 bp, synthetic construct
  source 1..75: mol_type = other DNA
gcgggacctgcttgtgttgaagcctgcccgacgcatgcattgcagtgtgtggatgttgagaaagtgcagcggaat

SEQ ID NO: 709624 - DNA, 75 bp, synthetic construct
  source 1..75: mol_type = other DNA
atgagtatggttgccagaaccaaccccggacccgcagaggacgacatcaccgataccgatgatggcgacactcgc

SEQ ID NO: 709625 - DNA, 75 bp, synthetic construct
  source 1..75: mol_type = other DNA
taaaagctgtatgctggcttgcaccgtttggtgcgatggaggtcgtttcttcgcgcaaaaaggcgagggcgatta

SEQ ID NO: 709626 - DNA, 75 bp, synthetic construct
  source 1..75: mol_type = other DNA
agccgcgaacatgggcatattttcgttgaacaatcacgttgtattggctgtaaaagctgtatgctggcttgcccg

SEQ ID NO: 709627 - DNA, 75 bp, synthetic construct
  source 1..75: mol_type = other DNA
gcctgtgttgaagcctgcccgacaaaggcgttgcagtgcatggatgtcgagaaagtgcagcggcatcggctacgg

SEQ ID NO: 709628 - DNA, 75 bp, synthetic construct
  source 1..75: mol_type = other DNA
ctataaagtcctggatgactacttcaccggagaacttcagcatcgcaacagcttaagtgcgcagctcaacatgaa

SEQ ID NO: 709629 - DNA, 75 bp, synthetic construct
  source 1..75: mol_type = other DNA
aaaggattctggcgttcgccggtagaagaagttttggtttcaaattcgcggcttctaaaccttagcgttgaagag

SEQ ID NO: 709630 - DNA, 75 bp, synthetic construct
  source 1..75: mol_type = other DNA
tagcgatctggctcaagcttttgatgatagcttcagcccccaagagtcaccgtcacgatataaaatagcgttgct

SEQ ID NO: 709631 - DNA, 75 bp, synthetic construct
  source 1..75: mol_type = other DNA
gaacagcaggcggctggccatcagacgctggccgatgttccggcccccgtaattaacggagaaagcgtcaatctc

SEQ ID NO: 709632 - DNA, 75 bp, synthetic construct
  source 1..75: mol_type = other DNA
tctgaaactgcagacagcgcaggattcagacaatggattttcggcgcttgaacaggcgctgctgcggtatatcgc

SEQ ID NO: 709633 - DNA, 75 bp, synthetic construct
  source 1..75: mol_type = other DNA
gttgcttacgattatgcggcttggttaaaccccgggttcaagtacgcggcctataaagtcctcgatgactacttc

SEQ ID NO: 709634 - DNA, 75 bp, synthetic construct
  source 1..75: mol_type = other DNA
agcggtgcccagtggctggtgatccttggcgacgtgttgaatcacggcccgcgtaatgctttaccggagggttac

SEQ ID NO: 709635 - DNA, 75 bp, synthetic construct
  source 1..75: mol_type = other DNA
ccaatctgttgtaccgggatatataagtgaaggtgttagtattaattatcttgcatttttttctttagtagtgtt

SEQ ID NO: 709636 - DNA, 75 bp, synthetic construct
  source 1..75: mol_type = other DNA
ggcagtggtaccagggtatgtaagcgaaggtgtgagccttggttttttagcaattagttctgtacttatactttt

SEQ ID NO: 709637 - DNA, 75 bp, synthetic construct
  source 1..75: mol_type = other DNA
ttggtagttcaggaattgtcggcaaccacgataaaacgctttgcagctatcccacgataattattggtcgcaaag

SEQ ID NO: 709638 - DNA, 75 bp, synthetic construct
  source 1..75: mol_type = other DNA
ccatcatgaacagcatggggaatgaccaggttcgcacggttaacctgattaaatctgcccgtgttggctatacaa

SEQ ID NO: 709639 - DNA, 75 bp, synthetic construct
  source 1..75: mol_type = other DNA
tgcattatccgccgcaatgcattagtgggaatgaacgcggtagtgatggacggtgcggtgattggcgagaacagc

SEQ ID NO: 709640 - DNA, 75 bp, synthetic construct
  source 1..75: mol_type = other DNA
ccgattcttataaaacctttatactttatttcttgtgtgatgtttcctcttcatgctataccgaaagaatattgg

SEQ ID NO: 709641 - DNA, 75 bp, synthetic construct
  source 1..75: mol_type = other DNA
tgggaaacagacaagtcgtattcgcattattcaaactggtggtgattttcccgaagatagggaaaaattacaatg

SEQ ID NO: 709642 - DNA, 75 bp, synthetic construct
  source 1..75: mol_type = other DNA
gaacgcaggtgtgaaacgcgagattgcaaccctttcccgcgccctgaaaaaagccgattccgcagccgaaccaga

SEQ ID NO: 709643 - DNA, 75 bp, synthetic construct
  source 1..75: mol_type = other DNA
gcgttaccgcgatgcggacacaacggacaagggcgaccgccgggcggacgcactggatatacagacatcggattt

SEQ ID NO: 709644 - DNA, 75 bp, synthetic construct
  source 1..75: mol_type = other DNA
ccgacggtatggtctggatggcgcacaccggcacattaggcgcggtaaccagctttggtgaatcccggaacgact

SEQ ID NO: 709645 - DNA, 75 bp, synthetic construct
  source 1..75: mol_type = other DNA
gcgaaacagcctgctttataccggcatgtccacggtgaccgtcgcggcggctgatgtggtgcagattgaacgtca

SEQ ID NO: 709646 - DNA, 75 bp, synthetic construct
  source 1..75: mol_type = other DNA
aaccgggcaatctcctggcggatgcgcttgccgcgatgattaacgctgaccaggacagtccggtgagtgcgagta

SEQ ID NO: 709647 - DNA, 75 bp, synthetic construct
  source 1..75: mol_type = other DNA
tcagcccgaagtctttggacctgaaaatgccaaggaacttaatgaggacgacagagagcaagaaatcacctatgt

SEQ ID NO: 709648 - DNA, 75 bp, synthetic construct
  source 1..75: mol_type = other DNA
cggcaacttgcaggtgaacgccgacggcgtgctgaccaactcgcagggcttgccgttgcagccggaaatcgacgt

SEQ ID NO: 709649 - DNA, 75 bp, synthetic construct
  source 1..75: mol_type = other DNA
acaacattatgccgaccgggctgcaattcggtggcggcgtacgcattgtcggcactcagaaaaccttcaccgaag

SEQ ID NO: 709650 - DNA, 75 bp, synthetic construct
  source 1..75: mol_type = other DNA
gcgccgggcgcgatgctcgatcagaacaacattatgccgaccgggctgcaattcggtggcggcgtacgcattgtc

SEQ ID NO: 709651 - DNA, 75 bp, synthetic construct
  source 1..75: mol_type = other DNA
tacgctgttttccaataacttaccgaaagggaccgtctccgcatcgctgaatatggtgatcctgatggtgatgtc

SEQ ID NO: 709652 - DNA, 75 bp, synthetic construct
  source 1..75: mol_type = other DNA
aaggtcgtgacgttctgctgttcgttgacaacatctatcgttacaccctggcaggtacggaagtatccgcactgc

SEQ ID NO: 709653 - DNA, 75 bp, synthetic construct
  source 1..75: mol_type = other DNA
acttaccctaaagctttatgactggtgggttttgggagtatcaaatcggcttgcatggggatgtcctacaaagga

SEQ ID NO: 709654 - DNA, 75 bp, synthetic construct
  source 1..75: mol_type = other DNA
acgcaatgcggcgcaggccttaactgacgatggaactctatacggagccacaattcttggcgatggagttgtgca

SEQ ID NO: 709655 - DNA, 75 bp, synthetic construct
  source 1..75: mol_type = other DNA
aagggctggggaatcaaaaattaaacataaaattagccatgatgtttttgaaccttatcccgcggcgttacatgg

SEQ ID NO: 709656 - DNA, 75 bp, synthetic construct
  source 1..75: mol_type = other DNA
tgcccgccctctggcatatccgcgtgcaacctttgcccgtatttgtcgggatgccaacattgataacctgcggat

SEQ ID NO: 709657 - DNA, 75 bp, synthetic construct
  source 1..75: mol_type = other DNA
ccgaccgaaggcgtaccgggcgaagatgggcttggcaccttgcaggacaacgcgctcgaaggctcgaacgtggat

SEQ ID NO: 709658 - DNA, 75 bp, synthetic construct
  source 1..75: mol_type = other DNA
tttggtgaggacggcacggtgacggcgattcttcctggcgacagcgacgtgactgagttagggcaactgacactg

SEQ ID NO: 709659 - DNA, 75 bp, synthetic construct
  source 1..75: mol_type = other DNA
acggcgatatcgcctatacccgcgacggcaatttgcaggtgaacgccgacggcgtactgaccaactcgcagggct

SEQ ID NO: 709660 - DNA, 75 bp, synthetic construct
  source 1..75: mol_type = other DNA
atgggttttatctcatttgtcggcttgctgctggcgatgccagagacggtgaagcgcggcgcggttccgtttagc

SEQ ID NO: 709661 - DNA, 75 bp, synthetic construct
  source 1..75: mol_type = other DNA
gcggcacaaccggagcctgcttccggagcagaaacacaaccggagggtaccccgacgccggaaccggcgacgttg

SEQ ID NO: 709662 - DNA, 75 bp, synthetic construct
  source 1..75: mol_type = other DNA
ctgcagatgcagtgaaggccgcactgcgctctgaagaagtgcggggcaaactgaaggaaaccatccgaaaaacgt

SEQ ID NO: 709663 - DNA, 75 bp, synthetic construct
  source 1..75: mol_type = other DNA
agaagttctccagctggtatgacacgaatagcgtgacgctgggtggtgtcaaaattccgcacttttccccggtga

SEQ ID NO: 709664 - DNA, 75 bp, synthetic construct
  source 1..75: mol_type = other DNA
atggggatgtcctacaaaggaacaccttcttccacactttctggaacattaggtaacaaccatctggatattggc

SEQ ID NO: 709665 - DNA, 75 bp, synthetic construct
  source 1..75: mol_type = other DNA
ggaagcgattctggatgagcttatcggacctgctgagggggcatctgcgccacaggcaggggatggtgagaatac

SEQ ID NO: 709666 - DNA, 75 bp, synthetic construct
  source 1..75: mol_type = other DNA
atgacagaaatgaaaaaactggtcactgctgatgcagtgaagtcagcgctgcgcactgaagaagtccgcgggacg

SEQ ID NO: 709667 - DNA, 75 bp, synthetic construct
  source 1..75: mol_type = other DNA
tcggcaatctgctgtcaccgcacgtctggctgtggtcggtgctgggcaccagtttgtatgctttcgggattggtt

SEQ ID NO: 709668 - DNA, 75 bp, synthetic construct
  source 1..75: mol_type = other DNA
tgggatcttgataaggcccgtaagggtcagaatgcgatgggtatatcagttatcgaggtgaaaaaagataacgtg

SEQ ID NO: 709669 - DNA, 75 bp, synthetic construct
  source 1..75: mol_type = other DNA
gtcctgatacagattatggatggggaagtagctattctcttgagaaaaagacaatttactctatacgaccagcga

SEQ ID NO: 709670 - DNA, 75 bp, synthetic construct
  source 1..75: mol_type = other DNA
tctggaagcagcgcaagcctgggccgatgccgatccttacgtggcggccggagtgtacgaacaagtttcagtaaa

SEQ ID NO: 709671 - DNA, 75 bp, synthetic construct
  source 1..75: mol_type = other DNA
atggtgatcctgatggtgatgtctgtctcggtcgaaatcggccgctggctgtggtttaacggcggtcgcttgccg

SEQ ID NO: 709672 - DNA, 75 bp, synthetic construct
  source 1..75: mol_type = other DNA
gcgttatcgtcgttttcaccctggcgggattgctcaatcgcgtgcgccagcatcaggcagccgagctggcggagg

SEQ ID NO: 709673 - DNA, 75 bp, synthetic construct
  source 1..75: mol_type = other DNA
ctgataacttccaagataatataaaaaattatcttgaaattactggacagacagaagacggagcacgtttaagca

SEQ ID NO: 709674 - DNA, 75 bp, synthetic construct
  source 1..75: mol_type = other DNA
gcttctttattcctttgaaagagaagcatgggcgttctccagcgaagcgactggagcatgtgttgcacccgtggg

SEQ ID NO: 709675 - DNA, 75 bp, synthetic construct
  source 1..75: mol_type = other DNA
cattactctatctggcctttaactatgccgatccgattacccgcgaagggtgggcgatcccggcggctactgaca

SEQ ID NO: 709676 - DNA, 75 bp, synthetic construct
  source 1..75: mol_type = other DNA
tacagctaaatcgaaaattgatagtgtttatgctaagttcatgcccacaaaaaaaacgtggggaatcatggagaa

SEQ ID NO: 709677 - DNA, 75 bp, synthetic construct
  source 1..75: mol_type = other DNA
tatttttactatgatcaaaaaacaaacgaactatttatatctagagaccagaaaaaaaatgatttaattgaaatt

SEQ ID NO: 709678 - DNA, 75 bp, synthetic construct
  source 1..75: mol_type = other DNA
ctattgagtccctcccggaagatttacgcatggcaataaccttgcgggagctggatggcctgagttatgaagaga

SEQ ID NO: 709679 - DNA, 75 bp, synthetic construct
  source 1..75: mol_type = other DNA
tgcgcgtaatgcgattaacgcgggtgtcgtggcgctttccaccacgaataccggggtctggacattagcgaaaaa

SEQ ID NO: 709680 - DNA, 75 bp, synthetic construct
  source 1..75: mol_type = other DNA
tggattgacatcatgggagagcagcttcgcccgctgtatgatgaactgaagcactatgtgctgatgccgggtaaa

SEQ ID NO: 709681 - DNA, 75 bp, synthetic construct
  source 1..75: mol_type = other DNA
aacgtattacggagcataatcacacggtcagcccatcagcgccggtggtattacgctggttgcgggaacaacatg

SEQ ID NO: 709682 - DNA, 75 bp, synthetic construct
  source 1..75: mol_type = other DNA
attggacctacgggtgatgtaatgacgcttaatggacattatccctataccgagaaggttcactcaacaaaatat

SEQ ID NO: 709683 - DNA, 75 bp, synthetic construct
  source 1..75: mol_type = other DNA
gatttccgcagcgccaaaatcatcgccagtgagtttcttgccgacgacgatcagcgcaaagtgaaaggttacgat

SEQ ID NO: 709684 - DNA, 75 bp, synthetic construct
  source 1..75: mol_type = other DNA
gccgactggcaagggctggctctggaaagcgagtttctgccggacagcccgaaccaccctgaatggccgcaaccg

SEQ ID NO: 709685 - DNA, 75 bp, synthetic construct
  source 1..75: mol_type = other DNA
aatgaaaaaggtatagcacttgatttttttgggggatcaggtacttttggtcatgccgttttcatggccaatgca

SEQ ID NO: 709686 - DNA, 75 bp, synthetic construct
  source 1..75: mol_type = other DNA
tggtttgagtatgggaccggagcgggatcgtggtggctttaattatcgctgttctgcgccattattttctgacga

SEQ ID NO: 709687 - DNA, 75 bp, synthetic construct
  source 1..75: mol_type = other DNA
tcacagccacagcagttaatacaggctccagttctgcagactgctcgtactacaaatcaggatcgtttcgttata

SEQ ID NO: 709688 - DNA, 75 bp, synthetic construct
  source 1..75: mol_type = other DNA
ctaaacccgcaatatccaatgattccatgcaatgatagctgttccgtagtagggaaagttatcgccagccagtgg

SEQ ID NO: 709689 - DNA, 75 bp, synthetic construct
  source 1..75: mol_type = other DNA
cggtatatatacagatttccggtctgggatgtgctcatgtatttagtggtactgagcctcaggatgtattcaaat

SEQ ID NO: 709690 - DNA, 75 bp, synthetic construct
  source 1..75: mol_type = other DNA
atgatggcggtaataatctacatggctttgcattctgggggtggaaacaataacacggtatatatacagatttcc

SEQ ID NO: 709691 - DNA, 75 bp, synthetic construct
  source 1..75: mol_type = other DNA
cccggcaatcgcgtgtttactggcgtatctataataaagcgcttgaacaaaaagtcagtggtacgtggaatcgtt

SEQ ID NO: 709692 - DNA, 75 bp, synthetic construct
  source 1..75: mol_type = other DNA
gggtgcaggcagggcttgccgacgacgtgatgtcgccggatgaggccttttcttttctgttaaaggagacagcaa

SEQ ID NO: 709693 - DNA, 75 bp, synthetic construct
  source 1..75: mol_type = other DNA
aaaaccatgtaaattaccaaccagtggttggagatacccaacagaagctcgcttttgggaagagtacgaaaaagg

SEQ ID NO: 709694 - DNA, 75 bp, synthetic construct
  source 1..75: mol_type = other DNA
attggcatggtaaacgacaggcacgccaacttgcgctcaccccttctagtgggaccttacgtccatgtaaagacg

SEQ ID NO: 709695 - DNA, 75 bp, synthetic construct
  source 1..75: mol_type = other DNA
gacgccggatttaacgccgcaatttttgcagctgctactgccggaactggcgcgcgagtcggcgaaaactcccgc

SEQ ID NO: 709696 - DNA, 75 bp, synthetic construct
  source 1..75: mol_type = other DNA
gcttctttattccgttaaaagagaagcatgggcgctctccggctaaacgtctggagcatgttttgcatccatggg

SEQ ID NO: 709697 - DNA, 75 bp, synthetic construct
  source 1..75: mol_type = other DNA
gatgattttccgttctctgggagtggacgatgggaacggatcccgcgtgaacttcccaccgggcgtccggccatg

SEQ ID NO: 709698 - DNA, 75 bp, synthetic construct
  source 1..75: mol_type = other DNA
actcaaaaccctacgacaagacgcccgtagctggctgctgaaatacccggaacacgccataaccggcctgctgcc

SEQ ID NO: 709699 - DNA, 75 bp, synthetic construct
  source 1..75: mol_type = other DNA
cgcctttggtcagcttttgccgactacgaactgctaccaccgttccgtcagcttgaccgtaacagttacgccctg

SEQ ID NO: 709700 - DNA, 75 bp, synthetic construct
  source 1..75: mol_type = other DNA
aagcaagctgtggctatgggaaggtggatttgcccctatatttccagacacctgttatcacttaacccattactg

SEQ ID NO: 709701 - DNA, 75 bp, synthetic construct
  source 1..75: mol_type = other DNA
cgcaatgccagcgaactgacccgctggacaggcagaaaatgcccgagcggtcgggccatggggctggcaaataaa

SEQ ID NO: 709702 - DNA, 75 bp, synthetic construct
  source 1..75: mol_type = other DNA
tgcccatcacgaattacttcgcagcgagtgagctggcacctgccgtcgcccgtgccttcaacaaactgaaaacgc

SEQ ID NO: 709703 - DNA, 75 bp, synthetic construct
  source 1..75: mol_type = other DNA
aaagccggtgaagcccaggataatgcccgcgccgccttgcgtatgttgactgaaaatggtcatcagccattactg

SEQ ID NO: 709704 - DNA, 75 bp, synthetic construct
  source 1..75: mol_type = other DNA
gatttagcgccattaggcattgagccaatctgttatctgacagaagaaatcagtaatcaacttttggcgaaatat

SEQ ID NO: 709705 - DNA, 75 bp, synthetic construct
  source 1..75: mol_type = other DNA
tgaactcagtgagcaggagctggcatggaaaaagcagggtacgcatgagtatcaggtgctggtgacacgctgtaa

SEQ ID NO: 709706 - DNA, 75 bp, synthetic construct
  source 1..75: mol_type = other DNA
gcagacgttgcatcaagtcgaaccattgcgggaagttgaaccgaacaggcagcgcctggtatttgatgagaatct

SEQ ID NO: 709707 - DNA, 75 bp, synthetic construct
  source 1..75: mol_type = other DNA
gtgacgcttccggcagccgtctgaaagacctgcccaaaccaaacaaaagcgatgatgaatcacaggcgaacgatg

SEQ ID NO: 709708 - DNA, 75 bp, synthetic construct
  source 1..75: mol_type = other DNA
tcggctggatgatcaaacctctgggccgctggtcgttaatcatggaaatcgatgaaggctttgcagttggtatgt

SEQ ID NO: 709709 - DNA, 75 bp, synthetic construct
  source 1..75: mol_type = other DNA
gtaattcaacacaggaagcgcagttctccgtactcgatgccatcaccgccagcgagctaattaacgatattgaag

SEQ ID NO: 709710 - DNA, 75 bp, synthetic construct
  source 1..75: mol_type = other DNA
ttggtgggcgaagtggagtgatcgagaccgcgccgagcgtcagagtgttgccgcttaaagacgtggaagatgaag

SEQ ID NO: 709711 - DNA, 75 bp, synthetic construct
  source 1..75: mol_type = other DNA
cttccccgaaatgcaaaaggttctgccgatacttcttaagcccctttatttcatctcctgcatcatgttccctct

SEQ ID NO: 709712 - DNA, 75 bp, synthetic construct
  source 1..75: mol_type = other DNA
aaacgctgggtgagcaatatgacccggtactgccatccgccctgcgccagtcttcagcccgtaaaccgttaccgg

SEQ ID NO: 709713 - DNA, 75 bp, synthetic construct
  source 1..75: mol_type = other DNA
ggctcatgcccggagaaaaatccacgatgtgcatgcaagagtgcctaccgacatcaccacggaagccctgcagcg

SEQ ID NO: 709714 - DNA, 75 bp, synthetic construct
  source 1..75: mol_type = other DNA
caatgtttacattgataactctgttcattggtctggcgttataccgaactcgtgaggaggcaatgctgacatcat

SEQ ID NO: 709715 - DNA, 75 bp, synthetic construct
  source 1..75: mol_type = other DNA
gaaggcgtgagtctgaactacctggcaatgttcactctggtaaccctgttcattggtctggcgttataccgaact

SEQ ID NO: 709716 - DNA, 75 bp, synthetic construct
  source 1..75: mol_type = other DNA
tcttatctactctggaacccattagtacatgtggtggagctaagccgcgaggctgttatgcctggctatatcagc

SEQ ID NO: 709717 - DNA, 75 bp, synthetic construct
  source 1..75: mol_type = other DNA
ggacttcgttccacaagaacaaaactccctgcagggcgatgactttccaatgttcggtagttctgatgaaccgcc

SEQ ID NO: 709718 - DNA, 75 bp, synthetic construct
  source 1..75: mol_type = other DNA
ggttttgctgtaccaaacacggtgcaggagaagggtgaacgtgcgtactaccgctactgggaagttttgcctgag

SEQ ID NO: 709719 - DNA, 75 bp, synthetic construct
  source 1..75: mol_type = other DNA
cgaaacaacagagcaggaaaaagccgcagcaacagaagccggaggttgatgccggagccgggcctgaacaaaaga

SEQ ID NO: 709720 - DNA, 75 bp, synthetic construct
  source 1..75: mol_type = other DNA
gccactcggatacagcgaaagcgttcacctatctgctgaagcaccgggtagttgcactggggcggcgtaactaca

SEQ ID NO: 709721 - DNA, 75 bp, synthetic construct
  source 1..75: mol_type = other DNA
gcggatcccgcgtgaacttcccaccgggcgtccggccatgctgcatattttcgagccggtggaggacgggcagac

SEQ ID NO: 709722 - DNA, 75 bp, synthetic construct
  source 1..75: mol_type = other DNA
tacggacaaacctaatctgcatgagaaagacgcaaagaccttactcgttgagatgttagccgggtacggagaagc

SEQ ID NO: 709723 - DNA, 75 bp, synthetic construct
  source 1..75: mol_type = other DNA
tcgaacaggttgacgcaccagtgctggatgatgacgatgatatttacgttgacctggaaattgcacaagaactca

SEQ ID NO: 709724 - DNA, 75 bp, synthetic construct
  source 1..75: mol_type = other DNA
ttgattctacgattacggatttattagaaaaaccattgaacaatgcattattagcaataaggaaagaacatctgc

SEQ ID NO: 709725 - DNA, 75 bp, synthetic construct
  source 1..75: mol_type = other DNA
tttctcaaaacattacatcagccgacaattgtaaacaaaaaaatgaagatttagatacctggtatgtgggaatga

SEQ ID NO: 709726 - DNA, 75 bp, synthetic construct
  source 1..75: mol_type = other DNA
caggccgcactggaaagaaccattgatcacaacgatgcgctgtcgccaacagaaaaatgctcgctgcacgcttac

SEQ ID NO: 709727 - DNA, 75 bp, synthetic construct
  source 1..75: mol_type = other DNA
cgccagttactgaacaccatcttcaccgaagatgaacccgcagacgaatccccagcggagatcccgccacacgct

SEQ ID NO: 709728 - DNA, 75 bp, synthetic construct
  source 1..75: mol_type = other DNA
aatccgatgatgacgaactggtaacctttagctttgttaatggacaggcgattgaatacagcaccagccgtcagc

SEQ ID NO: 709729 - DNA, 75 bp, synthetic construct
  source 1..75: mol_type = other DNA
tatatttaatccaaaggctatttagtaatgttgagtctatatttaataaagtacctgtcagcattttagtgaatg

SEQ ID NO: 709730 - DNA, 75 bp, synthetic construct
  source 1..75: mol_type = other DNA
ccatatattaatgatgtaagaatactggattggtgttttaataaaagtatgcaatattttggtgattctgaaaag

SEQ ID NO: 709731 - DNA, 75 bp, synthetic construct
  source 1..75: mol_type = other DNA
aataatgttgagtcactatttaataaagtacctgtcagtattttagttaatgatatttttatgaatgattttttt

SEQ ID NO: 709732 - DNA, 75 bp, synthetic construct
  source 1..75: mol_type = other DNA
atttgatgatgttaagttgctatttaatgaagtgcctgtcagcattttagtaaatgatattttttttgaaggatt

SEQ ID NO: 709733 - DNA, 75 bp, synthetic construct
  source 1..75: mol_type = other DNA
tatttgatgatgttaagttgctatttaatgaagtgcctgtcagcattttagtaaatgatatttttttgaaggatt

SEQ ID NO: 709734 - DNA, 75 bp, synthetic construct
  source 1..75: mol_type = other DNA
ctttgcacagaaaatgggatactgtctggctcctgacccctatcaccaccacgtaaaggcagatgtcgatggtgt

SEQ ID NO: 709735 - DNA, 75 bp, synthetic construct
  source 1..75: mol_type = other DNA
gctggtttgcgcctcttgcggcgttattaatggtagttagcctgagtgggtgttttgataaagaaggagatcagc

SEQ ID NO: 709736 - DNA, 75 bp, synthetic construct
  source 1..75: mol_type = other DNA
gagcgcattcagcccgcctcgcctgagcagcgccaggcagtccgcgagaaaatgcagactaacccacagatccag

SEQ ID NO: 709737 - DNA, 75 bp, synthetic construct
  source 1..75: mol_type = other DNA
gaataacattaatattttagtgcaatacagtgaccatgctaaccaactgatattaataacggacaatgatagtat

SEQ ID NO: 709738 - DNA, 75 bp, synthetic construct
  source 1..75: mol_type = other DNA
aagcgagcagatggaacatcaacgcctgcggtcaggaagatgcgcatcgacagcaagacagcatggctatcagct

SEQ ID NO: 709739 - DNA, 75 bp, synthetic construct
  source 1..75: mol_type = other DNA
aaaattacgcgtcagcttatcgaacgcgggctgatcaaagaagttgatcaacaggcctccaccgggggccgccgc

SEQ ID NO: 709740 - DNA, 75 bp, synthetic construct
  source 1..75: mol_type = other DNA
tggattccggtctgcgtccggttgtagacagcgttaacgcgattcgcgtaccacaggattacgtcacgcaaagtg

SEQ ID NO: 709741 - DNA, 75 bp, synthetic construct
  source 1..75: mol_type = other DNA
aaagaaaacgtatttatcagctgggtgatgcgattgctgattgtcgtcagtctcgcctggacggggtgggctatt

SEQ ID NO: 709742 - DNA, 75 bp, synthetic construct
  source 1..75: mol_type = other DNA
aaaaatcagctgtgggtaaggttatcgttagtgttgcttgctctgatggcagaattacgcctgtcgaagtcaaac

SEQ ID NO: 709743 - DNA, 75 bp, synthetic construct
  source 1..75: mol_type = other DNA
gaagcacgcggtgcgtatgtcagttggcttgccagcgataggtctgatccatcgtgtcctatcggctatgttttt

SEQ ID NO: 709744 - DNA, 75 bp, synthetic construct
  source 1..75: mol_type = other DNA
tgtttctgatggtatggatggcgctgttaatcacagcaatggtgtatccccaggggatttttccggtactggcag

SEQ ID NO: 709745 - DNA, 75 bp, synthetic construct
  source 1..75: mol_type = other DNA
accctggtcttttatctgctgacagttattgccttctggatgacccgtaatcagatggcgcaacaggtatcagca

SEQ ID NO: 709746 - DNA, 75 bp, synthetic construct
  source 1..75: mol_type = other DNA
ctggtcttttatctactgaccgttattgccttctggatcacccgtaatcagatggcgcaacaggtagcagcatga

SEQ ID NO: 709747 - DNA, 75 bp, synthetic construct
  source 1..75: mol_type = other DNA
ttctattaaataatcatcagaagttaaattatcgtcagaagttaaataattcgcaggggttaaataattcacagg

SEQ ID NO: 709748 - DNA, 75 bp, synthetic construct
  source 1..75: mol_type = other DNA
attcagggtgaagtcgataaagactggaattctgttgaaattgacgtcaaacagatccgcaaagtaaatccgtaa

SEQ ID NO: 709749 - DNA, 75 bp, synthetic construct
  source 1..75: mol_type = other DNA
ccccaaaattaccgccacttatattcacaaagttgcaaccaggttgcataattacgataaaggtttgccacaaag

SEQ ID NO: 709750 - DNA, 75 bp, synthetic construct
  source 1..75: mol_type = other DNA
tcgtcttcgcaaagacaaggggcgtgaaaaagtgatgatcaacatagcggcaatgacgattgacgctctggccgg

SEQ ID NO: 709751 - DNA, 75 bp, synthetic construct
  source 1..75: mol_type = other DNA
gatctttggccttaataagtcggttatttgtatcttcatcgagatacaccgagaccgttctgcttataccgcctc

SEQ ID NO: 709752 - DNA, 75 bp, synthetic construct
  source 1..75: mol_type = other DNA
gatgctggcgataacccgcgcgcagcagctctttggcgcgcgttacgtcaatgtgcagcctcactccggcagcca

SEQ ID NO: 709753 - DNA, 75 bp, synthetic construct
  source 1..75: mol_type = other DNA
ttttctggcccatcggcaacgcaaagtcaggccggaggattccaggggccgaatggcagcgtaacgaccgtagaa

SEQ ID NO: 709754 - DNA, 75 bp, synthetic construct
  source 1..75: mol_type = other DNA
ggcggtcgccagtacctgaccaccatcaatatgtccgagttccaggagaaacacaccgtctcgcggctgattggc

SEQ ID NO: 709755 - DNA, 75 bp, synthetic construct
  source 1..75: mol_type = other DNA
cgttaagccagcagcaggagacggaaatccgccagcttgagcgcgaaaggcgtatcgggctgcgtaccgataccg

SEQ ID NO: 709756 - DNA, 75 bp, synthetic construct
  source 1..75: mol_type = other DNA
ctacagaagttaaataatatacaggagttaaataattcgcaggagttaaataattcgcaggagttaaataactcg

SEQ ID NO: 709757 - DNA, 75 bp, synthetic construct
  source 1..75: mol_type = other DNA
tcgtctccggaaggacaaaaaaagagaaaaggtaatgatcaaccttgctgctcttaccgttgatgcacttactga

SEQ ID NO: 709758 - DNA, 75 bp, synthetic construct
  source 1..75: mol_type = other DNA
tcaaaggccaggacctggcgattgccagcctgcataaacacctgctgaccgcgcgcgccgacctgcgccgtccgg

SEQ ID NO: 709759 - DNA, 75 bp, synthetic construct
  source 1..75: mol_type = other DNA
gtgattgttgaacacgcggatgacccggaaaccatgcaggaagtgctgtatccggtgctggcggacttctttaaa

SEQ ID NO: 709760 - DNA, 75 bp, synthetic construct
  source 1..75: mol_type = other DNA
ctcggtggtatatcatcaaagctattcatttatgggatgcgggagaaactcatcagttccagcctgcacggttgt

SEQ ID NO: 709761 - DNA, 75 bp, synthetic construct
  source 1..75: mol_type = other DNA
atggcttctaaaaaattttactcagatgatgacatccagctggcaaaagctgctttatcggaattgccagatctc

SEQ ID NO: 709762 - DNA, 75 bp, synthetic construct
  source 1..75: mol_type = other DNA
aaccatcccgccgttcttcctctaaaacagcacctaaaaagacagattcaggcaggaaagatggcatcgatatga

SEQ ID NO: 709763 - DNA, 75 bp, synthetic construct
  source 1..75: mol_type = other DNA
catccagagatgatttggcatcaaaactgaaaagcgccggatattcacgcagttttatacaatattcatcgggta

SEQ ID NO: 709764 - DNA, 75 bp, synthetic construct
  source 1..75: mol_type = other DNA
tacaccggtcatccattcgatgttgatgacttttttagaattgccatataataatgatgtaaaaatactggagtg

SEQ ID NO: 709765 - DNA, 75 bp, synthetic construct
  source 1..75: mol_type = other DNA
ggtatgaacgacagcaccgtacttggcggcgtacgtgcaaccgaaggtcagggctttaaagcagccgatatcatc

SEQ ID NO: 709766 - DNA, 75 bp, synthetic construct
  source 1..75: mol_type = other DNA
gtcagatttttgaccatgacgcgacagaaaaactacgcacttacttttcaaatgtatgtgctgattttgaagctg

SEQ ID NO: 709767 - DNA, 75 bp, synthetic construct
  source 1..75: mol_type = other DNA
ttgtcttgcgcattatcaacaaagcccagaagcagaaaaaatagcacaatctattattctgaatggaattcggtg

SEQ ID NO: 709768 - DNA, 75 bp, synthetic construct
  source 1..75: mol_type = other DNA
tgctcattaccaacaaaacacgacatcagaaaaaatagcacaatctattattcttaacgggcttcgttgtcagat

SEQ ID NO: 709769 - DNA, 75 bp, synthetic construct
  source 1..75: mol_type = other DNA
ggcggcctgaccttcagtaatgacagttttagcgactccgatacactggcggtagttcaggctccaggtgctcaa

SEQ ID NO: 709770 - DNA, 75 bp, synthetic construct
  source 1..75: mol_type = other DNA
tctctattataaccttatcacaaacagtatcgattggtccgggggtggcattaatcatatctgaaagtctgacat

SEQ ID NO: 709771 - DNA, 75 bp, synthetic construct
  source 1..75: mol_type = other DNA
atggctcgttctatacctctggaagctggtctgattactggggggggcagtaagagccgtagcaactattcggtc

SEQ ID NO: 709772 - DNA, 75 bp, synthetic construct
  source 1..75: mol_type = other DNA
aaacccgtaagttgtcttgcgcattatcaacaaagttcagaagcagaaaaaatagcgcaatctattattctgaat

SEQ ID NO: 709773 - DNA, 75 bp, synthetic construct
  source 1..75: mol_type = other DNA
gccttcaacaaactcaaaacgctacgcgaaaacgcccgcacctggctgttgaaatacccggaacatgccattacc

SEQ ID NO: 709774 - DNA, 75 bp, synthetic construct
  source 1..75: mol_type = other DNA
ccgaaaacgagctactggcttgctttcgcgtggcggaagataacagctacagcaccgcagacgatgatcttttca

SEQ ID NO: 709775 - DNA, 75 bp, synthetic construct
  source 1..75: mol_type = other DNA
gaaaatatttatcctgcatcggtgaatcggagcaagatcagacttttgctaaattcgcaaaagactttgcacatt

SEQ ID NO: 709776 - DNA, 75 bp, synthetic construct
  source 1..75: mol_type = other DNA
cttgtcgaggaggttctggtctggatcgggaatcagttgccggtggaccgtatcctgattaacgacatcacgctg

SEQ ID NO: 709777 - DNA, 75 bp, synthetic construct
  source 1..75: mol_type = other DNA
tgtttaccgcctggcagaccgctggcgcgccgtcgaaagagagttgggcgttcactgcgttaggcgttctcggta

SEQ ID NO: 709778 - DNA, 75 bp, synthetic construct
  source 1..75: mol_type = other DNA
ggcagctttttgccgactacgaactgttaccaccgttccgccagcttgatcgtaacagttacgcgctgacagaag

SEQ ID NO: 709779 - DNA, 75 bp, synthetic construct
  source 1..75: mol_type = other DNA
gcattgtgacgttgggggcgctggcctgccgccatccatcccgccgctggttacagcgccgtacaggttccgtga

SEQ ID NO: 709780 - DNA, 75 bp, synthetic construct
  source 1..75: mol_type = other DNA
gttaatgcggaaatcatcagttgcgatgaactgtgtcgcctgaatattgagtcaccaactcgtctgaaaatcaaa

SEQ ID NO: 709781 - DNA, 75 bp, synthetic construct
  source 1..75: mol_type = other DNA
tagtaaacctgggtagcctgggtgatcaggtaaacgttaaagcgggctatgctcgtaacttcctggtaccgcagg

SEQ ID NO: 709782 - DNA, 75 bp, synthetic construct
  source 1..75: mol_type = other DNA
aacgtcatcgttacctatattcctgatgacctgcctgacctcattcagatgattggacgagccgggcgcgatggt

SEQ ID NO: 709783 - DNA, 75 bp, synthetic construct
  source 1..75: mol_type = other DNA
ttgcgggatgctggcgttcactctgtggcattcggtgacaagttgccgaggcaccgcaacgctcaacaactcgcg

SEQ ID NO: 709784 - DNA, 75 bp, synthetic construct
  source 1..75: mol_type = other DNA
caacctgcccgcgcttttctgatgtggtcatcgctggcgcttgatgctgcacctgatgagcttgcttacttctac

SEQ ID NO: 709785 - DNA, 75 bp, synthetic construct
  source 1..75: mol_type = other DNA
gaaatgcgcggcgtgcttccggtgggccgggttcagacccccacgctcgggctggtcgttaaccgctggctggcc

SEQ ID NO: 709786 - DNA, 75 bp, synthetic construct
  source 1..75: mol_type = other DNA
ttgcatcaggcagaaaatgtgatcgtcagccgcagcattaacgaacaatatcagcaacaattgcagtcggctgat

SEQ ID NO: 709787 - DNA, 75 bp, synthetic construct
  source 1..75: mol_type = other DNA
ttctgcatcggtgacggtaaatctgttacccggccgcgcactcgatgaagggcaaattagcgctattgtacatct

SEQ ID NO: 709788 - DNA, 75 bp, synthetic construct
  source 1..75: mol_type = other DNA
acatctggtttccagcgcggttgctggtctgccgccgggaaacgtcacgctggtggatcagggcgggcatctgtt

SEQ ID NO: 709789 - DNA, 75 bp, synthetic construct
  source 1..75: mol_type = other DNA
tcaaccgctgggattggaacaaacatagaggctatattgatgttccagaaatagcactggatgccttgcagcgtg

SEQ ID NO: 709790 - DNA, 75 bp, synthetic construct
  source 1..75: mol_type = other DNA
aaacaaaaaagggctacgtagaagaagtatccgtgataacaccgacatctgtccccgtccaggttatcgaatgcc

SEQ ID NO: 709791 - DNA, 75 bp, synthetic construct
  source 1..75: mol_type = other DNA
gaggctatcgttcttcttatgtaaatatgaccaccacattcggacatgatacgcagcataacaagcaaatgtcat

SEQ ID NO: 709792 - DNA, 75 bp, synthetic construct
  source 1..75: mol_type = other DNA
gcaacagcaagtgtttatcgatcagttgctggctgctggttgctggtactgctggttgcgtggttgctgtggcgg

SEQ ID NO: 709793 - DNA, 75 bp, synthetic construct
  source 1..75: mol_type = other DNA
cctgcgatgagaaaaaacgtatcagtgacgagggctgggcgacccgttgcgcgcagtcactgacaaaacagcccg

SEQ ID NO: 709794 - DNA, 75 bp, synthetic construct
  source 1..75: mol_type = other DNA
gcttctggaaggacaacgtcagctgttcagcccggtgcgggttccgcctgtcaaggacgctgctcggcaaggagc

SEQ ID NO: 709795 - DNA, 75 bp, synthetic construct
  source 1..75: mol_type = other DNA
gggggcagaagtcatgagccagcgtatccgtgaaatatctgataacgatccgcgcgtggtggcgctggtcattcg

SEQ ID NO: 709796 - DNA, 75 bp, synthetic construct
  source 1..75: mol_type = other DNA
ggcacctgcgaataacgcgccaatcagcacgcctccggcaaatcaaaataaccgccagcagcaggcgagcaccac

SEQ ID NO: 709797 - DNA, 75 bp, synthetic construct
  source 1..75: mol_type = other DNA
gaagaacagtatcgccctaacggtgatgaatctcaggcggcgcttcgttcacgccagcttaatgagagcgagcaa

SEQ ID NO: 709798 - DNA, 75 bp, synthetic construct
  source 1..75: mol_type = other DNA
ctggcgacgaaggtaaactgttcggttccgtcggtactcgcgacatcgctgacgctgtaactgcagctggcgttg

SEQ ID NO: 709799 - DNA, 75 bp, synthetic construct
  source 1..75: mol_type = other DNA
gaaactggctgcggcaggcgtacaggatgcgaatttccatcccgaaggaatgcacggtcagaagtgcgagaactg

SEQ ID NO: 709800 - DNA, 75 bp, synthetic construct
  source 1..75: mol_type = other DNA
tacgtggtttaccctccttgatattccggggggtggaaaccctttttaatacccgtaaaaccaatgacccgattg

SEQ ID NO: 709801 - DNA, 75 bp, synthetic construct
  source 1..75: mol_type = other DNA
gtgagtgttgaactgacggataaaggaggacgatgtgcggcactgggcatgtcaaatggtacgtggtttaccctc

SEQ ID NO: 709802 - DNA, 75 bp, synthetic construct
  source 1..75: mol_type = other DNA
catccagcggtggcggaattactaacgctcaattcacctatattaatcatggtaatgcttatgctcctggctggc

SEQ ID NO: 709803 - DNA, 75 bp, synthetic construct
  source 1..75: mol_type = other DNA
aacagcctcgcggaataaaacacgaacagaccgaagtgatcatttttgcgggtagtgatgcctggtcacacgcga

SEQ ID NO: 709804 - DNA, 75 bp, synthetic construct
  source 1..75: mol_type = other DNA
aactggatcaccacacacaacggcattgagtacacgccgccagtaccaggggagaatatccgcgacaacgcgcca

SEQ ID NO: 709805 - DNA, 75 bp, synthetic construct
  source 1..75: mol_type = other DNA
gtgattatccgccgcttgctggctaattttgctgaccctgaaaaggcacgggctttattactggaacagcgcgac

SEQ ID NO: 709806 - DNA, 75 bp, synthetic construct
  source 1..75: mol_type = other DNA
aacagtggcaggagcaggacggccccgcatccggcgataatgtgcctcctgtgtggcttgggccaaatcagcttg

SEQ ID NO: 709807 - DNA, 75 bp, synthetic construct
  source 1..75: mol_type = other DNA
gtctatatggccttcatggcatacacaggaaaggggaaatgtttgagcgtgaatgagttcggaaaggctatgagg

SEQ ID NO: 709808 - DNA, 75 bp, synthetic construct
  source 1..75: mol_type = other DNA
gcgtttcacggcggtaatcagggcggtggtgctggcgaccaacaacaacccgatgatattcaccgaacgggccgg

SEQ ID NO: 709809 - DNA, 75 bp, synthetic construct
  source 1..75: mol_type = other DNA
tttcataaatggcttgagcacgcagccggaaaagacccgcgcaagatgatgcgtatatgtgccgcgctgtacatg

SEQ ID NO: 709810 - DNA, 75 bp, synthetic construct
  source 1..75: mol_type = other DNA
ttgaatacacgccgccagtaccaggggagaatatccgcgacaacgcgccaaactttcataaatggcttgatcacg

SEQ ID NO: 709811 - DNA, 75 bp, synthetic construct
  source 1..75: mol_type = other DNA
ccgggaacggaaattgcgttttacattcctaaccaacgcaccccagtcgcctcacaggctacgttattgctttga

SEQ ID NO: 709812 - DNA, 75 bp, synthetic construct
  source 1..75: mol_type = other DNA
aaggaagcatgtgaaaaaaatgaggttgcacaaggatacttttccatcatattgagaaaagttcttgagactcat

SEQ ID NO: 709813 - DNA, 75 bp, synthetic construct
  source 1..75: mol_type = other DNA
ttgagcatttaagtagctatggcgatctcgacccgcaggaaatgccgctgctgatcctcaacggctttgagtatg

SEQ ID NO: 709814 - DNA, 75 bp, synthetic construct
  source 1..75: mol_type = other DNA
aagggatgaaaggctggaacctgttccagttgatgcatcgtaaagcacgcggcgatgaggtcagcaatgacaagt

SEQ ID NO: 709815 - DNA, 75 bp, synthetic construct
  source 1..75: mol_type = other DNA
tttcaacgggcgtggtagctaaatctgctggaagagttcgcttggttgaagaaaaagtgtgtactggaagtgttg

SEQ ID NO: 709816 - DNA, 75 bp, synthetic construct
  source 1..75: mol_type = other DNA
attctgtcgtatggcttgtctgcaccattcttgggagggttgcaccagagtcggttgcacgtgcgtggtgtgagt

SEQ ID NO: 709817 - DNA, 75 bp, synthetic construct
  source 1..75: mol_type = other DNA
gcgaatcggcagcctggacgtccgagacaatattgagcgtcgggcttatgaaatcgcactggcatcgctggaagc

SEQ ID NO: 709818 - DNA, 75 bp, synthetic construct
  source 1..75: mol_type = other DNA
tggttaacttcattaatgacgcgcactttcgccgcgtatggagacacccgaagaaaaccatcaactctagccaga

SEQ ID NO: 709819 - DNA, 75 bp, synthetic construct
  source 1..75: mol_type = other DNA
ggtactcgcgacatcgctgacgctgtaactgcagctggcgttgaagtggctaagagcgaagttcgtctgccgaac

SEQ ID NO: 709820 - DNA, 75 bp, synthetic construct
  source 1..75: mol_type = other DNA
gacgctgtaactgcagctggcgttgaagtggctaagagcgaagttcgcctgccgaacggcgttctgcgtaccact

SEQ ID NO: 709821 - DNA, 75 bp, synthetic construct
  source 1..75: mol_type = other DNA
ctggcgtacattactgaagcgccttccattgtgcgaccagagaacgtgacacgcgaaaccgccaccttcaacctg

SEQ ID NO: 709822 - DNA, 75 bp, synthetic construct
  source 1..75: mol_type = other DNA
cgcaaccctgttagccggttgtgatggcggtggttccggatcttcctccgatacgccgcctgtagattctggaac

SEQ ID NO: 709823 - DNA, 75 bp, synthetic construct
  source 1..75: mol_type = other DNA
tggagatgcgctctataagaaagctcgcgaactggtcatccctcaatcatcgttcagcaacatcatcgctctcgc

SEQ ID NO: 709824 - DNA, 75 bp, synthetic construct
  source 1..75: mol_type = other DNA
cctctgggttcaacatcaggacaaagggcgtcttgaattgaattttgttatcccgaacatcgaattgcagagcgg

SEQ ID NO: 709825 - DNA, 75 bp, synthetic construct
  source 1..75: mol_type = other DNA
taaagagccagaccggagccggcgtatcgataattcacgattccaagaacaagagcgtgtattacctgatccttc

SEQ ID NO: 709826 - DNA, 75 bp, synthetic construct
  source 1..75: mol_type = other DNA
gcctgcccttctatgccggttggggtttaaccgttgatgaacatcactgcccgcgccgcgagcaaaaattaacgt

SEQ ID NO: 709827 - DNA, 75 bp, synthetic construct
  source 1..75: mol_type = other DNA
tctggacagaggacccttctctggccgtcattaatcccccggtggataccgccggtttcggggctgcgtttccct

SEQ ID NO: 709828 - DNA, 75 bp, synthetic construct
  source 1..75: mol_type = other DNA
gccgctcggctatctcattaacgtaaaggaatggtgggagacaaacgacccgcccggcacctttcgccttgatat

SEQ ID NO: 709829 - DNA, 75 bp, synthetic construct
  source 1..75: mol_type = other DNA
acgaggaagttcaaatgttactgcaaaatttttagatgtttcagatcaaattacaaatcttgttccccaacatcc

SEQ ID NO: 709830 - DNA, 75 bp, synthetic construct
  source 1..75: mol_type = other DNA
cggtgatggcgattacctccaacgaactggatacggctcgtcgccgtactacggggtctatggatgcgctgaaag

SEQ ID NO: 709831 - DNA, 75 bp, synthetic construct
  source 1..75: mol_type = other DNA
attaaacatataaaacaaaaggatggtataaataaaaaattaccattatttataataattgatgagcttgacagg

SEQ ID NO: 709832 - DNA, 75 bp, synthetic construct
  source 1..75: mol_type = other DNA
cctcctggttcacaccacttagacacaccagagcaatggttagagggatatttaactgctgatgaaacgttagtt

SEQ ID NO: 709833 - DNA, 75 bp, synthetic construct
  source 1..75: mol_type = other DNA
tgccgactatcaggcactggacgcagatattattcaatgcattcagcgcgcagatgaagtgcacaccatgacatc

SEQ ID NO: 709834 - DNA, 75 bp, synthetic construct
  source 1..75: mol_type = other DNA
gacgatttacagcgacgacgaacaccggaacacctacttggtggtgctaccgaagcaggcgcacggcgtggaaac

SEQ ID NO: 709835 - DNA, 75 bp, synthetic construct
  source 1..75: mol_type = other DNA
catttcaggagccggacattgcagacgctgagaaatcacgcctgatggatgaatgggagcacacgctgctgactg

SEQ ID NO: 709836 - DNA, 75 bp, synthetic construct
  source 1..75: mol_type = other DNA
tttgaccgggtcatcattgcaacaggtgaactctggcaaccccgccgcccccccctgccaggtgaggaaaacttc

SEQ ID NO: 709837 - DNA, 75 bp, synthetic construct
  source 1..75: mol_type = other DNA
ttagctgaagctaatttgactaagcattactccgataaactggataagttaaagcaaaagcttaaaaaagaactt

SEQ ID NO: 709838 - DNA, 75 bp, synthetic construct
  source 1..75: mol_type = other DNA
tgatgctacttatgacaaggttactcagcttcaagcagctattgaacctactgattttgagattcaggatgaaat

SEQ ID NO: 709839 - DNA, 75 bp, synthetic construct
  source 1..75: mol_type = other DNA
atgaaacgcagaagaagattgctatgcaggctgatattgagcagcttactaagatttcaacgaaatacagcaaag

SEQ ID NO: 709840 - DNA, 75 bp, synthetic construct
  source 1..75: mol_type = other DNA
tactgcgccaatctgcgtaaagagcagatcctcgacatcttccagctctatctcgataaatacgaaccggaagag

SEQ ID NO: 709841 - DNA, 75 bp, synthetic construct
  source 1..75: mol_type = other DNA
ttacggcgttgctgggcgcagaggcagaaaacatcgacctttttgacaggctgcaactggaacacgtgatagctc

SEQ ID NO: 709842 - DNA, 75 bp, synthetic construct
  source 1..75: mol_type = other DNA
gaaagattgatagcttcagtgactggtcgccacagactgaacatccactacatattattcagcgtcaagagcatg

SEQ ID NO: 709843 - DNA, 75 bp, synthetic construct
  source 1..75: mol_type = other DNA
aatatgaagatgctaagaaggttgctatgcaggctgatattgagcagcttacgaagatttctagcaaatatgcaa

SEQ ID NO: 709844 - DNA, 75 bp, synthetic construct
  source 1..75: mol_type = other DNA
cacgtaacaagcaacttgatagtgctaagttgcatctctcaagagagcttcaggctatgaaagagcttgtgaaag

SEQ ID NO: 709845 - DNA, 75 bp, synthetic construct
  source 1..75: mol_type = other DNA
attatcaggagccagaggcatttaaaggaaaaaatatcctcatcattggcggcggtgtcagcggtgcggatattg

SEQ ID NO: 709846 - DNA, 75 bp, synthetic construct
  source 1..75: mol_type = other DNA
accatctttgtagctcctgaacctcaagaaatgcctgatatttgcaagagtgaagcattatttaatcttgagcgt

SEQ ID NO: 709847 - DNA, 75 bp, synthetic construct
  source 1..75: mol_type = other DNA
catactatccagcgtaaagaacacgatgaaagaattaagtttgagcaagagttaaagatgtcaccaaaaacaacc

SEQ ID NO: 709848 - DNA, 75 bp, synthetic construct
  source 1..75: mol_type = other DNA
aatatgaagatgctaagaagattgctatgcaggctgatattgagcagttagtgaaaatttctcagaagtatagta

SEQ ID NO: 709849 - DNA, 75 bp, synthetic construct
  source 1..75: mol_type = other DNA
ttaagacacatttaggtatagactccatttctaatttatcaaaaagcctttctgaaaaacttttagatatacacg

SEQ ID NO: 709850 - DNA, 75 bp, synthetic construct
  source 1..75: mol_type = other DNA
gatcagccagtaaacatgggaagttatgacgtcaatgattttttgaatgtaggggatgtttctggcagccataca

SEQ ID NO: 709851 - DNA, 75 bp, synthetic construct
  source 1..75: mol_type = other DNA
gataataatggcgatgccagtttagtctttaaactccgctataagtcaactcagcaaaacgtacatgcggggcag

SEQ ID NO: 709852 - DNA, 75 bp, synthetic construct
  source 1..75: mol_type = other DNA
ttttctcaggcaggcacaggtacttatttgctgtctgcccttcatgacaattacggcaaccggattgattttatc

SEQ ID NO: 709853 - DNA, 75 bp, synthetic construct
  source 1..75: mol_type = other DNA
ttcttgccggtccgctcatccgggacctggcacgcctgagccgcaaacaggagagcgcacgccgggaagggctta

SEQ ID NO: 709854 - DNA, 75 bp, synthetic construct
  source 1..75: mol_type = other DNA
actggtcagacgtaagccggaaggtgaagacagcgccagcgaaactgattttgacgttgagggcgactttgtcgc

SEQ ID NO: 709855 - DNA, 75 bp, synthetic construct
  source 1..75: mol_type = other DNA
gttaaaaaacagtttgattatcaggagccggttcagaatatgccagggcaacaatctactactggcagtaacttt

SEQ ID NO: 709856 - DNA, 75 bp, synthetic construct
  source 1..75: mol_type = other DNA
gatgcactcagcgaaaatgaaagtgaactgctgcagccggaaggcccgccctttcatctctgtgccttctgccac

SEQ ID NO: 709857 - DNA, 75 bp, synthetic construct
  source 1..75: mol_type = other DNA
tgtggagatatagaaagaacggaagatatattgatgttgcggtagatacaggggaaattgtctcttttggtcgtt

SEQ ID NO: 709858 - DNA, 75 bp, synthetic construct
  source 1..75: mol_type = other DNA
gtgcagaaacggtagagcaatatctaaataaagctaaggttttttctgagaacttgagaagaataaaaccaacta

SEQ ID NO: 709859 - DNA, 75 bp, synthetic construct
  source 1..75: mol_type = other DNA
ggtgcggaaagcagtgattgtaccaaacccggcgaacccgtggacgccggaaccggcgactttctccagcacttc

SEQ ID NO: 709860 - DNA, 75 bp, synthetic construct
  source 1..75: mol_type = other DNA
gttggccgcgtacaggaactgctgacagaaaacggcctgatagtctggaaaggcaagcagcagctatggggccgt

SEQ ID NO: 709861 - DNA, 75 bp, synthetic construct
  source 1..75: mol_type = other DNA
gcctggccgttgaggagaaatttcgcacctggcgtccggcggattttgctgatgcactgcgccgctggccgccgg

SEQ ID NO: 709862 - DNA, 75 bp, synthetic construct
  source 1..75: mol_type = other DNA
cgtgaccccaccatactggccgtcactcgagatcagacgtgaccgccgcacggcaccagaccctgaacgggtacc

SEQ ID NO: 709863 - DNA, 75 bp, synthetic construct
  source 1..75: mol_type = other DNA
aagatgacgaatttcttggtgaaaaattacctgcagatacattggacagaaaaaagtacgcaaaatatctttatg

SEQ ID NO: 709864 - DNA, 75 bp, synthetic construct
  source 1..75: mol_type = other DNA
tgtcgaaatacaaccaggcgccgccgtttgttcctcccaccgtgatgccagatgcggtgctggtcgtcgaccaga

SEQ ID NO: 709865 - DNA, 75 bp, synthetic construct
  source 1..75: mol_type = other DNA
gtggcaggtgaacggagttgccggtgataacctgcataaaactggcgaaggtaccctgacagtaaacgggaccgg

SEQ ID NO: 709866 - DNA, 75 bp, synthetic construct
  source 1..75: mol_type = other DNA
aagtaaaatatttacaacataaaggcaactatcataataattcatataataaaaaagaaatttccacaggaatta

SEQ ID NO: 709867 - DNA, 75 bp, synthetic construct
  source 1..75: mol_type = other DNA
gctatctacattaaacttcaaagattatgacctttattcaaggataaaatcaaaagaaaaaattacaactgccgc

SEQ ID NO: 709868 - DNA, 75 bp, synthetic construct
  source 1..75: mol_type = other DNA
gttgaattcattgggcgaaaagatggaatagataaagagcttccattatttataataattgatgaacttgataga

SEQ ID NO: 709869 - DNA, 75 bp, synthetic construct
  source 1..75: mol_type = other DNA
ctctacgatctggcgcacaatgaaaatcatgaatatggcgaaaatgaacaatcagcctacggctacatttgcgcc

SEQ ID NO: 709870 - DNA, 75 bp, synthetic construct
  source 1..75: mol_type = other DNA
ctgactcgcgtcggtgttgaccctaataacgttgctcagatgtatcagcagaatccttcaggatttggtgagttt

SEQ ID NO: 709871 - DNA, 75 bp, synthetic construct
  source 1..75: mol_type = other DNA
ctgactcgcgtcggtgttgaccctaacagcgttgctcagatgtatcagcagaacccttcaggatttggtgagttt

SEQ ID NO: 709872 - DNA, 75 bp, synthetic construct
  source 1..75: mol_type = other DNA
tgaacgcaggaaaaaacctcctgttcaccggcaataatggcgaggtcgttctgcagaattccgttaatcaggggg

SEQ ID NO: 709873 - DNA, 75 bp, synthetic construct
  source 1..75: mol_type = other DNA
tgcttatgagtagtttgattttgtcaggatgtgggccgcaacctgagaataaggaaagtcagcaacaacaaccca

SEQ ID NO: 709874 - DNA, 75 bp, synthetic construct
  source 1..75: mol_type = other DNA
ttatatgatttgtctcacaatgaaagtcatgaatatggagaaaacgaacaatctgtttatggctatatttgctcc

SEQ ID NO: 709875 - DNA, 75 bp, synthetic construct
  source 1..75: mol_type = other DNA
ccagtcgccatcgccaaagcagcgggaaaacccgtcattcgtctggaagatggatttgtgcgttcgctggatctt

SEQ ID NO: 709876 - DNA, 75 bp, synthetic construct
  source 1..75: mol_type = other DNA
acagtgtacagaaaaccagtatcgggagtatcagaatgaggccctataacggttcatctgcaggcagtgttcaga

SEQ ID NO: 709877 - DNA, 75 bp, synthetic construct
  source 1..75: mol_type = other DNA
tggctgtattcattctggtttgctgcaatatcagccatgcggcagtttcatttattggcagtacggagaatgatg

SEQ ID NO: 709878 - DNA, 75 bp, synthetic construct
  source 1..75: mol_type = other DNA
tcaggccagagaagcgatgcacaccatcgtgaccgatgatttgtcgaaatataatctggcgcctgcgtttgtggc

SEQ ID NO: 709879 - DNA, 75 bp, synthetic construct
  source 1..75: mol_type = other DNA
attagaaaaaataatatttacagagttattaacatttaccgtaagttaatcatgttctgcaaagtaagactgggc

SEQ ID NO: 709880 - DNA, 75 bp, synthetic construct
  source 1..75: mol_type = other DNA
cagacgccgcgcaagccgatgtttattagaaaaaataatatttacagagttattaacatttaccgtaagttaatc

SEQ ID NO: 709881 - DNA, 75 bp, synthetic construct
  source 1..75: mol_type = other DNA
caggtcctgtgggagcaacggtggggcaaatcggcaaacttaaaggttgcagggtggtgggggttgccggtggcg

SEQ ID NO: 709882 - DNA, 75 bp, synthetic construct
  source 1..75: mol_type = other DNA
gccgttgggttctggcgtcgcgtccacacggcgcgccggttccggagaatttccgtcttgaagaagatgatgtcg

SEQ ID NO: 709883 - DNA, 75 bp, synthetic construct
  source 1..75: mol_type = other DNA
cagaacgcgccactgccagtgccgtcagtccggcttataccgcagacgctgaccataccggtaatgcctcccccc

SEQ ID NO: 709884 - DNA, 75 bp, synthetic construct
  source 1..75: mol_type = other DNA
ggtttactgcttatatggggctgctggatatcggacagccaaaagggggcgaaacactggtggttgccgcggcga

SEQ ID NO: 709885 - DNA, 75 bp, synthetic construct
  source 1..75: mol_type = other DNA
atggggcaacaaaagcagcgtaatcgacgttgggttctggcctcgcgtccgcatggcgcaccggttccggagaat

SEQ ID NO: 709886 - DNA, 75 bp, synthetic construct
  source 1..75: mol_type = other DNA
tcgctgggtgtgctggggatgcctggttttaccgcttatatgggcttgctggatatcggtcaacctaaaaagggg

SEQ ID NO: 709887 - DNA, 75 bp, synthetic construct
  source 1..75: mol_type = other DNA
tatttataaaccgcacccggatgtattagtggggaatcgcaagggcgatattccggcagaacagattgctgaact

SEQ ID NO: 709888 - DNA, 75 bp, synthetic construct
  source 1..75: mol_type = other DNA
gctggcattgctggcctgtagcgatgccatccgccgaatctccacgcatccgctgtggcgctggttgttgcatat

SEQ ID NO: 709889 - DNA, 75 bp, synthetic construct
  source 1..75: mol_type = other DNA
aattttgttatgaataatcctgaaggtgagcgtgcggattcatctaaggtgattatagaaatttcactttctact

SEQ ID NO: 709890 - DNA, 75 bp, synthetic construct
  source 1..75: mol_type = other DNA
tgaactcttaacctatggttttccgacaatcggtaatgattttattgatgagatggaatgcgattatcgccagct

SEQ ID NO: 709891 - DNA, 75 bp, synthetic construct
  source 1..75: mol_type = other DNA
tttaataatgggattcgtgaaggacatacagtcattatatttacacaacctgatggttcgactaatcgttattaa

SEQ ID NO: 709892 - DNA, 75 bp, synthetic construct
  source 1..75: mol_type = other DNA
tctctggtgaggggcgtcatctctggcaactgtggccgcaaacgatctggatgctggtgggcgttggttgcgcct

SEQ ID NO: 709893 - DNA, 75 bp, synthetic construct
  source 1..75: mol_type = other DNA
atgtgctggaaagcgccagagcaatgggcatgagcggggggcagcgactccttcatgtccagttacctctggcgc

SEQ ID NO: 709894 - DNA, 75 bp, synthetic construct
  source 1..75: mol_type = other DNA
caatcgaacggctttgttcatctgtatcgattacccctcatgaaatggctgtggccttggctggcctaaacccat

SEQ ID NO: 709895 - DNA, 75 bp, synthetic construct
  source 1..75: mol_type = other DNA
gattgtttatccaacctatatccacccaacacggctacaacctattacggtagaagaagctgcggaatatttaat

SEQ ID NO: 709896 - DNA, 75 bp, synthetic construct
  source 1..75: mol_type = other DNA
tgctgattatcaggcactggacgcagatattattcaatgcattcagcgcgcagatgaagtgcacaccatgacatc

SEQ ID NO: 709897 - DNA, 75 bp, synthetic construct
  source 1..75: mol_type = other DNA
ggtttttgcatcatgaagttcaggcaactaaaaaaattatcttcagggatggtaataaaagaaattgccacccaa

SEQ ID NO: 709898 - DNA, 75 bp, synthetic construct
  source 1..75: mol_type = other DNA
aagaaccaagccagcttcatcgttggcggcgtgtttatggcgtcatgcgtggttaatgccattatcggcatgtct

SEQ ID NO: 709899 - DNA, 75 bp, synthetic construct
  source 1..75: mol_type = other DNA
caggggttgcagcgaataggtagcgtaagcacgatggttcggggctctccggatgacgcattagcagaaatcaga

SEQ ID NO: 709900 - DNA, 75 bp, synthetic construct
  source 1..75: mol_type = other DNA
tcggtctgtcgcaaatcatctccacgcaactggaggtttcacgcgccgagcagctacgtgaaatggcaaataagg

SEQ ID NO: 709901 - DNA, 75 bp, synthetic construct
  source 1..75: mol_type = other DNA
cgcgggataatccaccaatcccgggaaaacaatcgctggcgaaggggacgtcaattcctctggtcagtcaggttg

SEQ ID NO: 709902 - DNA, 75 bp, synthetic construct
  source 1..75: mol_type = other DNA
aagcgcaacgctggcgcgtcggtattctcggcggcatgttgtgtgaaacgctgaccatgattctggtgattatct

SEQ ID NO: 709903 - DNA, 75 bp, synthetic construct
  source 1..75: mol_type = other DNA
ctggtgatcccgctgtgggagaaaggcgtagtgaccggcacgttgaaaatttactactgccatgctcaccagata

SEQ ID NO: 709904 - DNA, 75 bp, synthetic construct
  source 1..75: mol_type = other DNA
ttattaaaaacaatgatgaagcccaccgcacaccagagattcattccatgctggtgatcccattgtgggagaaag

SEQ ID NO: 709905 - DNA, 75 bp, synthetic construct
  source 1..75: mol_type = other DNA
atgaataaccagtatttacagtttgttcgtgagcaactcatgattgccactgcggatctcagtggggcgacaaaa

SEQ ID NO: 709906 - DNA, 75 bp, synthetic construct
  source 1..75: mol_type = other DNA
cagaaggcgtggttactgtggtgctacagtggaaatgtttgctgggaagatcaggtcaccataacacagtgggtg

SEQ ID NO: 709907 - DNA, 75 bp, synthetic construct
  source 1..75: mol_type = other DNA
ctggcaggcgctgaaatatgccggctactgcgccaacctgcgtcaggagagcgtggtggagatcttccagcttta

SEQ ID NO: 709908 - DNA, 75 bp, synthetic construct
  source 1..75: mol_type = other DNA
atagtctgcattctctgcaagaggtgtcgttcagcagcctcggctttcgcgagcgcgatcacctgcaggagtggc

SEQ ID NO: 709909 - DNA, 75 bp, synthetic construct
  source 1..75: mol_type = other DNA
tttgcctttaactggctgtatgagcgtaaagcggcgattgaagagacatttggtcatgcgctgaagtgggaaccg

SEQ ID NO: 709910 - DNA, 75 bp, synthetic construct
  source 1..75: mol_type = other DNA
cgtgtgaagttattgtatggtgaggggttacatatccgtcgtctggaaccgggaacggaaatcgcgttttacatt

SEQ ID NO: 709911 - DNA, 75 bp, synthetic construct
  source 1..75: mol_type = other DNA
attttgaattaaacacggtgttgaatgaaggtgtattctggaccgcgaatcagctcttcggtattaagtttgtcg

SEQ ID NO: 709912 - DNA, 75 bp, synthetic construct
  source 1..75: mol_type = other DNA
tttggtatccgcgcccagtgcttcaaagtgaccccctaccgttttggtgaagacgtgtttgtcgatatccgccag

SEQ ID NO: 709913 - DNA, 75 bp, synthetic construct
  source 1..75: mol_type = other DNA
ggcgttgtcaccatcagcgttgcagagtgcggtaatcgggtacgcattgcggtgcgagataccgggcacggcatc

SEQ ID NO: 709914 - DNA, 75 bp, synthetic construct
  source 1..75: mol_type = other DNA
cagctgaaagcctgggcggagaaacaggtgctggaaaacccccttcagcgttcagataaccatttcctggatgag

SEQ ID NO: 709915 - DNA, 75 bp, synthetic construct
  source 1..75: mol_type = other DNA
gtaccggagtttctgcagcagccagcacccggaaaacataacgatgcgtggatacagagtctgacccgaaaatca

SEQ ID NO: 709916 - DNA, 75 bp, synthetic construct
  source 1..75: mol_type = other DNA
atgaactggaaaacatttgcgctttttgccctgactgcaggaatgcatatcactgttcatgcctcagacaatgtg

SEQ ID NO: 709917 - DNA, 75 bp, synthetic construct
  source 1..75: mol_type = other DNA
tcatgtgctggcctatgttggcgtgggtgaacacaactatcagaatggcgatgacttcattagcccgactacccg

SEQ ID NO: 709918 - DNA, 75 bp, synthetic construct
  source 1..75: mol_type = other DNA
cggcgcgactgatggtgttcagatcgacccgacgctgttttcacagtacggcattcgcagtgtaccggcactggt

SEQ ID NO: 709919 - DNA, 75 bp, synthetic construct
  source 1..75: mol_type = other DNA
tgggcgaaacccggcactacggtattccggccacgctgcggggcatggtgaacaacgacctgaaggccacggctg

SEQ ID NO: 709920 - DNA, 75 bp, synthetic construct
  source 1..75: mol_type = other DNA
cgcgtgaagttattgtatggcgaggggctgcatatccgccgcctggaaccaggaacggaaattgcgttttacatt

SEQ ID NO: 709921 - DNA, 75 bp, synthetic construct
  source 1..75: mol_type = other DNA
ccaatgatcctcggcagcgtctgtatcggctttattgtgttgctggtacaaagcgttgagggcgaaaaagaggcc

SEQ ID NO: 709922 - DNA, 75 bp, synthetic construct
  source 1..75: mol_type = other DNA
cgtgaaatggcaaataaggcagagcttcgcgccctgcaaagcaaaattaatccccattttctgtttaacgctctg

SEQ ID NO: 709923 - DNA, 75 bp, synthetic construct
  source 1..75: mol_type = other DNA
tgctgttcatgcttcagaaaatgtgaacacaactgaaaaccgccagttcctgaagcagcaggaaaatttaagcag

SEQ ID NO: 709924 - DNA, 75 bp, synthetic construct
  source 1..75: mol_type = other DNA
tgacgatcagcgtcatgattgctttcgcgccgctggccctggcgagcgcccagaccgatatctccgtctccgacc

SEQ ID NO: 709925 - DNA, 75 bp, synthetic construct
  source 1..75: mol_type = other DNA
tcctttcatgaaaatacgcaaaatatcatgaaccggaaaatatttgcactttttgctctgacagcagggatgcat

SEQ ID NO: 709926 - DNA, 75 bp, synthetic construct
  source 1..75: mol_type = other DNA
atgacaccgcccgcaaactgacgccattaatccgcgcctggcctggcgaatcccagcataaacgcgccaccgtcg

SEQ ID NO: 709927 - DNA, 75 bp, synthetic construct
  source 1..75: mol_type = other DNA
acattcgcttcttgttgcccattacctatacggtatctctaaaagaaagctcgccaaagctcgtaaaaaggatga

SEQ ID NO: 709928 - DNA, 75 bp, synthetic construct
  source 1..75: mol_type = other DNA
gaaattgatacgtatagaaatacagttagccgaaggatttattgatggctgcctttccatgctagatctaacatt

SEQ ID NO: 709929 - DNA, 75 bp, synthetic construct
  source 1..75: mol_type = other DNA
ctcatgatcgatgggtgtgtagctagattaagaaagtacaagccagaagagtatgagttggttattgctcatttt

SEQ ID NO: 709930 - DNA, 75 bp, synthetic construct
  source 1..75: mol_type = other DNA
accgctggggtgcatgggctgcagcagataacagtggtgtggactggcagccgatagcagcaggcttcaaggggc

SEQ ID NO: 709931 - DNA, 75 bp, synthetic construct
  source 1..75: mol_type = other DNA
gtctgaagcagaaaaaaccagaggagtattcgcttctcattgctcattatttgttgcgaatatcaaaaagacaga

SEQ ID NO: 709932 - DNA, 75 bp, synthetic construct
  source 1..75: mol_type = other DNA
tgaatgaacgctttgccaccccggcctttaaggccaccgccgcgcgcgaacggctggatgaactgcttatgctgc

SEQ ID NO: 709933 - DNA, 75 bp, synthetic construct
  source 1..75: mol_type = other DNA
aaaggtacctgatgaactggctgttgcggcatcaatggcagaaaacgaacagcagatggcaatgcatccgtctga

SEQ ID NO: 709934 - DNA, 75 bp, synthetic construct
  source 1..75: mol_type = other DNA
aactaccaagtgaattaaatcatgtattaagcaagaataaaaaacttattaccgacgtaatatttggtaattcgg

SEQ ID NO: 709935 - DNA, 75 bp, synthetic construct
  source 1..75: mol_type = other DNA
gatttcccagccgggtgattatccgaaagatacgacgacacaagcccctttaacgccatacgatacgtggaacgg

SEQ ID NO: 709936 - DNA, 75 bp, synthetic construct
  source 1..75: mol_type = other DNA
aagaggggctttatttaataaatcaccttggggatcgacgcttaacaattcaacactacccaatgagttgttaat

SEQ ID NO: 709937 - DNA, 75 bp, synthetic construct
  source 1..75: mol_type = other DNA
cacaggtcgagtatgtccctgtgacggcactggtgaagtctcccctaaacgtcaggaccattccctatccggcgg

SEQ ID NO: 709938 - DNA, 75 bp, synthetic construct
  source 1..75: mol_type = other DNA
atggatgaccagtgctgacaatcagaaacagcctgccgcaaagtctgaactcagtctggcaacaagtcagaacga

SEQ ID NO: 709939 - DNA, 75 bp, synthetic construct
  source 1..75: mol_type = other DNA
aaacactgaaggctcgttcggcaccgtacagtacagccagattggcaaggctgtgcaaagcggcaatgtggaacc

SEQ ID NO: 709940 - DNA, 75 bp, synthetic construct
  source 1..75: mol_type = other DNA
aagtgaccggagcgcgtggcgtgattattcgcggcaacggcgttcaggtgatttatggccctcatgtcaccatca

SEQ ID NO: 709941 - DNA, 75 bp, synthetic construct
  source 1..75: mol_type = other DNA
gtctggcgtttatgatcgcccatattttacatatcacgattgggcaaaccttttcgggcgggcttatcgatttcc

SEQ ID NO: 709942 - DNA, 75 bp, synthetic construct
  source 1..75: mol_type = other DNA
cggtcggcgtcgccgtggggctggcgaaatcggataaaggcactgccgggcttgcggcattgctagcgtttctgg

SEQ ID NO: 709943 - DNA, 75 bp, synthetic construct
  source 1..75: mol_type = other DNA
gggaatatgatgctcacagtgcttgcagcagtggcacaaatggagcgtgaaatgatgcttgagcgtcaacgtgaa

SEQ ID NO: 709944 - DNA, 75 bp, synthetic construct
  source 1..75: mol_type = other DNA
cgtgaaggtgatgttatccatgtacatgacctgtcacgtttagggcgttctaccgtggatgtattaacgctggtg

SEQ ID NO: 709945 - DNA, 75 bp, synthetic construct
  source 1..75: mol_type = other DNA
gaaatcggataaaggcactgccgggcttgcgtcattgctggcgtttctggtgatgaatgctaccatcaacgcctt

SEQ ID NO: 709946 - DNA, 75 bp, synthetic construct
  source 1..75: mol_type = other DNA
gcagaaaaacctcacggcggcggcgtgcgaagagaaagtggtggccctgacgctggacgacaaacgccgcgagca

SEQ ID NO: 709947 - DNA, 75 bp, synthetic construct
  source 1..75: mol_type = other DNA
atgcgacaaatcatcgacactctggcgcagttgcagcgcctgcgggataaatcggtcaaagacaaaaccgtcgaa

SEQ ID NO: 709948 - DNA, 75 bp, synthetic construct
  source 1..75: mol_type = other DNA
atcggtcaaagacaaaaccgtcgaactggcaaagcaaaaacagatctgcgcgggctatgacaacaatatcaaagc

SEQ ID NO: 709949 - DNA, 75 bp, synthetic construct
  source 1..75: mol_type = other DNA
agagaaggcgacaccttacacgtgcactctctcgatcgtttagggcgtaacaccttagacattcttgccttagtg

SEQ ID NO: 709950 - DNA, 75 bp, synthetic construct
  source 1..75: mol_type = other DNA
acaagaaagcgccaccgcgaaagcgcaaaaagcggtggacgatatcgccgttcagtgctggttgcggcacaaagt

SEQ ID NO: 709951 - DNA, 75 bp, synthetic construct
  source 1..75: mol_type = other DNA
cgctggacgacaaacgccgcgagcagcaggaaagcgccaccgcgaaagcgcaaaaagcggtggatgacatcgccg

SEQ ID NO: 709952 - DNA, 75 bp, synthetic construct
  source 1..75: mol_type = other DNA
gatgcaccagttacacataaagctggttatacaatttgccgttctgtggatttaaaatcatgggaatatgtgtca

SEQ ID NO: 709953 - DNA, 75 bp, synthetic construct
  source 1..75: mol_type = other DNA
agactgccagactgcaacgccagaaacgggtggatcaggcgatgaagtccatcgaccccatcaacctcaaactgc

SEQ ID NO: 709954 - DNA, 75 bp, synthetic construct
  source 1..75: mol_type = other DNA
aatcacagttccgggtgattaccctgaaaatacaaccactatcgccccattaacgcaatacgataaatgggatgg

SEQ ID NO: 709955 - DNA, 75 bp, synthetic construct
  source 1..75: mol_type = other DNA
tgccagagtgatgaatgatactcgtggggtattaaaagcgattgttgataataaaacccaacgtatattaggggc

SEQ ID NO: 709956 - DNA, 75 bp, synthetic construct
  source 1..75: mol_type = other DNA
taacccgataaatgtgatgtatgcactggtcgttggcggtctgttgctgattgccgccgaatgcctgaagccgaa

SEQ ID NO: 709957 - DNA, 75 bp, synthetic construct
  source 1..75: mol_type = other DNA
taaaaccttcctgcaattgattaagcggatttcgtttatcccattcgccatttatcgctttattgtggcggctgc

SEQ ID NO: 709958 - DNA, 75 bp, synthetic construct
  source 1..75: mol_type = other DNA
tagcggcaatattgggtgtggtcgaaggattgacagaatttctgccggtatccagcacgggccacatgattattg

SEQ ID NO: 709959 - DNA, 75 bp, synthetic construct
  source 1..75: mol_type = other DNA
acgttggttgagtgataatggcataacacaaagcatgtcccgacgtggtaactgcttagataatgcagcaatgga

SEQ ID NO: 709960 - DNA, 75 bp, synthetic construct
  source 1..75: mol_type = other DNA
ggcatttaggtattttgggcggcggatatattggcgttgagttcgcctctatgttcgctaattttggcagcaagg

SEQ ID NO: 709961 - DNA, 75 bp, synthetic construct
  source 1..75: mol_type = other DNA
aattcatggcgagaaaatttttattaataccggtgcacaaaccgtggttccgccaattcctggaattaccaccac

SEQ ID NO: 709962 - DNA, 75 bp, synthetic construct
  source 1..75: mol_type = other DNA
ttggttttggcaaggctggaaaaacattagccgtcacgctggcaaaagcaggttggcgtgtggctctcatcgaac

SEQ ID NO: 709963 - DNA, 75 bp, synthetic construct
  source 1..75: mol_type = other DNA
tggcgcggcacaaacgcgagaatccgcccacggtggtatcggaagccatggcagaacttcgcgccctgccctcgt

SEQ ID NO: 709964 - DNA, 75 bp, synthetic construct
  source 1..75: mol_type = other DNA
tatatttcactggatgacttccgtatcgtacgcgatgagttgctgggagaaggtaaacgcagtactgacgatcga

SEQ ID NO: 709965 - DNA, 75 bp, synthetic construct
  source 1..75: mol_type = other DNA
ggggcgaccatttcaggtgggatgctgatgggggtgagccgttacgctgcttccgagttttcgtcctgctggcgg

SEQ ID NO: 709966 - DNA, 75 bp, synthetic construct
  source 1..75: mol_type = other DNA
tgcgttgatgcgccgggcagcaaaaaagaaggtttcgcaatctgccgcaaggctgatttaaccagttgggaatac

SEQ ID NO: 709967 - DNA, 75 bp, synthetic construct
  source 1..75: mol_type = other DNA
ccggcggacaccaccacaaaacagcctgccacaccatgggatacctggaacggtgaagcgtgggtaactgatact

SEQ ID NO: 709968 - DNA, 75 bp, synthetic construct
  source 1..75: mol_type = other DNA
cccatcatcggcggccttgaaattcaggatattgagccgatgcaactgctggaagtaatccgcagatttgaagat

SEQ ID NO: 709969 - DNA, 75 bp, synthetic construct
  source 1..75: mol_type = other DNA
gattatatcgacgcggtgacggcaacagataccagcaccgcgccggatgtcatctggcctgaactgccggaggcg

SEQ ID NO: 709970 - DNA, 75 bp, synthetic construct
  source 1..75: mol_type = other DNA
agtctgattcaactgaaattgcaggccgggcggaagctgatgcagacagaaaacccccgacttaacgctgtgctg

SEQ ID NO: 709971 - DNA, 75 bp, synthetic construct
  source 1..75: mol_type = other DNA
cacatgctggtgttcaccagccaggaaaacgaagcccgtatcactgaaatcatgcgcaacgccgccatcagggag

SEQ ID NO: 709972 - DNA, 75 bp, synthetic construct
  source 1..75: mol_type = other DNA
atgctcaccgttaagcagattgaagcagcaaagccgaaagaaaaaccataccgccttctcgatggtaatggcctg

SEQ ID NO: 709973 - DNA, 75 bp, synthetic construct
  source 1..75: mol_type = other DNA
tttacaaccatgctcagtatatcgataagcgcagagaaatgatgcagtggtgggcggactggcttgatgacaaat

SEQ ID NO: 709974 - DNA, 75 bp, synthetic construct
  source 1..75: mol_type = other DNA
agcttattgccacgaaggcgggggatattaccgtctatagctatgatggtgaaactcgggaatatatttccactt

SEQ ID NO: 709975 - DNA, 75 bp, synthetic construct
  source 1..75: mol_type = other DNA
tttacaaccatgctcagtatctcgataagcgcagagaaatgatgctgtggtgggcggactggctggacgaaaaga

SEQ ID NO: 709976 - DNA, 75 bp, synthetic construct
  source 1..75: mol_type = other DNA
taagcgcagagaaatgatgcaatggtgggcggactggcttgatgaaaagggggggggatccgccttaaccactat

SEQ ID NO: 709977 - DNA, 75 bp, synthetic construct
  source 1..75: mol_type = other DNA
ggtcccgatgtcagaccaggtggttgaacttctcactacgctaagctccatcactaaaccagtatcagagtttgt

SEQ ID NO: 709978 - DNA, 75 bp, synthetic construct
  source 1..75: mol_type = other DNA
gcaccggggaaatgtggtggaaaaagtgattgaaggggcttacgaggtggtgggcgtgtttgaccggattgagga

SEQ ID NO: 709979 - DNA, 75 bp, synthetic construct
  source 1..75: mol_type = other DNA
gtgacagcattactgacactggaagaaatcaaggcacatctgcgtatcgaccatgacgcggatgatgagatgctg

SEQ ID NO: 709980 - DNA, 75 bp, synthetic construct
  source 1..75: mol_type = other DNA
aatatcatcaataagttacgtgatgaaggtttccagccgttctttgcctgtcagagtcgggtttgtgatttggga

SEQ ID NO: 709981 - DNA, 75 bp, synthetic construct
  source 1..75: mol_type = other DNA
gcaccggggaaatgtggtggacacagtgattgaaggggcttacgaggtggtgggcgtgtttgaccggattgagga

SEQ ID NO: 709982 - DNA, 75 bp, synthetic construct
  source 1..75: mol_type = other DNA
gcaccggggaaatgtggtggaaagagtaattgaaggggcttacgaggtggtgggcgtgtttgaccggattgagga

SEQ ID NO: 709983 - DNA, 75 bp, synthetic construct
  source 1..75: mol_type = other DNA
gcaccggggaaatgtggtggaaatagttattgaaggggcttacgaggtggtgggcgtgtttgaccggattgagga

SEQ ID NO: 709984 - DNA, 75 bp, synthetic construct
  source 1..75: mol_type = other DNA
cagcgtatccgtgaaatgtctgataacgatccgcgcgtggtagcgctggtcattcgccagtggataaataacgat

SEQ ID NO: 709985 - DNA, 75 bp, synthetic construct
  source 1..75: mol_type = other DNA
caggtgaattatcagcgggcgctggaaggcgagctttctcgtaccatcgaaactatcggcccggtaaaaggggcg

SEQ ID NO: 709986 - DNA, 75 bp, synthetic construct
  source 1..75: mol_type = other DNA
agtacgcctccggcaaatcaaaacaaccgtcagcaacaaacaagcaccaccagtaatagcggcccgcgcagcacc

SEQ ID NO: 709987 - DNA, 75 bp, synthetic construct
  source 1..75: mol_type = other DNA
tctcagcaacgaacagatgaagcaaattgaagatctgacccgcgaggcgatgggcttttctgaaaaacgcggtga

SEQ ID NO: 709988 - DNA, 75 bp, synthetic construct
  source 1..75: mol_type = other DNA
agcacccgcaaataacgcgccgatcagcacgcctccggcaaatcaaaataatcgccagcagcaggcaagcacaac

SEQ ID NO: 709989 - DNA, 75 bp, synthetic construct
  source 1..75: mol_type = other DNA
atgaaaccagtaactacgaagtcgatcgcaccattcgtcataccaaaatgaacgtgggcgatgtgcaacgtctgt

SEQ ID NO: 709990 - DNA, 75 bp, synthetic construct
  source 1..75: mol_type = other DNA
gcaccggggaaatgtggtggacagagtcattgaaggggcttacgaggtggtgggcgtgtttgaccggattgagga

SEQ ID NO: 709991 - DNA, 75 bp, synthetic construct
  source 1..75: mol_type = other DNA
atgagtgaagctctcaaggcactgaacaatattcgtacacttcgcgcacaggctcgtgaaacagatctggcaact

SEQ ID NO: 709992 - DNA, 75 bp, synthetic construct
  source 1..75: mol_type = other DNA
cggggcgaagtgcctccggtaaaaataccaggacaagagccattacaggtattgatggtgatatccgaatcaaca

SEQ ID NO: 709993 - DNA, 75 bp, synthetic construct
  source 1..75: mol_type = other DNA
taacgggaaggaagttcctgaaattatcctgcttaattcacatgatggttcatccagttatcagatgatccccgg

SEQ ID NO: 709994 - DNA, 75 bp, synthetic construct
  source 1..75: mol_type = other DNA
ggaagccgcggcgcaacgattcggcgatggtcatctcaatgaacgcattcattttgatgatgggtcgagttttga

SEQ ID NO: 709995 - DNA, 75 bp, synthetic construct
  source 1..75: mol_type = other DNA
ccctatctctattaccttcatcaaatgcgtttactggatgtcggactgatcgcttttattgcaatctccctcgct

SEQ ID NO: 709996 - DNA, 75 bp, synthetic construct
  source 1..75: mol_type = other DNA
gcatgtctttgaaccctttgtgcgtctcgatcctagccgtgaccgttcaaccggcggttgtgggttgggactggc

SEQ ID NO: 709997 - DNA, 75 bp, synthetic construct
  source 1..75: mol_type = other DNA
gcccctacggcgcgccgcaatataacgaaaccaaagggcatatgactaaatgcgacggctgctatgaccgtgtcg

SEQ ID NO: 709998 - DNA, 75 bp, synthetic construct
  source 1..75: mol_type = other DNA
cgaaaccaaagggcatatgaccaaatgcgatggttgctatgaccgtgtcgcggaaggtaaaaagccgatctgcgt

SEQ ID NO: 709999 - DNA, 75 bp, synthetic construct
  source 1..75: mol_type = other DNA
gcaccggggaaatgtggtggagagagtgattgaaggggcttacgaggtggtgggcgtgtttgaccggattgagga

SEQ ID NO: 710000 - DNA, 75 bp, synthetic construct
  source 1..75: mol_type = other DNA
tttctggtgataaacatgaatcccggagtgagcgttatacatatatcccaaccatcaatatcatcaataagttac

SEQ ID NO: 710001 - DNA, 75 bp, synthetic construct
  source 1..75: mol_type = other DNA
agtgacgagcaacatttatttggcagagctgcactgatgggcaggtaggaagatgaaaataaaacgccagtgacg

SEQ ID NO: 710002 - DNA, 75 bp, synthetic construct
  source 1..75: mol_type = other DNA
agtgacgaacaacatttatttggcagagctgcagtgatggacaggtaggaagatgaaaataaaacgccagtgacg

SEQ ID NO: 710003 - DNA, 75 bp, synthetic construct
  source 1..75: mol_type = other DNA
cagaacgatctctggacaacctggcagcgggttcaggagaatatgataaaaggtggattatcggggcgaagtgcc

SEQ ID NO: 710004 - DNA, 75 bp, synthetic construct
  source 1..75: mol_type = other DNA
gaagaggtggttgtgatcgcgcaaagcgtcggcgcagtgctggttgccacatgggttcatgattatgcgcctgca

SEQ ID NO: 710005 - DNA, 75 bp, synthetic construct
  source 1..75: mol_type = other DNA
ttaaattgtatgtgccgctggcacgtcctgcgctggcgttatggcatcgtctgcgtggtctgttttttattaatt

SEQ ID NO: 710006 - DNA, 75 bp, synthetic construct
  source 1..75: mol_type = other DNA
aaggcagcgttctggtccattgtgcattgggattatcgcgcagtgcgctggtggtggcggcatggttgttatgtt

SEQ ID NO: 710007 - DNA, 75 bp, synthetic construct
  source 1..75: mol_type = other DNA
aaattttcacctggcttgctggttggagagaaattgcgatgactggcggacgtaatattccttatttcattgtac

SEQ ID NO: 710008 - DNA, 75 bp, synthetic construct
  source 1..75: mol_type = other DNA
ccattattgctccgatcattggggcatgtgttggcgcagcaatttatcgttttctcattgcaaaaaacttacctg

SEQ ID NO: 710009 - DNA, 75 bp, synthetic construct
  source 1..75: mol_type = other DNA
gtggtcattacgtccatgttgatggggttgattatggcgttaaccgatgacggcaatggcgtaccaaaaggacct

SEQ ID NO: 710010 - DNA, 75 bp, synthetic construct
  source 1..75: mol_type = other DNA
taaggttaaattgtatgtgccgctggcacgtcctgggctggcgttatggcatcgtctgcgtggtctgttttttat

SEQ ID NO: 710011 - DNA, 75 bp, synthetic construct
  source 1..75: mol_type = other DNA
cgcgccactgccgcgcgcgcatttcacaaaacccaatatcgttatcaaacctaacgccaacagccgcccgaccgg

SEQ ID NO: 710012 - DNA, 75 bp, synthetic construct
  source 1..75: mol_type = other DNA
ttggcccggaagtcagtttccgccgtatttatgaatacgctggcggcgactggcaggaagataatggcgtctggc

SEQ ID NO: 710013 - DNA, 75 bp, synthetic construct
  source 1..75: mol_type = other DNA
ttgccggggtgttaaccagtcataaagatggtaaaccgtgggtaatgcgcgtgcgttcgcaaggggagatggatt

SEQ ID NO: 710014 - DNA, 75 bp, synthetic construct
  source 1..75: mol_type = other DNA
atgccggatttgataaatgcacacaacggattgatgagtggggcatttttacggtttcgatggcggtgcgtcgtg

SEQ ID NO: 710015 - DNA, 75 bp, synthetic construct
  source 1..75: mol_type = other DNA
cacacgggcgattgccgttaatatcttgctcgatctttataaaacgtctgaacgtattgttagcgatgcggcggc

SEQ ID NO: 710016 - DNA, 75 bp, synthetic construct
  source 1..75: mol_type = other DNA
tgtatggcaagctgcgttggttgaagtggtcataacgtccatgttaatggggttgattatggcgttgaccgatga

SEQ ID NO: 710017 - DNA, 75 bp, synthetic construct
  source 1..75: mol_type = other DNA
gggaaacgtggtggacagggtgattgaaggtgcttacgaagtggtgggcgtgtttgaccggattgaggaaaagcg

SEQ ID NO: 710018 - DNA, 75 bp, synthetic construct
  source 1..75: mol_type = other DNA
atctctggacaacctggcagcgggttcaggagaatatgataaaaggtggattatcggggcgaagtacctccggta

SEQ ID NO: 710019 - DNA, 75 bp, synthetic construct
  source 1..75: mol_type = other DNA
cagtttgtgccttcggtgttttccggtgataaacatgagtcccggagtgaacgttatacgtatattccaacaatc

SEQ ID NO: 710020 - DNA, 75 bp, synthetic construct
  source 1..75: mol_type = other DNA
tacatcttaacagtgacgaacaacatttatttggcagagctgcattgatggccaggtacgaagatgaaaataaaa

SEQ ID NO: 710021 - DNA, 75 bp, synthetic construct
  source 1..75: mol_type = other DNA
agcatcgacacagacattaagctcaatcgcgcattgtgggtgatggcagaaacgctgctggagagcatgcgctga

SEQ ID NO: 710022 - DNA, 75 bp, synthetic construct
  source 1..75: mol_type = other DNA
catgcgcctgaccgggatgctgtacaggaatccggatcttgcggagcgggaagagctgattcagggggaactccc

SEQ ID NO: 710023 - DNA, 75 bp, synthetic construct
  source 1..75: mol_type = other DNA
gcaaaacgcggtaagcccgacacctggctgccgcaggcgctcctcgcctggctggagcgtcatcatcttcgcggc

SEQ ID NO: 710024 - DNA, 75 bp, synthetic construct
  source 1..75: mol_type = other DNA
tttaccaaggtcaacggagggaggcgattcatagtcggtaatgcttttgcttttcgggcgaccgacgttcgagag

SEQ ID NO: 710025 - DNA, 75 bp, synthetic construct
  source 1..75: mol_type = other DNA
aaaaatatggtgagttttccagggaagaacagagagggaaagtggaaattatgcgagtgtcttctccggatgata

SEQ ID NO: 710026 - DNA, 75 bp, synthetic construct
  source 1..75: mol_type = other DNA
ggataagcaggtagaaagcttccgatacaataatcggggagtacggaagattgaagaaatcctggacgcggagaa

SEQ ID NO: 710027 - DNA, 75 bp, synthetic construct
  source 1..75: mol_type = other DNA
gtttttctgtgtccgtgctgatttacgatttgcgttgtccgacggtgttatgaggagggaggaatggcaatatct

SEQ ID NO: 710028 - DNA, 75 bp, synthetic construct
  source 1..75: mol_type = other DNA
gatatccagacaggaaaggtcaatgtcgatcaggcgccggtgttgacgaccaaatatgaaatatggggactaccg

SEQ ID NO: 710029 - DNA, 75 bp, synthetic construct
  source 1..75: mol_type = other DNA
tcgattactggactccgatcggtggggcgatcacgccccgagaacgagaactggtatcaggcttcgttgagtacc

SEQ ID NO: 710030 - DNA, 75 bp, synthetic construct
  source 1..75: mol_type = other DNA
tacgccagccctgagtgatgccgcagaacaatatctgaataccattgcgatacgcagaacctgtgatacggcatt

SEQ ID NO: 710031 - DNA, 75 bp, synthetic construct
  source 1..75: mol_type = other DNA
agccgtacttaacgtcctgtggaactggatcctgttccgtaaattctcctctttggaggaagtcgaaaatgtggc

SEQ ID NO: 710032 - DNA, 75 bp, synthetic construct
  source 1..75: mol_type = other DNA
gctaaagtcgtttgaggcttttcgcgagtgggtaaccattcaggctggattttacaccgaacatttttatccgga

SEQ ID NO: 710033 - DNA, 75 bp, synthetic construct
  source 1..75: mol_type = other DNA
gaatgggtaaccattcaggccggattttacaccgagcatttttatccggacggtagccgcgggcgtcgggcgaaa

SEQ ID NO: 710034 - DNA, 75 bp, synthetic construct
  source 1..75: mol_type = other DNA
tacgccagccctgagtgatgctgcagagcaataccttaataccgttgcgacgcgtagaacccgtgatacggcatt

SEQ ID NO: 710035 - DNA, 75 bp, synthetic construct
  source 1..75: mol_type = other DNA
ggcgatcacgcctcgcgaacgaaaactggtgtccggtttcgttgattacctgtgcgaatcagttggtcgggaaca

SEQ ID NO: 710036 - DNA, 75 bp, synthetic construct
  source 1..75: mol_type = other DNA
ggcgatcacgccccgagaacgagaactggtatcaggcttcgttgagtacctgtgcgaatcagtaggtcgggaaca

SEQ ID NO: 710037 - DNA, 75 bp, synthetic construct
  source 1..75: mol_type = other DNA
tttacaccgaacatttttatccggacggtagccgtgggcgtcgggcaaaatccatcgcttttgcgaatatggacg

SEQ ID NO: 710038 - DNA, 75 bp, synthetic construct
  source 1..75: mol_type = other DNA
ggcgacgccggagagttgtgattttctgcatcaaatcaaaataggagagtggatacacgctgatttcaagcgcgt

SEQ ID NO: 710039 - DNA, 75 bp, synthetic construct
  source 1..75: mol_type = other DNA
atggcacatatacaactgatcaaacatacctcttctggattactgctcccggcaacaccggagagttgcgaattc

SEQ ID NO: 710040 - DNA, 75 bp, synthetic construct
  source 1..75: mol_type = other DNA
cggtagccgcgggcgtcgggcgaaatccattgcttttgcgaatatggacgaaaccgagtttcagcaggtttataa

SEQ ID NO: 710041 - DNA, 75 bp, synthetic construct
  source 1..75: mol_type = other DNA
ctttaatcgtaatgaactggcggcactggaaccgcgtccgacgctggggatcgtgtccggtctgtatgaactgtt

SEQ ID NO: 710042 - DNA, 75 bp, synthetic construct
  source 1..75: mol_type = other DNA
ggagatcacatcatctgcatcttcggctgtagtgagcgataccaacaatctggtatttacgttactgttgaaaag

SEQ ID NO: 710043 - DNA, 75 bp, synthetic construct
  source 1..75: mol_type = other DNA
ggaaggccagccttcacgatatccgcctgcgcgaagaggctgacctctggctgtcggtgcgctcggatatcccgg

SEQ ID NO: 710044 - DNA, 75 bp, synthetic construct
  source 1..75: mol_type = other DNA
gttatttggggcaagtccggttctgcgcgaacgtctggtgttgctcaatcgtcagttacgctcccgacgccagcg

SEQ ID NO: 710045 - DNA, 75 bp, synthetic construct
  source 1..75: mol_type = other DNA
cgaacttggtagtgatgttagcgcggtgaaatcattctccctgtacgctgatgaagcaaatggggttctgagtct

SEQ ID NO: 710046 - DNA, 75 bp, synthetic construct
  source 1..75: mol_type = other DNA
gctcatcacctcatctgaagggttgtctgtgccgacaaatatcgtgactgattcaacaggacatgtttctgtacc

SEQ ID NO: 710047 - DNA, 75 bp, synthetic construct
  source 1..75: mol_type = other DNA
acggaaatgctgtttttgcattaataagctccactccaggttcttacgtgattaaagctcacgctgggcctcagg

SEQ ID NO: 710048 - DNA, 75 bp, synthetic construct
  source 1..75: mol_type = other DNA
tggggccgtccggctccgggaaagacagcctgctggcggaactccgcctgcgggaacaaactcagttactggtgg

SEQ ID NO: 710049 - DNA, 75 bp, synthetic construct
  source 1..75: mol_type = other DNA
tggggccgtccggctccgggaaagatagcctgctggcggaactccgcctgcgggaacaaactcagctactggtgg

SEQ ID NO: 710050 - DNA, 75 bp, synthetic construct
  source 1..75: mol_type = other DNA
ctgattgaccagtacgggccaatctcgcgaattcagatcgccgagcaaagccagcttgcccctgccagcgtaact

SEQ ID NO: 710051 - DNA, 75 bp, synthetic construct
  source 1..75: mol_type = other DNA
gacagtcttctgtcatccgggctgatccagattacgcagttacgcctctggctggaagacggaacacttattgat

SEQ ID NO: 710052 - DNA, 75 bp, synthetic construct
  source 1..75: mol_type = other DNA
ggacagtggtgcagggatccgcgctttattccccctctgctgacgctgtctgccagtccttcgctgatgactgaa

SEQ ID NO: 710053 - DNA, 75 bp, synthetic construct
  source 1..75: mol_type = other DNA
gccctgagcgagcaggagttttttgcccgtgcaggtcagcaactcttcgcgttaagctggcatgctaacggctac

SEQ ID NO: 710054 - DNA, 75 bp, synthetic construct
  source 1..75: mol_type = other DNA
tcgattactggaccccggttggtgggacgatcacgccccgcgaacgagaactggtgtttggtttcgttgattacc

SEQ ID NO: 710055 - DNA, 75 bp, synthetic construct
  source 1..75: mol_type = other DNA
atcactggcgttaccggacgcccgatatggaaaataatcagagttatcttggtcttcgtgccggctttaacgcag

SEQ ID NO: 710056 - DNA, 75 bp, synthetic construct
  source 1..75: mol_type = other DNA
gctttgatgaaaccttaaaaccgtttgtgcgcgatgtttctggcagccgcctgaaagacttacctaaacccaata

SEQ ID NO: 710057 - DNA, 75 bp, synthetic construct
  source 1..75: mol_type = other DNA
tctggaactggatgataacggttcgctactgctggatttcggcccgcgtcagttcactgtcagctttgatgaaac

SEQ ID NO: 710058 - DNA, 75 bp, synthetic construct
  source 1..75: mol_type = other DNA
ccgacagggtatgcggtgaatggcagttatcgttcaccggtggccaccctgcaggccacggcaggtaatgacagt

SEQ ID NO: 710059 - DNA, 75 bp, synthetic construct
  source 1..75: mol_type = other DNA
aatcagttgcaactgactgtgaaccagagtcttggtgagggatggggaaacctgtatctgaccggagccacttat

SEQ ID NO: 710060 - DNA, 75 bp, synthetic construct
  source 1..75: mol_type = other DNA
tatcaccctgaatacggggatgagtaccgcacctcattatctgtcagggctgggtggtgtggcattcaacacacc

SEQ ID NO: 710061 - DNA, 75 bp, synthetic construct
  source 1..75: mol_type = other DNA
gcagaaaaatgtccaaactgttgaatggctgaaacttgttgtacaagaatcttccttgctcaaagcactggaatc

SEQ ID NO: 710062 - DNA, 75 bp, synthetic construct
  source 1..75: mol_type = other DNA
ccttagataatcacccgacaaaaatccccactcttccggccttttatcagccatcgctctggacccgcccggtat

SEQ ID NO: 710063 - DNA, 75 bp, synthetic construct
  source 1..75: mol_type = other DNA
atgagcaggtattgacggaactggaaaaataccatcctgggcacccagggcaggtatttgatgattattactgcg

SEQ ID NO: 710064 - DNA, 75 bp, synthetic construct
  source 1..75: mol_type = other DNA
tgcgtggtgaaccgcaagacggaggctggatcggctggatgatcaaacctctgggccgctggtcattaatcatgg

SEQ ID NO: 710065 - DNA, 75 bp, synthetic construct
  source 1..75: mol_type = other DNA
aagattatttaactttgatcgatgcttttaagtcctataacgccccttatcagggcgaatggaagctttcttcac

SEQ ID NO: 710066 - DNA, 75 bp, synthetic construct
  source 1..75: mol_type = other DNA
ttccctcaggaagatacgctgtatccggggttattacaggtgaaagacgcctgtactgccgactcactggctgag

SEQ ID NO: 710067 - DNA, 75 bp, synthetic construct
  source 1..75: mol_type = other DNA
ccactgcgacccagcattttctcagtgcccggctgcgcaagcgcaacctgaaaaatgcctttcgtcttgaattgc

SEQ ID NO: 710068 - DNA, 75 bp, synthetic construct
  source 1..75: mol_type = other DNA
tgtgattttggcaggcttagatgagcaatttgtcgttgaaaataaaaatattttggtaaataaatttacagagtt

SEQ ID NO: 710069 - DNA, 75 bp, synthetic construct
  source 1..75: mol_type = other DNA
ttttttaaaacattaaaaaataactatacattgttccaacaacacgcctttagaaaatcgttagcaaataaaggc

SEQ ID NO: 710070 - DNA, 75 bp, synthetic construct
  source 1..75: mol_type = other DNA
tagagttatatcccaattttaggctagatgtagtcagaaatgctcctgaattgctttatctctttgatcaggaat

SEQ ID NO: 710071 - DNA, 75 bp, synthetic construct
  source 1..75: mol_type = other DNA
ctgcatcaaatcaaaataggcgagtggatacacgctgattttaagcgcgttcgtaactacgcattccacaagcgt

SEQ ID NO: 710072 - DNA, 75 bp, synthetic construct
  source 1..75: mol_type = other DNA
agtcctcaggaatcctgatcccggccacgccggagaccagcgactttctgcaatcaaaaatcaagctcggcgccg

SEQ ID NO: 710073 - DNA, 75 bp, synthetic construct
  source 1..75: mol_type = other DNA
tggtagtcgtgggcgcagggcaaaatctatcgcatttgcgaacatggacgaaaccgagtttcagcaggtttataa

SEQ ID NO: 710074 - DNA, 75 bp, synthetic construct
  source 1..75: mol_type = other DNA
accacgcaacaacggagaacggtcatccgaaccccaaatggaacggggctaccatgcgcgattccagtgattatc

SEQ ID NO: 710075 - DNA, 75 bp, synthetic construct
  source 1..75: mol_type = other DNA
ggctatgccgaatgcccctggcgttaggtcattgggggatttgttcggtatgctctcgcgccacccgtacagata

SEQ ID NO: 710076 - DNA, 75 bp, synthetic construct
  source 1..75: mol_type = other DNA
cgcccggctgcgcaagcgcaacctgaaaaatgcctttcgccttgaattgcccgtgcaaggtcgccatatggtgat

SEQ ID NO: 710077 - DNA, 75 bp, synthetic construct
  source 1..75: mol_type = other DNA
tcatgttgcacacaataaagatgatatgcaatctcagctcgttcctgttctgtgtatacagcaccctaatcagga

SEQ ID NO: 710078 - DNA, 75 bp, synthetic construct
  source 1..75: mol_type = other DNA
aacgcgtttattgatgatgtttctgtaaaaagtacagcgttttatcgtcccaggaatcaattccagatttcaatc

SEQ ID NO: 710079 - DNA, 75 bp, synthetic construct
  source 1..75: mol_type = other DNA
gctaactattaccagtatagctcttccgggacgagtaacgaacagacttatctgggattaaaagctggattcaat

SEQ ID NO: 710080 - DNA, 75 bp, synthetic construct
  source 1..75: mol_type = other DNA
ctcacgccagcatgcttcctggatttatccattagctatcgggatcatcatctttatcatcgcgccatatctccc

SEQ ID NO: 710081 - DNA, 75 bp, synthetic construct
  source 1..75: mol_type = other DNA
ggacattcgcattgatgccagactggatgaagaaaccgtctccttcctgacaaacacagacgaaggcaagcgaat

SEQ ID NO: 710082 - DNA, 75 bp, synthetic construct
  source 1..75: mol_type = other DNA
atataaacaatatgccccttactgaagaaccggaatgcattattaacgacctgaatctgtattcaaaaaattcaa

SEQ ID NO: 710083 - DNA, 75 bp, synthetic construct
  source 1..75: mol_type = other DNA
gggcgatcatgcaggcggaagccggtcacagcatcgaaccctatttcagccgcacgtttgaaaacatccgcgaaa

SEQ ID NO: 710084 - DNA, 75 bp, synthetic construct
  source 1..75: mol_type = other DNA
ggaacaatggagaaaaggtccgtttatctcatttattagataaagtaccaactaatgaatgggactggtatctat

SEQ ID NO: 710085 - DNA, 75 bp, synthetic construct
  source 1..75: mol_type = other DNA
tttacaaccatgctcagtatctcgataagcgcagagaaatgatgcaatggtgggcggactggattgatggggagt

SEQ ID NO: 710086 - DNA, 75 bp, synthetic construct
  source 1..75: mol_type = other DNA
atcgcaacagttatgccctgactgaagtcgaacgcaacgccagcgaactgacccgctgggcaggcagaaaatgcc

SEQ ID NO: 710087 - DNA, 75 bp, synthetic construct
  source 1..75: mol_type = other DNA
gcgaacgatgctgttaaccgctacaaattgctgaaaaaagatgcgcgtaccgtcgccgcccagcaggtagcaagg

SEQ ID NO: 710088 - DNA, 75 bp, synthetic construct
  source 1..75: mol_type = other DNA
acagctacagcaccgctgacgatgatcttttcaccctgccggaaggcgatatctctatcggcactcctcacgttc

SEQ ID NO: 710089 - DNA, 75 bp, synthetic construct
  source 1..75: mol_type = other DNA
tttacaaccatgctcagtatctcgataagcgccgtgaaatgatgcagtggtgggctgactacatagacggaaatg

SEQ ID NO: 710090 - DNA, 75 bp, synthetic construct
  source 1..75: mol_type = other DNA
gcgtctgattgccggttacgacggtatcgcgccggaggtgtcggcaagcggacgtcgggaccgtgcgggaagttg

SEQ ID NO: 710091 - DNA, 75 bp, synthetic construct
  source 1..75: mol_type = other DNA
cagaaccggattatgcagaaggagttttcgcgtatacaggttattgccggatacaaggggcaaccggatgcatag

SEQ ID NO: 710092 - DNA, 75 bp, synthetic construct
  source 1..75: mol_type = other DNA
atcgcggatcgcgttgagtttaaacgggatgtgttgctgccgcgctggacaccgactgtggaagcgtatctggaa

SEQ ID NO: 710093 - DNA, 75 bp, synthetic construct
  source 1..75: mol_type = other DNA
gggccgcgtggttatagcccatctcttgcgcgttcagtgcaggatgtcgatgaatttgttcgttttgctgccagc

SEQ ID NO: 710094 - DNA, 75 bp, synthetic construct
  source 1..75: mol_type = other DNA
ggagtttggtagttcagatcccgcaagagtaaaatcttgcaaaaatctttctaaaaaaagccttctagataacaa

SEQ ID NO: 710095 - DNA, 75 bp, synthetic construct
  source 1..75: mol_type = other DNA
gcgtctggtctttcttgcccggtaggattcaaaaatggcaccgatggcacgattaaagtggctattgatgccatt

SEQ ID NO: 710096 - DNA, 75 bp, synthetic construct
  source 1..75: mol_type = other DNA
gggcgcggtaatgcgtatcacctgcgccacctggtggaacaaccagctgcgccacctcgctgatctctggcggga

SEQ ID NO: 710097 - DNA, 75 bp, synthetic construct
  source 1..75: mol_type = other DNA
caccagtgataatacagcgttgttttatcggcactggcccactttacagccaggggtgaaaaaggtcatcgtctt

SEQ ID NO: 710098 - DNA, 75 bp, synthetic construct
  source 1..75: mol_type = other DNA
ctgaacagtgttggctggcgcggtattcgccagcgtaaaacccatttacaaatactgattaaacaagccgttgcc

SEQ ID NO: 710099 - DNA, 75 bp, synthetic construct
  source 1..75: mol_type = other DNA
gctgtttgataccggcgagctgggtcaggcgctcgaatgggcagaaattgccatcgagcaagggcaggaaacgcc

SEQ ID NO: 710100 - DNA, 75 bp, synthetic construct
  source 1..75: mol_type = other DNA
gttactgcgacagcagcagtctctggacacggaaaccagcctgcatattcagattgtcgcgctggagaaagatgt

SEQ ID NO: 710101 - DNA, 75 bp, synthetic construct
  source 1..75: mol_type = other DNA
cctggcggctgcatgaacaggtcacggccaagtggttcaagtttgccgggctggagctgctgcgcggcgaagatg

SEQ ID NO: 710102 - DNA, 75 bp, synthetic construct
  source 1..75: mol_type = other DNA
aacgctgcaggtgcgccgcactgcttcctgtctgtgaccaaatggggtcattcggcgattgtgaataccagcggt

SEQ ID NO: 710103 - DNA, 75 bp, synthetic construct
  source 1..75: mol_type = other DNA
ccagatcaacgacggtttacgcattgctcgtaaattgctgcttgatattaacgatagcggcctgccagcggcggg

SEQ ID NO: 710104 - DNA, 75 bp, synthetic construct
  source 1..75: mol_type = other DNA
ctacagttgctcatgcccgtaaggcgatccataagatcctgaaaggtaacgatgatcgcctgttagtggtgattg

SEQ ID NO: 710105 - DNA, 75 bp, synthetic construct
  source 1..75: mol_type = other DNA
gtggcaaggctggaatccgccatgtgcctgcgtcgccgctggtcaccggaaaactttcagctcttcctggttgag

SEQ ID NO: 710106 - DNA, 75 bp, synthetic construct
  source 1..75: mol_type = other DNA
ctcagtgccagaacaaatgagcaaaagcatgcaaatgacgctcttaatgccctgttgaaggaaaaagagaatatc

SEQ ID NO: 710107 - DNA, 75 bp, synthetic construct
  source 1..75: mol_type = other DNA
aaaggatgaaataaatatggtaaaggatgccataaaactcacctctgatttctacagaacgatatatgatgagtt

SEQ ID NO: 710108 - DNA, 75 bp, synthetic construct
  source 1..75: mol_type = other DNA
ttgcactggtcttcagtattcttaccggaagcgctttaggcattatcgggtatggtttactgatggctgtcaccg

SEQ ID NO: 710109 - DNA, 75 bp, synthetic construct
  source 1..75: mol_type = other DNA
tattaaaaaacggacactctctcaacagcaatctctgcaagtatgagcaaattaaggatcaaatttattctatta

SEQ ID NO: 710110 - DNA, 75 bp, synthetic construct
  source 1..75: mol_type = other DNA
tggtcgggcgcaatcgctcagttacgtcgccacgcaccggagaagaaaatcgttgttgaagccgatacgcctgaa

SEQ ID NO: 710111 - DNA, 75 bp, synthetic construct
  source 1..75: mol_type = other DNA
aaccagacgtacttcagctcgacaaatttagtccgcaacaggcaactgaaattgcgcaaatagcaccgtcgctgg

SEQ ID NO: 710112 - DNA, 75 bp, synthetic construct
  source 1..75: mol_type = other DNA
ccgattatgatgccgaactgtggcaggctatggagcaggaaaaaggacgtcaggaagagcacatcgaactgatcg

SEQ ID NO: 710113 - DNA, 75 bp, synthetic construct
  source 1..75: mol_type = other DNA
cgttccttacggtatcgatgctaccggtcatatcgactacgccgatctggaaaaacaagccaaagaacacaaacc

SEQ ID NO: 710114 - DNA, 75 bp, synthetic construct
  source 1..75: mol_type = other DNA
gtggtcagggcggtccgttgatgcacgtaatcgccggtaaagcggttgctctgaaagaagcgatggagcctgagt

SEQ ID NO: 710115 - DNA, 75 bp, synthetic construct
  source 1..75: mol_type = other DNA
aggaaaatttacaagtcttgctgactggatcactgagtttggtaaggctgtccggacagagaactggcgtcctct

SEQ ID NO: 710116 - DNA, 75 bp, synthetic construct
  source 1..75: mol_type = other DNA
cattttttgtaaaacttgaatcactggcagcaggaagagctgcttcagcagttacagcatgggcgttttccgtca

SEQ ID NO: 710117 - DNA, 75 bp, synthetic construct
  source 1..75: mol_type = other DNA
tcaggtccatatggcggagaattttaagctgttcagtaaggcatttggttttaccggaaaagttattgatcgtta

SEQ ID NO: 710118 - DNA, 75 bp, synthetic construct
  source 1..75: mol_type = other DNA
gaaaattaaaacagataattacaactcaagcgacagaaccgaggaaaaaagaataaatgaagaaagatatcagag

SEQ ID NO: 710119 - DNA, 75 bp, synthetic construct
  source 1..75: mol_type = other DNA
ttgttgactttaaagatataccagagaaagatattaatagagagccatcgattattgttaaatccagaggtatta

SEQ ID NO: 710120 - DNA, 75 bp, synthetic construct
  source 1..75: mol_type = other DNA
tgaatatgcaaggtttgcagttgacgggatatccggcaaccggcacgccgccgactattcagcaaggcgcgaatc

SEQ ID NO: 710121 - DNA, 75 bp, synthetic construct
  source 1..75: mol_type = other DNA
tgaatatgcaaggtttacagctgacgggttacccggcaaccggtacgccgccgactattcagcaaggggcgaatc

SEQ ID NO: 710122 - DNA, 75 bp, synthetic construct
  source 1..75: mol_type = other DNA
aaaaatcacataaattctgggcggtgaagcagcaaggcaacgagttacatatcagttggggcaaagtcggcacta

SEQ ID NO: 710123 - DNA, 75 bp, synthetic construct
  source 1..75: mol_type = other DNA
cagccttaagaagaggcagagttatgtcaaagggatatttaactgaaaattttggcccatatcctgtctatagct

SEQ ID NO: 710124 - DNA, 75 bp, synthetic construct
  source 1..75: mol_type = other DNA
taaaaaacaatacaactactatcgtgaccagttgttgagttttgatgatgagcaggaaaaacctatttatctgga

SEQ ID NO: 710125 - DNA, 75 bp, synthetic construct
  source 1..75: mol_type = other DNA
caacagcagcaagcaggcgattggcgcgggtggcggctggtctgacacgccttcaaattacgggctgaactgcgc

SEQ ID NO: 710126 - DNA, 75 bp, synthetic construct
  source 1..75: mol_type = other DNA
atgtggtgcatcgccaaccgcagattgattttttatcagagattacgtagccctctgaaagagctgcatctgctg

SEQ ID NO: 710127 - DNA, 75 bp, synthetic construct
  source 1..75: mol_type = other DNA
tcagagattacgtagccctctgaaagagctgcatctgctgccaggcttttatcacgacacgttgggtgaagagaa

SEQ ID NO: 710128 - DNA, 75 bp, synthetic construct
  source 1..75: mol_type = other DNA
gcgttctgacgtcaaatccaacagagaatattaccactggcgcaattaacggcgcagaacccgccacgtttagcc

SEQ ID NO: 710129 - DNA, 75 bp, synthetic construct
  source 1..75: mol_type = other DNA
ctgcacgtggcaaaacgcgccataccgggctggaaacgcaggcacgttacgatctgggtacgctaacgccaacgc

SEQ ID NO: 710130 - DNA, 75 bp, synthetic construct
  source 1..75: mol_type = other DNA
tccaaccagaccaacgacaccgtcactgcacgtggcaaaacgcgccataccgggctggaaacgcaggcacgttac

SEQ ID NO: 710131 - DNA, 75 bp, synthetic construct
  source 1..75: mol_type = other DNA
cgcgctggcggcacgtccttcttatatcgcgctgggacatgtgtttccgacacaaaccaaacagatgccttctgc

SEQ ID NO: 710132 - DNA, 75 bp, synthetic construct
  source 1..75: mol_type = other DNA
gacagccaggtgaaaaaacatttcgacctggcgggtgttcgcgcgccagtgcagacttatcaggtgctgcctgct

SEQ ID NO: 710133 - DNA, 75 bp, synthetic construct
  source 1..75: mol_type = other DNA
ttttgcgctggtgtggcactggctggcaagcgcctattttatcgtgctgtttttcttctcgttatttgacccagg

SEQ ID NO: 710134 - DNA, 75 bp, synthetic construct
  source 1..75: mol_type = other DNA
aggtgccggggcattaggtctggctatctcgtttggttcgcaaacgctggtgaaagatatcattaccggagtatt

SEQ ID NO: 710135 - DNA, 75 bp, synthetic construct
  source 1..75: mol_type = other DNA
taaaagatattattaccggcgtgttcattcagtttgaaaacggcatgaacactggagatttggttaccatcgggc

SEQ ID NO: 710136 - DNA, 75 bp, synthetic construct
  source 1..75: mol_type = other DNA
cataaaccctttaacccgcaaaccttcaacaacgcgctgacccatttttcaatgctagcggtgctggtgtttggc

SEQ ID NO: 710137 - DNA, 75 bp, synthetic construct
  source 1..75: mol_type = other DNA
atcgccatgaagatgctgataaagccaatcaggcactgaaagatgcggtagcggaattaatggaaaaacgaagaa

SEQ ID NO: 710138 - DNA, 75 bp, synthetic construct
  source 1..75: mol_type = other DNA
ttaatcctgaattcagctgtgaagtgctgatacgtcatgacagcgacaaccagctttcttcctgccctctggcat

SEQ ID NO: 710139 - DNA, 75 bp, synthetic construct
  source 1..75: mol_type = other DNA
ttgcaggaaatcacaacagaacttgacgcactgattgatgcggtagagtcccattcccctgttttcagaaagaaa

SEQ ID NO: 710140 - DNA, 75 bp, synthetic construct
  source 1..75: mol_type = other DNA
atgagcgctaacgctaaatatccggcatgggtttttgagttatacgcccgctactttgaattgctggcacaaggt

SEQ ID NO: 710141 - DNA, 75 bp, synthetic construct
  source 1..75: mol_type = other DNA
atcatgattgtgttgtcggaaatcggcgttaatatcgcgccattgctggcaggtgccggtgcattggggctggct

SEQ ID NO: 710142 - DNA, 75 bp, synthetic construct
  source 1..75: mol_type = other DNA
accaggctggtgttcgtgcgccggtgcaaacttatcaggtgctgccgggaacgcccccggtagcaccactgccat

SEQ ID NO: 710143 - DNA, 75 bp, synthetic construct
  source 1..75: mol_type = other DNA
ggatgatgtcctccctgcctctgagtctgctcacaaaagcgctgttttcgttactgtctctcttgtccgtgcaat

SEQ ID NO: 710144 - DNA, 75 bp, synthetic construct
  source 1..75: mol_type = other DNA
tcttttacggtaacagctttaataaccagttgctgccggtgaaattaagcgatgaagaagtggacgagctgtttg

SEQ ID NO: 710145 - DNA, 75 bp, synthetic construct
  source 1..75: mol_type = other DNA
gcatccgcaaaatgaagtacgtctgatcgacgttctgctgcgcccggaagtgctggtctttgagccgctgtggac

SEQ ID NO: 710146 - DNA, 75 bp, synthetic construct
  source 1..75: mol_type = other DNA
caactgattgatggggaagggcgactggttaactgcgtgtggaaaacctgggcgtgggaaaccgcgtttgatcag

SEQ ID NO: 710147 - DNA, 75 bp, synthetic construct
  source 1..75: mol_type = other DNA
tcatgcaggacaaagatatcgaggaaaactatcacgcgcagtttatggagcaggcgctgcaacaggcgggctttg

SEQ ID NO: 710148 - DNA, 75 bp, synthetic construct
  source 1..75: mol_type = other DNA
actgacgtgggtatggcgtgggagattttctcgctgcgcttcctgcgtgaagtggtcaatgacaacatcctgcca

SEQ ID NO: 710149 - DNA, 75 bp, synthetic construct
  source 1..75: mol_type = other DNA
taacgagctgcacctgatgtatctgcatgccaccgacaaggtgctgaaagatgacaatctgttggcgctgttcga

SEQ ID NO: 710150 - DNA, 75 bp, synthetic construct
  source 1..75: mol_type = other DNA
gagcaaggctataaaggcaacggcttcaatccggcggaagggctgattaacgaactggcaggcgcatggaaacac

SEQ ID NO: 710151 - DNA, 75 bp, synthetic construct
  source 1..75: mol_type = other DNA
gtgattgcgccgagttttgctgacatcttctacggcaacagctttaacaaccagctgctgccggtgaaattaagc

SEQ ID NO: 710152 - DNA, 75 bp, synthetic construct
  source 1..75: mol_type = other DNA
ctggacagcatcggtctgacactgcagcacggcgacgccatcgcgtcttatgaagagaagcaaccggcgtttatg

SEQ ID NO: 710153 - DNA, 75 bp, synthetic construct
  source 1..75: mol_type = other DNA
ccgccgccactgcatgatgaacggtctggacagcatcggcctgactctgcagcacgacgacgccattgcgtctta

SEQ ID NO: 710154 - DNA, 75 bp, synthetic construct
  source 1..75: mol_type = other DNA
cttgatgtatataattacacttgcattaatatttgtattttatcttttatccaaggataaaacacattcaggtat

SEQ ID NO: 710155 - DNA, 75 bp, synthetic construct
  source 1..75: mol_type = other DNA
atggctacagtaccaacaaggtcaggtagtccccgccagttaaccaccaaacagaccggcgatgcgtgggaagca

SEQ ID NO: 710156 - DNA, 75 bp, synthetic construct
  source 1..75: mol_type = other DNA
ccttatatgatagagagcaaaatatcttttttgaaaaggttacggccttaattggcgaaaatggtgctggtaagt

SEQ ID NO: 710157 - DNA, 75 bp, synthetic construct
  source 1..75: mol_type = other DNA
tcatatcagggacttgttcgcaccttccctaaatatccggcatgggtttttgaactatacgcccgctactttgaa

SEQ ID NO: 710158 - DNA, 75 bp, synthetic construct
  source 1..75: mol_type = other DNA
tccaaatcaaaactatgatttcggtgtcgcagcttataacaatttaggttttgttagtccaaaagtaacggtaga

SEQ ID NO: 710159 - DNA, 75 bp, synthetic construct
  source 1..75: mol_type = other DNA
taatcgtttatctcagacattgaccgatgcaattaatacggcgaatggttatgcggatactaaagtaacggcttc

SEQ ID NO: 710160 - DNA, 75 bp, synthetic construct
  source 1..75: mol_type = other DNA
tgggtacgttacaatcacggcagttgaagcccctgatgcaatgtacgatggcgtagatcccggtatctggtcacc

SEQ ID NO: 710161 - DNA, 75 bp, synthetic construct
  source 1..75: mol_type = other DNA
ttagcgaaccgatgtttcatcaggggcgtggcggcctgcgccaccgcgtgcatccgggcaatgaccatttcgtcc

SEQ ID NO: 710162 - DNA, 75 bp, synthetic construct
  source 1..75: mol_type = other DNA
catcgggcaggctacaccgctaacggcgttcctgccaatatcagcgtggtgcgttcattgcagaactcactggcg

SEQ ID NO: 710163 - DNA, 75 bp, synthetic construct
  source 1..75: mol_type = other DNA
gccgatgactctccgctttgccatgaaatcctggcgaaaaaattattacccgttgttcgttattacagctatatc

SEQ ID NO: 710164 - DNA, 75 bp, synthetic construct
  source 1..75: mol_type = other DNA
taatgataacttcaatatgaccgtagaaatgaaaggacaggtaatctatgattttaatagtggtactaatttcgc

SEQ ID NO: 710165 - DNA, 75 bp, synthetic construct
  source 1..75: mol_type = other DNA
atgaatctaatatggttggtgcggtacagatttcaaccagtggcggtactgactacttcaatgtggttgattgca

SEQ ID NO: 710166 - DNA, 75 bp, synthetic construct
  source 1..75: mol_type = other DNA
ctttgtattatctctattgcgctggcgatgatctccctgctgatctcggaatggctggccagaatcagtcgtgaa

SEQ ID NO: 710167 - DNA, 75 bp, synthetic construct
  source 1..75: mol_type = other DNA
tttggtaacttattcgttagctggactgaatcgaccgaaccagattatgcaggtgcacatatcgttatgcgtact

SEQ ID NO: 710168 - DNA, 75 bp, synthetic construct
  source 1..75: mol_type = other DNA
tgctcaggggtggatgtcgggcacgttctcaccagaagttaagattacaccggaaaacttacagtgtggactagt

SEQ ID NO: 710169 - DNA, 75 bp, synthetic construct
  source 1..75: mol_type = other DNA
cattatacgattaatatctatgatggtacgacactgaaagatacatatattgcaagtagtaatgagtttaacttt

SEQ ID NO: 710170 - DNA, 75 bp, synthetic construct
  source 1..75: mol_type = other DNA
catcgggcgggttataccgctaacggcgttccggccaatatcagcgttgtgcgttccttgcagaactcactggcg

SEQ ID NO: 710171 - DNA, 75 bp, synthetic construct
  source 1..75: mol_type = other DNA
tacgtctggccaaaccctacagtggtgatgcttatggttttcattttccgctgattcagggaacggaagtggcca

SEQ ID NO: 710172 - DNA, 75 bp, synthetic construct
  source 1..75: mol_type = other DNA
gcaatcgtaaagttacaggggcattagcatgtattcatttcgccccaacagagagatcaaaagataatctcctga

SEQ ID NO: 710173 - DNA, 75 bp, synthetic construct
  source 1..75: mol_type = other DNA
cacatgactaacccgcgtcattggctggcgataaatgccgctttctggtgctgcgtgtaccgcgaggcagagagc

SEQ ID NO: 710174 - DNA, 75 bp, synthetic construct
  source 1..75: mol_type = other DNA
ctattttgaagaactggcaccaggtgaagaagcattaagcattgacgaatacgcggagtgtttaggattcaaggg

SEQ ID NO: 710175 - DNA, 75 bp, synthetic construct
  source 1..75: mol_type = other DNA
gcagaggcattgccagcagatattcagagccaggttaagctgacggacgccctgaaagacctgacccggccggga

SEQ ID NO: 710176 - DNA, 75 bp, synthetic construct
  source 1..75: mol_type = other DNA
gaaccgctacagactggatataccttcctgcccgtcatcgctggatgttgaagatttcagcggaactgaaggcat

SEQ ID NO: 710177 - DNA, 75 bp, synthetic construct
  source 1..75: mol_type = other DNA
agcctggtttatttcgctatcgttattctggtttcgctctatccgggcaagctgctggataccgtgggcaacttc

SEQ ID NO: 710178 - DNA, 75 bp, synthetic construct
  source 1..75: mol_type = other DNA
ccggtgatttcgtggcgctggcaactctggtggcgaattttttggctcccacggagtctgcgaaaccgtccgtgg

SEQ ID NO: 710179 - DNA, 75 bp, synthetic construct
  source 1..75: mol_type = other DNA
ggggcaaatccagtggtgactatacgagtactaaaactcttgctgcaaaatatgctggttcgaaatggacaaata

SEQ ID NO: 710180 - DNA, 75 bp, synthetic construct
  source 1..75: mol_type = other DNA
aatcgttaggggctgaattggccgcgtggggagttcctcacaattacgctgtggcttttgctgagaaaagtacca

SEQ ID NO: 710181 - DNA, 75 bp, synthetic construct
  source 1..75: mol_type = other DNA
ggcggacaacctatgaactgcacctgattccggtaccgaactactcagctgccacagtacaccccacttttcact

SEQ ID NO: 710182 - DNA, 75 bp, synthetic construct
  source 1..75: mol_type = other DNA
gtaaaaatgggcgtatcgctttgcatccgttcttcttcaatgacactgaacacatgacaaatccgcgtcactggc

SEQ ID NO: 710183 - DNA, 75 bp, synthetic construct
  source 1..75: mol_type = other DNA
gtaccgatgcgtggtcgtacccggttctgcgacttaaacgcctaggcctgtcaaaaacgtttcgtcgtctgatcg

SEQ ID NO: 710184 - DNA, 75 bp, synthetic construct
  source 1..75: mol_type = other DNA
actcgctgtcacaccagactagtgacttcggtgaatcagaatggattcattttacaggtagcggctatctgttac

SEQ ID NO: 710185 - DNA, 75 bp, synthetic construct
  source 1..75: mol_type = other DNA
tcaaaaacgttccgtcgtctggttgtcacactcatccaacgttatggcgtcagtctcattcatctggatgccagc

SEQ ID NO: 710186 - DNA, 75 bp, synthetic construct
  source 1..75: mol_type = other DNA
cgccatcatttgctaccctgactggcatacgctgcagtaccgcgcatatcacggcaaaagacaacgtctggctgt

SEQ ID NO: 710187 - DNA, 75 bp, synthetic construct
  source 1..75: mol_type = other DNA
acggacaacgcctggttgtactcgctgtcacaccagaccagggacgttggtgaatcagaatggattcattttaca

SEQ ID NO: 710188 - DNA, 75 bp, synthetic construct
  source 1..75: mol_type = other DNA
tttacaggcagcggatatctgttacgtaccgatgcgtggtcatacccggttctgcggcttaaacgcctgggcctg

SEQ ID NO: 710189 - DNA, 75 bp, synthetic construct
  source 1..75: mol_type = other DNA
gtctggttgtcacactaacccaacgttatggcgtcagtctcattcatctggatgccagcgctgaatgcctgccgg

SEQ ID NO: 710190 - DNA, 75 bp, synthetic construct
  source 1..75: mol_type = other DNA
gtctggttgtcacactaaacccacgttatggcgtcagtctcattcatctggatgccagcgctgaatgcctgccgg

SEQ ID NO: 710191 - DNA, 75 bp, synthetic construct
  source 1..75: mol_type = other DNA
gtctggttctcacactaatcctacgttatggcgtcagtctcattcatctggatgccagcgctgaatgcctgccgg

SEQ ID NO: 710192 - DNA, 75 bp, synthetic construct
  source 1..75: mol_type = other DNA
cggtatcagtaaagagagtcactggcgcgaggcgatcaacgccaaagtgatgggggcaatgatcttaaactggca

SEQ ID NO: 710193 - DNA, 75 bp, synthetic construct
  source 1..75: mol_type = other DNA
atggctaagtcactgttcagggcgctggtcgccctgtcttttctcgcgccactgtggctcaacgcggcaccgcgc

SEQ ID NO: 710194 - DNA, 75 bp, synthetic construct
  source 1..75: mol_type = other DNA
gcaggttgaccaactgatttcgctgggaataaaagtgatgtgggtcgatgcgacaagcattgaacaaattgctga

SEQ ID NO: 710195 - DNA, 75 bp, synthetic construct
  source 1..75: mol_type = other DNA
ttggcggaagagtacgatatttactggtatgctggtgaagatgacgttagcaaaagctatgcttgtctgacaccg

SEQ ID NO: 710196 - DNA, 75 bp, synthetic construct
  source 1..75: mol_type = other DNA
caacccttgccggcatacgatgcagtaccgcacatatcacggaaacggacaacgcctggttgtactcgctgtcac

SEQ ID NO: 710197 - DNA, 75 bp, synthetic construct
  source 1..75: mol_type = other DNA
caacccttgcctgcatacgttgcagtaccgcacatatcacggaaacggacaacgcctggttgtactcgctgtcac

SEQ ID NO: 710198 - DNA, 75 bp, synthetic construct
  source 1..75: mol_type = other DNA
caacccttgccagcatacggtgcagtaccgcacatatcacggaaacggacaacgcctggttgtactcgctgtcac

SEQ ID NO: 710199 - DNA, 75 bp, synthetic construct
  source 1..75: mol_type = other DNA
tggttgtcacacttacccgacgttatggcgtcagtctcattcatctggatgccagcgctgaatgcctgccgggtt

SEQ ID NO: 710200 - DNA, 75 bp, synthetic construct
  source 1..75: mol_type = other DNA
caatggccactcccttcgtgttgttgatgaatctgaccgggtctcaacagactgcacgccaccatttgctgccct

SEQ ID NO: 710201 - DNA, 75 bp, synthetic construct
  source 1..75: mol_type = other DNA
atggtctgcgataacggctactcccttcgtgttgttgatgaatctgaccggacctcagcagactgcacgccacca

SEQ ID NO: 710202 - DNA, 75 bp, synthetic construct
  source 1..75: mol_type = other DNA
tgacgtcgatggtgttaatctcattgaactgattaacaaagtccctgaaaacggttattcactccgggtggtaga

SEQ ID NO: 710203 - DNA, 75 bp, synthetic construct
  source 1..75: mol_type = other DNA
tgacgtcgatggtgttaatctcattgaactgattaacaaagtcactgaaaacggttattcactccgggtggtcga

SEQ ID NO: 710204 - DNA, 75 bp, synthetic construct
  source 1..75: mol_type = other DNA
tgacgtcgatggtgttaatctcaatgaactgattaacaaagtctctgaaaacggttattcactccgggtggtcga

SEQ ID NO: 710205 - DNA, 75 bp, synthetic construct
  source 1..75: mol_type = other DNA
caacccttaccggcatacggtgcagtaccgcacatatcacggaaacggacaacgcctggttgtactcgctgtcac

SEQ ID NO: 710206 - DNA, 75 bp, synthetic construct
  source 1..75: mol_type = other DNA
atggtgttaatctcgctgaactgattaacatggtctgcgataacggctactcccttagtgttgttgatgaatctg

SEQ ID NO: 710207 - DNA, 75 bp, synthetic construct
  source 1..75: mol_type = other DNA
tgacgtcgatggtgttaatctcactgaactgattaacaaagtctctgaaaacggttattcactccgggtggtaga

SEQ ID NO: 710208 - DNA, 75 bp, synthetic construct
  source 1..75: mol_type = other DNA
gtctggttatcacactaagccgacgttatggcgtcagtctcattcatctggatgccagcgctgaatgcctgccgg

SEQ ID NO: 710209 - DNA, 75 bp, synthetic construct
  source 1..75: mol_type = other DNA
attacgggatgatggattgtggtttttgcaaaaagcctaccgcggcacagaacaggcggaagaaagggtacgcag

SEQ ID NO: 710210 - DNA, 75 bp, synthetic construct
  source 1..75: mol_type = other DNA
tatctttgatggcgttaactcagcattccatttgtggtgcaacggacgctgggtcggttacgggcaggacagccg

SEQ ID NO: 710211 - DNA, 75 bp, synthetic construct
  source 1..75: mol_type = other DNA
cggtagttatctggaagaccaggatatgtggcggatgagcggtattttccgcgatgtttcattgctacataaacc

SEQ ID NO: 710212 - DNA, 75 bp, synthetic construct
  source 1..75: mol_type = other DNA
agcgccatattactgaagcacaagctaaaggtgagtttgataatctcccaggcattggtgagccattaattctgg

SEQ ID NO: 710213 - DNA, 75 bp, synthetic construct
  source 1..75: mol_type = other DNA
aacttgagcagcgaaaggaagcaatactgcttttggatattctcaaagctattcgtcaggatgatccacaatatc

SEQ ID NO: 710214 - DNA, 75 bp, synthetic construct
  source 1..75: mol_type = other DNA
agcgtcatattactgaggcacaatccaaaggtgagtttgataatcttccgggaagtggcgagccattgattctgg

SEQ ID NO: 710215 - DNA, 75 bp, synthetic construct
  source 1..75: mol_type = other DNA
atgaccatgattacggattcactggccgtcgtggcccgcaccgatcgcccttcccaacagttgcgcagcctgaat

SEQ ID NO: 710216 - DNA, 75 bp, synthetic construct
  source 1..75: mol_type = other DNA
atgaaaaaccgtaaagcaaaaattcttttgacctgtagaaacgcgcgcggcgtccagcaatggttaaaactcagt

SEQ ID NO: 710217 - DNA, 75 bp, synthetic construct
  source 1..75: mol_type = other DNA
gagcagggttataaaggcagcggtttcaatccggctgaagggttgattaacgagctggcaggcgcatggaaacac

SEQ ID NO: 710218 - DNA, 75 bp, synthetic construct
  source 1..75: mol_type = other DNA
cttcgtctgggactgggtggatcagtcactgattaaatatgatgaaaacggcaacccgtggtcggcttacggcgg

SEQ ID NO: 710219 - DNA, 75 bp, synthetic construct
  source 1..75: mol_type = other DNA
tacaccaacgtgacctatcccattacggtcaatccgccttttgttcccgcggagaatccgacaggttgttactcg

SEQ ID NO: 710220 - DNA, 75 bp, synthetic construct
  source 1..75: mol_type = other DNA
attacgtgcggggtatcgcttgttgaagaatgccggttacttacctccagaacttgaacagcgaaaggaggcaat

SEQ ID NO: 710221 - DNA, 75 bp, synthetic construct
  source 1..75: mol_type = other DNA
atgaaactttccctgacgctggaagccgacagcattaacgtgcaggcactgaacatggggcgcattgtcgttgac

SEQ ID NO: 710222 - DNA, 75 bp, synthetic construct
  source 1..75: mol_type = other DNA
gaagaatataccgtggccgccgtcagttgcatcgatctgggcgggggtagccagattttccgttactacacttcg

SEQ ID NO: 710223 - DNA, 75 bp, synthetic construct
  source 1..75: mol_type = other DNA
atgtctggttttttccagcgcctgtttggcaaggatgataagcctgctatcgctcgcggtccgctgggactccat

SEQ ID NO: 710224 - DNA, 75 bp, synthetic construct
  source 1..75: mol_type = other DNA
tctgcggcttaaacgcctggggctgtcaaaaacgttccgtcgtctggttgtcacactcaacccacgttatggcgt

SEQ ID NO: 710225 - DNA, 75 bp, synthetic construct
  source 1..75: mol_type = other DNA
tctgcggcttaaacgcctggggctgtcaaaaacgttccgtcgtctggttctcacactgaacccacgttatggcgt

SEQ ID NO: 710226 - DNA, 75 bp, synthetic construct
  source 1..75: mol_type = other DNA
tctgcggcttaaacgcctggggctgtcaaaaacgttccgtcgtctggttctcacactcaaccgacgttatggcgt

SEQ ID NO: 710227 - DNA, 75 bp, synthetic construct
  source 1..75: mol_type = other DNA
ccagggttgcaggcgtatcaaaatccaccgtatcacgcgtgctgaataagcaaactaatatctccccggaagcgc

SEQ ID NO: 710228 - DNA, 75 bp, synthetic construct
  source 1..75: mol_type = other DNA
ggtggggccgctgtttgcgacgccgcgtacagcaacagtctcctttgaagtggggattgcgccgttgacaggcga

SEQ ID NO: 710229 - DNA, 75 bp, synthetic construct
  source 1..75: mol_type = other DNA
gatgcatcaagcatatcggatcaatcacttagcttgttacctcgaatggaaactgacatcaccattaactcatca

SEQ ID NO: 710230 - DNA, 75 bp, synthetic construct
  source 1..75: mol_type = other DNA
ttgccaacatgctgtttggtcgtctcgaggtctttacattgctggtgctctttaccccgactttctggcgtgaat

SEQ ID NO: 710231 - DNA, 75 bp, synthetic construct
  source 1..75: mol_type = other DNA
gaccgccgggtttacgaccgacagcattgcccgctggccgctctttttgccggtactactgttgtgctctgcatt

SEQ ID NO: 710232 - DNA, 75 bp, synthetic construct
  source 1..75: mol_type = other DNA
gagttaggtcaacaaagctgcgagttattattccgcttaatttctggaaaaccgtcaccacagaatattaccgtt

SEQ ID NO: 710233 - DNA, 75 bp, synthetic construct
  source 1..75: mol_type = other DNA
ccggtcttggcgtttcctacgaacagttgtcccgtgattactcgaaggtcagttattccagtgccagggcatccg

SEQ ID NO: 710234 - DNA, 75 bp, synthetic construct
  source 1..75: mol_type = other DNA
ccttgctgtcaatgacccagccgctcaaactgcgtggtttccagaagtgggatgtgttctgtaatgccgtcaaca

SEQ ID NO: 710235 - DNA, 75 bp, synthetic construct
  source 1..75: mol_type = other DNA
cgcttttggtaattaattccggaaataataacgataaacaattttcattgttacttgaggaataccgttcacttt

SEQ ID NO: 710236 - DNA, 75 bp, synthetic construct
  source 1..75: mol_type = other DNA
atgacagcgcttcccgaccatgccgccagtcccctgatgacccgactgcaggacgagctgcgcacggaatctgtc

SEQ ID NO: 710237 - DNA, 75 bp, synthetic construct
  source 1..75: mol_type = other DNA
aagccgatgaccgtgccctgtctgtggatgagtatttctggcgacacatcctgcaccggggacatcagcaggtgc

SEQ ID NO: 710238 - DNA, 75 bp, synthetic construct
  source 1..75: mol_type = other DNA
gagcgtctgtgttgcctctgttgtccgtacggccctgcgcgctgttcgtgacaccgtggtctctgttgcccgcgc

SEQ ID NO: 710239 - DNA, 75 bp, synthetic construct
  source 1..75: mol_type = other DNA
aaaaatatcctatcgccagcaacaagacagcacagggccgggctgaaaaccgccgcgttgcggtggtgattagtg

SEQ ID NO: 710240 - DNA, 75 bp, synthetic construct
  source 1..75: mol_type = other DNA
acgcaggccgacaaaacggagccctgccatgaatgggatatggccggcattcagccttctcccgcacaggcacag

SEQ ID NO: 710241 - DNA, 75 bp, synthetic construct
  source 1..75: mol_type = other DNA
gaactggatacgctggtcagtgcgctaatgacagcacttcccgaccatgccgccagtcccctgatgacccgcctg

SEQ ID NO: 710242 - DNA, 75 bp, synthetic construct
  source 1..75: mol_type = other DNA
tttctctcattctgtcggattaacgatctggataccgcgttgaatcatattttcccattgcctactggcgacatt

SEQ ID NO: 710243 - DNA, 75 bp, synthetic construct
  source 1..75: mol_type = other DNA
gcaaaacaggcaaatcgaatctttggctcgcagcattcataccctgcgtcgtcagcgcggcagcgcgatgaaaat

SEQ ID NO: 710244 - DNA, 75 bp, synthetic construct
  source 1..75: mol_type = other DNA
ctgcgcgccaccgacgagcgtttattgttggcctgcggcgcaaatatggttattccatggaacgctccactctct

SEQ ID NO: 710245 - DNA, 75 bp, synthetic construct
  source 1..75: mol_type = other DNA
tcggctttgaaattgaagggactggcaagaagtacgcattacgaaacggtgaatatgtcgatgcgtattatatgg

SEQ ID NO: 710246 - DNA, 75 bp, synthetic construct
  source 1..75: mol_type = other DNA
tatgattcaggtgaaataacactcgatgaattggcaatggcgctgataacttcatacacggggaggcgacctata

SEQ ID NO: 710247 - DNA, 75 bp, synthetic construct
  source 1..75: mol_type = other DNA
tgagtctgttagagaataccatagtaggaatttattaaaaaagccggattatattaatagtataagagttttttt

SEQ ID NO: 710248 - DNA, 75 bp, synthetic construct
  source 1..75: mol_type = other DNA
gcaaacactgtgggatgagctctcccgccacaacgaagatgatcccatttttgtacgctctggtgtcattaacct

SEQ ID NO: 710249 - DNA, 75 bp, synthetic construct
  source 1..75: mol_type = other DNA
tgttaatcaagaattcgaaaaattaagaaaacttaccgacttcaacattaaagcatcagacaacaattatcatgt

SEQ ID NO: 710250 - DNA, 75 bp, synthetic construct
  source 1..75: mol_type = other DNA
cgatcaagatgatatttggctcgaaaacaaattaagcgagatgattgttttcgcagatagtaaagggctggctag

SEQ ID NO: 710251 - DNA, 75 bp, synthetic construct
  source 1..75: mol_type = other DNA
ttggtcttgtagagaaaatacttggtcgatccgtaagtgatattgagatggctgaactaccactattcattgatt

SEQ ID NO: 710252 - DNA, 75 bp, synthetic construct
  source 1..75: mol_type = other DNA
atcaagcaactcgtcgcctgtattgatggagacgtcgtaggtcatcttaccattgacgtacagcaacgcccgcgt

SEQ ID NO: 710253 - DNA, 75 bp, synthetic construct
  source 1..75: mol_type = other DNA
atgagtgagatagtaatacgccacgcagaaacacgcgattacgaggccatcaggcagattcacgcccagccggag

SEQ ID NO: 710254 - DNA, 75 bp, synthetic construct
  source 1..75: mol_type = other DNA
caggcagattcacgcccagccggaggtgtattgcaacacgctacaggtgcctcatccttccgatcatatgtggca

SEQ ID NO: 710255 - DNA, 75 bp, synthetic construct
  source 1..75: mol_type = other DNA
ggcccgtacatccggttgttgccgtatcggcccgcaccggctgggaactggatacgctggtcagtgcgctcatga

SEQ ID NO: 710256 - DNA, 75 bp, synthetic construct
  source 1..75: mol_type = other DNA
gtggtgacgctggccgacaaaacagagccctgccatgaatgggatatggcaggtattcagccttctcccgcacag

SEQ ID NO: 710257 - DNA, 75 bp, synthetic construct
  source 1..75: mol_type = other DNA
acgcacagttctgcgtgccgtccgtgacacggtggtctctgttgcccgcgcggtatggaactggattttcttctg

SEQ ID NO: 710258 - DNA, 75 bp, synthetic construct
  source 1..75: mol_type = other DNA
ttactttgccgctttccgtgagtatctgaagcaggcttacggtcaggcattggcgatgtatcatggtcagactta

SEQ ID NO: 710259 - DNA, 75 bp, synthetic construct
  source 1..75: mol_type = other DNA
gttcgctgtgggttaaccaggaaaaaacccgcattggcaatcaattgcgacgtagcgatgccgacaaccgtgcaa

SEQ ID NO: 710260 - DNA, 75 bp, synthetic construct
  source 1..75: mol_type = other DNA
gtgcaccgctggcgtggcagatatggggcggtagctttcatatggatcgctggtcggaaaacgggaaaaagacgc

SEQ ID NO: 710261 - DNA, 75 bp, synthetic construct
  source 1..75: mol_type = other DNA
agtggatacccggggtctaccgtacggtatttacgatgtggaagttgaggtaatcgttaacggtcgcgtgatcag

SEQ ID NO: 710262 - DNA, 75 bp, synthetic construct
  source 1..75: mol_type = other DNA
ttcgtcgcggcgtgcgcgtcctgctggataatgccaccgccaccattaaccctggtcagaaagtcggcctggtgg

SEQ ID NO: 710263 - DNA, 75 bp, synthetic construct
  source 1..75: mol_type = other DNA
tcactctgtaatgcactgtttcagggggaggtcaccccggtagtgatgttcacgccggcacccgggaagtgcggc

SEQ ID NO: 710264 - DNA, 75 bp, synthetic construct
  source 1..75: mol_type = other DNA
agccctgccatgaatgggatatggccggcattcagccttctcccgcacaggcacagaacattcgggagaaaacgg

SEQ ID NO: 710265 - DNA, 75 bp, synthetic construct
  source 1..75: mol_type = other DNA
atgccattgaggcaattgaaaaaccgactctcctccctgccttactcactttcccgtcacatcctggaacatctg

SEQ ID NO: 710266 - DNA, 75 bp, synthetic construct
  source 1..75: mol_type = other DNA
cagaatattcgcgaaaaaacggaggcgatattccgtctgttccggcccgtacatccggttgttgccgtatcggcc

SEQ ID NO: 710267 - DNA, 75 bp, synthetic construct
  source 1..75: mol_type = other DNA
cgatgcggccctgctgcccgcgttgcgtctggggaatgcccgggcagatgatctggtgcgcaataatcggaatag

SEQ ID NO: 710268 - DNA, 75 bp, synthetic construct
  source 1..75: mol_type = other DNA
cgcttccgtctgagtggtcacggtcacagcatggttatcactgacctgcccgggtggcgagagccgggacaggga

SEQ ID NO: 710269 - DNA, 75 bp, synthetic construct
  source 1..75: mol_type = other DNA
cgatgcggccctgctgcctgcgttgcgtctggggaatgcccgggcagatgatctggtgcgcaataacggaatagc

SEQ ID NO: 710270 - DNA, 75 bp, synthetic construct
  source 1..75: mol_type = other DNA
atttctggcgatacatcctgcaccggggacatcagtgggtactgtttgtggtgatgcaggccgataaaacggagc

SEQ ID NO: 710271 - DNA, 75 bp, synthetic construct
  source 1..75: mol_type = other DNA
agcttccgcgcgccggaaagcctgccaaatccgttactgaagatggaaaaagtcagcgcaggctatggcgatcgc

SEQ ID NO: 710272 - DNA, 75 bp, synthetic construct
  source 1..75: mol_type = other DNA
accacgctgggaaaatcgctgctattcagcagagttttgtatcgagaatggtggccagccacttattgctctcgc

SEQ ID NO: 710273 - DNA, 75 bp, synthetic construct
  source 1..75: mol_type = other DNA
gatgcagagtatgaggccctgtaccgtgacattctgcctgaacttgacctggtactgtggctgattaaagccgat

SEQ ID NO: 710274 - DNA, 75 bp, synthetic construct
  source 1..75: mol_type = other DNA
gcggtgaaattggtctggcgaaagggatcaagctcggctacttcgcccagcatcaactggaatacctgcgcgccg

SEQ ID NO: 710275 - DNA, 75 bp, synthetic construct
  source 1..75: mol_type = other DNA
tggcgatgtatcacgggcagacttaccagattgcgccagaacagccgctgggtgacaaaaccattgtgcctattc

SEQ ID NO: 710276 - DNA, 75 bp, synthetic construct
  source 1..75: mol_type = other DNA
ttgggccgttggtggagatataagtggatcacttttcatccgtcgttgacaggggtgggcgagagccgggacagg

SEQ ID NO: 710277 - DNA, 75 bp, synthetic construct
  source 1..75: mol_type = other DNA
cctctgttgcacgcacggttctgcgtgccgtccgtgacacggtggtctctgttgcccgtgcggtatggaactgga

SEQ ID NO: 710278 - DNA, 75 bp, synthetic construct
  source 1..75: mol_type = other DNA
aactgcgagactacctcggcggctttggtttccagggcgataaagtaacggaagaaacccgccgtttctccggtg

SEQ ID NO: 710279 - DNA, 75 bp, synthetic construct
  source 1..75: mol_type = other DNA
atcagcgccgacggcggcagctacacctttcctggtaactggcaactggcgtgggtgaatcaggaaacgccggcg

SEQ ID NO: 710280 - DNA, 75 bp, synthetic construct
  source 1..75: mol_type = other DNA
aactgcgtgactacctcggcggctttggtttccagggcgataaagtgacggaagaaacgcgccgcttctccggtg

SEQ ID NO: 710281 - DNA, 75 bp, synthetic construct
  source 1..75: mol_type = other DNA
tttgaaggcgcgctggttgtcgtttcgcacgaccgccatttactgcgttccaccactgacgatctctatctggtt

SEQ ID NO: 710282 - DNA, 75 bp, synthetic construct
  source 1..75: mol_type = other DNA
agcgtatggagttgattgctcccgcgcacgtcgacaacccgttccgctttagcttccgcgcaccggaaagcctgc

SEQ ID NO: 710283 - DNA, 75 bp, synthetic construct
  source 1..75: mol_type = other DNA
cgttcccgcgccgccagcctgctgcacggcctcggtttcagcaatgagcaactggagcttccggtgagcgatttc

SEQ ID NO: 710284 - DNA, 75 bp, synthetic construct
  source 1..75: mol_type = other DNA
gtgatccgtggggagctgaaccagcaacagctaaagcaaatgcgggaaacactggcaaaggctgaccttccccca

SEQ ID NO: 710285 - DNA, 75 bp, synthetic construct
  source 1..75: mol_type = other DNA
atgattgccggtggcgagctgaataaaaaacagctggccgaattgcgcaaagcactggccagcatggagctgccg

SEQ ID NO: 710286 - DNA, 75 bp, synthetic construct
  source 1..75: mol_type = other DNA
ttgataacgcgctggcgcgtcagcttcaggccatcggctttggctgggatgttaaggcgcaggatattaagggga

SEQ ID NO: 710287 - DNA, 75 bp, synthetic construct
  source 1..75: mol_type = other DNA
gctggaaatggcggcagcgataagtcagattaaccaggctaacagccagatgcaggccctgaacagcgctgccga

SEQ ID NO: 710288 - DNA, 75 bp, synthetic construct
  source 1..75: mol_type = other DNA
aggtttgtaaccgacaaaatcagggaacttcagtcagcggtcctgctggggagtgcgccgcagggggtggccctg

SEQ ID NO: 710289 - DNA, 75 bp, synthetic construct
  source 1..75: mol_type = other DNA
tgaaattattatcagcaccccggaaaccctgacgctgaacggtggtgggtcttacctgagactgagtaagaacgg

SEQ ID NO: 710290 - DNA, 75 bp, synthetic construct
  source 1..75: mol_type = other DNA
tatgcaagtcgtaatacaaggcgggacaaaactgagacacataaggcctcgcaatggcttgcaaggccacacatg

SEQ ID NO: 710291 - DNA, 75 bp, synthetic construct
  source 1..75: mol_type = other DNA
aggatcctaatcgctctcgtcgtgtcaccttcaaagttgtaacaaatgccgagttgcagattagaaagattattc

SEQ ID NO: 710292 - DNA, 75 bp, synthetic construct
  source 1..75: mol_type = other DNA
cacaactggcagagcgtaacgctgaattactcaggattacccaggaaaaagccttccacatactcgaacgattag

SEQ ID NO: 710293 - DNA, 75 bp, synthetic construct
  source 1..75: mol_type = other DNA
ggtttgcttatccggatactggaggacaaaccggtcaaaacgtcctggcagattgatttacctgccagggcgttt

SEQ ID NO: 710294 - DNA, 75 bp, synthetic construct
  source 1..75: mol_type = other DNA
atgctgagtggggaaagtgtgaaagaaaagaagactgctgcgtcgtttgtcgtcacgtttatcttcattggttat

SEQ ID NO: 710295 - DNA, 75 bp, synthetic construct
  source 1..75: mol_type = other DNA
atgctgggtggggaaagtatgaaggaaaagaagactgctgcgccgtttgtcgtcacatttatcttcattggctat

SEQ ID NO: 710296 - DNA, 75 bp, synthetic construct
  source 1..75: mol_type = other DNA
ttcgacctgcttgacccaacaaaacttatcccggaagagttagtccccgttcagcgcatcggtaaaatggtgctc

SEQ ID NO: 710297 - DNA, 75 bp, synthetic construct
  source 1..75: mol_type = other DNA
gtcatgtcttttccgctgatggtgcgggcgattcgtctggcgctggaaggggttgatatcaaactggagcaggcc

SEQ ID NO: 710298 - DNA, 75 bp, synthetic construct
  source 1..75: mol_type = other DNA
gcgtggtgcggttctcgctgccgctgtcatgtcttttccgctgatggtgcgggcgattcgtctggcgctggaagg

SEQ ID NO: 710299 - DNA, 75 bp, synthetic construct
  source 1..75: mol_type = other DNA
ccgtggtcgtcggttacttattattagtttcgatgggacggcgcggatttatcggtgaacgtctgtatgactggt

SEQ ID NO: 710300 - DNA, 75 bp, synthetic construct
  source 1..75: mol_type = other DNA
ctgccgtttgggatcttttttgcctggttactggtgcgctgcacgtttccgggcaaagcactgctcgacagtgta

SEQ ID NO: 710301 - DNA, 75 bp, synthetic construct
  source 1..75: mol_type = other DNA
accgctgaccttaccgggaattattgttggtacggtactggcattcgctcgttcgctcggtgaatttggcgcaac

SEQ ID NO: 710302 - DNA, 75 bp, synthetic construct
  source 1..75: mol_type = other DNA
gttcgctcggtgaatttggtgcaaccatcacctttgtttctaacattcctggtgaaacgcgaaccattccttcag

SEQ ID NO: 710303 - DNA, 75 bp, synthetic construct
  source 1..75: mol_type = other DNA
atcgcggtatcccgcgcagttaccgcaccatggaaggcttcggtattcataccttccgcctgattaatgccgaag

SEQ ID NO: 710304 - DNA, 75 bp, synthetic construct
  source 1..75: mol_type = other DNA
tgacgaccagttgaatatcaccccgcctccgaacgtcaacggtctgaaaaaggatccatccttaagtctgtacgc

SEQ ID NO: 710305 - DNA, 75 bp, synthetic construct
  source 1..75: mol_type = other DNA
cctccggacgtcaacggtctgaaaaaggatccatccttaagtctgtacgccattcctgacggtgatgtgaaaggt

SEQ ID NO: 710306 - DNA, 75 bp, synthetic construct
  source 1..75: mol_type = other DNA
atttgagtcggcaaaatcctatctggattggggcgagaaattagatacaccggcatacggatgtatcgttgtatt

SEQ ID NO: 710307 - DNA, 75 bp, synthetic construct
  source 1..75: mol_type = other DNA
gtagggtggtattcgcatttaactataaacccaccgcgtcgcggaacagacgagagaaggggtacgcagtgcgat

SEQ ID NO: 710308 - DNA, 75 bp, synthetic construct
  source 1..75: mol_type = other DNA
aaactccctgcgtgccggtagccgtgggcctacgctgctggaagattttattctgcgtgagaaaatcactcactt

SEQ ID NO: 710309 - DNA, 75 bp, synthetic construct
  source 1..75: mol_type = other DNA
ggcgtgaatgccgttgtccatgagttcgcagcggcttgtggttttggtattgaactttccgaatctgcactgccc

SEQ ID NO: 710310 - DNA, 75 bp, synthetic construct
  source 1..75: mol_type = other DNA
tgcgtacagcggttatcgagcgcctatcaaaagactgcgctggaaggatcatcgaaatatggcaatgcgcggcga

SEQ ID NO: 710311 - DNA, 75 bp, synthetic construct
  source 1..75: mol_type = other DNA
attcgacagagcgtaatatcagcgaccattatttgcagtcaataacggccagggatgccgagtgtatgttcggcg

SEQ ID NO: 710312 - DNA, 75 bp, synthetic construct
  source 1..75: mol_type = other DNA
caccttcttactcgattgattggtcgcccaaaacagttgtagaagaagttttgcaaaatgtctctactattatta

SEQ ID NO: 710313 - DNA, 75 bp, synthetic construct
  source 1..75: mol_type = other DNA
cagatgagctccctgtttttctccggaggctcgctgaatatcatggcagtcctgttacccgcatggcgacaaatc

SEQ ID NO: 710314 - DNA, 75 bp, synthetic construct
  source 1..75: mol_type = other DNA
tcatgcttttcgggcgaaggatatccgacttctgtacggaatggcaagtggcggttaatttattcaggggaaggc

SEQ ID NO: 710315 - DNA, 75 bp, synthetic construct
  source 1..75: mol_type = other DNA
tgctgattgatgaagtgcgtgctggcggccgtattccgctgattatcgggcgtggcctgaccaccaaagcgcgtg

SEQ ID NO: 710316 - DNA, 75 bp, synthetic construct
  source 1..75: mol_type = other DNA
caattgaaaaaccactggcctccctgcctaattcgctttcccgccatatcctcgaacatctgcgtaaactcacca

SEQ ID NO: 710317 - DNA, 75 bp, synthetic construct
  source 1..75: mol_type = other DNA
tccatttctgatgatgacctgtgcgcctggtgtacccgtctgctttaccgtcccggagaactcagtctgtgcaga

SEQ ID NO: 710318 - DNA, 75 bp, synthetic construct
  source 1..75: mol_type = other DNA
agaaacccttcaacaaaaggatgtttttaagaagctaaaaacaattagcgatcaaccattatcggtattgaaaga

SEQ ID NO: 710319 - DNA, 75 bp, synthetic construct
  source 1..75: mol_type = other DNA
gctggttttaacgttgttgtaaacagttcgaacccgccagtaaaagatcgcgttaactcaatgaatgcaatgttc

SEQ ID NO: 710320 - DNA, 75 bp, synthetic construct
  source 1..75: mol_type = other DNA
ctgattaaagcctatcttcgaggacagtttactaacctgacaagtggtactgtttaccatcagtttgaccgaaaa

SEQ ID NO: 710321 - DNA, 75 bp, synthetic construct
  source 1..75: mol_type = other DNA
cgtgaacagtttaccggtgcggtggaccggatatttgacacggcggagagcgtctgtgttgcctctgttgcccgt

SEQ ID NO: 710322 - DNA, 75 bp, synthetic construct
  source 1..75: mol_type = other DNA
aaaattccatcaggggtacctataatcatgccctgtatctcgatggtcgccgtgaaatgatgcaatggtacgctg

SEQ ID NO: 710323 - DNA, 75 bp, synthetic construct
  source 1..75: mol_type = other DNA
ggctgagtcaaaccaaagtggaacaaaatcatattgtcggaggattcagcttcgaattaggcaaggtagtgcgcc

SEQ ID NO: 710324 - DNA, 75 bp, synthetic construct
  source 1..75: mol_type = other DNA
cacatggttattttcaggtctatgaatcgctagcctcctataccacagcagaatttcttcaggatcccagtgtta

SEQ ID NO: 710325 - DNA, 75 bp, synthetic construct
  source 1..75: mol_type = other DNA
aaattcactaaagtcaggagctagaggctcaaccttgctcgaagactttattctgcgagaaaagatcactcattt

SEQ ID NO: 710326 - DNA, 75 bp, synthetic construct
  source 1..75: mol_type = other DNA
gaccgtctggcgttctccaccgacagttacgtcattgacccgctgttcttccctggcggtaatatcggcaagctg

SEQ ID NO: 710327 - DNA, 75 bp, synthetic construct
  source 1..75: mol_type = other DNA
ggtgtaaacgcggtggttcatgagttcgcggcagcctgcggttgtggtattgaactttcagaagcggcactgcct

SEQ ID NO: 710328 - DNA, 75 bp, synthetic construct
  source 1..75: mol_type = other DNA
gggcgactatccttaacctgcgtgagcaactggggctggatggagaactggtcagcgactgcgcggtgctgacgc

SEQ ID NO: 710329 - DNA, 75 bp, synthetic construct
  source 1..75: mol_type = other DNA
gaccagtacactggcggcgccaaaagcggcgcatttccccataagcgctaacttaagggttgtggtattacgcct

SEQ ID NO: 710330 - DNA, 75 bp, synthetic construct
  source 1..75: mol_type = other DNA
cgttatgccatcgccaccggacgagccactgtcaatccggcatctgaactgaccagtacactggcggcgccaaaa

SEQ ID NO: 710331 - DNA, 75 bp, synthetic construct
  source 1..75: mol_type = other DNA
gaaaatctctgccaccaatacgttccatgtcctcgctacggaatggcaccagcataaatctttgtcatggtctga

SEQ ID NO: 710332 - DNA, 75 bp, synthetic construct
  source 1..75: mol_type = other DNA
ttacttcgaacggaagtaataacaaggcaatctctacagttgaaccgcactatgaagatactgcacctgccgaaa

SEQ ID NO: 710333 - DNA, 75 bp, synthetic construct
  source 1..75: mol_type = other DNA
gaagccacaaacgatcgtcggtttcaaaattggtaatgcgttggtggatgaactggacattttgccgaaggaaaa

SEQ ID NO: 710334 - DNA, 75 bp, synthetic construct
  source 1..75: mol_type = other DNA
ccgaatctctggagcaacaggtctgggatgataagggggagcctgataaaaaatctggcaatgatcacccgaatg

SEQ ID NO: 710335 - DNA, 75 bp, synthetic construct
  source 1..75: mol_type = other DNA
cgccaccatttgctgccctgaccggcatacgctgcagtaccgcgcatatcacggcaaaggacaacgcctggttgt

SEQ ID NO: 710336 - DNA, 75 bp, synthetic construct
  source 1..75: mol_type = other DNA
tgccgttcctgacccgccccggccaggtgcgctataagctgatgatgggccgcccgcaggagtgggggcaccacg

SEQ ID NO: 710337 - DNA, 75 bp, synthetic construct
  source 1..75: mol_type = other DNA
cgccgcgtgaaggtggtgacgagttcagtcaggcatggaagcaggaagtgaagatcagtaaagacagcaaggacg

SEQ ID NO: 710338 - DNA, 75 bp, synthetic construct
  source 1..75: mol_type = other DNA
gggggtagtggtaactaaagaatggctcgacagcgtgaagggcaaacaggcaatggatgcgctggaacgttacaa

SEQ ID NO: 710339 - DNA, 75 bp, synthetic construct
  source 1..75: mol_type = other DNA
acggcgtgaaaggcaaacaggcattagccgcactggaacgctataaaggggccaaaaacgccggaaaaacgccca

SEQ ID NO: 710340 - DNA, 75 bp, synthetic construct
  source 1..75: mol_type = other DNA
gcttacgcggtgattcagtgggggcgtgatggttttccggcggctttacatccttacccgccgcagtcggtgaac

SEQ ID NO: 710341 - DNA, 75 bp, synthetic construct
  source 1..75: mol_type = other DNA
gtgaggcgcgagaatggctgagcaatcacccggtggattttctcctgaacgagcagccgaacgactgccagacgc

SEQ ID NO: 710342 - DNA, 75 bp, synthetic construct
  source 1..75: mol_type = other DNA
gaatgagtaaccaggatgcggaatggctggcctcccgtcgcttctccattgaagacatcgcccggatgttcaacg

SEQ ID NO: 710343 - DNA, 75 bp, synthetic construct
  source 1..75: mol_type = other DNA
agcgtgcagacagtaactggtcagcctgatgtggatcaggtcgtgctggatgaagcgatcaaaaatcgttccggg

SEQ ID NO: 710344 - DNA, 75 bp, synthetic construct
  source 1..75: mol_type = other DNA
cgagccagacggcagccgttatattgaagtccataacccgctgtctaccaccgaagcccagtttgaaggtcagga

SEQ ID NO: 710345 - DNA, 75 bp, synthetic construct
  source 1..75: mol_type = other DNA
gcttatgcggtgattcagtgggggcgtgatggttttccggtggctttacatccttacccgccgcagtcggtgaac

SEQ ID NO: 710346 - DNA, 75 bp, synthetic construct
  source 1..75: mol_type = other DNA
cgaagcctcctgggggattgccaacggctggtcgctgtacggcggggcgctggcagatgaacactatcagtcggc

SEQ ID NO: 710347 - DNA, 75 bp, synthetic construct
  source 1..75: mol_type = other DNA
ccatcattaaaagccaaactggcgctgggcgaggattacctcagatccgatatttttgatggctttaactatgtt

SEQ ID NO: 710348 - DNA, 75 bp, synthetic construct
  source 1..75: mol_type = other DNA
ccggttgttcctgatgacataaagcctgtcattcaggagcagacgcagcaggtgacacctggcaatccccctgtt

SEQ ID NO: 710349 - DNA, 75 bp, synthetic construct
  source 1..75: mol_type = other DNA
ttgtcgtaactaatttatctgacgacacacaaacttattgtggaaaggagtctgttgtcattgttggcaggaacg

SEQ ID NO: 710350 - DNA, 75 bp, synthetic construct
  source 1..75: mol_type = other DNA
ataaatttactatgttttataccggagagcatgatgttgtcgtaactaatttatctgacgatacacaaacttatt

SEQ ID NO: 710351 - DNA, 75 bp, synthetic construct
  source 1..75: mol_type = other DNA
catgaatccgaacgaagcccgtgagcgtgagggaatgccgccgcgtgaaggtggcgacgagttcagccaggcatg

SEQ ID NO: 710352 - DNA, 75 bp, synthetic construct
  source 1..75: mol_type = other DNA
catgaacttcggaacaccggcgattgcgataaactacgaacacaaatcagcgggcattatgcagcaactgggtat

SEQ ID NO: 710353 - DNA, 75 bp, synthetic construct
  source 1..75: mol_type = other DNA
gtgtgacgcagtttgagcacgcgctgtgcacctttatggcgaaaaaaccaatttatatggtcggccatagtgtcg

SEQ ID NO: 710354 - DNA, 75 bp, synthetic construct
  source 1..75: mol_type = other DNA
cgtcacggacagcggcaagctgcgcaatatcgccattgctcagggctttaccgattttgtgcgtctgttgtccga

SEQ ID NO: 710355 - DNA, 75 bp, synthetic construct
  source 1..75: mol_type = other DNA
cccgcgaacgtgaggggatgccgccgcgtgaaggtggcgacgaattcagccaggcatggaagcagacggtggaaa

SEQ ID NO: 710356 - DNA, 75 bp, synthetic construct
  source 1..75: mol_type = other DNA
gctttgctggtggcttctcccgtacctggtacccgttatctggttgagtttgattcagccgatttactgcgcgcc

SEQ ID NO: 710357 - DNA, 75 bp, synthetic construct
  source 1..75: mol_type = other DNA
atgtggtggccttttagtcgtaaaaaaagcgagcaacgtaacctgtccattgatgattttctggcgctgtccggc

SEQ ID NO: 710358 - DNA, 75 bp, synthetic construct
  source 1..75: mol_type = other DNA
tggaacgctacaagggggcgaaaaatgccggaaaaacgccaatccttgaagggggcatggattacaagcaactgg

SEQ ID NO: 710359 - DNA, 75 bp, synthetic construct
  source 1..75: mol_type = other DNA
tagatattctgctgaatgagcagcctaattcgtgccagacaccttaccagtttaaacgcacaatgatgcgtcact

SEQ ID NO: 710360 - DNA, 75 bp, synthetic construct
  source 1..75: mol_type = other DNA
aagcccgcgaacgtgaagggctgtccccgcgtgatggtggtgatgagttcagccaggcatggaaacaggaagtaa

SEQ ID NO: 710361 - DNA, 75 bp, synthetic construct
  source 1..75: mol_type = other DNA
agaggctgaaaccaatggcctacgttctcattatagtttcactggcgacggtagccgttccagccggccagagcc

SEQ ID NO: 710362 - DNA, 75 bp, synthetic construct
  source 1..75: mol_type = other DNA
atatttttttaagaatcaaagcagtatatgatttaaatgacagtcagataaaaaaacttattgagtgggaaatac

SEQ ID NO: 710363 - DNA, 75 bp, synthetic construct
  source 1..75: mol_type = other DNA
gtgaaaaaaatcctaaaaactttctttacttagcgattaaagatataaatgcattatcccaggcgttagaacgta

SEQ ID NO: 710364 - DNA, 75 bp, synthetic construct
  source 1..75: mol_type = other DNA
agccattagagaaaaagaaaacataaacacatattttaaagaatatgaatggttggccacacgatggaaggattg

SEQ ID NO: 710365 - DNA, 75 bp, synthetic construct
  source 1..75: mol_type = other DNA
gttccggtgacatgggccagtattttacgccgtacagtgtccagtccatgatggcccgtttgctgatacctggtg

SEQ ID NO: 710366 - DNA, 75 bp, synthetic construct
  source 1..75: mol_type = other DNA
gtgttcagggataccgcccgcagcctgcgccgctgggaggtgttcagcgactttatcacgctggccgccagcgag

SEQ ID NO: 710367 - DNA, 75 bp, synthetic construct
  source 1..75: mol_type = other DNA
agcgtctttaaatccacgggccgtcatctggggcgctgggaggtgttcagtgattttctttcactcgcagccagt

SEQ ID NO: 710368 - DNA, 75 bp, synthetic construct
  source 1..75: mol_type = other DNA
atcttccatactgattatgttaatatcaggatgcaagcagaagcaaattgccgagagttattgatcaagaccatt

SEQ ID NO: 710369 - DNA, 75 bp, synthetic construct
  source 1..75: mol_type = other DNA
ctgaagcatggcgtgatgactatgaagcaggaaaaactccggtcgaagcatattgtgatgagtggggcgatgaat

SEQ ID NO: 710370 - DNA, 75 bp, synthetic construct
  source 1..75: mol_type = other DNA
attgttcatgcacgcggctcagccgctcacggttatttccagccatataaaagcttaagcgatatcaccaaagcg

SEQ ID NO: 710371 - DNA, 75 bp, synthetic construct
  source 1..75: mol_type = other DNA
ttactttcccaaatgagaaaagaattcagcgagttgactagctttagacctatcacaatatttagcctatttaaa

SEQ ID NO: 710372 - DNA, 75 bp, synthetic construct
  source 1..75: mol_type = other DNA
agggcaacctgttacgtttataaatggccaaaacaaaacagctgatgaactacttgttttctcaagatatttgag

SEQ ID NO: 710373 - DNA, 75 bp, synthetic construct
  source 1..75: mol_type = other DNA
ttaaaaaccctaaagccttatctgctaaacctagtaacgccaagcaaaaagtactaccaactaatacttcaaaag

SEQ ID NO: 710374 - DNA, 75 bp, synthetic construct
  source 1..75: mol_type = other DNA
gcgatgaaaaacggaatctatggtcactcccgtttttgcaacaccgattttgacgacaagttggcttgcttgaat

SEQ ID NO: 710375 - DNA, 75 bp, synthetic construct
  source 1..75: mol_type = other DNA
taataaggtgcctcttcgccggcgtacgaaggataaagatttggatgtgagcagtgatggaacatcaggtgaata

SEQ ID NO: 710376 - DNA, 75 bp, synthetic construct
  source 1..75: mol_type = other DNA
atcgtgatgaagtgctgacgctcaagacaccttttaacatcgtattgaatatgattaatgatgcattacaaggag

SEQ ID NO: 710377 - DNA, 75 bp, synthetic construct
  source 1..75: mol_type = other DNA
tcccaaaacgtccattaaaattacgtgcgctacctctcacagatgcacatattactccccctagagagtcatcac

SEQ ID NO: 710378 - DNA, 75 bp, synthetic construct
  source 1..75: mol_type = other DNA
ctggcgtggcaggtatggggcggtagctttcatatggatcgctggtcggaaaacgggaaaaagacgcgaccagct

SEQ ID NO: 710379 - DNA, 75 bp, synthetic construct
  source 1..75: mol_type = other DNA
gcggtgccgtctgggtcggtgatgtggtctgcagcggcctctcatcgtgggcggcggtgacgcagacaggagaag

SEQ ID NO: 710380 - DNA, 75 bp, synthetic construct
  source 1..75: mol_type = other DNA
acggtaaaaatggcggaggctggcaagaatttcctgtatccatgaaatctttttctccggtagactctaaaggca

SEQ ID NO: 710381 - DNA, 75 bp, synthetic construct
  source 1..75: mol_type = other DNA
ccgcggccgtactatttatcagaacactggacgcctgatgtacagccttgcagggcaatgcaaggctaactggtg

SEQ ID NO: 710382 - DNA, 75 bp, synthetic construct
  source 1..75: mol_type = other DNA
ttgcagggcaatgtaaggctaattggtggtacgaaaacaaccaggtgcatattgttcctgatgataagtacatac

SEQ ID NO: 710383 - DNA, 75 bp, synthetic construct
  source 1..75: mol_type = other DNA
atactcgcgggcaggcgtggtatatggacctgctgtgtctggcgaaaggggctagagaactgcaaagcctgagca

SEQ ID NO: 710384 - DNA, 75 bp, synthetic construct
  source 1..75: mol_type = other DNA
gaaagcctgccggaagttcagcccggtcagctaccgtgcacatggcctgcccgtattggagaatctgctggagca

SEQ ID NO: 710385 - DNA, 75 bp, synthetic construct
  source 1..75: mol_type = other DNA
ttcaatattaaaaccattgccgccagcctgcgtcgtcaggggctgcgggcgaaagcctgccggaagttcagcccg

SEQ ID NO: 710386 - DNA, 75 bp, synthetic construct
  source 1..75: mol_type = other DNA
tctggccttgcccgtcagagtatttaccgcgcattatcccccaacggtaacccgaccatcacaacgcttgcacaa

SEQ ID NO: 710387 - DNA, 75 bp, synthetic construct
  source 1..75: mol_type = other DNA
ggcattcgacttcgcaggtcgctattgccttcaccgaaaaaacaccgccacaatttctctaccacggtacggcaa

SEQ ID NO: 710388 - DNA, 75 bp, synthetic construct
  source 1..75: mol_type = other DNA
catactctgtgcacaaaaagcgggcaagcggttaacgcgtgcattactggattccgtggtcgccaccagtgataa

SEQ ID NO: 710389 - DNA, 75 bp, synthetic construct
  source 1..75: mol_type = other DNA
ggcattcgacttcgcaggtcgctatttcctttgccgaaaaaccccccgccacagtttctctaccacggtacggca

SEQ ID NO: 710390 - DNA, 75 bp, synthetic construct
  source 1..75: mol_type = other DNA
cgaaggaagcagcctgcgcgccgcgctggcggagttgcgcctgttcccgccgatgatgctgtacatgatcgcctc

SEQ ID NO: 710391 - DNA, 75 bp, synthetic construct
  source 1..75: mol_type = other DNA
gtcgtttccttgaggcgataaaaagtcagggattaattgcaggggagcgtcactatgtgcatctctctgctgatg

SEQ ID NO: 710392 - DNA, 75 bp, synthetic construct
  source 1..75: mol_type = other DNA
gtctggctgacatcaacggttgctgttgagtttcttgagtggtcgttcatgccggctggggtacaaaaacaataa

SEQ ID NO: 710393 - DNA, 75 bp, synthetic construct
  source 1..75: mol_type = other DNA
tgaaaattgatgatatcaaccaggctaatgaacgctggaaaaaagataccgaacaattgcggcgcaatggggtga

SEQ ID NO: 710394 - DNA, 75 bp, synthetic construct
  source 1..75: mol_type = other DNA
gttaacgatgaaagtttcagaaataaacagtaaaaaagtcgcgattttgatgaagattgacgatatcaaccaggc

SEQ ID NO: 710395 - DNA, 75 bp, synthetic construct
  source 1..75: mol_type = other DNA
aacgcaggttccggctggaccgtttcgtattcaggatcttggtgattctgtctccggtacgttgcatattcgcat

SEQ ID NO: 710396 - DNA, 75 bp, synthetic construct
  source 1..75: mol_type = other DNA
ggcattcgacttcgcaggtcgccatttcctttgccgaaaaaacaccgccacagtttctttaccacggtacggcaa

SEQ ID NO: 710397 - DNA, 75 bp, synthetic construct
  source 1..75: mol_type = other DNA
tgaagattgacgatatcaaccaggcgagcgattgctggaaaaaagataccgaagaattacggcgtaatggggtga

SEQ ID NO: 710398 - DNA, 75 bp, synthetic construct
  source 1..75: mol_type = other DNA
ctgcgctggaaaaggaagtgaaagcgcttgataagcaaatggtggcggcgcagaaagcagcggatgcatattggg

SEQ ID NO: 710399 - DNA, 75 bp, synthetic construct
  source 1..75: mol_type = other DNA
ggtagtgccgaaaatcatcgaacagttcgatcatctcggacacgcgctacccgcctccacccgaatgctcatcgc

SEQ ID NO: 710400 - DNA, 75 bp, synthetic construct
  source 1..75: mol_type = other DNA
tgttgagatcactgaaaccgtgatcgagcgaattaatgaacatttttatctcaatattgaacaactgcgtaaaca

SEQ ID NO: 710401 - DNA, 75 bp, synthetic construct
  source 1..75: mol_type = other DNA
gactttggcaccggtttgtcaaacctgaaacgtttttatgaaattaatccagacagtataaaggtggattcgcaa

SEQ ID NO: 710402 - DNA, 75 bp, synthetic construct
  source 1..75: mol_type = other DNA
gggtgaattcagacattttagtcagcgtgcgtcgctgaaggatgatttcttactgcatattaatgtttcgccctg

SEQ ID NO: 710403 - DNA, 75 bp, synthetic construct
  source 1..75: mol_type = other DNA
attttcaggcgacagcaaaggtgctgaaattcccggaagtgcaaattcaggaaatcatgagtaactgtgcgagag

SEQ ID NO: 710404 - DNA, 75 bp, synthetic construct
  source 1..75: mol_type = other DNA
ccacaggaggatatgtgccagacattcggtttaccttcatcggtgaaatatgaatcagatggaggccccggtatc

SEQ ID NO: 710405 - DNA, 75 bp, synthetic construct
  source 1..75: mol_type = other DNA
ccgtaatgtgtccgataatggcatgggaaaagcttactgaagccagacttgaagaagtattaacggcttataaag

SEQ ID NO: 710406 - DNA, 75 bp, synthetic construct
  source 1..75: mol_type = other DNA
gtcacaccggttggcggcgtgagcttccttgcgggctgggcgttaatgttagttggtgctatccgtttaaagcgc

SEQ ID NO: 710407 - DNA, 75 bp, synthetic construct
  source 1..75: mol_type = other DNA
ctgcctctggtcccggaagccgcaaaggttagcgatccctttctgctcgacgtgatccttgatgaaaaaacgctg

SEQ ID NO: 710408 - DNA, 75 bp, synthetic construct
  source 1..75: mol_type = other DNA
ctgcctctggtcccggaagccgcaaaggtcagcgatccctttctgctcgacgtgatccttgaaaaagaaacgctg

SEQ ID NO: 710409 - DNA, 75 bp, synthetic construct
  source 1..75: mol_type = other DNA
agcttccttgcgggctgggcgttaatgttagttggtgctatccgtttaaagcgcaagggcgtaagtcatgaataa

SEQ ID NO: 710410 - DNA, 75 bp, synthetic construct
  source 1..75: mol_type = other DNA
tggcaatgcagcgtcgcatcagtatctggttttactggagtagcgttttcctcgcgttaggcacggtgctgttca

SEQ ID NO: 710411 - DNA, 75 bp, synthetic construct
  source 1..75: mol_type = other DNA
cggcctcgaataccaggcgtttcatacgctggcgatcttaggtctggcggtggcaatgcagcgtcgcatcagtat

SEQ ID NO: 710412 - DNA, 75 bp, synthetic construct
  source 1..75: mol_type = other DNA
tgttgcctcccaatctgcgcggctacgcgccagacatttccggcgtggcacacaccacagcaaaagtgaccgtca

SEQ ID NO: 710413 - DNA, 75 bp, synthetic construct
  source 1..75: mol_type = other DNA
acgcagcaatatcaccaccgcaaaagtggaacatggcgtcgataccgcgtggctggtcgatcaccacacagaaga

SEQ ID NO: 710414 - DNA, 75 bp, synthetic construct
  source 1..75: mol_type = other DNA
aacgaagctgtcagtcgcgaacgtcagacgggaatgcagatggtgaaatctgtgcttgaacgcatcggggaggtg

SEQ ID NO: 710415 - DNA, 75 bp, synthetic construct
  source 1..75: mol_type = other DNA
aaccgcccggtaatgggcgatccgctgttcctgcaaatgaaacaacacaacagtgcagcgggcgttgtcgggcgc

SEQ ID NO: 710416 - DNA, 75 bp, synthetic construct
  source 1..75: mol_type = other DNA
gcttccggcgctgaacgcacgacttaacgaagctgtcagtcgtgagcgtcagacgggaatgcagatggtgcaatc

SEQ ID NO: 710417 - DNA, 75 bp, synthetic construct
  source 1..75: mol_type = other DNA
cgcgcctgcactccgccattatctcgatgaatttctccactccggcaattgccatcaactacgaacataaatccg

SEQ ID NO: 710418 - DNA, 75 bp, synthetic construct
  source 1..75: mol_type = other DNA
agcgaagctgtcagtcgtgagcgtcagacaggaatgcagatggtgcagtccgtactggaacgcattggggaggta

SEQ ID NO: 710419 - DNA, 75 bp, synthetic construct
  source 1..75: mol_type = other DNA
acacctgtggcaaccgtggcgatagcgccattatgcgcggattgctggacgctatcagccgccaacagccggacg

SEQ ID NO: 710420 - DNA, 75 bp, synthetic construct
  source 1..75: mol_type = other DNA
atcacgtggtgatggacgaactgaacgatctggagatgggcaaactgctctctgcctgtgacctgaccgtgggca

SEQ ID NO: 710421 - DNA, 75 bp, synthetic construct
  source 1..75: mol_type = other DNA
catgaacttcggtacgcccgccattgccattaattacgaacacaaatccgcgggcattatgcagcagcttggtat

SEQ ID NO: 710422 - DNA, 75 bp, synthetic construct
  source 1..75: mol_type = other DNA
tttcgaaccgagctacgcggtacagcactggctgaacctgaccgcacagcgtaaaaccgtggcgattactctgcg

SEQ ID NO: 710423 - DNA, 75 bp, synthetic construct
  source 1..75: mol_type = other DNA
cgcactaacgcgttgattctgcgtgaaaccgtcagccgtgagctgatggcgaaggcgaatatcgacaccggtaag

SEQ ID NO: 710424 - DNA, 75 bp, synthetic construct
  source 1..75: mol_type = other DNA
gggcgtgagattattgccgatccgctgtatcagctgagccagaaacagcaggcggctgcaggggtgagcgggcgc

SEQ ID NO: 710425 - DNA, 75 bp, synthetic construct
  source 1..75: mol_type = other DNA
gaatacacctttaccgaagccggtctgcgcgccggctgccccgtcatcgttaaactatcattcaccgattttctg

SEQ ID NO: 710426 - DNA, 75 bp, synthetic construct
  source 1..75: mol_type = other DNA
ccgctgatcgacgcgctggacgatgccaaactggcaccgattgctgccaaagcactgtcccacacgctgttgatg

SEQ ID NO: 710427 - DNA, 75 bp, synthetic construct
  source 1..75: mol_type = other DNA
atgctgaaaaacgcccgtgaaggtattgagccagaccagcctggtgttgttggtccgatcaagcaaatcgaagct

SEQ ID NO: 710428 - DNA, 75 bp, synthetic construct
  source 1..75: mol_type = other DNA
agcgtctgtgtggttgcggaaagcatgatggccgtgaacacgggcagtcgcttacagcacaactgcgactggggc

SEQ ID NO: 710429 - DNA, 75 bp, synthetic construct
  source 1..75: mol_type = other DNA
aactccgtgctgtggtttatgggtgaagatattcctcatgtaccgaacaaacgcggcggtggtttgtgtctcggc

SEQ ID NO: 710430 - DNA, 75 bp, synthetic construct
  source 1..75: mol_type = other DNA
tgcagccgcaacaggcgtaatgccgctggatatgccagaatccgttctggtacgcttcaaaggcaaaatgcagcc

SEQ ID NO: 710431 - DNA, 75 bp, synthetic construct
  source 1..75: mol_type = other DNA
cgctgccggacttcatcatgaaccgtggcggtgtgtcgctgcgtccgggtgacggcgtaattcactcctggctga

SEQ ID NO: 710432 - DNA, 75 bp, synthetic construct
  source 1..75: mol_type = other DNA
tcataccacacacccgcaagggcgggactcgcacgacctgaataaatacatctggcgttttatcgccctgagcac

SEQ ID NO: 710433 - DNA, 75 bp, synthetic construct
  source 1..75: mol_type = other DNA
gtcaccaatccggatgtaccacacgcagggcgtcgcgccctgctgtttggtcgcaggagtggcgaaaatgcatga

SEQ ID NO: 710434 - DNA, 75 bp, synthetic construct
  source 1..75: mol_type = other DNA
tcgagggtgaatttttttctggtgctgaagcttcctgggggatcgctaacggctggtcgttatatggcggcgcac

SEQ ID NO: 710435 - DNA, 75 bp, synthetic construct
  source 1..75: mol_type = other DNA
gcgccgactttcaggagaacattggtcgtgcaaagcggtactggtctgcttccagacttccgactggcgagagac

SEQ ID NO: 710436 - DNA, 75 bp, synthetic construct
  source 1..75: mol_type = other DNA
ttatgcaactactattccgcgcgtctgacaccgcttcccgggccggactcctccagggaaagcaatcatcggctg

SEQ ID NO: 710437 - DNA, 75 bp, synthetic construct
  source 1..75: mol_type = other DNA
ctgattccatggcgtttactatttcgtgtggtacacgagcctttagagcttgtgattttgcgtttgttgtacccg

SEQ ID NO: 710438 - DNA, 75 bp, synthetic construct
  source 1..75: mol_type = other DNA
tcggtcgaacccacttgcaggatgccacgccgctaacactggggcaggagatttccggctgggtagcgatgctgg

SEQ ID NO: 710439 - DNA, 75 bp, synthetic construct
  source 1..75: mol_type = other DNA
agttcaccctaacgacgacgtgaacaaaagccaaagttccaacgatgtctttccgacggcgatgcacgttgcggc

SEQ ID NO: 710440 - DNA, 75 bp, synthetic construct
  source 1..75: mol_type = other DNA
gggaatattttcagaacgggagctggttggcgtaatgcaatggggctatgcccttaatccaaacagtggtgcacg

SEQ ID NO: 710441 - DNA, 75 bp, synthetic construct
  source 1..75: mol_type = other DNA
aacatcgcccttgagcataaagggtccggtaacttttcagcgtgggttattgaagcctgtcgccggagactgaca

SEQ ID NO: 710442 - DNA, 75 bp, synthetic construct
  source 1..75: mol_type = other DNA
ccggtaacttttcagcgtgggttattgaagcctgcaggagaaggctggcaacagatgcaacgcatctgctgcccg

SEQ ID NO: 710443 - DNA, 75 bp, synthetic construct
  source 1..75: mol_type = other DNA
agcatgacgatgaatttccgctggctatctggcagaccggttccggtacgcaaagcaatatgaatatgaacgaag

SEQ ID NO: 710444 - DNA, 75 bp, synthetic construct
  source 1..75: mol_type = other DNA
tcaaaaacgtttcgtcgtctcatcgtcacgctcattcgccgttatggcgtcagtctcattcatctggatgcctgc

SEQ ID NO: 710445 - DNA, 75 bp, synthetic construct
  source 1..75: mol_type = other DNA
tcgtctggttgtcacgcttagccggggttatggcgtccgtctcattcatctggttgccagcgccggatttctgcc

SEQ ID NO: 710446 - DNA, 75 bp, synthetic construct
  source 1..75: mol_type = other DNA
tcgtctggttgtcacccttagccggggttatggcgtccgtctcattcatctggttgccagcgccgcatttctgcc

SEQ ID NO: 710447 - DNA, 75 bp, synthetic construct
  source 1..75: mol_type = other DNA
ttgagacaataagttgctggctggccagactggtcatcgtcaataaacattacagccaccgtttcgtaaataact

SEQ ID NO: 710448 - DNA, 75 bp, synthetic construct
  source 1..75: mol_type = other DNA
aacaacattctatgaacttgatggcgagtggtatcacgagatttgcaggaatgccattaaacgaggcggacagcg

SEQ ID NO: 710449 - DNA, 75 bp, synthetic construct
  source 1..75: mol_type = other DNA
taggcagccatgaatcaatattctatgaacttgatggcgagtggtatcacgagatttgcaggaatgccattaaac

SEQ ID NO: 710450 - DNA, 75 bp, synthetic construct
  source 1..75: mol_type = other DNA
tgcgtaagattggtctggagctgggtctaccgtacgacatgctgtaccgtcacccgttcccgggaccaggccttg

SEQ ID NO: 710451 - DNA, 75 bp, synthetic construct
  source 1..75: mol_type = other DNA
ccagccgctggtcatgggccggacgtaccatgaggacaaccgttcgccgggggacctgccgggaacgaagacgca

SEQ ID NO: 710452 - DNA, 75 bp, synthetic construct
  source 1..75: mol_type = other DNA
cacagagcgccattgtcaccgggcctgcgggagaggaaatcttctgtgatgaacatggccgggtacgggtgaagt

SEQ ID NO: 710453 - DNA, 75 bp, synthetic construct
  source 1..75: mol_type = other DNA
ggatagatgataacacgctaccgctccttccatgcaaatccgtaccattgcccgaggttgcacgcgccttcgcca

SEQ ID NO: 710454 - DNA, 75 bp, synthetic construct
  source 1..75: mol_type = other DNA
gttgtgtccgtctgcgtaacgaagatatcaaattcttgttcgagaaagtgcctgttggtactcgcgtacagttca

SEQ ID NO: 710455 - DNA, 75 bp, synthetic construct
  source 1..75: mol_type = other DNA
ctcgtttgtggtcatccattcagggggcgtggacatcgtcgggccgaaaatcaatctcaatagcggcggtagtcc

SEQ ID NO: 710456 - DNA, 75 bp, synthetic construct
  source 1..75: mol_type = other DNA
gcgaatgaccggcgcataacggtacgcaacgaccagacgctgaaggtgacgaacgaccggacggtgagcgtgagt

SEQ ID NO: 710457 - DNA, 75 bp, synthetic construct
  source 1..75: mol_type = other DNA
catgtaataagatggacacgcgtaagcagttaccgctaacaccaagtcaacaggggtttttattccattccttaa

SEQ ID NO: 710458 - DNA, 75 bp, synthetic construct
  source 1..75: mol_type = other DNA
gatgaagatgggcctggttgaaccgctgaaagagctgttcaaagacgaagtgcgtaagattggtctggagctggg

SEQ ID NO: 710459 - DNA, 75 bp, synthetic construct
  source 1..75: mol_type = other DNA
caacgaagcagagcaggttctggatatgtttggcgatcactttggtcttaacattgttcacgtaccggcagaaga

SEQ ID NO: 710460 - DNA, 75 bp, synthetic construct
  source 1..75: mol_type = other DNA
gaaagaacggggtactgctaatgtgctgcatgcgttagcgcaacggaatctgctggatgagcgtctgctactgct

SEQ ID NO: 710461 - DNA, 75 bp, synthetic construct
  source 1..75: mol_type = other DNA
gcttgtctggcaactctgctcgaacgctatggacggttggatggcgtgatttttgctgccgacgctaccaccaca

SEQ ID NO: 710462 - DNA, 75 bp, synthetic construct
  source 1..75: mol_type = other DNA
cctcgctctacattaccgatctccatgggcatttgttgcctatcggtgccaccggtgaactagtggcgggtgggg

SEQ ID NO: 710463 - DNA, 75 bp, synthetic construct
  source 1..75: mol_type = other DNA
tcgtctggttgtcacccttagccggcgttatggcgtccgtctcattcatctggttgccagcgccggatttctgcc

SEQ ID NO: 710464 - DNA, 75 bp, synthetic construct
  source 1..75: mol_type = other DNA
ccgactgcattaacgtgcaggcgctgaacatggggcgaattgtcgtcgacgtcgatggtgttaatctcactgaac

SEQ ID NO: 710465 - DNA, 75 bp, synthetic construct
  source 1..75: mol_type = other DNA
cgttatggcgtcagtctcattcatctgaatgccagcgccgaatgtctgccggatttacccactttcgactggtaa

SEQ ID NO: 710466 - DNA, 75 bp, synthetic construct
  source 1..75: mol_type = other DNA
atgaacctttccctgacgccggaagccgacagcattaacatgctggcgctgaacatggggcgcattgtcgttgac

SEQ ID NO: 710467 - DNA, 75 bp, synthetic construct
  source 1..75: mol_type = other DNA
gctacgcgcaggttgaagtcgtaaacgacagcgcactggttcgcggtatcgaagatgctctgaccgcagacggta

SEQ ID NO: 710468 - DNA, 75 bp, synthetic construct
  source 1..75: mol_type = other DNA
actcgctgtcacaccagactaatgacgacggcgaatcagaatggattcattttacaggcagcggctatctgttac

SEQ ID NO: 710469 - DNA, 75 bp, synthetic construct
  source 1..75: mol_type = other DNA
cgtctggttgtcacacttacccgacgttatggcgtcagtctcattcatctggatgccagcgctgaatatctgccg

SEQ ID NO: 710470 - DNA, 75 bp, synthetic construct
  source 1..75: mol_type = other DNA
tcaaaaacgttccgccgtctggttgtcacactcatccgacgttatggcgtcagtctcattccaatgacgtcagcc

SEQ ID NO: 710471 - DNA, 75 bp, synthetic construct
  source 1..75: mol_type = other DNA
ttcgaccaacagtcaacctgcacaccaccaccgtttacggcccttgccggcatacgctgcagtaccgcacatatc

SEQ ID NO: 710472 - DNA, 75 bp, synthetic construct
  source 1..75: mol_type = other DNA
atgaactgaacagccgcgtcacttttgccggataccgcttctcggaagagaacttcatgaccatgagcgagtatc

SEQ ID NO: 710473 - DNA, 75 bp, synthetic construct
  source 1..75: mol_type = other DNA
tctgcggcttaaacgcctgggcctgtcaaaaacgttccgtcgtctggtcgtcacactcatccggcgttatggcgt

SEQ ID NO: 710474 - DNA, 75 bp, synthetic construct
  source 1..75: mol_type = other DNA
tcacactcatccggcgttatggcgtcagtctcattcatctggatgccagcgctgaatgtctgccggacctgctca

SEQ ID NO: 710475 - DNA, 75 bp, synthetic construct
  source 1..75: mol_type = other DNA
ctgtcaaaaacgttccgccgtctggttgtcacacttacccgacgttatggcgtcagtctcattcatctggatgcc

SEQ ID NO: 710476 - DNA, 75 bp, synthetic construct
  source 1..75: mol_type = other DNA
cctgccgtacgacatgctgtaccgtcacccgttcccgggaccaggccttggcgttcgtgtgctgggcgaagtgaa

SEQ ID NO: 710477 - DNA, 75 bp, synthetic construct
  source 1..75: mol_type = other DNA
tcactctcatccgccgttatggcgtcagtctcattcatctggatgccagtgccagatgcctgctgggtttaccca

SEQ ID NO: 710478 - DNA, 75 bp, synthetic construct
  source 1..75: mol_type = other DNA
ttcacaggtagcggatatctgttacgtaccgatgcgtggtcatatccggttctgcggcttaaacgcctggggttg

SEQ ID NO: 710479 - DNA, 75 bp, synthetic construct
  source 1..75: mol_type = other DNA
atgaaactggcactgacactggaagccgacagcgttaacgtgcaggcgctgaacatgggacgaattgtcgttgac

SEQ ID NO: 710480 - DNA, 75 bp, synthetic construct
  source 1..75: mol_type = other DNA
tcgtctggttgtcacacttagccggggttatggcgtccgtctcattcatctggttgccagcgccgaatttctgcc

SEQ ID NO: 710481 - DNA, 75 bp, synthetic construct
  source 1..75: mol_type = other DNA
tcgtctggttgtcacacttagccggtgttatggcgtccgtctcattcatctggttgccagcgccgtatttctgcc

SEQ ID NO: 710482 - DNA, 75 bp, synthetic construct
  source 1..75: mol_type = other DNA
tcgtctggttgtcacacttagccggagttatggcgtccgtctcattcatctggttgccagcgccggatttctgcc

SEQ ID NO: 710483 - DNA, 75 bp, synthetic construct
  source 1..75: mol_type = other DNA
tggtcatacccggttctgcggcttaaacgcctggggctgtcaaaaatgttccgccgtctggttgtcacacttatc

SEQ ID NO: 710484 - DNA, 75 bp, synthetic construct
  source 1..75: mol_type = other DNA
tcacactcatccgacgttatggcgtcagtctcattcacctggatgccagcgctgaatgcctgccgggcttaccca

SEQ ID NO: 710485 - DNA, 75 bp, synthetic construct
  source 1..75: mol_type = other DNA
atgaaactggccctgacactggaagccgacagcattaacgtgcaggcactgaacatgggacgcattgtcgttgac

SEQ ID NO: 710486 - DNA, 75 bp, synthetic construct
  source 1..75: mol_type = other DNA
cttcggcgaatcagaatggattcattttacaggtagcggatatctgttacgtaccgatgcgtggtcatacccggt

SEQ ID NO: 710487 - DNA, 75 bp, synthetic construct
  source 1..75: mol_type = other DNA
atgcttcagcctctgtcacaacgcgtggcagaggctttttatttatcaggagaaaacagatatgccgggttacac

SEQ ID NO: 710488 - DNA, 75 bp, synthetic construct
  source 1..75: mol_type = other DNA
acagacaacgcctggctgtactcgctgtcgcatcagacgaatgacaccggcgaatcagaatggattcattttaca

SEQ ID NO: 710489 - DNA, 75 bp, synthetic construct
  source 1..75: mol_type = other DNA
atgtccttaaaaggtctgcgctttacgctggagattgacggccaggagccggacacctttgcagtggtgcatttc

SEQ ID NO: 710490 - DNA, 75 bp, synthetic construct
  source 1..75: mol_type = other DNA
cgctggagattgacggccaggagccggacacctttgcagtggcgaatttcaggttaatccagaaccagtcatatc

SEQ ID NO: 710491 - DNA, 75 bp, synthetic construct
  source 1..75: mol_type = other DNA
gcagatgaccatccgctcgaagacctataaaggaagcggctttaatgaactgcgtttcgaggatgcgacggacag

SEQ ID NO: 710492 - DNA, 75 bp, synthetic construct
  source 1..75: mol_type = other DNA
ctgctgcgcttcaatatctgggcaggcgcactgactggcggtgtttttattggttttgtgttttctgcaggtgcc

SEQ ID NO: 710493 - DNA, 75 bp, synthetic construct
  source 1..75: mol_type = other DNA
gtaaccctgacgctcattgccggtcttgaccgttatgtgaatgtcaaaatcaccagcgccaccggcacgcaactg

SEQ ID NO: 710494 - DNA, 75 bp, synthetic construct
  source 1..75: mol_type = other DNA
gcagagggtaagccacagcacgggatcctcggtttctatcagggattcgacgaagtgggcgcagttgtcgaccaa

SEQ ID NO: 710495 - DNA, 75 bp, synthetic construct
  source 1..75: mol_type = other DNA
aaaggaagcggatttaacgagctgcggtttgaagacgccaccagtaatgagcaggtgtatatccatgcgcagaag

SEQ ID NO: 710496 - DNA, 75 bp, synthetic construct
  source 1..75: mol_type = other DNA
aagaggggtatacagagcgtttttttgtatctagcaaacatgaaattaaagtgaagttgctatttgcgaatgatg

SEQ ID NO: 710497 - DNA, 75 bp, synthetic construct
  source 1..75: mol_type = other DNA
tggctcgtttgtggtcatccattcagggggcgtggacatcgtcgggccgaaaatcagtctcaatagcggcggtag

SEQ ID NO: 710498 - DNA, 75 bp, synthetic construct
  source 1..75: mol_type = other DNA
gagaagctgctggagaagggggccgtgctgaccatctggcagggtggcacggcgctgcgttatgtgagcggtgtg

SEQ ID NO: 710499 - DNA, 75 bp, synthetic construct
  source 1..75: mol_type = other DNA
gtcacaggcgggagagcttccgtttaacccggacacatcggcaggagcggagacggagtgtctcagtatgttccg

SEQ ID NO: 710500 - DNA, 75 bp, synthetic construct
  source 1..75: mol_type = other DNA
ggtgtcgaatgaccggacggtgagcgtgagtcacgatgacggtctgtacgtcagaaacgaccgtaaagtgacggt

SEQ ID NO: 710501 - DNA, 75 bp, synthetic construct
  source 1..75: mol_type = other DNA
gtgcactggctggcggtgtctttattggttttgttttttctgcaggtgcaggtgccattgaagcctatatcgagc

SEQ ID NO: 710502 - DNA, 75 bp, synthetic construct
  source 1..75: mol_type = other DNA
gggcggaggaggggattttcttctttgagcggtttgcggcggacagtccggagcagaagctgacgctgtgcgacg

SEQ ID NO: 710503 - DNA, 75 bp, synthetic construct
  source 1..75: mol_type = other DNA
tgctgaaccgtgaatggcaggtggtacagagcattctgtcaggagaccagccgcaggcgcttcacggcagccagg

SEQ ID NO: 710504 - DNA, 75 bp, synthetic construct
  source 1..75: mol_type = other DNA
ataacggtggggttggggcagacggtgaatgtggggagcaaaaaggaaggtggtcatgaccagaaagtgacagtg

SEQ ID NO: 710505 - DNA, 75 bp, synthetic construct
  source 1..75: mol_type = other DNA
gttcccatcgtccagcggctgaaccgacgccaccgggagcgcagccaaccgcgccagggagtctgaaagcccctg

SEQ ID NO: 710506 - DNA, 75 bp, synthetic construct
  source 1..75: mol_type = other DNA
acgaactgggcttccagttgattcctgaagaagatgaattcaagttcgacttcgatcttctcgatccaaccaaac

SEQ ID NO: 710507 - DNA, 75 bp, synthetic construct
  source 1..75: mol_type = other DNA
attatgaaccgaactcgatcaacgataactggccgcgcgaaacaccgccggggccgaaacgcggcggttttgaat

SEQ ID NO: 710508 - DNA, 75 bp, synthetic construct
  source 1..75: mol_type = other DNA
tagtcatttgggagtcgacctcagagaatccgattcttgacctcagtttgtttaagtcccgtaatttcaccattg

SEQ ID NO: 710509 - DNA, 75 bp, synthetic construct
  source 1..75: mol_type = other DNA
gattatttttactttcagtaacctttttttcgctgtcttcattaatgtgtagcctatcgaccaatcttgatgtgc

SEQ ID NO: 710510 - DNA, 75 bp, synthetic construct
  source 1..75: mol_type = other DNA
ttcgtaccttgtcaggatcagttggtacgtcgttgacaatgacgctgtggggacgacgagaatcattacaccata

SEQ ID NO: 710511 - DNA, 75 bp, synthetic construct
  source 1..75: mol_type = other DNA
cggaagcatggcgtggtgattatgaagcaggaaaaactccggtagaagcatattgtgatgaatggggagaggatt

SEQ ID NO: 710512 - DNA, 75 bp, synthetic construct
  source 1..75: mol_type = other DNA
tttgttcagctaaatataacatcagttttgaagagcgggatgaactattaatggactatggtgagttacgcggtg

SEQ ID NO: 710513 - DNA, 75 bp, synthetic construct
  source 1..75: mol_type = other DNA
aaattatggataaatactatggttcgctttcaggggttcttaatgaaattaataatgaaataactcagcagtcac

SEQ ID NO: 710514 - DNA, 75 bp, synthetic construct
  source 1..75: mol_type = other DNA
ttacgcttccattttacagatgatagcagtattccgtatgcgaatactaaatatatcgcatactttgcagatggt

SEQ ID NO: 710515 - DNA, 75 bp, synthetic construct
  source 1..75: mol_type = other DNA
ctggcgataccgcgggtgggccaggaggtgattgttgattttctgaacggggacccggaccagccgctggtcatg

SEQ ID NO: 710516 - DNA, 75 bp, synthetic construct
  source 1..75: mol_type = other DNA
gtctgcgagccgactggcagactgactaccagcacagcaaaagcaatgatgacgatgttatcaacggtgatgaca

SEQ ID NO: 710517 - DNA, 75 bp, synthetic construct
  source 1..75: mol_type = other DNA
ccgtttaacccgaacacccgtgaggtgacgacggcgtgcatcagcctgttccgctaccaggcgcaggtgcggccc

SEQ ID NO: 710518 - DNA, 75 bp, synthetic construct
  source 1..75: mol_type = other DNA
cgggcagggttacggcagaacttccgtatcttccagcagcaggacatagggacgatatcagcacagcttctgaga

SEQ ID NO: 710519 - DNA, 75 bp, synthetic construct
  source 1..75: mol_type = other DNA
gaagggtggcggaacggggcggagacggcgagcggggtgtgtaacacggcgcgactgtggccgggaacgcggttc

SEQ ID NO: 710520 - DNA, 75 bp, synthetic construct
  source 1..75: mol_type = other DNA
agtatgttccgttatgaggcgcatgtccgcccgtcgtcggtgcagagccaggattacacgtttaaggtgccggac

SEQ ID NO: 710521 - DNA, 75 bp, synthetic construct
  source 1..75: mol_type = other DNA
tcccggaagacgaccgcgccacgctctgcgtctcttcgcaggtggggtgtgcgctggagtgtaaattctgttcca

SEQ ID NO: 710522 - DNA, 75 bp, synthetic construct
  source 1..75: mol_type = other DNA
cgggcgatgttatcgaccgcactaaacgtactttgcgtaaacggatgcagggcgaagccatcgagattaaaacgg

SEQ ID NO: 710523 - DNA, 75 bp, synthetic construct
  source 1..75: mol_type = other DNA
cgggcgatgttatcgaccgtacgaaacgtactctgcgtaaacggatgcagggtgaagccatcgacattaaagcgg

SEQ ID NO: 710524 - DNA, 75 bp, synthetic construct
  source 1..75: mol_type = other DNA
tttggcctgtctaaacgccgcgtgacgctctctacttcgggcgtggttccggcgctggataaactgggcgatatg

SEQ ID NO: 710525 - DNA, 75 bp, synthetic construct
  source 1..75: mol_type = other DNA
gatcagcgcgtcgaaacggtgtatatcccggaagatgaccgagccacactttgtgtctcttcgcaggtagggtgt

SEQ ID NO: 710526 - DNA, 75 bp, synthetic construct
  source 1..75: mol_type = other DNA
atctaacgccaatcagggccgagtcactattgaatacgtgatgcttgatcacgttaacgacggcactgaacacgc

SEQ ID NO: 710527 - DNA, 75 bp, synthetic construct
  source 1..75: mol_type = other DNA
ccacagagcgccattgtcaccggtcctgcgggagaggaaatcttctgcgacgaacacggacgtgtgcgagtgcag

SEQ ID NO: 710528 - DNA, 75 bp, synthetic construct
  source 1..75: mol_type = other DNA
aggtgataccggcggaccggacgtggcgtccacggctgcaaagcaaaccgaaggtggacgggccacagagcgcca

SEQ ID NO: 710529 - DNA, 75 bp, synthetic construct
  source 1..75: mol_type = other DNA
ttaccagttgaacgtaggcaccagcgacaatcactccagcgttgacggttattacagccacgacggatcgctggc

SEQ ID NO: 710530 - DNA, 75 bp, synthetic construct
  source 1..75: mol_type = other DNA
caggtcgtggtgctgaacagcaaggataagcgggtcaactatgaccgggcggtcagcatcgggcatgatgaattc

SEQ ID NO: 710531 - DNA, 75 bp, synthetic construct
  source 1..75: mol_type = other DNA
atgaattgtcgttgggaacaacaggtgatcagttttataaagctgatggtgatatgaatatgaaagggaagaaaa

SEQ ID NO: 710532 - DNA, 75 bp, synthetic construct
  source 1..75: mol_type = other DNA
cgctggaggttgacggccaggagccggacacctttgcagtggtgaatttccggttaatccagaaccagtcttatc

SEQ ID NO: 710533 - DNA, 75 bp, synthetic construct
  source 1..75: mol_type = other DNA
gccggggttcggtaatctggcgataccgcgggtgggtcaggaggtgatagtggacttcctgaacggcgacccgga

SEQ ID NO: 710534 - DNA, 75 bp, synthetic construct
  source 1..75: mol_type = other DNA
gcgggagttctgtgtgcagtacggggagtcggacctggcgtttctggcgcggctgtgggcggaggaggggatttt

SEQ ID NO: 710535 - DNA, 75 bp, synthetic construct
  source 1..75: mol_type = other DNA
ccgcgtgtgggtcaggaagtgatagtggacttcctgaacggggccccggaccagccgataatcatggggcggacg

SEQ ID NO: 710536 - DNA, 75 bp, synthetic construct
  source 1..75: mol_type = other DNA
aaatggcggtgatgatagtaacgagatcagcggcaacgggacggtcggggttaacctggggccatggcgtatgcg

SEQ ID NO: 710537 - DNA, 75 bp, synthetic construct
  source 1..75: mol_type = other DNA
ggttttgatatgaacatgcatatcctctcttttgcgccaggtgccagccacggttatatcgaaacccacgttcag

SEQ ID NO: 710538 - DNA, 75 bp, synthetic construct
  source 1..75: mol_type = other DNA
cactgccaaagccgaaggcaaaacatttgccttaagcgaaggtggctatctttattgcccaccaggctccttaat

SEQ ID NO: 710539 - DNA, 75 bp, synthetic construct
  source 1..75: mol_type = other DNA
tgaaaattgtgacgcgacaatcctctccacgccaaagctgggtgcctcttttgttgattatctggtcacactgca

SEQ ID NO: 710540 - DNA, 75 bp, synthetic construct
  source 1..75: mol_type = other DNA
agtgaagtgtctctgggtaaaaagattagcggtaatgtttctgttaatgccatcaacgactgggggggagtggag

SEQ ID NO: 710541 - DNA, 75 bp, synthetic construct
  source 1..75: mol_type = other DNA
aactgatttatcggccattatccattaaaaatgagcgtaaggatgcagaaaataaactcattctggagcagcgcg

SEQ ID NO: 710542 - DNA, 75 bp, synthetic construct
  source 1..75: mol_type = other DNA
aagacctacggtggtcaggtgtggattgataacacgaaccagggggacggtgtctacatggttccacagccgccg

SEQ ID NO: 710543 - DNA, 75 bp, synthetic construct
  source 1..75: mol_type = other DNA
gccgccgactgttaacggcgatggcgctttctccgttgttatggcagatgaataccgcccacgcggcggctattg

SEQ ID NO: 710544 - DNA, 75 bp, synthetic construct
  source 1..75: mol_type = other DNA
gggcagcaccgcggtcagtattgatcgtctggcggcgtataaagatgttgatgtgctgtgttttgatcacgataa

SEQ ID NO: 710545 - DNA, 75 bp, synthetic construct
  source 1..75: mol_type = other DNA
atgagcggcttacctcttatttcgcgccgtcgactgttaacggcgatggcgctttctccgttgttatggcagatg

SEQ ID NO: 710546 - DNA, 75 bp, synthetic construct
  source 1..75: mol_type = other DNA
aaaatagataatatttcgaaggtgattgataaggtggttaagactatgatatcaactatcataagaatttttcct

SEQ ID NO: 710547 - DNA, 75 bp, synthetic construct
  source 1..75: mol_type = other DNA
ttgccgcgagggaaatccactactctctttagaagatgacagagagactatcgacaacgctgcgggtgatgctgc

SEQ ID NO: 710548 - DNA, 75 bp, synthetic construct
  source 1..75: mol_type = other DNA
atgcagcgaaagtgcttaatctgccccccctcggcaatctatcagcctattcagaaactgcgcgttatattccct

SEQ ID NO: 710549 - DNA, 75 bp, synthetic construct
  source 1..75: mol_type = other DNA
atgagtattcgtatcgaaattggcgaacgttatgtcgttaccagtgacagctttcagtttattctccacgagaaa

SEQ ID NO: 710550 - DNA, 75 bp, synthetic construct
  source 1..75: mol_type = other DNA
ccgaaggacgcgttctggagctacaccagggtatgcgtaagccgcctgagttagaggccacgtttgcgcgcctgg

SEQ ID NO: 710551 - DNA, 75 bp, synthetic construct
  source 1..75: mol_type = other DNA
tgtttgatctgcaaggccaggagtcaggccttgaacgctggcaaggaaaggcggtgtacctgaatttttggtctg

SEQ ID NO: 710552 - DNA, 75 bp, synthetic construct
  source 1..75: mol_type = other DNA
cgtttgtccgtgcagggcgttttcaacgcgtacccgcagtttggttctatggcgcgacgctttcggcaatgcact

SEQ ID NO: 710553 - DNA, 75 bp, synthetic construct
  source 1..75: mol_type = other DNA
atgcgtcgcctgcgggaaaaactcgcccaggccaacctgaaattggggcgtaactacccggagccaaaactctct

SEQ ID NO: 710554 - DNA, 75 bp, synthetic construct
  source 1..75: mol_type = other DNA
aggagcatcagcttaccgtacgccgccataatcgcgtagttcgtggcgaggccgtctatcgctgtgttcactgcg

SEQ ID NO: 710555 - DNA, 75 bp, synthetic construct
  source 1..75: mol_type = other DNA
tgtctctcagtaataaaacgctggctgacattgcccgtttcagcccgttcagtgaagtgtctttgggtaaaaaga

SEQ ID NO: 710556 - DNA, 75 bp, synthetic construct
  source 1..75: mol_type = other DNA
gagactctggacgggctgaaacaggagcagaaacatgagtcagcacataaccaggcggatattgatgattatcgt

SEQ ID NO: 710557 - DNA, 75 bp, synthetic construct
  source 1..75: mol_type = other DNA
agtgtgaaacacgacggtaaggatgtgaagctcagcgacagcgtgatgaaagaagttgcgcaactgaaaccgttt

SEQ ID NO: 710558 - DNA, 75 bp, synthetic construct
  source 1..75: mol_type = other DNA
gtacgccgtcataatcgcgtagttcgtggcgaagccgtctatcgctgtgttcactgcggcgaacaactggtcgca

SEQ ID NO: 710559 - DNA, 75 bp, synthetic construct
  source 1..75: mol_type = other DNA
gcacagaaccgaatcttgaactgctgaccgaaatgaaaccgtcatttatggtctggtcggcaggttacggccctt

SEQ ID NO: 710560 - DNA, 75 bp, synthetic construct
  source 1..75: mol_type = other DNA
gaccgaaatgaaaccatcgtttatggtctggtcggcaggatatggcccttcaccagaaatgctggcacgtattgc

SEQ ID NO: 710561 - DNA, 75 bp, synthetic construct
  source 1..75: mol_type = other DNA
tggttctatggtgcgacgctttcggcaatgcactttgtgcgtattctggataacgccatcggaggtaaagcgtga

SEQ ID NO: 710562 - DNA, 75 bp, synthetic construct
  source 1..75: mol_type = other DNA
ggacagtaacctaccgaaggaccgtgaatccctgttctggctgaatgttcaggaagtaccaccaaaaccggaagt

SEQ ID NO: 710563 - DNA, 75 bp, synthetic construct
  source 1..75: mol_type = other DNA
tgagtgctctcctcgccttcaccctgagcggtcaggctctggccgcttttacggtgagtggtacccgtttcattt

SEQ ID NO: 710564 - DNA, 75 bp, synthetic construct
  source 1..75: mol_type = other DNA
cgtttgtccgcgccggacgctttcagcgcgttccggcggtctggttctatggtgcgacgctttctgcaatgcact

SEQ ID NO: 710565 - DNA, 75 bp, synthetic construct
  source 1..75: mol_type = other DNA
ttgccgcgagggaaatccactactctctttagaagatgacagagagactatcgacaacgctgcgcatgtacttct

SEQ ID NO: 710566 - DNA, 75 bp, synthetic construct
  source 1..75: mol_type = other DNA
tcctgtaggcacagtatgtgtattgaaatgcaccgcttacttagtgaaacccaaacgatgctggcgggatattac

SEQ ID NO: 710567 - DNA, 75 bp, synthetic construct
  source 1..75: mol_type = other DNA
aaatggacttcatgattctgaaagacgtgaatgaacacatggaaggtctgtttcaacgtttttctaaactgttac

SEQ ID NO: 710568 - DNA, 75 bp, synthetic construct
  source 1..75: mol_type = other DNA
aatgatatcagatacgtatcaggccagcaggacggagtaatttcctcagataaactggctctccctgtcactccg

SEQ ID NO: 710569 - DNA, 75 bp, synthetic construct
  source 1..75: mol_type = other DNA
gcgacaaggggaagtagtggaacaaggaccgtgcgcgcgcgtgtttgccgcaccgcagcaggagtatacgcgtca

SEQ ID NO: 710570 - DNA, 75 bp, synthetic construct
  source 1..75: mol_type = other DNA
acagattatccgcatcagctctccggcggcgaacgccagcgggtgatgattgcgatggcgctgttaacgcgaccg

SEQ ID NO: 710571 - DNA, 75 bp, synthetic construct
  source 1..75: mol_type = other DNA
tgctaatctttgctgtcggttccggcggccacttcagcggcactgcgcattttttacggcgtggccattccgtat

SEQ ID NO: 710572 - DNA, 75 bp, synthetic construct
  source 1..75: mol_type = other DNA
cgggcatttcagtatttatgagcgcattctgcataaactggaaggcaacgggcagctcgctcgcgccgcgaagat

SEQ ID NO: 710573 - DNA, 75 bp, synthetic construct
  source 1..75: mol_type = other DNA
tttacaggaaaaatttatctataaaaggtatagaagagacgccggaagttatccgttgtgtgctgcaatgatggt

SEQ ID NO: 710574 - DNA, 75 bp, synthetic construct
  source 1..75: mol_type = other DNA
cgaccggatcaggacgctctggagttatgccgtgaacacggtcgtgaaattgcccgtcaatgggcgctttcgccg

SEQ ID NO: 710575 - DNA, 75 bp, synthetic construct
  source 1..75: mol_type = other DNA
gtcagatccccccaacaaatccgtagctttacgtcaaaagacggaaacagttacatcgaaatgccgtataccaaa

SEQ ID NO: 710576 - DNA, 75 bp, synthetic construct
  source 1..75: mol_type = other DNA
agcctgggcagcacaacaatgactacctccactcagccattaacgctgaataacctcatgtggcagggagatatc

SEQ ID NO: 710577 - DNA, 75 bp, synthetic construct
  source 1..75: mol_type = other DNA
tggaagcgcgctttgtgctggaagataagctgattctactggtgcttgacgccgcccgcgtcaaacatcctgctt

SEQ ID NO: 710578 - DNA, 75 bp, synthetic construct
  source 1..75: mol_type = other DNA
aacatattgaagatgcactagctacagattacgccttcggtactaatgattgcaatatcgtagctttacgtattg

SEQ ID NO: 710579 - DNA, 75 bp, synthetic construct
  source 1..75: mol_type = other DNA
atcggtgtgttactggagatctggctcggagccagcgctggcagtaaacctgaacaagattttgctgctttaggc

SEQ ID NO: 710580 - DNA, 75 bp, synthetic construct
  source 1..75: mol_type = other DNA
gcgtcgaattttgattttataggcagccacgaaagcacgttctacgaactggacggcgagtggtatcacgagata

SEQ ID NO: 710581 - DNA, 75 bp, synthetic construct
  source 1..75: mol_type = other DNA
cgccgttttgtgaataactcttaccttcatctgggggtattcagcggacgcgatctggttggcgttctccagtgg

SEQ ID NO: 710582 - DNA, 75 bp, synthetic construct
  source 1..75: mol_type = other DNA
caatcagtcagtctattcagaaactgcgcgttatattccctgacccattgtttattcgcaaaggccagggtgtca

SEQ ID NO: 710583 - DNA, 75 bp, synthetic construct
  source 1..75: mol_type = other DNA
caaacgcgtactgtggataccggttgaaggcgagcgcagcatcccgctggcgcagcgtcgcgttggatcaccgtt

SEQ ID NO: 710584 - DNA, 75 bp, synthetic construct
  source 1..75: mol_type = other DNA
gtggaactcaaaactatacctgtcgatactcttggtcgcccgctggaaacgacattcgtttgtgttgcaccgtta

SEQ ID NO: 710585 - DNA, 75 bp, synthetic construct
  source 1..75: mol_type = other DNA
atggaaggctggcagcgcgcatttgtcctgcatagtcgcccgtggagcgaaaccagcctgatgctggacgtcttc

SEQ ID NO: 710586 - DNA, 75 bp, synthetic construct
  source 1..75: mol_type = other DNA
gtcatctgacggaacacatcgtttaccagggggatgagctaaaacgggaagaagatctggatgtcgttctgaagg

SEQ ID NO: 710587 - DNA, 75 bp, synthetic construct
  source 1..75: mol_type = other DNA
gcgatgaacgcgattaagcgcggaggtcaacgaggcgagtatttgcgggctaataaggaacgggccgtggtacac

SEQ ID NO: 710588 - DNA, 75 bp, synthetic construct
  source 1..75: mol_type = other DNA
tttttttcgattatttgcattgtatccaggcactggcagggatcacaggtacgccagaaccggcgttgcgtcgtt

SEQ ID NO: 710589 - DNA, 75 bp, synthetic construct
  source 1..75: mol_type = other DNA
cgcgcgggaatttcctgacgcagacacactgcgcgccgcgaaacgctttacccgcatggcgcttaagccgtatct

SEQ ID NO: 710590 - DNA, 75 bp, synthetic construct
  source 1..75: mol_type = other DNA
tggcggtaaacctttaaaaagcagggaactgttccggcagtttatacctaagcggacagtgaaaacatttaatga

SEQ ID NO: 710591 - DNA, 75 bp, synthetic construct
  source 1..75: mol_type = other DNA
aactttcgtcagcggaattagccatgctggacaaagcgtatccggcaccaaaaggaaaaactgcgctggatatgg

SEQ ID NO: 710592 - DNA, 75 bp, synthetic construct
  source 1..75: mol_type = other DNA
cgcttacgtaatggtttgctaaaaaacgcagtggtcaacgaaatagctcatgctcacaatgccactgccgcgcaa

SEQ ID NO: 710593 - DNA, 75 bp, synthetic construct
  source 1..75: mol_type = other DNA
cagtccattagcccaggccgggcggttgcgcaatggactgttaaaaaacgcggtagtcaacgaaattgcacatgc

SEQ ID NO: 710594 - DNA, 75 bp, synthetic construct
  source 1..75: mol_type = other DNA
gatgccgctgagtttcttgatgcgggcagttataagcatgtacaacgctgggcgaaagaagtgggcgaacgtccg

SEQ ID NO: 710595 - DNA, 75 bp, synthetic construct
  source 1..75: mol_type = other DNA
gtgaagcatatatagtgacgattgaaaaaggaaagccaggacagacggtaacctggtaccaactcagagccatca

SEQ ID NO: 710596 - DNA, 75 bp, synthetic construct
  source 1..75: mol_type = other DNA
aactttcgtcagcggaattagctatgctggataaagcgtatccggcaccaaaaggaaaaactgcgctggatatgg

SEQ ID NO: 710597 - DNA, 75 bp, synthetic construct
  source 1..75: mol_type = other DNA
cgttttatggtgaaaaaccgggtgccgataagatggtgactttcgcctttatttgggtggcgctggcaatttttg

SEQ ID NO: 710598 - DNA, 75 bp, synthetic construct
  source 1..75: mol_type = other DNA
aactcagtaaagaaagagcttcaagaaaaggttcttcttcatcctcttccggtggaggctcaagtggcggcggat

SEQ ID NO: 710599 - DNA, 75 bp, synthetic construct
  source 1..75: mol_type = other DNA
cggagacgataccattgaacaatatgcaacacgcgtttttgatagctggaaactgggagataagcagcgaaacga

SEQ ID NO: 710600 - DNA, 75 bp, synthetic construct
  source 1..75: mol_type = other DNA
atgagaaaaatcacgaccttgtcagagttacaggagatgaatatgagtattgaattaagatcgtcttatgaatat

SEQ ID NO: 710601 - DNA, 75 bp, synthetic construct
  source 1..75: mol_type = other DNA
tgtggctgctgcccgtggcggcgatttacctgtttgctattgccgacagctcaaccagccatatggggcaaaacc

SEQ ID NO: 710602 - DNA, 75 bp, synthetic construct
  source 1..75: mol_type = other DNA
gggaaagcagagaaatacccggcgcttcagtcactgatatcaacgaccagcctgaatctgaaagagatcgaaatc

SEQ ID NO: 710603 - DNA, 75 bp, synthetic construct
  source 1..75: mol_type = other DNA
attcgctgggaacgccgaacggtcagaaagtgacgattatgctcgaagaactactcgcactgggcgttactggtg

SEQ ID NO: 710604 - DNA, 75 bp, synthetic construct
  source 1..75: mol_type = other DNA
aaagatgtcggattcagtcgggagaacgtggagcacataatttacgcgcagtgcgccctgctggacgaaacggtc

SEQ ID NO: 710605 - DNA, 75 bp, synthetic construct
  source 1..75: mol_type = other DNA
tgattcatttaaggcgcttccttctcctattcagatcttccttctgtggattttttatcaagtggtgcttggcgc

SEQ ID NO: 710606 - DNA, 75 bp, synthetic construct
  source 1..75: mol_type = other DNA
caaagcaacaattaattaaagaaaacaaagaaattagttgggaagatctcaatggttttcgttttataactggtg

SEQ ID NO: 710607 - DNA, 75 bp, synthetic construct
  source 1..75: mol_type = other DNA
tgcgtggtgagcacgttggtgattcatgctttagagatcaatctggacgctcttattatttatgccaatggcatc

SEQ ID NO: 710608 - DNA, 75 bp, synthetic construct
  source 1..75: mol_type = other DNA
ggaaccaccgtgcgtcacggtatggagctgtatcgccactgccagcggcagggggagggggtccgcgaacgcctg

SEQ ID NO: 710609 - DNA, 75 bp, synthetic construct
  source 1..75: mol_type = other DNA
agcgtatgaagcaggtgttacaggaacccgcgcctgcacatgctgtgctgacctgctttcaccgagtcctgttac

SEQ ID NO: 710610 - DNA, 75 bp, synthetic construct
  source 1..75: mol_type = other DNA
gcgggcgatgagtacaccattgctgatatggcaatctggccgtggtttggcaacgtggtgttaggcggcgtgtat

SEQ ID NO: 710611 - DNA, 75 bp, synthetic construct
  source 1..75: mol_type = other DNA
ctgctcgacgtgctggataagcaactggcgcagcataagtttgttgcgggcgatgagtacaccattgcggatatg

SEQ ID NO: 710612 - DNA, 75 bp, synthetic construct
  source 1..75: mol_type = other DNA
gcagtgaagcgtgggcgtattgttaaccgcaccaacgggccgctgaacgagcagttgcatgagcgccatgacgcc

SEQ ID NO: 710613 - DNA, 75 bp, synthetic construct
  source 1..75: mol_type = other DNA
cgttgcgaaaccagttagagatacttaataaacaggctggtttaaataacatgcaggcgatgcttaatgaattaa

SEQ ID NO: 710614 - DNA, 75 bp, synthetic construct
  source 1..75: mol_type = other DNA
aacaattggctagtatgccgaacttggctggaataggcagcaagtatcgtgaacatatcgcgattttacagaaac

SEQ ID NO: 710615 - DNA, 75 bp, synthetic construct
  source 1..75: mol_type = other DNA
cttattcgcagcatgtgcaggtggacggcggccagattctgaaacccggcctttactggcacggcgtgcgcgact

SEQ ID NO: 710616 - DNA, 75 bp, synthetic construct
  source 1..75: mol_type = other DNA
cgccaacaggtgaccgatattactggtacgttaagcacgtctgaacaacaatcactgacacaacagctgcaggat

SEQ ID NO: 710617 - DNA, 75 bp, synthetic construct
  source 1..75: mol_type = other DNA
ggggaattgcgatctaactcaacagattgttgatattctgaaaaaaaataataaagatactcctatcatgcttag

SEQ ID NO: 710618 - DNA, 75 bp, synthetic construct
  source 1..75: mol_type = other DNA
cgcataacattactaataatggctcggatgagctagttgttatgctttgggcaaatgaaatatttaatcgttctg

SEQ ID NO: 710619 - DNA, 75 bp, synthetic construct
  source 1..75: mol_type = other DNA
cattcgctgggtcagcgcgcctccgctttaatgctgtttgttctgaatcagcaggataatgatgtggtgatcatc

SEQ ID NO: 710620 - DNA, 75 bp, synthetic construct
  source 1..75: mol_type = other DNA
tgtctctgaatatcagtcatcgtgaatctctctctttcgctgaaaagatgatggctgccattacgatcggttttt

SEQ ID NO: 710621 - DNA, 75 bp, synthetic construct
  source 1..75: mol_type = other DNA
tagaaggagcgaacgaaactggttacaggacatttggtccaatttattctgttactgttggtgaggtggcacaat

SEQ ID NO: 710622 - DNA, 75 bp, synthetic construct
  source 1..75: mol_type = other DNA
aacgcttatggaaagagtaaagcagttgcggaaaaaatcattcagcagtatggggaaacgacaaacgctaaatat

SEQ ID NO: 710623 - DNA, 75 bp, synthetic construct
  source 1..75: mol_type = other DNA
taaaatcatcagggcgatgaaaccccgcacgcaatttatctttgccactcacaatgccaatattccggtgctcgg

SEQ ID NO: 710624 - DNA, 75 bp, synthetic construct
  source 1..75: mol_type = other DNA
atctcagctccctgagcacgattgtggacggcgcccgccagcttctcacagaactcgatacaaagcagcaggctt

SEQ ID NO: 710625 - DNA, 75 bp, synthetic construct
  source 1..75: mol_type = other DNA
aactgtgggtggaagagtatcaggaaattgaagccgtgctggccggcatcagccaggctggttcgcccctgaaga

SEQ ID NO: 710626 - DNA, 75 bp, synthetic construct
  source 1..75: mol_type = other DNA
acagaggcgctgagccgattgtatgaactgtgggtggaagaatataaggaaattgaagccgtgttggccggcatc

SEQ ID NO: 710627 - DNA, 75 bp, synthetic construct
  source 1..75: mol_type = other DNA
acctcggttccctgaacaccatcgtagacggcgcccgccggctcctcacagaactcgatacgaagcagcaggctt

SEQ ID NO: 710628 - DNA, 75 bp, synthetic construct
  source 1..75: mol_type = other DNA
cgtgcacacgctcgtggtgtttgctgatgagtggtttatcaatccacagcagacgaaccatattgaaagtttcct

SEQ ID NO: 710629 - DNA, 75 bp, synthetic construct
  source 1..75: mol_type = other DNA
atcgtagccggctggcatttcggctgggtgcttggggcagtggtggtggttctcggagcctgtaatttcatatgt

SEQ ID NO: 710630 - DNA, 75 bp, synthetic construct
  source 1..75: mol_type = other DNA
aacttctggataatcagtgccgttgcagagcaactgggcgcgttatctgtggtggctgattttacccgtccacat

SEQ ID NO: 710631 - DNA, 75 bp, synthetic construct
  source 1..75: mol_type = other DNA
gcaacctcattggtataagcctgtacctcaagtaaagcgaaaatatggtgttgcattttttggtggctactatgg

SEQ ID NO: 710632 - DNA, 75 bp, synthetic construct
  source 1..75: mol_type = other DNA
attttgcctttaactccctttgattggcgttggaaattacgcttgtttaaacctgattttttgtttgttgaatct

SEQ ID NO: 710633 - DNA, 75 bp, synthetic construct
  source 1..75: mol_type = other DNA
tctgcctggcgaggatataaaaatagctggcaaggtaaaattgccagctatgggcatacatctcccactaaaccc

SEQ ID NO: 710634 - DNA, 75 bp, synthetic construct
  source 1..75: mol_type = other DNA
ggtggctcaagtggcggcggatttagcggcgggggcggttcttctggcggtggcggcgcgtccggtcgctggtaa

SEQ ID NO: 710635 - DNA, 75 bp, synthetic construct
  source 1..75: mol_type = other DNA
aacttctggataatcagtgccgttgcagagcaactgggcgtgttatccgttgaggctgattttacccgtccacat

SEQ ID NO: 710636 - DNA, 75 bp, synthetic construct
  source 1..75: mol_type = other DNA
gcgaaaggcacgctgaatggtgttccggcggtaatgccgggcatgtggggcgatcatcttggtgtggtcgacttg

SEQ ID NO: 710637 - DNA, 75 bp, synthetic construct
  source 1..75: mol_type = other DNA
tataaggcattaaatacgctggactataccgtcggcacgcttggcaaccatgagtttaactacggtctggattac

SEQ ID NO: 710638 - DNA, 75 bp, synthetic construct
  source 1..75: mol_type = other DNA
acgccgttttcccaagtaaagattttgctgatatcgaaggagctgatatcgcgaaaggcacgctgaatggtgttc

SEQ ID NO: 710639 - DNA, 75 bp, synthetic construct
  source 1..75: mol_type = other DNA
gggatatcgcgaaggtaaggcagtgcatgtttcgccaggggcgttagatgctgaaacttatggtgtgaagtcgac

SEQ ID NO: 710640 - DNA, 75 bp, synthetic construct
  source 1..75: mol_type = other DNA
ctggaaaatctcaatggtatctataacctacgctttgtcagcgaaccagataacggtatctacgacgccatgaac

SEQ ID NO: 710641 - DNA, 75 bp, synthetic construct
  source 1..75: mol_type = other DNA
cagagccgggagacatccggcgttttgttcagcaggcggtggaccactggccgcatttgctggcattttacttca

SEQ ID NO: 710642 - DNA, 75 bp, synthetic construct
  source 1..75: mol_type = other DNA
gtgattttcacccgtcggcaaaatattctcagcgtgatattgagctggcgcggcaactgcatcagagaggcatgc

SEQ ID NO: 710643 - DNA, 75 bp, synthetic construct
  source 1..75: mol_type = other DNA
gttccccgccgtgagatcgcggaaaaactcgaaatgcccctgagcatgattaatcagtacgtttatttcgaaagg

SEQ ID NO: 710644 - DNA, 75 bp, synthetic construct
  source 1..75: mol_type = other DNA
gacatacagacacgggaactggtgatgctgatcaaacgactggcatcttctctgaaagcggtgaaaccggacagt

SEQ ID NO: 710645 - DNA, 75 bp, synthetic construct
  source 1..75: mol_type = other DNA
gggtattagtatgatgttacggggtgattatcaccagtcagcaaaatatccgcagagtgatattgagctggcgcg

SEQ ID NO: 710646 - DNA, 75 bp, synthetic construct
  source 1..75: mol_type = other DNA
atgtcccggcgtgaaatagccggaaaattcgggatgaagttgcgcacagtgaataactacgtttatttcgacagg

SEQ ID NO: 710647 - DNA, 75 bp, synthetic construct
  source 1..75: mol_type = other DNA
aaagaagggaaattgccagaaaattaggcatgccgctgcgcatagtgaataactacgtttatttcgacaggaggg

SEQ ID NO: 710648 - DNA, 75 bp, synthetic construct
  source 1..75: mol_type = other DNA
atggtcagctataatgtgactaatgtgtgggagctaatcgtcttgtatcttttggtctttgtagtattagcattt

SEQ ID NO: 710649 - DNA, 75 bp, synthetic construct
  source 1..75: mol_type = other DNA
cgcctgcaataagctcttacagctaaacgaggaggactccgaatggttaagccaggagattaaagataataacag

SEQ ID NO: 710650 - DNA, 75 bp, synthetic construct
  source 1..75: mol_type = other DNA
atcatcgccggtggtattacgctggttgcgggaacaacatggaggagcaacaatgcgatgcctgttgctgctcag

SEQ ID NO: 710651 - DNA, 75 bp, synthetic construct
  source 1..75: mol_type = other DNA
atggtcagctataatgtgactaatgtgtgggagctaatcgtttttttcctttgtagctttgcagtattagcattt

SEQ ID NO: 710652 - DNA, 75 bp, synthetic construct
  source 1..75: mol_type = other DNA
ttgcacattatttcaattttggatattcagacaaaaattaaaagacttgaccgcgagtggcgcgacattcaacta

SEQ ID NO: 710653 - DNA, 75 bp, synthetic construct
  source 1..75: mol_type = other DNA
tatgtttatagtgacaaagttcttttatccttcaaaaataaaacagttgaatttaataaaacttatagccttgcc

SEQ ID NO: 710654 - DNA, 75 bp, synthetic construct
  source 1..75: mol_type = other DNA
tcctggtactccggcagtgtgcgggaacgatgaaggtaaaaagcatcggtagtctgattggtcgtagtgaggtgg

SEQ ID NO: 710655 - DNA, 75 bp, synthetic construct
  source 1..75: mol_type = other DNA
gtactggcctcctaccgccaaccggcagtaaaccttgcctaccaggtaaaaggaactcgtgttgttttaattctg

SEQ ID NO: 710656 - DNA, 75 bp, synthetic construct
  source 1..75: mol_type = other DNA
cggcgctgttcttgagcagcaagctagcgaggcagacgccgaggagcggggcgaagatcagttgaccacctcagc

SEQ ID NO: 710657 - DNA, 75 bp, synthetic construct
  source 1..75: mol_type = other DNA
caatgccgggtggaaaggtgttttcgggttgtccggcctgatacatcagagcaatacattgcgttaaaaacggct

SEQ ID NO: 710658 - DNA, 75 bp, synthetic construct
  source 1..75: mol_type = other DNA
atccggcaacgcgcacaggataacaaatgtgccattcatgtcagatgcggcgtaaacgccttatctgacctacgt

SEQ ID NO: 710659 - DNA, 75 bp, synthetic construct
  source 1..75: mol_type = other DNA
aatcgggctattcaacaccatgtcctgttcacggatgagatgacattaattcgccgaaaggaaaatccgcttctt

SEQ ID NO: 710660 - DNA, 75 bp, synthetic construct
  source 1..75: mol_type = other DNA
ccaatggtaagacctcactcgcaattcctatacctgaaaatttataatagcggtaagacaccagccctgaatgta

SEQ ID NO: 710661 - DNA, 75 bp, synthetic construct
  source 1..75: mol_type = other DNA
ttgcgactttcattgcgcccaagctgtttactcaacaggaaaaagaggctgccagtagtgccattgtggtcggtg

SEQ ID NO: 710662 - DNA, 75 bp, synthetic construct
  source 1..75: mol_type = other DNA
ggtatctttgacccgctgatcggcctgatgtcgccggtaggttcgttttatctggtgctggcgattggcctcgcg

SEQ ID NO: 710663 - DNA, 75 bp, synthetic construct
  source 1..75: mol_type = other DNA
ccaccggtcttattaactgtattgcgttttcagcacaggcagtggatacgacgattactgtgacgggtaatgttt

SEQ ID NO: 710664 - DNA, 75 bp, synthetic construct
  source 1..75: mol_type = other DNA
tagacgccttcgacgaagccgatccggacgcagcgttcgagcagggactcgcggtgattgtcgatggattggcga

SEQ ID NO: 710665 - DNA, 75 bp, synthetic construct
  source 1..75: mol_type = other DNA
ggttggaaagctgttttcaggttgaccgttcaggtacattagatcagttcgttgtgctaaagacaactgttcagt

SEQ ID NO: 710666 - DNA, 75 bp, synthetic construct
  source 1..75: mol_type = other DNA
ccgatgattaccgccaacacgctggcgggcggtattaccggcgtgctggtgatcactttcggaatcaaacggctg

SEQ ID NO: 710667 - DNA, 75 bp, synthetic construct
  source 1..75: mol_type = other DNA
atgatgttacgtggtgattttcacccgtcggcaaaatattctcagcgtgatattgagctggcgcggcaactgcat

SEQ ID NO: 710668 - DNA, 75 bp, synthetic construct
  source 1..75: mol_type = other DNA
gaaaatccgcgcggtggtaaaaggtgcgatggaagaaagtggtgcggtactgatcaagcgctacggctttgacgc

SEQ ID NO: 710669 - DNA, 75 bp, synthetic construct
  source 1..75: mol_type = other DNA
ccgtcatagctatcaggttcatgtggttggtgaaaccgagcaggtagataccgtttccggcgtcaatgctgtcag

SEQ ID NO: 710670 - DNA, 75 bp, synthetic construct
  source 1..75: mol_type = other DNA
gagcgcgatgaactggcaaaactccttgagcaattcatcgctaaagaaatgcgaccatgggtaagcacatatccg

SEQ ID NO: 710671 - DNA, 75 bp, synthetic construct
  source 1..75: mol_type = other DNA
cggcctgccgcataaaaacctgattcagggcattgccgcagcaatgcatttccgcagtgaagatgatccgcaggc

SEQ ID NO: 710672 - DNA, 75 bp, synthetic construct
  source 1..75: mol_type = other DNA
gcgcagatttctggccttgatgctaacagcgaggttgtatccgaggcggtaaccgcttataaagcaatgcaataa

SEQ ID NO: 710673 - DNA, 75 bp, synthetic construct
  source 1..75: mol_type = other DNA
cgtatctgaaagatgatgtagagcgcgtaggccgtcagccgctgcgtaaactgagtgctggcgaccgtctgatca

SEQ ID NO: 710674 - DNA, 75 bp, synthetic construct
  source 1..75: mol_type = other DNA
gggttcaatcatgcaatagaacggatgaggagacagatacctgtgattgacaaagcagaaagccgactttgcgag

SEQ ID NO: 710675 - DNA, 75 bp, synthetic construct
  source 1..75: mol_type = other DNA
cgttgatctgcagatccgcatcatgaatgacgagaacttccagcatggtggcactaatatccactatctggagaa

SEQ ID NO: 710676 - DNA, 75 bp, synthetic construct
  source 1..75: mol_type = other DNA
cggcatgttgagcgcctggcggattatcccaccgtggcgattggcggtatcagtctggcgcgcgcgcctgcggta

SEQ ID NO: 710677 - DNA, 75 bp, synthetic construct
  source 1..75: mol_type = other DNA
gcaatctgtaccaaaaactcggtgtcgcccaccgtcaggctgccgtgcagcacgcgcagaaactgctgaagatga

SEQ ID NO: 710678 - DNA, 75 bp, synthetic construct
  source 1..75: mol_type = other DNA
gtgagcaagattgactatcaggcactgcgtgaggcagcacaaaactatcaatcgacgctggcgtggtatcaggaa

SEQ ID NO: 710679 - DNA, 75 bp, synthetic construct
  source 1..75: mol_type = other DNA
gctaatgcgccggaaggtgattttgaccgctcattctctgatggcgttctcgaagatatcgccgcccagcttcga

SEQ ID NO: 710680 - DNA, 75 bp, synthetic construct
  source 1..75: mol_type = other DNA
agccactgctcggtacgctggaatacggcctcccgtacaaaaatctgattcagggaattgccgctgcaatgcact

SEQ ID NO: 710681 - DNA, 75 bp, synthetic construct
  source 1..75: mol_type = other DNA
ataaaactgtcagaatctcagtaattggtgctgcattgatggtattgattgttgtcatcagtcaatcaatcttta

SEQ ID NO: 710682 - DNA, 75 bp, synthetic construct
  source 1..75: mol_type = other DNA
agtagtgtggtgcgtgaagcgcaggactggctgtgcgacagaaaacttgtggatatcacagatattctccggtga

SEQ ID NO: 710683 - DNA, 75 bp, synthetic construct
  source 1..75: mol_type = other DNA
gggcgtcggaaatgagagtccctctgctccgccggagacaatgccggacatacagacacgggaactggttatgtt

SEQ ID NO: 710684 - DNA, 75 bp, synthetic construct
  source 1..75: mol_type = other DNA
gggagcgtttgaggaatctgcagatcggcttgtttcgacctttattacactgaaaagatatttccagtatgatga

SEQ ID NO: 710685 - DNA, 75 bp, synthetic construct
  source 1..75: mol_type = other DNA
tgtacgaggtgatggtactgcgccagttgatagcaaagcgcggcatgctgcccgaaaagatgaaatgtttcttcc

SEQ ID NO: 710686 - DNA, 75 bp, synthetic construct
  source 1..75: mol_type = other DNA
ctggcgtcacagcgtgcttacatacgtgccacttctatctcttgtgttaattcaaaagggaaagcttttgacgta

SEQ ID NO: 710687 - DNA, 75 bp, synthetic construct
  source 1..75: mol_type = other DNA
tttagtcgctttttatttatcaaaaacctgaacatgattgttttggacagaattcactatgaggtgttgatgtga

SEQ ID NO: 710688 - DNA, 75 bp, synthetic construct
  source 1..75: mol_type = other DNA
ggaacgcattgctccggcaatcgccaaagggctggtgaaacgtaaagagcaaggtaatgaatccccgctgaacat

SEQ ID NO: 710689 - DNA, 75 bp, synthetic construct
  source 1..75: mol_type = other DNA
tggcttgccgcacaaaaatctgattgaaggtattgccgctgcaatgcatttccgcagtgaagatgatccgcaggc

SEQ ID NO: 710690 - DNA, 75 bp, synthetic construct
  source 1..75: mol_type = other DNA
cgtgatgtcgagaaaaacgtattaagccgcgcgctttaccaggttttggcgcagcgtgtatttgtttacggtaac

SEQ ID NO: 710691 - DNA, 75 bp, synthetic construct
  source 1..75: mol_type = other DNA
tctctggttgagcgttttgatattccgtttgagctggtaagtcatgaaggattaagccgcaacgagcacgatcaa

SEQ ID NO: 710692 - DNA, 75 bp, synthetic construct
  source 1..75: mol_type = other DNA
taaaactttatttgaaggacagaaagttgaattcgccattcagatcggagataaaggtcctgctgctgcaaacgt

SEQ ID NO: 710693 - DNA, 75 bp, synthetic construct
  source 1..75: mol_type = other DNA
tacgttcacgcgactccgctgatccgccgtctggcacgcgagtttggcgttaacctggcgaaagtgaagggcact

SEQ ID NO: 710694 - DNA, 75 bp, synthetic construct
  source 1..75: mol_type = other DNA
cgacaaggcttctatggaagttccggctccgtttgctggcaccgtgaaagagatcaaagtgaacgtgggtgacaa

SEQ ID NO: 710695 - DNA, 75 bp, synthetic construct
  source 1..75: mol_type = other DNA
agatcaaagtgaacgtgggtgacaaagtgtctaccggctcgctgattatggtcttcgaagtcgcgggtgaagctg

SEQ ID NO: 710696 - DNA, 75 bp, synthetic construct
  source 1..75: mol_type = other DNA
gacgatatatgtgggcttgctttaacttgcattggacacttggcaagaataaatggtaaaatagataaagaaaaa

SEQ ID NO: 710697 - DNA, 75 bp, synthetic construct
  source 1..75: mol_type = other DNA
aaagctgaagggtttgttgaagggtgtctggcaatgctcgaggtatctttagaaatggattgttatatgaatcac

SEQ ID NO: 710698 - DNA, 75 bp, synthetic construct
  source 1..75: mol_type = other DNA
ggaagcggcagcgccggctccggcagcaaaagctgaagccccggcagcagctccggctgcgaaagccgaaggcaa

SEQ ID NO: 710699 - DNA, 75 bp, synthetic construct
  source 1..75: mol_type = other DNA
atgtcaatcgaatctctcaatgcgttctcaatggattttttctccctgaaaggtaaaacagcaattgttaccggc

SEQ ID NO: 710700 - DNA, 75 bp, synthetic construct
  source 1..75: mol_type = other DNA
ctatgagtaaaaaaaataacaggatttttgctaacataacctttactaacaatagctctaccacgtatttttttc

SEQ ID NO: 710701 - DNA, 75 bp, synthetic construct
  source 1..75: mol_type = other DNA
atacgggtttgggcttgagagagatatcaaaggaaggccattaatttatcctatcgaaaattatgatgagtgtaa

SEQ ID NO: 710702 - DNA, 75 bp, synthetic construct
  source 1..75: mol_type = other DNA
gtaacttcgacaaagggtatgtagaagcagaactggatattaatccggatctgtggttcttcggttgccacttca

SEQ ID NO: 710703 - DNA, 75 bp, synthetic construct
  source 1..75: mol_type = other DNA
gcctctggtcgcggtgaactgtttggcgctaaaggcccgcaattgccagcaccgaacatgctgatgatggaccgt

SEQ ID NO: 710704 - DNA, 75 bp, synthetic construct
  source 1..75: mol_type = other DNA
tggttctatggtgcgacgctttctgcaatgcactttgtgcgcgttctggataacgccatcggaggtaaagcgtga

SEQ ID NO: 710705 - DNA, 75 bp, synthetic construct
  source 1..75: mol_type = other DNA
tgaccactaaccctttctgctttgcctggccgttcagtgatgggcgtccgccgattctggttgattttgccacca

SEQ ID NO: 710706 - DNA, 75 bp, synthetic construct
  source 1..75: mol_type = other DNA
gctttaacttgccagtcgatatgatagcgacctctcacggcgtggtatggcgcgataacccgacgcaaattgtcg

SEQ ID NO: 710707 - DNA, 75 bp, synthetic construct
  source 1..75: mol_type = other DNA
catctgttcaacgatgaagtggatcagaccgagcttttcgaacagtgccagcgttactacgccaatatcctgacg

SEQ ID NO: 710708 - DNA, 75 bp, synthetic construct
  source 1..75: mol_type = other DNA
ttcattgggtgggtcaacgtgactgggaagtgcgtgattttcacggtacagaatataaaacgctgcgcggcagca

SEQ ID NO: 710709 - DNA, 75 bp, synthetic construct
  source 1..75: mol_type = other DNA
cgataaatggtcatcaccatcatccggagtggaattttaatgtggtgaaaactggcgacacgctggatatcggca

SEQ ID NO: 710710 - DNA, 75 bp, synthetic construct
  source 1..75: mol_type = other DNA
ggcgcaaattccggatacgccgatctactgcactgcaaacgcgatcgattcgataaatggtcatcaccatcatcc

SEQ ID NO: 710711 - DNA, 75 bp, synthetic construct
  source 1..75: mol_type = other DNA
tttcggctcccacggctggagcggcggtgcggttgatcgtctttctacgcgcttgcaggatgcaggcttcgaaat

SEQ ID NO: 710712 - DNA, 75 bp, synthetic construct
  source 1..75: mol_type = other DNA
gcgtcaacctgaagaagtttcaggctgatatccgtcgtgaggctcgtgaagagctacagcgcgaacaagctgcgg

SEQ ID NO: 710713 - DNA, 75 bp, synthetic construct
  source 1..75: mol_type = other DNA
gaaaatcagggttcaacaaagtcccagcgctatcgcaatgatgaaagcacttggtggtgtcgctacccctatggc

SEQ ID NO: 710714 - DNA, 75 bp, synthetic construct
  source 1..75: mol_type = other DNA
ccgattctggttgattttgctaccagtagcatggcgctgaataaagcacgggtgatgtcggctgccgggaagcag

SEQ ID NO: 710715 - DNA, 75 bp, synthetic construct
  source 1..75: mol_type = other DNA
gagcgaaaccaatacccgttcttataaaaaaggtctgcgcaccccgggtcaggcaaccgttgctcttaacgccga

SEQ ID NO: 710716 - DNA, 75 bp, synthetic construct
  source 1..75: mol_type = other DNA
ccagactgaactgtttgagtctatcgtccagttgcaggaagccgaagatggcaagattgacccgcaggagcgtgt

SEQ ID NO: 710717 - DNA, 75 bp, synthetic construct
  source 1..75: mol_type = other DNA
tgattttaggagatagtattgtaatctttgaagtgtctggggagcgaaagtttaagccattctatgaaagtaatg

SEQ ID NO: 710718 - DNA, 75 bp, synthetic construct
  source 1..75: mol_type = other DNA
taaccagcaccggacgacgtgttctcactgacgatggtcagccaggtatggggggaatccccggaattggatctt

SEQ ID NO: 710719 - DNA, 75 bp, synthetic construct
  source 1..75: mol_type = other DNA
acgttccagcaagggtactatttctataaaccggtgacgtatattgaactcgtcaaaattattctctcaaaaccg

SEQ ID NO: 710720 - DNA, 75 bp, synthetic construct
  source 1..75: mol_type = other DNA
ggtacagaggccgcgctgaaaccccatctgcggacgatcatcattctcaaacaaggtgctgtctggtgtacatcg

SEQ ID NO: 710721 - DNA, 75 bp, synthetic construct
  source 1..75: mol_type = other DNA
cacagtttcgttggccgcgtaaacgcagacccagaatcaactcggattctggattgtgtattggatctggcgcgt

SEQ ID NO: 710722 - DNA, 75 bp, synthetic construct
  source 1..75: mol_type = other DNA
cgcagggggtagagatgtacgcagataacctcgacaacgtagcagacgacgcagaacgaggtggttttgattatg

SEQ ID NO: 710723 - DNA, 75 bp, synthetic construct
  source 1..75: mol_type = other DNA
aggcgtttaatgacctttgctcggcgttcgttaaacacgcgaatctcgcgggaatggatgatggtgagctagtga

SEQ ID NO: 710724 - DNA, 75 bp, synthetic construct
  source 1..75: mol_type = other DNA
gtgataacagatgtctggaaatataggggcaaatccagtaatttactgttggctccggcaatcgacaccgttaat

SEQ ID NO: 710725 - DNA, 75 bp, synthetic construct
  source 1..75: mol_type = other DNA
gtgcctatcctgtgacgttaaaaatctaccataatggccagttgtcccgggtgatgacacaatattttcgcaata

SEQ ID NO: 710726 - DNA, 75 bp, synthetic construct
  source 1..75: mol_type = other DNA
acattgagggcgttttacctgacccccggagcggcagggaatacctgacactgccatgttcagagggggctaacg

SEQ ID NO: 710727 - DNA, 75 bp, synthetic construct
  source 1..75: mol_type = other DNA
gggtggcgcatctggcatcgacgcatgcctgccggatgcggcataaacgccttatccggcctacgattcaggcac

SEQ ID NO: 710728 - DNA, 75 bp, synthetic construct
  source 1..75: mol_type = other DNA
gtgacagttttacccgtcacgatttaaacctcgttctggaagttaccgagcgtgagccattaaatgttgatgaaa

SEQ ID NO: 710729 - DNA, 75 bp, synthetic construct
  source 1..75: mol_type = other DNA
ctggatgattttggtacggggtactcgggactttcttatctccatgatctgcacatcgattatattaagattgat

SEQ ID NO: 710730 - DNA, 75 bp, synthetic construct
  source 1..75: mol_type = other DNA
gaaccaggtcgccacacaaatgaacgcgatcgcaagtaaactgccggaaggtttccatgtagggattaattttag

SEQ ID NO: 710731 - DNA, 75 bp, synthetic construct
  source 1..75: mol_type = other DNA
tccggcgctaaatatgttagcggcgctgatgttcttgtcgttgtgtctgacttcgtaactgctgattcaaataaa

SEQ ID NO: 710732 - DNA, 75 bp, synthetic construct
  source 1..75: mol_type = other DNA
agagggtctgaaattatctgagtggatgtcgcggcatctcgacgctgtctgtgataccgcagatgagattcataa

SEQ ID NO: 710733 - DNA, 75 bp, synthetic construct
  source 1..75: mol_type = other DNA
cgggttcgtggagtgtgatgctaatgcccaggtaatctgggaagcctgccgtgatgccattcttaacggagacaa

SEQ ID NO: 710734 - DNA, 75 bp, synthetic construct
  source 1..75: mol_type = other DNA
ttaccgaagcgtgttagaagatgagatgctcactttgcttaatgctggaggtcaacttgaagttaaatacccata

SEQ ID NO: 710735 - DNA, 75 bp, synthetic construct
  source 1..75: mol_type = other DNA
tattgagtttgcaaattcactagcttgtagatacgggctaaaacgaccaaatggtattgaggcatattttgctaa

SEQ ID NO: 710736 - DNA, 75 bp, synthetic construct
  source 1..75: mol_type = other DNA
ttgagaaacaggcttttcacgatctgataatatctctaagagaaaaaagtgaaatatacgattcaatacccttct

SEQ ID NO: 710737 - DNA, 75 bp, synthetic construct
  source 1..75: mol_type = other DNA
tggaggatgaaaatcagcggctgaagaaactggtggctgatctgagtctggataaggagatgttgcaggaggtac

SEQ ID NO: 710738 - DNA, 75 bp, synthetic construct
  source 1..75: mol_type = other DNA
attcagtttgccagcgatgttatgttgacgcgctgtgagctgaccagcgaggcgaaggcggcagaagctgcaata

SEQ ID NO: 710739 - DNA, 75 bp, synthetic construct
  source 1..75: mol_type = other DNA
atgcggagacttgatcaccagcactggcgctaaatatgaatcaggagatgatatctatgttgttatgagtgaatt

SEQ ID NO: 710740 - DNA, 75 bp, synthetic construct
  source 1..75: mol_type = other DNA
tgtttccagttcgcaaatcatttaccgatatcgtttcatatgcaactgatgagttcggttgtgtgcaatctttta

SEQ ID NO: 710741 - DNA, 75 bp, synthetic construct
  source 1..75: mol_type = other DNA
atgaaaaccgaacaacgtcatgatcttgttaaagatattgaggtttttggcgtatccttgtctctgttgatttcc

SEQ ID NO: 710742 - DNA, 75 bp, synthetic construct
  source 1..75: mol_type = other DNA
atggtatggctcaaaaaggacaacgaatgccttcctgtatcaatataattggaggaccaagttcaactgccgata

SEQ ID NO: 710743 - DNA, 75 bp, synthetic construct
  source 1..75: mol_type = other DNA
aggtgttgtcttattctccgccccagaacgagggcgttcagtaagtcttttacctgaagcgtcggtgttcgtttt

SEQ ID NO: 710744 - DNA, 75 bp, synthetic construct
  source 1..75: mol_type = other DNA
ttgagcgagtcaccggctggttgtttttatcggtcattcccgtgggtttgcctgccgcgctacaaattgctgccg

SEQ ID NO: 710745 - DNA, 75 bp, synthetic construct
  source 1..75: mol_type = other DNA
cggaaggtattgccctgacactccggatgcccgaaggaaatcaaaaaccgcctttgattatcttatgtcacggat

SEQ ID NO: 710746 - DNA, 75 bp, synthetic construct
  source 1..75: mol_type = other DNA
cattctgtacttccttttatcgacaactgcatgaacgtattactgagagcaatcacactgccagtccatcatcgt

SEQ ID NO: 710747 - DNA, 75 bp, synthetic construct
  source 1..75: mol_type = other DNA
acgaacgtattacggagcgtaatcacactgcctgtccatcctcgccggtggtattacgctggttgcaggaacaac

SEQ ID NO: 710748 - DNA, 75 bp, synthetic construct
  source 1..75: mol_type = other DNA
cttgtggtttttcttcgcgattgcggtgatttatctggtttcaccgctgattcaggtgaagaacgtcggcggaaa

SEQ ID NO: 710749 - DNA, 75 bp, synthetic construct
  source 1..75: mol_type = other DNA
atcaatggcgatactttttactacatcctgtatggcatgttgggccgcgccattgggatgatggacacgcaacac

SEQ ID NO: 710750 - DNA, 75 bp, synthetic construct
  source 1..75: mol_type = other DNA
cagcccggcattatgatctttatgagggtgagttttttgaacgtgtcgttgcagtacagacgcaatggtttaaaa

SEQ ID NO: 710751 - DNA, 75 bp, synthetic construct
  source 1..75: mol_type = other DNA
tcttgaactggcggatacggtaagtgagctgcgccccatcaaacatgcgtttgatgccggtgttaaggcgcaaat

SEQ ID NO: 710752 - DNA, 75 bp, synthetic construct
  source 1..75: mol_type = other DNA
agatccctcactggatatggttttgctcgatgagctgacttatatggtcgcgtatgactatttgccacctgaaga

SEQ ID NO: 710753 - DNA, 75 bp, synthetic construct
  source 1..75: mol_type = other DNA
acggtaagtgagttacgccccgtgaaacatgcgtttgatgctggcgtaaaagcgcagatagggattgattactaa

SEQ ID NO: 710754 - DNA, 75 bp, synthetic construct
  source 1..75: mol_type = other DNA
aatattcataaaaacagaagaatgggcatatgaaagagagtggagaatttcaacctacgctaggccaaatagcac

SEQ ID NO: 710755 - DNA, 75 bp, synthetic construct
  source 1..75: mol_type = other DNA
ggttgagcatattcagatcctcgcctgcggtacttcttacaactccggtatggtttcccgttactggtttgaatc

SEQ ID NO: 710756 - DNA, 75 bp, synthetic construct
  source 1..75: mol_type = other DNA
ttctacaccgttcctctgcagttgctggcctatcacgttgctctgattaagggcactgacgttgaccagccacgt

SEQ ID NO: 710757 - DNA, 75 bp, synthetic construct
  source 1..75: mol_type = other DNA
gtaatttatctgatttcaccgctgattcaggtaaagaacgtcaacggtaaaatattgctggtattaatggcagtg

SEQ ID NO: 710758 - DNA, 75 bp, synthetic construct
  source 1..75: mol_type = other DNA
atgccttagagatcaatctggatgcactcatcatttatgccaacggcatctttattatgatttacctgctgtgca

SEQ ID NO: 710759 - DNA, 75 bp, synthetic construct
  source 1..75: mol_type = other DNA
gctgtacggtagtcgtcttacacttcgacgcctatggtgaaaaaatggccgcggcagcatcgcttccaaaaattg

SEQ ID NO: 710760 - DNA, 75 bp, synthetic construct
  source 1..75: mol_type = other DNA
taacccacaactgtttacctccggtaccacctatgatgcttcttccgtacctctctataaccgcctggttgaatt

SEQ ID NO: 710761 - DNA, 75 bp, synthetic construct
  source 1..75: mol_type = other DNA
ttagttttcccgattgcgatcgtgtttgcgattctgggtcgccactaccccagcgcgggcggtgtggcgcatttt

SEQ ID NO: 710762 - DNA, 75 bp, synthetic construct
  source 1..75: mol_type = other DNA
tctctatgcgctgatcatgctggcggggttatggctgtttctgccaaaacgaaaaacgccggaaaatggcataac

SEQ ID NO: 710763 - DNA, 75 bp, synthetic construct
  source 1..75: mol_type = other DNA
ccgccgcctggcatgcgagaaaagcgcaaatgcggcatcaacttcactgtcagatgcttttgcaccggcggcaat

SEQ ID NO: 710764 - DNA, 75 bp, synthetic construct
  source 1..75: mol_type = other DNA
agtttgtgctgactcgcccggaagcgccgttcctcgctgacctggcaatggacttcgcctctattctgtcaaaag

SEQ ID NO: 710765 - DNA, 75 bp, synthetic construct
  source 1..75: mol_type = other DNA
gttcaggctaaaactctggtttattgctcagaaggatctccggaagggtttaacccgcagctgtttacctccggt

SEQ ID NO: 710766 - DNA, 75 bp, synthetic construct
  source 1..75: mol_type = other DNA
tatgatatttataaaggcgcgttttttgaacgtgtggcggcagtacagacgcaatggtttaaaaaacatctttaa

SEQ ID NO: 710767 - DNA, 75 bp, synthetic construct
  source 1..75: mol_type = other DNA
cgaaagctttgctgaaagaagcgggtctggaaaaaggcttctccatcgatctgtgggcaatgccagtacaacgtc

SEQ ID NO: 710768 - DNA, 75 bp, synthetic construct
  source 1..75: mol_type = other DNA
agatggcgagcaccagacggtaatgatgggctggactggcgataacggggatccggataacttcttcgccaccct

SEQ ID NO: 710769 - DNA, 75 bp, synthetic construct
  source 1..75: mol_type = other DNA
cccgaacccggcagatatcgctcgcatgaagcaggataaatccatcaacctgatggaaatgccggggctgaacgt

SEQ ID NO: 710770 - DNA, 75 bp, synthetic construct
  source 1..75: mol_type = other DNA
tcgtcactatggcagttaccttgctgcatatgacggacataccgctaaaaatactaatgatacaaaacaggcatg

SEQ ID NO: 710771 - DNA, 75 bp, synthetic construct
  source 1..75: mol_type = other DNA
atgaaaatcaggcaaagtcagaccagtgccacttaccttttaccggatcccggagagctgaatcgccggataaag

SEQ ID NO: 710772 - DNA, 75 bp, synthetic construct
  source 1..75: mol_type = other DNA
atgaatctgccgtgcaaaacgttgttgaaagggttggatgaagctatcgcccggcgcggaactaaaactgaagat

SEQ ID NO: 710773 - DNA, 75 bp, synthetic construct
  source 1..75: mol_type = other DNA
gctggcgtgaaccggcaaaaacggctcaacaaagtaacattccggtgaccgttgaacgccagttgtattggctta

SEQ ID NO: 710774 - DNA, 75 bp, synthetic construct
  source 1..75: mol_type = other DNA
gccgtctgatcccgctcagtctcgcctggcgttcgcttgccgatcatcaaagtgccgccgctaacgacattcgtc

SEQ ID NO: 710775 - DNA, 75 bp, synthetic construct
  source 1..75: mol_type = other DNA
aattcgttctgcctcctgctcgttatgtgcgttcctatgcacctgcacagcaaagtgttgcggcagggagtgaat

SEQ ID NO: 710776 - DNA, 75 bp, synthetic construct
  source 1..75: mol_type = other DNA
caatatgcgtgggataaagcggcaaacagcaatcagccgctggcgcacacggttgtgctgctcaatagcggtggt

SEQ ID NO: 710777 - DNA, 75 bp, synthetic construct
  source 1..75: mol_type = other DNA
aagatgaggtattgaggctgaaacagattagtgggctgacggagttatttctggaagaagattttagtgatgcat

SEQ ID NO: 710778 - DNA, 75 bp, synthetic construct
  source 1..75: mol_type = other DNA
attggcacagagttgggtatggacttggatgaagtgctgagactgaaacagattagtgggctgacggagctgttt

SEQ ID NO: 710779 - DNA, 75 bp, synthetic construct
  source 1..75: mol_type = other DNA
gaacgtattggcacagagctggggatggaccaggatgaagtgctgagactgaaacagattagcgggctgacggag

SEQ ID NO: 710780 - DNA, 75 bp, synthetic construct
  source 1..75: mol_type = other DNA
cttcccctgctgttacgcccgctgtccgcgctctttcgcaaaatatgcaggcagaacagcttttatgtccgggag

SEQ ID NO: 710781 - DNA, 75 bp, synthetic construct
  source 1..75: mol_type = other DNA
ttgaaagctggcatgggacattaaccgggtttaaagttgagaatgggttagatggtaacgtatcagaacggggcg

SEQ ID NO: 710782 - DNA, 75 bp, synthetic construct
  source 1..75: mol_type = other DNA
atgcaaaacgataagttttttgaacggtatcaacccgtttttgaaatcgtatgtcgaatcctggggaacggctgg

SEQ ID NO: 710783 - DNA, 75 bp, synthetic construct
  source 1..75: mol_type = other DNA
tcgtggcaaagataagcgatgcacaggccgtgctctgcgatgaggagctggcgacactggaaaggctgatccgga

SEQ ID NO: 710784 - DNA, 75 bp, synthetic construct
  source 1..75: mol_type = other DNA
gcatcgctaagcccctcgcagaacatgtcttagacctgaaacattcgccactgagcaaacaggccatgaagcgcc

SEQ ID NO: 710785 - DNA, 75 bp, synthetic construct
  source 1..75: mol_type = other DNA
acggcatggcacgcgagatagcaaaacgcgttagctatttacgaaacgagtgcccttatccatgccagccagcta

SEQ ID NO: 710786 - DNA, 75 bp, synthetic construct
  source 1..75: mol_type = other DNA
ttcacagctttctgatgcaagacaagtagcattcgtagacggctttatgaaatctctcgatccaaaagtaacgga

SEQ ID NO: 710787 - DNA, 75 bp, synthetic construct
  source 1..75: mol_type = other DNA
ccagtgtcgtaggggtacttaaaggcaccaagacaaaagccggtacccgaaaggtggagctgaacagtgaggcgc

SEQ ID NO: 710788 - DNA, 75 bp, synthetic construct
  source 1..75: mol_type = other DNA
gttaagtacgccgagcgcctgctcggggagatacaaaaccagatcgtcagtggcacctttgaatatgcgaaatat

SEQ ID NO: 710789 - DNA, 75 bp, synthetic construct
  source 1..75: mol_type = other DNA
ctctctgacgtagggctgagtcgcgaagagatttctacgctcctaatcaattcgctgaacatttcaccaagcagt

SEQ ID NO: 710790 - DNA, 75 bp, synthetic construct
  source 1..75: mol_type = other DNA
ggcttctatggaagttccggctccgtttgctggcaccgtgaaagagatcaaagtgaacgtgggtgacaaagtgtc

SEQ ID NO: 710791 - DNA, 75 bp, synthetic construct
  source 1..75: mol_type = other DNA
ctctatggaagtaccatctccgcaggcgggtatcgttaaagagatcaaagtctccgttggcgataaaacccagac

SEQ ID NO: 710792 - DNA, 75 bp, synthetic construct
  source 1..75: mol_type = other DNA
gccgtctggctcgcgagttcggcgttaacctggcgaaagtgaagggcacaggccgtaaaggtcgtatcctgcgcg

SEQ ID NO: 710793 - DNA, 75 bp, synthetic construct
  source 1..75: mol_type = other DNA
ttatgaaatctctcgatccaaaagtaacggaagagtttatgaaaaacctttctaatctcactccgtattttacga

SEQ ID NO: 710794 - DNA, 75 bp, synthetic construct
  source 1..75: mol_type = other DNA
tagatgccatcggtaaagatgtaaaggaacgcgctaccaaaagctatgacgaggctgaatatgtagttgataaga

SEQ ID NO: 710795 - DNA, 75 bp, synthetic construct
  source 1..75: mol_type = other DNA
acgtagacgatattgctaaaaagcaagcacaggcagataaagccaatgctaaagcacaattagccgctcaacgtg

SEQ ID NO: 710796 - DNA, 75 bp, synthetic construct
  source 1..75: mol_type = other DNA
ccacagggaaaatcacacctgcaattgcggaggttgttaacgacggctctaaatttatggatgcctataaaatga

SEQ ID NO: 710797 - DNA, 75 bp, synthetic construct
  source 1..75: mol_type = other DNA
gtgacggcgcgctgaagtcgtcaattgcaaaatgggtgcttggtatgatgtcggaagggaataaccgccaggtcc

SEQ ID NO: 710798 - DNA, 75 bp, synthetic construct
  source 1..75: mol_type = other DNA
gctactcgtaacggggattctgaacttgaggtcaccaatgccattttcggtaccaatgagttccgggcgtcagat

SEQ ID NO: 710799 - DNA, 75 bp, synthetic construct
  source 1..75: mol_type = other DNA
tgaatgcgcatccgcatgtttctgagcacattgtggtggtgcataacggcatcatcgaaaaccatgaaccgctgc

SEQ ID NO: 710800 - DNA, 75 bp, synthetic construct
  source 1..75: mol_type = other DNA
caccggtattgctcatactcgctgggcgacccacggtgaaccttcagaagctaatgcgcatccgcatgtttctga

SEQ ID NO: 710801 - DNA, 75 bp, synthetic construct
  source 1..75: mol_type = other DNA
gttccttgttatcggcgatcgctcatggcgtgtaggccaatactacgattgtgccggtgatatcgttcgcattaa

SEQ ID NO: 710802 - DNA, 75 bp, synthetic construct
  source 1..75: mol_type = other DNA
ctgtggacggtgatccccggcaacaaagcgattctgccgatcctctggtcgctgttcccgcaccatcgttacctg

SEQ ID NO: 710803 - DNA, 75 bp, synthetic construct
  source 1..75: mol_type = other DNA
gaaaaactaatagagacaatgagtcctccaagatctaaaaaccaatcaacaaaaaatcaacggaataaaaataat

SEQ ID NO: 710804 - DNA, 75 bp, synthetic construct
  source 1..75: mol_type = other DNA
gtgagccaaacaaaaaatagagaactgttagataaaaaaataagatcagaaattgaggtgataaaaaaaataatc

SEQ ID NO: 710805 - DNA, 75 bp, synthetic construct
  source 1..75: mol_type = other DNA
ccggttctcctgactgcaacgccagtcgttaacaccccgatcgatgcatacaacatgctttctcatgttctgccg

SEQ ID NO: 710806 - DNA, 75 bp, synthetic construct
  source 1..75: mol_type = other DNA
cgacccgtttgggtaataagttgcttaatgattgtgttatggtcaggcattatctcgcatggacgaaataagctc

SEQ ID NO: 710807 - DNA, 75 bp, synthetic construct
  source 1..75: mol_type = other DNA
cttaaagacacttttgatgacaccaccattctgggctggatgatccagacggaagatactgaatacagcttaccg

SEQ ID NO: 710808 - DNA, 75 bp, synthetic construct
  source 1..75: mol_type = other DNA
taccggtattgctcacactcgctgggcgactcatggtgaaccttcagaagtgaatgcgcatccgcatgtttctga

SEQ ID NO: 710809 - DNA, 75 bp, synthetic construct
  source 1..75: mol_type = other DNA
tttcacgctttagcgagctttatagccgggagccgttttatttctgctgctgtcaggacaccgatgaagacagga

SEQ ID NO: 710810 - DNA, 75 bp, synthetic construct
  source 1..75: mol_type = other DNA
ttgctggagtacaacgccgatacgccaacttcattgtacgagtcggcttatttccagtggttgtggctggaagat

SEQ ID NO: 710811 - DNA, 75 bp, synthetic construct
  source 1..75: mol_type = other DNA
tttatcaggcgcgatcagcctggtcacgggcagagtggattggtgccggaagaatggccattgacgggctcaagg

SEQ ID NO: 710812 - DNA, 75 bp, synthetic construct
  source 1..75: mol_type = other DNA
gggacagggatgcagagtatgaagccctgtaccgtgacattctgcctgaactggacctggtactgtggctgatta

SEQ ID NO: 710813 - DNA, 75 bp, synthetic construct
  source 1..75: mol_type = other DNA
ttggcagcatcacccgactttcatatcatcgacaatgaaatctattgggacgagagtcgggcttaccgttttact

SEQ ID NO: 710814 - DNA, 75 bp, synthetic construct
  source 1..75: mol_type = other DNA
gcggcaacgtcaccattttcaacggtcagaatgatgtcgttgaccatgctgatggtgattacgccgatgaaccga

SEQ ID NO: 710815 - DNA, 75 bp, synthetic construct
  source 1..75: mol_type = other DNA
tccggcatggctattgctggctggcaaaccgatgatgattgtgaatcgcccgaagcagcaaccaccccacgataa

SEQ ID NO: 710816 - DNA, 75 bp, synthetic construct
  source 1..75: mol_type = other DNA
gtgtctgccacggttgcacgcaatgatgcatcagattaaaaaccctgtgcttatgctcggggttggcgggtttat

SEQ ID NO: 710817 - DNA, 75 bp, synthetic construct
  source 1..75: mol_type = other DNA
ggattatttttccatcctcatttttcactgcccattgcgcattatgggcagatggagatgaccgatattctcagc

SEQ ID NO: 710818 - DNA, 75 bp, synthetic construct
  source 1..75: mol_type = other DNA
gctgggtattctgggcgtcatcggcggacctgtctcactgtttaaaggactggatgagatgcagcaaatggtgat

SEQ ID NO: 710819 - DNA, 75 bp, synthetic construct
  source 1..75: mol_type = other DNA
ctggttaagtctttttatggcggcagtcgttgtacccaataccacattgctaccttgctctgtatcgtcatgctt

SEQ ID NO: 710820 - DNA, 75 bp, synthetic construct
  source 1..75: mol_type = other DNA
ggcagcagctggtgcacttactaccggattatttttccatcctcatttttcactgcccattgcgcattacggaca

SEQ ID NO: 710821 - DNA, 75 bp, synthetic construct
  source 1..75: mol_type = other DNA
tgcgtcgggcgtgtcgtaatccatccccgaaccccataactgttgatgatttgccagcaattacggcagaactgc

SEQ ID NO: 710822 - DNA, 75 bp, synthetic construct
  source 1..75: mol_type = other DNA
tgggcttcgacagcgtgattgctgacgaaggccacaactaccgcaatagctataaaaatggtcgcgaagcgtcac

SEQ ID NO: 710823 - DNA, 75 bp, synthetic construct
  source 1..75: mol_type = other DNA
aatattattttgcctctctcgtcgcctttgctttatggaaagaggcacccgataccattgaactgttcagaacac

SEQ ID NO: 710824 - DNA, 75 bp, synthetic construct
  source 1..75: mol_type = other DNA
tttttaaatcagtgttcaacggctgatcctgctgctatatcgaaaatcatgagtaagtttggtcgtgtcagaggt

SEQ ID NO: 710825 - DNA, 75 bp, synthetic construct
  source 1..75: mol_type = other DNA
catgttcacaactggtggatttactgcaacagacctggcgggtgataagtgctggcggacaatgtcgggtggaaa

SEQ ID NO: 710826 - DNA, 75 bp, synthetic construct
  source 1..75: mol_type = other DNA
gcgcggacgtaggtaacactctggaaccatcggcgggcaccggcgtttttaatgagacaaaaccggttggtacgg

SEQ ID NO: 710827 - DNA, 75 bp, synthetic construct
  source 1..75: mol_type = other DNA
gaacaactggcggcgtatgaagaattgcgtcagcaggcggaagcggcagccaaagccaacaatggcgtaacgacc

SEQ ID NO: 710828 - DNA, 75 bp, synthetic construct
  source 1..75: mol_type = other DNA
taaaccttctttgcaggcgaccgcgttattgcagcatttaaaacaatcgctggcaatcacaggaaaactgcataa

SEQ ID NO: 710829 - DNA, 75 bp, synthetic construct
  source 1..75: mol_type = other DNA
tggcctcatatcaacggcgttttttatgccatggaggatcaagaacgtgttgtcggtgatgctgtcaacttactg

SEQ ID NO: 710830 - DNA, 75 bp, synthetic construct
  source 1..75: mol_type = other DNA
ccagcaatgcagaccgaagatattatttcagttatcaattgggcagaaaagcaggtatgtattgataatcagcgt

SEQ ID NO: 710831 - DNA, 75 bp, synthetic construct
  source 1..75: mol_type = other DNA
gcgtgaagctgttctgcgtgctattccacagctgcgtggcgcttatggcacggtaattatggatacccgtcaccc

SEQ ID NO: 710832 - DNA, 75 bp, synthetic construct
  source 1..75: mol_type = other DNA
ctggatgcctccattgaacatgacatcgtgcatggtctgcaggcgctgccgagtcgtattgagcagatgctgtct

SEQ ID NO: 710833 - DNA, 75 bp, synthetic construct
  source 1..75: mol_type = other DNA
cgcaacgtgatgtagcagaaatccttcttgaaggtttacgtcgtctggaataccgcggatatgactctgccggtc

SEQ ID NO: 710834 - DNA, 75 bp, synthetic construct
  source 1..75: mol_type = other DNA
taaacaagccaccagcgaagacgacgacagtgatgattcaatcacgcagcaatcgcaatactccctgatagataa

SEQ ID NO: 710835 - DNA, 75 bp, synthetic construct
  source 1..75: mol_type = other DNA
accagcatagtgaggcgctcattgaatttgccattgattacctgaagaacaataaaaagcaggggctgatgaagc

SEQ ID NO: 710836 - DNA, 75 bp, synthetic construct
  source 1..75: mol_type = other DNA
ttgcgggaacaactacatggaggagcaacaatacgatgcctgttgctgctcagccagacgagcatttgccatccg

SEQ ID NO: 710837 - DNA, 75 bp, synthetic construct
  source 1..75: mol_type = other DNA
aaaaatatcccatagccagtaacaagaccgcccagggccgcgccgagaaccgccgcgtcgcagtggtgattactg

SEQ ID NO: 710838 - DNA, 75 bp, synthetic construct
  source 1..75: mol_type = other DNA
atgagcgcgttagctgtattttcgtttcaggaagagcatcaggttcgtgtagtgatgattgatagcgatccgtgg

SEQ ID NO: 710839 - DNA, 75 bp, synthetic construct
  source 1..75: mol_type = other DNA
tgcaggtagctgctgagattgaagcgctggccagtggtgctgataaggatgcaattgtgcgggaggctcttcttc

SEQ ID NO: 710840 - DNA, 75 bp, synthetic construct
  source 1..75: mol_type = other DNA
gtgatgagcagaaatctcgcagagtgtttcagtattcataatgataatttcagtgacctggaatgggagtgtaac

SEQ ID NO: 710841 - DNA, 75 bp, synthetic construct
  source 1..75: mol_type = other DNA
agttgggccaaacaagaacgttccggggctgattagaggcgcagagatatgcgtaagtattgctgcccagcttcg

SEQ ID NO: 710842 - DNA, 75 bp, synthetic construct
  source 1..75: mol_type = other DNA
atctgcaacaaaaaggcagaggtgggtatcaacctgcatcgaggaacgactgacatccatcatctgacgttgcca

SEQ ID NO: 710843 - DNA, 75 bp, synthetic construct
  source 1..75: mol_type = other DNA
ccgactgtccgaagatgggcgcggcatcctgggcttcggcaccgggctgggtaaaactacgaccgcgctggcgct

SEQ ID NO: 710844 - DNA, 75 bp, synthetic construct
  source 1..75: mol_type = other DNA
ttggcgggtccgtctccgaatattacacaccaaagcctatcgctgaaggtgtctgggagatcatgaagctctacg

SEQ ID NO: 710845 - DNA, 75 bp, synthetic construct
  source 1..75: mol_type = other DNA
taccaatgagttccgggcgtcagattatgagatcaccacagcacagtttggcaccattggcatttacagcaataa

SEQ ID NO: 710846 - DNA, 75 bp, synthetic construct
  source 1..75: mol_type = other DNA
catcccacgagatttaaaggttaacgaaacaaacgctgaatatctggtgcgtaagttcggtgaacttgaatcaaa

SEQ ID NO: 710847 - DNA, 75 bp, synthetic construct
  source 1..75: mol_type = other DNA
atctcccgcacggctatcgacggccttgacctgatagtctccaatgacccccatgaacaactgaaaacggccatg

SEQ ID NO: 710848 - DNA, 75 bp, synthetic construct
  source 1..75: mol_type = other DNA
tttacttagacctaaaaaaatggacagaagcaaaactaaccgaaaaagcactgtctattcttatgagtaaagata

SEQ ID NO: 710849 - DNA, 75 bp, synthetic construct
  source 1..75: mol_type = other DNA
gcaaccgtggtgaaagtcacccaagcgattggtctgcggttcacgttcaagccgactcacggcgggcccgcaccg

SEQ ID NO: 710850 - DNA, 75 bp, synthetic construct
  source 1..75: mol_type = other DNA
atgtcaaaaattataccaattatttctactaaaggtggagccggaaagtcaaccaaagccggcaatattgcgggt

SEQ ID NO: 710851 - DNA, 75 bp, synthetic construct
  source 1..75: mol_type = other DNA
catcttgtttctgagctgtttccggaatggaaaacccgttttgatgatgtgctgaaacgggaggttcgtccatga

SEQ ID NO: 710852 - DNA, 75 bp, synthetic construct
  source 1..75: mol_type = other DNA
ctgacatatgaagcgccagccggcctttttgaactccttatgcgtacggctgacctcactcatcccgataatatc

SEQ ID NO: 710853 - DNA, 75 bp, synthetic construct
  source 1..75: mol_type = other DNA
atactcttcttattcattatactggggccaccaagccgtggcacaaatgggcaatttatccatcggtaaaatact

SEQ ID NO: 710854 - DNA, 75 bp, synthetic construct
  source 1..75: mol_type = other DNA
tttgtaagggaaatattagtcaactattgcatttagagtttaatggagcggtggctgcagtagtcagggatgtag

SEQ ID NO: 710855 - DNA, 75 bp, synthetic construct
  source 1..75: mol_type = other DNA
attaataatcgacatgttaatcttgatttttatattattgctgatgtttataacgacgatttctttcaaaaagtt

SEQ ID NO: 710856 - DNA, 75 bp, synthetic construct
  source 1..75: mol_type = other DNA
gtaccgatcgcatgttgcgcaaacttgaagcactgctggcagtcgcagacgaaactgcatcgcttatcatcaccg

SEQ ID NO: 710857 - DNA, 75 bp, synthetic construct
  source 1..75: mol_type = other DNA
actattaaaaacgacgaccttacatatcaactccgaaatacagataccagcgaagaagtaaacgtcgcacttcag

SEQ ID NO: 710858 - DNA, 75 bp, synthetic construct
  source 1..75: mol_type = other DNA
gcagtattgttaacttacgtgaaaaagatggggaatggcttgtagtacaaactattaaaaacgacgaccttacat

SEQ ID NO: 710859 - DNA, 75 bp, synthetic construct
  source 1..75: mol_type = other DNA
gcttgtttgagttgttaatgcaactgaccgatctctccctgccagatactatcatatcacgctctgttatcccta

SEQ ID NO: 710860 - DNA, 75 bp, synthetic construct
  source 1..75: mol_type = other DNA
acctggatgagatgaaacaatacaatctccagtggacaaatagcgtcacagtcggtcacggtgatgttggagctg

SEQ ID NO: 710861 - DNA, 75 bp, synthetic construct
  source 1..75: mol_type = other DNA
atggcaagaggtatgtatgtcttatgcgaaattgaaggtgtgctggcaaataccagccatcgtaaatctgtatct

SEQ ID NO: 710862 - DNA, 75 bp, synthetic construct
  source 1..75: mol_type = other DNA
gcccaataaccggtgatcgggttcagatggatacctgtaaaattggccccggcttatatcagtacacatctattg

SEQ ID NO: 710863 - DNA, 75 bp, synthetic construct
  source 1..75: mol_type = other DNA
ccgtgcaaaacagcaggtaaaatatgagttgagcggtgaggtttacgagttggggtgggatgtcacgtatcagta

SEQ ID NO: 710864 - DNA, 75 bp, synthetic construct
  source 1..75: mol_type = other DNA
cgcttgggcacaggataccagcccggatactctcgtcgttactgctaaccgttttcaacagcctatcaatactgt

SEQ ID NO: 710865 - DNA, 75 bp, synthetic construct
  source 1..75: mol_type = other DNA
ccacacagcggggattacgggaaatgcgccgggcagtggcccgttcctcccgctttaccgccgtggtgcgtacct

SEQ ID NO: 710866 - DNA, 75 bp, synthetic construct
  source 1..75: mol_type = other DNA
ccgtcatgctggaaatgattgtgctgtctgccacggagtctgtgggggggatggtgaatccggttctgccggatg

SEQ ID NO: 710867 - DNA, 75 bp, synthetic construct
  source 1..75: mol_type = other DNA
ctgacgtatgaagcgccggccggtctttttgaattactgatgcgcacggctgacctcagtcatcccgacaacatc

SEQ ID NO: 710868 - DNA, 75 bp, synthetic construct
  source 1..75: mol_type = other DNA
attgggagagcgaaatatgttcagtctgctcgatacctgtatcgagcaacttgatatcttcaaactgggccatgt

SEQ ID NO: 710869 - DNA, 75 bp, synthetic construct
  source 1..75: mol_type = other DNA
ctgatgacctgaaagaactgctggcagaatggcagcattactataactgggaacgccctcatagcgctcacaacg

SEQ ID NO: 710870 - DNA, 75 bp, synthetic construct
  source 1..75: mol_type = other DNA
taccgtgaactgggtatccccctgccaaaagtccgcaccctggttaactgcatggattatacggcgctggccaga

SEQ ID NO: 710871 - DNA, 75 bp, synthetic construct
  source 1..75: mol_type = other DNA
tgcggctggtcaacccgtacatcgtctcgaaaaagaatccacacgtcgcagtgattccgcgcttgtcacgatgca

SEQ ID NO: 710872 - DNA, 75 bp, synthetic construct
  source 1..75: mol_type = other DNA
cagaagaaacggtttctgacacacgatgaaattaaaattctttatgctgcgatcgatggttctcgaatggttccc

SEQ ID NO: 710873 - DNA, 75 bp, synthetic construct
  source 1..75: mol_type = other DNA
atggacgttgtgaagcgcatttgtgattgcgtggcgatatgggtcttcccctgttgtggtgggtggtacataatt

SEQ ID NO: 710874 - DNA, 75 bp, synthetic construct
  source 1..75: mol_type = other DNA
caccactggcgcagaagtttattcagtcgaccctgcatctggatatcccggaagattatcaggcacgtttaaaaa

SEQ ID NO: 710875 - DNA, 75 bp, synthetic construct
  source 1..75: mol_type = other DNA
agtgaagtgttctcgcatccgaaaacgccgctggcgcagaaatttattcagtcgaccctgcatctggatatcccg

SEQ ID NO: 710876 - DNA, 75 bp, synthetic construct
  source 1..75: mol_type = other DNA
gaactgggcatggccttctggcatgatttagcggctccggtcattgctggcattcttgccagtatgatcgtgaac

SEQ ID NO: 710877 - DNA, 75 bp, synthetic construct
  source 1..75: mol_type = other DNA
acacgttctattctcgaactgctgaaagacatcaaccgccgtctgggtttgacgattctgttgatcacccacgaa

SEQ ID NO: 710878 - DNA, 75 bp, synthetic construct
  source 1..75: mol_type = other DNA
caatcggtcgatgccccgctgctttctgaaaccgcgcgtcgtttcaatgtcaacaacaacattattagcgcgcag

SEQ ID NO: 710879 - DNA, 75 bp, synthetic construct
  source 1..75: mol_type = other DNA
tggtaaccggtgcaagccgcggaattggccgcgcaattgctgaaacgctcgcagcccgtggcgcgaaagttattg

SEQ ID NO: 710880 - DNA, 75 bp, synthetic construct
  source 1..75: mol_type = other DNA
aattttgtccgtaagttaaaaatgcaaaaagataacgtgatgatcaccggcgatgcgctgctggattttggcgac

SEQ ID NO: 710881 - DNA, 75 bp, synthetic construct
  source 1..75: mol_type = other DNA
gtgacgcaagaaggtaggcggctggttatcaatgaatatcattggcaaatagataaaaaagcctctacggccatg

SEQ ID NO: 710882 - DNA, 75 bp, synthetic construct
  source 1..75: mol_type = other DNA
attgcccgtgcgttagccagcaatcccaaagtattgctgtgtgatgaagccaccagcgcgctggacccggcaacg

SEQ ID NO: 710883 - DNA, 75 bp, synthetic construct
  source 1..75: mol_type = other DNA
aagtgttccaccagggcacccgcaccatccaggcgttgaacaacgtcagcctgcatgtgccagctggacaaattt

SEQ ID NO: 710884 - DNA, 75 bp, synthetic construct
  source 1..75: mol_type = other DNA
tcactatcggttctgtggttggttccatgggaaatggcggtcaggccaactacgctgcggcgaaagcgggcttga

SEQ ID NO: 710885 - DNA, 75 bp, synthetic construct
  source 1..75: mol_type = other DNA
atcgcggaagcggcatggcaggtgaacgaatctaccgaaaacatcggtgctcgtcgtttacataccgttctggag

SEQ ID NO: 710886 - DNA, 75 bp, synthetic construct
  source 1..75: mol_type = other DNA
atggcgatatcgactttgtcatgctggcgaaaaacccgaccatcgacgcctggtggaagctactttcccgcgagg

SEQ ID NO: 710887 - DNA, 75 bp, synthetic construct
  source 1..75: mol_type = other DNA
acggtgcgacggctggcacaaagaatcaatgaggttatgtattacgcagtgaatattggattaattccagctaat

SEQ ID NO: 710888 - DNA, 75 bp, synthetic construct
  source 1..75: mol_type = other DNA
gaacagccagaccgccaacgcagcattacggcgcatggggttcgctggcgtgctggtgtctcatggattacgcgc

SEQ ID NO: 710889 - DNA, 75 bp, synthetic construct
  source 1..75: mol_type = other DNA
agagctaattactgccaaggtggacgattttgatttcattaataaaatatggactgtaccaccagaacgacataa

SEQ ID NO: 710890 - DNA, 75 bp, synthetic construct
  source 1..75: mol_type = other DNA
gataagagcgattatctagaagaacagcgtaaagcttacttggcatggtggaagagggttgaatcgattgttaat

SEQ ID NO: 710891 - DNA, 75 bp, synthetic construct
  source 1..75: mol_type = other DNA
cgccgtgcgtacaaccgctcaacctatctcgagcagcgacgcccgttaatggcgtggtggggggattttgtagag

SEQ ID NO: 710892 - DNA, 75 bp, synthetic construct
  source 1..75: mol_type = other DNA
aactctacggaaacaaaacttttgataataacggcggtaaacttaagatcaaaatggtagacgatgttcctgtat

SEQ ID NO: 710893 - DNA, 75 bp, synthetic construct
  source 1..75: mol_type = other DNA
gattttgatttcataaataaggtatggactgtaccacctgaacgacataagacagggggtaatgactccaactta

SEQ ID NO: 710894 - DNA, 75 bp, synthetic construct
  source 1..75: mol_type = other DNA
tacgtcgacaactacagacccggctacaacgtccacgccgccagcgtctgtggatactaccgcaaccaacacgca

SEQ ID NO: 710895 - DNA, 75 bp, synthetic construct
  source 1..75: mol_type = other DNA
ttacagcgcatcaatgaagttatggattacgccgccaacagcgggatgattgataccaatccggctacaaacgtg

SEQ ID NO: 710896 - DNA, 75 bp, synthetic construct
  source 1..75: mol_type = other DNA
cgcatcagaatggcgcaatgcaatatgaaggccaagtggataacaaaaaatattatgtgtggcgtgataatcaag

SEQ ID NO: 710897 - DNA, 75 bp, synthetic construct
  source 1..75: mol_type = other DNA
gtcttgaagtaattgaaccaaaatttgattctgaatataaacacactcaatttgcatgtgacatggtagacgcag

SEQ ID NO: 710898 - DNA, 75 bp, synthetic construct
  source 1..75: mol_type = other DNA
atgacagatgtaacgattaaaacgctggccgcagagcgacagacctccgtggaacgcctggtacagcaatttgct

SEQ ID NO: 710899 - DNA, 75 bp, synthetic construct
  source 1..75: mol_type = other DNA
aggatgaggtgctaagactgaaacagattagcgggctgacggagctgtttcaggaagaggacttcagcccggcat

SEQ ID NO: 710900 - DNA, 75 bp, synthetic construct
  source 1..75: mol_type = other DNA
ccgtgctaaacagcaggtgaaatacagctcgactggcagttgtatgacttcgactgggggattacttatcagtat

SEQ ID NO: 710901 - DNA, 75 bp, synthetic construct
  source 1..75: mol_type = other DNA
gatgcaggtatccggaagtctgctgacgactctgtgtctgcacaagagaaacagactttgattgaccacctgaat

SEQ ID NO: 710902 - DNA, 75 bp, synthetic construct
  source 1..75: mol_type = other DNA
cagcacattggtgcataccacgttgaaactgaaaacggcatgatcaccttcctggacaccccggggcacgccgcg

SEQ ID NO: 710903 - DNA, 75 bp, synthetic construct
  source 1..75: mol_type = other DNA
agcgtgaagcggaagagcaagcccgtcgtgaggcagaagaatcggctaaacgcgaggcgcaacaaaaagctgaac

SEQ ID NO: 710904 - DNA, 75 bp, synthetic construct
  source 1..75: mol_type = other DNA
aaatagccaacctgttcgacaaagattacgagacagtctatggctaccaaactgcaggacgggaatataccttgt

SEQ ID NO: 710905 - DNA, 75 bp, synthetic construct
  source 1..75: mol_type = other DNA
cttcaatgtctgaaattgtcagggacctgtcacgactgggctggacagatgaccgaattggaacagaggctgggc

SEQ ID NO: 710906 - DNA, 75 bp, synthetic construct
  source 1..75: mol_type = other DNA
cttcaatgtctgaaattgtcagggacctctcacgactgggctggacagatgagcgaattggaacagaggctgggc

SEQ ID NO: 710907 - DNA, 75 bp, synthetic construct
  source 1..75: mol_type = other DNA
ccgtcttcctggcgtggatatcacccaaaacggcggttcaggtcagctctcatctatttttattcgcggtacaaa

SEQ ID NO: 710908 - DNA, 75 bp, synthetic construct
  source 1..75: mol_type = other DNA
agtttggtcgtcatggaacctggcaaaccagcgctggttgggaattcatcgaaggctatcgcttcattgcttcct

SEQ ID NO: 710909 - DNA, 75 bp, synthetic construct
  source 1..75: mol_type = other DNA
cgctggatgagatgaagcagtacaccgtccagtgggcaaataacgttaccgttggccacggtaatattggtgcgg

SEQ ID NO: 710910 - DNA, 75 bp, synthetic construct
  source 1..75: mol_type = other DNA
tctggttggctttaacgtacgtgctgatgcatctgcgcgtaaagttattgagtccgaaagcctggatctgcgtta

SEQ ID NO: 710911 - DNA, 75 bp, synthetic construct
  source 1..75: mol_type = other DNA
aggtttctgacatactcatccggaatctctgttcatgtggtacggatgaagagaaaattaatgttctgaatcatc

SEQ ID NO: 710912 - DNA, 75 bp, synthetic construct
  source 1..75: mol_type = other DNA
tggatcaggatgaagtgctgaggctcaaacagattagcgggctgacagagctgtttcaggaagagaatttcagcc

SEQ ID NO: 710913 - DNA, 75 bp, synthetic construct
  source 1..75: mol_type = other DNA
gaaagggacaggcctcacgtattgctgcgaccatccgacataaccgggccaggggcaaacatcagataacctcaa

SEQ ID NO: 710914 - DNA, 75 bp, synthetic construct
  source 1..75: mol_type = other DNA
aagatggtttcacacaaccggtggtggtgtctgaggaaaagaaccattacctggtggtggatggttttcatcgcc

SEQ ID NO: 710915 - DNA, 75 bp, synthetic construct
  source 1..75: mol_type = other DNA
acattcactggagcaggatgggttcacacagccagtggttgtctcggaagagaaggagcattacctagtcgtgga

SEQ ID NO: 710916 - DNA, 75 bp, synthetic construct
  source 1..75: mol_type = other DNA
aggatgggctcacgcagcctgtggttgtctcggaggagaaggggcattacctggtcgtggatggttttcatcgtc

SEQ ID NO: 710917 - DNA, 75 bp, synthetic construct
  source 1..75: mol_type = other DNA
tgaaactgtctactgacgaagttaaagtgaagatcatcggttctggcgtagggggtatcaccgaaaccgacgcca

SEQ ID NO: 710918 - DNA, 75 bp, synthetic construct
  source 1..75: mol_type = other DNA
atgccgcagaccatcgaagcaatccagcacgcgaaagcggcaggtgtgcctgtggtggttgcagtgaacaaaatc

SEQ ID NO: 710919 - DNA, 75 bp, synthetic construct
  source 1..75: mol_type = other DNA
ttcttcgctgcagcagagcttccagaaaccagctcaggctgttaaccgtgacgtcgtgattggtgaaaccatcac

SEQ ID NO: 710920 - DNA, 75 bp, synthetic construct
  source 1..75: mol_type = other DNA
gaagttctggagctgaaagcggtacgtaaaggtatggcgagcggtgcggttatcgaatccttcctcgataaaggt

SEQ ID NO: 710921 - DNA, 75 bp, synthetic construct
  source 1..75: mol_type = other DNA
ggttgtggttgcagtgaacaagatcgacaaaccagaagccgatccagatcgcgttaagaacgaactctcccagta

SEQ ID NO: 710922 - DNA, 75 bp, synthetic construct
  source 1..75: mol_type = other DNA
aaggtgtggttaaacgtcacaacccgatccgcgttctgcgcgacaacgtggttatctacgaaggcgagctggagt

SEQ ID NO: 710923 - DNA, 75 bp, synthetic construct
  source 1..75: mol_type = other DNA
cttcaatgtctgaaattgtcagggacctttcacgtctgggctggacagatgaacgaattggaacagaggctgggc

SEQ ID NO: 710924 - DNA, 75 bp, synthetic construct
  source 1..75: mol_type = other DNA
atgaagaatgttcgcaacgggtggatttattgcaacagacctggaaggtgataagcgctggcggacaatgccggg

SEQ ID NO: 710925 - DNA, 75 bp, synthetic construct
  source 1..75: mol_type = other DNA
attggtactgagctgggtatggaccaggatgaagtgctgaggctgaaacaaatcagcggactgactgagctgttt

SEQ ID NO: 710926 - DNA, 75 bp, synthetic construct
  source 1..75: mol_type = other DNA
tgatttattttctttccctggcaataggccaccagaagtagaagtatttcaacatgaggaagtaaaaaaaattcc

SEQ ID NO: 710927 - DNA, 75 bp, synthetic construct
  source 1..75: mol_type = other DNA
agttcctttcaccgacgggtgcacgaacgtattacggagcgtaatcacacgatcagcccatcagcgccggtggta

SEQ ID NO: 710928 - DNA, 75 bp, synthetic construct
  source 1..75: mol_type = other DNA
agggacaggcctcacgtattgctgcgaccatccgacataaccgggccaggggcaaacatcagataacctcaatgt

SEQ ID NO: 710929 - DNA, 75 bp, synthetic construct
  source 1..75: mol_type = other DNA
cctttcgcgtctgggctggacagatgagcgtattggcacagagttgggcatggatcaggatgaagtgctgaggct

SEQ ID NO: 710930 - DNA, 75 bp, synthetic construct
  source 1..75: mol_type = other DNA
tcgctagttataccaaaatcattagttgaaaatattgatgttgattcaggtgggatgttgcaaggggatcgctgg

SEQ ID NO: 710931 - DNA, 75 bp, synthetic construct
  source 1..75: mol_type = other DNA
acaacgcttatgacgagacctctggctcatcacatacagttaaattaggcggtgtgagcttgtgggatcttgcgg

SEQ ID NO: 710932 - DNA, 75 bp, synthetic construct
  source 1..75: mol_type = other DNA
atgacatggaacagcgttatattcagtggggtaatagcattgaggtagggcatggtgcaattagcggcgggatcg

SEQ ID NO: 710933 - DNA, 75 bp, synthetic construct
  source 1..75: mol_type = other DNA
tcagggctaaacggcgctgggaaaagcactcttgggcagttagcaatatgcgcatataaaaaaccagttacagcc

SEQ ID NO: 710934 - DNA, 75 bp, synthetic construct
  source 1..75: mol_type = other DNA
gtctgatgggcagtttaaagggctgcatatttgcgtagaagaccagtttgcaaaagttttacttagtgaagtaat

SEQ ID NO: 710935 - DNA, 75 bp, synthetic construct
  source 1..75: mol_type = other DNA
tgttttagaggctgcggcagcgatgaaaggggtgtttcttcccgcaacagataagaatacgtgggctaaatactt

SEQ ID NO: 710936 - DNA, 75 bp, synthetic construct
  source 1..75: mol_type = other DNA
tggtcaacagattcagacattctgtagttcctttcaccgacgggtgcacgaacgtattacggagcgtaatcacac

SEQ ID NO: 710937 - DNA, 75 bp, synthetic construct
  source 1..75: mol_type = other DNA
cgagccagggggaaacaccagataacgtcaatgtctgaaattgtcagggacctttcccggctgggctggacggat

SEQ ID NO: 710938 - DNA, 75 bp, synthetic construct
  source 1..75: mol_type = other DNA
tggatcgcctgacgccggatgccgacgatacagtgctggtgaagtggcgctacagcgcgtttcatcgttccccgc

SEQ ID NO: 710939 - DNA, 75 bp, synthetic construct
  source 1..75: mol_type = other DNA
atggtgatatcgattttgtcatgctggcgaaaaacccgaccatcgacgtctggtggaagctactctcccgcgagg

SEQ ID NO: 710940 - DNA, 75 bp, synthetic construct
  source 1..75: mol_type = other DNA
cttcaatgtctgaaattgtcagggacctatcacgtctgggctggacagatgatcgaattggaacagaggctgggc

SEQ ID NO: 710941 - DNA, 75 bp, synthetic construct
  source 1..75: mol_type = other DNA
cgggccagggggaaacaccagataacgtcaatgtctgaaattgtcagggacctttcccgcctgggctggacagat

SEQ ID NO: 710942 - DNA, 75 bp, synthetic construct
  source 1..75: mol_type = other DNA
cgggccagggggaaacaccagataacgtcaatgtctgaaattgtcagggacctttcccgactgggctggaccgat

SEQ ID NO: 710943 - DNA, 75 bp, synthetic construct
  source 1..75: mol_type = other DNA
ataggtacggagctgggtatggaccaggatgaagttctcagattgaaacagattagcgggctgacggagctgttt

SEQ ID NO: 710944 - DNA, 75 bp, synthetic construct
  source 1..75: mol_type = other DNA
tacttggcaacatgattcgtcagtacttcagccaggaacgagcagaagaagagactatacaggccctgaatcacc

SEQ ID NO: 710945 - DNA, 75 bp, synthetic construct
  source 1..75: mol_type = other DNA
aggatgaagtgctgagactgaaacagattagcgggctgacggaactgtttcaggaagaaaatttcagtcaatctt

SEQ ID NO: 710946 - DNA, 75 bp, synthetic construct
  source 1..75: mol_type = other DNA
atgggggattctgtgacacctgaagtggaggtactgagtgacatgattcgtcagtacttcagccaggaacgatca

SEQ ID NO: 710947 - DNA, 75 bp, synthetic construct
  source 1..75: mol_type = other DNA
cttcagccaggaacgaccagaagaagaggccatacaggccctgaatcatctgcgcagggtgcttcatgaggtcag

SEQ ID NO: 710948 - DNA, 75 bp, synthetic construct
  source 1..75: mol_type = other DNA
aattgttgtttcggaaaaaacaagccattacctggtggtggatggttttcataggcagttactaggtagaagaac

SEQ ID NO: 710949 - DNA, 75 bp, synthetic construct
  source 1..75: mol_type = other DNA
taccgtcagcccggataacggttttacaaccagtattgaactcgaagtgaagattaatgatcttgaaatggaata

SEQ ID NO: 710950 - DNA, 75 bp, synthetic construct
  source 1..75: mol_type = other DNA
cagcatattgaggcaggcattttactgtgtgatgcagttaattttctcgtggaaaaatacgcgctggtgcgtacc

SEQ ID NO: 710951 - DNA, 75 bp, synthetic construct
  source 1..75: mol_type = other DNA
atctgttattcatccgacagggacagggtaaaagcgccagcggtaaaccactgccggtgatctttatcacacgca

SEQ ID NO: 710952 - DNA, 75 bp, synthetic construct
  source 1..75: mol_type = other DNA
aagccctgtgggcgcaggattttgaaaccctggccaatccatcgatgattggcatgttgtattttgtcttgtttg

SEQ ID NO: 710953 - DNA, 75 bp, synthetic construct
  source 1..75: mol_type = other DNA
gcagacagtgaagctgaaacgtaagcccaaagagcaacacctccgggcgctacagcacccgaaagcaaaaccagt

SEQ ID NO: 710954 - DNA, 75 bp, synthetic construct
  source 1..75: mol_type = other DNA
gtgaatacatggccggtgaggctgacaacgttttcgcgctgacgaccatttacgcgacaaaggcgcaagcgatgc

SEQ ID NO: 710955 - DNA, 75 bp, synthetic construct
  source 1..75: mol_type = other DNA
aggctttaagcgcgtcatagatgagcaatcttggttaatcagtaaggtaactcacattctgagtaatagcggctt

SEQ ID NO: 710956 - DNA, 75 bp, synthetic construct
  source 1..75: mol_type = other DNA
gcgtgaagaatcatggcatgacaccaccctcgacgaactggtcagcaccattgcgaaacgcaacaaactgacggc

SEQ ID NO: 710957 - DNA, 75 bp, synthetic construct
  source 1..75: mol_type = other DNA
aattgctgtttctgaaagccggtagtgcgatgacggccagcggcagacccatcccgcaaatgacgctgacccgta

SEQ ID NO: 710958 - DNA, 75 bp, synthetic construct
  source 1..75: mol_type = other DNA
tgatggggctgacgttgacggataaccggggctttgaagcagaccagcttgatctggaactggacgacgccgaca

SEQ ID NO: 710959 - DNA, 75 bp, synthetic construct
  source 1..75: mol_type = other DNA
gatctggaactggatgatgccgacggaaaaatcgtgctgccgcgccgaggtgcggtcattacgctggcgctgggc

SEQ ID NO: 710960 - DNA, 75 bp, synthetic construct
  source 1..75: mol_type = other DNA
ccaaatgggacaaactgcaacgtggggttgctgagttttctatcaggctggcgacggggcgagcagacctttacc

SEQ ID NO: 710961 - DNA, 75 bp, synthetic construct
  source 1..75: mol_type = other DNA
atgaggatcagctgatgtcatgcctgatgctgctcccggtggttctgctggtgtttggcctggcgggttctctgg

SEQ ID NO: 710962 - DNA, 75 bp, synthetic construct
  source 1..75: mol_type = other DNA
aaggcgcaggccatgcgcgcagctcaggcaaagtgggacaggatacaacgtggggtggcggagttttcgattacg

SEQ ID NO: 710963 - DNA, 75 bp, synthetic construct
  source 1..75: mol_type = other DNA
ctcacccgactgttggaccagcattacggcctcacactgaatgacacaccgttcgctgatgaacgtgtgattgag

SEQ ID NO: 710964 - DNA, 75 bp, synthetic construct
  source 1..75: mol_type = other DNA
accggcctgatgacccgcgacaattacagaacggtaaataacattacccagggtaagtatccggaggcgaaacaa

SEQ ID NO: 710965 - DNA, 75 bp, synthetic construct
  source 1..75: mol_type = other DNA
gaagcgcgcgaaggtgaatacatggccggtgaggctgacaacgtttttgccctgaccacggtatatgccacaaaa

SEQ ID NO: 710966 - DNA, 75 bp, synthetic construct
  source 1..75: mol_type = other DNA
acggcctcacgctaaatgacacaccgttctccgatgaacgtgtgattgagcagcatattgaggcaggcatttcac

SEQ ID NO: 710967 - DNA, 75 bp, synthetic construct
  source 1..75: mol_type = other DNA
atcccgcaggtcaccatcacccgcagcgacggtgaccgccatcattttgcgattgctgaccgtggagcctacacc

SEQ ID NO: 710968 - DNA, 75 bp, synthetic construct
  source 1..75: mol_type = other DNA
ttgcgggtaataccggcagcgttgatgataacgacgaagtacagcgcaatctgaatgacactaactacaaccgca

SEQ ID NO: 710969 - DNA, 75 bp, synthetic construct
  source 1..75: mol_type = other DNA
cccgattctgtcggcaaaagaagcgcagaatttcgatgctcaacactattttgcatccctgacaccaggtgctgc

SEQ ID NO: 710970 - DNA, 75 bp, synthetic construct
  source 1..75: mol_type = other DNA
aaaccgcgcctggtacctcttctcgcccgattctgtcggcaaaagaagcgcagaatttcgatgctcaacactatt

SEQ ID NO: 710971 - DNA, 75 bp, synthetic construct
  source 1..75: mol_type = other DNA
ctgaatggcactaactacaaccgcatgtgggaatacaataaccgtggcgtgggtagcaaagtggttgcagaagca

SEQ ID NO: 710972 - DNA, 75 bp, synthetic construct
  source 1..75: mol_type = other DNA
gtgaacacattttcagtttcccgtctggcgctggcattggcttttggcgtgacgctggccgcctgtagctcaaca

SEQ ID NO: 710973 - DNA, 75 bp, synthetic construct
  source 1..75: mol_type = other DNA
ctcgctggatgttgatgccaataccaacggtcaggtggtgatccgtgatagcgccatcaacgaaggttttaacac

SEQ ID NO: 710974 - DNA, 75 bp, synthetic construct
  source 1..75: mol_type = other DNA
gggctttaagcgcgtcatagacgagcaatcttggttaatcagtaaggtgactcacaatctgaataatagcggctt

SEQ ID NO: 710975 - DNA, 75 bp, synthetic construct
  source 1..75: mol_type = other DNA
aacggcctagatcgggaagcgcgcgggctgattgctggcctgactcgatgtgaaccgaccccgggcgcaggtatc

SEQ ID NO: 710976 - DNA, 75 bp, synthetic construct
  source 1..75: mol_type = other DNA
atttatatgaagccttattgagacataactacttccccaaccaaaaaggttcgataagtgaaatcccaccgtgct

SEQ ID NO: 710977 - DNA, 75 bp, synthetic construct
  source 1..75: mol_type = other DNA
attattgcttaaaatattccattgatattgacagttgtctcattagtaagatttttgaaaacggtgattgcctaa

SEQ ID NO: 710978 - DNA, 75 bp, synthetic construct
  source 1..75: mol_type = other DNA
ttcgccttggcggtctgtcatctgttcagacatggaatggtcccggctggtctgacaggtcaggttatgtcgtta

SEQ ID NO: 710979 - DNA, 75 bp, synthetic construct
  source 1..75: mol_type = other DNA
ttaacgtcagtcggtcgcgatattctggccaaaacaagcgtccttgctgttatccaataccttggtttaagagaa

SEQ ID NO: 710980 - DNA, 75 bp, synthetic construct
  source 1..75: mol_type = other DNA
cgataaccagctgcaggtcgcggaatgtaatccaggctcgggggttacgtttctgcctctgtcgcgatttatccg

SEQ ID NO: 710981 - DNA, 75 bp, synthetic construct
  source 1..75: mol_type = other DNA
cgttcgcggtatgctgggcttcactggtacttacaaaggccgcaaaatttccgtaatgggccacggtatgggtat

SEQ ID NO: 710982 - DNA, 75 bp, synthetic construct
  source 1..75: mol_type = other DNA
ctgatttttccctggcagatccgtaaccagcagcctgacccggccatttttctcgattttctcgaacgcttcgct

SEQ ID NO: 710983 - DNA, 75 bp, synthetic construct
  source 1..75: mol_type = other DNA
ttaccggacagcattttgacgaagaatattgctgagctatctggtggtgaaaaacaacgcatctcattgattcgt

SEQ ID NO: 710984 - DNA, 75 bp, synthetic construct
  source 1..75: mol_type = other DNA
ttatccttaattcacccaagagcatatgcacagttagcaaagcatttgtatgagtcttgggatgagattcgaaaa

SEQ ID NO: 710985 - DNA, 75 bp, synthetic construct
  source 1..75: mol_type = other DNA
ttgtccgtacgctgctgccaaccatggcgggaatttccggtctgccaaaccgccgtttccagtttttcaactggt

SEQ ID NO: 710986 - DNA, 75 bp, synthetic construct
  source 1..75: mol_type = other DNA
ttgtggtgattaaaaaaaatactgtaacgcctgacgattttccccgttcccggttgctgtaccgggaacgtattt

SEQ ID NO: 710987 - DNA, 75 bp, synthetic construct
  source 1..75: mol_type = other DNA
tccgaattttacaccaccaccagaaaaccttcagcaggagatgttggtgcatatactaaagcggaatgtaattca

SEQ ID NO: 710988 - DNA, 75 bp, synthetic construct
  source 1..75: mol_type = other DNA
cacttgtggcgcaatgaccatacgcattaccacaccgagtacatccagcggtgaaggcatccctaatgctcaatt

SEQ ID NO: 710989 - DNA, 75 bp, synthetic construct
  source 1..75: mol_type = other DNA
tgatgaattaattgatacaacacaggcaaggccaattcagtattgcattaatggaacgtggtataacgcggggag

SEQ ID NO: 710990 - DNA, 75 bp, synthetic construct
  source 1..75: mol_type = other DNA
atctacgttgattctccatttttatatgggagctggtagttgtccggctgttcagttccgcgtgaattataagaa

SEQ ID NO: 710991 - DNA, 75 bp, synthetic construct
  source 1..75: mol_type = other DNA
gtgcctgcaccgattccaaagttaaccgcatccgttttaaagaccatgactttgcagctatcgctgacttcgaca

SEQ ID NO: 710992 - DNA, 75 bp, synthetic construct
  source 1..75: mol_type = other DNA
tcgcactgtatcttattgcgcaagtgacgacatcgataggaggattattctttaacttagtcgcgttaagtttgc

SEQ ID NO: 710993 - DNA, 75 bp, synthetic construct
  source 1..75: mol_type = other DNA
atgcggggagttgccctgctgtacagttccgcgtgaattataagaacggcggtatttattatcgttcagcgcgtg

SEQ ID NO: 710994 - DNA, 75 bp, synthetic construct
  source 1..75: mol_type = other DNA
ttgcagacggcgtgtactatcaacggtgtctcgtttgatggttctaaaaacattgagctaacggcggaagattta

SEQ ID NO: 710995 - DNA, 75 bp, synthetic construct
  source 1..75: mol_type = other DNA
ggaatgccgacaccgcgacgaaattgaaaacagccataaacattaatggcgtcaggttcgatggttctacgaaca

SEQ ID NO: 710996 - DNA, 75 bp, synthetic construct
  source 1..75: mol_type = other DNA
tattatcgttctgcgcgtgacggttatggttttgaagccgactggtcggaattttatactacaacacgtaaacca

SEQ ID NO: 710997 - DNA, 75 bp, synthetic construct
  source 1..75: mol_type = other DNA
ccacaacccgcaaaccctctgcgggggatgttggtgcatatacgcaggcagaatgtaactcaaggtttattacag

SEQ ID NO: 710998 - DNA, 75 bp, synthetic construct
  source 1..75: mol_type = other DNA
cgatactggctgtggaactattcatcttgcaggttgcgttattgaggttatgggtaataaaggtgccatgaccat

SEQ ID NO: 710999 - DNA, 75 bp, synthetic construct
  source 1..75: mol_type = other DNA
aatggcgcggatattcctggaaaagataccttcactaaaaatattggtgcatgtcgcgcttttcacagttctatt

SEQ ID NO: 711000 - DNA, 75 bp, synthetic construct
  source 1..75: mol_type = other DNA
ccgcttgctgccaaatcactgggcgatatcacccgtctgcccaagtcactcaaagttttgctcgaaaacctgctg

SEQ ID NO: 711001 - DNA, 75 bp, synthetic construct
  source 1..75: mol_type = other DNA
ggcgatcaaaaaaggtgatttaaccgttggagcggtgctgtctggtaaccgtaactttgaagggcgtattcatcc

SEQ ID NO: 711002 - DNA, 75 bp, synthetic construct
  source 1..75: mol_type = other DNA
gaccgtgaaattgcctaccgcccggcaagggtgctgatgcaggactttaccggcgtacctgccgttgttgatctg

SEQ ID NO: 711003 - DNA, 75 bp, synthetic construct
  source 1..75: mol_type = other DNA
gtaactttgaaggccgtatccatccgctggttaaaactaactggctggcttcgccgccattggtggttgcctatg

SEQ ID NO: 711004 - DNA, 75 bp, synthetic construct
  source 1..75: mol_type = other DNA
gcaaggcgtaacgcgtaaaacgttaggactaaccggggaagagaagattgatattggcgatctgcaaaatctaca

SEQ ID NO: 711005 - DNA, 75 bp, synthetic construct
  source 1..75: mol_type = other DNA
gcctgccagcgaggttgtctctatttacgatgcagcaatgcgctataagcaggagaaaacaccgctggcggtgat

SEQ ID NO: 711006 - DNA, 75 bp, synthetic construct
  source 1..75: mol_type = other DNA
tgcggtcattacgctggcgctgggttggaaggggcagccgcttttcccgaaaggggcattcacggtggacgagat

SEQ ID NO: 711007 - DNA, 75 bp, synthetic construct
  source 1..75: mol_type = other DNA
aactgttatttcttaaggcggggcggggggtgacggccagcggtaagaaaatcccgcaggtcatcatcacccgca

SEQ ID NO: 711008 - DNA, 75 bp, synthetic construct
  source 1..75: mol_type = other DNA
gccgctcaggctaagtgggataagctgcagcgaggcgttgcggagttttctattacgctcgcgcttggcagggct

SEQ ID NO: 711009 - DNA, 75 bp, synthetic construct
  source 1..75: mol_type = other DNA
ggcaggcggccagttctcgcccgtctcctgttgaaatctggcagatactgctgacccggctactggaccagcatt

SEQ ID NO: 711010 - DNA, 75 bp, synthetic construct
  source 1..75: mol_type = other DNA
cttcgtcgcagttaatcaacagcattgatattctccgggcacgccgggcaacaggtctgatgacccgcgacaatt

SEQ ID NO: 711011 - DNA, 75 bp, synthetic construct
  source 1..75: mol_type = other DNA
cagcatcagtattgagggcagggatatcactactgtgctggataacagcctgatgagtctgacgctgacggacaa

SEQ ID NO: 711012 - DNA, 75 bp, synthetic construct
  source 1..75: mol_type = other DNA
ttccatgcttatcccggacgtagtgggctttaaacttaccggaaaattacgtgaaggtattaccgccacagacct

SEQ ID NO: 711013 - DNA, 75 bp, synthetic construct
  source 1..75: mol_type = other DNA
cttggggataaaaatgcttttgatgatctcatcgaaaataataatctagacattctcatcaatcttggcatcaca

SEQ ID NO: 711014 - DNA, 75 bp, synthetic construct
  source 1..75: mol_type = other DNA
ccaggactccagtgagcgctattcttctggcaagaatactctctgatgagattaaagaattaccatctacaatga

SEQ ID NO: 711015 - DNA, 75 bp, synthetic construct
  source 1..75: mol_type = other DNA
atactcgataataccacttagcacaggtcaaataatcgactttgtagataaaatctgcaatgacattaaaataac

SEQ ID NO: 711016 - DNA, 75 bp, synthetic construct
  source 1..75: mol_type = other DNA
tgggcagacataatggagggaaaaccgcagaaattgcggaggcgctggcggtaacggattaccaggcacgctatt

SEQ ID NO: 711017 - DNA, 75 bp, synthetic construct
  source 1..75: mol_type = other DNA
ttgataaaaatctagaggtggaattaattatttctggagtattgtcagagtataaaatacaacatgaaggaaaga

SEQ ID NO: 711018 - DNA, 75 bp, synthetic construct
  source 1..75: mol_type = other DNA
tttggaggggaatgttggtgcagggaagagtacattaataaagcagttaattgagaaaataaaagcagaatactc

SEQ ID NO: 711019 - DNA, 75 bp, synthetic construct
  source 1..75: mol_type = other DNA
aggatggctgaaaaatgcccatgctgaccgtgaaatcgcttaccgtccggcaagagtgctgatgcaagactttac

SEQ ID NO: 711020 - DNA, 75 bp, synthetic construct
  source 1..75: mol_type = other DNA
cgacacggcgacagaattaacctattaccagaacgatggcattttgcattatgtcattcgtaatatgttgaagtg

SEQ ID NO: 711021 - DNA, 75 bp, synthetic construct
  source 1..75: mol_type = other DNA
gctgtggtcattgctgcgataacgtcgtgcaccaacacctctaacccaagtgtgctgatggccgcaggcttgctg

SEQ ID NO: 711022 - DNA, 75 bp, synthetic construct
  source 1..75: mol_type = other DNA
gtaacggacagcctttcgccgtaaaggaaggcagtggcactacggcgcaacgctttcgcgcctctgtcccggtgc

SEQ ID NO: 711023 - DNA, 75 bp, synthetic construct
  source 1..75: mol_type = other DNA
tacatgcgtttaagtggacgcagtgaagatcaggtcgaactggtcgaaaaatacgccaaagcgcaaggaatgtgg

SEQ ID NO: 711024 - DNA, 75 bp, synthetic construct
  source 1..75: mol_type = other DNA
tggattgcttacccggatacgcttgtcggcaccgactcgcacaccacgatgatcaacggtcttggcgtgttgggg

SEQ ID NO: 711025 - DNA, 75 bp, synthetic construct
  source 1..75: mol_type = other DNA
tcaattcccgccgtgaaggctcctggcatgacaccacgctcggtgcgattgttgaggcgatagcctcccgtaaca

SEQ ID NO: 711026 - DNA, 75 bp, synthetic construct
  source 1..75: mol_type = other DNA
gcacggcttctcatctgaagaaatcacctggtcgtcttgattttcagcgcggcgtactgcaacgcaatgcgaacg

SEQ ID NO: 711027 - DNA, 75 bp, synthetic construct
  source 1..75: mol_type = other DNA
ttgcgagatcatcaacttagggattatccgcgatgatccccatgccctgcgcgccgcatttattgaagccgacaa

SEQ ID NO: 711028 - DNA, 75 bp, synthetic construct
  source 1..75: mol_type = other DNA
cgcgatcgcggcaatgtggaagtgggcgaatgggtggaagtagaaccgtttaacgcgttgttcggaggcctgtaa

SEQ ID NO: 711029 - DNA, 75 bp, synthetic construct
  source 1..75: mol_type = other DNA
actaagaagcagaagaaagagccggaagcgaagcagggcgattacctggtaggtacggatgaaaacgtgctggta

SEQ ID NO: 711030 - DNA, 75 bp, synthetic construct
  source 1..75: mol_type = other DNA
gcacggcttctcgcctcaagaaaacgcctggtcgccttgatttccaacgcggtgtgctgcaacgcaacgccgacg

SEQ ID NO: 711031 - DNA, 75 bp, synthetic construct
  source 1..75: mol_type = other DNA
cgcgagcgcggcaatgttgacgtgggcgaatgggtggaagtcgaaccgtttaacgcgttgttcggaggcctgtaa

SEQ ID NO: 711032 - DNA, 75 bp, synthetic construct
  source 1..75: mol_type = other DNA
gttgagcaatggcaaaccggtgaccaaagcactgttccgccagatgttggctgaagagatgaaagagattgccca

SEQ ID NO: 711033 - DNA, 75 bp, synthetic construct
  source 1..75: mol_type = other DNA
aaaggctgtatgctcgcaatattaaccatggttcctttcatcattgtgattggtattatgatcgcaccagtattt

SEQ ID NO: 711034 - DNA, 75 bp, synthetic construct
  source 1..75: mol_type = other DNA
gtcccgcaggtcaccataacccgcagcgacggcgaccgccatcattttgcgattgctgaccgtggagcctatacc

SEQ ID NO: 711035 - DNA, 75 bp, synthetic construct
  source 1..75: mol_type = other DNA
ccaggcggatgtggtgatcagttccggcggtgtttcagtgggtgaagcggattacaccaaaacgattcttgaaga

SEQ ID NO: 711036 - DNA, 75 bp, synthetic construct
  source 1..75: mol_type = other DNA
tacacctgatgttagaacagttgggatgcgaggtaatcaacttagggattatccgcgacgatccacatgccctgc

SEQ ID NO: 711037 - DNA, 75 bp, synthetic construct
  source 1..75: mol_type = other DNA
ctgaactgcggtcgctgggattacatcttcagctatatcaaaacgttgaaaaactatcccgatcgtgtcctgcca

SEQ ID NO: 711038 - DNA, 75 bp, synthetic construct
  source 1..75: mol_type = other DNA
tgtgtgatacggtgaactttctcgttgaaaaatacgcactgatacgtaccgaccagccgggattcagcgcctgta

SEQ ID NO: 711039 - DNA, 75 bp, synthetic construct
  source 1..75: mol_type = other DNA
aagcaccacggtgaagcgtaagcgcagaactaagaagcagaagaaagagccagaagcgaagcagggcgattacct

SEQ ID NO: 711040 - DNA, 75 bp, synthetic construct
  source 1..75: mol_type = other DNA
gaaaaatcgtgctgccgcgccgtggtgcggttattacgctggcgctgggctggaaggggcagccgcttttcccga

SEQ ID NO: 711041 - DNA, 75 bp, synthetic construct
  source 1..75: mol_type = other DNA
tctaaagaagcatttggcgttgccatgcttgagcgccattacgcggcatatcaccagcgactgacggaattgctg

SEQ ID NO: 711042 - DNA, 75 bp, synthetic construct
  source 1..75: mol_type = other DNA
gccactggtcgggcagatatttacacggaaacgccggtcaaagtgtcaggctttaagcgcgtcatagacgagcag

SEQ ID NO: 711043 - DNA, 75 bp, synthetic construct
  source 1..75: mol_type = other DNA
aactgttgtttctcaaagcggggcagggagtgacggccagcggtaaaaaaatcccgcaggtcaccataacccgca

SEQ ID NO: 711044 - DNA, 75 bp, synthetic construct
  source 1..75: mol_type = other DNA
cataccgtcagcccggataacggttttacaaccagtattgaactcgaagtgaatattgatgatcttgaaatggaa

SEQ ID NO: 711045 - DNA, 75 bp, synthetic construct
  source 1..75: mol_type = other DNA
gtcaccatccgcgcccggagtgcagattttcgtggcacgctcaattcccgccgggaaggctcctggcatgacacc

SEQ ID NO: 711046 - DNA, 75 bp, synthetic construct
  source 1..75: mol_type = other DNA
aaagaaaaacacctgcgcgcactggagcacccgaaagcgaaaccggtcacgcagaagaaagcgccaaaagtaccg

SEQ ID NO: 711047 - DNA, 75 bp, synthetic construct
  source 1..75: mol_type = other DNA
ggcgtaattgccagctggttgcatacccgcgaacctgcgaagaaagaaagcgccacggtgaagcgtaagcgcaga

SEQ ID NO: 711048 - DNA, 75 bp, synthetic construct
  source 1..75: mol_type = other DNA
agggtccttctatcactactttcgctctaaagaagcgtttggcgttgccatgcttgagcgccattacgccgcata

SEQ ID NO: 711049 - DNA, 75 bp, synthetic construct
  source 1..75: mol_type = other DNA
aaagcagaaggtaaaactgaaacgcaaaaagaaagaaaaacacctgcgcgcactggagcacccgaaagcgaaacc

SEQ ID NO: 711050 - DNA, 75 bp, synthetic construct
  source 1..75: mol_type = other DNA
tgcggtcattacgctggcgctgggctggaaagggcagccgcttgtcccgaaaggggcattcacggtggacgagat

SEQ ID NO: 711051 - DNA, 75 bp, synthetic construct
  source 1..75: mol_type = other DNA
aaaggtttgttggtctatcggtcggtgattgcccgtccacatgaagccatgtggcgtcagatggtggagggataa

SEQ ID NO: 711052 - DNA, 75 bp, synthetic construct
  source 1..75: mol_type = other DNA
gctggtcgacagtctgatcctccctaatattcatcccagtatacttcccgcaatcagcggactgaaccatgttga

SEQ ID NO: 711053 - DNA, 75 bp, synthetic construct
  source 1..75: mol_type = other DNA
aaggtcaagcggagcaagctgaaaagacagatacgctggtatcagcaaaccctcaagtcgatgaaccttctccag

SEQ ID NO: 711054 - DNA, 75 bp, synthetic construct
  source 1..75: mol_type = other DNA
atgagccagtcacgctcttccttcccggtggagtacggatgtgctgtcagccgtcacaacttaccgatgtcttca

SEQ ID NO: 711055 - DNA, 75 bp, synthetic construct
  source 1..75: mol_type = other DNA
agtattacagccggattatcatgaatccgccgttcagccacgggcaggatatccggcatatcctgcgggcctttt

SEQ ID NO: 711056 - DNA, 75 bp, synthetic construct
  source 1..75: mol_type = other DNA
ttgacgctgccgattgtgcagtgaaagcggcaaacgtcacgctcgtgcgggtgcatatggccttcggtattggcg

SEQ ID NO: 711057 - DNA, 75 bp, synthetic construct
  source 1..75: mol_type = other DNA
atcgtgatattgccagcgacctgtttggcgtggtcaatgataaccctgacatcattactaatgtttatcgcgatg

SEQ ID NO: 711058 - DNA, 75 bp, synthetic construct
  source 1..75: mol_type = other DNA
agtgcagtccagcaggcaatcgaaacaggagcctctctggccggtgaaatgttagttgacagtctggtgctaccc

SEQ ID NO: 711059 - DNA, 75 bp, synthetic construct
  source 1..75: mol_type = other DNA
ctaacgttaccggtcatggtcaaccgactgaaaatgataccgttctggtttatggtgccggtccaatcggcctga

SEQ ID NO: 711060 - DNA, 75 bp, synthetic construct
  source 1..75: mol_type = other DNA
tcgcctattcaacaaatcttgggctggcggtgtggtcaaacaacaagagctttttctctgacctcgatgagccgg

SEQ ID NO: 711061 - DNA, 75 bp, synthetic construct
  source 1..75: mol_type = other DNA
tccagaactggaagtgattggcactaacgccgaagacgcggtaccgcactatctgcgtaagctctatttatcgta

SEQ ID NO: 711062 - DNA, 75 bp, synthetic construct
  source 1..75: mol_type = other DNA
tcccgagctggaagtgattggtactaacgccgaagacgcggtgccgcattatctgcgtaaactctatttatcgta

SEQ ID NO: 711063 - DNA, 75 bp, synthetic construct
  source 1..75: mol_type = other DNA
cttcacatcacttcgcgaatggccgcaggatgtcgcaaaagctgaacgccgggcaaatgaaccgaccgttcttcc

SEQ ID NO: 711064 - DNA, 75 bp, synthetic construct
  source 1..75: mol_type = other DNA
agtggtcaggaagtgttgtatatcactgaacgcgcagtattccagttaacggcagaaggcgttgaattaattgaa

SEQ ID NO: 711065 - DNA, 75 bp, synthetic construct
  source 1..75: mol_type = other DNA
cgtaaagtggtgttctgcggcacgttcgacgccaaaggcagcaagatcgatgtaacgccagatggcttgcatatc

SEQ ID NO: 711066 - DNA, 75 bp, synthetic construct
  source 1..75: mol_type = other DNA
acaggcctgatgacccgcgacaattacagaacggtaaataacattaccctgggtaaacatccgggggcgaaacaa

SEQ ID NO: 711067 - DNA, 75 bp, synthetic construct
  source 1..75: mol_type = other DNA
gatggaagaaaaaatagacgccgtaatccgtgagaaatacgggttacccccggttatgagcacgcctgtgaaata

SEQ ID NO: 711068 - DNA, 75 bp, synthetic construct
  source 1..75: mol_type = other DNA
tctgtcgctttgcaggacatctttcacacttctacagtgtcgcccaacatgcggtgctttgcagccagctggtgc

SEQ ID NO: 711069 - DNA, 75 bp, synthetic construct
  source 1..75: mol_type = other DNA
aacgtgattccactggcaccgggccatgtctacgggatgtttatggaacgttttaacgatttatcggagttacgc

SEQ ID NO: 711070 - DNA, 75 bp, synthetic construct
  source 1..75: mol_type = other DNA
acgctgcccgccgtgttccagatggatgaaatccttcacgcgctgcgtgaccatattgttggtctgaactgcggt

SEQ ID NO: 711071 - DNA, 75 bp, synthetic construct
  source 1..75: mol_type = other DNA
ctgcggacttagaagatcgtcgcgtagagattaccggacctgtagagcgcaagatggtgatcaacgcgctcaacg

SEQ ID NO: 711072 - DNA, 75 bp, synthetic construct
  source 1..75: mol_type = other DNA
cgggcaggatatccggcatatcctgcgggctttttccctgttgcgtccgggtggcgtgctggttgccgtctgtct

SEQ ID NO: 711073 - DNA, 75 bp, synthetic construct
  source 1..75: mol_type = other DNA
catgaatccgccgttcagtcacgggcaggatatccggcatatcctgcgggctttttccctgttgcgtccgggggg

SEQ ID NO: 711074 - DNA, 75 bp, synthetic construct
  source 1..75: mol_type = other DNA
acaacgcaataaacttctggcagcgcgcattcagcagcagcaggatatcgataacggaatgttgcctgattttat

SEQ ID NO: 711075 - DNA, 75 bp, synthetic construct
  source 1..75: mol_type = other DNA
caggggcgttttgacgatgccgcacgcttgatggaacagatcaccacttccgatgagttaattgatttcctgacc

SEQ ID NO: 711076 - DNA, 75 bp, synthetic construct
  source 1..75: mol_type = other DNA
agagtcggtgaacgtgttgctgtcgatccggtggtcagctgtggtcattgctatccgtgctctataggtaagccg

SEQ ID NO: 711077 - DNA, 75 bp, synthetic construct
  source 1..75: mol_type = other DNA
accgcgtcaggggacgttctacggcttacagatgggtatttcgatttggactataacggatttacgtatctcgca

SEQ ID NO: 711078 - DNA, 75 bp, synthetic construct
  source 1..75: mol_type = other DNA
actgcgtcaggggacgttctacggcttactgatgggtacttcgatttagactataacggctttacctatcttgcg

SEQ ID NO: 711079 - DNA, 75 bp, synthetic construct
  source 1..75: mol_type = other DNA
cggaaacgagaacgatctattcttctcaagggcgggtcgctggcaatcagaaagcaagtggcattcatcgaagaa

SEQ ID NO: 711080 - DNA, 75 bp, synthetic construct
  source 1..75: mol_type = other DNA
caatagattttaagagctttgccgatgcgctaaagataacagaaggtgaattagcctaccttttagaaaacgatc

SEQ ID NO: 711081 - DNA, 75 bp, synthetic construct
  source 1..75: mol_type = other DNA
aggttgaaactacttaccctgttttccgtggggtagtcgattccatcgggattaacatcgaacatgaagatgatg

SEQ ID NO: 711082 - DNA, 75 bp, synthetic construct
  source 1..75: mol_type = other DNA
ccgatggtatccaccgatcctatgccggaaacgagaatgatctattcttctctcgtgccgggaagtggaatagcg

SEQ ID NO: 711083 - DNA, 75 bp, synthetic construct
  source 1..75: mol_type = other DNA
cagtcataacacccacatataattctgaaagaacgattagatgtacaattgattctgttctatctcaatcatata

SEQ ID NO: 711084 - DNA, 75 bp, synthetic construct
  source 1..75: mol_type = other DNA
tgcagaaggtagatatgcgtgaagcgcaattcttgcgccggagccagttcgatgaaattcagtatggcagtgctg

SEQ ID NO: 711085 - DNA, 75 bp, synthetic construct
  source 1..75: mol_type = other DNA
ctgtgctcaagcgcaatggcaagggagccatactacgcccggttatcacggcacacgggcatttcagaatactga

SEQ ID NO: 711086 - DNA, 75 bp, synthetic construct
  source 1..75: mol_type = other DNA
atcgttcaggtattaaaaggcgtctataacgttaagaatgtgattgttgccgatcgcattgatgaacgactggaa

SEQ ID NO: 711087 - DNA, 75 bp, synthetic construct
  source 1..75: mol_type = other DNA
aacgtttgtacgacactggctgtattaggtgtgcacgctgacggtggtttcagtgaatatgccgtggttccggca

SEQ ID NO: 711088 - DNA, 75 bp, synthetic construct
  source 1..75: mol_type = other DNA
tatcagaattgattaagcataatgcgccgtattctgaaactgaagtccttcggactaaaatcaaatactttctta

SEQ ID NO: 711089 - DNA, 75 bp, synthetic construct
  source 1..75: mol_type = other DNA
gaaaacaacaaactgctggaagagcagcggctgacccagcgtacccagtttgatctggagatgatgaacgagcta

SEQ ID NO: 711090 - DNA, 75 bp, synthetic construct
  source 1..75: mol_type = other DNA
taataaattaggttacatgcaggctttcgttgaatacggtattcgtcacaactcgctgggtgctgaatttaaagc

SEQ ID NO: 711091 - DNA, 75 bp, synthetic construct
  source 1..75: mol_type = other DNA
ttgatgaaactggccatagtcagatcatggttgagcctgttgctgatgtgactgcatacggtgttgtggattgca

SEQ ID NO: 711092 - DNA, 75 bp, synthetic construct
  source 1..75: mol_type = other DNA
cggctacctgttacgtggcggtagtggtgagaaatggcatcacctttgcctgccagtgaagatcgacaacagtct

SEQ ID NO: 711093 - DNA, 75 bp, synthetic construct
  source 1..75: mol_type = other DNA
gtttctccagtgaaccgtctgaagtgattcagcaaggaattaccggaaaagaactctctattttcggtgatgctg

SEQ ID NO: 711094 - DNA, 75 bp, synthetic construct
  source 1..75: mol_type = other DNA
gtgcacgctgacggtggtttcagtgaatatgccgtggttccggcaaaaaatgcgtggaaaattcctgaagcagtg

SEQ ID NO: 711095 - DNA, 75 bp, synthetic construct
  source 1..75: mol_type = other DNA
cgctgaaagatatctcccgcccaggtggtggatttgccatgttagctgtcgatcagcgtgaagctatgcgtctga

SEQ ID NO: 711096 - DNA, 75 bp, synthetic construct
  source 1..75: mol_type = other DNA
ttgctcatgttggtgatctgcctgttaacgccggaagggagttatttgaactctggcaatccaactttattcagt

SEQ ID NO: 711097 - DNA, 75 bp, synthetic construct
  source 1..75: mol_type = other DNA
ggctattgctcgggcattgaaaactactcgcgcttcctctccggccgtggacctggcgaaccgccgccgactctg

SEQ ID NO: 711098 - DNA, 75 bp, synthetic construct
  source 1..75: mol_type = other DNA
cgtccggtagcgacacaggtggatgatcttctatcggagattcgtcagcgagcggcaattaacgaacgcgtactg

SEQ ID NO: 711099 - DNA, 75 bp, synthetic construct
  source 1..75: mol_type = other DNA
atgttgaccatcaaagaagaggttattcagtcaaaatgcgaaaacgatggcctgttcttcaaccgttatttctac

SEQ ID NO: 711100 - DNA, 75 bp, synthetic construct
  source 1..75: mol_type = other DNA
ttcagtccaaatgtgaaaacgatggcctgtttttcaatcgctacttttacaagcaagcgaacggaacgaagatgt

SEQ ID NO: 711101 - DNA, 75 bp, synthetic construct
  source 1..75: mol_type = other DNA
gcttgcatcgcgtctggcagtgcaaacaacgcctgttatcgtcatcatgcagcgcatccactacgatgatttgtc

SEQ ID NO: 711102 - DNA, 75 bp, synthetic construct
  source 1..75: mol_type = other DNA
atttctcgaaattgcgcaaaacgcccgtaaagtggtgttctgcggcacgttcgacgccaaaggcagcaagattga

SEQ ID NO: 711103 - DNA, 75 bp, synthetic construct
  source 1..75: mol_type = other DNA
gaagcctactgcttcccaggcggtgtgattcaggcattgctgcgggaaattggtgccggacgtccggggcttttt

SEQ ID NO: 711104 - DNA, 75 bp, synthetic construct
  source 1..75: mol_type = other DNA
aacctgacactaatccactcgctgggcattggcgatcgcgacagcaaaggcactaaccgcctcgctcatgccgaa

SEQ ID NO: 711105 - DNA, 75 bp, synthetic construct
  source 1..75: mol_type = other DNA
cgcgtggatcacgcgggtaatcgcaccgaagaggtgatcccgctggataacgcctcagcctcggaaattgcccgc

SEQ ID NO: 711106 - DNA, 75 bp, synthetic construct
  source 1..75: mol_type = other DNA
caggggaaagtgagtattcgtaccatgaccccactcaatgaacgccagtattaccagctattccttaacctgctg

SEQ ID NO: 711107 - DNA, 75 bp, synthetic construct
  source 1..75: mol_type = other DNA
tcagaaatggagcgcagcggcaacagccaggtgttctatctcaaatacagcaaagccgaagatctggtcgatgtg

SEQ ID NO: 711108 - DNA, 75 bp, synthetic construct
  source 1..75: mol_type = other DNA
acaggaaaatcacggagtgatgtgcagcaacgcattcagcagtttcacagccaggaatttttaaactcactccgg

SEQ ID NO: 711109 - DNA, 75 bp, synthetic construct
  source 1..75: mol_type = other DNA
tgctcccgttctttcagcagttccgggatatgggggtgaaagacaaagcagccggagtatcagcagaaacggcac

SEQ ID NO: 711110 - DNA, 75 bp, synthetic construct
  source 1..75: mol_type = other DNA
agcacaacaacctttgctggcagaaaatacacaaacagcgatatgccttcgccgaaaaaaatgaaactaatggca

SEQ ID NO: 711111 - DNA, 75 bp, synthetic construct
  source 1..75: mol_type = other DNA
atgcgtaagataacaaccgccgagacactggcggcgcaaattcaggacggcgcaaccattgccattagcggtaat

SEQ ID NO: 711112 - DNA, 75 bp, synthetic construct
  source 1..75: mol_type = other DNA
actttacctggtcgcccaaaatgcaggaactggtgaaaaacaatgccattgaagcctactgctttcctggtggcg

SEQ ID NO: 711113 - DNA, 75 bp, synthetic construct
  source 1..75: mol_type = other DNA
cgcttcaaccaactttggtttcggtattccaggcggtattcctggggttgcgctgcgcgaaggcgtgccttatca

SEQ ID NO: 711114 - DNA, 75 bp, synthetic construct
  source 1..75: mol_type = other DNA
gcggcgagaaccagccagcaacgctgaaatctcaaattgtcgccgatgaacgcaccaacagcgtgattgtcagtg

SEQ ID NO: 711115 - DNA, 75 bp, synthetic construct
  source 1..75: mol_type = other DNA
gcccattagacagttacaccattccaacaagggacagcgatggtgagttttcgtgtgagcgttacgatcatgatt

SEQ ID NO: 711116 - DNA, 75 bp, synthetic construct
  source 1..75: mol_type = other DNA
aaatcaatcactcagcgcaatcgcgccaaaataatttgcaatattgcttgactcgcttttttgtcatggcgtatc

SEQ ID NO: 711117 - DNA, 75 bp, synthetic construct
  source 1..75: mol_type = other DNA
gctgccactgagcgcgaagcacgtgcacagctgccgcacgcacatctgatttttgtcgcccgtattcgtcagggg

SEQ ID NO: 711118 - DNA, 75 bp, synthetic construct
  source 1..75: mol_type = other DNA
attaatcatgcggataaggtaattatgctgcaaccgaatgccggagaaatgcaggaagaacgctatgaacacgca

SEQ ID NO: 711119 - DNA, 75 bp, synthetic construct
  source 1..75: mol_type = other DNA
atcccgcagtgaatcccgatctctacgtgaacctagacgaacagcgcgagggatacgcgccgattgagtcaaggg

SEQ ID NO: 711120 - DNA, 75 bp, synthetic construct
  source 1..75: mol_type = other DNA
ctaggtatcgatatggaagtcgcagggttatatgcacttgcacatcaattcggtattgaagcgttggcaatttta

SEQ ID NO: 711121 - DNA, 75 bp, synthetic construct
  source 1..75: mol_type = other DNA
aaaactttctgagggtatccgtctgtttgccgttgaccaacgaaaactggaagacctgcttgccgccaaattcta

SEQ ID NO: 711122 - DNA, 75 bp, synthetic construct
  source 1..75: mol_type = other DNA
agaagcaggcgtttttctgatttcgccgtttgtcgggcgtatttatgactggtatcaggcacgcaagccgatgga

SEQ ID NO: 711123 - DNA, 75 bp, synthetic construct
  source 1..75: mol_type = other DNA
aaggaactgaatttaagaatggccgccactttgctgcatggctgggtctggttccacgccagcattcgagtggcg

SEQ ID NO: 711124 - DNA, 75 bp, synthetic construct
  source 1..75: mol_type = other DNA
gtattcgcacgcccttattttgtctggcgctttatgcagtgcctgacagacagcattgcaatattcaccgttacc

SEQ ID NO: 711125 - DNA, 75 bp, synthetic construct
  source 1..75: mol_type = other DNA
tgcttgggagcaatacgagcagcttgcaaaatggcttatatatttcggcagccttttagaaattggtggaactaa

SEQ ID NO: 711126 - DNA, 75 bp, synthetic construct
  source 1..75: mol_type = other DNA
atgcagcagctacacataggctgtgctttcttacaggcactggattttcaaaggctgtttctgatgataaagccc

SEQ ID NO: 711127 - DNA, 75 bp, synthetic construct
  source 1..75: mol_type = other DNA
ctcgttctcagttaataaacagtattgatatcctccgggcccgccgggcaaccggcctgatggcccgcgacaatt

SEQ ID NO: 711128 - DNA, 75 bp, synthetic construct
  source 1..75: mol_type = other DNA
gccatgcgcatgatgtttgccgcggctggcgcacccgctccggtagccgatagcgttttaactgatttcaaagtt

SEQ ID NO: 711129 - DNA, 75 bp, synthetic construct
  source 1..75: mol_type = other DNA
gtgattaacgatatcgcggtttccctttcaaatatctgtcgctttgccggtcatctttcacacttctacagtgtc

SEQ ID NO: 711130 - DNA, 75 bp, synthetic construct
  source 1..75: mol_type = other DNA
acacttctacagcgtcgcccaacatgcggtgctttgcagccagctggtgccgcaggaatttgcttttgaagcgtt

SEQ ID NO: 711131 - DNA, 75 bp, synthetic construct
  source 1..75: mol_type = other DNA
tctgtcgctttgctggccatctttcgcacttctacagggtcgcccaacatgcggtactttgcagccagctggtgc

SEQ ID NO: 711132 - DNA, 75 bp, synthetic construct
  source 1..75: mol_type = other DNA
tctgtcgctttgcaggccatctttcgcacttctacagggtcgcccaacatgcggtcctttgcagccagcttgtgc

SEQ ID NO: 711133 - DNA, 75 bp, synthetic construct
  source 1..75: mol_type = other DNA
tttgaaaagcgttggcatccgtttgtgaccgccgtgctgattggccttatcgccctgctggcctggccgctgagt

SEQ ID NO: 711134 - DNA, 75 bp, synthetic construct
  source 1..75: mol_type = other DNA
ccggggctaatcttgctcgataactatcttcctgacggtagagggattaatttattgcatgaactggtgcaggcg

SEQ ID NO: 711135 - DNA, 75 bp, synthetic construct
  source 1..75: mol_type = other DNA
gcgaaaactgttcaaagagcctggtgtgcaacatacggcagaaacggtggcgcaggcactgaccatcagccgcac

SEQ ID NO: 711136 - DNA, 75 bp, synthetic construct
  source 1..75: mol_type = other DNA
gtgcaacatacggcagaaacggtggcgcaggcactgaccatcagtcgcaccactgccaggcgttatcttgaatat

SEQ ID NO: 711137 - DNA, 75 bp, synthetic construct
  source 1..75: mol_type = other DNA
atgtcatttattaaaactttttccgggaaacatttttattatgacaagataaataaagatgacatcgttattaac

SEQ ID NO: 711138 - DNA, 75 bp, synthetic construct
  source 1..75: mol_type = other DNA
cgcaggaatttgcttttgaagcgttaatgcatgatgcaacagaagcgtattgccaggacattcccgcaccactga

SEQ ID NO: 711139 - DNA, 75 bp, synthetic construct
  source 1..75: mol_type = other DNA
atccgtgagaaatacgggttacccccagttatgagtacgcccgtgaaatatgccgatcttatcatgctggcaacc

SEQ ID NO: 711140 - DNA, 75 bp, synthetic construct
  source 1..75: mol_type = other DNA
tctgtcgctttgccggccatctttcgcacttctacagggtcgcccaacatgcggttctttgcagccagctcgtgc

SEQ ID NO: 711141 - DNA, 75 bp, synthetic construct
  source 1..75: mol_type = other DNA
attttccgtgaaattcgcggacttttccgcgccggaaagcctacggacctgctcagccttgcgaacgtgatcgag

SEQ ID NO: 711142 - DNA, 75 bp, synthetic construct
  source 1..75: mol_type = other DNA
gtgttcggcactggcgcacacgcaaagcttcctctggaagctatgtgggacagcatgcttgttcctctgttgaaa

SEQ ID NO: 711143 - DNA, 75 bp, synthetic construct
  source 1..75: mol_type = other DNA
ggaagattacatcggctggctggggaataacttcgatccgtctatctcatggaaagaccttgagtggatccgcga

SEQ ID NO: 711144 - DNA, 75 bp, synthetic construct
  source 1..75: mol_type = other DNA
cgatatcctccgggctcgccgggcgaccggcctgatgacccgcgacaattacagaacggtaaataacattaccct

SEQ ID NO: 711145 - DNA, 75 bp, synthetic construct
  source 1..75: mol_type = other DNA
gtgttacagacggcattggctttacgcttacagatgaaaacattatccgacacacatgtacgggaggcatcgcgc

SEQ ID NO: 711146 - DNA, 75 bp, synthetic construct
  source 1..75: mol_type = other DNA
cgatgaggaggtttatcgccgaaccagcgaccgctcagaaaaaaataagcgttattcccgtagcgataattctcg

SEQ ID NO: 711147 - DNA, 75 bp, synthetic construct
  source 1..75: mol_type = other DNA
aaagggatacttgatccggaagatgcgcgggatgcagtacgctttggcgctgacggaattgtggtttctaaccac

SEQ ID NO: 711148 - DNA, 75 bp, synthetic construct
  source 1..75: mol_type = other DNA
tgtggcgaaagtgccattgctgggcgatatcccgttgattggtaacctttttaaatcgacggcggataaaaaaga

SEQ ID NO: 711149 - DNA, 75 bp, synthetic construct
  source 1..75: mol_type = other DNA
ccactcagccgatactccctgcccagaatatgtcattaccagcagaagtacgcgcgtttcaaaatgccgggaggc

SEQ ID NO: 711150 - DNA, 75 bp, synthetic construct
  source 1..75: mol_type = other DNA
atgcgcgacgcggcgaagttcaggccgcaaaagcggcggatgcacatggcattccgtttactctctcgaccgttt

SEQ ID NO: 711151 - DNA, 75 bp, synthetic construct
  source 1..75: mol_type = other DNA
tgacgggattgtggtttctaaccacggcggccgccagttagatggcgtactctcttctgcccgtgcgctgcctgc

SEQ ID NO: 711152 - DNA, 75 bp, synthetic construct
  source 1..75: mol_type = other DNA
attctgaaaaacatgtctgacttaagcctggaaacgacgctgtttaatgagaaattgtcgatgccggtggcgctg

SEQ ID NO: 711153 - DNA, 75 bp, synthetic construct
  source 1..75: mol_type = other DNA
tgtggttcagcgctctcccttaagacgaggcatggcaacatactggtttctgaaaggagagaggcaggcgggtca

SEQ ID NO: 711154 - DNA, 75 bp, synthetic construct
  source 1..75: mol_type = other DNA
tgttctgttgacggtcgggcgagttcagacaccaacgctggcacttgttgttgcccgcgatctcgaaattgaaaa

SEQ ID NO: 711155 - DNA, 75 bp, synthetic construct
  source 1..75: mol_type = other DNA
tgttgtcgctgtatggcgatttacaacagcagcataaagaaaaatgcctgatggtggcgatgctggcgtccgcgg

SEQ ID NO: 711156 - DNA, 75 bp, synthetic construct
  source 1..75: mol_type = other DNA
atgagagtatttattgcagaaaagccaaatgttgcgaaagcgattgccgctgtgttaggcgcgacaaacaaaaaa

SEQ ID NO: 711157 - DNA, 75 bp, synthetic construct
  source 1..75: mol_type = other DNA
ggacatagcactatcatgatgacaatgcgctacgcacactttgcgccaaatcacctggatgcagcgattgcactg

SEQ ID NO: 711158 - DNA, 75 bp, synthetic construct
  source 1..75: mol_type = other DNA
actaaaggaaagaagaaccgcactgtaccgatttcacctcaattgcaggctatgcttcctaaaaaacgaggagcg

SEQ ID NO: 711159 - DNA, 75 bp, synthetic construct
  source 1..75: mol_type = other DNA
gacaagtacaaatgcaaggtatgtggtaaaggacttattcgtcgtccgtccaaaaaatccggtcacttctggtct

SEQ ID NO: 711160 - DNA, 75 bp, synthetic construct
  source 1..75: mol_type = other DNA
gtttattcagatggagaggatgaagacgaagaaaatgagtctgaacagtctcttccatcaatgaaaaatggtgac

SEQ ID NO: 711161 - DNA, 75 bp, synthetic construct
  source 1..75: mol_type = other DNA
ctcattagcgtacagactggatgaacaagaactgattttgtgctcttttgaagcacgtaaccaaacagggcttaa

SEQ ID NO: 711162 - DNA, 75 bp, synthetic construct
  source 1..75: mol_type = other DNA
caagaactgattttgtgctcttttgaagcacgtaaccaaacagggcttaacggccctgttttatcactgactcgc

SEQ ID NO: 711163 - DNA, 75 bp, synthetic construct
  source 1..75: mol_type = other DNA
agtcgcgggcggcgtacagatttctgacaagtacaaatgcaacgtatgcggcaaagggcttattcgccgtgcatc

SEQ ID NO: 711164 - DNA, 75 bp, synthetic construct
  source 1..75: mol_type = other DNA
cccccgtcgttttaatgacggtacgcttaacacggcgatggtgaatattcataaattcgttgatgacccggcgca

SEQ ID NO: 711165 - DNA, 75 bp, synthetic construct
  source 1..75: mol_type = other DNA
gcatccagtagctacggttataccgcagagcaggtgctggcaacctgtcagtctttatatgaaacacataaactg

SEQ ID NO: 711166 - DNA, 75 bp, synthetic construct
  source 1..75: mol_type = other DNA
ccccgggattccgctacggctctgccatcgcaatccccccgtttatctccggacagccagattcccgattatttt

SEQ ID NO: 711167 - DNA, 75 bp, synthetic construct
  source 1..75: mol_type = other DNA
tttatcataacccgcgctttgaagtgatggtgcctggcggcatattgcgttcgcataatagcgggatcattggcc

SEQ ID NO: 711168 - DNA, 75 bp, synthetic construct
  source 1..75: mol_type = other DNA
gatattcctgggttttgtacctttatggaacacgaactggttgccaaagagacggatggactgccttatcgttat

SEQ ID NO: 711169 - DNA, 75 bp, synthetic construct
  source 1..75: mol_type = other DNA
cgcatgggtacaattgcccattccggcactggtggcattatttttcaccatcgcattttgtagcggcatcggcac

SEQ ID NO: 711170 - DNA, 75 bp, synthetic construct
  source 1..75: mol_type = other DNA
gaagcgcaaatggaaagaaaagagtcttcctttaatcaggcgctctataataaaactattcttgaaaatgtaatg

SEQ ID NO: 711171 - DNA, 75 bp, synthetic construct
  source 1..75: mol_type = other DNA
ccattaaacgctcggatgatttaaacagcggcagcctgaattttggtctgcttctgggtgcctctaaccccagtt

SEQ ID NO: 711172 - DNA, 75 bp, synthetic construct
  source 1..75: mol_type = other DNA
ctacctgatcagaagagtcaaaaccctgagtggatagcatttaccaatacgctttggaagttgcagtatttgcag

SEQ ID NO: 711173 - DNA, 75 bp, synthetic construct
  source 1..75: mol_type = other DNA
actgtcgttgtggcatttagtctcggtaagcgggatcgacgacgagcgagggtggcgacgcggcaggtaatgact

SEQ ID NO: 711174 - DNA, 75 bp, synthetic construct
  source 1..75: mol_type = other DNA
atgaccgatctcttttccagccctgaccacacactcgacgcgcttggcctgcgctgcccggaaccagtaatgatg

SEQ ID NO: 711175 - DNA, 75 bp, synthetic construct
  source 1..75: mol_type = other DNA
ttgattatgccgatatttcccaacgcgaacagttagccgcagcattaaagcgttggccgttactgaatgagtttg

SEQ ID NO: 711176 - DNA, 75 bp, synthetic construct
  source 1..75: mol_type = other DNA
aagcaggcattttcactgcctgatattgattatgccgatatttcccaacgtgaacagggtgatgctgccaactta

SEQ ID NO: 711177 - DNA, 75 bp, synthetic construct
  source 1..75: mol_type = other DNA
gagcatatcgatgccggtatctcactgtgcgacgcggtgaattttatcgtggagaaatacgatctggtacgaacc

SEQ ID NO: 711178 - DNA, 75 bp, synthetic construct
  source 1..75: mol_type = other DNA
tggcaatgggttgcttctacagtctgaacgagaagatgtacgtccgcattgttgaagagatagaagcccgtaaac

SEQ ID NO: 711179 - DNA, 75 bp, synthetic construct
  source 1..75: mol_type = other DNA
ctttccgcgcaattgccggtaaccgcccactgttcattttgtgcattgccaacctctgtaccttaggggcgttta

SEQ ID NO: 711180 - DNA, 75 bp, synthetic construct
  source 1..75: mol_type = other DNA
ctttaccgatatgggaaccggcatcatgttggattcccgacgcaagatcggtccaaaaggtaaattccgtccttt

SEQ ID NO: 711181 - DNA, 75 bp, synthetic construct
  source 1..75: mol_type = other DNA
tttaatctgcttaataaagtcatcgagtctgaaagccgggttggatgggtttttcttttatgcctattacttgga

SEQ ID NO: 711182 - DNA, 75 bp, synthetic construct
  source 1..75: mol_type = other DNA
gtgggcgcaggcattgaacgcagagcaggtataagaataacagaaaaagtaaaacaacatgccgctccggtaacg

SEQ ID NO: 711183 - DNA, 75 bp, synthetic construct
  source 1..75: mol_type = other DNA
taaaacggtgatggccactatcctgtttatgctttatggactgtttttcagcatgatgaactgttcctacggcgc

SEQ ID NO: 711184 - DNA, 75 bp, synthetic construct
  source 1..75: mol_type = other DNA
gccaaccttattatttgaatgaaggcaattggtctgtttttcgggacagcatgatttctacggctaaaatattac

SEQ ID NO: 711185 - DNA, 75 bp, synthetic construct
  source 1..75: mol_type = other DNA
ctgaattactgatctgcaccaggggaaatcagacagaagtcgccagaatactgaactgcaatcgtgccacagtca

SEQ ID NO: 711186 - DNA, 75 bp, synthetic construct
  source 1..75: mol_type = other DNA
ctgaactgcaatcgtgccacagtcagaaaatacattgatgataaagatgcgaaaaagcacgccgtcgtcaatggc

SEQ ID NO: 711187 - DNA, 75 bp, synthetic construct
  source 1..75: mol_type = other DNA
gacctggcctctaacatcctgctggatatcggtacgctttatcttttgaagttttataccgacgttctggggctg

SEQ ID NO: 711188 - DNA, 75 bp, synthetic construct
  source 1..75: mol_type = other DNA
tggcgtgcgttcggaaggcacggtgtacaccggctttaccttctttcgcaaggtgtcccaggcactggctggctt

SEQ ID NO: 711189 - DNA, 75 bp, synthetic construct
  source 1..75: mol_type = other DNA
cggctactttacgtctgccctttaaagagaaactctcttacggtatcggcgatctggcctctaacatcctgctgg

SEQ ID NO: 711190 - DNA, 75 bp, synthetic construct
  source 1..75: mol_type = other DNA
gtgaatatcgttgaatgttatatgccagtatttaaactcatatcatctattaaagtctttccagaaggatatggt

SEQ ID NO: 711191 - DNA, 75 bp, synthetic construct
  source 1..75: mol_type = other DNA
ctgaactccattggcttactgttccgggcaaagctcgcatgggcaatcagtatcattttgttgttgatagcgcta

SEQ ID NO: 711192 - DNA, 75 bp, synthetic construct
  source 1..75: mol_type = other DNA
atttaatgctcgctacgaaaatcatatagatgttcaatatcttgatgattatagaaagtatgagactgttgtagc

SEQ ID NO: 711193 - DNA, 75 bp, synthetic construct
  source 1..75: mol_type = other DNA
ccggaagaaatagagttattcagagttatatatcagcataatttctatttgttaggagttttgcgcgatttagat

SEQ ID NO: 711194 - DNA, 75 bp, synthetic construct
  source 1..75: mol_type = other DNA
acaacctttacaatattttacacagtaattccgatataccaaaatgcaaatctgcaggaatcaatagcaaaaaaa

SEQ ID NO: 711195 - DNA, 75 bp, synthetic construct
  source 1..75: mol_type = other DNA
gttttaaatggtgaagagattaataatgatatgctcgtttcaatgttgttgaactccggtcatgaagtggtcaac

SEQ ID NO: 711196 - DNA, 75 bp, synthetic construct
  source 1..75: mol_type = other DNA
atgatatgctcgtctcaatgttgctgaactccgggcatggtattttcagcgatgacgatgaaacgaaaactgaca

SEQ ID NO: 711197 - DNA, 75 bp, synthetic construct
  source 1..75: mol_type = other DNA
agggcggcgcatctaccaccgaagatcaaatcaagtacggctggaactacgccctgcttatcaaccatggtccgt

SEQ ID NO: 711198 - DNA, 75 bp, synthetic construct
  source 1..75: mol_type = other DNA
tcttcgatacattatcagactcaattttttggtatatcctatcttcagttcattgtaaactttataccaaaagaa

SEQ ID NO: 711199 - DNA, 75 bp, synthetic construct
  source 1..75: mol_type = other DNA
aatgcgggttaaatattcgtgttgaagaaaaaaataagatctcatttaaacaaaaaaagaataaatcatcatggt

SEQ ID NO: 711200 - DNA, 75 bp, synthetic construct
  source 1..75: mol_type = other DNA
caccgctgaagccgtgaacgtggcccacgcagtgggcgtccgcgcctggtttttagcgaatcgcgcgggggagcc

SEQ ID NO: 711201 - DNA, 75 bp, synthetic construct
  source 1..75: mol_type = other DNA
tctgcgccgttacttcgaacagcgtgtcgccacacataaagaagctcactggcaggcttattatcaagcccgcca

SEQ ID NO: 711202 - DNA, 75 bp, synthetic construct
  source 1..75: mol_type = other DNA
acgcatgttagtcactcttgctaccgggcgcggtttgatgttggtgggggaacctggcaccgcaaaatctctcct

SEQ ID NO: 711203 - DNA, 75 bp, synthetic construct
  source 1..75: mol_type = other DNA
ctggcaggacgtgatgaaagccggggcactggcgctgcatatttccggcactttcccggatctgggggtacaact

SEQ ID NO: 711204 - DNA, 75 bp, synthetic construct
  source 1..75: mol_type = other DNA
gccgatatacgaaggcttcatggacaaagcggatatcgcagatgctatgaagtcgctgaacgatttccacccgct

SEQ ID NO: 711205 - DNA, 75 bp, synthetic construct
  source 1..75: mol_type = other DNA
gaggacaacactgtcgctctgtttagcgatatcatccccgatccgcctatcgctacagtggtagcaggtatcgag

SEQ ID NO: 711206 - DNA, 75 bp, synthetic construct
  source 1..75: mol_type = other DNA
ggcttgtgtggggttggtgctgatgatttggctgtaccagacgctgaagttcagaaatcgcgcgctggcgctgga

SEQ ID NO: 711207 - DNA, 75 bp, synthetic construct
  source 1..75: mol_type = other DNA
gtttgaggcctttgaagccggcagacggtatgccaacaccgactggcagcaggatctgcagggcatggaaggcga

SEQ ID NO: 711208 - DNA, 75 bp, synthetic construct
  source 1..75: mol_type = other DNA
ccaccaaagttatgtatcttttcatcttcacgttttagtaccgccctacaagagaatgccgcgacatctttgcct

SEQ ID NO: 711209 - DNA, 75 bp, synthetic construct
  source 1..75: mol_type = other DNA
tgcagaaagcgtcattcctgaaattaaacatcaggatgaggtgcgggtacgcaaaatatgattttattggctcac

SEQ ID NO: 711210 - DNA, 75 bp, synthetic construct
  source 1..75: mol_type = other DNA
gccggtgcttctgtacttatctcgcttgagtccggccccctgatgacgatgattattctgggggccgccgggcag

SEQ ID NO: 711211 - DNA, 75 bp, synthetic construct
  source 1..75: mol_type = other DNA
tccccatcctcgctgtctggctgttctgtatgggcgcctccattaaaatcagtgcaaccgggaccgttctcaaaa

SEQ ID NO: 711212 - DNA, 75 bp, synthetic construct
  source 1..75: mol_type = other DNA
gtgctaactcacgcgctggaagcatatgtttcgccgcacgcaagcgacttcactgacgctctggcagaaaaagca

SEQ ID NO: 711213 - DNA, 75 bp, synthetic construct
  source 1..75: mol_type = other DNA
gttgtttgcgccggggctgcatgtgctgtcgtataacgaagtgccggatgagctggagttgaagattatgggggc

SEQ ID NO: 711214 - DNA, 75 bp, synthetic construct
  source 1..75: mol_type = other DNA
gtgctgctggtgccaccgcagctgcgccctttgctggcgcgttatgcaaggttgtttgcgccggggctgcatgtg

SEQ ID NO: 711215 - DNA, 75 bp, synthetic construct
  source 1..75: mol_type = other DNA
gtttatcgacccggttgctatgtcgcagattacgcgcattgaaatccccggtgtgaccggcgtattaaccggcat

SEQ ID NO: 711216 - DNA, 75 bp, synthetic construct
  source 1..75: mol_type = other DNA
gaagtgaccagcgcctgtgtcatcagcgatccagagaaagggattaaatatccccttttcgataatgcactttat

SEQ ID NO: 711217 - DNA, 75 bp, synthetic construct
  source 1..75: mol_type = other DNA
gtttatacagcggaccgggaagtctcaaggtaattagccgtttctctcataaacacatctggattatttgcgacg

SEQ ID NO: 711218 - DNA, 75 bp, synthetic construct
  source 1..75: mol_type = other DNA
ccttccttgcaggttcgccattgattgacacgttgcgtcagtcgctgcctgatagcaaccgcatcagtattttta

SEQ ID NO: 711219 - DNA, 75 bp, synthetic construct
  source 1..75: mol_type = other DNA
cttttcagaggggacctggatcgccaccatcaacgatcccacattgttgcagtcctgcaagctggtactggcagt

SEQ ID NO: 711220 - DNA, 75 bp, synthetic construct
  source 1..75: mol_type = other DNA
gaactgatgacctttaccgaaggtaatcgcctgccctgcaccgtggagccgtataatcaccgggatcttaccgcg

SEQ ID NO: 711221 - DNA, 75 bp, synthetic construct
  source 1..75: mol_type = other DNA
ggcagcgctggcggatgcaacattgcgtaccaacccacgagcggctgatgcctccgctattgaggaactgcttga

SEQ ID NO: 711222 - DNA, 75 bp, synthetic construct
  source 1..75: mol_type = other DNA
atatcgaccgcttcgttaaccgcgatatgtttggttataccgttccgaccgcgatgttccagtcgattaatgcct

SEQ ID NO: 711223 - DNA, 75 bp, synthetic construct
  source 1..75: mol_type = other DNA
gctgggtgcaagtgagatccatccgtcattcctctatctgtccctggcgattatcgtctgcggctatggcctgtt

SEQ ID NO: 711224 - DNA, 75 bp, synthetic construct
  source 1..75: mol_type = other DNA
ggcgtgtgtaggagtggtactgatgatttggctgtatcaggcgctgaaattcagaaaccgcgcgctggcgctgga

SEQ ID NO: 711225 - DNA, 75 bp, synthetic construct
  source 1..75: mol_type = other DNA
ttcagcgcctactgttcgctggtgtatgtcacgccgatccttggcggtttcctcgcggataaggttctcggcaac

SEQ ID NO: 711226 - DNA, 75 bp, synthetic construct
  source 1..75: mol_type = other DNA
gcgaactatctggcgggcgtgattgccgatcagacatcgcaagcttcgtttgatgcttccggagcgatcaactac

SEQ ID NO: 711227 - DNA, 75 bp, synthetic construct
  source 1..75: mol_type = other DNA
aaaaccagaaacagcgtaaggagctggggctgattgttaccctcaccttcttcagcatgttgttctgggccttcg

SEQ ID NO: 711228 - DNA, 75 bp, synthetic construct
  source 1..75: mol_type = other DNA
cactgacgcatacgaaaaaagccatcgtatttttctgcgtaaaaaacatcgccgtagtgatggacgtattggttg

SEQ ID NO: 711229 - DNA, 75 bp, synthetic construct
  source 1..75: mol_type = other DNA
gattttttgtcccttgctaatgtcatttctaataacacaaaagacaagtgaaacactcactgctgtgttagccgg

SEQ ID NO: 711230 - DNA, 75 bp, synthetic construct
  source 1..75: mol_type = other DNA
aacgcgatcgtttattacaactctgcgatcctgtcacgtttgctgaggcgactggaaacagaaggtaatgaaaag

SEQ ID NO: 711231 - DNA, 75 bp, synthetic construct
  source 1..75: mol_type = other DNA
agaaccggatagagtcttatcaccagttacgtgcagcagtggccaaagttggtggaaagaaagagttaaccggaa

SEQ ID NO: 711232 - DNA, 75 bp, synthetic construct
  source 1..75: mol_type = other DNA
tacgcgccgagcgtattgcgcgcgcaacacgtccttttcttgcccgcggtaatcgcgttcgtcgctgccaacgct

SEQ ID NO: 711233 - DNA, 75 bp, synthetic construct
  source 1..75: mol_type = other DNA
atgaccgaaaacgctgttctccagttacgcgccgagcgtattgcgcgcgcaacacgtccttttcttgcccgcggt

SEQ ID NO: 711234 - DNA, 75 bp, synthetic construct
  source 1..75: mol_type = other DNA
atgattacacaacaaattatcagtagtgagttggaagttttaaagaaacatattgactcaggagatattagaatc

SEQ ID NO: 711235 - DNA, 75 bp, synthetic construct
  source 1..75: mol_type = other DNA
ccggggacctttaaacatatcgcgctggaagagatctacgccctgtgtagcgcctattccacaacctacaacatg

SEQ ID NO: 711236 - DNA, 75 bp, synthetic construct
  source 1..75: mol_type = other DNA
tggcgtcgatagcctggcagtggcgattggtacggcacatggtctgtacagtaaaacgccgaagattgatttcca

SEQ ID NO: 711237 - DNA, 75 bp, synthetic construct
  source 1..75: mol_type = other DNA
actggcgcactttattctgggtaatggctgaaattagcaccgtactgttgctgggctgtctgttatttattcatg

SEQ ID NO: 711238 - DNA, 75 bp, synthetic construct
  source 1..75: mol_type = other DNA
tggaagagatctacgccctgtgtagcgcctattccacgacctataacatgccgctggcactgcatcttgatcacc

SEQ ID NO: 711239 - DNA, 75 bp, synthetic construct
  source 1..75: mol_type = other DNA
tggaagagatctacgccctgtgtagtgcctattccacaacctacaacatgccactggcgctgcatctcgaccacc

SEQ ID NO: 711240 - DNA, 75 bp, synthetic construct
  source 1..75: mol_type = other DNA
cataacgccgagacgatccaggcgatcctcgaagtgtgcagtgaaatgcgatcgccggtgatcctcgccgggacg

SEQ ID NO: 711241 - DNA, 75 bp, synthetic construct
  source 1..75: mol_type = other DNA
gcaaaaagtcgcttctgtttgctgatgttcgacactgaaccaatgaaacccagtaataccgggcgtttaattgcc

SEQ ID NO: 711242 - DNA, 75 bp, synthetic construct
  source 1..75: mol_type = other DNA
tgatgctgtgctttctgattttgactggaactttgctaccaaacgcgtggcgcttgcagatacgagcaatccacc

SEQ ID NO: 711243 - DNA, 75 bp, synthetic construct
  source 1..75: mol_type = other DNA
gaagccagcaaggaagcgggggaatgttcgctgcactttgaggcctgccgtgatgctgtgctttctgattttgac

SEQ ID NO: 711244 - DNA, 75 bp, synthetic construct
  source 1..75: mol_type = other DNA
cggcgatccgcgtcgagtggcgtgggataaaacaacgcatgacttccccagcgtgactggcgatacccgctcgtt

SEQ ID NO: 711245 - DNA, 75 bp, synthetic construct
  source 1..75: mol_type = other DNA
cgtctggaaaatgatgagttaattgtcggcagtgaagatggtattgacccggtttcgctggcggccctgacgcgt

SEQ ID NO: 711246 - DNA, 75 bp, synthetic construct
  source 1..75: mol_type = other DNA
caatatgtacaatcgcgtgattcttagtgctggctcgcatagccagaatgaatcacaggaaccacagccaccggt

SEQ ID NO: 711247 - DNA, 75 bp, synthetic construct
  source 1..75: mol_type = other DNA
tacgggaggtatctcgctgcccgtctcccgtcaccatctggaagacactgctcatccgactgctggaccagcatt

SEQ ID NO: 711248 - DNA, 75 bp, synthetic construct
  source 1..75: mol_type = other DNA
ttgccgaaatgccggcctccgtggcgctgcattatgcggtactgccgctgcgtctggaaaatgatgagttaattg

SEQ ID NO: 711249 - DNA, 75 bp, synthetic construct
  source 1..75: mol_type = other DNA
tacccatctgattgtgttcgcataaccgagatcatgccgacaggcatacgcaatcctactgctgagcagcgcatt

SEQ ID NO: 711250 - DNA, 75 bp, synthetic construct
  source 1..75: mol_type = other DNA
caacgcgtccttttcttgcccgtggtaatcgcgttcgtcgttgccaacgctgtcttttgccagagaaactttgcc

SEQ ID NO: 711251 - DNA, 75 bp, synthetic construct
  source 1..75: mol_type = other DNA
tgcagttcagcatcagtggctcacggaacagcaggccggtgaaatctggcggcaatatgtgccgcatcagttcct

SEQ ID NO: 711252 - DNA, 75 bp, synthetic construct
  source 1..75: mol_type = other DNA
gatgcaatcactattactcaaagcaggtttaaacacagaacaggttgcacaactggagtccgaaaatgaaggaga

SEQ ID NO: 711253 - DNA, 75 bp, synthetic construct
  source 1..75: mol_type = other DNA
cggtcatattaatcgttcagcaattaacgtgttgttattgcgccatgaacgcagttctctgccgctcggcaagtt

SEQ ID NO: 711254 - DNA, 75 bp, synthetic construct
  source 1..75: mol_type = other DNA
aaaaacggcagcctgttattcattctgccgggtggcggaaccgggccggacggaagagccctgccttcgttcgcc

SEQ ID NO: 711255 - DNA, 75 bp, synthetic construct
  source 1..75: mol_type = other DNA
cgtcaccggatatcgacatcaccatcaacaacaacacactggcaaacctcacagagcgactcatgacgctgaccc

SEQ ID NO: 711256 - DNA, 75 bp, synthetic construct
  source 1..75: mol_type = other DNA
gttacaactggcggaagggcgggcagatctctacacggaaatgccagtgaaagtcagtggctttaaacagccgat

SEQ ID NO: 711257 - DNA, 75 bp, synthetic construct
  source 1..75: mol_type = other DNA
aggcaatgtgtttgtgttacgcaagacttatcagaacgagcaggcagcaagacgcgcagcggcggcaaagtggca

SEQ ID NO: 711258 - DNA, 75 bp, synthetic construct
  source 1..75: mol_type = other DNA
gcgtatacgggggtgcgcgcctactggcttgatcttaattacgggaaaaagaaaaaagtcagcgtgaaacgccgc

SEQ ID NO: 711259 - DNA, 75 bp, synthetic construct
  source 1..75: mol_type = other DNA
agcgcgtggtatccgccatcgctcatcggtatggtctgaaaccgcaaatcagcgaaatgctgatggatatcgaaa

SEQ ID NO: 711260 - DNA, 75 bp, synthetic construct
  source 1..75: mol_type = other DNA
caggaaatagccttcaccgacaaattgtacgccgccgattctcgcctggtggtggcgaaaaattccgacattcag

SEQ ID NO: 711261 - DNA, 75 bp, synthetic construct
  source 1..75: mol_type = other DNA
cgacctatgcgccgtttgaatcaaaaaattcacaaggcgaactggttggctttgacatcgatttggcgaaggagc

SEQ ID NO: 711262 - DNA, 75 bp, synthetic construct
  source 1..75: mol_type = other DNA
attctgctcgatatggacacaccgggcggaatggtggcgggagcatttgactgtgctgacatcatcgcccgtgtg

SEQ ID NO: 711263 - DNA, 75 bp, synthetic construct
  source 1..75: mol_type = other DNA
cggcagggacagggtaaaagcgccagcggtaaaccactaccggttatcactatcacacgtaaggacggcgacagt

SEQ ID NO: 711264 - DNA, 75 bp, synthetic construct
  source 1..75: mol_type = other DNA
ggtggcgaaaaattccgacattcagccgacagtcgaatcgctgaaaggcaagcgggtaggcgtattgcagggcac

SEQ ID NO: 711265 - DNA, 75 bp, synthetic construct
  source 1..75: mol_type = other DNA
caggaaattgctttcaccgacaaactgtacgctgccgattctcgtctggtggtcgcgaaaaattctgacattcag

SEQ ID NO: 711266 - DNA, 75 bp, synthetic construct
  source 1..75: mol_type = other DNA
tgcggaaaattggcaagaaggacaggaagcatgcgcgccatggtggcgcgcatgcttaagggttactctgttttt

SEQ ID NO: 711267 - DNA, 75 bp, synthetic construct
  source 1..75: mol_type = other DNA
cataagaaaagagcgcaaaacaggcggtcgcttttcttaccagataaacccgatgccgttcaggtgcggcaatcc

SEQ ID NO: 711268 - DNA, 75 bp, synthetic construct
  source 1..75: mol_type = other DNA
ccaatccgggttgtagcggtggagaaatcgccgccgcgctgaataccccaaccacagccattaatgctgagttgc

SEQ ID NO: 711269 - DNA, 75 bp, synthetic construct
  source 1..75: mol_type = other DNA
ctcacccgactgctggaccagcactacggccttacgctgaatgacacaccgttcgcggatgaacgtgtgattgag

SEQ ID NO: 711270 - DNA, 75 bp, synthetic construct
  source 1..75: mol_type = other DNA
tctctgcatatcaggaaaaccttcagtatgaaaacattacccgatacacacgtacgggaggcatcgagctgcccg

SEQ ID NO: 711271 - DNA, 75 bp, synthetic construct
  source 1..75: mol_type = other DNA
agcagaactctggcgagtagaaaagctaggggatttacctgatgtcacttttgaagaggcctgcctaagatggct

SEQ ID NO: 711272 - DNA, 75 bp, synthetic construct
  source 1..75: mol_type = other DNA
gatgtatgcggcgggtaacgtggggtctattatcgcacctatcgcctgtggttacgcccaggaagagtacagctg

SEQ ID NO: 711273 - DNA, 75 bp, synthetic construct
  source 1..75: mol_type = other DNA
ctggcgcaagccgttaaagagcagccttcccgctatattgactcaacggcgtcactcgttcgtgccggaataaaa

SEQ ID NO: 711274 - DNA, 75 bp, synthetic construct
  source 1..75: mol_type = other DNA
gttaaaagatgcttgtcatattgatatattaagtatcgtagaggctacaattaatgaagttcgcgactgtggaaa

SEQ ID NO: 711275 - DNA, 75 bp, synthetic construct
  source 1..75: mol_type = other DNA
aaatgcaccgaagagcatcaggcgattgtgcgtaagtggctggaagaacacaaactggaagaggtacgcaccagc

SEQ ID NO: 711276 - DNA, 75 bp, synthetic construct
  source 1..75: mol_type = other DNA
tatgtattacctggaacagttattaatgtaatagttgctcaggatattgatttttcgtcagtctatacagttaaa

SEQ ID NO: 711277 - DNA, 75 bp, synthetic construct
  source 1..75: mol_type = other DNA
gaagagcaggctgaaaatttattttcccgcggagcagagatcttgattcttggttgtacggaaattcccattatt

SEQ ID NO: 711278 - DNA, 75 bp, synthetic construct
  source 1..75: mol_type = other DNA
gatgcattaatgcataacgggctctcgcctttacccgttatgcgtgactatatgcataaactggaagatgcagga

SEQ ID NO: 711279 - DNA, 75 bp, synthetic construct
  source 1..75: mol_type = other DNA
gatgatctcagcgtacaacaaccacgggccatggtggaactcagggtcaagccatatgaatcaggcgataaagaa

SEQ ID NO: 711280 - DNA, 75 bp, synthetic construct
  source 1..75: mol_type = other DNA
aaggacagtgcgatgatctcagcgtacaacaaccacgggccatggtggaactcagggtcaagccatatgaatcag

SEQ ID NO: 711281 - DNA, 75 bp, synthetic construct
  source 1..75: mol_type = other DNA
tttgcggcttttttcctgttattcaggtgtatccaaaaattttgcatcatatgcacagcgtttaaaggaggcact

SEQ ID NO: 711282 - DNA, 75 bp, synthetic construct
  source 1..75: mol_type = other DNA
gcgtggtggaactcgggagccagtcatatgaatcaggcgataaagaggtcgtggttcagaggactgggcttaata

SEQ ID NO: 711283 - DNA, 75 bp, synthetic construct
  source 1..75: mol_type = other DNA
gacgggtaaccgcagccgctcagtcaaagcgacgatcgatgaactgacgccattgctgcgcgggtggataagcta

SEQ ID NO: 711284 - DNA, 75 bp, synthetic construct
  source 1..75: mol_type = other DNA
tgatattctccgggcacgccgggcaacaggtctgatgacccgcagcaactacagaacggtaaataacattacccg

SEQ ID NO: 711285 - DNA, 75 bp, synthetic construct
  source 1..75: mol_type = other DNA
tgtggttcagcgctctcccttaaggcgaggcatggcaacatactggattctgaaaggagagaggcaggcgggcca

SEQ ID NO: 711286 - DNA, 75 bp, synthetic construct
  source 1..75: mol_type = other DNA
tgtggttcagcgctctcccttaagccgaggcatggcaacatactggattctgaaaggagagaggcaggcggggca

SEQ ID NO: 711287 - DNA, 75 bp, synthetic construct
  source 1..75: mol_type = other DNA
tgtggttcagcgctctcccttaagtcgaggcatggcaacatactggtttctgaaaggagagaggcaggcgggaca

SEQ ID NO: 711288 - DNA, 75 bp, synthetic construct
  source 1..75: mol_type = other DNA
tcttcggcggcaaggggcgcattttctctgtggtgattggcgggttgatcatcggcaccatcaacaacggtctga

SEQ ID NO: 711289 - DNA, 75 bp, synthetic construct
  source 1..75: mol_type = other DNA
gggttttgaaacctatgccattgccagcgccatcattggcggcaccagtttcttcggcggcaaggggcgcatttt

SEQ ID NO: 711290 - DNA, 75 bp, synthetic construct
  source 1..75: mol_type = other DNA
agcggcaattaacgaacgcgtactggtcaccacactgaccaagcgaatggcggaagatctcacggaatatctcga

SEQ ID NO: 711291 - DNA, 75 bp, synthetic construct
  source 1..75: mol_type = other DNA
ttgataaagaagagttcatcaaactctatacatcacaaataaaagcctactttgatctcacgaaaacagcataca

SEQ ID NO: 711292 - DNA, 75 bp, synthetic construct
  source 1..75: mol_type = other DNA
ttaattaaattaaccgaagttcatgccgaacagggggggggatttattttctgctttcagcactctgttaacccc

SEQ ID NO: 711293 - DNA, 75 bp, synthetic construct
  source 1..75: mol_type = other DNA
tggaccatgatggaaaccatcctcggcactgttggtgccatcgttgggatgattgcgttccagctgttgagttaa

SEQ ID NO: 711294 - DNA, 75 bp, synthetic construct
  source 1..75: mol_type = other DNA
tgcgcatcgacagcaagacatcatggctatcagcttgtcgtcgtgcaggaattgaagatttccgtttccatgacc

SEQ ID NO: 711295 - DNA, 75 bp, synthetic construct
  source 1..75: mol_type = other DNA
tcggagtctggactgcgtcctggcttgtgtatgtacgaccacagcgtaaggcacgactggcgactgctgcggcaa

SEQ ID NO: 711296 - DNA, 75 bp, synthetic construct
  source 1..75: mol_type = other DNA
ttccggtatgccgctcgataaaatcgcagcgacgatggaaaaagggatgggaggcaccctcggcttcctggcggt

SEQ ID NO: 711297 - DNA, 75 bp, synthetic construct
  source 1..75: mol_type = other DNA
atgaatgaaatagaagttgatttagatttaggcttaaaccctttttgctttgagacagagataaagattgaaaca

SEQ ID NO: 711298 - DNA, 75 bp, synthetic construct
  source 1..75: mol_type = other DNA
taatgaaaaaaactggtattttataaaccctgctattgtcttcaacggtgatagggctcgcttcgtttctgagat

SEQ ID NO: 711299 - DNA, 75 bp, synthetic construct
  source 1..75: mol_type = other DNA
acaggtgctggttgactctggcgtaggtccggcactgggcgaagcgttaaccggcatgggcctgccgattgccat

SEQ ID NO: 711300 - DNA, 75 bp, synthetic construct
  source 1..75: mol_type = other DNA
ccggaaggatcaactgcttacgaatggtttgagtttatcggtcatccgtttaccgcgattctggttgcttgtctg

SEQ ID NO: 711301 - DNA, 75 bp, synthetic construct
  source 1..75: mol_type = other DNA
tgaacaactgaactactccggtgcgcaaatggcggcgctgtcgatttgtatcgctggtggttcgattgttgtcag

SEQ ID NO: 711302 - DNA, 75 bp, synthetic construct
  source 1..75: mol_type = other DNA
gctggcgaatgcgtacggccagaagggcggcggtcacttcaacatggttgagaagaaaacggatatggataaccg

SEQ ID NO: 711303 - DNA, 75 bp, synthetic construct
  source 1..75: mol_type = other DNA
aacggcagatcaccctgaattcaaaaaaatcatgatcaacgacgtactgccgccgacgcatgatcgtcatttttt

SEQ ID NO: 711304 - DNA, 75 bp, synthetic construct
  source 1..75: mol_type = other DNA
attcgcgcttcagtttaattccccagaaaagcagacgtgctgggcggtcaacatgacgtctgatggtgagttatc

SEQ ID NO: 711305 - DNA, 75 bp, synthetic construct
  source 1..75: mol_type = other DNA
gctgtttattgacgagatggcccatccgttacagccggtgcgtctgtccggagatgaactgcatggcgaagatcc

SEQ ID NO: 711306 - DNA, 75 bp, synthetic construct
  source 1..75: mol_type = other DNA
aacggtctgaaaaaaatccgtttcccggagaagagcggcaggatgcaggatcacggtgttattgccgttgatacc

SEQ ID NO: 711307 - DNA, 75 bp, synthetic construct
  source 1..75: mol_type = other DNA
agtattgaccagtctgacctgttcactcttgcgctggtcgataatctctcactgtttattgacgagatggctcat

SEQ ID NO: 711308 - DNA, 75 bp, synthetic construct
  source 1..75: mol_type = other DNA
atgaaagtattaacttttaaaaatgatactgtctctgttggtgatgtctttgtatcatcctggggctatgagcaa

SEQ ID NO: 711309 - DNA, 75 bp, synthetic construct
  source 1..75: mol_type = other DNA
gttcactttgaaatacatcctgacgtggcctggaagttgaatgaggtgctggcttacagtatgcctgctgcaatc

SEQ ID NO: 711310 - DNA, 75 bp, synthetic construct
  source 1..75: mol_type = other DNA
atgcagaatataaaaaatttcacgaaatacaccccggacaacctgccagtggaaggggcgggatatctcatcagt

SEQ ID NO: 711311 - DNA, 75 bp, synthetic construct
  source 1..75: mol_type = other DNA
cagaagtcacaggtggaagagctggagcgtacactgagctttattggcggcgtgcaggagaacaagcactggcag

SEQ ID NO: 711312 - DNA, 75 bp, synthetic construct
  source 1..75: mol_type = other DNA
ttgcatttctttgcacacaaagaatttatcaccatcaatcgcacggccgagatgctgtcagctgcgtatcgagca

SEQ ID NO: 711313 - DNA, 75 bp, synthetic construct
  source 1..75: mol_type = other DNA
acgctggctgcgctggggcatctgaaagtcggcgggcgtcttgtagcagtattgccgggcactgcgccaatactg

SEQ ID NO: 711314 - DNA, 75 bp, synthetic construct
  source 1..75: mol_type = other DNA
cgcagctgccgcaggaggcgcgcaaccagctggttgtctcggtgccaagcggaaacttcggcgatttgacggcgg

SEQ ID NO: 711315 - DNA, 75 bp, synthetic construct
  source 1..75: mol_type = other DNA
gagtgttgcctgctgatttacttgatatcgcaagtgaaaataatctacgtggcgtcaaaatccatgttctggatg

SEQ ID NO: 711316 - DNA, 75 bp, synthetic construct
  source 1..75: mol_type = other DNA
agattctacaacgtgtcgatactcttcctctttatttacatgcctatgcctttcatttaaatatgcggctggaaa

SEQ ID NO: 711317 - DNA, 75 bp, synthetic construct
  source 1..75: mol_type = other DNA
ctgaattactgatctgcaccaggggaaatcagacagaagtcgccagaataccgaactgcaatcgtgctacagtca

SEQ ID NO: 711318 - DNA, 75 bp, synthetic construct
  source 1..75: mol_type = other DNA
gccacgccgtttacgctgcgcttctactcggcggcgcaaaacgcatgttgggcggtaaaactggcacacgatggc

SEQ ID NO: 711319 - DNA, 75 bp, synthetic construct
  source 1..75: mol_type = other DNA
attaatcagataaatcatgtgcgtaacgtactacaacaaatcaaacaagaggcaagccatcttctgaaccactaa

SEQ ID NO: 711320 - DNA, 75 bp, synthetic construct
  source 1..75: mol_type = other DNA
tcgcaaagatattgaaaaggtatttaccgggcgtaccgtattgtcgagcatttaccaggatcagcgtactaaact

SEQ ID NO: 711321 - DNA, 75 bp, synthetic construct
  source 1..75: mol_type = other DNA
tcaaaggcgaatgtgcgatgtggcgcaatatcctggtccgcaagtatgcggggatgccgatccgtttctatcagg

SEQ ID NO: 711322 - DNA, 75 bp, synthetic construct
  source 1..75: mol_type = other DNA
gatttacccttgctttcgcataatctgcccgccgattttgctgcgttgcgtaaattgatgatgaatcatcagtaa

SEQ ID NO: 711323 - DNA, 75 bp, synthetic construct
  source 1..75: mol_type = other DNA
gatccgtttttcgccttttgaacccgccacgccgtttacgctgcgcttttactcggcggcgcaaaacgcatgttg

SEQ ID NO: 711324 - DNA, 75 bp, synthetic construct
  source 1..75: mol_type = other DNA
actcagcggcgcaaaacgcatgttgggcggtgaaactggcgcacgatggcgcgttatctctcagtcaatgtgatg

SEQ ID NO: 711325 - DNA, 75 bp, synthetic construct
  source 1..75: mol_type = other DNA
cgtgaaacggctggctggaatacccggaatgggaagaatacgatgttaagggcgctgggcattatacccggcgtc

SEQ ID NO: 711326 - DNA, 75 bp, synthetic construct
  source 1..75: mol_type = other DNA
ctgtgcgtgtaatcgcagaatgcgagcatgctgcacgccttaaacttgccactgaatttatcctgagctttgctg

SEQ ID NO: 711327 - DNA, 75 bp, synthetic construct
  source 1..75: mol_type = other DNA
cctattggcacgctgggggcggcgatttctcaggcaaaaccgcagaaaggctccacggtgatcagcgaaaacggt

SEQ ID NO: 711328 - DNA, 75 bp, synthetic construct
  source 1..75: mol_type = other DNA
ccgagcatcaccacgctggacaaccaggaagccttcttcatggtgggccaggatgttccggtattaaccggctct

SEQ ID NO: 711329 - DNA, 75 bp, synthetic construct
  source 1..75: mol_type = other DNA
gagcaggggttaagcctgatgccgcatacttcacagccggtattgcctgcgcaaaaccaggctttaccgccggaa

SEQ ID NO: 711330 - DNA, 75 bp, synthetic construct
  source 1..75: mol_type = other DNA
tatttcggctatctcaaccaggcgcgacaagaaaccattgctcagttgaagcaaacgcgtgaagaagtcgctatg

SEQ ID NO: 711331 - DNA, 75 bp, synthetic construct
  source 1..75: mol_type = other DNA
tgcgccgcgtggtcaggcattctggccggttcgcgggccgacgctgcatcgctatggcgaacagctacagggtga

SEQ ID NO: 711332 - DNA, 75 bp, synthetic construct
  source 1..75: mol_type = other DNA
cgccagatgatcgacagcgcaggctcaggcaacgttgttaattacgatccctccaacgtgattatgctcaccgga

SEQ ID NO: 711333 - DNA, 75 bp, synthetic construct
  source 1..75: mol_type = other DNA
atgaccattctggactacatctctacccatccgaattgtagcggtggagaaatcgccgcagcactgaatacccca

SEQ ID NO: 711334 - DNA, 75 bp, synthetic construct
  source 1..75: mol_type = other DNA
acacacctgggcaagctggctgattcagtcaggcgtcccattatcagtgcttcaggaaatgggcggatgggagtc

SEQ ID NO: 711335 - DNA, 75 bp, synthetic construct
  source 1..75: mol_type = other DNA
accggcctgatgacccggaacaattacagaatggtaaataacattacccagggcaagtatccggaggcaaaacga

SEQ ID NO: 711336 - DNA, 75 bp, synthetic construct
  source 1..75: mol_type = other DNA
gtttcccggtgatgccttcctgggatggcaactctgatacctggccggtgacttcccggatgtcgacgcagcaaa

SEQ ID NO: 711337 - DNA, 75 bp, synthetic construct
  source 1..75: mol_type = other DNA
gataaaggcgtagtatcttactttcctgaatcaaaggaggcagcacttaagatcgttaaaaacattgaattacgg

SEQ ID NO: 711338 - DNA, 75 bp, synthetic construct
  source 1..75: mol_type = other DNA
ggtcgcgctcgcaaaactggaggccaggcttcttaccacgtaaacccgatgccgttcgggtgtagcaatccactt

SEQ ID NO: 711339 - DNA, 75 bp, synthetic construct
  source 1..75: mol_type = other DNA
gattcaggccgatatcgctgcaaaagaacgcgcggtacgccaacaacagcaacaacgctcaagcctgcttgccca

SEQ ID NO: 711340 - DNA, 75 bp, synthetic construct
  source 1..75: mol_type = other DNA
ctgcatattgaggccggcatttcactgtgtgatgcggtgaactttctcgtggaaaaatacgcgctggtgcgtacc

SEQ ID NO: 711341 - DNA, 75 bp, synthetic construct
  source 1..75: mol_type = other DNA
cattatgacgctaactcccggcgaaacggcgatgatcgccggtgatttagcgctgaaagccgccgatgtgcatat

SEQ ID NO: 711342 - DNA, 75 bp, synthetic construct
  source 1..75: mol_type = other DNA
gatatttttcagcagggaaaccgctggctaaactggctggagaagcagccggaaggttcagtgcgtccggtagtc

SEQ ID NO: 711343 - DNA, 75 bp, synthetic construct
  source 1..75: mol_type = other DNA
gaacatatcgatgccggtatcactctcgctaatgccattaactttctggtagagaaatatgagttagttcgtatt

SEQ ID NO: 711344 - DNA, 75 bp, synthetic construct
  source 1..75: mol_type = other DNA
gaggcaggcatttcactgtgtgatgcggtgaactttctcgtggaaaaatacgcgctggtgcgtaccgaccagccg

SEQ ID NO: 711345 - DNA, 75 bp, synthetic construct
  source 1..75: mol_type = other DNA
aacaacgcgcaagcctgcttgctcagctgaaaaagcaggaagaggcgatctccgaagccacccgcaagctgcgcg

SEQ ID NO: 711346 - DNA, 75 bp, synthetic construct
  source 1..75: mol_type = other DNA
agagcgagcaacaaacgctgttgtatgagcagcgcgcccaacaggcgaagctgacccaggcgctgaacgagcgta

SEQ ID NO: 711347 - DNA, 75 bp, synthetic construct
  source 1..75: mol_type = other DNA
gaataaacagattgatgagatgaacgcgtcgattgccaaactggagcagcaaaaagccgcccaggagcgcagcct

SEQ ID NO: 711348 - DNA, 75 bp, synthetic construct
  source 1..75: mol_type = other DNA
agttatatacagcgcatagggtttaatccgcctgataacaaaaaaaactgggtggttccttcagttaaagatgca

SEQ ID NO: 711349 - DNA, 75 bp, synthetic construct
  source 1..75: mol_type = other DNA
aggcgggtgggggccttttcccaaccgccagaaagaagcgacgcgcaaaggcaccacctacaagccgaccgaaag

SEQ ID NO: 711350 - DNA, 75 bp, synthetic construct
  source 1..75: mol_type = other DNA
tgcgccgcgtggtcaggcattctggccagttcgcgggccgacgctgcatcgctatggcgagcagctacagggtga

SEQ ID NO: 711351 - DNA, 75 bp, synthetic construct
  source 1..75: mol_type = other DNA
tcgaagctcttgaagttggtatgcccgactgttccggcgtggcgttaggtgttgaccgcctggtgatgttagcac

SEQ ID NO: 711352 - DNA, 75 bp, synthetic construct
  source 1..75: mol_type = other DNA
gagccaaacataggtaaagagaaaccgacctttgtttatcacttccctgccagccaggcatctctggcgcaaatc

SEQ ID NO: 711353 - DNA, 75 bp, synthetic construct
  source 1..75: mol_type = other DNA
caagctttcttgcgttatctggaaattgacccgctctctgccgacaaaacgcaactgcgggaagtcgcagcgaaa

SEQ ID NO: 711354 - DNA, 75 bp, synthetic construct
  source 1..75: mol_type = other DNA
gatctacaaaacccggatgcacctcagtcggctattggcttgatcgtctgtgctttgcaacaacgtaaagaggcc

SEQ ID NO: 711355 - DNA, 75 bp, synthetic construct
  source 1..75: mol_type = other DNA
aacaacaagacgcatggcaacaggcgctcgcattactgcaccttagcgccatatttggtgatttaagcaaccatc

SEQ ID NO: 711356 - DNA, 75 bp, synthetic construct
  source 1..75: mol_type = other DNA
cttaaatatcgacgcccaggaatacgccgacctgttaattgaacgctttagcaaccgtaatgttgcacaccgtac

SEQ ID NO: 711357 - DNA, 75 bp, synthetic construct
  source 1..75: mol_type = other DNA
gggggttcgcgtcagggatggaagcccgccagggcggagacagcttcgctggctccgttcacgacagcccgcccc

SEQ ID NO: 711358 - DNA, 75 bp, synthetic construct
  source 1..75: mol_type = other DNA
caatgagcagggacccgccgcaacgacggagagcgcgtgcgcgaaacggcgttgccccttacatcccggcggcct

SEQ ID NO: 711359 - DNA, 75 bp, synthetic construct
  source 1..75: mol_type = other DNA
atattgccgacaaactgttggcgtcacttagctcgattcttctctattggtatcactatagccacaacggcgaac

SEQ ID NO: 711360 - DNA, 75 bp, synthetic construct
  source 1..75: mol_type = other DNA
caacaacgggcagggacccgccgcaacgacgaagagcgcgtgcgcgaaacggcgttgccccttacatcccggcgg

SEQ ID NO: 711361 - DNA, 75 bp, synthetic construct
  source 1..75: mol_type = other DNA
cggcgttgcgccttacatcccggcggccttttgccgggatgccgggagcgcaggccacggcgcgacagaggcggc

SEQ ID NO: 711362 - DNA, 75 bp, synthetic construct
  source 1..75: mol_type = other DNA
gcccggaaaaggcataagcaggagaacaacaaaacagacaataatcagggcagcagtaatcagagtcagaacagg

SEQ ID NO: 711363 - DNA, 75 bp, synthetic construct
  source 1..75: mol_type = other DNA
aacaagcccgaacacttaatccagacttaaatatcaacacccaggaatacgccgacctgttaattgaacgcttta

SEQ ID NO: 711364 - DNA, 75 bp, synthetic construct
  source 1..75: mol_type = other DNA
ggggagcgtcatctgaatattcgtcctgcgttcgtactggtaccgacggcgatggagtctgttgctaaccaggtc

SEQ ID NO: 711365 - DNA, 75 bp, synthetic construct
  source 1..75: mol_type = other DNA
caggcaggagaacaacaaaacagacaataatcagggcagcagtaatcagagtcagaacaggaggaaaaagagaat

SEQ ID NO: 711366 - DNA, 75 bp, synthetic construct
  source 1..75: mol_type = other DNA
tgaggaaatcaatcgcgaccatgtgatgctgcgctatcagggaaaaatagagcgcctgagtctggctgaagagga

SEQ ID NO: 711367 - DNA, 75 bp, synthetic construct
  source 1..75: mol_type = other DNA
atcgccactgttcaccgctatcccggtggtgattgttcttgtgtacgttgcttttaaggtgtttgacggggaagg

SEQ ID NO: 711368 - DNA, 75 bp, synthetic construct
  source 1..75: mol_type = other DNA
gtacgtctgacttcggtaatattctgctggatgttgcgaacaaagccattctgcagggctgggaagatgcccctg

SEQ ID NO: 711369 - DNA, 75 bp, synthetic construct
  source 1..75: mol_type = other DNA
cgacggtgtggcggcatcaatggcgtcggtcattgcgatggtgggaaacccggtcattatgccggaaaacacctt

SEQ ID NO: 711370 - DNA, 75 bp, synthetic construct
  source 1..75: mol_type = other DNA
ttctctgttcgatgccagcggttttaaggaaggcgatatcgccattgcgctaaatcagcaggatttcactgatcc

SEQ ID NO: 711371 - DNA, 75 bp, synthetic construct
  source 1..75: mol_type = other DNA
gagcaatgattgctctgatgcggcagttaccttcaatggattccattcaacttacggttttacgcaagggtgcgc

SEQ ID NO: 711372 - DNA, 75 bp, synthetic construct
  source 1..75: mol_type = other DNA
taaaaatgacgtgcaattaatcagccaacaaaactggtttggcaaatatcaacccgtcgccgcaccggtaaaaca

SEQ ID NO: 711373 - DNA, 75 bp, synthetic construct
  source 1..75: mol_type = other DNA
cacgaatttatctcattcaatggctgacaaaaattcgtcacactcttaaccagagacaatctcttaatacagaca

SEQ ID NO: 711374 - DNA, 75 bp, synthetic construct
  source 1..75: mol_type = other DNA
taaaaatgacgtgcaattaatcagccagcaaaactggtttggcaaatatcagcctgtcgccgtgccggtaaaaca

SEQ ID NO: 711375 - DNA, 75 bp, synthetic construct
  source 1..75: mol_type = other DNA
cactctggcgctatttctccttttctgcggaatatacggcggtttcctcatcggcgaataaaccgctccgtgcgg

SEQ ID NO: 711376 - DNA, 75 bp, synthetic construct
  source 1..75: mol_type = other DNA
ctacctgttacgcctacgcttgactacatgaaccgctcacgatcaatggcagccggcttaatgcccggcgcgctg

SEQ ID NO: 711377 - DNA, 75 bp, synthetic construct
  source 1..75: mol_type = other DNA
ttagccggtgttgctcatactggttcctcatccagtgccgactttgatgatttacgccagcgcatacagctacag

SEQ ID NO: 711378 - DNA, 75 bp, synthetic construct
  source 1..75: mol_type = other DNA
ggtgacgtatgctgaagtggagatcgataaacctcacgcgctgcgctacgccgactcagtatcaatgaccttgag

SEQ ID NO: 711379 - DNA, 75 bp, synthetic construct
  source 1..75: mol_type = other DNA
gcgtggacgctcaatctctccggttcccgttactttatcgaacagccaccgctcaccagttatgacgagcttgat

SEQ ID NO: 711380 - DNA, 75 bp, synthetic construct
  source 1..75: mol_type = other DNA
cactggcaactctccgcaggcgatctcgcgccgctgtttggcgcgggtctgttgggattaaccgcaggcgcgctg

SEQ ID NO: 711381 - DNA, 75 bp, synthetic construct
  source 1..75: mol_type = other DNA
ctcatcaagtcattacttgatgatgcaaaaaaaatacacgaaaaaaaagacgtattgctgggagcaattggccca

SEQ ID NO: 711382 - DNA, 75 bp, synthetic construct
  source 1..75: mol_type = other DNA
atggttttgctattttctaccagaaccgggcgcaaatgttcgaggcttccagccatatctttgacatagagaagg

SEQ ID NO: 711383 - DNA, 75 bp, synthetic construct
  source 1..75: mol_type = other DNA
atgcaccatgcgccaacttcgtcgaatccgtacattccgaaagaagaactagaggaaacggagaagaaatccgat

SEQ ID NO: 711384 - DNA, 75 bp, synthetic construct
  source 1..75: mol_type = other DNA
gcataaacgtgctgatgaccttttcgattgttatacctatggattgatcatcgcgcacggtaattacgcggcgtt

SEQ ID NO: 711385 - DNA, 75 bp, synthetic construct
  source 1..75: mol_type = other DNA
attattgaagtcatcaacgagcaccaggttcttggtttcccaaatcttctcgctggcgacgatggtgggccggtt

SEQ ID NO: 711386 - DNA, 75 bp, synthetic construct
  source 1..75: mol_type = other DNA
gttcgaacggctgcggtaaatccaccaccatgaaaatgctcaccggactgctgcccgccagcgaaggtgaggcgt

SEQ ID NO: 711387 - DNA, 75 bp, synthetic construct
  source 1..75: mol_type = other DNA
ttctatggctacatgttggcaaacaaggatgctctacacacctacgttaaggctaacaaggttcccttcatccag

SEQ ID NO: 711388 - DNA, 75 bp, synthetic construct
  source 1..75: mol_type = other DNA
tttacgccagcgcatacagctacaggccaacgccaaagagtttaagctgaaacacttagccaaaggcgacttcct

SEQ ID NO: 711389 - DNA, 75 bp, synthetic construct
  source 1..75: mol_type = other DNA
tgacctcggaatatctgcctgcccgccgccgcggcgcgctggtgacgctgatgttttgcggctttacgctgggtt

SEQ ID NO: 711390 - DNA, 75 bp, synthetic construct
  source 1..75: mol_type = other DNA
atgctcgatcgcaaagatttaaaaggaatgattaaagcactgaagaaaggcgaagtggtctggtatgcaccagat

SEQ ID NO: 711391 - DNA, 75 bp, synthetic construct
  source 1..75: mol_type = other DNA
tttatgaaacgacgcgccaaaattgtgcaccgcaacctggaactgtgcttcccggagatgagtgaacaggaacgc

SEQ ID NO: 711392 - DNA, 75 bp, synthetic construct
  source 1..75: mol_type = other DNA
tccgatgcggccatttcttgtcagcaagtcgggccgattgaactgtcggatcgtattaaaaacggcaaagctcag

SEQ ID NO: 711393 - DNA, 75 bp, synthetic construct
  source 1..75: mol_type = other DNA
acggcaacctgccaaaggcaaaactgcaacagctgaaggccagaccggatgtgttcatcggtaaggtgacgaaca

SEQ ID NO: 711394 - DNA, 75 bp, synthetic construct
  source 1..75: mol_type = other DNA
ccgcactgcttcatccgcgttattggttaacctggttgggtattggcgtactttggttggtcgttcagttaccct

SEQ ID NO: 711395 - DNA, 75 bp, synthetic construct
  source 1..75: mol_type = other DNA
gttcacctccgctggataacgctgaaaccaccgctgcgtggatgaataaagtggtagaaaaatgcatcatgatgg

SEQ ID NO: 711396 - DNA, 75 bp, synthetic construct
  source 1..75: mol_type = other DNA
cagtgggagcgggcatatgcactactgcgtatagaaagtatcttcggcacacttgctactacagataatatattc

SEQ ID NO: 711397 - DNA, 75 bp, synthetic construct
  source 1..75: mol_type = other DNA
gcaggtagaagctttggagattatcgtcactgcaatgcttcgcaatatggcgcaaaatgaccaacagcggttgat

SEQ ID NO: 711398 - DNA, 75 bp, synthetic construct
  source 1..75: mol_type = other DNA
taaagcccgatgccagcattcctgacgacgatacggagctgctgcgcgattacgtaaagaagttattgaggcatc

SEQ ID NO: 711399 - DNA, 75 bp, synthetic construct
  source 1..75: mol_type = other DNA
tcgcttccagtcaaaccaacgctcggctatatggacagggcaaacaccatggccaacgcattgttaccctcagcg

SEQ ID NO: 711400 - DNA, 75 bp, synthetic construct
  source 1..75: mol_type = other DNA
atgtcaacgcttaaggatttatcccggcagctaaagcagctgcagaagcaaataccgtttgcgactgcccaggct

SEQ ID NO: 711401 - DNA, 75 bp, synthetic construct
  source 1..75: mol_type = other DNA
ggagaagcacatccgtatcatcagtgtgacgactgcggcggccatccatccagtcatcggttcgtctgagaatga

SEQ ID NO: 711402 - DNA, 75 bp, synthetic construct
  source 1..75: mol_type = other DNA
agtttcgttcgcgtttggatttgattcgcatcgacgccattggtttgttaatactgccggttccggatctctatt

SEQ ID NO: 711403 - DNA, 75 bp, synthetic construct
  source 1..75: mol_type = other DNA
attgctgacctgggcggcagggatgccacgcctttttttgaaggtatcaaccggcaggcaccggcttctgctccg

SEQ ID NO: 711404 - DNA, 75 bp, synthetic construct
  source 1..75: mol_type = other DNA
gcccggctaatggcgacacaggtgcctgtcactgcggggcatattaatgccacggctaccttcactcttgaatat

SEQ ID NO: 711405 - DNA, 75 bp, synthetic construct
  source 1..75: mol_type = other DNA
tgcagatagccacaatgccaacctgcttgcacttgaaaatacggtgtcagcggttgcgggactgggaatacagct

SEQ ID NO: 711406 - DNA, 75 bp, synthetic construct
  source 1..75: mol_type = other DNA
ttaccggcgttgcagatagccacaatgccaatctgcttgcacttgaaaatacggtgtcagcggcttcgggactgg

SEQ ID NO: 711407 - DNA, 75 bp, synthetic construct
  source 1..75: mol_type = other DNA
caaatattgggcttcccggcctttctgttatcagaaatcccctgaaagcacagcggctggctgaggagataaata

SEQ ID NO: 711408 - DNA, 75 bp, synthetic construct
  source 1..75: mol_type = other DNA
agagttcgctgaatgggaaggtatctcccgtggctctgtttaccagaaaattcaccatggccagctcgccaagta

SEQ ID NO: 711409 - DNA, 75 bp, synthetic construct
  source 1..75: mol_type = other DNA
cgctagcacgaaagcatggtcgttcggattgctgggttggccgtttgttgcaaaaggctgaagggatagttgacg

SEQ ID NO: 711410 - DNA, 75 bp, synthetic construct
  source 1..75: mol_type = other DNA
gcggtggtggaactcgccgccagcgcgcagctctgcgtggaaggtgaactgggccatctggcagatgcgccgcgt

SEQ ID NO: 711411 - DNA, 75 bp, synthetic construct
  source 1..75: mol_type = other DNA
tgcccagcgcgaaggtatcaatgcctcgacacgctacccgaaaaactgggtgcagtcgggggatccggcgcgcga

SEQ ID NO: 711412 - DNA, 75 bp, synthetic construct
  source 1..75: mol_type = other DNA
cagaggacggtaccgaaaaacgttatctgccggagggcacactggtcctggggaatacgtcagcagagggcattc

SEQ ID NO: 711413 - DNA, 75 bp, synthetic construct
  source 1..75: mol_type = other DNA
gcagagtcgttactggcagaactgcagaatgctgccatgctcttcagcgtcccgaccagcaaaggggggacgcgc

SEQ ID NO: 711414 - DNA, 75 bp, synthetic construct
  source 1..75: mol_type = other DNA
aaagcaactcgcaactgtactggcatacccggtttaacccagacgatcaggccgatccgctccccattcctgccg

SEQ ID NO: 711415 - DNA, 75 bp, synthetic construct
  source 1..75: mol_type = other DNA
tgcaccaagcgctggatctgctcgaagagcgggaagcagaactgctggtctggggggatacagatggcgcattta

SEQ ID NO: 711416 - DNA, 75 bp, synthetic construct
  source 1..75: mol_type = other DNA
tccgttccttcaaagccgtcagggagaagctggatactcgtcgcggctctcattccgagctggagacagcggtaa

SEQ ID NO: 711417 - DNA, 75 bp, synthetic construct
  source 1..75: mol_type = other DNA
tttcgtggacgaccctgacgccggaaaaaccaaatacgctaaatttttacgctcgactgatggccacacaggtgc

SEQ ID NO: 711418 - DNA, 75 bp, synthetic construct
  source 1..75: mol_type = other DNA
tatttggcgttggcatcggcgtaacaccgccgccggtagtcctgctggatgaagtacacacctatgtggggaata

SEQ ID NO: 711419 - DNA, 75 bp, synthetic construct
  source 1..75: mol_type = other DNA
catggtcaagaaagaaaaaaacaaaggtcgcgtaagcctgcgttacctgatgtacaaaaccgaccaggttcgcga

SEQ ID NO: 711420 - DNA, 75 bp, synthetic construct
  source 1..75: mol_type = other DNA
tctcgctgatgggctggggactgggttacttcgggcagccgcacatcctggcgcgttttatggcggcggattctc

SEQ ID NO: 711421 - DNA, 75 bp, synthetic construct
  source 1..75: mol_type = other DNA
taggcgcgtggattaactggaagctggtggccgggcggttgcgtgtgcataccgaatacaacaataacgccttaa

SEQ ID NO: 711422 - DNA, 75 bp, synthetic construct
  source 1..75: mol_type = other DNA
agtttttctttccgggatttccgaaagttggatcgccattggcctgacattaggcgcgtggattaactggaagct

SEQ ID NO: 711423 - DNA, 75 bp, synthetic construct
  source 1..75: mol_type = other DNA
agtgcgattaccgaagatctgtacaaagcatttctgcgtaaacatgccagccagaaagaactggtgtgggtaggg

SEQ ID NO: 711424 - DNA, 75 bp, synthetic construct
  source 1..75: mol_type = other DNA
agtgcgattaccgaagatctgtacaaagcgtttctgcgtaaacatgccagccagaaagagctggtgtgggtaggg

SEQ ID NO: 711425 - DNA, 75 bp, synthetic construct
  source 1..75: mol_type = other DNA
ggcgcaaattctgtttaacccgtggattgccgggattctgctgtcggcgattctggcggcggtaatgtcaacgtt

SEQ ID NO: 711426 - DNA, 75 bp, synthetic construct
  source 1..75: mol_type = other DNA
attggtgacctggtctacaaggtgttgacggataacccgaaactgtcagacggtaaggcgctgttccatgccgat

SEQ ID NO: 711427 - DNA, 75 bp, synthetic construct
  source 1..75: mol_type = other DNA
cctgatggttgttgtggctttgtttttccttaacgccgtcatttttcttttcatgttaatgaaatatttcactaa

SEQ ID NO: 711428 - DNA, 75 bp, synthetic construct
  source 1..75: mol_type = other DNA
gtgacacgcataatatctcgcttgtcatgacggaagcagataaagccttacgcgaagcgaaaagcgaggggggca

SEQ ID NO: 711429 - DNA, 75 bp, synthetic construct
  source 1..75: mol_type = other DNA
cgtgctcaggtcaatctcgctgttctatacgcaaagggtaatggtgttgaacaggattatcgacaggccaaaagc

SEQ ID NO: 711430 - DNA, 75 bp, synthetic construct
  source 1..75: mol_type = other DNA
tggtatgaaaaggctgcagctcaaaatagctctgatgcgcagttcgcccttggaattctgcatgccaatgctaat

SEQ ID NO: 711431 - DNA, 75 bp, synthetic construct
  source 1..75: mol_type = other DNA
aggagactattgcactggcgacctacggggaaattttctccatcacccgtcaggccattatcaatgatgacctga

SEQ ID NO: 711432 - DNA, 75 bp, synthetic construct
  source 1..75: mol_type = other DNA
tggcgatcaaccaaaaactttgacgactatattctgggcggtcgcagtcttgggccattcgtgacggccttatcg

SEQ ID NO: 711433 - DNA, 75 bp, synthetic construct
  source 1..75: mol_type = other DNA
ttgttgatgaaatctgcgattttgtgatgaatcagcaggcggttttcctcggtggtcactatatccttcagggca

SEQ ID NO: 711434 - DNA, 75 bp, synthetic construct
  source 1..75: mol_type = other DNA
agattgttgatgaaatctgcgattttgtagtgaatcagcaggcggttttcctcggcggtcactacatcttacagg

SEQ ID NO: 711435 - DNA, 75 bp, synthetic construct
  source 1..75: mol_type = other DNA
aaattctgcgtaattacaaaaccgtgattaatgcgcggcgtcgtgagatggggcagaaaccgctcaccaccgcgc

SEQ ID NO: 711436 - DNA, 75 bp, synthetic construct
  source 1..75: mol_type = other DNA
tcccgcggctctgtttaccaaaaaattcaccatggtcaacttgctaagtacatggtcaagaaagaaaaaaacaaa

SEQ ID NO: 711437 - DNA, 75 bp, synthetic construct
  source 1..75: mol_type = other DNA
gaacataaggctgaggtgaaagacggttgtatcgccattgcttgcccaattaccggggattgggttgcgatgacc

SEQ ID NO: 711438 - DNA, 75 bp, synthetic construct
  source 1..75: mol_type = other DNA
tgatattccggcttatcttatcgtccatgacaatccgggtcttctcggctcaggtgcacatttacgccagacctt

SEQ ID NO: 711439 - DNA, 75 bp, synthetic construct
  source 1..75: mol_type = other DNA
cgcgaaattctgcgcaattacaaagctgtgattaatgcacgacgtcgtgagatggggcagaaaacgctcaccacc

SEQ ID NO: 711440 - DNA, 75 bp, synthetic construct
  source 1..75: mol_type = other DNA
aatataagaaatatcatcaggcactctgataaaatagttttatacctaagaggaaatcatggtgcttctgtgaaa

SEQ ID NO: 711441 - DNA, 75 bp, synthetic construct
  source 1..75: mol_type = other DNA
gtagtagagaaagttgtgggcacgagcctgatgtttatgggagtagaaaaatttggcaccagcatctctcagatt

SEQ ID NO: 711442 - DNA, 75 bp, synthetic construct
  source 1..75: mol_type = other DNA
aaattctgcgtaattacagggccgtgattaatgtgcggcgtcgtgatatggggcagaaaccgctcaccaccgcgc

SEQ ID NO: 711443 - DNA, 75 bp, synthetic construct
  source 1..75: mol_type = other DNA
ctggggcgaaacatgggaaggcgcgctggacgagatccgcgctctacctgcagtacagaaagctaacgcggttgt

SEQ ID NO: 711444 - DNA, 75 bp, synthetic construct
  source 1..75: mol_type = other DNA
ggttctgcgccagaacgcggtgataacgccattttcaaaatgggaccgattcttggcgaattacaagaactgtcc

SEQ ID NO: 711445 - DNA, 75 bp, synthetic construct
  source 1..75: mol_type = other DNA
tgaggcggtagacgttttccgcctgaacaaacattctgtgttggcagaatcacgcggagctggtgagtctgttag

SEQ ID NO: 711446 - DNA, 75 bp, synthetic construct
  source 1..75: mol_type = other DNA
ttgcagattaaacaatcgcagcaaggttatcgtacttaccagaatcgccaggtgaaaacggctgcagatgaagct

SEQ ID NO: 711447 - DNA, 75 bp, synthetic construct
  source 1..75: mol_type = other DNA
ggttacaaccgccgggaaaacgatgagtgccattgtggatgccgtggcgagcgtcacacatatcatgcaggaaat

SEQ ID NO: 711448 - DNA, 75 bp, synthetic construct
  source 1..75: mol_type = other DNA
tggacagcacccgctggtttggtcatgtcgccacggtgaatgccggacgcagcactgccagctggcgggagaacc

SEQ ID NO: 711449 - DNA, 75 bp, synthetic construct
  source 1..75: mol_type = other DNA
ccatgacactgtcgggctataacggtggtctgggctgggtacaacgggacaggcggcttgcatcacagaaaggtc

SEQ ID NO: 711450 - DNA, 75 bp, synthetic construct
  source 1..75: mol_type = other DNA
cctttagggtcttcatcagaaccgaacgcctgtcagtccgcgccgggacctttctggttcatatggcacgggtat

SEQ ID NO: 711451 - DNA, 75 bp, synthetic construct
  source 1..75: mol_type = other DNA
atgtttgaagcgattatcaatcatgaaagtgagcagatccgaccgctggataatgcttataccgatattttgaac

SEQ ID NO: 711452 - DNA, 75 bp, synthetic construct
  source 1..75: mol_type = other DNA
tgtgacgctggattatccgcaaccgatagtcgagcacaaagaagcgagagtacaaacgttggcagcgtatgaggt

SEQ ID NO: 711453 - DNA, 75 bp, synthetic construct
  source 1..75: mol_type = other DNA
tttctggtgaaagatttattgatcgactggcgcgaaggcgagcgatatttcatgtcgcagctgattgatggtgat

SEQ ID NO: 711454 - DNA, 75 bp, synthetic construct
  source 1..75: mol_type = other DNA
tgaggcggtggacgtattccgtctgaacaaacaatctgtgttggcagaacctcgcggagcgggtgaaccagttag

SEQ ID NO: 711455 - DNA, 75 bp, synthetic construct
  source 1..75: mol_type = other DNA
tgaggcggtggacgtattccgtctgaacaaacaatctgtgttggcagaacctcgcggagttggtaaaccagttag

SEQ ID NO: 711456 - DNA, 75 bp, synthetic construct
  source 1..75: mol_type = other DNA
gtattgcggaaatggaagcaatgaagcgaaatattgcgcaagccgaatcggagattaaacagtcgcagcaaggtt

SEQ ID NO: 711457 - DNA, 75 bp, synthetic construct
  source 1..75: mol_type = other DNA
gcatcctatgttcgtgctgtaaatgaccaggcggcaactgctggttatgtaaaaaccaataccgcatataccgtt

SEQ ID NO: 711458 - DNA, 75 bp, synthetic construct
  source 1..75: mol_type = other DNA
gcaccagccgtttgtccgccagcctggcaacgggcgggttatcgcctcgccagtgtctgcatcgcctgttggcgg

SEQ ID NO: 711459 - DNA, 75 bp, synthetic construct
  source 1..75: mol_type = other DNA
gcaccagtcgtttgtccgccagcctggcaacgggcgggttatcgcctcgccagtgtttacatcgcctgttggcgg

SEQ ID NO: 711460 - DNA, 75 bp, synthetic construct
  source 1..75: mol_type = other DNA
cagcgtgattttccggcagtggaaggcaccagccgtttgtctgcaagccttgcaacgggtaggttatcgcctcgc

SEQ ID NO: 711461 - DNA, 75 bp, synthetic construct
  source 1..75: mol_type = other DNA
ctggcacccgtaccggcttctccggcaatcacggccccggtggcgcaaccggccaggggaggcttcctgaaaaaa

SEQ ID NO: 711462 - DNA, 75 bp, synthetic construct
  source 1..75: mol_type = other DNA
caactggaagtggacgatgttcagcgggtggtctgccacagtctgcgggaggggtatcagttaccggcaggccag

SEQ ID NO: 711463 - DNA, 75 bp, synthetic construct
  source 1..75: mol_type = other DNA
gtcagggacatcctgaccaccccgctggccagccgggttatgcgacgggaatatggcagccttgtacctgatttg

SEQ ID NO: 711464 - DNA, 75 bp, synthetic construct
  source 1..75: mol_type = other DNA
ctacaggaaaaattattcatcatcatgacggatgaaaaccaagttaatcattcattcgtcactgacaggggcgtt

SEQ ID NO: 711465 - DNA, 75 bp, synthetic construct
  source 1..75: mol_type = other DNA
ccgcctcgtcggttatcatgaacacgaatttattgatttgctgattgagcgcgggattttataccaggtctgctt

SEQ ID NO: 711466 - DNA, 75 bp, synthetic construct
  source 1..75: mol_type = other DNA
gcaggaaggcaaaacgggatacccgattgtcgatgctgccatgcgtcagcttaacagcactggctggatgcataa

SEQ ID NO: 711467 - DNA, 75 bp, synthetic construct
  source 1..75: mol_type = other DNA
aacaaactgatagcgagtcagctttcgagaaatggttgcttcaccatcctgatggctttgttgttaatttgagaa

SEQ ID NO: 711468 - DNA, 75 bp, synthetic construct
  source 1..75: mol_type = other DNA
agatggatgagtcagttttacaagtcaggcaaagcctgcgtgaagcgttttatccacaggagattgaacaagagt

SEQ ID NO: 711469 - DNA, 75 bp, synthetic construct
  source 1..75: mol_type = other DNA
tgtaaagctggattatccagagccgattgtcgatcacaaagaagcgagagtacgaacactggcagcgtatgaggc

SEQ ID NO: 711470 - DNA, 75 bp, synthetic construct
  source 1..75: mol_type = other DNA
acgttagtgtttcagacttaattacaatgctcaataacagtgattgggttaaggagggtttaacatatttcagta

SEQ ID NO: 711471 - DNA, 75 bp, synthetic construct
  source 1..75: mol_type = other DNA
cgccgccaaaattgtacaagagaaagccggcggcgcacacgcggcggtagtaacggcggtggctaaagctgcatt

SEQ ID NO: 711472 - DNA, 75 bp, synthetic construct
  source 1..75: mol_type = other DNA
gattacgcagtaaaagtgccagatggtctggattcggctgctgccagcagcattacctgtgcgggcgtcaccacc

SEQ ID NO: 711473 - DNA, 75 bp, synthetic construct
  source 1..75: mol_type = other DNA
ataccagcggtaaagccattactgatattgatcatctgcgccagtcggtgcgggacattttgctgacgccgcagg

SEQ ID NO: 711474 - DNA, 75 bp, synthetic construct
  source 1..75: mol_type = other DNA
gtatcaccctgagcgcgccgggtgccggtcggctggttgccactatccaggccaatcgcaccgacaatcagacgc

SEQ ID NO: 711475 - DNA, 75 bp, synthetic construct
  source 1..75: mol_type = other DNA
gatagtgcgaatgatgagtatgcttcgtcaaaaattgagataaaagatggaataaacacatctctacatagcaac

SEQ ID NO: 711476 - DNA, 75 bp, synthetic construct
  source 1..75: mol_type = other DNA
tacgctgggggtggtattaccggtattaccgactacgccgtttatcctgttggctgcctggtgctttgcccgctc

SEQ ID NO: 711477 - DNA, 75 bp, synthetic construct
  source 1..75: mol_type = other DNA
atgcaacgaatcattttaatcatcattggctggctggcggtagtgctgggtacgctgggcgtggtattaccggta

SEQ ID NO: 711478 - DNA, 75 bp, synthetic construct
  source 1..75: mol_type = other DNA
acggcgtggagtgggccggactgcgtccgaatcagccaaatagcgagggcgaacagcaccggagcaattcacccg

SEQ ID NO: 711479 - DNA, 75 bp, synthetic construct
  source 1..75: mol_type = other DNA
tgacgcaattaaccgcatttcgtcataccttcagccatttccacttagatattgtgcctatgtggcttcccgtgt

SEQ ID NO: 711480 - DNA, 75 bp, synthetic construct
  source 1..75: mol_type = other DNA
aagaagtcgcggcgttaccgggcgtcgggcgttccaccgcaggtgcgattctctcgctttctctgggtaagcact

SEQ ID NO: 711481 - DNA, 75 bp, synthetic construct
  source 1..75: mol_type = other DNA
cctggttgctgtaccgctcatggtttggcagctatctacgtttctggcagaaacatcatgcgatgccgcgcggcg

SEQ ID NO: 711482 - DNA, 75 bp, synthetic construct
  source 1..75: mol_type = other DNA
tgtttgcaggtgccctgttagtcagccaatgggtgatgaaaaagccgctaattcagcggatgctgggtaaagaac

SEQ ID NO: 711483 - DNA, 75 bp, synthetic construct
  source 1..75: mol_type = other DNA
cccatatcatatgactcaagatgaaaaccctctccgcgccgccatgattgtcttcctcatgatgcaggacgtcaa

SEQ ID NO: 711484 - DNA, 75 bp, synthetic construct
  source 1..75: mol_type = other DNA
ggcttctgggtcagctccgccatggcgggcgcgtatgtgggtcttgggatcatcctgattttcacgctcggtaat

SEQ ID NO: 711485 - DNA, 75 bp, synthetic construct
  source 1..75: mol_type = other DNA
ggttctgaactgttcaccggacacaccatgttcctcacctttggggtgaaagcgggcactatcagccacgggcaa

SEQ ID NO: 711486 - DNA, 75 bp, synthetic construct
  source 1..75: mol_type = other DNA
cgtggaaatgggcgcagaaagtgggtgtaaagctggattatccagagccgattgtcgatcacaaagaagccagat

SEQ ID NO: 711487 - DNA, 75 bp, synthetic construct
  source 1..75: mol_type = other DNA
aataatcctgaagacgcagagccgattatcgtagagaacagaattggcattattccagcgccagaaaatggatta

SEQ ID NO: 711488 - DNA, 75 bp, synthetic construct
  source 1..75: mol_type = other DNA
gcagtgatagcaccccatatcatatgactcaagatgaaaaccaactccgcgccgccatgattgtctttctcatga

SEQ ID NO: 711489 - DNA, 75 bp, synthetic construct
  source 1..75: mol_type = other DNA
gatgctgacgccgatgccaatctcggcgggctgacgttacaaggaatggatgataacgccgcaggtttaggtgtc

SEQ ID NO: 711490 - DNA, 75 bp, synthetic construct
  source 1..75: mol_type = other DNA
acaggccagtctgatgattttttccctgatcctgacgccagttatcgtcattatcagtgtcggtggctttggtga

SEQ ID NO: 711491 - DNA, 75 bp, synthetic construct
  source 1..75: mol_type = other DNA
ctgggcttagtgagctacgcgtgggcaggctttggcgcagcgtttggtccggtggtgctgttctcggtgatgtgg

SEQ ID NO: 711492 - DNA, 75 bp, synthetic construct
  source 1..75: mol_type = other DNA
ctcttatacacaaatccccacccggggatttgtgatgtctgtcagtctgctttagggggactctttccatccggt

SEQ ID NO: 711493 - DNA, 75 bp, synthetic construct
  source 1..75: mol_type = other DNA
attaatctcgataatttgatcgtgggcgataagctttattttaatagtggcgtaaatacaccggaagctgtcagg

SEQ ID NO: 711494 - DNA, 75 bp, synthetic construct
  source 1..75: mol_type = other DNA
ggcgcttccaggaagaatagaacgtcgctgccgtgacgttatgtggataatactgccactggtgaaggaactggc

SEQ ID NO: 711495 - DNA, 75 bp, synthetic construct
  source 1..75: mol_type = other DNA
gccatcttctgcttcatttccaccggcatggggctgctggcctccaccctcaccagcagccagatagccgcgatg

SEQ ID NO: 711496 - DNA, 75 bp, synthetic construct
  source 1..75: mol_type = other DNA
ggaggtcatcgagggctttccggcggcccgtgaggcgcatttcagttccttcatgctgcgttacggcgggcaggt

SEQ ID NO: 711497 - DNA, 75 bp, synthetic construct
  source 1..75: mol_type = other DNA
cgcaaaatttgtgccgtcagtgaaaaaacaggccgcggagtggggcggtttgcgtgaatccctcagtaccaacca

SEQ ID NO: 711498 - DNA, 75 bp, synthetic construct
  source 1..75: mol_type = other DNA
gacacttccagcgagttcaacacccagcgcgttgaatgcctggaactggataacctgatggaaacggcgtatgca

SEQ ID NO: 711499 - DNA, 75 bp, synthetic construct
  source 1..75: mol_type = other DNA
tgtcggccttgactactggctcctccagagaacgggcggaacaggttattcatggagatgttctggggaatgtta

SEQ ID NO: 711500 - DNA, 75 bp, synthetic construct
  source 1..75: mol_type = other DNA
tctttgcgcgtcgcggttcaaagctgagcgttcgcggttatcactcaagcaggctgaagtagcagccctttgtgg

SEQ ID NO: 711501 - DNA, 75 bp, synthetic construct
  source 1..75: mol_type = other DNA
gcccgtgaggcccatttcagtgcctttatgctgcgttacggggggcagacatcattccaccgcctgctgctcgac

SEQ ID NO: 711502 - DNA, 75 bp, synthetic construct
  source 1..75: mol_type = other DNA
gcagtggcaaatggatttccgcaaactgaaaaaaggcgatgaatttgcggtgttaatgtcacgagaaatgcttga

SEQ ID NO: 711503 - DNA, 75 bp, synthetic construct
  source 1..75: mol_type = other DNA
accattgagctggaacaaaacgaaatccgttcactcttacctgaagccagtgaaccgattgatcaagccgcacaa

SEQ ID NO: 711504 - DNA, 75 bp, synthetic construct
  source 1..75: mol_type = other DNA
gggcgaactgaaggacaaacctgacctgctggctgcggtgatgttctcgatgatgatttatgtcgagcaacggat

SEQ ID NO: 711505 - DNA, 75 bp, synthetic construct
  source 1..75: mol_type = other DNA
agtctgggagcgtaaagagaacgctgcacggattgacgatatcgtgcattacatgaaggaggcaattcagcaacc

SEQ ID NO: 711506 - DNA, 75 bp, synthetic construct
  source 1..75: mol_type = other DNA
tgaacaggccgctctgacaaaatttgccaataaaaaaggctatccgctgacactgcgccattaccgcctgtttgt

SEQ ID NO: 711507 - DNA, 75 bp, synthetic construct
  source 1..75: mol_type = other DNA
gccggaagcgattctggaactcgaacacatgggcctgccgttctcgcgtctcgatgatggtcgtatctatcaacg

SEQ ID NO: 711508 - DNA, 75 bp, synthetic construct
  source 1..75: mol_type = other DNA
gcatcagtgagtcagaggttatccccgtcgtctgcgacaacattggtgaaagcacattgattccactggcgacct

SEQ ID NO: 711509 - DNA, 75 bp, synthetic construct
  source 1..75: mol_type = other DNA
tagctggcaacgcatcagttatactttctctgccagccaatcctatgatgaaaacgacaaagaagaggagcgttt

SEQ ID NO: 711510 - DNA, 75 bp, synthetic construct
  source 1..75: mol_type = other DNA
gagcacgaggtcacgcgtctcgatgcgtctgatctgatttcgctggccgggaaggtggtcggttttttgtcgcct

SEQ ID NO: 711511 - DNA, 75 bp, synthetic construct
  source 1..75: mol_type = other DNA
ttcctttcggactccatcgcgataccggacggtttctggacatcacggaagtcagcagaggaagcgcatgcaact

SEQ ID NO: 711512 - DNA, 75 bp, synthetic construct
  source 1..75: mol_type = other DNA
tagggagttattccggcctgacaagaggaaatttaaaataattttccgaccgcgcattttttcagcaaaagcccc

SEQ ID NO: 711513 - DNA, 75 bp, synthetic construct
  source 1..75: mol_type = other DNA
accggttatgtctacgatgtcattgccgattttgatggcaagccgtctattacattgaccgaatttgctggacaa

SEQ ID NO: 711514 - DNA, 75 bp, synthetic construct
  source 1..75: mol_type = other DNA
ggcgtactcttccgttattctgggtaacgtgggtaatcaactgctaaccatgcaaattacgctgccagctgacga

SEQ ID NO: 711515 - DNA, 75 bp, synthetic construct
  source 1..75: mol_type = other DNA
atgaacgtgagtaaatatgtcgctatatttttctttgtttttattcagttaatcagtgttggtaaagtttttgct

SEQ ID NO: 711516 - DNA, 75 bp, synthetic construct
  source 1..75: mol_type = other DNA
cgcggctgtgatggtccgtgggggccacacgcgaaactgaaacttgaccacctgggtaaagaagttctcgaatcc

SEQ ID NO: 711517 - DNA, 75 bp, synthetic construct
  source 1..75: mol_type = other DNA
gagcacgagctcgcgcgtctggatgcgtcagacctgatttcactagccggtaaggtggtcggttttttgtcacca

SEQ ID NO: 711518 - DNA, 75 bp, synthetic construct
  source 1..75: mol_type = other DNA
cgctggccggtaaggtggtcggttttttgtcgccgaactcggtgcagtgacgttcccgaaaaatctgtcggtcga

SEQ ID NO: 711519 - DNA, 75 bp, synthetic construct
  source 1..75: mol_type = other DNA
accacgggcagatggaatatgtggctgacccggcggcgctgcagtacctgcagagtctggaatacgcagaaaatg

SEQ ID NO: 711520 - DNA, 75 bp, synthetic construct
  source 1..75: mol_type = other DNA
accgccagacgttatccgttaacgccgctgctctatgcactgattttctttcacgccatcatcctgatggtcggc

SEQ ID NO: 711521 - DNA, 75 bp, synthetic construct
  source 1..75: mol_type = other DNA
ctggctgcagacggattattacaaacagcggatggtcggtaacagtaaagccgatgcggctctgctggatgaaat

SEQ ID NO: 711522 - DNA, 75 bp, synthetic construct
  source 1..75: mol_type = other DNA
agcgcgccggtacgactcctgccgatcagccatcggtaatggacgaagcctataaagagtttgttatgcaactgg

SEQ ID NO: 711523 - DNA, 75 bp, synthetic construct
  source 1..75: mol_type = other DNA
tataaagagtttgttatgcaactggcgtcgtgggacacccgccgcgatttctggttgcagaccgactattacaaa

SEQ ID NO: 711524 - DNA, 75 bp, synthetic construct
  source 1..75: mol_type = other DNA
gaatcgacataaacgcgatgcactaaaccagatcaacgcaccaatcaagcgcggtattgtgaaaagtgaatcgcc

SEQ ID NO: 711525 - DNA, 75 bp, synthetic construct
  source 1..75: mol_type = other DNA
cgagatcacattctggaaccctctgccggcaccggggccatactgcgggctattcgggataccgcgccgggggcc

SEQ ID NO: 711526 - DNA, 75 bp, synthetic construct
  source 1..75: mol_type = other DNA
tgcccctgatgccaataatctgctgcgtcaatatgtcgcattcgccagtcagcgcgctgccagccatctgaatga

SEQ ID NO: 711527 - DNA, 75 bp, synthetic construct
  source 1..75: mol_type = other DNA
ggtggtcagagaaggcgcaaccactctgctgtggtttgaacatccagcagagcgttttctgctcgtcaccgataa

SEQ ID NO: 711528 - DNA, 75 bp, synthetic construct
  source 1..75: mol_type = other DNA
aacgttttctgatcgtgaccgatgaaactaccgccagtgcgctgacagataaactgcgcggcgaagcggaactga

SEQ ID NO: 711529 - DNA, 75 bp, synthetic construct
  source 1..75: mol_type = other DNA
gtcgcagctcactgaactgaaaaaatatgcagtgttctctaaagtgaacatcgcaccagacgacgaacgtgtgct

SEQ ID NO: 711530 - DNA, 75 bp, synthetic construct
  source 1..75: mol_type = other DNA
atgaacaacaagacatggtttcgtgcatatgcatgggcgctagtatgcgtcctcgtctctctcattctgtatgta

SEQ ID NO: 711531 - DNA, 75 bp, synthetic construct
  source 1..75: mol_type = other DNA
tgcaaacccggagaaagcccgccagttactggcgatggatgggcagtccgcgctgattgaactcactcgactatc

SEQ ID NO: 711532 - DNA, 75 bp, synthetic construct
  source 1..75: mol_type = other DNA
gcctgcgccgtcagcggtgtcacaaccggccatcagcgcacctcagtccgtccccgttaaacctgtcagcggagg

SEQ ID NO: 711533 - DNA, 75 bp, synthetic construct
  source 1..75: mol_type = other DNA
taaaaacaagtgtctggtcggcgtgggaggacgttttagcgcaggcaaatcgcaatttatcaacacgctgaccgg

SEQ ID NO: 711534 - DNA, 75 bp, synthetic construct
  source 1..75: mol_type = other DNA
atgagcgggcgcgggatgtggaagttgaaagagcgctgcgtaacgtggtgtgtgaaggatttgatgacagcgtga

SEQ ID NO: 711535 - DNA, 75 bp, synthetic construct
  source 1..75: mol_type = other DNA
catgaatccgccgttcagccacgggcaggatatccggcatatcctgcgggccttttccctgttgcgtccgggggg

SEQ ID NO: 711536 - DNA, 75 bp, synthetic construct
  source 1..75: mol_type = other DNA
gaaaaaagctggcaacgtgattttctggcgctgaccaatgcgcgcggcacattcgatccctgggatacgcaaacc

SEQ ID NO: 711537 - DNA, 75 bp, synthetic construct
  source 1..75: mol_type = other DNA
ttggcgcattaacgacggtgatattcctcgctcgctttcattgccgccagctacggcgctttggcttaatcacca

SEQ ID NO: 711538 - DNA, 75 bp, synthetic construct
  source 1..75: mol_type = other DNA
accgccagacgttatccattaacgcccttgctctatacgctgattttctttcacgccatcatcctgatggttggc

SEQ ID NO: 711539 - DNA, 75 bp, synthetic construct
  source 1..75: mol_type = other DNA
cactgctctatacgctgattttctttcacgccatcatcctgatggtcggaggtcagcacacctacgcaaaagtcc

SEQ ID NO: 711540 - DNA, 75 bp, synthetic construct
  source 1..75: mol_type = other DNA
tcccgttgccgattttccccataatgtattcaagtacgtgcgcaaaaatcatgtcaaaaccagcgaacactggaa

SEQ ID NO: 711541 - DNA, 75 bp, synthetic construct
  source 1..75: mol_type = other DNA
ttaacatcgccatgtctcagttcagtgaaggcagtaaaaagcctctgtttcctatgcatttgatgctggctggtg

SEQ ID NO: 711542 - DNA, 75 bp, synthetic construct
  source 1..75: mol_type = other DNA
aaaaattgccagggagcacctgagcaattgtgactatgttatttggctggcgacagccgataatggttcattagg

SEQ ID NO: 711543 - DNA, 75 bp, synthetic construct
  source 1..75: mol_type = other DNA
ttccgtcgctgacttttcgcataacgtcttcaagtatgtgcgcaaaaatcatgtcaaaaccaccgtgcactggaa

SEQ ID NO: 711544 - DNA, 75 bp, synthetic construct
  source 1..75: mol_type = other DNA
tgccttaaccgctacggcgtgtttgcccgttcccatgccgcgcctacgcagtcggcatggacctataaaattcgc

SEQ ID NO: 711545 - DNA, 75 bp, synthetic construct
  source 1..75: mol_type = other DNA
gaaaaaagctggcaacgtgattttctggcgctgaccaatgcgcgcggcgcgttcgatccctgggatacgcaaacc

SEQ ID NO: 711546 - DNA, 75 bp, synthetic construct
  source 1..75: mol_type = other DNA
cgtccacactgcctgtaaccacgccaatactgttaattcacaacggcatgggcaccatcgaagagttgcaaaaca

SEQ ID NO: 711547 - DNA, 75 bp, synthetic construct
  source 1..75: mol_type = other DNA
gagcaaatcccggaaaaatctctggtaacattacattttgacccttttgattttaggcaacattcttcaatggaa

SEQ ID NO: 711548 - DNA, 75 bp, synthetic construct
  source 1..75: mol_type = other DNA
gtcatgaaatcgaggatttctgcgcgacgttggaggcgccaggcgaaccggaaacgccggaagcaatacagcaag

SEQ ID NO: 711549 - DNA, 75 bp, synthetic construct
  source 1..75: mol_type = other DNA
gaaacgccggaagcaatacagcaagagctgctgcaacgcattgacaaggttttcgattttttccttaaccagtaa

SEQ ID NO: 711550 - DNA, 75 bp, synthetic construct
  source 1..75: mol_type = other DNA
tctcgacagccgggggaatatccaacgcttcaatcggttatgtgaagattacacagggttgaacgaacacgacgt

SEQ ID NO: 711551 - DNA, 75 bp, synthetic construct
  source 1..75: mol_type = other DNA
tcaataaacgggaatgggctggcaacgcgtctgcatggcatgacacaccggggttgctcgtgatttatcacacgg

SEQ ID NO: 711552 - DNA, 75 bp, synthetic construct
  source 1..75: mol_type = other DNA
cgatcatctgcgtctgctgaccgagaagttaaaagccagccagccgtcgaacatcgcatcgcaggctgaagaaac

SEQ ID NO: 711553 - DNA, 75 bp, synthetic construct
  source 1..75: mol_type = other DNA
ccgcgcaattgcacgtggtgtgggcggtgatgatgatgcaaacatggaaaccatcatctacgaaggttacggtcc

SEQ ID NO: 711554 - DNA, 75 bp, synthetic construct
  source 1..75: mol_type = other DNA
aagaaagagatggttgaagcgaacctacgtctggttatttctatcgctaagaaatacaccaaccgtggcttgcag

SEQ ID NO: 711555 - DNA, 75 bp, synthetic construct
  source 1..75: mol_type = other DNA
ggcaacgcacgacgtgctggctggcctgaccgcgcgtgaagcaaaagttcttcgtatgcgtttcggtatcgatat

SEQ ID NO: 711556 - DNA, 75 bp, synthetic construct
  source 1..75: mol_type = other DNA
tacgcgaactggcgactgccgtgcaaagaatacccccccatgaatcactaccatctcgcgtgagcttacaaccgt

SEQ ID NO: 711557 - DNA, 75 bp, synthetic construct
  source 1..75: mol_type = other DNA
gaaacgccggaagcaatgcaacaagagctgctgcaacgcatcgacaacgttttcgattttttccttaaccagcaa

SEQ ID NO: 711558 - DNA, 75 bp, synthetic construct
  source 1..75: mol_type = other DNA
ggtgatgatggtgcggacatggaaaccatcatctacgaaggttacggtcctggcggcacggcaatcatggttgaa

SEQ ID NO: 711559 - DNA, 75 bp, synthetic construct
  source 1..75: mol_type = other DNA
cacagcagtgaacatgaaccggcaccttctctgcctcctgcaccgcctgaagtgcagccgtcactctccggtaac

SEQ ID NO: 711560 - DNA, 75 bp, synthetic construct
  source 1..75: mol_type = other DNA
accaccagcaatacagcggtggtggcaaacctcagagcagcgccaataacgaacctccaatggactttgaagacg

SEQ ID NO: 711561 - DNA, 75 bp, synthetic construct
  source 1..75: mol_type = other DNA
ggagaagctgttaccgttttctgacatccgcgaggagctgccgcgcggcacgtttgcttatacccgtgttccgac

SEQ ID NO: 711562 - DNA, 75 bp, synthetic construct
  source 1..75: mol_type = other DNA
ggacgggaaaatccaccgtgtcccgaccgccgatgacaaaaaaggacaaaaaagtggcgcatatcgcggattcct

SEQ ID NO: 711563 - DNA, 75 bp, synthetic construct
  source 1..75: mol_type = other DNA
aaagatctcagctcacgaatgtgctttgaagaagcgttattactgtatcttcatcgggtatttcggccattatta

SEQ ID NO: 711564 - DNA, 75 bp, synthetic construct
  source 1..75: mol_type = other DNA
aaaaattatattgaatggtatatgaataatgtttttttgttgaactgggcgtcttttaataaatatgcaataaag

SEQ ID NO: 711565 - DNA, 75 bp, synthetic construct
  source 1..75: mol_type = other DNA
gttgataaaaagacacccagactcaaagcgatttagaaatgatataatgaactttgcttatgaaaatattaaaac

SEQ ID NO: 711566 - DNA, 75 bp, synthetic construct
  source 1..75: mol_type = other DNA
tgaagctgcggcatcgccgacacaggatgaaacgccacagccgccggcagaggcatccgcaccaccggtcacacc

SEQ ID NO: 711567 - DNA, 75 bp, synthetic construct
  source 1..75: mol_type = other DNA
gttgcggaagacctcaatgctgatgttactgtgatgaccacagctcaccacaccgatacagcagaaacagcctca

SEQ ID NO: 711568 - DNA, 75 bp, synthetic construct
  source 1..75: mol_type = other DNA
tgcaggagtacgcagccatgcagcaggcagccacgatgcagcatgcagaggctgaagcaggaacggagacagaac

SEQ ID NO: 711569 - DNA, 75 bp, synthetic construct
  source 1..75: mol_type = other DNA
cgtgctggtcgctgtctgtctgaacgggccacgccagcaggagaagctgttaccgttttctgacgtccgcgagga

SEQ ID NO: 711570 - DNA, 75 bp, synthetic construct
  source 1..75: mol_type = other DNA
taacccggtgactgacgacgtggaaaacttaagccgcgtgttggacaccatttacggcgtgatcgacaaattcaa

SEQ ID NO: 711571 - DNA, 75 bp, synthetic construct
  source 1..75: mol_type = other DNA
gaactgcgttcgggggatgtgctggcaggcgttgcagcggcaagttcacaggagcgcgtggcggcaaagcaggtg

SEQ ID NO: 711572 - DNA, 75 bp, synthetic construct
  source 1..75: mol_type = other DNA
ttgcaaaagaaaaagaaaaaatgctgtgcaacaaactttctttttacagggagcatgctcaatcgagtgaagata

SEQ ID NO: 711573 - DNA, 75 bp, synthetic construct
  source 1..75: mol_type = other DNA
atgacacagggctggcgggaggataaatgcccgtctgaccgcgctgggaaaagaccgcgcgtcggtggcgctgaa

SEQ ID NO: 711574 - DNA, 75 bp, synthetic construct
  source 1..75: mol_type = other DNA
aaaaatgttttatcgccccacgaacctggcaatggcacctgaagaagcgcctgcaatgcttcgagttcatacaag

SEQ ID NO: 711575 - DNA, 75 bp, synthetic construct
  source 1..75: mol_type = other DNA
cattgttgccaggaactgaagtgactacgactgatgctgtcggtattagcggtgatgacatggaagcgttggcct

SEQ ID NO: 711576 - DNA, 75 bp, synthetic construct
  source 1..75: mol_type = other DNA
atttgtctgttactgatgatgctgttgttcctgctactgctactgttactactgatactgtgcttcttttttctg

SEQ ID NO: 711577 - DNA, 75 bp, synthetic construct
  source 1..75: mol_type = other DNA
atgacacagggctggcgggaggataaatgcccgtctgtccgcgcggggaaaagaccgcgcgtcggtggcgctgaa

SEQ ID NO: 711578 - DNA, 75 bp, synthetic construct
  source 1..75: mol_type = other DNA
atgacacagggctggcgggaggataaatgcccgtctgaccgcgcggggaaaataccgcgcgtcggtggcgctgaa

SEQ ID NO: 711579 - DNA, 75 bp, synthetic construct
  source 1..75: mol_type = other DNA
gggcttctgtcttttcagaacggtcatttgtctgttactgatgatgttgttgttcctgctactgctactgctact

SEQ ID NO: 711580 - DNA, 75 bp, synthetic construct
  source 1..75: mol_type = other DNA
ttgttcctgctactgctactgctactgctactgctactgctactgctactgttcttctttttcctgctgctctga

SEQ ID NO: 711581 - DNA, 75 bp, synthetic construct
  source 1..75: mol_type = other DNA
gaagcggtcagtggatttggcgcacaggacccgaaatcactggcgctgcgtacccactgccagacctcaggctag

SEQ ID NO: 711582 - DNA, 75 bp, synthetic construct
  source 1..75: mol_type = other DNA
ggctggccttcctggtaatttgccttcggtcaccggcgcaagcgaggagagcgttctgggcgcgatttttcctgc

SEQ ID NO: 711583 - DNA, 75 bp, synthetic construct
  source 1..75: mol_type = other DNA
cagggtcattctccctctgctgcaaaatatgcttagtgatgcgtatttttcccagcctgcgccaaaaagcaccgg

SEQ ID NO: 711584 - DNA, 75 bp, synthetic construct
  source 1..75: mol_type = other DNA
aaccacacactttacagattggcgataacaatcaaattgtggcacgcaccggaattacggttgtcggtgattttc

SEQ ID NO: 711585 - DNA, 75 bp, synthetic construct
  source 1..75: mol_type = other DNA
taaaaaaaatgaatatcacccgggtgattattgcacacagagaaactacgttgagaactgttgacaggattattt

SEQ ID NO: 711586 - DNA, 75 bp, synthetic construct
  source 1..75: mol_type = other DNA
atggaactgtatctggatacttcagacgttgttgcggtgaaggcgctgtcacgtatttttccgctggcgggtgtg

SEQ ID NO: 711587 - DNA, 75 bp, synthetic construct
  source 1..75: mol_type = other DNA
gctggatattctcacccgccctaaaacagcggacgggcagccggatgatgccgtggcagaacaggcactggcaga

SEQ ID NO: 711588 - DNA, 75 bp, synthetic construct
  source 1..75: mol_type = other DNA
ccagagaacaaaaatccgcgattgcagaagcattagacgtatcattagacgatttagaagaacttagaattaaag

SEQ ID NO: 711589 - DNA, 75 bp, synthetic construct
  source 1..75: mol_type = other DNA
gctgttgtcggcgctggcgggcgcggaatatgttgcgccttacgtcaaccgtattgatgctcaggggggtagcgg

SEQ ID NO: 711590 - DNA, 75 bp, synthetic construct
  source 1..75: mol_type = other DNA
gactgcttactggcaggatgtgaatcaattacgctgccactggatgtggcacaacagatgattagctatccggcg

SEQ ID NO: 711591 - DNA, 75 bp, synthetic construct
  source 1..75: mol_type = other DNA
acgttgctgcggtgaaggcgttggcacgagttttcccgctggcgggcgtaaccactaacccgagcattatcgccg

SEQ ID NO: 711592 - DNA, 75 bp, synthetic construct
  source 1..75: mol_type = other DNA
ccgcccaccgaggctacgactccgataacccacgcgtggcgggcgacgtcggcaaagcgggcgtcgctatcgaca

SEQ ID NO: 711593 - DNA, 75 bp, synthetic construct
  source 1..75: mol_type = other DNA
tacaaaaccctaaaacaattgagcaataccagctggcgcgacagcataaatttttattgtggctgttctccgatg

SEQ ID NO: 711594 - DNA, 75 bp, synthetic construct
  source 1..75: mol_type = other DNA
gttattgaagttcctgatattaccgctaaccgccgtattaccgtgcctggttactggttttaccgcgacgataaa

SEQ ID NO: 711595 - DNA, 75 bp, synthetic construct
  source 1..75: mol_type = other DNA
tatttgaaaaaaagatacttattcgcaatgcagaagacgaccatgtatatttgaactctaatttatgtgtaaaag

SEQ ID NO: 711596 - DNA, 75 bp, synthetic construct
  source 1..75: mol_type = other DNA
caaagagcttgggctgaataaatcaaatgtttcacgtgcattcaaagagttatttggaaaaaaaaaatacttatt

SEQ ID NO: 711597 - DNA, 75 bp, synthetic construct
  source 1..75: mol_type = other DNA
atgttgcatttaaaaaatattacggtaggtaatccgaaaaccgcggaacaatatcagctgacaaaacagtatgat

SEQ ID NO: 711598 - DNA, 75 bp, synthetic construct
  source 1..75: mol_type = other DNA
tttcgggcgcgatatcgcgcgtggtacgcctgtggaactcggtgtctggatcgacggagcgatgccgagccgtgc

SEQ ID NO: 711599 - DNA, 75 bp, synthetic construct
  source 1..75: mol_type = other DNA
acgtctgcccgcgcatcgcctggatgccgcaggggctgggcaaaaacctctaccacaccttgtcggtgtatgaaa

SEQ ID NO: 711600 - DNA, 75 bp, synthetic construct
  source 1..75: mol_type = other DNA
gcgcccttagcgtggtgcgggaaaaagagttggggtcgattatcaacctttacgttacccccaccacccgtagcg

SEQ ID NO: 711601 - DNA, 75 bp, synthetic construct
  source 1..75: mol_type = other DNA
gtaaaatggtatgtgcattaacgggcggaaagagtagcaaagcagaaatgctctctttagcaaccagcagacatt

SEQ ID NO: 711602 - DNA, 75 bp, synthetic construct
  source 1..75: mol_type = other DNA
cacgggcatttcagagtactgaatattttattccctacagtaaaaacacatgtaatttcacacgagtgtttttta

SEQ ID NO: 711603 - DNA, 75 bp, synthetic construct
  source 1..75: mol_type = other DNA
gtacatcgcgctggggatgctgaactttttcctgctctgcgccttgtcggtgtttgtgtttggcgtgccgcataa

SEQ ID NO: 711604 - DNA, 75 bp, synthetic construct
  source 1..75: mol_type = other DNA
tgcaaattacccgtatccgcgttgaccttgctcagaacggtatcaggccgcagcgatgggagcttgaggcgctgg

SEQ ID NO: 711605 - DNA, 75 bp, synthetic construct
  source 1..75: mol_type = other DNA
tgaattagcaccttcagcgcgactgactaaatcgcagcgtgaccagatatcacgcatccggtttgacctagcaca

SEQ ID NO: 711606 - DNA, 75 bp, synthetic construct
  source 1..75: mol_type = other DNA
ctttgactttaaaaagcggcatcgccgcgcctcggagtcctgtcaataactgtgggttaccggccaacggaagcg

SEQ ID NO: 711607 - DNA, 75 bp, synthetic construct
  source 1..75: mol_type = other DNA
gtggcgcgaccgtaaattatgatgggaaaacgttttcatatccgatttctgatggttgggcgggatttgaaacaa

SEQ ID NO: 711608 - DNA, 75 bp, synthetic construct
  source 1..75: mol_type = other DNA
tggtcagctcgataacgataccggcaggccgctgaaagacactgctgcggctgttaccgcatgggcgtcaacgtg

SEQ ID NO: 711609 - DNA, 75 bp, synthetic construct
  source 1..75: mol_type = other DNA
gaaccacaggtattagcacgcggtgcgacagtatgtttcgatgggaggaaatataaatttaaaaaaattccaact

SEQ ID NO: 711610 - DNA, 75 bp, synthetic construct
  source 1..75: mol_type = other DNA
ttatcgatacagaggaaatgcagaaccagagttacacgacaataatattgtacaacgcgttgatatgcgcgaagc

SEQ ID NO: 711611 - DNA, 75 bp, synthetic construct
  source 1..75: mol_type = other DNA
tgcccagttataattctgaattcacaattaaggaaagtataaaatcggtaatagaacaaacatattctaattggg

SEQ ID NO: 711612 - DNA, 75 bp, synthetic construct
  source 1..75: mol_type = other DNA
aaggttaatttatggacgaaaaacagttacaggctctggctaacgaactggccaaaaacctcaaaacccctgaag

SEQ ID NO: 711613 - DNA, 75 bp, synthetic construct
  source 1..75: mol_type = other DNA
caagatatgggtctatggctaaaaatattatcacaaggtcataccgcttactgttgtcctcatgtacttgctgac

SEQ ID NO: 711614 - DNA, 75 bp, synthetic construct
  source 1..75: mol_type = other DNA
gatgaacaacaatttcgtgactggttgtcagttcacatgactacgtgtgccatagaaacagggcatttttgtcca

SEQ ID NO: 711615 - DNA, 75 bp, synthetic construct
  source 1..75: mol_type = other DNA
ttgagttttattaaaaccttatggtatttttcacactatgttattagagcattaaaaaaacataaattaccaagc

SEQ ID NO: 711616 - DNA, 75 bp, synthetic construct
  source 1..75: mol_type = other DNA
ctaaaagagcagattaattatatgattatgaatggctacgcccttacttatactgcatatagtaaaattgatgca

SEQ ID NO: 711617 - DNA, 75 bp, synthetic construct
  source 1..75: mol_type = other DNA
gatcaactggatatcgccaaaatccacctgctgggcaactcgatgggcggccatagttctgtggcgttcaccctt

SEQ ID NO: 711618 - DNA, 75 bp, synthetic construct
  source 1..75: mol_type = other DNA
taagatccgcaaagtactgaagatcgccaaagagccaatctctatggaaaccccgatcggtgacgatgaagattc

SEQ ID NO: 711619 - DNA, 75 bp, synthetic construct
  source 1..75: mol_type = other DNA
acatcggtctgatgaaagcggtagataaattcgaatatcgccgtggctacaagttctccacctacgcaacctggt

SEQ ID NO: 711620 - DNA, 75 bp, synthetic construct
  source 1..75: mol_type = other DNA
acagttcccggattttggcccacgtctggcggaaatcaaagcgcaaaccctgattgtctgggggcgcaacgaccg

SEQ ID NO: 711621 - DNA, 75 bp, synthetic construct
  source 1..75: mol_type = other DNA
atccgctggtagaggcgggctatcgggtgatcctgctggattgtccgggttggggtaagagcgattcgatcgtta

SEQ ID NO: 711622 - DNA, 75 bp, synthetic construct
  source 1..75: mol_type = other DNA
cccggattttggcccacgtctggcggaaatcaaagcgcaaaccctgattgtctgggggcgcaacgaccgctttgt

SEQ ID NO: 711623 - DNA, 75 bp, synthetic construct
  source 1..75: mol_type = other DNA
cgacacgtcaggtcggaaaaggcgaaagtaaaaccgtccagcttaatcacggctggaatgatgaggcatttaatc

SEQ ID NO: 711624 - DNA, 75 bp, synthetic construct
  source 1..75: mol_type = other DNA
ttgaactgctgtgctgtattcacgcttatcgtaccggacaagagcgatactggatttttatcatcttcttttttc

SEQ ID NO: 711625 - DNA, 75 bp, synthetic construct
  source 1..75: mol_type = other DNA
ggactgacctgcaccgagcagaacttcattaccaaatcagggatgcagcgttacgcggcagaacacaacattatt

SEQ ID NO: 711626 - DNA, 75 bp, synthetic construct
  source 1..75: mol_type = other DNA
tcggcattattccgcatcactgaaatgtgaaatgaatgtcggcgtctatctcccaccaaaagctgcaggtgaaaa

SEQ ID NO: 711627 - DNA, 75 bp, synthetic construct
  source 1..75: mol_type = other DNA
tgatacggctaaacgctcaagagcgcattatagaaaacaccaccgggaatggattaagaccgccaatgaacggct

SEQ ID NO: 711628 - DNA, 75 bp, synthetic construct
  source 1..75: mol_type = other DNA
tgccaacgagctggcgcgtctggagcgttaccacgaagccgttccccattatcagcaggcgttaagcgggatatt

SEQ ID NO: 711629 - DNA, 75 bp, synthetic construct
  source 1..75: mol_type = other DNA
agcctggcgcaggcacagtttgctattcaggagttcgccgcctgtcagcagacgctggaagatgtgatgcgttat

SEQ ID NO: 711630 - DNA, 75 bp, synthetic construct
  source 1..75: mol_type = other DNA
atgatccaggaaaaactggcgctgatggcgattaagatcgacaacatgcgcaacatggtgctgaaagtggcatgg

SEQ ID NO: 711631 - DNA, 75 bp, synthetic construct
  source 1..75: mol_type = other DNA
acatttatgagaggcttttttggtcttatcgttttttcttttatatttgtgatagtttataactattgcgcagtg

SEQ ID NO: 711632 - DNA, 75 bp, synthetic construct
  source 1..75: mol_type = other DNA
ctggaacgcctcataaattcagcgaagagaggcaggcgcaattcattgaatattatgaagacctgaaagaaaaag

SEQ ID NO: 711633 - DNA, 75 bp, synthetic construct
  source 1..75: mol_type = other DNA
gggctgacttgcaacgagcagaatttcattactaaatcggggatgcaacgttacgcggctgagcacaacattatt

SEQ ID NO: 711634 - DNA, 75 bp, synthetic construct
  source 1..75: mol_type = other DNA
gttttcgcccattgtctccccatcgcaagtaccgtggggacagcaagcctttgccgcatatcttggtgaaaataa

SEQ ID NO: 711635 - DNA, 75 bp, synthetic construct
  source 1..75: mol_type = other DNA
cgaaacagcagagcaacgatcgcgcgcagcagatcgtggacgcgaccgacaaactggcagtaaatattggtctgg

SEQ ID NO: 711636 - DNA, 75 bp, synthetic construct
  source 1..75: mol_type = other DNA
gacgctggaagatgtgatgcgttataaccccgattttcagtcggcagacgggcatttgttatttgccagagcgtt

SEQ ID NO: 711637 - DNA, 75 bp, synthetic construct
  source 1..75: mol_type = other DNA
cacgtgctttcaatatttccccgctttactggaaaaaataccgtaaagggcagatgaccacgaggcaggcatatt

SEQ ID NO: 711638 - DNA, 75 bp, synthetic construct
  source 1..75: mol_type = other DNA
atctcggcgcgcgtcatattcatatcaccagaaccacggactggcgcattgtgccgaaagtgccggtcattgagc

SEQ ID NO: 711639 - DNA, 75 bp, synthetic construct
  source 1..75: mol_type = other DNA
gagcctgatttgcatcatagtgacatcgtacaacgcgttgatatgcgcaatacgcaatttctaaaccgcagccag

SEQ ID NO: 711640 - DNA, 75 bp, synthetic construct
  source 1..75: mol_type = other DNA
ctttgactttaaaaagcggcatcgccgcgcctcggagtcctgtcaataactgtggaaagttcaccggcagtgata

SEQ ID NO: 711641 - DNA, 75 bp, synthetic construct
  source 1..75: mol_type = other DNA
cttgaggcgctggcgcgtggcgcgaccgtaaattatgacgggaaaaaattcacgtatccggtcgctgatgagtgg

SEQ ID NO: 711642 - DNA, 75 bp, synthetic construct
  source 1..75: mol_type = other DNA
atggccgttaaagcctccgggcgttttgtccctccgtcagcatttgctgcaggcaccggtaagacgtttaccggt

SEQ ID NO: 711643 - DNA, 75 bp, synthetic construct
  source 1..75: mol_type = other DNA
cgcgagagcgacatcgtaccgggagagcagaccgccaccagcatattgaaacaacgcacaaaaaatcttgcaccg

SEQ ID NO: 711644 - DNA, 75 bp, synthetic construct
  source 1..75: mol_type = other DNA
agtacaaccgacaggccgcgtatgcccgccgctatgtcaacaaatggccgcaggccacagcacatgaatacctga

SEQ ID NO: 711645 - DNA, 75 bp, synthetic construct
  source 1..75: mol_type = other DNA
cggtgcagtattacagccggatcatcatgaatccgccgttcagccacgggcaggatatccggcatatcctgcggg

SEQ ID NO: 711646 - DNA, 75 bp, synthetic construct
  source 1..75: mol_type = other DNA
taaagatgatcagcaggataccgaagccacggcgatcgcaggtgatttgttgagcggcaaaaaacgctggcaagc

SEQ ID NO: 711647 - DNA, 75 bp, synthetic construct
  source 1..75: mol_type = other DNA
aagctttggcctggaagagcgtgctgctgaaaaacgccagtacgccagcgcatcgtggtcagcgccaggttgctg

SEQ ID NO: 711648 - DNA, 75 bp, synthetic construct
  source 1..75: mol_type = other DNA
cacaaaaaatattgcgctaccgcctcacacccaccagcaacagaacccaccacaggaaaagacggtggtcagcat

SEQ ID NO: 711649 - DNA, 75 bp, synthetic construct
  source 1..75: mol_type = other DNA
ggtgatcatctgacccaggcggttatcgactggaaagcgagttgcgaacgccgttttgtgttcaggccgaatgaa

SEQ ID NO: 711650 - DNA, 75 bp, synthetic construct
  source 1..75: mol_type = other DNA
aatgaccgccaaacgacatcggctggaatcgacgttgactgtcggcgcgacagagttgcagcgattccgccttca

SEQ ID NO: 711651 - DNA, 75 bp, synthetic construct
  source 1..75: mol_type = other DNA
cttatcagcctgtccattctggctgaaaccaacaaccgggagcaggcgcggctctatgccgacgcagaacagacc

SEQ ID NO: 711652 - DNA, 75 bp, synthetic construct
  source 1..75: mol_type = other DNA
tctttcatcgcatggcgaataaatgcactcttaaatccatcgtcatacctgaacttgatttaataatagatggcg

SEQ ID NO: 711653 - DNA, 75 bp, synthetic construct
  source 1..75: mol_type = other DNA
gatattcctttgcctactgacattatccggctgcgggaacgtccgacactcaccggaggtgcagcttaccgtcag

SEQ ID NO: 711654 - DNA, 75 bp, synthetic construct
  source 1..75: mol_type = other DNA
agcgcactgctgagacaacgacaacgccggatcgaggaactgaaatgtgagaatgaggatttacgccgctgggct

SEQ ID NO: 711655 - DNA, 75 bp, synthetic construct
  source 1..75: mol_type = other DNA
ctgctgcatggcgaaaagccatcgcaaagctgggaaaaggcgatgcatatttcactggtgctgtacgccgagcac

SEQ ID NO: 711656 - DNA, 75 bp, synthetic construct
  source 1..75: mol_type = other DNA
gcggcgtcgcacccgatggatgttatgcgcaccggcgtttccgcgctcggctgcacgctgccagaaaaagagggg

SEQ ID NO: 711657 - DNA, 75 bp, synthetic construct
  source 1..75: mol_type = other DNA
gatctggcggaacattgcgaatttgaagaagtggcgcatctgctgatccacggcaaactgccgacccgtgacgaa

SEQ ID NO: 711658 - DNA, 75 bp, synthetic construct
  source 1..75: mol_type = other DNA
cagacgagcttcggagcaaaagccaggcactggcaaagagtaacagccagctgatcagcctgtccattctgactg

SEQ ID NO: 711659 - DNA, 75 bp, synthetic construct
  source 1..75: mol_type = other DNA
cttatcagcctgtccattctgacagaaaccaacaaccgggagcaggcgcgactttatgccgacgcagaacagacc

SEQ ID NO: 711660 - DNA, 75 bp, synthetic construct
  source 1..75: mol_type = other DNA
gaacgaggatttacgccgctgggctgatactcctttgcctgctgatattatccggctgcgggaacgccccacact

SEQ ID NO: 711661 - DNA, 75 bp, synthetic construct
  source 1..75: mol_type = other DNA
cagggtgcattcagcttatgaaaataagcctccagccagaatccagcccaaaatggagtccttattaaataagcc

SEQ ID NO: 711662 - DNA, 75 bp, synthetic construct
  source 1..75: mol_type = other DNA
agcccggaaaatttagttctgactcccaatgggacggcgacaacgaatgagcaagggcaggctattttcaccgcc

SEQ ID NO: 711663 - DNA, 75 bp, synthetic construct
  source 1..75: mol_type = other DNA
aacgcactgacgtatggcgggtacgaaatgacgcctgtgaaggtgacaattaacgccgttgctgcagagactgaa

SEQ ID NO: 711664 - DNA, 75 bp, synthetic construct
  source 1..75: mol_type = other DNA
gtatcgacgaaaactgctgaatctaaattcgtcgcggatgataaaaacgcggtgctcgccgcatctccagaacgt

SEQ ID NO: 711665 - DNA, 75 bp, synthetic construct
  source 1..75: mol_type = other DNA
atgacttttaaaatgagtgaaaccgatcaaacagttactgtttataacctgcgttccgacacgaatgaatttatt

SEQ ID NO: 711666 - DNA, 75 bp, synthetic construct
  source 1..75: mol_type = other DNA
cagtggtgtactgcaggcggatgctgtcacgaacggtgcaatagtgatccacacccaacgcctgaaatcagatcc

SEQ ID NO: 711667 - DNA, 75 bp, synthetic construct
  source 1..75: mol_type = other DNA
tcgtcgttttattcaacaagggaataaagttatcgccactggccggcgccaggagcgggggggggggtggaaaaa

SEQ ID NO: 711668 - DNA, 75 bp, synthetic construct
  source 1..75: mol_type = other DNA
atggtgtcacaggaaattcttttaaatggggcttttgataaatgggataatagggttcattcagcttatgaagat

SEQ ID NO: 711669 - DNA, 75 bp, synthetic construct
  source 1..75: mol_type = other DNA
aggtgaagacagtcatgatatgtgggaggagttcgagtggggtaacttcctcatatcaagagaagaaagcatctt

SEQ ID NO: 711670 - DNA, 75 bp, synthetic construct
  source 1..75: mol_type = other DNA
gtgttgggggagacgttcatggcgctggcacggaaacatgggtgctctgacacctgtataggtaaacgccttcac

SEQ ID NO: 711671 - DNA, 75 bp, synthetic construct
  source 1..75: mol_type = other DNA
aatcattgtctgtaggcagaccgtggcctaataaatgtttatgggttggaatgcgaaaaggaaggaagtcagtta

SEQ ID NO: 711672 - DNA, 75 bp, synthetic construct
  source 1..75: mol_type = other DNA
atgtatatacatattgttcctaaactttatcatctcatggctaataaatgtagccttaaatctatttccatacct

SEQ ID NO: 711673 - DNA, 75 bp, synthetic construct
  source 1..75: mol_type = other DNA
cactcttaaatccatctccatacctgaacttgatttaataattgatggcgaatcattgtctgtggggaggccgtg

SEQ ID NO: 711674 - DNA, 75 bp, synthetic construct
  source 1..75: mol_type = other DNA
gcagctctcgcaggaaggcggctcgctgaagatgtacaacatcgccgatcgcctggaaacggtgatgtgggagag

SEQ ID NO: 711675 - DNA, 75 bp, synthetic construct
  source 1..75: mol_type = other DNA
ttgcgcatatggcttgaaacacttggcgacaatgaatgcgacaaacaaaaatcaagaattgccacggcattaata

SEQ ID NO: 711676 - DNA, 75 bp, synthetic construct
  source 1..75: mol_type = other DNA
tagaccgcgcatttagtgcccttgcttacgctgaaggtatgtacgaaatattgcggatgtgccttgaatcctttg

SEQ ID NO: 711677 - DNA, 75 bp, synthetic construct
  source 1..75: mol_type = other DNA
cagatcgcgtatttcttgcactttctcacagtgaaaatatgatggaaatattgcggatgtgccttgaatcctttg

SEQ ID NO: 711678 - DNA, 75 bp, synthetic construct
  source 1..75: mol_type = other DNA
tgcggcaagaaagagaatctgcggttatcggtggcctgctgttaggtgggcttactcctaacgcgcaagacgttc

SEQ ID NO: 711679 - DNA, 75 bp, synthetic construct
  source 1..75: mol_type = other DNA
gaccacacctcctgtcagacggcactatcctgccctgccgctggagcggctgcctgaactgcttgaacgtattgg

SEQ ID NO: 711680 - DNA, 75 bp, synthetic construct
  source 1..75: mol_type = other DNA
tagaccgcgcatttagtgcccttgcttacgctgaaggtatgtacgaaatattgcaaatgtggctggaaaaatttg

SEQ ID NO: 711681 - DNA, 75 bp, synthetic construct
  source 1..75: mol_type = other DNA
tgggcaggtacatggtgcaatgaactctggccccgaaccttttatatttgtttcagtggttgcgccgggcaatgc

SEQ ID NO: 711682 - DNA, 75 bp, synthetic construct
  source 1..75: mol_type = other DNA
taagaaaaaacgattattttccctgagcggcctgcaacacattcagcctcagaataatgctgaacgaaagcttct

SEQ ID NO: 711683 - DNA, 75 bp, synthetic construct
  source 1..75: mol_type = other DNA
atgcgataccgacgagaagatgctgacggcgattacactttcgggcaaggtgacgacaccttccttatcgacagt

SEQ ID NO: 711684 - DNA, 75 bp, synthetic construct
  source 1..75: mol_type = other DNA
actctccttgaacatgtaataacagagttgcaggaaatagacttattgcacgacagatataacgaacagcacacc

SEQ ID NO: 711685 - DNA, 75 bp, synthetic construct
  source 1..75: mol_type = other DNA
tagaccgcgcatttcttgcactttctcacagtgaaaacatgttggaaatattgcgcttatggcttgaaacgcttg

SEQ ID NO: 711686 - DNA, 75 bp, synthetic construct
  source 1..75: mol_type = other DNA
aacgatggggtgcgtgggcggcaaataaccgtgaggatgtgacctggtcatccgttgccgcaggatttaagggga

SEQ ID NO: 711687 - DNA, 75 bp, synthetic construct
  source 1..75: mol_type = other DNA
gcgctacaaactggaaacagggacgcttgaagtcgtcaaagagacgatgaaagattttgattcccggtattcaaa

SEQ ID NO: 711688 - DNA, 75 bp, synthetic construct
  source 1..75: mol_type = other DNA
tgtcactggagattcatcctcacatgttacgccattcgtgcggttttgctttagcaaatatgggaatagatacac

SEQ ID NO: 711689 - DNA, 75 bp, synthetic construct
  source 1..75: mol_type = other DNA
ctgagtcagctttcgcgcgatgttgagaagcgaccaaacaaacgcccgacaaacgcagatttgcgtgattcagga

SEQ ID NO: 711690 - DNA, 75 bp, synthetic construct
  source 1..75: mol_type = other DNA
acagtacccatgtcattaaaccgaaaaaatcggtggcactttctggcgttccggcgggcaatacggcgctctgca

SEQ ID NO: 711691 - DNA, 75 bp, synthetic construct
  source 1..75: mol_type = other DNA
aaaccaacagccgggaacaggcgcggctttatgcggcagcggaacagaccaccgcactgctgcgcagccgccagc

SEQ ID NO: 711692 - DNA, 75 bp, synthetic construct
  source 1..75: mol_type = other DNA
gtcactagatcagatgactgaacgtgccatcgctggcgctggtaatttatcaaccgactgcctacgcaatccggt

SEQ ID NO: 711693 - DNA, 75 bp, synthetic construct
  source 1..75: mol_type = other DNA
tacggcaggaacgtgaggcgtcagttatcggcgggctactgttaggtggccttactcctaacgcgcaagatgttc

SEQ ID NO: 711694 - DNA, 75 bp, synthetic construct
  source 1..75: mol_type = other DNA
tgaggaacgaccgaacaagcgccctaataattctgatcttcgtgattctggcaaccttgagcaagatgccgacag

SEQ ID NO: 711695 - DNA, 75 bp, synthetic construct
  source 1..75: mol_type = other DNA
aatattttgattcccggtattcaaaattaaaaacaacgaaagacaagattattccggtgctgttgcgcgacgcgg

SEQ ID NO: 711696 - DNA, 75 bp, synthetic construct
  source 1..75: mol_type = other DNA
aatctgcgttggcgctgacaattgcccgcgctgccgctgaacgcccttaccctggcagtaaagatcagcgggttg

SEQ ID NO: 711697 - DNA, 75 bp, synthetic construct
  source 1..75: mol_type = other DNA
gaaatacgcgccacaacggaacggatgaaacaggagcatcccaacctgggtatggtaatgattgactacatcggg

SEQ ID NO: 711698 - DNA, 75 bp, synthetic construct
  source 1..75: mol_type = other DNA
tatattatcaggtggaatgatatctcttatcagcgtgtcagacgtcaagagaatcagtcaggcatataacggacc

SEQ ID NO: 711699 - DNA, 75 bp, synthetic construct
  source 1..75: mol_type = other DNA
ggtgaaagacgaccataaagaagcccggcgacagctggaggctatccgtgacggaaaactgacactggggttgca

SEQ ID NO: 711700 - DNA, 75 bp, synthetic construct
  source 1..75: mol_type = other DNA
gagctggatgtactagcacgaggtgcgagggtggcatatggcgagaaaaaatttacatatccggttgttgatgag

SEQ ID NO: 711701 - DNA, 75 bp, synthetic construct
  source 1..75: mol_type = other DNA
ttttagtgcttgatgaatgtggtacttggtttaattcccgttcatggggtgataaagacagacaacctgttattg

SEQ ID NO: 711702 - DNA, 75 bp, synthetic construct
  source 1..75: mol_type = other DNA
tcaaaccgattaatattaatgctttcattttttgcctttgggcttgggcttggcttctggctacaatctggtaag

SEQ ID NO: 711703 - DNA, 75 bp, synthetic construct
  source 1..75: mol_type = other DNA
ggtttggccatctcagtatatcgatacgagtgctgatgcgaaatattcaattgaatctattatggcgcacggatt

SEQ ID NO: 711704 - DNA, 75 bp, synthetic construct
  source 1..75: mol_type = other DNA
aggacggcgaaatccgttcttattatcaccgcgactggttcgactttgatgcagtgaaagataacgtgaccgaca

SEQ ID NO: 711705 - DNA, 75 bp, synthetic construct
  source 1..75: mol_type = other DNA
caacagctggaaactgcccgcttccgcttcccgtacaacacgccgacctcaaaagaagcgtatctgtaccgggag

SEQ ID NO: 711706 - DNA, 75 bp, synthetic construct
  source 1..75: mol_type = other DNA
cgcgtaagatcaaggcgatgggcattaaaatggtgctgtccggtgaaggttctgacgaagtgtttggcggttatc

SEQ ID NO: 711707 - DNA, 75 bp, synthetic construct
  source 1..75: mol_type = other DNA
ctgagaacaccaaatcgtcagcaaagaaacggaagtccgttaaaaccgcatgaaatagcgccatcagccaggctg

SEQ ID NO: 711708 - DNA, 75 bp, synthetic construct
  source 1..75: mol_type = other DNA
cccgcaatttaaaacggttggtctgccgacaatgggggcttaccgtgaactacgcaaattgcctcgcggcgtcag

SEQ ID NO: 711709 - DNA, 75 bp, synthetic construct
  source 1..75: mol_type = other DNA
acagtggtgattttgcgttgtatatcagcgcgcagggtggggcaaatgttccgcgcgattgtcagactgtcagag

SEQ ID NO: 711710 - DNA, 75 bp, synthetic construct
  source 1..75: mol_type = other DNA
ggtctgacctgtacggagcagaatttcatcaccaaatcgggtatgcagcattatgccgccaggaacaacatcatc

SEQ ID NO: 711711 - DNA, 75 bp, synthetic construct
  source 1..75: mol_type = other DNA
acgagtatctcctttagggaagccagacagtaagcgaggaattatctggtacaactatccaaagataaatcagtt

SEQ ID NO: 711712 - DNA, 75 bp, synthetic construct
  source 1..75: mol_type = other DNA
acgagtatctcctttaggtaagccagacagcaagcgagggattatctggtacaactatccgaagataaatcagtt

SEQ ID NO: 711713 - DNA, 75 bp, synthetic construct
  source 1..75: mol_type = other DNA
aaagggtatcaggccgcagcgatgggagctcgaagtgttggcacgaggcgctactgttagttatgagggacaaaa

SEQ ID NO: 711714 - DNA, 75 bp, synthetic construct
  source 1..75: mol_type = other DNA
caggaagtattggtattcatgttgtgaatactgctattgcaatgggccatcagcccgtgactctggtcaggaatc

SEQ ID NO: 711715 - DNA, 75 bp, synthetic construct
  source 1..75: mol_type = other DNA
gctcttagacgccctgtccgaccagatgcaccgtgtttggcactgttgcaaagttagcgatgaggcagccttttg

SEQ ID NO: 711716 - DNA, 75 bp, synthetic construct
  source 1..75: mol_type = other DNA
atatctggctcaatattcgtctaccacgggttttgctggcggtgctggtaggtgcagcgttggcaaccgccgggg

SEQ ID NO: 711717 - DNA, 75 bp, synthetic construct
  source 1..75: mol_type = other DNA
aaagtgatgtggcacgcggcgcaaatccgcgaagcgatccacatgtacggcccggattatggctttgataccacc

SEQ ID NO: 711718 - DNA, 75 bp, synthetic construct
  source 1..75: mol_type = other DNA
aggtgaaagtgtataaatcctctttcaccgcgatgtataccgccgtcaccactcaccgccagccgtgccgcatga

SEQ ID NO: 711719 - DNA, 75 bp, synthetic construct
  source 1..75: mol_type = other DNA
gagccaggtctggtcggcggtactgaattttccaatgtccgctttaaaggcgatgacggtaaagcggaaaaaacc

SEQ ID NO: 711720 - DNA, 75 bp, synthetic construct
  source 1..75: mol_type = other DNA
gagcttgaggttcttgctcggggagcgaaagtgcattttggatataaagtattcaaatatcacaataatgataaa

SEQ ID NO: 711721 - DNA, 75 bp, synthetic construct
  source 1..75: mol_type = other DNA
tgctgcaggcaccggtaagacgtttaccggtgcttatgcatggaacgcgccacgcgaggccgtcgggcgcgaaag

SEQ ID NO: 711722 - DNA, 75 bp, synthetic construct
  source 1..75: mol_type = other DNA
aatggtttattaaaaaattcaaactgttatgattacagcattttggatagattacctacgaaagaaccaaatgat

SEQ ID NO: 711723 - DNA, 75 bp, synthetic construct
  source 1..75: mol_type = other DNA
atgactgcgcacgcgccaacaaagcgatgtcggcctggggcgtggaagcacgcgtgccgttccttgacaagaaat

SEQ ID NO: 711724 - DNA, 75 bp, synthetic construct
  source 1..75: mol_type = other DNA
cactggaagcgcgtggtctgtaccggagagcggcggcgcggtgggctgaggtcattatgctggcgaatgatgaca

SEQ ID NO: 711725 - DNA, 75 bp, synthetic construct
  source 1..75: mol_type = other DNA
cagccgggcacatgccgggatgggattacatcagcccaatggtgaggcattcaggaaataccaaaaaaagaacaa

SEQ ID NO: 711726 - DNA, 75 bp, synthetic construct
  source 1..75: mol_type = other DNA
aaaccgcacacataccgggatgggcttacagaaacctggcggtgagatgttcaggaactacccgaaaaaaaggga

SEQ ID NO: 711727 - DNA, 75 bp, synthetic construct
  source 1..75: mol_type = other DNA
caggtgcaaggtgttttatatcgaatcgaccgcctcccttttttcctgaaaacactgtttaactctcgttataac

SEQ ID NO: 711728 - DNA, 75 bp, synthetic construct
  source 1..75: mol_type = other DNA
ttagtttgctagttataagctcagttatcaatgtttttggctatttttggcctaagttacatgtggacttttatt

SEQ ID NO: 711729 - DNA, 75 bp, synthetic construct
  source 1..75: mol_type = other DNA
gcacgcccaccagcaaggcaggataatttcggggagatgcgcgaaaccatcagccgggcacatgccggaatggga

SEQ ID NO: 711730 - DNA, 75 bp, synthetic construct
  source 1..75: mol_type = other DNA
acaattgatgaaattcagtccactgaaactctgatcgtactgcagaacccgatcatgcgtactatcaagccatga

SEQ ID NO: 711731 - DNA, 75 bp, synthetic construct
  source 1..75: mol_type = other DNA
ttaataaatttgctgctgttataaaatcgcgcatcgtcaatgaaccatcgtcatgctatttgctgcatgataatg

SEQ ID NO: 711732 - DNA, 75 bp, synthetic construct
  source 1..75: mol_type = other DNA
caccacaataaaaccaccggtaatcaaagcggggtttgtggcaatttttgattcagagaagcaaagatggatttc

SEQ ID NO: 711733 - DNA, 75 bp, synthetic construct
  source 1..75: mol_type = other DNA
aatacagatattttcgaaattcgtatatttagtcgtgatgaaaaaaacaagatgatatgcgaaaaaaatacgcaa

SEQ ID NO: 711734 - DNA, 75 bp, synthetic construct
  source 1..75: mol_type = other DNA
gaatgctgtattaaatagatttcttgatacagatattgcagaaatccgtatatttagtcgtgatgaaaaaaacaa

SEQ ID NO: 711735 - DNA, 75 bp, synthetic construct
  source 1..75: mol_type = other DNA
tcagcccgaaacagctcggttatgacgtaggttgctttatcggcattatattgaagagtgccaaagactatcctt

SEQ ID NO: 711736 - DNA, 75 bp, synthetic construct
  source 1..75: mol_type = other DNA
aggacgacagcgtcactggatttgcccctatatttccagacatctgttatcacttaacccattacaagcccgctg

SEQ ID NO: 711737 - DNA, 75 bp, synthetic construct
  source 1..75: mol_type = other DNA
taaccacgaagatgttacctggtcgtcgattgctgcgggattcaaaggactgattccgtcaaaggttaagtcacg

SEQ ID NO: 711738 - DNA, 75 bp, synthetic construct
  source 1..75: mol_type = other DNA
aaagctgaaggtgttattgaaggaatgctgatgatgctggatgttcggctggagatggacagatatgtgcagcgc

SEQ ID NO: 711739 - DNA, 75 bp, synthetic construct
  source 1..75: mol_type = other DNA
gttccgaaagtgccggtcgttgagcctttgactttaaaaagcggcatcgccgcgcctcggagtcctgtcaataac

SEQ ID NO: 711740 - DNA, 75 bp, synthetic construct
  source 1..75: mol_type = other DNA
gctcaggggggcattaaaacacgaactgagaacaccaaatcgtcagcaaagaaacggaagcccgttaaaaccgca

SEQ ID NO: 711741 - DNA, 75 bp, synthetic construct
  source 1..75: mol_type = other DNA
ctggttgatgacggggttatagaatggaatgacccggaggttgtgagggcgctcaggggcgcattaaaacacggt

SEQ ID NO: 711742 - DNA, 75 bp, synthetic construct
  source 1..75: mol_type = other DNA
aaacggttggcctgccgacaatgggggcttaccgtgagctacgcaaattgcctcgcggcgtcagcattgctgatg

SEQ ID NO: 711743 - DNA, 75 bp, synthetic construct
  source 1..75: mol_type = other DNA
caataaagaccgttcaccttatgccagtaaacatgccattcgtgatgtgcgtgcgcgccgccaggcaaatctgga

SEQ ID NO: 711744 - DNA, 75 bp, synthetic construct
  source 1..75: mol_type = other DNA
cgaccgtaaattatgacgggaaaaaattcacgtatccggtcgctaatgagtggtcggttttttcagttaaacaat

SEQ ID NO: 711745 - DNA, 75 bp, synthetic construct
  source 1..75: mol_type = other DNA
attattgtctgactttgctttgttttattcatggtttccgggcgagtgaaatttgccgattgaggatttcggata

SEQ ID NO: 711746 - DNA, 75 bp, synthetic construct
  source 1..75: mol_type = other DNA
gaaacggaagcccgttaaaaccgcatgaaattgcaccatcggccagactgacccggtctgaacgattgcaaatca

SEQ ID NO: 711747 - DNA, 75 bp, synthetic construct
  source 1..75: mol_type = other DNA
taacgagtacgaggaagaggtcgagagagtggtcggcatttacgcgccgcatctcggcgcgcgtcatattcatat

SEQ ID NO: 711748 - DNA, 75 bp, synthetic construct
  source 1..75: mol_type = other DNA
caaccgtaaattatgacgggaaaaatttcacgtatatggttactaatgagtggttcggatttcgagatgaagagt

SEQ ID NO: 711749 - DNA, 75 bp, synthetic construct
  source 1..75: mol_type = other DNA
cccgcgccgctgacctggccgggcgcattggttcgcctgaacagagcgggatcgccgatgtggccgaatttatga

SEQ ID NO: 711750 - DNA, 75 bp, synthetic construct
  source 1..75: mol_type = other DNA
ggtaaacactttttcaaggttgttggtgatgagttgaaaattttgcgggttactttaagtaactcacaaaatttg

SEQ ID NO: 711751 - DNA, 75 bp, synthetic construct
  source 1..75: mol_type = other DNA
acggcctcacactgaatgacacaccgttcgctgatgaacgtgtgattgagcagcatattgaagcagggatttcac

SEQ ID NO: 711752 - DNA, 75 bp, synthetic construct
  source 1..75: mol_type = other DNA
ctacagataaaatattcctaacacttttaactgatgcaagtagaaataaagatttatttttaaaaagcctgccta

SEQ ID NO: 711753 - DNA, 75 bp, synthetic construct
  source 1..75: mol_type = other DNA
tggattcgcgcgacggaagttacacggggaaaagatggcagtgcacatccgcattttcactgtttactgatggtt

SEQ ID NO: 711754 - DNA, 75 bp, synthetic construct
  source 1..75: mol_type = other DNA
gcttcgtagtgcgcaattttgccgtgtccgtcattgccctgtctgccagtggagaagaaccctcatgtggcaagc

SEQ ID NO: 711755 - DNA, 75 bp, synthetic construct
  source 1..75: mol_type = other DNA
ggattatgctaaccgctcacaggcattattccgcgaattgtatccagcgctaaagcaaattcaatcgaactattc

SEQ ID NO: 711756 - DNA, 75 bp, synthetic construct
  source 1..75: mol_type = other DNA
acagcgtcactctgttggtggagggattcccgccatcacatgccgggaccatctccgtgtatgaagattctcaac

SEQ ID NO: 711757 - DNA, 75 bp, synthetic construct
  source 1..75: mol_type = other DNA
gaagggagataaaggagagcgcggtgacaccggccctgtcggggcaaccggcgaacggggaccggcaggtgatgc

SEQ ID NO: 711758 - DNA, 75 bp, synthetic construct
  source 1..75: mol_type = other DNA
gcaggcccacagggaccgaaaggagaaacaggtgacggctggcccggtgggggcaaccgggacctcagggaccaa

SEQ ID NO: 711759 - DNA, 75 bp, synthetic construct
  source 1..75: mol_type = other DNA
atttagtgcagccaactccactagactctacagaagttacattgttacaaactgcgctctcaactgtgaggcatg

SEQ ID NO: 711760 - DNA, 75 bp, synthetic construct
  source 1..75: mol_type = other DNA
tgaaggtcagcgaacccaacgctgccgaagccaccattattctgcgcggtctgtcggcggtctatgaacagtctc

SEQ ID NO: 711761 - DNA, 75 bp, synthetic construct
  source 1..75: mol_type = other DNA
aaccgggtcccgcgggtcctcaggggccgaagggagataaaggagagcgtggagacaccggtccggcaggggcaa

SEQ ID NO: 711762 - DNA, 75 bp, synthetic construct
  source 1..75: mol_type = other DNA
cgctgaaatactccgttaaaccggaagatatggcaaacgatcctgagtggtttcttgagctgacgcggcagcttc

SEQ ID NO: 711763 - DNA, 75 bp, synthetic construct
  source 1..75: mol_type = other DNA
ggaatgcgctttccaaaaacagaatgtttgacggcaacaaagagctgaaagaatttgtgatgacgctgaccggct

SEQ ID NO: 711764 - DNA, 75 bp, synthetic construct
  source 1..75: mol_type = other DNA
aagtcgttgatccgcatggtagaggacacgctgacaagcatagaaaataaagccatcacggacacaccgttgacg

SEQ ID NO: 711765 - DNA, 75 bp, synthetic construct
  source 1..75: mol_type = other DNA
gttgacagacaaatgagttacatgcgccagcaggtctctgcccgcatgatgacccgctaccagaataactatcat

SEQ ID NO: 711766 - DNA, 75 bp, synthetic construct
  source 1..75: mol_type = other DNA
gtaccaccatccccgtcttcaaatacctggttgacccgcagatgctcggtgtttccaacagtatgatttaccagc

SEQ ID NO: 711767 - DNA, 75 bp, synthetic construct
  source 1..75: mol_type = other DNA
tcctgccaggcggcacaggggattatcggcgggcttttcccccggacgcaggtgtcccagcagaaagtctgtcag

SEQ ID NO: 711768 - DNA, 75 bp, synthetic construct
  source 1..75: mol_type = other DNA
atggcaagcgacattaacagtatgaacctcagttcctgccaggcgcacaggggattagtcggcgggcttttcccc

SEQ ID NO: 711769 - DNA, 75 bp, synthetic construct
  source 1..75: mol_type = other DNA
cttggcattagttgcccttgtcgcacttatgttctggaagctcccgccgtggctggttgtcctcggtagcggtgc

SEQ ID NO: 711770 - DNA, 75 bp, synthetic construct
  source 1..75: mol_type = other DNA
tatgttctggaagctcccgccgtggctggttgtcctcggtagcggtgcagctgggtggctgttgagcgtcgctct

SEQ ID NO: 711771 - DNA, 75 bp, synthetic construct
  source 1..75: mol_type = other DNA
tgggtcaacaatgaatcctttctcgcggggtacggggcagctcaagcggtgcccggccctttgttcacgttcgcc

SEQ ID NO: 711772 - DNA, 75 bp, synthetic construct
  source 1..75: mol_type = other DNA
ccggagatcaaaaccgcgaaggatttccttcagaagatggccactgatatgaacagcatgaacctcagctcctgc

SEQ ID NO: 711773 - DNA, 75 bp, synthetic construct
  source 1..75: mol_type = other DNA
gaaatacctgaccaatgcgcagagtatgggtatgagcgccacctatctgctgcaggtctctgattttattgcgca

SEQ ID NO: 711774 - DNA, 75 bp, synthetic construct
  source 1..75: mol_type = other DNA
gcaattgctacctgcgtcgttttacttgtgccgtccgcgtggggacaggttggcgtgattgctatcgcaggcatc

SEQ ID NO: 711775 - DNA, 75 bp, synthetic construct
  source 1..75: mol_type = other DNA
gcaggcggcagaaagtgcagccgctgcaaagaagtcagaggaagcgtcctcgtcctcggcctctgaggccgctca

SEQ ID NO: 711776 - DNA, 75 bp, synthetic construct
  source 1..75: mol_type = other DNA
tcaagctggaataccatcagtagttatttacaacgtgatatcaaggcgttgaagtctcagttgcttctgggagaa

SEQ ID NO: 711777 - DNA, 75 bp, synthetic construct
  source 1..75: mol_type = other DNA
gaaaaagatgacgatagcgtgatcaactcgcttgaacaaatcattcccggtacagctgctgaatttgatttcaat

SEQ ID NO: 711778 - DNA, 75 bp, synthetic construct
  source 1..75: mol_type = other DNA
tgaatgccgcagcatcacaaaaatctgcggccacatctgcatccaccgcgaccacgaaagcgtcagaagctgcca

SEQ ID NO: 711779 - DNA, 75 bp, synthetic construct
  source 1..75: mol_type = other DNA
gtgcattttccgtgggatatgctcaggttcacccgggcggcgtaccggcattgtccggcaaccggacctcaggga

SEQ ID NO: 711780 - DNA, 75 bp, synthetic construct
  source 1..75: mol_type = other DNA
atgtttcagcatttgcaggtcagatttggtgacgggccgtggcaggatgttaaggggctggatgaagtgggcagt

SEQ ID NO: 711781 - DNA, 75 bp, synthetic construct
  source 1..75: mol_type = other DNA
aatggtagcggcgcgtttcaacgccaatatcggttatcgcgtacttgttacagtcagcgatcgcaacggtaaacc

SEQ ID NO: 711782 - DNA, 75 bp, synthetic construct
  source 1..75: mol_type = other DNA
caaaatcttgatggaagaatcgcgccgattgctgatgaatgcaaatcaggtgttggctcggattgaacaaatagg

SEQ ID NO: 711783 - DNA, 75 bp, synthetic construct
  source 1..75: mol_type = other DNA
atctggcgaatggcgacagaaccaccggcaggttttaccagcttacggttgcatgaatcggcgtttctggtggcg

SEQ ID NO: 711784 - DNA, 75 bp, synthetic construct
  source 1..75: mol_type = other DNA
tgggaacggcaatgtggggacggatgcgcccggttatgcggcgattcctcagggaaaatcctaacgttgacgttc

SEQ ID NO: 711785 - DNA, 75 bp, synthetic construct
  source 1..75: mol_type = other DNA
ccggacctcagggaccgaagggcgacccgggggagacacaaatacggttccgtctggggccgggaaacattattg

SEQ ID NO: 711786 - DNA, 75 bp, synthetic construct
  source 1..75: mol_type = other DNA
cagatggtgcgctcatcaccggactgacctttcttgaccccaaagatgccacacgggttcagggtttttttcagc

SEQ ID NO: 711787 - DNA, 75 bp, synthetic construct
  source 1..75: mol_type = other DNA
aacaggggcccgcgggtcctcaggggccgaagggagataaaggagagcgtggagacaccggccctgtcggggcaa

SEQ ID NO: 711788 - DNA, 75 bp, synthetic construct
  source 1..75: mol_type = other DNA
atgaacataacaaaaagcgccccgttaccggagcgcccttgcgaacaattaacctgctgcgaaaaaaatggatca

SEQ ID NO: 711789 - DNA, 75 bp, synthetic construct
  source 1..75: mol_type = other DNA
caccagcgaacaggaagcacgccagcaatctccggctggctgcgtgatggtattcgctgcccgtattcgtcagga

SEQ ID NO: 711790 - DNA, 75 bp, synthetic construct
  source 1..75: mol_type = other DNA
aactggagtaacgattatggctgtaagacagcataccccacgcctggcgcacacacaaaccgcctttgtgtggcg

SEQ ID NO: 711791 - DNA, 75 bp, synthetic construct
  source 1..75: mol_type = other DNA
gcttacagcacaactgcgtctggggccggcagacatcctggagtcagatgagaatggtattatcccggagcaggc

SEQ ID NO: 711792 - DNA, 75 bp, synthetic construct
  source 1..75: mol_type = other DNA
gagcatcgccaacaatgccacatttgcggctggtgggcaatgctatcagtctggttcagttcgttgccatacctg

SEQ ID NO: 711793 - DNA, 75 bp, synthetic construct
  source 1..75: mol_type = other DNA
tttaacattgccatgccgcgatgttttccaggtatgcgaccccatttttgtgcgcctgtactcttttaagaactt

SEQ ID NO: 711794 - DNA, 75 bp, synthetic construct
  source 1..75: mol_type = other DNA
aggtcagatttggcgacgggccgtggcaggatgtcaaggggctggatgaagtgggcagtgatacaggcagaacag

SEQ ID NO: 711795 - DNA, 75 bp, synthetic construct
  source 1..75: mol_type = other DNA
ttcggcatttgcaggtcaggtatggtgacgggccgtggcaggatgttaaggggctggatgaagtgggcagtgata

SEQ ID NO: 711796 - DNA, 75 bp, synthetic construct
  source 1..75: mol_type = other DNA
aggtgcggctggcccggtgggggcaaccggacctcagggaccgaagggcgacccgggggagacacaaatccgttt

SEQ ID NO: 711797 - DNA, 75 bp, synthetic construct
  source 1..75: mol_type = other DNA
taacggggcttctaaccaaaccgttaactggagtaacgattatggctgtaagacagcataccccacgacttgcgc

SEQ ID NO: 711798 - DNA, 75 bp, synthetic construct
  source 1..75: mol_type = other DNA
gtgcggcaggcccggcaggcccacagggaccgaaaggagaaacaggtgcggctggcccggtgggggcaaccggac

SEQ ID NO: 711799 - DNA, 75 bp, synthetic construct
  source 1..75: mol_type = other DNA
cacacgggttcaggggttttttcagcatttgcaggtcaggtttggtgacgggccgtggcaggatgtcaaggggct

SEQ ID NO: 711800 - DNA, 75 bp, synthetic construct
  source 1..75: mol_type = other DNA
acgtactggtaacacgattactgtgactggtgcgggcgaggcgaagaactggacactgtgcttgcgcaatgttgt

SEQ ID NO: 711801 - DNA, 75 bp, synthetic construct
  source 1..75: mol_type = other DNA
ggcctccgttggtgcgcagaaattcccggtacactggggtggcgactgttacgctaactacgaatcaatggcgga

SEQ ID NO: 711802 - DNA, 75 bp, synthetic construct
  source 1..75: mol_type = other DNA
caatggtttgacggttccgatccgcagaaaatgcataaccattatgcgtacatctacaacgaactggtgtggaac

SEQ ID NO: 711803 - DNA, 75 bp, synthetic construct
  source 1..75: mol_type = other DNA
ttatactgattattcgttgctgaccgctgatgcgcgcatcaccaacgaagtacggcgggggttcaactttattga

SEQ ID NO: 711804 - DNA, 75 bp, synthetic construct
  source 1..75: mol_type = other DNA
caatcgaacttgctaatggtacatatccaatcgagttgcaaatgattaaaatatcaaataactacaataaaaatc

SEQ ID NO: 711805 - DNA, 75 bp, synthetic construct
  source 1..75: mol_type = other DNA
caacgtcccgattacgcgtggcacgaaggcacggcattccagctctttaatctgcaagacgggcatgaagccatc

SEQ ID NO: 711806 - DNA, 75 bp, synthetic construct
  source 1..75: mol_type = other DNA
aaagaattgcttcctgaaaaatacgatctgaactactatactcatgaatgccgcgagtatcagcgttattgtaat

SEQ ID NO: 711807 - DNA, 75 bp, synthetic construct
  source 1..75: mol_type = other DNA
aacgtcatcacctacaaagcgcagcgcgataaaaaagccagagagctggagctggcaaacgcaaccattactgat

SEQ ID NO: 711808 - DNA, 75 bp, synthetic construct
  source 1..75: mol_type = other DNA
ttctggatgaatctcctgttggtcttgagcccatagatattgagttatccacaagtaaagaagttagtattgctg

SEQ ID NO: 711809 - DNA, 75 bp, synthetic construct
  source 1..75: mol_type = other DNA
cgcgtctgtgcgctgcatttatttatgttcagttatgcctggtggcctgccgtgatcggctgatacgcctgttac

SEQ ID NO: 711810 - DNA, 75 bp, synthetic construct
  source 1..75: mol_type = other DNA
tgatgaggatgatcataaatattcgctaccaagtgacctgatgaatccttcatgggcgaattcatcacctaccga

SEQ ID NO: 711811 - DNA, 75 bp, synthetic construct
  source 1..75: mol_type = other DNA
tgatgaggatgaccataaatatttactaccaagcgacctgatgaatccgtcatgggcgaacacatcatctactgc

SEQ ID NO: 711812 - DNA, 75 bp, synthetic construct
  source 1..75: mol_type = other DNA
ctgatgagctgggtggaacggcatcaaccgttactggaacaacacgtactgtatgcaacaggcactaccggtaac

SEQ ID NO: 711813 - DNA, 75 bp, synthetic construct
  source 1..75: mol_type = other DNA
gcagagtggttttacgcttgccctgagcggtactgccggtgcagcactgaataccgcagtacagacggccggaga

SEQ ID NO: 711814 - DNA, 75 bp, synthetic construct
  source 1..75: mol_type = other DNA
tcccggacatacgttcagcctgacgctgaaaccggaaaccgggagcgggcagcagatcactccggtgatccgcac

SEQ ID NO: 711815 - DNA, 75 bp, synthetic construct
  source 1..75: mol_type = other DNA
agcggtgaacagggcggtattattgccggcggggatctttcactcagaacaggccgcctggaggcgtcacagggt

SEQ ID NO: 711816 - DNA, 75 bp, synthetic construct
  source 1..75: mol_type = other DNA
ccggacaggatgtcaccgtcggtaccggtgtggcaaaacttcacaacaccgggggaaatattgcggcccgggata

SEQ ID NO: 711817 - DNA, 75 bp, synthetic construct
  source 1..75: mol_type = other DNA
gatatcgcgcggactgaggcgacaatcagagccacggaaaaggcgaaggcaggttttgatatccgcaactataaa

SEQ ID NO: 711818 - DNA, 75 bp, synthetic construct
  source 1..75: mol_type = other DNA
cagtaaaggtggttccgttggtgtcggtgtgactttcgggtcaaatggtgcgggtttcaatgtgaatgccagtgt

SEQ ID NO: 711819 - DNA, 75 bp, synthetic construct
  source 1..75: mol_type = other DNA
gcatatgtgcagcttaccgctgatatggcgctgaatgaggctaaagccatcctgattgttgattgtgaaaatggt

SEQ ID NO: 711820 - DNA, 75 bp, synthetic construct
  source 1..75: mol_type = other DNA
atcatactcaacatcaaatgttgatagatagcggtatttatacagctcgacagctcaaaaatgcaaaaggtaaaa

SEQ ID NO: 711821 - DNA, 75 bp, synthetic construct
  source 1..75: mol_type = other DNA
tcaccgcatttcaacgacgcggtcgatattctgatccccgattatcagcgttatctcgcggaccgtctgaagtaa

SEQ ID NO: 711822 - DNA, 75 bp, synthetic construct
  source 1..75: mol_type = other DNA
cggcgggcattcacagttcggaaaaaagtacgcttctggccggtgcgccggcagccacaactgacggaacaaaag

SEQ ID NO: 711823 - DNA, 75 bp, synthetic construct
  source 1..75: mol_type = other DNA
gccgggaagccggcgtatgcgctggatgtgtcggcgctgggcgggatgtatgccggtaaaattattatggaaggc

SEQ ID NO: 711824 - DNA, 75 bp, synthetic construct
  source 1..75: mol_type = other DNA
caaccgccgccgcgctcactacgctgatgcacgcgctgattgatatttctgttattgctgacagggcgcataagc

SEQ ID NO: 711825 - DNA, 75 bp, synthetic construct
  source 1..75: mol_type = other DNA
ttcagattatagtacctgttttcgtcatatgcctaagggtatctatgacaaaacaaatagtgggtatgtcgaaaa

SEQ ID NO: 711826 - DNA, 75 bp, synthetic construct
  source 1..75: mol_type = other DNA
gatagtaccgatgccgaatcggctgatgatgcaggcagcgtacagccggaagagaccgctgaaacagtttccccg

SEQ ID NO: 711827 - DNA, 75 bp, synthetic construct
  source 1..75: mol_type = other DNA
tccgggcgtcagttaccggacaaagcgattgatgtgctggataccgcctgcgcccgtgtggccatcaacctgtcg

SEQ ID NO: 711828 - DNA, 75 bp, synthetic construct
  source 1..75: mol_type = other DNA
caggcttgacccggtactgtgccgcgactatgaaatcgacctgatgatcgacattctctgccgccgccgtaaaaa

SEQ ID NO: 711829 - DNA, 75 bp, synthetic construct
  source 1..75: mol_type = other DNA
catcaatatcatctgggactcgctgtccaaaaacaggatgcttgatggtaacaaagaactgaaagaatttattat

SEQ ID NO: 711830 - DNA, 75 bp, synthetic construct
  source 1..75: mol_type = other DNA
gataaaaaacagattgcagcggtgattgccgaatggaccggcgtgccgcttaaccgcctgtcacagaatgagatg

SEQ ID NO: 711831 - DNA, 75 bp, synthetic construct
  source 1..75: mol_type = other DNA
cagtggacacaggagtcggcggaatcagtcgtgccggatgcagactgtaaaggcgcaggcgcactgacggacgtc

SEQ ID NO: 711832 - DNA, 75 bp, synthetic construct
  source 1..75: mol_type = other DNA
cacacagccgggcgtctggcaggggcaggccgccggctatgcttacggtggctccctgtatgcccgtactcaggt

SEQ ID NO: 711833 - DNA, 75 bp, synthetic construct
  source 1..75: mol_type = other DNA
atgagtctgtttttattcccaaatcttaaacataaattatgcagaaatcgtaattgcattccagctttattgtta

SEQ ID NO: 711834 - DNA, 75 bp, synthetic construct
  source 1..75: mol_type = other DNA
gtgtcccagcagaaagtctgtcaggacattgccggtgagagcaatatttttgctgactgggcggcttcccggcag

SEQ ID NO: 711835 - DNA, 75 bp, synthetic construct
  source 1..75: mol_type = other DNA
gagctgctctacggcggtcgccagtacctgaccaccatcaatatgtccgaattccaggagaaacacaccgtctcg

SEQ ID NO: 711836 - DNA, 75 bp, synthetic construct
  source 1..75: mol_type = other DNA
accctgatggagctggagcaacggatggggtatctgcgtcagcaggtgtccacacatctgatgagccgttatgag

SEQ ID NO: 711837 - DNA, 75 bp, synthetic construct
  source 1..75: mol_type = other DNA
attcaaatacctggtagatccccagatgcttggggtgtctaactcgctgctttatcaactgaccgactatatcgg

SEQ ID NO: 711838 - DNA, 75 bp, synthetic construct
  source 1..75: mol_type = other DNA
cccgctctcagttaataaacagtattgatatcctccgggcccgccgggcaaccggcctgatggcccgcgacaatt

SEQ ID NO: 711839 - DNA, 75 bp, synthetic construct
  source 1..75: mol_type = other DNA
ggtggcgtattcctgcaagaagcgcgggctgtgcccgagctgcggcgcacggcgcatggccgagtcggcgcggca

SEQ ID NO: 711840 - DNA, 75 bp, synthetic construct
  source 1..75: mol_type = other DNA
tttgttgaggctgaacagtatgctgtttgtacatcaacgtctaatgaagcagccctggcagcggaaatatggaaa

SEQ ID NO: 711841 - DNA, 75 bp, synthetic construct
  source 1..75: mol_type = other DNA
acatctgatgaagatgcgcgaagaactggagaatatttcatattcagatgagcgcctggggatctgccaggccgg

SEQ ID NO: 711842 - DNA, 75 bp, synthetic construct
  source 1..75: mol_type = other DNA
gttaccagaaggagtcgatttttttctggatgaatcccctattgactttgatcctatagatattgagttatccac

SEQ ID NO: 711843 - DNA, 75 bp, synthetic construct
  source 1..75: mol_type = other DNA
atgaaattatctatcgacatttcagaacttattcaattagggaagaaaatgttaccagaaggagtcgattttttt

SEQ ID NO: 711844 - DNA, 75 bp, synthetic construct
  source 1..75: mol_type = other DNA
ggcaggcggtcagttcacgcccgtctccggttgaaatctggcaggcactgctgacccggctgctggaccagcatt

SEQ ID NO: 711845 - DNA, 75 bp, synthetic construct
  source 1..75: mol_type = other DNA
tttggggaagacagcgagattacccccctgccggcgcgtaccactgaccgcgatatcctccgggcgattatggag

SEQ ID NO: 711846 - DNA, 75 bp, synthetic construct
  source 1..75: mol_type = other DNA
gtggcggcatcgacgcctatctcggctcgttcagttttattaatggcgagcagctgcagcgttttgttaagcaga

SEQ ID NO: 711847 - DNA, 75 bp, synthetic construct
  source 1..75: mol_type = other DNA
atgagctacatgcgtcagcagctttccgcccgcatgctcagtcgttaccagaacaactatcacttcggagggagc

SEQ ID NO: 711848 - DNA, 75 bp, synthetic construct
  source 1..75: mol_type = other DNA
tgcttcagcaggcccgggccatgattgccaccgggaactatccacagaccgtgctggacagtgtgctggagaatc

SEQ ID NO: 711849 - DNA, 75 bp, synthetic construct
  source 1..75: mol_type = other DNA
ggaggacagtcatcgtctgttcgtgacaaggccagtgacaaagataaggaacgggtgctgaagaacatcaatatc

SEQ ID NO: 711850 - DNA, 75 bp, synthetic construct
  source 1..75: mol_type = other DNA
gggcgatgatttccaccgggaactacccgcaggcggtcctggacagtgtgctcgataaccttaatcaggcgcagc

SEQ ID NO: 711851 - DNA, 75 bp, synthetic construct
  source 1..75: mol_type = other DNA
cgtagcggcatccagtttctgcccttcaatacgctttatcagttgcgtgcgctgacggagcaacaacctgaactt

SEQ ID NO: 711852 - DNA, 75 bp, synthetic construct
  source 1..75: mol_type = other DNA
tggactttgtgctgctcgaccaacagggtcagcgtgtgggcctgcccgttgcttatcgcgatagccgcaccaatg

SEQ ID NO: 711853 - DNA, 75 bp, synthetic construct
  source 1..75: mol_type = other DNA
aatcctgacagtgaaattgcccactatgtggcgcagattcactctacacgacagacaaaggagctttgcgcatga

SEQ ID NO: 711854 - DNA, 75 bp, synthetic construct
  source 1..75: mol_type = other DNA
cctggtcattgatgggcttcgaaagccagacgccattcaccgatgatgcggcgctcgcagccaacatcaccaatg

SEQ ID NO: 711855 - DNA, 75 bp, synthetic construct
  source 1..75: mol_type = other DNA
atctgaccacctttacccctaatcctgacagtgaaattgcccactatgtggcgcagaactctacacgacagacaa

SEQ ID NO: 711856 - DNA, 75 bp, synthetic construct
  source 1..75: mol_type = other DNA
gcttatctctcttctggcacctggtcattgatgggcttcgaaagccagacgccatttaccaatgacacggcgctg

SEQ ID NO: 711857 - DNA, 75 bp, synthetic construct
  source 1..75: mol_type = other DNA
cgggtgttggctggatctatgaatatgcactggtggatcgcagcggtaagcacgatctggccgatttacgctcat

SEQ ID NO: 711858 - DNA, 75 bp, synthetic construct
  source 1..75: mol_type = other DNA
ggaagggcaggaagggcgtctgttttggcccgtttggcgttcactaaaacctatgcgatggcgggcgcggcgctg

SEQ ID NO: 711859 - DNA, 75 bp, synthetic construct
  source 1..75: mol_type = other DNA
atgcctaaaaaaatgagaacaacccgtatattattaatggctacgctattaggtagcgctttatttgccagggct

SEQ ID NO: 711860 - DNA, 75 bp, synthetic construct
  source 1..75: mol_type = other DNA
gctgcgtgtcgggaaacggcgcaaccgatcccggaaagtgatgctgaactggcgcgctgtattttcgacagtctg

SEQ ID NO: 711861 - DNA, 75 bp, synthetic construct
  source 1..75: mol_type = other DNA
gcttatcgccgcgacacaggcacttccggcttgccgcttcatcatcaatcccaatgacgatcgctttattaatcc

SEQ ID NO: 711862 - DNA, 75 bp, synthetic construct
  source 1..75: mol_type = other DNA
gtagcggcaattctggttttcctgggcatcaaaaaactgaaaaaagggcggggcagtgcctggttacgcgatttg

SEQ ID NO: 711863 - DNA, 75 bp, synthetic construct
  source 1..75: mol_type = other DNA
ggatgactccctgctggcgtggagcggtgccaacaaagcctggtttggccgcccgacgcatccgggcaatgtcat

SEQ ID NO: 711864 - DNA, 75 bp, synthetic construct
  source 1..75: mol_type = other DNA
gaccaaccagagccgctggtttggcctgccactggatgaactgatccccgcagcaatctgtattggctggggaat

SEQ ID NO: 711865 - DNA, 75 bp, synthetic construct
  source 1..75: mol_type = other DNA
agcatggagtaaattgttcattgaacgttatggcttcaccaatgcgacggaagtggcgatggcctgtgcgacgtt

SEQ ID NO: 711866 - DNA, 75 bp, synthetic construct
  source 1..75: mol_type = other DNA
ctgccgttcctgtttctccgcttattaaactggttactgtggcatcgcctgaagtggtcaacaaaaactggccac

SEQ ID NO: 711867 - DNA, 75 bp, synthetic construct
  source 1..75: mol_type = other DNA
atgccattcgcgaacgcgatgtgttgctctattatccttatcacacctttgagcatgtgctggaactgctgcgtc

SEQ ID NO: 711868 - DNA, 75 bp, synthetic construct
  source 1..75: mol_type = other DNA
catattgttcagcgatacagtcaaagcacgttatatcgataaagaactcagtaatcgctacgttccccgcggcaa

SEQ ID NO: 711869 - DNA, 75 bp, synthetic construct
  source 1..75: mol_type = other DNA
atgctattcgcgaacgcgatgtgttgctctattatccttatcatacctttgagcatgtactggaactgctgcgtc

SEQ ID NO: 711870 - DNA, 75 bp, synthetic construct
  source 1..75: mol_type = other DNA
ctggtagtgctgactgcgtttatctcaccacatcgcgctgaacgtcagatggttcgcgaacgtgtaggagaaggg

SEQ ID NO: 711871 - DNA, 75 bp, synthetic construct
  source 1..75: mol_type = other DNA
atggcgctgcatgacgaaaacgtcgtctggcatagccatccggtcactgtgcaacaacgcgagcaacaccacggt

SEQ ID NO: 711872 - DNA, 75 bp, synthetic construct
  source 1..75: mol_type = other DNA
cggtcagcgcgttggtttaccgatttcctatcgtgatagccgcactaacggactgatgacattggcacagcagca

SEQ ID NO: 711873 - DNA, 75 bp, synthetic construct
  source 1..75: mol_type = other DNA
tatttaaggaaatacggtattcctgaaacgccttacgaattgagtaaccataattgccttcgattacggcataaa

SEQ ID NO: 711874 - DNA, 75 bp, synthetic construct
  source 1..75: mol_type = other DNA
ggttcgtgaacgtgtaggagcaggtcgatttatcgaagtgtttgtcgatactccgctggcgatttgcgaagctcg

SEQ ID NO: 711875 - DNA, 75 bp, synthetic construct
  source 1..75: mol_type = other DNA
cgatttatcgaagtgtttgtcgatacgccgctggcgatttgcgaagctcgcgatccaaaaggcttatataagaaa

SEQ ID NO: 711876 - DNA, 75 bp, synthetic construct
  source 1..75: mol_type = other DNA
atgcctaaaaaaatgagaacaacccgtaatctattattaatggctacgctattaggtagcacactatttgccaac

SEQ ID NO: 711877 - DNA, 75 bp, synthetic construct
  source 1..75: mol_type = other DNA
tatccagaagcacaaatccagtttcgtctgaatctggctgatgtgctgctgagcgaaaacgtcaccggcaaagag

SEQ ID NO: 711878 - DNA, 75 bp, synthetic construct
  source 1..75: mol_type = other DNA
tgacaaggtaagcatcagctatgacaccagcgcgacgctaaaccctgacgcaggcttctggaataacacccgata

SEQ ID NO: 711879 - DNA, 75 bp, synthetic construct
  source 1..75: mol_type = other DNA
ttgtttccgtattttgccgagttgttcgttgcgcactacatgacgctttgggcggcagatagccgggcgatgctg

SEQ ID NO: 711880 - DNA, 75 bp, synthetic construct
  source 1..75: mol_type = other DNA
gacgcgatgttttaagccgtttactgagcggagctgcgccaaccgtaggcggcgcatttgtggtgacgcttgccg

SEQ ID NO: 711881 - DNA, 75 bp, synthetic construct
  source 1..75: mol_type = other DNA
ggtgggattttcaccggttgttattcgcgaagttaatgaaccgcaaacggtactcgccatggtcagtatgggtat

SEQ ID NO: 711882 - DNA, 75 bp, synthetic construct
  source 1..75: mol_type = other DNA
caaggtatccgctagctatgacgtctctggcgtgattaaccctgatgcaggtttctggaataacaccgggtatgg

SEQ ID NO: 711883 - DNA, 75 bp, synthetic construct
  source 1..75: mol_type = other DNA
atacagaaaatatgaactggatgcaggcattacgttttgttgcggcaaaaggacatcagaaagcgataattgttt

SEQ ID NO: 711884 - DNA, 75 bp, synthetic construct
  source 1..75: mol_type = other DNA
cgcaatgccacgacctggcgtaaagcgacgcaattattactgttggcaattaatatttatattgccatcacgttc

SEQ ID NO: 711885 - DNA, 75 bp, synthetic construct
  source 1..75: mol_type = other DNA
ccgctggcctaaaggcgaaaggttgattgctgaagcgttagatgttgcacctgagaacatctggccttcacgcta

SEQ ID NO: 711886 - DNA, 75 bp, synthetic construct
  source 1..75: mol_type = other DNA
tcgttgcacactacatgacgctctgggcggcagacagccgggcgatgctggctggtggtccgggcggttcaacca

SEQ ID NO: 711887 - DNA, 75 bp, synthetic construct
  source 1..75: mol_type = other DNA
ggataaggtttcagtgagctatgacgtgtccggggtaatcaatccggatgccggtttctggaacagcaccgccta

SEQ ID NO: 711888 - DNA, 75 bp, synthetic construct
  source 1..75: mol_type = other DNA
tgacagagcagcaaattatgcaacttaagcaaaagacatataaagtggtgataaaagatttggttaaccgctatc

SEQ ID NO: 711889 - DNA, 75 bp, synthetic construct
  source 1..75: mol_type = other DNA
ttctggataccttactggcgatcccttccctgctgctggcaattatcgttgtagcgtttgccggaccgagtttgt

SEQ ID NO: 711890 - DNA, 75 bp, synthetic construct
  source 1..75: mol_type = other DNA
atacgcgctggtgcgtaccgaccagccgggattcagcgcctgtacccggtctcagttaataaacagtatcgatat

SEQ ID NO: 711891 - DNA, 75 bp, synthetic construct
  source 1..75: mol_type = other DNA
gggaggctcttgatgagaagaaaaggctatttcttcaaggatatttatcgtattgcaaaagtgttgagccattat

SEQ ID NO: 711892 - DNA, 75 bp, synthetic construct
  source 1..75: mol_type = other DNA
aacaaaccttcattacgttggtattacaagagctgagaaatgctgcgtattaattaatgcagagttacgccaaaa

SEQ ID NO: 711893 - DNA, 75 bp, synthetic construct
  source 1..75: mol_type = other DNA
gaaagtacctttgttgataccctcgtggcgcgtaatgtcgatgccattattttgtcggcagtgtctgaaaatggc

SEQ ID NO: 711894 - DNA, 75 bp, synthetic construct
  source 1..75: mol_type = other DNA
gtgattcaggtgccaatcgatctctataccaaaacggaagacggtaaacagtggctggcaacgcacgttgatggt

SEQ ID NO: 711895 - DNA, 75 bp, synthetic construct
  source 1..75: mol_type = other DNA
atacgcgctggtgcgtaccgaccagccgggattcagcgcctgtacccgctctcagttaataaacaggattgatat

SEQ ID NO: 711896 - DNA, 75 bp, synthetic construct
  source 1..75: mol_type = other DNA
gagttcaccctttatgcctcctcgtttgcgcgtggacgcacacgctacacgccgctaaaacgctgggcgctaacg

SEQ ID NO: 711897 - DNA, 75 bp, synthetic construct
  source 1..75: mol_type = other DNA
tcgatttacagcatggtgcatgacgaactggaaaaagagtacgttatcgccgccgtctggatggcgcatcaacgc

SEQ ID NO: 711898 - DNA, 75 bp, synthetic construct
  source 1..75: mol_type = other DNA
ttttggatactttgctggcgattccttcgttgctactggcgattattgtcgtagcatttgccgggccaagtttgt

SEQ ID NO: 711899 - DNA, 75 bp, synthetic construct
  source 1..75: mol_type = other DNA
cgctgctcgccagtgacgatgttcacgctaacagccgcgcctattttctcgctgagaagcgtgccggagtacccg

SEQ ID NO: 711900 - DNA, 75 bp, synthetic construct
  source 1..75: mol_type = other DNA
ggcttatcatttagcaaattaattcttgaagaacgaatggtgatggctgaaaggttattaagctacaatttctat

SEQ ID NO: 711901 - DNA, 75 bp, synthetic construct
  source 1..75: mol_type = other DNA
atgtctgaaccgcaacgtctgttctttgctatcgacttacctgcagaaatccgcgaacagattatccactggcgc

SEQ ID NO: 711902 - DNA, 75 bp, synthetic construct
  source 1..75: mol_type = other DNA
gagacaaacagccatggctggttcccggatacagatggcgcactcatcaccggactgacctttcttgaccccaaa

SEQ ID NO: 711903 - DNA, 75 bp, synthetic construct
  source 1..75: mol_type = other DNA
gggagacgcaaatacggttccgtatggggccgggaaacattattgagacaaacagcaatggctggttcccggata

SEQ ID NO: 711904 - DNA, 75 bp, synthetic construct
  source 1..75: mol_type = other DNA
tcaggcagaagagagcgctgcaaatgctgacacttcagcaggggaggcatcggagtcagcccggcaggcggcaga

SEQ ID NO: 711905 - DNA, 75 bp, synthetic construct
  source 1..75: mol_type = other DNA
agcattattgagacaaacagcaatggctggttcccggatacagatggcgcactcatcaccggactgacctttctt

SEQ ID NO: 711906 - DNA, 75 bp, synthetic construct
  source 1..75: mol_type = other DNA
ggctggttcccggatacagatggcgcactcatcaccggactgacctttcttgaccccaaagatgccacacaggtt

SEQ ID NO: 711907 - DNA, 75 bp, synthetic construct
  source 1..75: mol_type = other DNA
acgcgctggtacgtaccgaccagccgggattcagcacctgtacccactctcagttaataaacagcatcgatatcc

SEQ ID NO: 711908 - DNA, 75 bp, synthetic construct
  source 1..75: mol_type = other DNA
ccggcatatcagccagtcaggcagaaaagagcgctgcacatgctgacacttcagcaggatatgcatcggagtcag

SEQ ID NO: 711909 - DNA, 75 bp, synthetic construct
  source 1..75: mol_type = other DNA
ttatgatgactggagcactccgtcagaactgggccatgcaggtctgaacggcgatattctggtgtggaacccggt

SEQ ID NO: 711910 - DNA, 75 bp, synthetic construct
  source 1..75: mol_type = other DNA
cgcaccggattatgatgactggagcaccccgtcagagctgggccatgcgggtctgaacggcgatattctggtgtg

SEQ ID NO: 711911 - DNA, 75 bp, synthetic construct
  source 1..75: mol_type = other DNA
gggcctcccggaccaaagggggaaccgggtcccgcgggtcctcaggggccgaagggagataaaggagagcgtgga

SEQ ID NO: 711912 - DNA, 75 bp, synthetic construct
  source 1..75: mol_type = other DNA
agatggcgcactcatcaccggactgacctttcttgaccccaaagatgccacacaggttcaggggctgtttcagca

SEQ ID NO: 711913 - DNA, 75 bp, synthetic construct
  source 1..75: mol_type = other DNA
atgccccgtccggaggctctgcgccgttttgaactgatggtggaagaggtggcgcgtcacgctgaggaggcgaag

SEQ ID NO: 711914 - DNA, 75 bp, synthetic construct
  source 1..75: mol_type = other DNA
gtacgctgaatgattttctcggtgccatgacggaggatgatacagtgtgtggtaagaccgctgcaaatcctgcgt

SEQ ID NO: 711915 - DNA, 75 bp, synthetic construct
  source 1..75: mol_type = other DNA
ccacagggtccaaagggagacaccggggcagcaggcccggcaggcccgcagggaccgaaaggagaaacaggtgcg

SEQ ID NO: 711916 - DNA, 75 bp, synthetic construct
  source 1..75: mol_type = other DNA
acataaagatcgcgaaactttccgatcccggaagcaacaattgccatgtaacgctaatggttactaacggcggta

SEQ ID NO: 711917 - DNA, 75 bp, synthetic construct
  source 1..75: mol_type = other DNA
ctctgcaaagaagtcagaggaagcgtcctcgtcctcagcctctgaggccgctcaaaaagccagtgagtcattaca

SEQ ID NO: 711918 - DNA, 75 bp, synthetic construct
  source 1..75: mol_type = other DNA
agaccggtctgacgggaaatgcaggtccacagggtccaaagggagatatcggtgcggcaggcccggcaggcccac

SEQ ID NO: 711919 - DNA, 75 bp, synthetic construct
  source 1..75: mol_type = other DNA
cacagggaccgaaaggagaaacaggtgcggctggcccggtgggggcaaccggacctcagggaccgaagggcgacc

SEQ ID NO: 711920 - DNA, 75 bp, synthetic construct
  source 1..75: mol_type = other DNA
aagcaaaacgtaacagtaccacggtggtggtgaacacggtggcatcagaaaacccggatgaagccgggcgttaca

SEQ ID NO: 711921 - DNA, 75 bp, synthetic construct
  source 1..75: mol_type = other DNA
aagagagcgctgcaaatgctgacacttcagcaggggaggcatcggagtcagcccggcaggcggcagaaagtgcag

SEQ ID NO: 711922 - DNA, 75 bp, synthetic construct
  source 1..75: mol_type = other DNA
cattattgagacaaacagcaatggctggttcccggatacagatggcgcactcatcaccggactgacctttcttga

SEQ ID NO: 711923 - DNA, 75 bp, synthetic construct
  source 1..75: mol_type = other DNA
atccccaccgtggtgggacctcccgggccaaagggggaacaggggcccgcgggtcctcaggggccgaagggtgat

SEQ ID NO: 711924 - DNA, 75 bp, synthetic construct
  source 1..75: mol_type = other DNA
attgagacaaacagccatggctggttcccggatacagatggcgcactcatcaccggactgacctttcttgacccc

SEQ ID NO: 711925 - DNA, 75 bp, synthetic construct
  source 1..75: mol_type = other DNA
taagggagagcgcggtgacaccggccctgtcggggcaaccggcgaacggggaccggcaggtgatgctggtccggc

SEQ ID NO: 711926 - DNA, 75 bp, synthetic construct
  source 1..75: mol_type = other DNA
accatgttgttgctgcaactgccacatattgggcaggttcagtgcggcgtatggcctgcggccgttcgcgagagc

SEQ ID NO: 711927 - DNA, 75 bp, synthetic construct
  source 1..75: mol_type = other DNA
agatcataacaatcaacatgcaccactgttcctgcaacagttgcgaaatctcatcctctccagcccactggcgga

SEQ ID NO: 711928 - DNA, 75 bp, synthetic construct
  source 1..75: mol_type = other DNA
gttccggcgctggcccctaaacgtggcggtcgctggcgctggcagatattgttgcagcacccttcccgcgtgcgc

SEQ ID NO: 711929 - DNA, 75 bp, synthetic construct
  source 1..75: mol_type = other DNA
gatgtcagcgagttgccgctcaatgaactgaaagcggtggtagacgtgctggacgttgaaccggtgtttactcac

SEQ ID NO: 711930 - DNA, 75 bp, synthetic construct
  source 1..75: mol_type = other DNA
cgctcagggcaaacaggcgctggtgatggtgccagaaatcggcctgacaccgcaaactatcgcccgttttcgtga

SEQ ID NO: 711931 - DNA, 75 bp, synthetic construct
  source 1..75: mol_type = other DNA
ggacgttgagccggtgtttactcactccgtctggcgattactgctctgggcggcagattactatcatcatccgat

SEQ ID NO: 711932 - DNA, 75 bp, synthetic construct
  source 1..75: mol_type = other DNA
cctgaacatcctctgttgcaaacgttgctgtataaaggctacgacgctttcgccgaacaggcgcttgctgagcga

SEQ ID NO: 711933 - DNA, 75 bp, synthetic construct
  source 1..75: mol_type = other DNA
gacctgatttactggtatatgccaacagccctgctgcgcggtatttttcataatgttcccgattcgtgtttccgg

SEQ ID NO: 711934 - DNA, 75 bp, synthetic construct
  source 1..75: mol_type = other DNA
attggtgcagcggttctggtttatttcgggattaaaaaactgaaaaaagggcggggcagctcctggttacgggat

SEQ ID NO: 711935 - DNA, 75 bp, synthetic construct
  source 1..75: mol_type = other DNA
tatatgccaacagtcctgctgcgcggtatttttcataatgttcccgattcgtgtttccggcagtggattaaatag

SEQ ID NO: 711936 - DNA, 75 bp, synthetic construct
  source 1..75: mol_type = other DNA
ctgcggcgaacgcgccgatgtggtactggtttgccactgaacaaggccaggcggtggatcttaacagcctgaaac

SEQ ID NO: 711937 - DNA, 75 bp, synthetic construct
  source 1..75: mol_type = other DNA
gaagttctgcattccggcctgaacgacagcgagcgtctttcggcgtggttgaaagcgaaaaatggcgaggcggcg

SEQ ID NO: 711938 - DNA, 75 bp, synthetic construct
  source 1..75: mol_type = other DNA
gtgccgggcgtgcgggtaaacagggtgaagtggtgctgcaaacgcaccatccggaacatcctctgttgcaaacat

SEQ ID NO: 711939 - DNA, 75 bp, synthetic construct
  source 1..75: mol_type = other DNA
aacgcctttcggcgtggctgaaagcgaaaaatggcgaagcagcgattgtgattggtacgcgttccgcactgttta

SEQ ID NO: 711940 - DNA, 75 bp, synthetic construct
  source 1..75: mol_type = other DNA
accatgctgctgctgcaactgccgcatatcggccaggttcagtgtggtgtatggccagctgctgttcgcgagagc

SEQ ID NO: 711941 - DNA, 75 bp, synthetic construct
  source 1..75: mol_type = other DNA
gaggaagcgtcctcgtcctcggcctctgaggccgctcaaaaagccagtgagtcattacaaagtgcagcagatgct

SEQ ID NO: 711942 - DNA, 75 bp, synthetic construct
  source 1..75: mol_type = other DNA
ctgaatgattttctcggtgccatgtcggaggatgacgtccggccggaggcactgcgccgttttgaactgatggtg

SEQ ID NO: 711943 - DNA, 75 bp, synthetic construct
  source 1..75: mol_type = other DNA
cgggattggcggcaagctgagcgatggtcatcgccacgacgtgcgcgcaccggattatgatgactggagcacccc

SEQ ID NO: 711944 - DNA, 75 bp, synthetic construct
  source 1..75: mol_type = other DNA
accatgctactgctgcaactgccgcatatcggccaggttcagtgtggcgtttggcctgcggcagttcgtgagagc

SEQ ID NO: 711945 - DNA, 75 bp, synthetic construct
  source 1..75: mol_type = other DNA
gcgatattctggtgtggaaccctgtactggaagatgcgtttgagctttcttccatggggatccgcgtggatgccg

SEQ ID NO: 711946 - DNA, 75 bp, synthetic construct
  source 1..75: mol_type = other DNA
atgcccgttgcccacgttgccttgcccgttccgcttcctcgtacccttcctcgtacctttgactatctgctgcca

SEQ ID NO: 711947 - DNA, 75 bp, synthetic construct
  source 1..75: mol_type = other DNA
ctatctgctgcctgaaggcatgacggttaaagccgggtgtcgcgtgcgcgtgccgtttggtaaacagcaagaacg

SEQ ID NO: 711948 - DNA, 75 bp, synthetic construct
  source 1..75: mol_type = other DNA
ttgcagcacatcattaatggcactctggcgcttatcaacacaataccggattcacgaaaagtgaaatgggtgctg

SEQ ID NO: 711949 - DNA, 75 bp, synthetic construct
  source 1..75: mol_type = other DNA
aggtccggcaggtccgcaggggccgaaaggcgacaggggagagcggggagagaccgggctgacaggaagtacagg

SEQ ID NO: 711950 - DNA, 75 bp, synthetic construct
  source 1..75: mol_type = other DNA
tgtttcagcatttgcaggtcaggtttggtgacgggccatggcaggatgttaagggactggatgaagtgggcagtg

SEQ ID NO: 711951 - DNA, 75 bp, synthetic construct
  source 1..75: mol_type = other DNA
ccatccatagcgcggcagataccttttccgcctggctgctggcgggcgtcaccggctccggtaaaacggaagttt

SEQ ID NO: 711952 - DNA, 75 bp, synthetic construct
  source 1..75: mol_type = other DNA
gccgggcaaccggcctgatggcccgcgacaattacagaacggtaaataacattaccctgggtaaacatccggggg

SEQ ID NO: 711953 - DNA, 75 bp, synthetic construct
  source 1..75: mol_type = other DNA
atgcctgccgggtttacctactttcaactggtaaccagaaacaacatgaaatcattaatcactgaaacagcgctg

SEQ ID NO: 711954 - DNA, 75 bp, synthetic construct
  source 1..75: mol_type = other DNA
gtttggtggtaacccaccattatattcgtgcggtcttagtgcgctgtaatatccaacgatatagtccgttattgc

SEQ ID NO: 711955 - DNA, 75 bp, synthetic construct
  source 1..75: mol_type = other DNA
atgcaatggatgcggtactcgctgccgctgatgccgggtgttttgccacctacattgagaaacagggcggcgtac

SEQ ID NO: 711956 - DNA, 75 bp, synthetic construct
  source 1..75: mol_type = other DNA
atgcctgccgggtttacccactttcgactggtaaccatgagcaacatgaaatcattaaccacggaaaccgcactg

SEQ ID NO: 711957 - DNA, 75 bp, synthetic construct
  source 1..75: mol_type = other DNA
cctatatcggtaagaacctggacgccagcgctttccacaacaatgatccgaaaaccggaaaaccttacgttgatg

SEQ ID NO: 711958 - DNA, 75 bp, synthetic construct
  source 1..75: mol_type = other DNA
aaatcattaaccacggaaaccgcactggatattctgattgcgtggctacaggacaatatcgactgcgaatcggga

SEQ ID NO: 711959 - DNA, 75 bp, synthetic construct
  source 1..75: mol_type = other DNA
atgcctgccgggtttacccactttctactggtaaccagtaacaacatgaaatcattaaccacggaaaccgctctg

SEQ ID NO: 711960 - DNA, 75 bp, synthetic construct
  source 1..75: mol_type = other DNA
atgcctgccgggtttacccactttcaactggtaaccagcaacaacatgaaatcattaaccacggaaacggctctg

SEQ ID NO: 711961 - DNA, 75 bp, synthetic construct
  source 1..75: mol_type = other DNA
ataaaacggattcggcagcacggctgccctgcattgaacaggccagggaagatatccataccctgcgccaactgc

SEQ ID NO: 711962 - DNA, 75 bp, synthetic construct
  source 1..75: mol_type = other DNA
atgaaatcattaaccacagaaacagcaccggatattctgattgcgtggctgcaggacaatatcgactgcggctcc

SEQ ID NO: 711963 - DNA, 75 bp, synthetic construct
  source 1..75: mol_type = other DNA
atgcctgccgggtttacccactttcgactggtaaccaggaacaacatgaaatcattaaccacggaaacagctctg

SEQ ID NO: 711964 - DNA, 75 bp, synthetic construct
  source 1..75: mol_type = other DNA
atgcctgccgggtttacccactttccactggtaaccagaaacaacatgaaatcattaaccacggaaacggctctg

SEQ ID NO: 711965 - DNA, 75 bp, synthetic construct
  source 1..75: mol_type = other DNA
gcccggctggatgaagaaaccgtggccttcctgacaaccacggacaaaggtaagcaaattaattcacaccttcac

SEQ ID NO: 711966 - DNA, 75 bp, synthetic construct
  source 1..75: mol_type = other DNA
gtggagtttgctcgtgaattgcatgagaaagaaggactaagcattaaagaggctgctgttgaagcggcgggtgat

SEQ ID NO: 711967 - DNA, 75 bp, synthetic construct
  source 1..75: mol_type = other DNA
tatattcctctcttctatatgttaattgccgggttcttcagccgcagaaataagaaatcatcggataagactgaa

SEQ ID NO: 711968 - DNA, 75 bp, synthetic construct
  source 1..75: mol_type = other DNA
caccccgggggccttcgcgctctcctgaaccgccgcctgtgtacggtggtgatattcatgttcaccttcacaacg

SEQ ID NO: 711969 - DNA, 75 bp, synthetic construct
  source 1..75: mol_type = other DNA
caacggtgacaataaacctgcccctgctgttcccggagaggtgaggggaacggcggacaatccggtcggcaaacc

SEQ ID NO: 711970 - DNA, 75 bp, synthetic construct
  source 1..75: mol_type = other DNA
ttcgatcgtgccgccggaaatctcagtaaataccgcgaacagattgcccgcgcggagcagaggctcgccgggctg

SEQ ID NO: 711971 - DNA, 75 bp, synthetic construct
  source 1..75: mol_type = other DNA
gctttggcgcaattgaccggctgacacgcccgaccgaaaacgcccgccgtcaggtgggcgctctcactgaatccc

SEQ ID NO: 711972 - DNA, 75 bp, synthetic construct
  source 1..75: mol_type = other DNA
ctgagaatcacctcaagtcgattaagattggtagcgataataaaaaagcagacaatattagttatgcaaaagttt

SEQ ID NO: 711973 - DNA, 75 bp, synthetic construct
  source 1..75: mol_type = other DNA
cttatcgctatattacttggtcaggatgttttattaaatctttatgatacgcagttatcagaacgtattaataac

SEQ ID NO: 711974 - DNA, 75 bp, synthetic construct
  source 1..75: mol_type = other DNA
tagataatcaagttgagcaacatcttaaaagcgaacttaaaggttttcaggaaaatgtgcgtgattatgctcaat

SEQ ID NO: 711975 - DNA, 75 bp, synthetic construct
  source 1..75: mol_type = other DNA
tccacggtgtatgactggttcaggcggttactcacacctgttcagaccagccatgaatctcttgaacggtgtgcc

SEQ ID NO: 711976 - DNA, 75 bp, synthetic construct
  source 1..75: mol_type = other DNA
ttgttcaggtagcggcatcatggggtgaacggctcagaggatgggttcaggataatccgcaactggtgcgtactc

SEQ ID NO: 711977 - DNA, 75 bp, synthetic construct
  source 1..75: mol_type = other DNA
ggaaagggtgacacggcaggcaatcgatcttgctcaggtcaccggcggtaatgtggctgaacaggttcaggctgc

SEQ ID NO: 711978 - DNA, 75 bp, synthetic construct
  source 1..75: mol_type = other DNA
atgaaatcattaaccacggaaacagtgctggatattctgattacgtggctgcaggacaatatcgactgcgaatca

SEQ ID NO: 711979 - DNA, 75 bp, synthetic construct
  source 1..75: mol_type = other DNA
tatgttgcgtgctggacaatcggtggttgggttctggctgaatacagtgcattgctactcgaaaatgctcgccgc

SEQ ID NO: 711980 - DNA, 75 bp, synthetic construct
  source 1..75: mol_type = other DNA
ggaaaacgagagtacggagtttgacgtcaccacgctgctgagaatggacagcgaacggcgcatgaaaacgctggg

SEQ ID NO: 711981 - DNA, 75 bp, synthetic construct
  source 1..75: mol_type = other DNA
atcaggcagctataaatgccttcgggtggcaaccatcttctcctttgctgcaaatgaggagcaaagcgccattgg

SEQ ID NO: 711982 - DNA, 75 bp, synthetic construct
  source 1..75: mol_type = other DNA
aaaaaaattggcttttacaccattggcgataaaagcatttacctgtatgacctacgtaagcgcaccgtgaaggac

SEQ ID NO: 711983 - DNA, 75 bp, synthetic construct
  source 1..75: mol_type = other DNA
gaaactgtgcgatggcaaaacgtgccatgacgaggtgatgctggaaaaccttgatgatgaaatcgccaaaatgcc

SEQ ID NO: 711984 - DNA, 75 bp, synthetic construct
  source 1..75: mol_type = other DNA
agtgaaaatttcctcgacatcgtgcagaaaaccggtgtctcgctgttatggaaagagaacgatggcggttgtaaa

SEQ ID NO: 711985 - DNA, 75 bp, synthetic construct
  source 1..75: mol_type = other DNA
cagcgcttctctccggacagcgtcaacggttcggataatacagctggcctcagaagaaacctggataaggacgat

SEQ ID NO: 711986 - DNA, 75 bp, synthetic construct
  source 1..75: mol_type = other DNA
gaagaggctgcaaggcgctatattcgcacgtctttaaaacgcgaatatgccaccgaaaatggcacagaattaaac

SEQ ID NO: 711987 - DNA, 75 bp, synthetic construct
  source 1..75: mol_type = other DNA
cagaagacccaccgtactttcccaggttccaaaggctttaatgccatgctggcagtgagtagcgtggatgccgcg

SEQ ID NO: 711988 - DNA, 75 bp, synthetic construct
  source 1..75: mol_type = other DNA
ggctttatggcagtagttgcagaactggaacaacggttccctgaccctgccagtattgaaagtgaaaaagagaag

SEQ ID NO: 711989 - DNA, 75 bp, synthetic construct
  source 1..75: mol_type = other DNA
ctttaaagccgcgcgtctggcaacagaactggactttattgataaagtcttcttcgtggtcgacagaaaagacct

SEQ ID NO: 711990 - DNA, 75 bp, synthetic construct
  source 1..75: mol_type = other DNA
gccagcgtcttcgggcgtgaattacattcttacgtaattactgatgcgattcgtgatgaaaaagtgctgaagttt

SEQ ID NO: 711991 - DNA, 75 bp, synthetic construct
  source 1..75: mol_type = other DNA
cagtattgaaagtgaaaaagagaaaaaagacttcgttaaactgtttggtgaatacctgcgtgccgagaacatcct

SEQ ID NO: 711992 - DNA, 75 bp, synthetic construct
  source 1..75: mol_type = other DNA
atggaatcattaaccacagaaacggcgctggatattctgattgtgtggctgcaggacaatatcgactgcgaatcg

SEQ ID NO: 711993 - DNA, 75 bp, synthetic construct
  source 1..75: mol_type = other DNA
tcatctggacgccggcgcagaatgtctgccgggtttacccactttcgactggtaatcaggacaaaagacactgga

SEQ ID NO: 711994 - DNA, 75 bp, synthetic construct
  source 1..75: mol_type = other DNA
tggccaccatgacggcggcgatgttcagcagcacattcgaaacactctgtgatggccttggtgccagagatggcg

SEQ ID NO: 711995 - DNA, 75 bp, synthetic construct
  source 1..75: mol_type = other DNA
cgctggatattctgattgcgtggctacaggacaatatcgactgcgaatcgggaattatctttgacaacgatgagg

SEQ ID NO: 711996 - DNA, 75 bp, synthetic construct
  source 1..75: mol_type = other DNA
cagctgggggcatcagaccccgaagccgccgcacgcctggcatccacacttcagcaggaccagaacaccatgaaa

SEQ ID NO: 711997 - DNA, 75 bp, synthetic construct
  source 1..75: mol_type = other DNA
aaaatcgtgcagcgagccgctgacggaaattcacaacatgaaatcattaaccacggaaacggcgctggatattct

SEQ ID NO: 711998 - DNA, 75 bp, synthetic construct
  source 1..75: mol_type = other DNA
tccaacatggacgaaatcaaagaactgatcaaactgtccggtagcgtaactgtgggtgaaactccggttatccgc

SEQ ID NO: 711999 - DNA, 75 bp, synthetic construct
  source 1..75: mol_type = other DNA
ttaaaacgcgaatacgccaccgaaaatggcacagaattaaacgaaacattaccaaaacttagtccgttaaatccg

SEQ ID NO: 712000 - DNA, 75 bp, synthetic construct
  source 1..75: mol_type = other DNA
aaaaagaatctcatgcgcaataaggtgcagattatccagcagtttgaacaggcaggttctcacgctaaccgttat

SEQ ID NO: 712001 - DNA, 75 bp, synthetic construct
  source 1..75: mol_type = other DNA
agaaatgatggccaccatgaaggggctggaacttctggccgaagcccgtggcgacaaagcggtgtttctgactgt

SEQ ID NO: 712002 - DNA, 75 bp, synthetic construct
  source 1..75: mol_type = other DNA
gcaggacaatatcgactgcgaatcgggaattatctttgacaacgatcaggataaaacggattcggcagcactgct

SEQ ID NO: 712003 - DNA, 75 bp, synthetic construct
  source 1..75: mol_type = other DNA
gcacgcacagagaatcagtgaaaccactgaacgcgccagccgcaaagcagacctgctgcggggtggcctgaccag

SEQ ID NO: 712004 - DNA, 75 bp, synthetic construct
  source 1..75: mol_type = other DNA
gaacgacggcaaactgctgccgaattttatcttcgttgccaacatcgaatcgaaagatccgcagcagattatctc

SEQ ID NO: 712005 - DNA, 75 bp, synthetic construct
  source 1..75: mol_type = other DNA
ttcactgattgaaaaaattcgcattatttcagatgcaatagaagtttacctgaaccataaaggccagccgttaat

SEQ ID NO: 712006 - DNA, 75 bp, synthetic construct
  source 1..75: mol_type = other DNA
gcagagttagttggggaattagttactccagtaatcaagaaaagtgattctattattctgcaaaggattttaagc

SEQ ID NO: 712007 - DNA, 75 bp, synthetic construct
  source 1..75: mol_type = other DNA
agctggataacgctggcctcgcacatggcaccgttcaatggtttgctgctccgcgtcgtctggcgctgaaagtag

SEQ ID NO: 712008 - DNA, 75 bp, synthetic construct
  source 1..75: mol_type = other DNA
gtacgctgcgtgacaaaactgaccgcatccaggcgctggctggctggattgctgaacagattggcgctgacgtta

SEQ ID NO: 712009 - DNA, 75 bp, synthetic construct
  source 1..75: mol_type = other DNA
gacccgtttgcgttgcgtcgtgccgcacttggcgtactgcgtattattgttgagaagaacctcaatcttgatctg

SEQ ID NO: 712010 - DNA, 75 bp, synthetic construct
  source 1..75: mol_type = other DNA
aaaaacagggcaaggcgcgttgatggtttaatcattggtactggtgaatccgatttcactaaaggtaatacccat

SEQ ID NO: 712011 - DNA, 75 bp, synthetic construct
  source 1..75: mol_type = other DNA
gaatttgaaaaatgtcgggttgcattcagaaatgcgactggtgaatttgaacgccgtatcgcgaacagtcgtcgt

SEQ ID NO: 712012 - DNA, 75 bp, synthetic construct
  source 1..75: mol_type = other DNA
atgtatgaagacctgaccagacgctatatatctgaagcacccctgattttttacgtggttgatgccacgaacccg

SEQ ID NO: 712013 - DNA, 75 bp, synthetic construct
  source 1..75: mol_type = other DNA
acaccttacgccgcccgaaaacgccagccggtaaaagccaaaaaaggccgggttaagcgggaaatgttcgccaaa

SEQ ID NO: 712014 - DNA, 75 bp, synthetic construct
  source 1..75: mol_type = other DNA
ataagctcgcggggctgatagcggcgctgtcacctgctgcccgtcgcagaatggccgcagatatcgcgaagaccc

SEQ ID NO: 712015 - DNA, 75 bp, synthetic construct
  source 1..75: mol_type = other DNA
cgcacatgaggtacagtatgcagaacggcaattgattgggttaagcccagtggataaaaatattatttatgagat

SEQ ID NO: 712016 - DNA, 75 bp, synthetic construct
  source 1..75: mol_type = other DNA
gacccgtttgcgctgcgtcgtgccgcacttggcgtgctgcgaattatcgttgagaagaacctcaaccttgatctg

SEQ ID NO: 712017 - DNA, 75 bp, synthetic construct
  source 1..75: mol_type = other DNA
tgccattcgctggatatatgaaccgggaagctttacacctctggcgcgttatgagaaaggcttgctgcattacgc

SEQ ID NO: 712018 - DNA, 75 bp, synthetic construct
  source 1..75: mol_type = other DNA
gtggcagtggcgctgaacgagcagtatcagccgcgttttgccggtgatgacctgccgtctaacccagtggcttgt

SEQ ID NO: 712019 - DNA, 75 bp, synthetic construct
  source 1..75: mol_type = other DNA
cctgccgtctaacccggtagcctgtgcactggcgattgctgacaaaatggacaccctggcgggtatcttcggtat

SEQ ID NO: 712020 - DNA, 75 bp, synthetic construct
  source 1..75: mol_type = other DNA
ataatgtcttgcatgacacgaatccacattataatatattatttcctgatggtactaaagcaggcataatcatcg

SEQ ID NO: 712021 - DNA, 75 bp, synthetic construct
  source 1..75: mol_type = other DNA
tgcgaggaactgttcacgtatgataaaaacctgaatataacccgccgccagacatgggtgaatgaggttctggaa

SEQ ID NO: 712022 - DNA, 75 bp, synthetic construct
  source 1..75: mol_type = other DNA
ccattgtctggcggggaaaacaacagctctgggaccgggaagaaggcaggaacagggatgatgcacctgactgcc

SEQ ID NO: 712023 - DNA, 75 bp, synthetic construct
  source 1..75: mol_type = other DNA
ttgatgacaaagaattgcgtatcaaccgtctgaccatgctggagaaactgcgcgaactgttcctgcgcgttgcgg

SEQ ID NO: 712024 - DNA, 75 bp, synthetic construct
  source 1..75: mol_type = other DNA
ggttgtggtgctacgtgacaagctggagccgtactttgcggaaggtcgttaccaggatgcgctggtcgaactggc

SEQ ID NO: 712025 - DNA, 75 bp, synthetic construct
  source 1..75: mol_type = other DNA
cctggtatcaggacgaaggttacaccgttgacaccatccaggcggtactggcacgtcgtccgacgcgtccggctg

SEQ ID NO: 712026 - DNA, 75 bp, synthetic construct
  source 1..75: mol_type = other DNA
gcgctggcgattgctgacaagatggacaccctcgcgggtatcttcggtattggtcagcatccgaaaggcgataaa

SEQ ID NO: 712027 - DNA, 75 bp, synthetic construct
  source 1..75: mol_type = other DNA
aaaagcactacgcagcctggctgagtcctttgctgcgaattttaaggcggagctggataacgctggcctcgcaca

SEQ ID NO: 712028 - DNA, 75 bp, synthetic construct
  source 1..75: mol_type = other DNA
cggcaccgttcaatggtttgcggctccacgtcgtctggcgctgaaagtggctaacctggcggaagcgcaaccgga

SEQ ID NO: 712029 - DNA, 75 bp, synthetic construct
  source 1..75: mol_type = other DNA
cttatctggaatatggtactcaggtttatccgttgatcaatgtgcgcggttattctgaggcctatgagtttgatg

SEQ ID NO: 712030 - DNA, 75 bp, synthetic construct
  source 1..75: mol_type = other DNA
atgccattaaccacggaaacagcgctggatattctgattgcgtggctgcaggacaatatcgactgcgggtccgga

SEQ ID NO: 712031 - DNA, 75 bp, synthetic construct
  source 1..75: mol_type = other DNA
ataaaacggattcggcagcactgctgccctgcattgaacaggccagggaggatatccataccctgcgccagttgc

SEQ ID NO: 712032 - DNA, 75 bp, synthetic construct
  source 1..75: mol_type = other DNA
atgaaatcattaaccacggaaacagcactggatattctgattgcgtggctgcaggacaatatcgactgtgaatcc

SEQ ID NO: 712033 - DNA, 75 bp, synthetic construct
  source 1..75: mol_type = other DNA
ataaaacggattcggcagcactgttgccctgtatcgaacaggccagggaggatatccgtaccctgcgtcatctgc

SEQ ID NO: 712034 - DNA, 75 bp, synthetic construct
  source 1..75: mol_type = other DNA
gcaggacaatatcgactgcgaatcgggaattatcttcgacaacgatgaggataaaacagattcggcagcactgtt

SEQ ID NO: 712035 - DNA, 75 bp, synthetic construct
  source 1..75: mol_type = other DNA
atgaaatcattaaccacggaaacagcgctggatatcctcattgcgtggctgcaggacaatatcgactgcgaatcg

SEQ ID NO: 712036 - DNA, 75 bp, synthetic construct
  source 1..75: mol_type = other DNA
ttttcaaaaatctgcccggacccgaaatcattcacggcgagtggaaagcaccgcaggttatccggacagtgcagg

SEQ ID NO: 712037 - DNA, 75 bp, synthetic construct
  source 1..75: mol_type = other DNA
cgctggggtgggtcattcagaacattgtgctggggccgctgacgatgctccttgatggcctcggcacagtgctga

SEQ ID NO: 712038 - DNA, 75 bp, synthetic construct
  source 1..75: mol_type = other DNA
gaactggcaaaactggttggcgaggctgtccgcgaagagatgcgcagacaggtgcgtacaggcatgaacagcttc

SEQ ID NO: 712039 - DNA, 75 bp, synthetic construct
  source 1..75: mol_type = other DNA
gccgggtttacccactttcgactggtaatccggaaattcacaacatgaaatcattaaccacggaaacagcgctgg

SEQ ID NO: 712040 - DNA, 75 bp, synthetic construct
  source 1..75: mol_type = other DNA
tggagaggcacggtattgccgcagagggcagcagtcagaccatacaggcagccattcgccggacggcagagtata

SEQ ID NO: 712041 - DNA, 75 bp, synthetic construct
  source 1..75: mol_type = other DNA
tgcacaacgtcaacacacagaatccgcgcgaactggcaaaactggttggtgaggccgtccgcgaagagatgcgca

SEQ ID NO: 712042 - DNA, 75 bp, synthetic construct
  source 1..75: mol_type = other DNA
atgaaatcattaaccacggaaacagcgctggatattctgattgcgtggatgcaggacaatattgactgcgaatca

SEQ ID NO: 712043 - DNA, 75 bp, synthetic construct
  source 1..75: mol_type = other DNA
ataaacgctggattggcgatctgctgggcggctcgctgatggttcgtgagagcaggattattgctgagctgctgc

SEQ ID NO: 712044 - DNA, 75 bp, synthetic construct
  source 1..75: mol_type = other DNA
atgagaatctccgtttacacccggaactggcagctttttctgattcatcgatccaaaagatgggtaacaatctta

SEQ ID NO: 712045 - DNA, 75 bp, synthetic construct
  source 1..75: mol_type = other DNA
aatgttgttggttgcgttgatgatccagtctccagttgttgcgacgtttattgctgaagttgtaaatccagctcg

SEQ ID NO: 712046 - DNA, 75 bp, synthetic construct
  source 1..75: mol_type = other DNA
ctggcggtagatattgcgaagaaactgcgccagcgccagcagcagcgaattaaattacaaaaaggcccggatggt

SEQ ID NO: 712047 - DNA, 75 bp, synthetic construct
  source 1..75: mol_type = other DNA
aacctggaagaagaaatgttgattgaggtaattaaaaatgaaaatcagggtaagttatttccgggcgaaagataa

SEQ ID NO: 712048 - DNA, 75 bp, synthetic construct
  source 1..75: mol_type = other DNA
gtttaagacaggtcagtatcagtaccagcttacgttgcgcatttctgatgggggcactactgaccctgattgtca

SEQ ID NO: 712049 - DNA, 75 bp, synthetic construct
  source 1..75: mol_type = other DNA
gattgcgtggctgcaggacaatattgactgcgaatcagggattatcttcgacaacgatgaggataaaacggattc

SEQ ID NO: 712050 - DNA, 75 bp, synthetic construct
  source 1..75: mol_type = other DNA
cgctggatattctgattgcgtggctgcaggacaatattgactgcgaatcggggattatcttcgacaacgatgagg

SEQ ID NO: 712051 - DNA, 75 bp, synthetic construct
  source 1..75: mol_type = other DNA
accgtcagggcggcgtgctcattccacgcaacctgtacctgatccgcaccgcatacgaaaccgcagatgaggcca

SEQ ID NO: 712052 - DNA, 75 bp, synthetic construct
  source 1..75: mol_type = other DNA
attttttccgtgatgctctcgcgccgtttcacaaatatctacaaaattctctactggatgccaccactgcgctca

SEQ ID NO: 712053 - DNA, 75 bp, synthetic construct
  source 1..75: mol_type = other DNA
aatgtctgccgggtttacccactttcgactggtaatcaggacaaaagacactggatgaaattattaaccacagaa

SEQ ID NO: 712054 - DNA, 75 bp, synthetic construct
  source 1..75: mol_type = other DNA
gacaatattgactgcgaatcagggattatcttcgacaacgatgaggataaaacggattcagcagcactgctgccc

SEQ ID NO: 712055 - DNA, 75 bp, synthetic construct
  source 1..75: mol_type = other DNA
tctatgctgccccccgtgatgtgcgtgaacgtacctggcagcttgatactcctttatttacgttgcgctttttct

SEQ ID NO: 712056 - DNA, 75 bp, synthetic construct
  source 1..75: mol_type = other DNA
gctggattatctggaagcactggagctggtggatacttccagtgcgccagatattgaatggcctacccctccggc

SEQ ID NO: 712057 - DNA, 75 bp, synthetic construct
  source 1..75: mol_type = other DNA
gctggattatctggaagcactggacctggtggatacatccagtgcgccagatattgaatggcctactcctccggc

SEQ ID NO: 712058 - DNA, 75 bp, synthetic construct
  source 1..75: mol_type = other DNA
gtgcgtgaacgtacctggcagcttgatacgcctttatttacgctgcgctttttctccccacaggaaggtattgtc

SEQ ID NO: 712059 - DNA, 75 bp, synthetic construct
  source 1..75: mol_type = other DNA
aagcctgcgcggcgggttatctattggcctttccggttttggtttctggagccacgatatcggtggctttgagaa

SEQ ID NO: 712060 - DNA, 75 bp, synthetic construct
  source 1..75: mol_type = other DNA
taaagtaaatggtctgcaaggcggttcgcaggctgaaagtgagttgggtgtggtggtgaccccgcaagggaatga

SEQ ID NO: 712061 - DNA, 75 bp, synthetic construct
  source 1..75: mol_type = other DNA
tatggctggattatctggacgcactggaactggtcgatacttccggtgcgccagatattgaatggcctacgcctc

SEQ ID NO: 712062 - DNA, 75 bp, synthetic construct
  source 1..75: mol_type = other DNA
gaagagtgaacaagtcaaaaagattacggtttccattcctcttaaggtgttaaaaatcctcaccgatgagcgcac

SEQ ID NO: 712063 - DNA, 75 bp, synthetic construct
  source 1..75: mol_type = other DNA
gcgcaaaatttgaaatctataacgtgatacgtcaactggctgcggcagggacagcaattattctggtgtcctctg

SEQ ID NO: 712064 - DNA, 75 bp, synthetic construct
  source 1..75: mol_type = other DNA
gctggattatctggaagcactggatctggtggatacgtccagtgcgccagatattgaatggcctacccctccggc

SEQ ID NO: 712065 - DNA, 75 bp, synthetic construct
  source 1..75: mol_type = other DNA
gctggattatctggaagcactggaactggtggatacctccagtgcgccagatattgaatggcctactcctccggc

SEQ ID NO: 712066 - DNA, 75 bp, synthetic construct
  source 1..75: mol_type = other DNA
gcggctattggtcgtctgaaaggtgaggaactggcgcaatataatttgtggctggattatctggacgcactggaa

SEQ ID NO: 712067 - DNA, 75 bp, synthetic construct
  source 1..75: mol_type = other DNA
gccgtccggcgctgccgcccgcgtggtccttcggtctgtggttaaccacttcatttaccactaactacgacgaag

SEQ ID NO: 712068 - DNA, 75 bp, synthetic construct
  source 1..75: mol_type = other DNA
tatccctgctgttgtgatgcattacggtgtcttcattcaaaacgtctttgattttctgattgtggcctttgccat

SEQ ID NO: 712069 - DNA, 75 bp, synthetic construct
  source 1..75: mol_type = other DNA
gttaccgccgccagaaaagggctcggtactcctggttcccgcacggtggctgaactggaatctgaaattctgcaa

SEQ ID NO: 712070 - DNA, 75 bp, synthetic construct
  source 1..75: mol_type = other DNA
cgaaagtgcgtgagatcttaagcctgcgcgaaccgaagtcgctggcgatttgtacgctgctggataaaccgtccc

SEQ ID NO: 712071 - DNA, 75 bp, synthetic construct
  source 1..75: mol_type = other DNA
ttgttgccgacctgcgtggtgaagcattgctgagcaaaggtgataagcaaggtgcgcgtagtgcatgggaagcag

SEQ ID NO: 712072 - DNA, 75 bp, synthetic construct
  source 1..75: mol_type = other DNA
ctggaatctgaaattctgcaactgcgtaaggcgttaaatgaagctcgccttgagcgagatatattaaaaaaagca

SEQ ID NO: 712073 - DNA, 75 bp, synthetic construct
  source 1..75: mol_type = other DNA
tctgcaactgtgtaaggcgttaaatgaagctcgccttgagcgcgatatattaaaaaaagcaacagcgtattttgc

SEQ ID NO: 712074 - DNA, 75 bp, synthetic construct
  source 1..75: mol_type = other DNA
atggcagaacagcgtcaccaggagtggttacgttttgtcgacctgcttaagaatgcctaccaaaacgatctccat

SEQ ID NO: 712075 - DNA, 75 bp, synthetic construct
  source 1..75: mol_type = other DNA
cggtatttgtgccaatggccttcttcggcggcaccaccggtgccatctatcgccagttctctattaccattgttg

SEQ ID NO: 712076 - DNA, 75 bp, synthetic construct
  source 1..75: mol_type = other DNA
actatcctgagttacgttccagaattgagcagcacattagcgaaacaaagaaccagctttcacagcttgaaagca

SEQ ID NO: 712077 - DNA, 75 bp, synthetic construct
  source 1..75: mol_type = other DNA
gagtttgtggtgggctacggcattgattacgctcagcgttaccgccatctgccgtacatcggcaaagtagtgctg

SEQ ID NO: 712078 - DNA, 75 bp, synthetic construct
  source 1..75: mol_type = other DNA
ccgttgtgactatctccgcagaaggcgaagacgagcaaaaagcggtagaacatctggttaaactgatggctgaac

SEQ ID NO: 712079 - DNA, 75 bp, synthetic construct
  source 1..75: mol_type = other DNA
cgtgccgcgctgccacatgaacgcctaaccctgatgaatcccctaatgatttttatcaaaatcattaagttaagg

SEQ ID NO: 712080 - DNA, 75 bp, synthetic construct
  source 1..75: mol_type = other DNA
tctgctggggaaaaattgcagatagtcatcgatgatgatgtcgaaggatatggttcgtcttttttggtggagggc

SEQ ID NO: 712081 - DNA, 75 bp, synthetic construct
  source 1..75: mol_type = other DNA
cgcaggacgggcgtgatgccacggctctggaaatactccccgctattgacgatcaaaaatcctttccccggggca

SEQ ID NO: 712082 - DNA, 75 bp, synthetic construct
  source 1..75: mol_type = other DNA
gtatgaccgaagataaacccggagaagctcattcatcagcctggaccctggctgcaaaacgtgggcgggatgcag

SEQ ID NO: 712083 - DNA, 75 bp, synthetic construct
  source 1..75: mol_type = other DNA
ggagattctccgcgcccgcaaagccaccaggctgctgacccgcaaggattaccacatggtcaccgctcttgtcac

SEQ ID NO: 712084 - DNA, 75 bp, synthetic construct
  source 1..75: mol_type = other DNA
aaagtgtcactgcggatgatgtacgcccgatgatcgagcagatggtgaaggacgcagtgagtcatatccccgttc

SEQ ID NO: 712085 - DNA, 75 bp, synthetic construct
  source 1..75: mol_type = other DNA
catattccagctccccgcgatggtcgtgattacgatccggaagtactgaagcaggcggtgaatgatgcggtcggg

SEQ ID NO: 712086 - DNA, 75 bp, synthetic construct
  source 1..75: mol_type = other DNA
gttctctgtggtggtccggcagagcagtggccagcgtacggaaaaaacattttccctgccggtgatgctctaccg

SEQ ID NO: 712087 - DNA, 75 bp, synthetic construct
  source 1..75: mol_type = other DNA
cccgctctcagttaatcaacagtatcgatatcctccgggcacgtcgggcaaccggcctgatgacccgcgacaatt

SEQ ID NO: 712088 - DNA, 75 bp, synthetic construct
  source 1..75: mol_type = other DNA
atgaatgaacgtgaactgtccattatccgtgcactgggcgaagaattcgccgcggtgataacggatttacagcgt

SEQ ID NO: 712089 - DNA, 75 bp, synthetic construct
  source 1..75: mol_type = other DNA
ggatgttctgcagaaggcggttctggatgcggtgagtgccctgccggctccgcaggacgggcgtgatgccacggc

SEQ ID NO: 712090 - DNA, 75 bp, synthetic construct
  source 1..75: mol_type = other DNA
ttccccggggcacgtatgccacacacctgggtggactctggcgggcgtatgaaaaaacgcacgggatgcggggat

SEQ ID NO: 712091 - DNA, 75 bp, synthetic construct
  source 1..75: mol_type = other DNA
cggcggacggcaaaagtatcacccccgatgatgtgcgtccgatgcttgagcagatggtgaaagaggccgtaagcc

SEQ ID NO: 712092 - DNA, 75 bp, synthetic construct
  source 1..75: mol_type = other DNA
atgaatgaacgtgaactgtccattatccgtgcgctgggcgaagaattcgctgcggtgctggcggatttacagcgc

SEQ ID NO: 712093 - DNA, 75 bp, synthetic construct
  source 1..75: mol_type = other DNA
tgatgtgcgtccgatgcttgaacagatggtgaaggaggcggtaagccatattcctgttccgcgtgatggtcgtga

SEQ ID NO: 712094 - DNA, 75 bp, synthetic construct
  source 1..75: mol_type = other DNA
tgatgcggtcgcgaaaataccggtaccggcggacggtaaaagtgtcactgcggatgatgtacgcccgatgatcga

SEQ ID NO: 712095 - DNA, 75 bp, synthetic construct
  source 1..75: mol_type = other DNA
gacgtcagcatgacgggtgagcggttgttctctgtggtggtccggcagagcagtggccagcgtacggaaaaaaca

SEQ ID NO: 712096 - DNA, 75 bp, synthetic construct
  source 1..75: mol_type = other DNA
aaagcgatgttcaggggggatactgagaaaatgacggaacgggaactgtccattattcgtgcactgggagaagaa

SEQ ID NO: 712097 - DNA, 75 bp, synthetic construct
  source 1..75: mol_type = other DNA
aaaatgccggcgctggtattgtggaaatcaatcctgtcccgggtgttggcgacactcccgtgaatcttccagcag

SEQ ID NO: 712098 - DNA, 75 bp, synthetic construct
  source 1..75: mol_type = other DNA
taccaccgccattagccaacaggtggcctggctgttgggtctgtccgcagtagctgcgcttatcgcgcagttcgg

SEQ ID NO: 712099 - DNA, 75 bp, synthetic construct
  source 1..75: mol_type = other DNA
aaccgttggacggtgttaaacattctcagcgtggttcgaagatgcgaactccccatcttgtacccttatcgcggc

SEQ ID NO: 712100 - DNA, 75 bp, synthetic construct
  source 1..75: mol_type = other DNA
cgcagtgctggcggatttacagcgcacatttgaggggaaaatagctgcgcaggcacaaacgtttgaagaaaaact

SEQ ID NO: 712101 - DNA, 75 bp, synthetic construct
  source 1..75: mol_type = other DNA
gcactgcaacagtatgaccggtgataagcccggagaagctcattcatcaggctggactctggctgcaaaacgtgg

SEQ ID NO: 712102 - DNA, 75 bp, synthetic construct
  source 1..75: mol_type = other DNA
cactgcaacagtatgaccggtgataagcccggagaagctcattcatcaggctggactctggctgcaaaacgtggg

SEQ ID NO: 712103 - DNA, 75 bp, synthetic construct
  source 1..75: mol_type = other DNA
acgatcaaaaatcctttccccggggcacgtatgccacacacctgggaggactctggcgggcgtatgaaaaaacgc

SEQ ID NO: 712104 - DNA, 75 bp, synthetic construct
  source 1..75: mol_type = other DNA
acgatcaaaaatcctttccccggggcacgtatgccacacaccagggtggactctggcgggcgtatgaaaaaacgc

SEQ ID NO: 712105 - DNA, 75 bp, synthetic construct
  source 1..75: mol_type = other DNA
aaaaacattttccctgccggtgatgctctaccgtggtgtgttcagaaccggcgaaatttaccaccccggcgatac

SEQ ID NO: 712106 - DNA, 75 bp, synthetic construct
  source 1..75: mol_type = other DNA
tctgatcagggacacacagccaggcgaacgcgccatggcatcagcatcagtcgggtccccggggccagtagtaaa

SEQ ID NO: 712107 - DNA, 75 bp, synthetic construct
  source 1..75: mol_type = other DNA
ttttacaccaacccggacaggcgtaatactcaataataaagaactccctgtcaccatttacaacgtggccccatt

SEQ ID NO: 712108 - DNA, 75 bp, synthetic construct
  source 1..75: mol_type = other DNA
atacagataacgtattgaatgaatgctttaataaccgttgcactctgcaaatatgtccttatggactaaaacagc

SEQ ID NO: 712109 - DNA, 75 bp, synthetic construct
  source 1..75: mol_type = other DNA
acctgctgcggggtggcctgaccagtggaaacaaaaaacagacagaaacgggactcacaaatcccgtaaatgagc

SEQ ID NO: 712110 - DNA, 75 bp, synthetic construct
  source 1..75: mol_type = other DNA
gctgtttggtgacaaaaacaccaaaaatgtggtgttagaaaagagttatacagagtatatggaaggctttactga

SEQ ID NO: 712111 - DNA, 75 bp, synthetic construct
  source 1..75: mol_type = other DNA
gcgaaagagggcctggtggtcgattttattcagcaaacgaacctggatgatttaccagacaaagccagtatcatt

SEQ ID NO: 712112 - DNA, 75 bp, synthetic construct
  source 1..75: mol_type = other DNA
ggcggctggtggacgacccgcaggtaaaacagaccagcaagggtacaccgatgacgctggcgcgtatggcggtat

SEQ ID NO: 712113 - DNA, 75 bp, synthetic construct
  source 1..75: mol_type = other DNA
cggaacggcgacgatgtggttatctgtcctggcgtttggcagacaggccgacgcactggcaaaacaccacaaagg

SEQ ID NO: 712114 - DNA, 75 bp, synthetic construct
  source 1..75: mol_type = other DNA
aaagaccaccagcaagggtacacaaatggcgatggtaagtatggcggtccccctgccatgcagtcaggctgatga

SEQ ID NO: 712115 - DNA, 75 bp, synthetic construct
  source 1..75: mol_type = other DNA
ctttgccatgcagccaggcacaggacggacaggcgacgttatggttatcggttatcgcatttggcaaacaggccg

SEQ ID NO: 712116 - DNA, 75 bp, synthetic construct
  source 1..75: mol_type = other DNA
accaactggcaggacatgagaaaggcaacgtaatcagcgtatccggtgtgatgcaggtcagtcagtggaccggac

SEQ ID NO: 712117 - DNA, 75 bp, synthetic construct
  source 1..75: mol_type = other DNA
cgttctgcctggaaaccgaaaaaggcgcggagatcgtcgtccatatgggtatcgacaccgtagcgctggaaggta

SEQ ID NO: 712118 - DNA, 75 bp, synthetic construct
  source 1..75: mol_type = other DNA
aacaaaattatcgtcaccactattcagaaactcaataacctgatgaaagcagaaagcgacctgcctgtatacaat

SEQ ID NO: 712119 - DNA, 75 bp, synthetic construct
  source 1..75: mol_type = other DNA
gccaaagaaggtctggtggtcgattttattcaacaaacaaacctggatgatttgccagacaaagccagcatcatt

SEQ ID NO: 712120 - DNA, 75 bp, synthetic construct
  source 1..75: mol_type = other DNA
tgatattaccgacgaaagttttgataccagtgcaatgaacagcagcgcgaaggaattcctggattcagccattga

SEQ ID NO: 712121 - DNA, 75 bp, synthetic construct
  source 1..75: mol_type = other DNA
aaagcttattacacgacatttaaaatgctacaggaagaagctgagaagaaatctggcagctataaacgtcttcgt

SEQ ID NO: 712122 - DNA, 75 bp, synthetic construct
  source 1..75: mol_type = other DNA
gacgtcacgatcctggttaatggcttgccgctggtgcaaatcgaactgaaaaagcgcggcgtggcgattcgtgag

SEQ ID NO: 712123 - DNA, 75 bp, synthetic construct
  source 1..75: mol_type = other DNA
attcatatgtgattaccgatgcgattcgtgatgaaaaagtgctcaaattcaaggtggactacaacgatgtgcggc

SEQ ID NO: 712124 - DNA, 75 bp, synthetic construct
  source 1..75: mol_type = other DNA
gcatttattgagaagtttaaaggcgtggggggggcatctttagttacaggcgcccagactcccccttgcctcaat

SEQ ID NO: 712125 - DNA, 75 bp, synthetic construct
  source 1..75: mol_type = other DNA
gcctttaaccagatacatcgttacagcaaagagagttttaacagcgaaaattctctgtttaagtatctgcaactg

SEQ ID NO: 712126 - DNA, 75 bp, synthetic construct
  source 1..75: mol_type = other DNA
gctgtttggtgacaaaaacaccaaaaatgtagtgttagaaaagagttatgcagagtatatggaaggctttactga

SEQ ID NO: 712127 - DNA, 75 bp, synthetic construct
  source 1..75: mol_type = other DNA
atctggcagctataaacgccttcgggtggcaaccatcttctcctttgctgcaaatgaagagcaaagcgccattgg

SEQ ID NO: 712128 - DNA, 75 bp, synthetic construct
  source 1..75: mol_type = other DNA
gctatagccctgttcacagcttcgacagaggaatcactgaaaaaacaccgggaaggggtgaaagaggcgatgatg

SEQ ID NO: 712129 - DNA, 75 bp, synthetic construct
  source 1..75: mol_type = other DNA
gaaacattgcagaaactgaacgcgaagacatggggcgtggagtttgtgcaggacgggagaaggaaatttctggtc

SEQ ID NO: 712130 - DNA, 75 bp, synthetic construct
  source 1..75: mol_type = other DNA
atggcgatggcgagtatggcgattcctcttccgtgcagccaggcagatgacggaacagcgacgatgtggttatca

SEQ ID NO: 712131 - DNA, 75 bp, synthetic construct
  source 1..75: mol_type = other DNA
aaagctgccgaggagatcgggcagctcgtcaccgtcgcacgtgaagaactacagcgccgcaaggccaaagaatca

SEQ ID NO: 712132 - DNA, 75 bp, synthetic construct
  source 1..75: mol_type = other DNA
atggctacaggttcaaaaaacgcaaaatcacaatcactaacagctcggatcccgcatgatgttattgaaggcatg

SEQ ID NO: 712133 - DNA, 75 bp, synthetic construct
  source 1..75: mol_type = other DNA
tcagctcaatcagaaagtgcgttacgagcaaagcgtagccgaagaagcggtagtcgcaccggtggttgaagaaac

SEQ ID NO: 712134 - DNA, 75 bp, synthetic construct
  source 1..75: mol_type = other DNA
gcaggtacggcggcatttgccgttcttggtgtttcactcgctgcccgtctgggtatcggtatcattaaaggcttc

SEQ ID NO: 712135 - DNA, 75 bp, synthetic construct
  source 1..75: mol_type = other DNA
aaccacaaaacgcacaacaaaatattccggaaaatattcccggtggcaactctccggtaactccggatagttgga

SEQ ID NO: 712136 - DNA, 75 bp, synthetic construct
  source 1..75: mol_type = other DNA
gcacctgcagcgcctgcggacggggcaccggcagacactatctggacctttaagggcgatggcggcaaatcgtta

SEQ ID NO: 712137 - DNA, 75 bp, synthetic construct
  source 1..75: mol_type = other DNA
cagtggcgcagcctggcgctgcgccgcgctacaggttgcccggtatgcggaggaagcaatgcagatcctgtttaa

SEQ ID NO: 712138 - DNA, 75 bp, synthetic construct
  source 1..75: mol_type = other DNA
tctacaacgacaaatcctctttaccactgaagatatcgagcgcccgaaatcgcaggtcagccaacagcgattgac

SEQ ID NO: 712139 - DNA, 75 bp, synthetic construct
  source 1..75: mol_type = other DNA
taactgtagattcaatctgtcaatgcaacagtggatatctgggatgccccgggaagtcacctttcagacgggcgg

SEQ ID NO: 712140 - DNA, 75 bp, synthetic construct
  source 1..75: mol_type = other DNA
gaacctgaggtcaccgttgagcataaccacgctaccgcgccaatgacgcgcgctccagcaccggaatatgttccg

SEQ ID NO: 712141 - DNA, 75 bp, synthetic construct
  source 1..75: mol_type = other DNA
gcaaataaagttgctttcgctgaaagaatttttaataaaggcggcgctggtgcaaaaaatcacgcaattgtcgat

SEQ ID NO: 712142 - DNA, 75 bp, synthetic construct
  source 1..75: mol_type = other DNA
cctgttatacctcactcttagcagcagcaaaaaatgccggtgatacagcttcaattccaacccatcgaagcgatt

SEQ ID NO: 712143 - DNA, 75 bp, synthetic construct
  source 1..75: mol_type = other DNA
tgcccggaatgctttggtgatgatgattgcgaaacttgtgactgtagcgggagaatcgaaatcaaggttccagtc

SEQ ID NO: 712144 - DNA, 75 bp, synthetic construct
  source 1..75: mol_type = other DNA
gtcctggcgtttggcagacaagccgacgcgctggcaaagcatcacaaaggcgaactcctgagcgtggcgggtaat

SEQ ID NO: 712145 - DNA, 75 bp, synthetic construct
  source 1..75: mol_type = other DNA
tgaacgtacctggcagcttgacacgcctttatttacgctgcgctttttctccccacaggaaggtattgtcggtgt

SEQ ID NO: 712146 - DNA, 75 bp, synthetic construct
  source 1..75: mol_type = other DNA
ggcgtataaaaatatcccgttctatatgactaaccgtggttatggggtactggtcaatcacccccagtgtgtctc

SEQ ID NO: 712147 - DNA, 75 bp, synthetic construct
  source 1..75: mol_type = other DNA
cactgccatgcagtcaggcacaggacggacaggcgacgttatggctatcggtcatcgcatttggtaagcaggccg

SEQ ID NO: 712148 - DNA, 75 bp, synthetic construct
  source 1..75: mol_type = other DNA
gtcctggcgtttggcagacaggccgatgcactggcaaaacaccagaaaggcgaactggtgagcgtggtgggtaac

SEQ ID NO: 712149 - DNA, 75 bp, synthetic construct
  source 1..75: mol_type = other DNA
agtgcgcgaacggcgcgaccgggcggcaaaaaaggtcagcaggggcaggccactgacgcactgaacagggcaaaa

SEQ ID NO: 712150 - DNA, 75 bp, synthetic construct
  source 1..75: mol_type = other DNA
cactgccttgcagtcagtcggatgacggtcaggcgacgatgtggttatctgtcctggcgtttggcagacaagccg

SEQ ID NO: 712151 - DNA, 75 bp, synthetic construct
  source 1..75: mol_type = other DNA
taatccgctgcacaccatgctcacgcacgcgcgggaaacttgccaggcactggggaaacccgccgatgacgccac

SEQ ID NO: 712152 - DNA, 75 bp, synthetic construct
  source 1..75: mol_type = other DNA
gctggtgcacggcgtatcgttaacccttaaacgcgggcgtgtgctggcgttagtcggcggtagcggcagcgggaa

SEQ ID NO: 712153 - DNA, 75 bp, synthetic construct
  source 1..75: mol_type = other DNA
cgttgagagtgaatatctcgaatactttgttatcgacggaccgacgccgaaagcggtacttgatcgttatacccg

SEQ ID NO: 712154 - DNA, 75 bp, synthetic construct
  source 1..75: mol_type = other DNA
agtgcgagaacggcgcgaccgggcggcaaaaaaggccagcaggggcaggctactgacgcactgaacagggcaaaa

SEQ ID NO: 712155 - DNA, 75 bp, synthetic construct
  source 1..75: mol_type = other DNA
agaacggggaaacgcggcagggctggcaggttattgcagacagcgtaatcagtgcgcgaacggcgcgaccgggcg

SEQ ID NO: 712156 - DNA, 75 bp, synthetic construct
  source 1..75: mol_type = other DNA
gaaggggatggggctcagcttgttggtactgttttgggtggacaatcacctagaatccaaattaatagtcttcaa

SEQ ID NO: 712157 - DNA, 75 bp, synthetic construct
  source 1..75: mol_type = other DNA
tggcatcccctcccgtcaggtgtggcgtgaactccgccgccttgccagccagatggcacgcaacccggaaggccc

SEQ ID NO: 712158 - DNA, 75 bp, synthetic construct
  source 1..75: mol_type = other DNA
ccagaactagcccatgagcgtaaacctagattaatatggttacctccggtaccagttaatttagaagacgtaaac

SEQ ID NO: 712159 - DNA, 75 bp, synthetic construct
  source 1..75: mol_type = other DNA
acatacagcgggatgcgcggggtggtaccggagacgttcacggaccggcagtacagctacagtggcgaggatgaa

SEQ ID NO: 712160 - DNA, 75 bp, synthetic construct
  source 1..75: mol_type = other DNA
ttgagccaatagataagagtcgcactgattcacgaggtagatctcattatagaaactatcgtgcagcagctagag

SEQ ID NO: 712161 - DNA, 75 bp, synthetic construct
  source 1..75: mol_type = other DNA
gagcacgcggcagctttacgaccccggcgggcgactgaagcgcagggagacatacagcgggatgcgcggggtggt

SEQ ID NO: 712162 - DNA, 75 bp, synthetic construct
  source 1..75: mol_type = other DNA
atggacgatagagaaagaggcttagcatttttatttgcaattactttgcctccagtgatggtatggtttctagtt

SEQ ID NO: 712163 - DNA, 75 bp, synthetic construct
  source 1..75: mol_type = other DNA
atcggttgttatggccgctggtcgcctgggtgaaagaaccctcgaatttgtctctaaatcattgggggagattga

SEQ ID NO: 712164 - DNA, 75 bp, synthetic construct
  source 1..75: mol_type = other DNA
gctgacaatgagatgcttaaaatcacattccgtcgttgccataatttcatccatggcaacgaaggcatgccaaag

SEQ ID NO: 712165 - DNA, 75 bp, synthetic construct
  source 1..75: mol_type = other DNA
gagatttttcagagggaaagtgaaactcagagaaagcgaactatcagggagcataaggtatctctttatgaaaat

SEQ ID NO: 712166 - DNA, 75 bp, synthetic construct
  source 1..75: mol_type = other DNA
aaaattgaatatccctatatggaaaaggtcaaagctttcattattaacacacctgatttagacccggcatcccag

SEQ ID NO: 712167 - DNA, 75 bp, synthetic construct
  source 1..75: mol_type = other DNA
cctgctgggtatgggtaagcgcgaccaacgcacgttgttttttatcgacgagctggaatcactggaatatctgcc

SEQ ID NO: 712168 - DNA, 75 bp, synthetic construct
  source 1..75: mol_type = other DNA
taaggcgcatgataacggtcgtgtatatttggaacctgcgaataaaaaaccactcagtcaagtagacatagaggc

SEQ ID NO: 712169 - DNA, 75 bp, synthetic construct
  source 1..75: mol_type = other DNA
ctgaataaaaagtgccgtattgcccaggctccgcgctctttcagcgaacgcataactgatcccaataaacgccct

SEQ ID NO: 712170 - DNA, 75 bp, synthetic construct
  source 1..75: mol_type = other DNA
ggtactgatttgctatctctgacgctcaaccgcctgaagacaattaagcgggataaccgtcgtacttttgccaaa

SEQ ID NO: 712171 - DNA, 75 bp, synthetic construct
  source 1..75: mol_type = other DNA
gcagcatgatcatgctggcgaaaggtaaccgcagtcagcaggttaccgacgcgtgtcataaacacggcggcttct

SEQ ID NO: 712172 - DNA, 75 bp, synthetic construct
  source 1..75: mol_type = other DNA
ctggctatgaaacgccgtgaagaactaggtttaccggcatggctgcagatccacgtaattgaattacctgttgat

SEQ ID NO: 712173 - DNA, 75 bp, synthetic construct
  source 1..75: mol_type = other DNA
gggatagtcatcgtccgtgctggtatgggttccggcaaatctactggattgttacgaccgttaatgcatagctca

SEQ ID NO: 712174 - DNA, 75 bp, synthetic construct
  source 1..75: mol_type = other DNA
cctgaagtacgtgcaatcactacaggggatagtcatcgtccgtgctggtatgggttccggcaaatctactggatt

SEQ ID NO: 712175 - DNA, 75 bp, synthetic construct
  source 1..75: mol_type = other DNA
aactgttttttattaccacagctaaagaaaaaatttagcttttggggttacttgtctctccttaaatatattaaa

SEQ ID NO: 712176 - DNA, 75 bp, synthetic construct
  source 1..75: mol_type = other DNA
gtgccgtttaccgaacatgaattcgcgaccatgggcgatcaacttaaatatctggtgccggacgatatgatctat

SEQ ID NO: 712177 - DNA, 75 bp, synthetic construct
  source 1..75: mol_type = other DNA
ggataacgcgctggcagcgggacgggcagggccgggtgcgcagccggacagacgcgacggggcgcaggacggcgt

SEQ ID NO: 712178 - DNA, 75 bp, synthetic construct
  source 1..75: mol_type = other DNA
ctatgtcaggccttgaggctcacacagctgcaataccactcctgttaagtgatgtgggcggatgttttgaattaa

SEQ ID NO: 712179 - DNA, 75 bp, synthetic construct
  source 1..75: mol_type = other DNA
ttagccctagcactaggcactactgagtcctatctcctgtatggagtatcatcacctgaatcatcccttgtgcag

SEQ ID NO: 712180 - DNA, 75 bp, synthetic construct
  source 1..75: mol_type = other DNA
taacagatgttgtttggtgtgtatcttatagtgatgaaataagtgcgaaagaaaaaataggcataaaaagaaaaa

SEQ ID NO: 712181 - DNA, 75 bp, synthetic construct
  source 1..75: mol_type = other DNA
atgatctggcagcctgagttcacagataaaacactctccaggaaacccggggcggttcagatcgcttctctggcg

SEQ ID NO: 712182 - DNA, 75 bp, synthetic construct
  source 1..75: mol_type = other DNA
gtgaaagatccggctaaccgcgagaaattcgccaaagcctggggcgtggaaagcctgcctgctcataccggttat

SEQ ID NO: 712183 - DNA, 75 bp, synthetic construct
  source 1..75: mol_type = other DNA
tacgtaaagcctttgaagatctggaactggtcatcgttcaggacatctttatgaccaaaaccgcgtcggcggcgg

SEQ ID NO: 712184 - DNA, 75 bp, synthetic construct
  source 1..75: mol_type = other DNA
ggctacattccattctaatgtagaagagtatcataagcttttcaataatgtcgtatcaaaaggttctacggataa

SEQ ID NO: 712185 - DNA, 75 bp, synthetic construct
  source 1..75: mol_type = other DNA
atgttattttaccgtcaacctcgtggggcgaacatgaaggcgtgtttactgcggcggaccgtggcttccagcgct

SEQ ID NO: 712186 - DNA, 75 bp, synthetic construct
  source 1..75: mol_type = other DNA
atgagcaatgccattaacgaaattgataataccgatttagtgttcgtctttgggtataacccagcggattcccac

SEQ ID NO: 712187 - DNA, 75 bp, synthetic construct
  source 1..75: mol_type = other DNA
caatcgacaaacttaccgacgagtatccgatggtgctctcaacggtgcgtgaagttggacactactcttgccgct

SEQ ID NO: 712188 - DNA, 75 bp, synthetic construct
  source 1..75: mol_type = other DNA
gcgccgcctgcataacctgcatataaatctatttgaagatcaggaagcacgggaattattcaaaatttacggggg

SEQ ID NO: 712189 - DNA, 75 bp, synthetic construct
  source 1..75: mol_type = other DNA
taaaactcggcaccagtgtgctaacaggcggatcgcgccgcctgaaccgtgcccatatcgttgaacttgttcgcc

SEQ ID NO: 712190 - DNA, 75 bp, synthetic construct
  source 1..75: mol_type = other DNA
ggtgaaatcacggtagatgaaggggcaactgccgccattctggaacgcggcagctccctgttgccgaaaggcatt

SEQ ID NO: 712191 - DNA, 75 bp, synthetic construct
  source 1..75: mol_type = other DNA
gactatcgcttcaaaacagctgctggcggcggtagggcagagtcgactgattcaactgtgggaacagctgttttc

SEQ ID NO: 712192 - DNA, 75 bp, synthetic construct
  source 1..75: mol_type = other DNA
atgcaaataatcattgattatctttgccatgctgcaaatacaatttttggcatgtatcaacagcagtttctcaaa

SEQ ID NO: 712193 - DNA, 75 bp, synthetic construct
  source 1..75: mol_type = other DNA
gcgccgcctgcgtgacctgcatatgaatatatttgaaaatcaggaagcgtgtgaactattcaagatctacgggga

SEQ ID NO: 712194 - DNA, 75 bp, synthetic construct
  source 1..75: mol_type = other DNA
cggcattgatgacgcactgcgcgcgattgccggtgacagcgtttcaggcctcggaaactggcggcatgagtacca

SEQ ID NO: 712195 - DNA, 75 bp, synthetic construct
  source 1..75: mol_type = other DNA
atcagaagatgttgctaaaaatatcataacagccatcgtaaaaggcgaagtattcgcaacaaaaataacctacta

SEQ ID NO: 712196 - DNA, 75 bp, synthetic construct
  source 1..75: mol_type = other DNA
gtacagtcaagagatatactttctcgacctcatttctggataaaaacaacaaaaatagttatcttatttcatacg

SEQ ID NO: 712197 - DNA, 75 bp, synthetic construct
  source 1..75: mol_type = other DNA
aatggcggattcaccctgacaccgggtattggtgtggagtggagcagccagaaacagaacgactattattatggc

SEQ ID NO: 712198 - DNA, 75 bp, synthetic construct
  source 1..75: mol_type = other DNA
tatactatgaatacgaaagctactgtttttagcttgccatcagatattgttgattcattcaagaaaaatgaaata

SEQ ID NO: 712199 - DNA, 75 bp, synthetic construct
  source 1..75: mol_type = other DNA
gtcatgcgcaaaacatatggctttaataaaaaactggattgggttagcaacgagcaactttccgaattaaccggg

SEQ ID NO: 712200 - DNA, 75 bp, synthetic construct
  source 1..75: mol_type = other DNA
aaccgtaacaagcaacaggctggagtgacagccggaaaatcaaaactggacctgacaaacactgactggatttat

SEQ ID NO: 712201 - DNA, 75 bp, synthetic construct
  source 1..75: mol_type = other DNA
atgtacggaacatgcgaaacgctatgccggtagctggcagcaaagtatacgggagacacgccactgatgctggtt

SEQ ID NO: 712202 - DNA, 75 bp, synthetic construct
  source 1..75: mol_type = other DNA
atgtacggaacatgcgaaacgctatgccggaagctggcagcaaagtatacgggagacacgcctctgatgctggtt

SEQ ID NO: 712203 - DNA, 75 bp, synthetic construct
  source 1..75: mol_type = other DNA
gggaaacacgccgctgatgctgcttatctggtccccggaagagattcaggcactggccgacggtatggaaatttc

SEQ ID NO: 712204 - DNA, 75 bp, synthetic construct
  source 1..75: mol_type = other DNA
atgtacggaacatgcgaaacgctatgccggcagctggcagcaaagtatccgggagacacgcctctgatgctggtt

SEQ ID NO: 712205 - DNA, 75 bp, synthetic construct
  source 1..75: mol_type = other DNA
atgtacggaacatgcgaaacgctatgccggtagctggcagcaaagtatgcgggagacacgccgctgatgctggtt

SEQ ID NO: 712206 - DNA, 75 bp, synthetic construct
  source 1..75: mol_type = other DNA
atgtacggaacatgcgaaacgctatgccggtagctggcagcaaagtatccgggagacacgcccctgatgctggtt

SEQ ID NO: 712207 - DNA, 75 bp, synthetic construct
  source 1..75: mol_type = other DNA
atggcagggcataaacaaccgccagacataccagtatcacctgccactgaatggagaaaatcagccggggaaccg

SEQ ID NO: 712208 - DNA, 75 bp, synthetic construct
  source 1..75: mol_type = other DNA
gttcaaaacaccgaaagagataattgaaaggggtgtgtccttgacccacgatattcagacagtcgttgtatctta

SEQ ID NO: 712209 - DNA, 75 bp, synthetic construct
  source 1..75: mol_type = other DNA
gctgcgtattaatggccatgtactggaagtcactgacggcagactgacacaccgtcgcgatcagcgcacagacag

SEQ ID NO: 712210 - DNA, 75 bp, synthetic construct
  source 1..75: mol_type = other DNA
gccaggtgaccgtcccggctgaactgctggcgtccctgattcagaccgctgaacaggcactgtggaaacgtgaat

SEQ ID NO: 712211 - DNA, 75 bp, synthetic construct
  source 1..75: mol_type = other DNA
gccggttgttgcgtgagcagtatcccgcagaaaccccgctgaacctcattatctggtccccggcggatatcgaag

SEQ ID NO: 712212 - DNA, 75 bp, synthetic construct
  source 1..75: mol_type = other DNA
gcacgcacagagaatcaatgaaaccactgaacgcgcacgtcacaaggcgggtctgttgcaggacaaaggcaatag

SEQ ID NO: 712213 - DNA, 75 bp, synthetic construct
  source 1..75: mol_type = other DNA
atgtacggaacatgcgaaacgctatgccgggagctggcagcaaagtatgcgggagacacgcctctgatgctggtt

SEQ ID NO: 712214 - DNA, 75 bp, synthetic construct
  source 1..75: mol_type = other DNA
aaaacttaggtcatctcaaggcggtcgccgggatgaccggacgcaatatggacccgtatatggggcgggcattcg

SEQ ID NO: 712215 - DNA, 75 bp, synthetic construct
  source 1..75: mol_type = other DNA
gggcattcgtcggtgatgggctggcgacgatgctttctggttctgtcggtggcagcggcgtaaccacctacgccg

SEQ ID NO: 712216 - DNA, 75 bp, synthetic construct
  source 1..75: mol_type = other DNA
atcctggcacgcctggaggacatcccggaagaacagcggattgagtccggtatttcttccgctgcggtgatggag

SEQ ID NO: 712217 - DNA, 75 bp, synthetic construct
  source 1..75: mol_type = other DNA
ggcagttaaaatcgacctctacagagagcggcgtggtcgcgccggatgaacgattgccgtttgctcagacggcag

SEQ ID NO: 712218 - DNA, 75 bp, synthetic construct
  source 1..75: mol_type = other DNA
tgtatggcgtgatgaccaacgttttagggctgggaaaagccgtcgattttactctcgtcagccatgctgcctggt

SEQ ID NO: 712219 - DNA, 75 bp, synthetic construct
  source 1..75: mol_type = other DNA
ggcagcggcgtaaccacctacgccgagaatatcggtgtgatggccgtgacaaaagtctactcgacgctggtgttt

SEQ ID NO: 712220 - DNA, 75 bp, synthetic construct
  source 1..75: mol_type = other DNA
ccctggctgacggtatggaaatttctctgaccggtcatgaaatcaggaccgtcctggcacgcctggaggacatcc

SEQ ID NO: 712221 - DNA, 75 bp, synthetic construct
  source 1..75: mol_type = other DNA
gggagacacgccgctgatgctggttatctggtctccggaagagattcaggcactggctgacggtatggaaatttc

SEQ ID NO: 712222 - DNA, 75 bp, synthetic construct
  source 1..75: mol_type = other DNA
gccgggcgctgatgcgttcgcttcgtgacaaacaggcaaaaaacagcagtgatgaaatgcagagctggacacaga

SEQ ID NO: 712223 - DNA, 75 bp, synthetic construct
  source 1..75: mol_type = other DNA
cgtcccggaatgcgtcacccgccgtcaggcggtggttaatcaggcccgcagcctgctgaaaaacaacacacacga

SEQ ID NO: 712224 - DNA, 75 bp, synthetic construct
  source 1..75: mol_type = other DNA
gtcctggcgtccctgattcagaccgctgaacaggcactgtggaaacgtgagtgggccgcccgtgataacggcctc

SEQ ID NO: 712225 - DNA, 75 bp, synthetic construct
  source 1..75: mol_type = other DNA
gggccgcccgtgataacggccttgccgtcccggaatgtgttacccgccgtcaggcagtgattaatcaggcccgca

SEQ ID NO: 712226 - DNA, 75 bp, synthetic construct
  source 1..75: mol_type = other DNA
gggcggcagtctgtacgttgacggcagcatcattgcgccgcagggatatgaaattgtacgtaaaccggatacccg

SEQ ID NO: 712227 - DNA, 75 bp, synthetic construct
  source 1..75: mol_type = other DNA
ccaccgatttaggcgttggtgtgctggctggcggtgctattaacgctgccggacgtggattaggtgctgcttatc

SEQ ID NO: 712228 - DNA, 75 bp, synthetic construct
  source 1..75: mol_type = other DNA
agcaggccaatgccgtctacgctgacgaagcggcgaaactaaagaataccaggctgaagaatgttctcatgaaag

SEQ ID NO: 712229 - DNA, 75 bp, synthetic construct
  source 1..75: mol_type = other DNA
ggtaaactcggcattggcgatggtacatatcaaccagcgccacgagtaacaacgcagggattagagcaggacttt

SEQ ID NO: 712230 - DNA, 75 bp, synthetic construct
  source 1..75: mol_type = other DNA
atgtccgggttttatcataagcatttcctgaaattactcgatttcacgccagctgaactcaacagcctgctgcag

SEQ ID NO: 712231 - DNA, 75 bp, synthetic construct
  source 1..75: mol_type = other DNA
cagcgtcacaacaatcagcagccacttctgcatccaccgcgaccacgaaagcgtcagaagctgccacctcagtcc

SEQ ID NO: 712232 - DNA, 75 bp, synthetic construct
  source 1..75: mol_type = other DNA
atgtcgctgatgccaacgatagatgatagttatttatcagttagtgttcgcgggtgttcgccgtggtgtgggtat

SEQ ID NO: 712233 - DNA, 75 bp, synthetic construct
  source 1..75: mol_type = other DNA
atgaaacccgacgcacaccaggttaaacagtttctgctcaaccttcaggatacgatttgtcagcagctgaccgcc

SEQ ID NO: 712234 - DNA, 75 bp, synthetic construct
  source 1..75: mol_type = other DNA
cgtccgggccatgatctgcgttacgccattgatgcgagcaaaataaaagatgaactgggctgggtaccgcaggag

SEQ ID NO: 712235 - DNA, 75 bp, synthetic construct
  source 1..75: mol_type = other DNA
agatcgcatcatgaccgaggtggtgaaagctgtatcggatggcgaaaaaatcatgttggccaccgacagctccac

SEQ ID NO: 712236 - DNA, 75 bp, synthetic construct
  source 1..75: mol_type = other DNA
ccagattgatgagcaagacaaggatgaaaagattaaagggactgattatctatatgcttcaaccagaaaccctgc

SEQ ID NO: 712237 - DNA, 75 bp, synthetic construct
  source 1..75: mol_type = other DNA
cgcccgggacatgacctgcgctacgctattgatgccagcaaaattaaaaacgatctgggatgggtgcctcaggaa

SEQ ID NO: 712238 - DNA, 75 bp, synthetic construct
  source 1..75: mol_type = other DNA
gactgttctttgatgacctgaacacgccagacttcgaccactgtttcgcctttatgcaggcggtaggcaaaggct

SEQ ID NO: 712239 - DNA, 75 bp, synthetic construct
  source 1..75: mol_type = other DNA
atcttcgaaaaagactcgacccgtacccgatgctctttcgaagttgccgcatatgaccagggtgctcgtgttact

SEQ ID NO: 712240 - DNA, 75 bp, synthetic construct
  source 1..75: mol_type = other DNA
atcaggttgtttatatgttcttcgccagccgattttcacttaatattggttataaaaagggaaaagaatcgatcc

SEQ ID NO: 712241 - DNA, 75 bp, synthetic construct
  source 1..75: mol_type = other DNA
aatgtggccctcatttcttacgtattctggtcactattcttgttttgagtcttgcattttctttctttggccttt

SEQ ID NO: 712242 - DNA, 75 bp, synthetic construct
  source 1..75: mol_type = other DNA
agtacattgtcaccaccagggtagtaagtgactcagggattgatgataaagataaagtatttgtctttagtcccc

SEQ ID NO: 712243 - DNA, 75 bp, synthetic construct
  source 1..75: mol_type = other DNA
atgatttgattagtgaagtaaaatatgctgaggaagcatccattaaagaatctgaagctgcatccacaaaaaaga

SEQ ID NO: 712244 - DNA, 75 bp, synthetic construct
  source 1..75: mol_type = other DNA
atcatcggatgagcttcgaaatctcttctcaatgagaggtgaagagtctgaatgggatgtgggttttttactggc

SEQ ID NO: 712245 - DNA, 75 bp, synthetic construct
  source 1..75: mol_type = other DNA
aatgtggaccacatttcttacgtatcctggtgaccattttggtcttaagtctggcgttctctttctttggttttt

SEQ ID NO: 712246 - DNA, 75 bp, synthetic construct
  source 1..75: mol_type = other DNA
ctgcgtgactatcaggtgaatagcaaaatgatagccctgaccggtaattcgcaggttaagttcctccactgtctg

SEQ ID NO: 712247 - DNA, 75 bp, synthetic construct
  source 1..75: mol_type = other DNA
ccgccagtattgtctttgatcaggcggaaaaccgtatgcataccatcaaagcagtcatggtcgcgacgctcagca

SEQ ID NO: 712248 - DNA, 75 bp, synthetic construct
  source 1..75: mol_type = other DNA
gggtgtcgatgggggaagcaaaagagaaatgggcagaacgcattgcattactgcgtgattatcaggtgaacagca

SEQ ID NO: 712249 - DNA, 75 bp, synthetic construct
  source 1..75: mol_type = other DNA
acggttatcaatgagacagagagagagtacattgtcaccaccagggtagtaagtgactcagggattgatgataaa

SEQ ID NO: 712250 - DNA, 75 bp, synthetic construct
  source 1..75: mol_type = other DNA
tggtaatattgcatcttcattttactatttcatgctctattatagtaagaaaatagcgcgtaagcatttttccaa

SEQ ID NO: 712251 - DNA, 75 bp, synthetic construct
  source 1..75: mol_type = other DNA
ttaatgaggcttatcaggcttcttgctggaatgatgtggcgtttattccagccacgaatgaaaagcagtatcaag

SEQ ID NO: 712252 - DNA, 75 bp, synthetic construct
  source 1..75: mol_type = other DNA
gatggcggtcaaagtgtggactgggccaatgcacgcccggtgcaggttctgattaatggtgtctggcgaaatgta

SEQ ID NO: 712253 - DNA, 75 bp, synthetic construct
  source 1..75: mol_type = other DNA
cctcaaggcctgttgttgcagagcttggtgatgattctggctggcatttttacagtcagaggaatacggataaca

SEQ ID NO: 712254 - DNA, 75 bp, synthetic construct
  source 1..75: mol_type = other DNA
cgtgcaggatgtgcgttatggttccgaaatgtattacaacccgggaggtaaccagatatcctggacatttcgctc

SEQ ID NO: 712255 - DNA, 75 bp, synthetic construct
  source 1..75: mol_type = other DNA
attcggcagataacatcggtggcgtgtattaccgaccgcttcagaaactgattaacggcacctggtataacgtgg

SEQ ID NO: 712256 - DNA, 75 bp, synthetic construct
  source 1..75: mol_type = other DNA
ccccggcaatatctattcagattttgatctgcgatatgtaaaaaaatctggtgatttgatgaccggggagctgaa

SEQ ID NO: 712257 - DNA, 75 bp, synthetic construct
  source 1..75: mol_type = other DNA
gcggaaactcaattgctttcggggataacgatacaggtataaaacaaaacggcgacggcattctggatgtttatg

SEQ ID NO: 712258 - DNA, 75 bp, synthetic construct
  source 1..75: mol_type = other DNA
aaaccgtgattctgggtgtcgatacccatcttgatattcatgtcggcgctgttatcagtcaggcaggtaaactgc

SEQ ID NO: 712259 - DNA, 75 bp, synthetic construct
  source 1..75: mol_type = other DNA
acgaactggtgaagggctatcgactaaagagatcctgagatgcctaaaacgctacatcgtccgtgagctctatcc

SEQ ID NO: 712260 - DNA, 75 bp, synthetic construct
  source 1..75: mol_type = other DNA
ttaacgcgctgatggcgaccagtggtatgtaccagaacgcgggggagtttgcctggcgggtgggactaccggcaa

SEQ ID NO: 712261 - DNA, 75 bp, synthetic construct
  source 1..75: mol_type = other DNA
tgcatccttcaacgtcattaaagctgtactcaagaccccttcagaaattaattaatggcacctggtataacgcgg

SEQ ID NO: 712262 - DNA, 75 bp, synthetic construct
  source 1..75: mol_type = other DNA
ttcagaacgtaattcatcaggccgcgaccaagttggccgccctggagttcatcgaccaggaaaccgcccggcaga

SEQ ID NO: 712263 - DNA, 75 bp, synthetic construct
  source 1..75: mol_type = other DNA
taatgcttttatggtggtgtactaccaagctgaaacgggccgggcgacacaggctgattttcaagaagcaatgaa

SEQ ID NO: 712264 - DNA, 75 bp, synthetic construct
  source 1..75: mol_type = other DNA
taccggcctgaaacagaatggtgatggcctgctggatgtttatgccaatagcgtgcatgtgttgcgttttcagag

SEQ ID NO: 712265 - DNA, 75 bp, synthetic construct
  source 1..75: mol_type = other DNA
tgtgtgacgcggtgaactttctcgttgaaaaatacgcgctggtgcgtaccgaccagccccggttcagcacttgtc

SEQ ID NO: 712266 - DNA, 75 bp, synthetic construct
  source 1..75: mol_type = other DNA
gccttgagttggcaatgacccttaagtatgagattcgggctgacgaccatcaggctctattgttaactgggccag

SEQ ID NO: 712267 - DNA, 75 bp, synthetic construct
  source 1..75: mol_type = other DNA
cttttaccttatctgacagaaaacacagaaaaagacgttgtggcgctgttattttgcgccccgtctgccgacgag

SEQ ID NO: 712268 - DNA, 75 bp, synthetic construct
  source 1..75: mol_type = other DNA
atgaatcctttccttggtttatcaaacgtgcgcacagtccatccagagggatttacagtgtacatataaacccat

SEQ ID NO: 712269 - DNA, 75 bp, synthetic construct
  source 1..75: mol_type = other DNA
cgatatcctccgggcacgccgggcaaccggcctgatgacccgcgataactacagaacggtaaataacattacacg

SEQ ID NO: 712270 - DNA, 75 bp, synthetic construct
  source 1..75: mol_type = other DNA
atggcctcacactgaatgacacaccttttgccgatgaacgtgtgattgagcagcatattgaggcaggcatttcac

SEQ ID NO: 712271 - DNA, 75 bp, synthetic construct
  source 1..75: mol_type = other DNA
tgaatgtggcaaccggggatggtctgtttctgcgtcaggacaggaatctttcggatgtggaagacaaagatgagg

SEQ ID NO: 712272 - DNA, 75 bp, synthetic construct
  source 1..75: mol_type = other DNA
tttcgtttccagaatggtgtggcgatagcgttaaaaaatattcaggccggaaatgctaaaaaattcacgttatcc

SEQ ID NO: 712273 - DNA, 75 bp, synthetic construct
  source 1..75: mol_type = other DNA
cgtcagactacggaaactttgatgcccgttaccagaccaaaacaggcggcgtgcaggatgtgcgttatggttccg

SEQ ID NO: 712274 - DNA, 75 bp, synthetic construct
  source 1..75: mol_type = other DNA
cccttctgctggcgagtttttatcactcgccaggcaattttcaggcgcatttccgttgccagaggtgggacgaat

SEQ ID NO: 712275 - DNA, 75 bp, synthetic construct
  source 1..75: mol_type = other DNA
gggaagaatgtcccgcatgatctccagccagctttcgctggccgtgagtaaaatgcagctccctgcaaaaccggc

SEQ ID NO: 712276 - DNA, 75 bp, synthetic construct
  source 1..75: mol_type = other DNA
ttccgttttcagaatggcgcgttacaaagtaaccgggcagtgaatgtttcagggcgggtaacaccaactgattat

SEQ ID NO: 712277 - DNA, 75 bp, synthetic construct
  source 1..75: mol_type = other DNA
atgttgcaagggcgattaagcgcaccacggcaacgtatgctggaagtcgtgcgcggcttaagcggcgtgtctgat

SEQ ID NO: 712278 - DNA, 75 bp, synthetic construct
  source 1..75: mol_type = other DNA
agagtacatatgtacgttttaacagcgggttaaatttactggggtggcaactgcattctgatgccagtttcagta

SEQ ID NO: 712279 - DNA, 75 bp, synthetic construct
  source 1..75: mol_type = other DNA
aatattggcgttgtcggccagggaagccagttatttattcgcaccaatgaagtaccgccatcggttaatgtggca

SEQ ID NO: 712280 - DNA, 75 bp, synthetic construct
  source 1..75: mol_type = other DNA
atgcagatgttgcctaactcgaaacaaaattttacgccacgggtgcaggggattgctcagagtaatgcgctggta

SEQ ID NO: 712281 - DNA, 75 bp, synthetic construct
  source 1..75: mol_type = other DNA
ttgatgaactggaaagtggttatgttccgccggaaaactgggaacggggtattaatgctttttatacctcttatt

SEQ ID NO: 712282 - DNA, 75 bp, synthetic construct
  source 1..75: mol_type = other DNA
attaatgcggtttacacctcttattatgtgagtcagtattacagcgactataaagcgtcgggaaatagcaaaagt

SEQ ID NO: 712283 - DNA, 75 bp, synthetic construct
  source 1..75: mol_type = other DNA
cggtaaatatgaaattagcgttaaagataatccgcaagaaacgtgtttatcgagggatattatcaaacggttagg

SEQ ID NO: 712284 - DNA, 75 bp, synthetic construct
  source 1..75: mol_type = other DNA
ttgggcgtatgaaatttgaaggccagaagagagttaaagacctgcttgatggcttatcacaagcgcaaggtaact

SEQ ID NO: 712285 - DNA, 75 bp, synthetic construct
  source 1..75: mol_type = other DNA
tttccaatattcgtttaggctttttacgtcgggcgaaacatatttatgctttaagcaaatggctgcgggattatc

SEQ ID NO: 712286 - DNA, 75 bp, synthetic construct
  source 1..75: mol_type = other DNA
actggtgccgcgtgcgcagaatctgccgctgttcttttcagaggggacctggatcgccaccatcaacgatcccac

SEQ ID NO: 712287 - DNA, 75 bp, synthetic construct
  source 1..75: mol_type = other DNA
aagaaggggatgtttcagcgataagatctctcatcaaagcagatgatgcttttattcttgggtgcgctgaactga

SEQ ID NO: 712288 - DNA, 75 bp, synthetic construct
  source 1..75: mol_type = other DNA
cgccaccagcagatctataggttcagaggcgcaaacaacgcccttgatagcaaagagctcatgaacgccgaccaa

SEQ ID NO: 712289 - DNA, 75 bp, synthetic construct
  source 1..75: mol_type = other DNA
accttcaggcaacaacatatccaaagtgaaatgtttttcttttgtcgtaatgacaaaatggataagggatggctg

SEQ ID NO: 712290 - DNA, 75 bp, synthetic construct
  source 1..75: mol_type = other DNA
gaacacgcgtattggcgcaatttcagtcgatgcaactaaatcgcacagtaagcaagacaatggtgatgtgtttga

SEQ ID NO: 712291 - DNA, 75 bp, synthetic construct
  source 1..75: mol_type = other DNA
acagcggcgagctctatattgattcagaatatggcttaccgcagcagcggctgatggggaaggtgcgagcctatg

SEQ ID NO: 712292 - DNA, 75 bp, synthetic construct
  source 1..75: mol_type = other DNA
gattgcgcagagtaacgcgctggtaaccattgaacaaaacggttttattgtttatcagaaggaggttccacctgg

SEQ ID NO: 712293 - DNA, 75 bp, synthetic construct
  source 1..75: mol_type = other DNA
ggattatcaggaacagtagggagtcgggatcagttcaattatggtgtcaacctgagtcatcaacatcagggaaat

SEQ ID NO: 712294 - DNA, 75 bp, synthetic construct
  source 1..75: mol_type = other DNA
gatgaagtcagaaagctcgcattaaaatactggggaccagcttcaaacagttcaccatcaaaaacatttgcactc

SEQ ID NO: 712295 - DNA, 75 bp, synthetic construct
  source 1..75: mol_type = other DNA
gatgcatcacttgttgccagaacatcaacggaaacacgtgcgcgaaatattgcatttaactttatcgtgagggct

SEQ ID NO: 712296 - DNA, 75 bp, synthetic construct
  source 1..75: mol_type = other DNA
tgatggtcgtggtgtagatagtggacgtggattacttagtacgcagtctgacctgatgaaacaatttactttgca

SEQ ID NO: 712297 - DNA, 75 bp, synthetic construct
  source 1..75: mol_type = other DNA
aggggcgagcaaacaaagtgattttgtccaggcgggttatcagtatggttttaataatttattgacgctgtatgg

SEQ ID NO: 712298 - DNA, 75 bp, synthetic construct
  source 1..75: mol_type = other DNA
cattaacaccgataacttcgccagtggaaagcaatgtttaacatttgagcaacttgttcagggcgggagttatac

SEQ ID NO: 712299 - DNA, 75 bp, synthetic construct
  source 1..75: mol_type = other DNA
gcgccgggaatcaaagatgcttatgtcaatgggcaaaaatatcgtacaacaaactgtaatggtgtggtggtgtac

SEQ ID NO: 712300 - DNA, 75 bp, synthetic construct
  source 1..75: mol_type = other DNA
agaatcatcatgaagagaaacgttttaatatttttatatcgattccctttgattggggtgatgacgttacgacgc

SEQ ID NO: 712301 - DNA, 75 bp, synthetic construct
  source 1..75: mol_type = other DNA
tctaactcaacgacgtttgatgatcaggggcttgcctcaaacaatacaggaatatcgggaacggttgggagccgc

SEQ ID NO: 712302 - DNA, 75 bp, synthetic construct
  source 1..75: mol_type = other DNA
gattgcgcagagtaacgcgctggtaactattgaacaaaacggttttattgtttatcagaaggaggttccgccagg

SEQ ID NO: 712303 - DNA, 75 bp, synthetic construct
  source 1..75: mol_type = other DNA
ctgttgtgggtggcgtggatacacataaagatctgcacgttgccgcagccgtagatcagaacaataaagtctttt

SEQ ID NO: 712304 - DNA, 75 bp, synthetic construct
  source 1..75: mol_type = other DNA
gtctgagtgccgtacttgccgcaagggaagcagaaggtcgtcagatggccagcctcttcgaaccggatgtcccgg

SEQ ID NO: 712305 - DNA, 75 bp, synthetic construct
  source 1..75: mol_type = other DNA
atgctgccggccggcatgaacgaggacggtgtcatcgaggacatgcaggcgtatgacgcctggctggcagatgag

SEQ ID NO: 712306 - DNA, 75 bp, synthetic construct
  source 1..75: mol_type = other DNA
gtttaattaccattggaagcttatgggttattggcgatatcattatcggaattttagtatttcttactaaaccaa

SEQ ID NO: 712307 - DNA, 75 bp, synthetic construct
  source 1..75: mol_type = other DNA
ttttatattatttaatatttttatgatctatacgcttttagttggactgggaggcactagtgaaataataaataa

SEQ ID NO: 712308 - DNA, 75 bp, synthetic construct
  source 1..75: mol_type = other DNA
tgctgcgcgccatccgcgacgcagagcacgcacagagaatcagtgaaaccactaaacatgctcgcaaaaaaatca

SEQ ID NO: 712309 - DNA, 75 bp, synthetic construct
  source 1..75: mol_type = other DNA
gcagcgtcgtgaagaggtgaacattaatgtgcaccgggagcgtggggaggatgttgagccgggagatgatttctg

SEQ ID NO: 712310 - DNA, 75 bp, synthetic construct
  source 1..75: mol_type = other DNA
accgtcggagaaaactctgttattggcgcgggcagtgtcgtaacaaaagacattccaccaaatgttgttgctgca

SEQ ID NO: 712311 - DNA, 75 bp, synthetic construct
  source 1..75: mol_type = other DNA
atgaacatgccaatgaccgaaagagtaaaagcaggaaagttatttaccgatatgtgcgaaggtttacctgaaaaa

SEQ ID NO: 712312 - DNA, 75 bp, synthetic construct
  source 1..75: mol_type = other DNA
cagcagatgcagcgtcgtgaagaggtgaacattaatgtgcaccgggagcgcggggaggatgttgagccgggagat

SEQ ID NO: 712313 - DNA, 75 bp, synthetic construct
  source 1..75: mol_type = other DNA
ttacgagaccgtcatcaccgccgggtcatccactgtctttatcgatggtctccccgcagcccgccagggagatcc

SEQ ID NO: 712314 - DNA, 75 bp, synthetic construct
  source 1..75: mol_type = other DNA
agtgttccggcaggggggatcgagcaggagctgaaaatgaaaccggaagaagagatggaacagcaactgccaccc

SEQ ID NO: 712315 - DNA, 75 bp, synthetic construct
  source 1..75: mol_type = other DNA
tattcctgatcatctggttcggctacaaactgattaaaggaacccacttcgtacgctacagcgaaatgaagttcc

SEQ ID NO: 712316 - DNA, 75 bp, synthetic construct
  source 1..75: mol_type = other DNA
tggccaaactcattaccatcgccgggccgcagggctttatggatgccacgctctggcagcacttaggtgcaagtc

SEQ ID NO: 712317 - DNA, 75 bp, synthetic construct
  source 1..75: mol_type = other DNA
cacctgcttacagcttagatataattgtgagtataatacaaatttctttacgtatttaatatctaacccaaacag

SEQ ID NO: 712318 - DNA, 75 bp, synthetic construct
  source 1..75: mol_type = other DNA
tctaaaaccttgggggaaatgatgtatctgattattacttcagaaaaaatgcataacaatcaaaagacatatctt

SEQ ID NO: 712319 - DNA, 75 bp, synthetic construct
  source 1..75: mol_type = other DNA
atgagaacgatgctgtcgctacggcagagattaaagtcggcgataacgacaacctttctgcgctggcggcgattc

SEQ ID NO: 712320 - DNA, 75 bp, synthetic construct
  source 1..75: mol_type = other DNA
tcatactatcctgtctctgtgccggacggacatatgcagagtccgcaggccagacgccctatccggaaaaaagcc

SEQ ID NO: 712321 - DNA, 75 bp, synthetic construct
  source 1..75: mol_type = other DNA
ttttcaaaagggtattttggctttgacatattaggggctattccatttcatcgtccaacaaaatgggtgcagtac

SEQ ID NO: 712322 - DNA, 75 bp, synthetic construct
  source 1..75: mol_type = other DNA
ctaaagaaaatccattgcagattgttggcaccatcaacgctaatcatgcgctgttggcgcagcgtgccggatatc

SEQ ID NO: 712323 - DNA, 75 bp, synthetic construct
  source 1..75: mol_type = other DNA
acgcatcgtcaggcattggcggccttgctgttcttctacggcaaggtgctgtgcacggatctgccctggcttcag

SEQ ID NO: 712324 - DNA, 75 bp, synthetic construct
  source 1..75: mol_type = other DNA
gcgacgacggtgattgccggtctgtgcttcctgacctccatgtttggcaaccagacggtatacctgtggctgctg

SEQ ID NO: 712325 - DNA, 75 bp, synthetic construct
  source 1..75: mol_type = other DNA
agcggcgttgcgcttcccgacgcccttgagcggaagtatccgcgcgggctctgttgcaaaaatcgtgaagcttga

SEQ ID NO: 712326 - DNA, 75 bp, synthetic construct
  source 1..75: mol_type = other DNA
gaccccggatgaagtggttcgcatcctcggttttctggaaggcgagcatcgtttgttcgcccggcactgttgcaa

SEQ ID NO: 712327 - DNA, 75 bp, synthetic construct
  source 1..75: mol_type = other DNA
cgctggggctgcccgatctcggtatttctacccttgatgatgtgctgaccgacattcgccgtatcaccgacgttt

SEQ ID NO: 712328 - DNA, 75 bp, synthetic construct
  source 1..75: mol_type = other DNA
ttctggctgaaattcgtgcggaagcacgcaacgaggggattaactataccgccagccgtcttgctgctgcgttca

SEQ ID NO: 712329 - DNA, 75 bp, synthetic construct
  source 1..75: mol_type = other DNA
acctggctgtctatatcggcattgtttatgcctacgtaccgtttatggtactgccaatttataccgccttgacgc

SEQ ID NO: 712330 - DNA, 75 bp, synthetic construct
  source 1..75: mol_type = other DNA
cagtcgttacaggtagcggtgatttcgactatttgttgtttactgatcggctatccgctggcgtgggcggtggcg

SEQ ID NO: 712331 - DNA, 75 bp, synthetic construct
  source 1..75: mol_type = other DNA
tcatgaacagcacggaaaacatgccctttatcgatatccagtgccgcaagttctttaccatcaaaagtcgcatcg

SEQ ID NO: 712332 - DNA, 75 bp, synthetic construct
  source 1..75: mol_type = other DNA
aaggctttaatattattgccactgccaatacccgcgatcgcggcgtcaatgaaatgagtgctgcgctaaagcgtc

SEQ ID NO: 712333 - DNA, 75 bp, synthetic construct
  source 1..75: mol_type = other DNA
agagataacgcgtacaccgctggaagtacaagactgtctgttaggtatgctttctgacagggtgatgacggtgcc

SEQ ID NO: 712334 - DNA, 75 bp, synthetic construct
  source 1..75: mol_type = other DNA
accagggaacatattcccggctggctatccgtaatgctgaaggtcagtgcgctggtgatgccggaacacagctta

SEQ ID NO: 712335 - DNA, 75 bp, synthetic construct
  source 1..75: mol_type = other DNA
gccggacaccaatgcgcctctcttacatcgagaaaaagaaaggccgccagacgactcatatcgtattttccttcc

SEQ ID NO: 712336 - DNA, 75 bp, synthetic construct
  source 1..75: mol_type = other DNA
aaatcgactggatcatggagcgctaccagctacctcaaagttaccaacgtatgccggattttcgccggcgtttcc

SEQ ID NO: 712337 - DNA, 75 bp, synthetic construct
  source 1..75: mol_type = other DNA
gtgatgtgagaaatgaaatcagcgacgggcggcgaatcgggcgttaccggctgaattatgccgatgtccgggatt

SEQ ID NO: 712338 - DNA, 75 bp, synthetic construct
  source 1..75: mol_type = other DNA
atttacagtgtacatataaacccatatctcattccctttttcatcgggctacaaaaccggtttacgcagttccgg

SEQ ID NO: 712339 - DNA, 75 bp, synthetic construct
  source 1..75: mol_type = other DNA
ccctggtttatcaaacgtgcgcacagtccatccagagggctttacagtgtacatatcaacccatatctcattccc

SEQ ID NO: 712340 - DNA, 75 bp, synthetic construct
  source 1..75: mol_type = other DNA
atccctgtgtcagtaccgtaagccggatggctcaggcatcgtctctctgaaaattgactggatcatagagcgtta

SEQ ID NO: 712341 - DNA, 75 bp, synthetic construct
  source 1..75: mol_type = other DNA
tcgcggcgtcaatgaaatgagtgccgcgctaaagcgtcgcttcgattttgaaactgtctttccgattatggattt

SEQ ID NO: 712342 - DNA, 75 bp, synthetic construct
  source 1..75: mol_type = other DNA
gaaggttcgcgcgatgtggcgctgcccagcctgtttaacggtcagtgggtggtgggccatagcgaaaacttctct

SEQ ID NO: 712343 - DNA, 75 bp, synthetic construct
  source 1..75: mol_type = other DNA
ggccagatttacggagcgcaggcaggaaactgaaaccgacctgcaacgcgccatccgttactaccttgaggcaga

SEQ ID NO: 712344 - DNA, 75 bp, synthetic construct
  source 1..75: mol_type = other DNA
caatcaggatctttattagcgttaaagccggcaatgataccaataacgccattacagttaattatttagatagcg

SEQ ID NO: 712345 - DNA, 75 bp, synthetic construct
  source 1..75: mol_type = other DNA
gaaggttcgcgcgacgtggcgctgcccagcctgtttaacggtcagtgggtagtgggtcatagcgaaaacttctct

SEQ ID NO: 712346 - DNA, 75 bp, synthetic construct
  source 1..75: mol_type = other DNA
tttccgcaatcggcatgtctatcttcctgcaaaactacgtcagcctgaccgaaggttcgcgcgacgtggcgctgc

SEQ ID NO: 712347 - DNA, 75 bp, synthetic construct
  source 1..75: mol_type = other DNA
tgatctggattgtcaccttcctcgccatgctggcgctgacgattttcattcgctattcccgtatggggcgcgcct

SEQ ID NO: 712348 - DNA, 75 bp, synthetic construct
  source 1..75: mol_type = other DNA
gtccgcgcctggtttttagcgaatcgcgcaggtgagccagccgacctggtggactgcattgccggaaccatcgtc

SEQ ID NO: 712349 - DNA, 75 bp, synthetic construct
  source 1..75: mol_type = other DNA
atggttacgctttggggaaattatgaggggatctctcagggcggggcatctaccaccgaagatcaaatcaagtat

SEQ ID NO: 712350 - DNA, 75 bp, synthetic construct
  source 1..75: mol_type = other DNA
tgacgcggtactggaattactggtccgcaccttccgcgatctgcgtgccaacggcgaaaagaaaacgtcaatgga

SEQ ID NO: 712351 - DNA, 75 bp, synthetic construct
  source 1..75: mol_type = other DNA
attacagttaattattcagatagcgtttgtgcgacaagacattaccattcgacgaaaataaactcaggtggttga

SEQ ID NO: 712352 - DNA, 75 bp, synthetic construct
  source 1..75: mol_type = other DNA
atgatttgcgccggatcgtgcaaacgctgacacaacgcggcgtgcatatcgaattcgtcaaggaacacctcagtt

SEQ ID NO: 712353 - DNA, 75 bp, synthetic construct
  source 1..75: mol_type = other DNA
gtggcagtcgccatggataatgcaattttagaaaacatcttgcggcaagtgcggccgctcattggtcagggtaaa

SEQ ID NO: 712354 - DNA, 75 bp, synthetic construct
  source 1..75: mol_type = other DNA
aatggtcagggaattaatccgaatatcagcatcgcgctgggcgggattatcgcctgtgggctggtttataccgtc

SEQ ID NO: 712355 - DNA, 75 bp, synthetic construct
  source 1..75: mol_type = other DNA
tgtgtggaaggtgaggtgtttgacgtggcagtggatatccgtcgttcatcacctacctttggtaaatgggttgga

SEQ ID NO: 712356 - DNA, 75 bp, synthetic construct
  source 1..75: mol_type = other DNA
cgaataattattacaataaagaaaatgaaagaaatattatttggaatgataatacaattgacattgattggcccg

SEQ ID NO: 712357 - DNA, 75 bp, synthetic construct
  source 1..75: mol_type = other DNA
atgaatgtaattaaaactgaaattcctgatgtattaattttggaaccggaagtttttggtgatgagcgcggtttt

SEQ ID NO: 712358 - DNA, 75 bp, synthetic construct
  source 1..75: mol_type = other DNA
gaccagccgggattcagcgcaggagccccatcgcagttaatcaacagcattgatattctccgggctcgcagggcg

SEQ ID NO: 712359 - DNA, 75 bp, synthetic construct
  source 1..75: mol_type = other DNA
ctctttcctgcgcaaaaaacaggaagccgatcgccagaaaggcaaaaagagctggcaggctgaacgctacgcgcg

SEQ ID NO: 712360 - DNA, 75 bp, synthetic construct
  source 1..75: mol_type = other DNA
caacgaactactatgctcctggtcatcagcaagcaattatttacaatgatcctattttaaacatcgattggcctt

SEQ ID NO: 712361 - DNA, 75 bp, synthetic construct
  source 1..75: mol_type = other DNA
tgcgtctgcttcaaaagatgaggcgaccagacaggcatcagcagcgaaaggcagcgccacgacggcatccacgaa

SEQ ID NO: 712362 - DNA, 75 bp, synthetic construct
  source 1..75: mol_type = other DNA
acgtggtgaacaggggatacaggggccagttggtgcaaccggaccggtggggccgcgaggagagcagggtattca

SEQ ID NO: 712363 - DNA, 75 bp, synthetic construct
  source 1..75: mol_type = other DNA
ctggcaaatgtcggttggtttaattgctcaggatgcacaaaaagcattgcctgaactggtaactgaagacgacga

SEQ ID NO: 712364 - DNA, 75 bp, synthetic construct
  source 1..75: mol_type = other DNA
gtcagttgtggatacctgaaggatttgcgcatggatttttggtgctgagtgaaacggctgagtttgtttataaaa

SEQ ID NO: 712365 - DNA, 75 bp, synthetic construct
  source 1..75: mol_type = other DNA
tccagacaaggaagttgaagaggcggcaaaaacagttgttcatgccgctacagaagcaattattttgaagagcct

SEQ ID NO: 712366 - DNA, 75 bp, synthetic construct
  source 1..75: mol_type = other DNA
atattgagatttctcatcaaaaatacttgaccaattaccatgagaaaactaaattaacatctatcaagacaccgc

SEQ ID NO: 712367 - DNA, 75 bp, synthetic construct
  source 1..75: mol_type = other DNA
cgaactggttattggaaccaaactgtccgcaagtctgaacggtaatgcattaacagcaacaaagctgcaaacgcc

SEQ ID NO: 712368 - DNA, 75 bp, synthetic construct
  source 1..75: mol_type = other DNA
ctgtggcgcgcatgtgatttacctgcgtcgtctggcggtaagtaaatatccggttgaacggatggtgaccctgga

SEQ ID NO: 712369 - DNA, 75 bp, synthetic construct
  source 1..75: mol_type = other DNA
cgccggaagagagcggattctatgcccgtatggtcagcaaaggtcgtgcaccgctgtaccctgatgatattttat

SEQ ID NO: 712370 - DNA, 75 bp, synthetic construct
  source 1..75: mol_type = other DNA
gcgggctacattatcaattagaaccttatgcacaaggaaaattggtgcgctgcgttgttggtgaagtttttgatg

SEQ ID NO: 712371 - DNA, 75 bp, synthetic construct
  source 1..75: mol_type = other DNA
ccgcatatggccaacggcctgattcgtatcagtcacacacatcagacactgattgaccagctgcgccactacccc

SEQ ID NO: 712372 - DNA, 75 bp, synthetic construct
  source 1..75: mol_type = other DNA
gtcatcattatggacagtatcgaccaggcttatccgatgctggaagccatcaaggctgaactggagtttaacccc

SEQ ID NO: 712373 - DNA, 75 bp, synthetic construct
  source 1..75: mol_type = other DNA
aaatgaactttcgcaagttattcttgaggttcatattcctgaaggtatagggaatgttgatgagaaatggaaaat

SEQ ID NO: 712374 - DNA, 75 bp, synthetic construct
  source 1..75: mol_type = other DNA
tcgaagtctagtaaaggtgttttacgcgggctgcattatcagttagaaccttatgcgcaagggaaattggtacgt

SEQ ID NO: 712375 - DNA, 75 bp, synthetic construct
  source 1..75: mol_type = other DNA
tcgatgacatttgtttcaggtggttccagtggtgctccgggaagtggatcacctgattattctaaatacagtgtt

SEQ ID NO: 712376 - DNA, 75 bp, synthetic construct
  source 1..75: mol_type = other DNA
atgtctggaaatataggggcaaatccaacttccgagtcactggcggcaacaccaaaagccgttaaggccgcgtat

SEQ ID NO: 712377 - DNA, 75 bp, synthetic construct
  source 1..75: mol_type = other DNA
gtgaaggtcgccatccgctgtatcaaaaactgattgccgcagcgccgaccgcagtcgcgccggaagaaagcggat

SEQ ID NO: 712378 - DNA, 75 bp, synthetic construct
  source 1..75: mol_type = other DNA
ctcacccggttactggaccagcactacggcctcacactgaatgacacaccgttggccgatgaacgtgtgattgag

SEQ ID NO: 712379 - DNA, 75 bp, synthetic construct
  source 1..75: mol_type = other DNA
atgaacgtaattaaaacaaaaatcccagatgtactgatttttgaaccgaaagtttttagtgatgagcgtggtttc

SEQ ID NO: 712380 - DNA, 75 bp, synthetic construct
  source 1..75: mol_type = other DNA
cagcaatactttgtggtggtacgtatcgtgccagaagtgatgctttttacgatgccagtaactcttcgccattag

SEQ ID NO: 712381 - DNA, 75 bp, synthetic construct
  source 1..75: mol_type = other DNA
tatcaaagcgggcaacgttatccgctggagatgattggcgattttaactggccttttacaaagggtgtcatctaa

SEQ ID NO: 712382 - DNA, 75 bp, synthetic construct
  source 1..75: mol_type = other DNA
cagacaggcgtcagcagcgaagggcagcgccacgacggcatccacgaaggcgacagaggcagctggcagtgcgac

SEQ ID NO: 712383 - DNA, 75 bp, synthetic construct
  source 1..75: mol_type = other DNA
gccgcttatccgtcaggcgtgatccctgatatgcgtggctggacgattaagggcaaacccgccagtggtcgtgcc

SEQ ID NO: 712384 - DNA, 75 bp, synthetic construct
  source 1..75: mol_type = other DNA
tccgacgtttgattgaaatacttaagaaaaccgacagaatccatttgaaagacgcggcacgaatgctggaagttt

SEQ ID NO: 712385 - DNA, 75 bp, synthetic construct
  source 1..75: mol_type = other DNA
agcagcgtctgtatattctgcaagagcgcattaatcagcaagcgatggcatggagccgccggatgctcggcacca

SEQ ID NO: 712386 - DNA, 75 bp, synthetic construct
  source 1..75: mol_type = other DNA
atgttacagccccccgacgcagccactggtggtggacagtgccgggatgcctggcaatggtgttactgaacgcag

SEQ ID NO: 712387 - DNA, 75 bp, synthetic construct
  source 1..75: mol_type = other DNA
tggagaacgttttcggacaatataccgccatcagcgccgtacaggatcgtacaaaactggttcaggatctgcaaa

SEQ ID NO: 712388 - DNA, 75 bp, synthetic construct
  source 1..75: mol_type = other DNA
ggcacaaatgacagtatcagtcagcttccacattaaaccttcagaagctggcgcagtttatacaacctacaacac

SEQ ID NO: 712389 - DNA, 75 bp, synthetic construct
  source 1..75: mol_type = other DNA
tcgaaaaatcttccaccagaaagctacccagttggcgcaccaatcccgtggccatcagataccgttccgtctggt

SEQ ID NO: 712390 - DNA, 75 bp, synthetic construct
  source 1..75: mol_type = other DNA
agtacgaatgcacagataattttggactttaaaaatggacgaggttattactgttcacatccatttatttcaagt

SEQ ID NO: 712391 - DNA, 75 bp, synthetic construct
  source 1..75: mol_type = other DNA
cctgtagtctttcgccgaactggtggtggcacagatgaattagcctcacgagtggttatcaccacttattcctca

SEQ ID NO: 712392 - DNA, 75 bp, synthetic construct
  source 1..75: mol_type = other DNA
ggcgaagtgctgcttcacggcgcaaatttcgatgaagcgaaagcgaaagcgatcgaactgtcacagcagcagggt

SEQ ID NO: 712393 - DNA, 75 bp, synthetic construct
  source 1..75: mol_type = other DNA
gcctctacagtttcgaattcccggaatcgccgggcgcgctgctgcgcttcctcaacacgctgggtacgcactgga

SEQ ID NO: 712394 - DNA, 75 bp, synthetic construct
  source 1..75: mol_type = other DNA
tggtgatcgccgggcaaggcacgctggcgctggaactgctccagcaggacgcccatctcgaccgcgtatttgtac

SEQ ID NO: 712395 - DNA, 75 bp, synthetic construct
  source 1..75: mol_type = other DNA
ggcagcttcctgaagttctgccagctgcttggcgggcgctcggtcaccgagttcaactaccgctttgccgatgcc

SEQ ID NO: 712396 - DNA, 75 bp, synthetic construct
  source 1..75: mol_type = other DNA
aaagagcgtatccgacgtttgatggaactgcttaagaaaaccgacagaatccatttgaaagacgcagcgcgaatg

SEQ ID NO: 712397 - DNA, 75 bp, synthetic construct
  source 1..75: mol_type = other DNA
gcttccctggtgaaaccaccgaagacttcgagaaaacgatgaagctgattgccgacgtcaatttcgacatgagct

SEQ ID NO: 712398 - DNA, 75 bp, synthetic construct
  source 1..75: mol_type = other DNA
atcaccgggcgcgctgctgcgcttcctcaacacgctgggtacgcactggaatatctctttgttccattatcgcag

SEQ ID NO: 712399 - DNA, 75 bp, synthetic construct
  source 1..75: mol_type = other DNA
aagtgatcgccgtagaagcggaagactccgcctgcctgaaagcggcgatggatgcggggtatccggttgatctgc

SEQ ID NO: 712400 - DNA, 75 bp, synthetic construct
  source 1..75: mol_type = other DNA
aaacaactgatgccgcaaatcaaagtgatcgcggtagaagcggaagattcagcctgcctgaaagcggcactggat

SEQ ID NO: 712401 - DNA, 75 bp, synthetic construct
  source 1..75: mol_type = other DNA
cgctacaaaaaatggaaaaactctcgtcgcgtctcgataacgtgattctggtgaaacgcgaagaccgtcagccag

SEQ ID NO: 712402 - DNA, 75 bp, synthetic construct
  source 1..75: mol_type = other DNA
cgaactttgacgaagcaaaagcgaaagcgatcgaactgtcacagcagcagggcttcacctgggtgccgccgttcg

SEQ ID NO: 712403 - DNA, 75 bp, synthetic construct
  source 1..75: mol_type = other DNA
agcttcctgaagttctgccagttgcttggcgggcgttcggtcaccgagttcaactaccgttttgctgatgcgaaa

SEQ ID NO: 712404 - DNA, 75 bp, synthetic construct
  source 1..75: mol_type = other DNA
aacggctggcgcatattctttccggtgctaacgtgaactttcacggcctgcgctacgtctcggaacgttgtgagc

SEQ ID NO: 712405 - DNA, 75 bp, synthetic construct
  source 1..75: mol_type = other DNA
ggggcggaagatatttaataaccaatgttaccgtctttgttttgttgacttttcgaagattgaatatatttctgc

SEQ ID NO: 712406 - DNA, 75 bp, synthetic construct
  source 1..75: mol_type = other DNA
aaagatggattaaattgcgaaataaggaaaaatagagaccttttccttactttacctaaaaagatgaacttttca

SEQ ID NO: 712407 - DNA, 75 bp, synthetic construct
  source 1..75: mol_type = other DNA
atggtcggtgcgttctttatcgatatcgtcaatgcgctggtgattaagctgtatttgatgttgccgatttttacg

SEQ ID NO: 712408 - DNA, 75 bp, synthetic construct
  source 1..75: mol_type = other DNA
tactcgccgacagtcgatgtatggatttgctgttgtgaccttagcattgctgtcgttaggcgcactggcaacgac

SEQ ID NO: 712409 - DNA, 75 bp, synthetic construct
  source 1..75: mol_type = other DNA
acctgcgtattgattaattgggaaccgttgggggcgaatgtggatgccgaagacgcggaagttctggcggaattg

SEQ ID NO: 712410 - DNA, 75 bp, synthetic construct
  source 1..75: mol_type = other DNA
atgcgattaggcagaggttgactccaaaaatagacggttgggataaaaatgttctacgtaatttctatgaattgg

SEQ ID NO: 712411 - DNA, 75 bp, synthetic construct
  source 1..75: mol_type = other DNA
cgtcgtgggcctgtcggcagcggcgttcggcttcgccgtgctggggctggggcagggcctgtggtggctggtgcc

SEQ ID NO: 712412 - DNA, 75 bp, synthetic construct
  source 1..75: mol_type = other DNA
atatctcacaaatcgtaatggcaaattaaccggcgtcggagaagaccacttcgtatacaacaaatacaagggctt

SEQ ID NO: 712413 - DNA, 75 bp, synthetic construct
  source 1..75: mol_type = other DNA
ggttgaaggacgtatggtgcaggcacaccgtttcggtgtaaagggacatgtatccggtactggtcgcagcgctct

SEQ ID NO: 712414 - DNA, 75 bp, synthetic construct
  source 1..75: mol_type = other DNA
tttccggcggtcacggtacgggcgctgcgtggagtaaattgttcattgaacgttatggcttcaccaatgcgacgg

SEQ ID NO: 712415 - DNA, 75 bp, synthetic construct
  source 1..75: mol_type = other DNA
cgtcaggaatgcagaagatgttgcagtcaccatggcgctgggtacagtgcagaatgccctttctcaggggatttc

SEQ ID NO: 712416 - DNA, 75 bp, synthetic construct
  source 1..75: mol_type = other DNA
atggaagttttctggatagttgttggtgtggttgcggtgattatttacgttatcaaccagaacaagactaagatc

SEQ ID NO: 712417 - DNA, 75 bp, synthetic construct
  source 1..75: mol_type = other DNA
acctgcgtattgattaattgggaacctttgggagcaaatgttgacgctgaggatgcagaggttctggctgaattg

SEQ ID NO: 712418 - DNA, 75 bp, synthetic construct
  source 1..75: mol_type = other DNA
ctggaaacatcaccggaaattatctggccgtccagatacttcgatgatcggggcaaccgcattgtaagacttatg

SEQ ID NO: 712419 - DNA, 75 bp, synthetic construct
  source 1..75: mol_type = other DNA
cggaaatcatctgtccgtccagatacttcgatgatcagggcaaccgcactgagagacccatgcgaaagcggtact

SEQ ID NO: 712420 - DNA, 75 bp, synthetic construct
  source 1..75: mol_type = other DNA
tcccgcagcgcgggactggcgtccgccacgctggcaaacgcgttgacccgttcgtggccgcgcggcgaaaaactc

SEQ ID NO: 712421 - DNA, 75 bp, synthetic construct
  source 1..75: mol_type = other DNA
gatgaaaagaagaaaaaagctcaagtcacacaaagtaatattaataaaaacactccccagcaactgacagacaaa

SEQ ID NO: 712422 - DNA, 75 bp, synthetic construct
  source 1..75: mol_type = other DNA
aaagataaaaatgagaacgaggatgttgccagtgctgagaatatgaactggatgcaggcactgcgttttgtggct

SEQ ID NO: 712423 - DNA, 75 bp, synthetic construct
  source 1..75: mol_type = other DNA
gatttattcggtaatgaaaccactctggctgtatccgaggaggatattcaagctgcgcttgaaggagatgagttt

SEQ ID NO: 712424 - DNA, 75 bp, synthetic construct
  source 1..75: mol_type = other DNA
cctccgggctcgcagggcaactggcctgatgaccagcgacaattacagaacggtaaataacattaccctgggtaa

SEQ ID NO: 712425 - DNA, 75 bp, synthetic construct
  source 1..75: mol_type = other DNA
tgaagtggttcattcactggcgaagtggaaacgtcagaccttagggcaacacgacttcagcgcgggcgaagggct

SEQ ID NO: 712426 - DNA, 75 bp, synthetic construct
  source 1..75: mol_type = other DNA
gggcgttaccaggaagcgtgcgacatcctgggaaaacgctacggtgttcaggctcgtgttgcgacaccgggtaca

SEQ ID NO: 712427 - DNA, 75 bp, synthetic construct
  source 1..75: mol_type = other DNA
cgcgccggaagctgtgatgcaggaggagatgaggcgatattatactgtcgccacattctctggtatcccggacaa

SEQ ID NO: 712428 - DNA, 75 bp, synthetic construct
  source 1..75: mol_type = other DNA
actcactatgtggtgctcggttttcgcttcagagtcgctgaagaagagctgttactgccggatgagcagcatgac

SEQ ID NO: 712429 - DNA, 75 bp, synthetic construct
  source 1..75: mol_type = other DNA
cgggtacagaaagatgaaacgctggaacaggcgtttgcccgcctgaccgaggccgaactggggctgagcctgccg

SEQ ID NO: 712430 - DNA, 75 bp, synthetic construct
  source 1..75: mol_type = other DNA
atgatttaacaaaagaagctgaggaattgcttgtaaaattcgctgacgagtatgtaaacaaatattctctaaatc

SEQ ID NO: 712431 - DNA, 75 bp, synthetic construct
  source 1..75: mol_type = other DNA
cgtcaacaagtgccgggcaggcctcagccagtgccaccgctgccggaaagtcggcagaaagtgccgcatcgtctg

SEQ ID NO: 712432 - DNA, 75 bp, synthetic construct
  source 1..75: mol_type = other DNA
aaacctctgaaacaaatgcaaagacttcagcagacaatgctgcttcctctaaggcggcagccgcatcgtccgctg

SEQ ID NO: 712433 - DNA, 75 bp, synthetic construct
  source 1..75: mol_type = other DNA
gcggctgcgtcgtctgccagcgccgcgtcaacaagtgccgggcaggcctcagccagtgccaccgccgccggaaaa

SEQ ID NO: 712434 - DNA, 75 bp, synthetic construct
  source 1..75: mol_type = other DNA
tcccgtcaccatctggcagacactgctcaaccggttactggaccagcattacagccttacgctgaatgacacacc

SEQ ID NO: 712435 - DNA, 75 bp, synthetic construct
  source 1..75: mol_type = other DNA
atgaaaacattacctgtattacccgggcagtcggccagttcacgcccgtctcctgttgaaatctggcagatactg

SEQ ID NO: 712436 - DNA, 75 bp, synthetic construct
  source 1..75: mol_type = other DNA
ttttgacgttcagtatagtgctgaaatatttaatgtggagagaatggatgggatatatcacatatgttacagatc

SEQ ID NO: 712437 - DNA, 75 bp, synthetic construct
  source 1..75: mol_type = other DNA
agacagtagcgctctgaccggttcgatcggtgtccgaatggatcactggaacctgtctcgcgttatggatactgt

SEQ ID NO: 712438 - DNA, 75 bp, synthetic construct
  source 1..75: mol_type = other DNA
gaggctgatgctgtcgcactgtattccggcagggtatggacaacgcagcaggcgatccggtacggactcatcgac

SEQ ID NO: 712439 - DNA, 75 bp, synthetic construct
  source 1..75: mol_type = other DNA
cactgcctgtgctggtcgtttgagtccgtccagtttcaggagtttctgcgtaccgtgctggttgagcgttcggcg

SEQ ID NO: 712440 - DNA, 75 bp, synthetic construct
  source 1..75: mol_type = other DNA
tgacagcaacaaagctgcaaacgccaagactggtttctggtgttgagtttgatggttccaaagatattactttaa

SEQ ID NO: 712441 - DNA, 75 bp, synthetic construct
  source 1..75: mol_type = other DNA
gtttctggaacaagaaccgggcagcgatgaagagattaaaacttactgtaccaccacatggggggtgacgttccc

SEQ ID NO: 712442 - DNA, 75 bp, synthetic construct
  source 1..75: mol_type = other DNA
atgccgatgcggatggtggcgttccctggaatgccgaatcaggcgcttacaatgtcacccgctctggcgacagct

SEQ ID NO: 712443 - DNA, 75 bp, synthetic construct
  source 1..75: mol_type = other DNA
gaaggtgaaggggacgctgttgcgatcctgaaccgaaacgaacccgcgttctattgcgttccaccaaaactttac

SEQ ID NO: 712444 - DNA, 75 bp, synthetic construct
  source 1..75: mol_type = other DNA
cctccgggctcgctgggctactggcctgatgaacagcgacaattacagaacggtaaataacattaccctgggtaa

SEQ ID NO: 712445 - DNA, 75 bp, synthetic construct
  source 1..75: mol_type = other DNA
gtgcggttattgatatgccgagtggcaggggaagcgtcactctggagtttaaggttttccataaaggcaatcagc

SEQ ID NO: 712446 - DNA, 75 bp, synthetic construct
  source 1..75: mol_type = other DNA
aaaaacatccccggcaacagttctttattgctcgggaacaggttacgttattggctttattgtgaatccctctgc

SEQ ID NO: 712447 - DNA, 75 bp, synthetic construct
  source 1..75: mol_type = other DNA
aatatcaaatggtgcaattgcttatatatcctctcagactatttttaaagaagataatttgataactaaaaaggt

SEQ ID NO: 712448 - DNA, 75 bp, synthetic construct
  source 1..75: mol_type = other DNA
tgatattttttggaataatttgaataaagacgggtttgatgctgtagtaggcaatccaccttgggaaaaaataaa

SEQ ID NO: 712449 - DNA, 75 bp, synthetic construct
  source 1..75: mol_type = other DNA
atgcggaaatggttagaaatggctatgcgtgggcgtatcgttaccataacgtaccatccagtaaagcgatggagt

SEQ ID NO: 712450 - DNA, 75 bp, synthetic construct
  source 1..75: mol_type = other DNA
cctccgggctcgcggggctactggcctgatgatcagcgacaattacagaacggtaaataacattaccctgggtaa

SEQ ID NO: 712451 - DNA, 75 bp, synthetic construct
  source 1..75: mol_type = other DNA
atgcccagtatcattttgtctgacaccagtgcaagtgtcagtgaactgaaaaaaaatccaatggcgacagtcagt

SEQ ID NO: 712452 - DNA, 75 bp, synthetic construct
  source 1..75: mol_type = other DNA
ataagtattggttttttcattgggttatcatttactattcttttttgggcaatagatgcggctgggcagattatt

SEQ ID NO: 712453 - DNA, 75 bp, synthetic construct
  source 1..75: mol_type = other DNA
atgaacgcaccatcatttgtttttgcaatattacccgtcatactgatgatatgtatcattacctctttattctgg

SEQ ID NO: 712454 - DNA, 75 bp, synthetic construct
  source 1..75: mol_type = other DNA
cctccgggctcgccgggccactggcctgatgagcagcgacaattacagaacggtaaataacattaccctgggtaa

SEQ ID NO: 712455 - DNA, 75 bp, synthetic construct
  source 1..75: mol_type = other DNA
cagcagccagtattactgacctgaaaaaaaatcctatgggaactgtagccgaaggagaaggggatgccgtcgcaa

SEQ ID NO: 712456 - DNA, 75 bp, synthetic construct
  source 1..75: mol_type = other DNA
cctgacggtcacggcggcctgaaacgtactcaagaaagcacactcctccatgctatcgaaaaagccctcggtatt

SEQ ID NO: 712457 - DNA, 75 bp, synthetic construct
  source 1..75: mol_type = other DNA
tacagcaactaaaagccagcgccgattactgccgatgctcattcatcgtgatgaagcgatggctgaatgcctggc

SEQ ID NO: 712458 - DNA, 75 bp, synthetic construct
  source 1..75: mol_type = other DNA
tggcggtacaacaaccattattgaccatatgggatttggcccaaacggctgtcggttacgccatcaactggaggt

SEQ ID NO: 712459 - DNA, 75 bp, synthetic construct
  source 1..75: mol_type = other DNA
gtaaatatggcgggattaattcaggctaccgcccactggttactgacggaacgcccgtttaaacatcaggaaaaa

SEQ ID NO: 712460 - DNA, 75 bp, synthetic construct
  source 1..75: mol_type = other DNA
ctctggtaacggtatttaccggcatgggtgtggcgcaggctactgacgtaacagctcaggctgtagcgacatggt

SEQ ID NO: 712461 - DNA, 75 bp, synthetic construct
  source 1..75: mol_type = other DNA
ccgttgagctgccaaaacaccgctcctgtatgcaccttgacaccgtcatgacccacatcgacgttgacactttct

SEQ ID NO: 712462 - DNA, 75 bp, synthetic construct
  source 1..75: mol_type = other DNA
gaccagaataaggtcctcacgccgtcggcgttttcgttcagttcgcagggtaacaacggctccagcaatgtgccg

SEQ ID NO: 712463 - DNA, 75 bp, synthetic construct
  source 1..75: mol_type = other DNA
gttctgccatcttcggtgctgagcaggtcggaaaactgttctatctcgagcagcctgctattgattccgtaccgg

SEQ ID NO: 712464 - DNA, 75 bp, synthetic construct
  source 1..75: mol_type = other DNA
aggtgtggcgtgaactgcgccgccttgccagccagatggcacgcaacccggaaggcccgcaacggctgaaggatg

SEQ ID NO: 712465 - DNA, 75 bp, synthetic construct
  source 1..75: mol_type = other DNA
ttgccattcaggaagaccgccacgagctgggcgatgacataactccgcgttttaaagcggagtacgtcgacggct

SEQ ID NO: 712466 - DNA, 75 bp, synthetic construct
  source 1..75: mol_type = other DNA
aacgcaagccgtggaatctgggcaacaactcctggcggaacctggtatgaatatccgcagcgtgaatttgagttc

SEQ ID NO: 712467 - DNA, 75 bp, synthetic construct
  source 1..75: mol_type = other DNA
gcggtggcaccggagactggagttataaggttgattatccggttactgtgagtggtggagcgtatttcgttaaca

SEQ ID NO: 712468 - DNA, 75 bp, synthetic construct
  source 1..75: mol_type = other DNA
ggtacggtggaagttcgggtgatggataccccgttaacccttagccacgcggtaaatatggcgggattaattcag

SEQ ID NO: 712469 - DNA, 75 bp, synthetic construct
  source 1..75: mol_type = other DNA
gagaaaggcgatacaggtgctgaagaacgcacgttcaccgttctggagccgctccgggtgcctgacaacgccctg

SEQ ID NO: 712470 - DNA, 75 bp, synthetic construct
  source 1..75: mol_type = other DNA
cgctgcgcccggcaattgaaagcattatcgccggtcaggtggagacatcccttcgccaggtgggtgacgtcagcc

SEQ ID NO: 712471 - DNA, 75 bp, synthetic construct
  source 1..75: mol_type = other DNA
cacctctgatatccacctgctgaatgaactcagcgtccatcagctggcgcgcacggccattcaggaacagaccgt

SEQ ID NO: 712472 - DNA, 75 bp, synthetic construct
  source 1..75: mol_type = other DNA
tacagggagccagcgagcgttttgctattgccctgaccggcaccgaaggcggcaggaagagaatggcgtccctgg

SEQ ID NO: 712473 - DNA, 75 bp, synthetic construct
  source 1..75: mol_type = other DNA
ccggatttatacgccactggaggccgggcaggctgcgcgtaaagtggagagcgtgtctgccgtccggcttgccag

SEQ ID NO: 712474 - DNA, 75 bp, synthetic construct
  source 1..75: mol_type = other DNA
ggaccgtcatattgacctcgcctacgccctgacggtgtatggcgtgcagggggccagtgaacgttttgccattgc

SEQ ID NO: 712475 - DNA, 75 bp, synthetic construct
  source 1..75: mol_type = other DNA
atattttttccgcctttcccgataatggcccaatgccgtgggtcagtaactggcaacaatttgaagccctgtttc

SEQ ID NO: 712476 - DNA, 75 bp, synthetic construct
  source 1..75: mol_type = other DNA
accgtttccaggcctgccgctatgggctggaaggcgtcattaccgatccgtacactggcgatcgtcgaccactaa

SEQ ID NO: 712477 - DNA, 75 bp, synthetic construct
  source 1..75: mol_type = other DNA
gtttccaggcctgtcgctatgggctggaaggcgtcattaccgatccgcacactggcgatcgtcgaccgctaacgg

SEQ ID NO: 712478 - DNA, 75 bp, synthetic construct
  source 1..75: mol_type = other DNA
cgcgacgttgccgcgctcgatacccgtcaggccaaagcctgggccgacccggagctgctgaaagctgactggcgc

SEQ ID NO: 712479 - DNA, 75 bp, synthetic construct
  source 1..75: mol_type = other DNA
gctggggaacctgtatcgttctgctttacgggaagatattgagtcaatgggatttgaaactgtcgcggccggaaa

SEQ ID NO: 712480 - DNA, 75 bp, synthetic construct
  source 1..75: mol_type = other DNA
tgcaggcagccgcagaccatcatctggaaatttgcggcggtggcacacacccgtttcagaaatggcagcgacagg

SEQ ID NO: 712481 - DNA, 75 bp, synthetic construct
  source 1..75: mol_type = other DNA
atggtctccagagcaaatatcaggatggttaaggcgaacaaaatcacgtcaaaaaacgctgcgaatatcacctga

SEQ ID NO: 712482 - DNA, 75 bp, synthetic construct
  source 1..75: mol_type = other DNA
ggctagtgatgcggactacgacgtgcgtttggtccaggactgctgctacgacccggatcgggatgcccacgaagc

SEQ ID NO: 712483 - DNA, 75 bp, synthetic construct
  source 1..75: mol_type = other DNA
tgagtgcggatatattcctgaagcgttctcagtgctgcctggtcgctgatgattccgtctctgataccgagaacg

SEQ ID NO: 712484 - DNA, 75 bp, synthetic construct
  source 1..75: mol_type = other DNA
cgcgctatcgcttcatctggctgcggcgaacggtactttcggtggaaatgctggaagataaacacgatcagcacc

SEQ ID NO: 712485 - DNA, 75 bp, synthetic construct
  source 1..75: mol_type = other DNA
ggtaagatactttttagcgttaaaaatatcaaaccagacagcttattaataaaaatacttaagcaatgtttttat

SEQ ID NO: 712486 - DNA, 75 bp, synthetic construct
  source 1..75: mol_type = other DNA
agttaagtttatatcaccgtccttttcaacttactcttaatcttattaattgccaactaaaaaagaagaatcatt

SEQ ID NO: 712487 - DNA, 75 bp, synthetic construct
  source 1..75: mol_type = other DNA
agccaactaatcaagatattaattagaatctgcctgtggacatggtctgaaaatatggagcataatgggtggatg

SEQ ID NO: 712488 - DNA, 75 bp, synthetic construct
  source 1..75: mol_type = other DNA
tggaagcgatgctggtcagtctggcgattgcccgcggtggcgatgaatgggaggcagacgttctcgcaaaagcgc

SEQ ID NO: 712489 - DNA, 75 bp, synthetic construct
  source 1..75: mol_type = other DNA
tcagagtccttggcagcggggaacaaatgagaacacaaatgggctaattcggcagtacttgaaccgccccggaaa

SEQ ID NO: 712490 - DNA, 75 bp, synthetic construct
  source 1..75: mol_type = other DNA
gtacgcgctggattgaacgactaatgccgccggttgtgacgggtgcggtggtgatggcgattggcctgaacttag

SEQ ID NO: 712491 - DNA, 75 bp, synthetic construct
  source 1..75: mol_type = other DNA
atctgctcagtaagctggaggcctgtgacgccagtgagaaaatgcttgatgagtgggatctgcgtcatcaggcgt

SEQ ID NO: 712492 - DNA, 75 bp, synthetic construct
  source 1..75: mol_type = other DNA
gcgagatgtcgcgcgcgccagtgagttaatgcgtcaacatttgctgacgccgatcccgattatccggcaggcaat

SEQ ID NO: 712493 - DNA, 75 bp, synthetic construct
  source 1..75: mol_type = other DNA
gagtgggatctgcgtcatcaggcgtttcatactgcaattgtggcgggctgtggttctcactatttgctgcaaatg

SEQ ID NO: 712494 - DNA, 75 bp, synthetic construct
  source 1..75: mol_type = other DNA
ctgcagttcggtggaaacggcggtggccgaaatgcaggaggtggcggacagaaagcgtaaatcctacgggcagtt

SEQ ID NO: 712495 - DNA, 75 bp, synthetic construct
  source 1..75: mol_type = other DNA
cggacgcgcgcaaacgggccgttctctctctcgctcagcgtcatgatattgtgatttttgaagatgatgtctacg

SEQ ID NO: 712496 - DNA, 75 bp, synthetic construct
  source 1..75: mol_type = other DNA
acaacagaccgagaaagacactgaagttcaaaataccgaaagagataattgaaaggggtgttgcattgacagatt

SEQ ID NO: 712497 - DNA, 75 bp, synthetic construct
  source 1..75: mol_type = other DNA
catctagaatttactgtcagtaccggcgttaaagtttacttctgcgatcctcagagtccctggcagcggggaaca

SEQ ID NO: 712498 - DNA, 75 bp, synthetic construct
  source 1..75: mol_type = other DNA
gtctcagtaaatcaggctcttaccgacaaattcctgagtttaccgtcagaactcagaaaatcactgacatgggac

SEQ ID NO: 712499 - DNA, 75 bp, synthetic construct
  source 1..75: mol_type = other DNA
caagccgaatgccaaagtggtttatatgcactccgagcgctttgttcaggacatggtaaaagccctgcaaaacaa

SEQ ID NO: 712500 - DNA, 75 bp, synthetic construct
  source 1..75: mol_type = other DNA
cgtagccgtgaagcgctacacctgaagtggtcaacaaaaactggccaccgagttagagttttttccagtatcgat

SEQ ID NO: 712501 - DNA, 75 bp, synthetic construct
  source 1..75: mol_type = other DNA
aggcgctgaagggtgataaagcagcgatttccgcgctcagggggatggcatatcgtgaaaaacggggtaagaaag

SEQ ID NO: 712502 - DNA, 75 bp, synthetic construct
  source 1..75: mol_type = other DNA
atcctgacctttcattgcagattgcggagcagcatgccggtccgtttgagccggtgccaatggacatctttgaac

SEQ ID NO: 712503 - DNA, 75 bp, synthetic construct
  source 1..75: mol_type = other DNA
gctcacacagctggtacgccttacacatgtttatgggaagccgtggtctgaaactgaacagaatgagcaacggtg

SEQ ID NO: 712504 - DNA, 75 bp, synthetic construct
  source 1..75: mol_type = other DNA
tatcaggatggttaaggcgaacaaaaccacgtcaaaaaacgctgcgaatatcacctgagacaatttataaaacgc

SEQ ID NO: 712505 - DNA, 75 bp, synthetic construct
  source 1..75: mol_type = other DNA
aggaatgactggttgcagtggatatcgctggcgtctgaatgtgatgtgccgatgatgaaaaacgcagcgaaaacc

SEQ ID NO: 712506 - DNA, 75 bp, synthetic construct
  source 1..75: mol_type = other DNA
gcctgcgtaatgatgatgtcgatttggttgatattctgaatgttgatgattgttggcaggcagaccccgaactac

SEQ ID NO: 712507 - DNA, 75 bp, synthetic construct
  source 1..75: mol_type = other DNA
ccgtaaacattctctctgatgcgaacgtggaaccacagaaagtggtttccggaggtgccgtcacgctggaatcac

SEQ ID NO: 712508 - DNA, 75 bp, synthetic construct
  source 1..75: mol_type = other DNA
tgagtacgtcatcactggcgaccagaacaaagtgttaaccccatcatcatttgcattcagctctcagggatcaaa

SEQ ID NO: 712509 - DNA, 75 bp, synthetic construct
  source 1..75: mol_type = other DNA
aacattgctcactgcgcctctgaaggcatacggtgcgtaccagatgtttggtgggacgtggagtccgtttactca

SEQ ID NO: 712510 - DNA, 75 bp, synthetic construct
  source 1..75: mol_type = other DNA
atgtccctcacccgcttgttgatccgcgatttccgcaatattgaaaccgcggatctcgctttatctcccggcttt

SEQ ID NO: 712511 - DNA, 75 bp, synthetic construct
  source 1..75: mol_type = other DNA
ttatcctggcactgttgtttattatcaacaacgtctttacttcgccgcatcgacagcgttccctcagactatctg

SEQ ID NO: 712512 - DNA, 75 bp, synthetic construct
  source 1..75: mol_type = other DNA
ggcgaatattgctctgttcgtccaggagaaaggcagtgttgtccgtgatctggcctactcattcgatgttgacgg

SEQ ID NO: 712513 - DNA, 75 bp, synthetic construct
  source 1..75: mol_type = other DNA
gacaccgcagaaaaatcagcacaagtattagtgaaggtttattcgatgggcggcatgaaacagaccatcagccgt

SEQ ID NO: 712514 - DNA, 75 bp, synthetic construct
  source 1..75: mol_type = other DNA
tgcccggcacggacgaaatcggccaggcgaccgcacaagagatgcaaaaacattcgctggtgttgtggcccttcc

SEQ ID NO: 712515 - DNA, 75 bp, synthetic construct
  source 1..75: mol_type = other DNA
cgagctgctggaagaactggctccgaacaagccgcacggcgtggcgcactatcgtgacctgatcacctttgtcgc

SEQ ID NO: 712516 - DNA, 75 bp, synthetic construct
  source 1..75: mol_type = other DNA
gctcttgattcgctgacgacggtgaataacgcgcaacgcgaggcttacggttatcaggttcaggctgccaactat

SEQ ID NO: 712517 - DNA, 75 bp, synthetic construct
  source 1..75: mol_type = other DNA
aatggtaaagcgttatggaaccaacctgccgggcacctggaagccgatgaaaccttagtggaagccgccgcccgt

SEQ ID NO: 712518 - DNA, 75 bp, synthetic construct
  source 1..75: mol_type = other DNA
gtgagccggaagaagattatgaagagaaattgcttattgccagatgggaactgacagcagaacaggccgttacac

SEQ ID NO: 712519 - DNA, 75 bp, synthetic construct
  source 1..75: mol_type = other DNA
ccgcataaagcggacttacgcattcgcgccgacggtgcgccggtggaagataccttatcgcgtgggcagcttaag

SEQ ID NO: 712520 - DNA, 75 bp, synthetic construct
  source 1..75: mol_type = other DNA
agaaaatccaggcgcaaatagcggtaactcaggcccaggcagaagcagacagtaaactggcggcagccaaagcag

SEQ ID NO: 712521 - DNA, 75 bp, synthetic construct
  source 1..75: mol_type = other DNA
ggagtcggaagttgccggaccctgcagatgaaggcgcattacagaaatggtggtctgttctaccgttcttcaaga

SEQ ID NO: 712522 - DNA, 75 bp, synthetic construct
  source 1..75: mol_type = other DNA
aggaatgacagccatcgggcatcccgcgttgtcatttcaacgccaagtcgcacagctaatcacagaatgaataac

SEQ ID NO: 712523 - DNA, 75 bp, synthetic construct
  source 1..75: mol_type = other DNA
cgctaaaacttacctgctgcttaccaatcaaggtgatgtttatggtggctggaatacattaagaccgtttgctat

SEQ ID NO: 712524 - DNA, 75 bp, synthetic construct
  source 1..75: mol_type = other DNA
gctctgtgttctatgttgatggcgctgctttccctgtttttgcgtttattgaagatggcctgtcaatatccgcac

SEQ ID NO: 712525 - DNA, 75 bp, synthetic construct
  source 1..75: mol_type = other DNA
cgccatcagcgcggtacaggatcgtacaaaactggttcaggatctgcaaaatgcaatgcgtaaagccgttgttgg

SEQ ID NO: 712526 - DNA, 75 bp, synthetic construct
  source 1..75: mol_type = other DNA
caccatcagatattggagcactgccaacaaccggaggaacagtttcaggtccgttgtctgttacaggtggattaa

SEQ ID NO: 712527 - DNA, 75 bp, synthetic construct
  source 1..75: mol_type = other DNA
aacgcctgaggggtttactttactcaacggtggccccaaatacagaagagcattcctcgactggggatgctttca

SEQ ID NO: 712528 - DNA, 75 bp, synthetic construct
  source 1..75: mol_type = other DNA
gtttgttctccacgggcgattacagggcgaagagcgcgagacggcgattggcttaaccaaagacaaacagggcga

SEQ ID NO: 712529 - DNA, 75 bp, synthetic construct
  source 1..75: mol_type = other DNA
tcgatctcggcgcatccagtgggcgcgtcatgctggcgcgttacgagtgtgaatgccgcagcctgacgctacgtg

SEQ ID NO: 712530 - DNA, 75 bp, synthetic construct
  source 1..75: mol_type = other DNA
gaataccagtacagatggtaatcatagccattcactgtccggcacagcagcatctgcaggtgcacacgcacatac

SEQ ID NO: 712531 - DNA, 75 bp, synthetic construct
  source 1..75: mol_type = other DNA
ccggttggcgcaccgatcccttggccatcagataccgttccgtctggttatgccctgatgcaggggcagactttt

SEQ ID NO: 712532 - DNA, 75 bp, synthetic construct
  source 1..75: mol_type = other DNA
cttattctgcttcaaaagcaagcagcgaccatctggtgcgcgcctggctgcggacctacggcctgccgacgttaa

SEQ ID NO: 712533 - DNA, 75 bp, synthetic construct
  source 1..75: mol_type = other DNA
ggaccgacatcattgaagccattcgggatgactggatggggcgaacccccgaggtgcagcagcagacgctggttg

SEQ ID NO: 712534 - DNA, 75 bp, synthetic construct
  source 1..75: mol_type = other DNA
acaggccggggcatggataccggaaaagtccgttatggaaatccgtgcgccgaaaaagggccaggagcaggacac

SEQ ID NO: 712535 - DNA, 75 bp, synthetic construct
  source 1..75: mol_type = other DNA
ggagctgattcagctggattcggtttccggggtgggaaacagggtgcttgttccgcgtgtggcgtatgagatgga

SEQ ID NO: 712536 - DNA, 75 bp, synthetic construct
  source 1..75: mol_type = other DNA
ggctgagcgaataaacggtatcctgaaaaatgagtttttactctcgcgtcctgcagacctggcgcaggcccggga

SEQ ID NO: 712537 - DNA, 75 bp, synthetic construct
  source 1..75: mol_type = other DNA
tattatttacgatgatttatacatctacttctgcatggtctgctgataatttaactttcaaaggaaacctaatta

SEQ ID NO: 712538 - DNA, 75 bp, synthetic construct
  source 1..75: mol_type = other DNA
tggcccaggtgaccggtgcccgggaacagcaacaactgacggatatcatccgagagtcacggcgggaggccggag

SEQ ID NO: 712539 - DNA, 75 bp, synthetic construct
  source 1..75: mol_type = other DNA
ccagctggcacaggactatgtgcgtctgtcggctgaagggcgggatgtggtggcccaggtgaccggcacccggga

SEQ ID NO: 712540 - DNA, 75 bp, synthetic construct
  source 1..75: mol_type = other DNA
aagtccgttatggaaatccgcgagtcgaaaaaaggccaggaacaggacaataacgttgcaggtgaacagacgcag

SEQ ID NO: 712541 - DNA, 75 bp, synthetic construct
  source 1..75: mol_type = other DNA
agaatctgtatgccaccaagatagcgctgggaaatctgtatcgttctgctttacgtgaagatattgagtccatgg

SEQ ID NO: 712542 - DNA, 75 bp, synthetic construct
  source 1..75: mol_type = other DNA
acgtcactccacagcaggtcccgcgtcagcccggggcctgggtgcccgataactcggtcatggaaatccgtgcgc

SEQ ID NO: 712543 - DNA, 75 bp, synthetic construct
  source 1..75: mol_type = other DNA
tcagggctacgcaggggtggggaaaaccacccagttccgggcggtgatgggtgccctgaacactctgtctgagtc

SEQ ID NO: 712544 - DNA, 75 bp, synthetic construct
  source 1..75: mol_type = other DNA
gctggtcttccctgaacgggcacaggagcgcgatatgcctgcgggtgacgctgtctctgtgctgacccaggataa

SEQ ID NO: 712545 - DNA, 75 bp, synthetic construct
  source 1..75: mol_type = other DNA
aggatataatttcttagacttaaatcatgagataattattgagcgaggtattcctgcagcattaacttatattgt

SEQ ID NO: 712546 - DNA, 75 bp, synthetic construct
  source 1..75: mol_type = other DNA
agctgacttccggcagtgcagcaccggtgcaatccggcactatgtcccgtcacgaggagatccgtcgtattctgg

SEQ ID NO: 712547 - DNA, 75 bp, synthetic construct
  source 1..75: mol_type = other DNA
agttccctgagcgaggaacaggcgcaggaactgctggactgtctgtggctcaagttcaacgacgttaacaaggtt

SEQ ID NO: 712548 - DNA, 75 bp, synthetic construct
  source 1..75: mol_type = other DNA
aacagttacgagcattattattcacttgacaaagatagcaaattatttgtaaatgagatggcagacagagagttt

SEQ ID NO: 712549 - DNA, 75 bp, synthetic construct
  source 1..75: mol_type = other DNA
tcaccaactgctcgaataactacggcccttaccactttccggaaaaactgatcccgctgatgatcctcaacgcgc

SEQ ID NO: 712550 - DNA, 75 bp, synthetic construct
  source 1..75: mol_type = other DNA
gtcgctggcaccggtcgcgcaaagcgagcgctttgcctttgagaaagttgatatctgcgatcgggcagaactggc

SEQ ID NO: 712551 - DNA, 75 bp, synthetic construct
  source 1..75: mol_type = other DNA
gaacgttcccgaaatatcgataacagacgctctctggggcattgggagggcgatttagtctcaggtacaaaaaac

SEQ ID NO: 712552 - DNA, 75 bp, synthetic construct
  source 1..75: mol_type = other DNA
gatgtagaagccgctgataagccgttcgagttctttatgaatcgcttccgtttgctggaggccgcgccacgcgtg

SEQ ID NO: 712553 - DNA, 75 bp, synthetic construct
  source 1..75: mol_type = other DNA
tcgagttctttatgaatcgcttccgtttgctggaagccgcaccgcgcgtggagtttagccagtacacaggacttt

SEQ ID NO: 712554 - DNA, 75 bp, synthetic construct
  source 1..75: mol_type = other DNA
tcatgaaatcgatgaattgatcgttatgggcctggctactgactattgcgtgaagtttaccgtgctggacgcgtt

SEQ ID NO: 712555 - DNA, 75 bp, synthetic construct
  source 1..75: mol_type = other DNA
ccagcgccagcgccattaaccaggcattacagaaacatgatacacccgtcggcccgttattttttgtaacacgcc

SEQ ID NO: 712556 - DNA, 75 bp, synthetic construct
  source 1..75: mol_type = other DNA
ctcactgagtgtgcggattactggcagataaccgagcacggtaaattattcttaaactcacttcttgaattattc

SEQ ID NO: 712557 - DNA, 75 bp, synthetic construct
  source 1..75: mol_type = other DNA
cgcgtcatccgcgtggttttatgcaaggaaggtatctggaaagccagcgtgatgtcgaagccgcagataagccgt

SEQ ID NO: 712558 - DNA, 75 bp, synthetic construct
  source 1..75: mol_type = other DNA
atgctccagtcaatttataaattcctgttcaatttatgcagttcaccgcagcagcccaaaaataaagacgtggat

SEQ ID NO: 712559 - DNA, 75 bp, synthetic construct
  source 1..75: mol_type = other DNA
ttagcctgatgattgctatcgccgtgctttgctcatgggtcggcgcactttgctggaacatcgccagccagcgat

SEQ ID NO: 712560 - DNA, 75 bp, synthetic construct
  source 1..75: mol_type = other DNA
cggtaaactcgcgtgggggaaactcgccccggcgctggtttgtattggcatcggcctggcatgtgtaaatattgc

SEQ ID NO: 712561 - DNA, 75 bp, synthetic construct
  source 1..75: mol_type = other DNA
ttctgacatttagtactgataaaacaacaagaagagagcatgtaattggacgtctagaacgtgcaagaacaattt

SEQ ID NO: 712562 - DNA, 75 bp, synthetic construct
  source 1..75: mol_type = other DNA
agcaatacgaggatgagccagaatcctatccaattgatgagtttcaacttactactacgcccaatgattttaata

SEQ ID NO: 712563 - DNA, 75 bp, synthetic construct
  source 1..75: mol_type = other DNA
acattatccgccaggcggacgccattattgccggtaaaattaccacaacggattttatcaccggcgccgacgccg

SEQ ID NO: 712564 - DNA, 75 bp, synthetic construct
  source 1..75: mol_type = other DNA
cgtcagctaaaacctggcagtgtggcggctatttcactgccgcgcagtccggagcacatgattatttcgctcgct

SEQ ID NO: 712565 - DNA, 75 bp, synthetic construct
  source 1..75: mol_type = other DNA
atctggctcgccaattgtcgtcgcgaaacgcaaaccagcctgcactgccattgatcctcactaactgtctgtcgt

SEQ ID NO: 712566 - DNA, 75 bp, synthetic construct
  source 1..75: mol_type = other DNA
gatccgcagttgcagacgctcagaacgcgcgaccgtctctggtggcaggcgcaattaccgacgtttccccctgct

SEQ ID NO: 712567 - DNA, 75 bp, synthetic construct
  source 1..75: mol_type = other DNA
ggggcagttgtagtaaaaccggttgagaaaaaaggcatttatgcaggaaacccggcaagactgatcagaatatta

SEQ ID NO: 712568 - DNA, 75 bp, synthetic construct
  source 1..75: mol_type = other DNA
tacttatattaaatacaataccaactgttattttttgtaatactcgcactcttaataaactaatatttatatcac

SEQ ID NO: 712569 - DNA, 75 bp, synthetic construct
  source 1..75: mol_type = other DNA
cgctggcaagtagacgagcgcgacgtttttatctccgtaactccattgcatcacgacatgtccgtttttgatctg

SEQ ID NO: 712570 - DNA, 75 bp, synthetic construct
  source 1..75: mol_type = other DNA
tcactcagactttctttcaaatcttgtttcattgaatgaaaacaagacatggagaaaaattctttcaaaaaatgt

SEQ ID NO: 712571 - DNA, 75 bp, synthetic construct
  source 1..75: mol_type = other DNA
ttgagcaatgctcgcaatctttgcgcagagatagagcagtatccagaaaactatacgaaacattcacaggaagaa

SEQ ID NO: 712572 - DNA, 75 bp, synthetic construct
  source 1..75: mol_type = other DNA
aaaattttcttcagaagtgatgtcattgaactatttaagttggtataaaaaattatatgaagaaagaaatttata

SEQ ID NO: 712573 - DNA, 75 bp, synthetic construct
  source 1..75: mol_type = other DNA
tgcaaaggtgactataggttctgaaactaagattcttagcgaaaatgaatctgtttacatacctcttggtgtaat

SEQ ID NO: 712574 - DNA, 75 bp, synthetic construct
  source 1..75: mol_type = other DNA
gttcaagttcacgaaagcgatgctggaaggaaaaagtatcgacgtttacaactacggcaaaatgaagcgcgactt

SEQ ID NO: 712575 - DNA, 75 bp, synthetic construct
  source 1..75: mol_type = other DNA
tgggaatatgtgaccttccaggatgacgcagaactgccgttggccttcaaagcgccttcagccgtactggcataa

SEQ ID NO: 712576 - DNA, 75 bp, synthetic construct
  source 1..75: mol_type = other DNA
ctaacatttttaaaaaactcagacagaaaggaatacttgtagagcatcatggtcatctctatatcaactctaaca

SEQ ID NO: 712577 - DNA, 75 bp, synthetic construct
  source 1..75: mol_type = other DNA
aaaatgtacgaaacctatcatcggatctttgaaaactgtggtcttaagtttaaggctgtagaggctcataccgga

SEQ ID NO: 712578 - DNA, 75 bp, synthetic construct
  source 1..75: mol_type = other DNA
taaatacggtgttggactcagccatcgacaaattggtcgtagtcttgcaatctccccttccgttgtatccagata

SEQ ID NO: 712579 - DNA, 75 bp, synthetic construct
  source 1..75: mol_type = other DNA
tgtccctttttacatctcaatacaaaagctcagttagcggttttttgaacaatttctcaaattatgcaaaaaact

SEQ ID NO: 712580 - DNA, 75 bp, synthetic construct
  source 1..75: mol_type = other DNA
gttgctccatataccagcttgctattacatcgggcatccggcatcaaagacattattcatctgatcaggctgctt

SEQ ID NO: 712581 - DNA, 75 bp, synthetic construct
  source 1..75: mol_type = other DNA
agcgtttgatatcgtcgatgcctcagctcttttggtatccaatactctggacgggaaaattaaccctgactatcc

SEQ ID NO: 712582 - DNA, 75 bp, synthetic construct
  source 1..75: mol_type = other DNA
ttcttaatcagaatcagccggcatctactgtgtgcctgctgaactctacgaaaggatgcctgatgctctggatga

SEQ ID NO: 712583 - DNA, 75 bp, synthetic construct
  source 1..75: mol_type = other DNA
gcccgccaccccatgctgcggttgcgcatcagcgatgaggggcagcagtacgtagtggcggagcatcctccgacg

SEQ ID NO: 712584 - DNA, 75 bp, synthetic construct
  source 1..75: mol_type = other DNA
ttggagtcattacccgataaggcgctgaatatgtttgataaagctattgctgtagatagcagtcgtgaatcccat

SEQ ID NO: 712585 - DNA, 75 bp, synthetic construct
  source 1..75: mol_type = other DNA
tacagttgcggagggttatcaaacaaaaggcgatataaaaaacgccattcattatgccgataaggcgctgaatat

SEQ ID NO: 712586 - DNA, 75 bp, synthetic construct
  source 1..75: mol_type = other DNA
atgaaaaagcaaattatggcggcagtcgtcgcttccctgattgttatttccggcgctcaggcggggatacctgtt

SEQ ID NO: 712587 - DNA, 75 bp, synthetic construct
  source 1..75: mol_type = other DNA
gctttatccgctggaatgtatatttactccagttggcattctgctattggatatgaagctgtgattgatagtggt

SEQ ID NO: 712588 - DNA, 75 bp, synthetic construct
  source 1..75: mol_type = other DNA
taataattttatctgtgttttattctcatcaggttttatccagcgcccccactcagccggatgtttattctgtcg

SEQ ID NO: 712589 - DNA, 75 bp, synthetic construct
  source 1..75: mol_type = other DNA
gccaccgtcggtgcgggcttgccgatcaaccataccgtgcgcgatctgatcgacagcggcgatactattttgtcg

SEQ ID NO: 712590 - DNA, 75 bp, synthetic construct
  source 1..75: mol_type = other DNA
ttgatttcgccagccacggtttccacgtcatcagtgccaacaaactggcgggagccagcgacagcaataaatatc

SEQ ID NO: 712591 - DNA, 75 bp, synthetic construct
  source 1..75: mol_type = other DNA
tccgtcttccgcgcagaaaaacgcatcggcctggtattgttcggtaagggcaatatcggttcccgttggctggaa

SEQ ID NO: 712592 - DNA, 75 bp, synthetic construct
  source 1..75: mol_type = other DNA
tctggcaagcctgaaatttaacaagctcaaatttcagtatgaaatgtatcgcgataagcagcgcgatcttgcaga

SEQ ID NO: 712593 - DNA, 75 bp, synthetic construct
  source 1..75: mol_type = other DNA
atcgagtacggcaataagctggaaagtaaactgcgtgaagataatcaggagatggccgatcttatcgaccaggtg

SEQ ID NO: 712594 - DNA, 75 bp, synthetic construct
  source 1..75: mol_type = other DNA
ttatcgcctctgttacggttatctctggtgctcaggctggtattcccgttgccattgatgcaagccctgaatggg

SEQ ID NO: 712595 - DNA, 75 bp, synthetic construct
  source 1..75: mol_type = other DNA
atttgagcaagcaacaggctgtcttagcaaatggtttttttgaaaagatatttcgatattatgattacattttga

SEQ ID NO: 712596 - DNA, 75 bp, synthetic construct
  source 1..75: mol_type = other DNA
ttaaaaccggcgacaaagtggcgtttaattttgtccagcagggcagcctttctttattacaagatattaaagtca

SEQ ID NO: 712597 - DNA, 75 bp, synthetic construct
  source 1..75: mol_type = other DNA
taagccatctttcgttaatatcggtgggcgtggcaagcctgaatggtgcttcagatctcgattgagtaatattta

SEQ ID NO: 712598 - DNA, 75 bp, synthetic construct
  source 1..75: mol_type = other DNA
ccgtccaatgctaaaaccatctgcgatcatctggcagtgctacgcccggatgtctggttgatgattggtcactgt

SEQ ID NO: 712599 - DNA, 75 bp, synthetic construct
  source 1..75: mol_type = other DNA
agagaatatttttacgctgtggcgcagtttacgctttggcgataatctccaggcatggctggagcagaacgcgcg

SEQ ID NO: 712600 - DNA, 75 bp, synthetic construct
  source 1..75: mol_type = other DNA
gttgaaaggcggtagtgcctggatgccagataatcaggttaacggtgtcgattttgtcctgcctttccgttttgc

SEQ ID NO: 712601 - DNA, 75 bp, synthetic construct
  source 1..75: mol_type = other DNA
gaaaaatggatagtgaaagacggctggctggcaaatagcgggccaatgaccttgcggctggataaagacaccgca

SEQ ID NO: 712602 - DNA, 75 bp, synthetic construct
  source 1..75: mol_type = other DNA
cgtgcgcgatggcgagcagcgtcagccgattacagaagcgtttattcgttcagcgcgcaatcacgcctgcgatca

SEQ ID NO: 712603 - DNA, 75 bp, synthetic construct
  source 1..75: mol_type = other DNA
tcaccacgccaaccggtgaaggggtaaccagcgcgcggacgtttgtccgtctgcgtcgctgtgtattagtcgatg

SEQ ID NO: 712604 - DNA, 75 bp, synthetic construct
  source 1..75: mol_type = other DNA
ttgggcgagcccgtgattgaaggccgcgcccgtacggtggaagcggcagttcacgagctgggtgactatttgatt

SEQ ID NO: 712605 - DNA, 75 bp, synthetic construct
  source 1..75: mol_type = other DNA
gcggtagaccgggtgaggaagttaaacagcggttacgtactggcactgtggtaaccacagatgacaggaactggg

SEQ ID NO: 712606 - DNA, 75 bp, synthetic construct
  source 1..75: mol_type = other DNA
cgcgtgaggcttctctgcttgttgataagccattaccgccaattgccagaatgcaacgcacaatgcccgtagttg

SEQ ID NO: 712607 - DNA, 75 bp, synthetic construct
  source 1..75: mol_type = other DNA
cctgcggtcagtaacgcggttgcacgcctgaaggtgatgtttaatgacgagctttttgttcgttatggccgtggc

SEQ ID NO: 712608 - DNA, 75 bp, synthetic construct
  source 1..75: mol_type = other DNA
aaaccgacatccagagaatctgtaaccttaactgcaatcgaggatggtttagccgcattatggaaaaagtatgaa

SEQ ID NO: 712609 - DNA, 75 bp, synthetic construct
  source 1..75: mol_type = other DNA
gtgcattccgaaaggaataacgccgacgacgctgaaagatcgctatgattttatgaaattccaggtcttccagtg

SEQ ID NO: 712610 - DNA, 75 bp, synthetic construct
  source 1..75: mol_type = other DNA
gtattaagcgttgcacctcttcctgtttttatcgcaatggaaattgcctatctgtgtgcagcgagggtttccgat

SEQ ID NO: 712611 - DNA, 75 bp, synthetic construct
  source 1..75: mol_type = other DNA
ccggtttacgtcagttgcctgacgacggcgaacaaacctgccagcagcattacgttggatgtggttgataacgca

SEQ ID NO: 712612 - DNA, 75 bp, synthetic construct
  source 1..75: mol_type = other DNA
cccttgtgaagcggcacgtcggccattgagtgatgatttagaatcgctctatgctcgctatccggggaacacgct

SEQ ID NO: 712613 - DNA, 75 bp, synthetic construct
  source 1..75: mol_type = other DNA
ggccacggatgccaaagacgtgatttttactgtgatcaccagtccggacagcgacaaggcgcggatgtggggcca

SEQ ID NO: 712614 - DNA, 75 bp, synthetic construct
  source 1..75: mol_type = other DNA
ggaaaaattcctcgccagcgcctattacagtgaccttagtccaagaacacaaaaagattatctgcaacatcaaaa

SEQ ID NO: 712615 - DNA, 75 bp, synthetic construct
  source 1..75: mol_type = other DNA
atatatgcggaagcaattccacagttacgtattgcaatggagatatcctatctctgtgcggcaaggctcggtgat

SEQ ID NO: 712616 - DNA, 75 bp, synthetic construct
  source 1..75: mol_type = other DNA
cgatcgaaaaagcaaaacagttaccaacatccgcctatgtaatcagcaaccaatacggcaaccgatatatgtaca

SEQ ID NO: 712617 - DNA, 75 bp, synthetic construct
  source 1..75: mol_type = other DNA
gttagccgtatttggtgaagcagaggcgaaatcaataaaacccgaacacgttcgccgttacatggatgccagagg

SEQ ID NO: 712618 - DNA, 75 bp, synthetic construct
  source 1..75: mol_type = other DNA
caaaaattcagtggtcacaaaactgaatcacaggtgctggtatacgacaggaaagtaaaaatcagcccaactttg

SEQ ID NO: 712619 - DNA, 75 bp, synthetic construct
  source 1..75: mol_type = other DNA
gcgagggtacgtgaaggctaacccatgtgcaggtgtaagtaaattcaaggccaaaaaccgcgaacgatatgtaac

SEQ ID NO: 712620 - DNA, 75 bp, synthetic construct
  source 1..75: mol_type = other DNA
gggccatatggcggaaacctttaccagcagcgaaggcgttaccttcaagcggcctttcctcaaagccgaactctc

SEQ ID NO: 712621 - DNA, 75 bp, synthetic construct
  source 1..75: mol_type = other DNA
atgcgggaataaccgatgcccggggcgtggcgacggtcgagattaagcaaccacagggcgtcgggctaaaaacgg

SEQ ID NO: 712622 - DNA, 75 bp, synthetic construct
  source 1..75: mol_type = other DNA
taatcctcaggacaatgaaggcgaccagttttccacaccacctgcgctgcgctgggaaaatcaacccccccctac

SEQ ID NO: 712623 - DNA, 75 bp, synthetic construct
  source 1..75: mol_type = other DNA
attcaccattaccaaaggtatggggtataaccgagcggggcaggtgagcgggtttgatgacccgagcagtggtgc

SEQ ID NO: 712624 - DNA, 75 bp, synthetic construct
  source 1..75: mol_type = other DNA
gatgtgtttggtagagcctcatacggaagcagtcacaatagagcttacctcaacggcgcaggatgcagcaaaatc

SEQ ID NO: 712625 - DNA, 75 bp, synthetic construct
  source 1..75: mol_type = other DNA
tgtatggtgtaacagggccagatggaaccactacgatgacgctccgacaggatgcttccactgggttaagaaccg

SEQ ID NO: 712626 - DNA, 75 bp, synthetic construct
  source 1..75: mol_type = other DNA
tgcccggcatgcgccacttcggcgcgctggcgaccgttatccctacgtcggtgcagacagtccttggctggccga

SEQ ID NO: 712627 - DNA, 75 bp, synthetic construct
  source 1..75: mol_type = other DNA
agcccggattcgccaaaagcgaatttttggggacatatggccgaaacggtggcggcctccgatggttcagtctat

SEQ ID NO: 712628 - DNA, 75 bp, synthetic construct
  source 1..75: mol_type = other DNA
tcgctctatgcgcgttatccggggaacacgctgacgactcaaatcggctggtctacgaagtatgcatggtgggca

SEQ ID NO: 712629 - DNA, 75 bp, synthetic construct
  source 1..75: mol_type = other DNA
acgctggacacgattttcaccgtgccgaccagcccgaatgtcgccacggcgtatttctggggtcatatggcggat

SEQ ID NO: 712630 - DNA, 75 bp, synthetic construct
  source 1..75: mol_type = other DNA
gctggcggggcttaccgggcagcaccatgcggcagatgtctctaaccgtggcgaaacgcagaagccggacagcac

SEQ ID NO: 712631 - DNA, 75 bp, synthetic construct
  source 1..75: mol_type = other DNA
gtgaccagcccggattcgccaaaagcgaatttttggggacatatggccgaaacggtgacggcctccgatggttcg

SEQ ID NO: 712632 - DNA, 75 bp, synthetic construct
  source 1..75: mol_type = other DNA
tacaacctgccagcgggacggtggtaacgctggctgacagtgggaatacgattgatggtgtgacaggggcggacg

SEQ ID NO: 712633 - DNA, 75 bp, synthetic construct
  source 1..75: mol_type = other DNA
agcaatcggtatcaaacgagaactcttcgatgtgcatagtattccggcgttcccgccagcaccaacgcatcgttc

SEQ ID NO: 712634 - DNA, 75 bp, synthetic construct
  source 1..75: mol_type = other DNA
tcgtcgcttgttactggctgaatacgcaaacgccggacttctccctaccttttggcccccgtccgctggtgttta

SEQ ID NO: 712635 - DNA, 75 bp, synthetic construct
  source 1..75: mol_type = other DNA
gttaattgcgctgcccattgcctggctgggacgcgtgcgtctgcgtcagttggcgcgtcgcgactggcttaccgc

SEQ ID NO: 712636 - DNA, 75 bp, synthetic construct
  source 1..75: mol_type = other DNA
ttgattataccgaaggtctggaaggttcacgcttcatcgtaaccaacccgaatgcgaaaagcacctgcggttgcg

SEQ ID NO: 712637 - DNA, 75 bp, synthetic construct
  source 1..75: mol_type = other DNA
caataatgaggactggccgtactattcaccgacaaaaaaatctgatgagagtgtgaccccttgcgaagtggcaag

SEQ ID NO: 712638 - DNA, 75 bp, synthetic construct
  source 1..75: mol_type = other DNA
gaatgggtcaagcgccagggcgtcgtcaaccaccgttgcgtttgtgccctgtctggtaaaccctcatgcagtggc

SEQ ID NO: 712639 - DNA, 75 bp, synthetic construct
  source 1..75: mol_type = other DNA
ccaaaacggcgctgatcgctgcgctgtattctgatgcaacgaaaaacgccagcctcgacaccatttttaccgttg

SEQ ID NO: 712640 - DNA, 75 bp, synthetic construct
  source 1..75: mol_type = other DNA
caagttccgcgccgtatcgggtctataacattggcaacagctcgccggtggaactgatggactacatcaccgccc

SEQ ID NO: 712641 - DNA, 75 bp, synthetic construct
  source 1..75: mol_type = other DNA
tttgatcgcgtgatccacctggcggctcaggccggtgtgcgttactcgctggaaaatccgtatgcctatgcggac

SEQ ID NO: 712642 - DNA, 75 bp, synthetic construct
  source 1..75: mol_type = other DNA
gcggtggttcgggtgcaggatgtgatcccgcaggccaatgccgactggaccgttgagagcggttcgccggccacc

SEQ ID NO: 712643 - DNA, 75 bp, synthetic construct
  source 1..75: mol_type = other DNA
ttgactataccgaaggtctggaaggttctcgtttcatcgtgaccaacccgaacgcgaaaaagcacctgcggttgc

SEQ ID NO: 712644 - DNA, 75 bp, synthetic construct
  source 1..75: mol_type = other DNA
ttgactataccgaaggtctggaaggttctcgtttcatcgtgaccaacccgaacgcgaaaagcacctgcggttgcg

SEQ ID NO: 712645 - DNA, 75 bp, synthetic construct
  source 1..75: mol_type = other DNA
tctctctcttttactttttacaagttagatctcgctgaccgtgatggtatggctaaacttttcgaaacggagcag

SEQ ID NO: 712646 - DNA, 75 bp, synthetic construct
  source 1..75: mol_type = other DNA
gaacccgcaggacctggaaggcgatgtgtttaccaacccccgttgggaaaaccaaacgccgccagcggtctcttt

SEQ ID NO: 712647 - DNA, 75 bp, synthetic construct
  source 1..75: mol_type = other DNA
cacagtggaatagcacgcttaatgcagcgaaactgaaaaagggtgaaacgctacaggtaaaagtcacggtgaaag

SEQ ID NO: 712648 - DNA, 75 bp, synthetic construct
  source 1..75: mol_type = other DNA
atggcgagcgggtgccgttcacggcttttactattaccaaagatatcagtcttgaccgtgaagaaagcgcaaccg

SEQ ID NO: 712649 - DNA, 75 bp, synthetic construct
  source 1..75: mol_type = other DNA
caaccgtccgactgcatgggcgaagaagggcgtatcaataccgttaactatcaaggtcacggatgatgcgggcag

SEQ ID NO: 712650 - DNA, 75 bp, synthetic construct
  source 1..75: mol_type = other DNA
ttgctgataagcgatgagtttgcggacattacgtttagagcgaaatccatgggctttattctgcttaatccaatg

SEQ ID NO: 712651 - DNA, 75 bp, synthetic construct
  source 1..75: mol_type = other DNA
gtcagggattcagtttattgaataagaatcgttatggtgatcaccgaagagcattgtgggagccttatatggatg

SEQ ID NO: 712652 - DNA, 75 bp, synthetic construct
  source 1..75: mol_type = other DNA
agcgttcttggcaccgttttctttggcattatcagccctgtaggactcacatttggattacatcctctgtcccta

SEQ ID NO: 712653 - DNA, 75 bp, synthetic construct
  source 1..75: mol_type = other DNA
tttatgtcagttgcctggcgacggcaaatagtcctgctaacgctattaccttagaggtggtggatcaggcgcaat

SEQ ID NO: 712654 - DNA, 75 bp, synthetic construct
  source 1..75: mol_type = other DNA
gtctgggcgcgtgttagtcaggcaaatacctcaagtataagtaacggtggctgcggagcgaatatgctgccacgt

SEQ ID NO: 712655 - DNA, 75 bp, synthetic construct
  source 1..75: mol_type = other DNA
tgcgccagtttggcgcgttggcaacggtggtgcccacgacagttcaggatctcgctggttggccgatacagggta

SEQ ID NO: 712656 - DNA, 75 bp, synthetic construct
  source 1..75: mol_type = other DNA
gaattacacctttagtcgtccgaaattggcggcggaagttgataacgaagatggcagtgtgaacgatcacggtga

SEQ ID NO: 712657 - DNA, 75 bp, synthetic construct
  source 1..75: mol_type = other DNA
ctggtggtcagcctttctggcatctcgcaaaccagtgaaacggcggtgatatttactgtactcaccagcccggat

SEQ ID NO: 712658 - DNA, 75 bp, synthetic construct
  source 1..75: mol_type = other DNA
tgggttaacggggagtgacggtagcaaaattctcaccatcacccgcccggacactcacggcacgaaaacggcaat

SEQ ID NO: 712659 - DNA, 75 bp, synthetic construct
  source 1..75: mol_type = other DNA
ttcaacaaaaccatggagtattttaaaccaacagattttatccgatatacatggaaattcgcaacagttactccg

SEQ ID NO: 712660 - DNA, 75 bp, synthetic construct
  source 1..75: mol_type = other DNA
tggcatatacgaggcggtttccgaacaactccttttactcatttttaaggctcgtcagctatatcagaatccaga

SEQ ID NO: 712661 - DNA, 75 bp, synthetic construct
  source 1..75: mol_type = other DNA
agatataatttgcttgaggctgaaacgatagcggcctggttggcagagaaccagcaaaatattgaagcgcattac

SEQ ID NO: 712662 - DNA, 75 bp, synthetic construct
  source 1..75: mol_type = other DNA
ggtatccactatcaaacaggcgctgggtaaacaaggtatcagtacgggcgcgaatgaaaagtcgctcacagtggg

SEQ ID NO: 712663 - DNA, 75 bp, synthetic construct
  source 1..75: mol_type = other DNA
taaaacagatcgtttcccgggcaatattgaggttgccatcaacgaaatggggatggaaaccagtaaataccggaa

SEQ ID NO: 712664 - DNA, 75 bp, synthetic construct
  source 1..75: mol_type = other DNA
gataattttgaatttcattctcttctggagctcagtaaagataatgagaagcggctggaaacatttcaaaaatgg

SEQ ID NO: 712665 - DNA, 75 bp, synthetic construct
  source 1..75: mol_type = other DNA
gcaccgcgtggagatgacgatgcccgcggcaattgcccgcgaagatggtcacctcttctcgtgtaccgttcagga

SEQ ID NO: 712666 - DNA, 75 bp, synthetic construct
  source 1..75: mol_type = other DNA
tacttctatggcccgccaaccgagatgctcaccgtggtcgtcagtatggtgtgggtattctacaacctgattgtt

SEQ ID NO: 712667 - DNA, 75 bp, synthetic construct
  source 1..75: mol_type = other DNA
tcatcagcaaaagcctcggacgcatcgctggcagtttactgggagccattgcggcactgcttcttgccgggcata

SEQ ID NO: 712668 - DNA, 75 bp, synthetic construct
  source 1..75: mol_type = other DNA
cccgctagtgacgccagccttgctaagccgtgagggttttttatatccgacgccagcgacctccattcccagaga

SEQ ID NO: 712669 - DNA, 75 bp, synthetic construct
  source 1..75: mol_type = other DNA
gcttaaacgcggtcagcaggaatacgtcttcccgacccaggtggcgcgcgtgatgggtaatgaagttgggctgaa

SEQ ID NO: 712670 - DNA, 75 bp, synthetic construct
  source 1..75: mol_type = other DNA
gcggcaattgcccgcgaagatggtcacctcttctcgtgtaccgttcaggatttctccgacggtggtttggggatc

SEQ ID NO: 712671 - DNA, 75 bp, synthetic construct
  source 1..75: mol_type = other DNA
ccgcgattgatgtcggtaacatgcttgcggaaaaaattctgtctggcagtacgcaagaagagattaccgagaaat

SEQ ID NO: 712672 - DNA, 75 bp, synthetic construct
  source 1..75: mol_type = other DNA
catgcccagtggcgttgggatctggcgatcgcttcccacggcattcatatgcacgcgccggaagaaggtctgagg

SEQ ID NO: 712673 - DNA, 75 bp, synthetic construct
  source 1..75: mol_type = other DNA
acttcgcccagacttgtgcgaactgccatacccaggacaaagctgccttgcaaaaagtggtcgcggaacgtaagc

SEQ ID NO: 712674 - DNA, 75 bp, synthetic construct
  source 1..75: mol_type = other DNA
aagtcgaaaatatggagcagtattacgacaaaattgctttctccgactggaccaacgccctgtcgaaaacgccga

SEQ ID NO: 712675 - DNA, 75 bp, synthetic construct
  source 1..75: mol_type = other DNA
ataaacacatcacgatagtttctccatggctgacctggcaaaagctggagcaaaccggttttcttgattctatga

SEQ ID NO: 712676 - DNA, 75 bp, synthetic construct
  source 1..75: mol_type = other DNA
gaagaatgcgctctcttttgattataaagagcgtaaggatttaaaaacctccgggaccaaaatctacacacttca

SEQ ID NO: 712677 - DNA, 75 bp, synthetic construct
  source 1..75: mol_type = other DNA
cgccgaaaaatgccgaagatggcacgatgccaatggcctgctggagttgtaaaagcccggacgtggcgcgtttga

SEQ ID NO: 712678 - DNA, 75 bp, synthetic construct
  source 1..75: mol_type = other DNA
caatgtgattttcagccagctggtgaatgaaatcaccactgagccggattacgaagcagctctggcggtactgaa

SEQ ID NO: 712679 - DNA, 75 bp, synthetic construct
  source 1..75: mol_type = other DNA
ttcatcccctgaaaaggtcattgaactcctgcatggtcagttggcagcaaaatccgagcaactgataagactgaa

SEQ ID NO: 712680 - DNA, 75 bp, synthetic construct
  source 1..75: mol_type = other DNA
tggtgtggagcagcatgataacttcctgaatcagacgttcgaaaataccgataaacacatcacgatagtttctcc

SEQ ID NO: 712681 - DNA, 75 bp, synthetic construct
  source 1..75: mol_type = other DNA
gtgatcctgtgggcggggtatcccttctcgcgcgattacaacaagccgcgtggacatgcctttgctgtgaccgat

SEQ ID NO: 712682 - DNA, 75 bp, synthetic construct
  source 1..75: mol_type = other DNA
atgacaaggataaaaataaacgcacgccgtatcttcagcttattgattccttttttctttttcacttctgttcac

SEQ ID NO: 712683 - DNA, 75 bp, synthetic construct
  source 1..75: mol_type = other DNA
tcaattgttactctcccgttccgaatccattacccgtgaaatgaaaaatatggttaatgagataagcggtatgtc

SEQ ID NO: 712684 - DNA, 75 bp, synthetic construct
  source 1..75: mol_type = other DNA
ctggctcgtcataccgataacgccgaagctatgtggagcgggctgcgtacattttgtacgttgatgatgattggc

SEQ ID NO: 712685 - DNA, 75 bp, synthetic construct
  source 1..75: mol_type = other DNA
taacctttcagggctgtcatttagttattccgcataaacccgaagagatgccgctggcacatctgggcaaagtcc

SEQ ID NO: 712686 - DNA, 75 bp, synthetic construct
  source 1..75: mol_type = other DNA
ggggcccggtggttgagtcgttacgcctgtcaactgaacaaaacatctctgtcccgacagcgctcgaagctgcca

SEQ ID NO: 712687 - DNA, 75 bp, synthetic construct
  source 1..75: mol_type = other DNA
tatgccctccatgaaggagtaagccctgatcttgcctcacttggccgaagtgtgatgcgcgagtggtatagccat

SEQ ID NO: 712688 - DNA, 75 bp, synthetic construct
  source 1..75: mol_type = other DNA
atgctacaaaattgccggaatggcggaagcctatgacgtgacccttgcgccgcactgtccgctcggcccgattgc

SEQ ID NO: 712689 - DNA, 75 bp, synthetic construct
  source 1..75: mol_type = other DNA
caaaaaaggactccgtcctagcacagatcaatgcaagaaaattgcagtatgcaaatgacagggctgcgattattg

SEQ ID NO: 712690 - DNA, 75 bp, synthetic construct
  source 1..75: mol_type = other DNA
tacatgtttcatttttccctaaggcgatgttgcaagattatgaatctgccgggcgggatctatctgatatcattg

SEQ ID NO: 712691 - DNA, 75 bp, synthetic construct
  source 1..75: mol_type = other DNA
gtacgattgctaacgttcgcacaattttcaataaaaaaggcggcaatatcggagcggcaggttctgtcagctata

SEQ ID NO: 712692 - DNA, 75 bp, synthetic construct
  source 1..75: mol_type = other DNA
cctggttcaaagaagtcatcaagaaaaacatgatcgaattgggctgcggcggctggatggcagattttggcgaat

SEQ ID NO: 712693 - DNA, 75 bp, synthetic construct
  source 1..75: mol_type = other DNA
agatctctgcgaagaagcggcgcaacatggctatctggcaaaagatgcctctggcggtgactatctggtggaatt

SEQ ID NO: 712694 - DNA, 75 bp, synthetic construct
  source 1..75: mol_type = other DNA
tggagctggtactcaaaggggttgatgttagagggaaggagcctggagagctgttcaaagctgcacaggccttta

SEQ ID NO: 712695 - DNA, 75 bp, synthetic construct
  source 1..75: mol_type = other DNA
atggaaagtaaagagcgtgcaccagccatcctcgtcatggtgatcggtgactgtatcactacatgggatgaggtg

SEQ ID NO: 712696 - DNA, 75 bp, synthetic construct
  source 1..75: mol_type = other DNA
ctatgcccggcgtagcatcggcaataacgccgcccgcctggtcaaaggcattcccttcagggaataccacccata

SEQ ID NO: 712697 - DNA, 75 bp, synthetic construct
  source 1..75: mol_type = other DNA
tcctttgcagctacggagaatgcagtgatggccgtgggagccgttccggtcttcgctaatattgacagttctttc

SEQ ID NO: 712698 - DNA, 75 bp, synthetic construct
  source 1..75: mol_type = other DNA
tgttctcatgttgtctggcaattgcgcgactgggaatcgcgttccgatccgttatcgcgagtacgggataactgt

SEQ ID NO: 712699 - DNA, 75 bp, synthetic construct
  source 1..75: mol_type = other DNA
ccaccgttggcggtgtcatcagcaaaagcatgggacgtattgctggcagtttgctcggagctatcgcggcactga

SEQ ID NO: 712700 - DNA, 75 bp, synthetic construct
  source 1..75: mol_type = other DNA
gctggcgcaatggcgttatgcgttacgcaataccattgccatgtgtctggcgctgacggttgcctattatttgaa

SEQ ID NO: 712701 - DNA, 75 bp, synthetic construct
  source 1..75: mol_type = other DNA
ttccgatggttaatatcacggaagcaagccaattgtgggatatcgctcaggcgcgcgtttgcgaagtcatcgtcg

SEQ ID NO: 712702 - DNA, 75 bp, synthetic construct
  source 1..75: mol_type = other DNA
gtttctctttccactgctggcgacaatgcagcttcttaaattgcagatgccaaaatttgccgcattgtgggggca

SEQ ID NO: 712703 - DNA, 75 bp, synthetic construct
  source 1..75: mol_type = other DNA
ctggtgccaatgcattaacgctggcagcaattagttgcgtactttactccgcagtcgcggcaccgtttaagtcgt

SEQ ID NO: 712704 - DNA, 75 bp, synthetic construct
  source 1..75: mol_type = other DNA
gcgtggtggagagtccggcggacatctacgccattgagcagacggggcagttttcaggtcgttattttgtgttga

SEQ ID NO: 712705 - DNA, 75 bp, synthetic construct
  source 1..75: mol_type = other DNA
cagcgtatggcgttcacgctgcttcagcgcgatcgtagcggcgggatgcgtctggcgcaggcgctcacccgggcg

SEQ ID NO: 712706 - DNA, 75 bp, synthetic construct
  source 1..75: mol_type = other DNA
tcctgttatcgtggatgcagcacagtgctttggtatcaggtcactcatcagccactgtgatctgctggcgttgag

SEQ ID NO: 712707 - DNA, 75 bp, synthetic construct
  source 1..75: mol_type = other DNA
tcatgtttttcaccgcaatgaaaaatattttgagtaagggtaatgtcgttcatatacagaacgaagaagagattg

SEQ ID NO: 712708 - DNA, 75 bp, synthetic construct
  source 1..75: mol_type = other DNA
tatcactatcattgattttgtcgcactcatcaatggcagttactgctctgtgcctgaagcgactgtgtcactttc

SEQ ID NO: 712709 - DNA, 75 bp, synthetic construct
  source 1..75: mol_type = other DNA
gatcgtctggaacagcgtctggcggaggaaaaaatcaccgaagtgatcctcgccaccaacccaacggtcgaaggt

SEQ ID NO: 712710 - DNA, 75 bp, synthetic construct
  source 1..75: mol_type = other DNA
caaacgctgcgtcgctatcagtgcgatctgattagcggtctgctacccgctgaagaagccgatagcctcattagc

SEQ ID NO: 712711 - DNA, 75 bp, synthetic construct
  source 1..75: mol_type = other DNA
atttagaaaacatactggatatacaccactccagtatagaaaaagtaaagtatggacatttaaaaaccagactgg

SEQ ID NO: 712712 - DNA, 75 bp, synthetic construct
  source 1..75: mol_type = other DNA
agaagatgaaaatgtcttaaaagaggcattagaagggtatgactatacaatgatatcctttgataagaacaatgg

SEQ ID NO: 712713 - DNA, 75 bp, synthetic construct
  source 1..75: mol_type = other DNA
gcctttgtcagcgatctggaacgtctggcggcgcagctcgacagcggtatcaccgacgcagtatatgcggaagtg

SEQ ID NO: 712714 - DNA, 75 bp, synthetic construct
  source 1..75: mol_type = other DNA
atttatcagccgcaacaacgccggtgaaacggtgctgctggggcgtaacggttccgactattccgcgacacaaat

SEQ ID NO: 712715 - DNA, 75 bp, synthetic construct
  source 1..75: mol_type = other DNA
cttgatgcccgcgagtttttacgcgctgaacgcgccgcacaaccgcaggttgatgaagggctttcttacccgttg

SEQ ID NO: 712716 - DNA, 75 bp, synthetic construct
  source 1..75: mol_type = other DNA
gatatccagagctactacgatcaacatcaggatcagttcactcagccacagcgtatgcgctacagcatcatccag

SEQ ID NO: 712717 - DNA, 75 bp, synthetic construct
  source 1..75: mol_type = other DNA
gcgtgacgatgtcgcggcgaaagtgaaacacgaaaaagccctcgatgcgtactacgctctgcaacagaaagtgag

SEQ ID NO: 712718 - DNA, 75 bp, synthetic construct
  source 1..75: mol_type = other DNA
ctggatgctgaaaaactgctggttgagctgaacgcaggcaaaggtgcggaagctatgcaggcggcagctctgaaa

SEQ ID NO: 712719 - DNA, 75 bp, synthetic construct
  source 1..75: mol_type = other DNA
tgttggttctaaatttcaaacaaatcaccctggattgattgtgtttgatgagcctcgtcaacaagaagcaaataa

SEQ ID NO: 712720 - DNA, 75 bp, synthetic construct
  source 1..75: mol_type = other DNA
tattctaaattcaaaaacaaattcaatagcgattatcggttctataataaatatgccactgaccaattacaaaat

SEQ ID NO: 712721 - DNA, 75 bp, synthetic construct
  source 1..75: mol_type = other DNA
cagcttcgagctgagcaggttcatgacaccatgctggctacaagtctaattaatcctcaaggtattagggtttca

SEQ ID NO: 712722 - DNA, 75 bp, synthetic construct
  source 1..75: mol_type = other DNA
aagccttattcagggactgcatcagtccgtcttccgcgcggaaaaacgcatcggcctggtcctgttcggtaaggg

SEQ ID NO: 712723 - DNA, 75 bp, synthetic construct
  source 1..75: mol_type = other DNA
gcagtcgcagcgcagaaagcaacggcgtcgatctgctgggcattatcgaccaggaagtgccgaaaatgaccgact

SEQ ID NO: 712724 - DNA, 75 bp, synthetic construct
  source 1..75: mol_type = other DNA
gacgacgcagcgaagagagcaacggcgtcgatttgctgggcatcatcgacgaggatgtgccgaaaatgaccgact

SEQ ID NO: 712725 - DNA, 75 bp, synthetic construct
  source 1..75: mol_type = other DNA
gctgcgccaacctgaactcggtgaagtctgccattgcgcgccacggttatgaacccaaagtcagccgtgacccgg

SEQ ID NO: 712726 - DNA, 75 bp, synthetic construct
  source 1..75: mol_type = other DNA
attgaaatccccggcgtgaccggcgtattaaccggcatttatatgctgctttccggcgcgattgcgaactatctg

SEQ ID NO: 712727 - DNA, 75 bp, synthetic construct
  source 1..75: mol_type = other DNA
gactttggtctgccactgccacatatgggctggaaccgcgtttatccgcaggcaggcaaccgcctgtttcagggg

SEQ ID NO: 712728 - DNA, 75 bp, synthetic construct
  source 1..75: mol_type = other DNA
gtttttacccggcgtcggcaccgcacaagcagcgatggatcaggtgcgtgagcgcgagctgtttgatctcatcaa

SEQ ID NO: 712729 - DNA, 75 bp, synthetic construct
  source 1..75: mol_type = other DNA
cgggcaaacgtctggtagtgaccggatttatcagccgcaacaacgccggtgaaacggtgctgctggggcgtaacg

SEQ ID NO: 712730 - DNA, 75 bp, synthetic construct
  source 1..75: mol_type = other DNA
taactgaacctgacccgcgtgatgacctttccggcaaagacgtgatgcgcaagctggtgatcctggcgcgtgaag

SEQ ID NO: 712731 - DNA, 75 bp, synthetic construct
  source 1..75: mol_type = other DNA
cgcgcctgatgtctgcggtgcttaaccaacaaggactgcctgcggcctggcttgatgcccgcgagtttttacgtg

SEQ ID NO: 712732 - DNA, 75 bp, synthetic construct
  source 1..75: mol_type = other DNA
aaattctataatatggacaaaaaaggaatcttcaaatactgaaacatcaatagatgaaggtatttatgcgcgctt

SEQ ID NO: 712733 - DNA, 75 bp, synthetic construct
  source 1..75: mol_type = other DNA
cggtgcgctggcgggcgtttcccgcgtaaccatctggagcgatgtcgccggggtgtacagcgccgacccgcgtaa

SEQ ID NO: 712734 - DNA, 75 bp, synthetic construct
  source 1..75: mol_type = other DNA
ataaagagatcgaccagatcctgaaacgcgcgcaggtgcgtccgctggcggttggcgtgcataacgatcgccagt

SEQ ID NO: 712735 - DNA, 75 bp, synthetic construct
  source 1..75: mol_type = other DNA
gagctggcagcgaacgaaggctatatgaaaaccctgcgtcaacaggtgctgaatcgtctgatcgacgaggcgctg

SEQ ID NO: 712736 - DNA, 75 bp, synthetic construct
  source 1..75: mol_type = other DNA
gttccgactattccgcgacacaaatcggtgcgctggcgggtgtttctcgcgtaaccatctggagcgacgtcgccg

SEQ ID NO: 712737 - DNA, 75 bp, synthetic construct
  source 1..75: mol_type = other DNA
tcgtctctctgcgcatcaggttcaacaaacgctgcgtcgctatcagtgcgatctgattagcggcctgctacccgc

SEQ ID NO: 712738 - DNA, 75 bp, synthetic construct
  source 1..75: mol_type = other DNA
gcccattgcgaaggcggtagcatcgaccatttctttgaaaacggcgatgaacttaacgagcagatggtgcaacga

SEQ ID NO: 712739 - DNA, 75 bp, synthetic construct
  source 1..75: mol_type = other DNA
ccgttgtggttattgatgaaaatgacaatgtaatttttagccagctggtagatgaaatcactaccgagccgaatt

SEQ ID NO: 712740 - DNA, 75 bp, synthetic construct
  source 1..75: mol_type = other DNA
agtggccgacagtgcgctgaaaatcctcgacgaagcgggattacctggcgaactgcgtctgcgtcaggggctggc

SEQ ID NO: 712741 - DNA, 75 bp, synthetic construct
  source 1..75: mol_type = other DNA
gtaaccatctggagcgacgtcgccggggtatacagtgccgacccgcgtaaagtgaaagatgcctgcctgctgccg

SEQ ID NO: 712742 - DNA, 75 bp, synthetic construct
  source 1..75: mol_type = other DNA
ggcaaaaccgatgtcagcggcgacggtaaaccggatacccgcatcagggatttaacccgcgaacaggtcgcgcag

SEQ ID NO: 712743 - DNA, 75 bp, synthetic construct
  source 1..75: mol_type = other DNA
aaaccaaatacggcatttctgaccgtcgcgacggcgttattgatggcaaaaccgatgttaacggtgacgggaagc

SEQ ID NO: 712744 - DNA, 75 bp, synthetic construct
  source 1..75: mol_type = other DNA
cgccggatcaaggttccacgcgcattgaacgcgtgctggcctccggtactggtgcgcgtattgtcaccagccacg

SEQ ID NO: 712745 - DNA, 75 bp, synthetic construct
  source 1..75: mol_type = other DNA
agccctgtttgcctttgactctgccgtccagcatggcgtcaaaaaggctgtccagttgcttcaggaagctgcggg

SEQ ID NO: 712746 - DNA, 75 bp, synthetic construct
  source 1..75: mol_type = other DNA
cccgcccagggcaaatacctgaacggctggtttaaccgcatggaaaaactgaccgacgcctgtctggaaatcatc

SEQ ID NO: 712747 - DNA, 75 bp, synthetic construct
  source 1..75: mol_type = other DNA
aagctatcaaaattttgcaggaagccactgatgtggatgctgacggcatcatcggcccgcgtacccgtaaggccg

SEQ ID NO: 712748 - DNA, 75 bp, synthetic construct
  source 1..75: mol_type = other DNA
tgctgcaacttccacagttacctcttagcgccaacggcaagctggatcgcaaagccttaccgttgcctgaactga

SEQ ID NO: 712749 - DNA, 75 bp, synthetic construct
  source 1..75: mol_type = other DNA
actgtcgcagcgccttacggtgtgggtattcacccttatttaacctgcaacttaacatctgttgatgaatatctg

SEQ ID NO: 712750 - DNA, 75 bp, synthetic construct
  source 1..75: mol_type = other DNA
gtttatagcggagaaaaattacagcgtcagggactggcagttgaacctatgagttgcccgcctaacgcctttaat

SEQ ID NO: 712751 - DNA, 75 bp, synthetic construct
  source 1..75: mol_type = other DNA
gcgggcagacaatttcactcatcgccggggattatcacgcgactatcgtgactgtcggagcaggtctggctgaat

SEQ ID NO: 712752 - DNA, 75 bp, synthetic construct
  source 1..75: mol_type = other DNA
atattgaccggcgtgagtggttacctgattagcggaggcaataactacgccgcaaaagtgaatgaccaggaaatc

SEQ ID NO: 712753 - DNA, 75 bp, synthetic construct
  source 1..75: mol_type = other DNA
aacatgttaataagcttgtggaggagttgatttgcggaaaatatataacagaaaagggtgaggattttattcgtc

SEQ ID NO: 712754 - DNA, 75 bp, synthetic construct
  source 1..75: mol_type = other DNA
accatttctttgaaaatggcgatgaacttaatgagcagatggtgcaacgactggaagcggcccgcgaaatggggc

SEQ ID NO: 712755 - DNA, 75 bp, synthetic construct
  source 1..75: mol_type = other DNA
cataaacgacacgctggaaacgtatcagtttggcgtgcgttccggtgctaaatcagggcttgaggcgaatctgga

SEQ ID NO: 712756 - DNA, 75 bp, synthetic construct
  source 1..75: mol_type = other DNA
cgtgacaggaatgtatgcacttatctttcttgcccttcccttgagcaacttcatctataaacttcttcgtaaata

SEQ ID NO: 712757 - DNA, 75 bp, synthetic construct
  source 1..75: mol_type = other DNA
agcatgggacgctacgagcattacaagagtttgctgacaagcataacgttgaggtgcgcagggaagggggaagta

SEQ ID NO: 712758 - DNA, 75 bp, synthetic construct
  source 1..75: mol_type = other DNA
ccacacctttaaaaccgctaatgatctgtgggaaataaccattacccatccacagcaggcgctttcggtaagcct

SEQ ID NO: 712759 - DNA, 75 bp, synthetic construct
  source 1..75: mol_type = other DNA
cgcagataatccccgggaatacagagcagttattgcaggaagcccgtgatcggctggcgcgggcaactattgaac

SEQ ID NO: 712760 - DNA, 75 bp, synthetic construct
  source 1..75: mol_type = other DNA
catgaaagcaccggataataacgtgctggaatttgcgctggccagacgcgtgctgctcgtggagggggatgctga

SEQ ID NO: 712761 - DNA, 75 bp, synthetic construct
  source 1..75: mol_type = other DNA
gttgaaaaccattcctcaaccatcgcggcgttcgtatgcgccgccaatgatgcgcccgaaaaacgcgtcaatatg

SEQ ID NO: 712762 - DNA, 75 bp, synthetic construct
  source 1..75: mol_type = other DNA
gccgaagggacaaaaagtccagctttggtcagctgattaagtacatggcagacaagccgtctcaggagttgactg

SEQ ID NO: 712763 - DNA, 75 bp, synthetic construct
  source 1..75: mol_type = other DNA
cacaggaactggatggcatcaagtcacatactcacagcgcgagtgcatcaaatacggacttaggcactaaatcaa

SEQ ID NO: 712764 - DNA, 75 bp, synthetic construct
  source 1..75: mol_type = other DNA
tgaagaaaaaggtgatggaaacaacgctgcgggggctacggggtttacggttggaaccgcaacaacatcgtctac

SEQ ID NO: 712765 - DNA, 75 bp, synthetic construct
  source 1..75: mol_type = other DNA
aacttaaatctatatttttctcgaaagaatacgtgaatatcatagttacaactattatttctgtaatgttgatgt

SEQ ID NO: 712766 - DNA, 75 bp, synthetic construct
  source 1..75: mol_type = other DNA
ttcgaatcagacaactggaaaatcaactgggtgtgaaccttttcccccgccacagaaacaatatccgtttaaccg

SEQ ID NO: 712767 - DNA, 75 bp, synthetic construct
  source 1..75: mol_type = other DNA
atgaccgtcaacagattgtccggaaccctcacagcaagaaagagcggggcaactggcgctcactcgatcgcatca

SEQ ID NO: 712768 - DNA, 75 bp, synthetic construct
  source 1..75: mol_type = other DNA
gaaccatccgttcaatggacgaagaaacggattcagtcctgaaaaatcatttctcatccattgtaactgaaagta

SEQ ID NO: 712769 - DNA, 75 bp, synthetic construct
  source 1..75: mol_type = other DNA
aataggagaatatctggggcgagaccgggattctgtccacaatcgggcgcgatatattggcgtaagcatgaaaaa

SEQ ID NO: 712770 - DNA, 75 bp, synthetic construct
  source 1..75: mol_type = other DNA
aatgggggagtatctcgggcgacatcatgacagcatccgctgccgggcacgagtgactggcgtcagcttaaaaaa

SEQ ID NO: 712771 - DNA, 75 bp, synthetic construct
  source 1..75: mol_type = other DNA
ttgctgtggccagcattgatgtggatggcaacatcacggatttacggccaaaaggtagcctgggagaacagcagg

SEQ ID NO: 712772 - DNA, 75 bp, synthetic construct
  source 1..75: mol_type = other DNA
acccgctgaaacctggcagattgattttactgcgcgtatggccggaatggatgagcgccagcgtctggaaaatat

SEQ ID NO: 712773 - DNA, 75 bp, synthetic construct
  source 1..75: mol_type = other DNA
tcgtttctgatggagtacaacggcgcacaaacggaaaccgggattaatacacccgctgaaacctggcagattgat

SEQ ID NO: 712774 - DNA, 75 bp, synthetic construct
  source 1..75: mol_type = other DNA
cttttagagtctctttatgctcttattgtgactcgttttgagttcttattggtttctcattttgcgtcacgaact

SEQ ID NO: 712775 - DNA, 75 bp, synthetic construct
  source 1..75: mol_type = other DNA
cagttggttcagacaatgatcgcaacaaagagaaatcccaacaagattaagagggaactcgatcttgccgaattg

SEQ ID NO: 712776 - DNA, 75 bp, synthetic construct
  source 1..75: mol_type = other DNA
caaccatcgcaataccaccgaccccactgaacggtatgcaatacctgataatgaacgaatttatgaggcacttca

SEQ ID NO: 712777 - DNA, 75 bp, synthetic construct
  source 1..75: mol_type = other DNA
tgcatatgttgatgactgcgcctacgttatacaatgcacttttagcatcagcaaaatatccaccattatctgaca

SEQ ID NO: 712778 - DNA, 75 bp, synthetic construct
  source 1..75: mol_type = other DNA
actatctggctggagggcgtacaactgccgctgcgcaatttgccagtggcgatcccaattgatgaaacggatctg

SEQ ID NO: 712779 - DNA, 75 bp, synthetic construct
  source 1..75: mol_type = other DNA
gttttctaactgcattacacaataagcgaggttttaatcggttgggttgtgattatctgttgctaaccgttctga

SEQ ID NO: 712780 - DNA, 75 bp, synthetic construct
  source 1..75: mol_type = other DNA
attattctgacagtaaaagcttgcgcgagtatatctgtcaggaagctggaataatgaagctaggaatgcacgatc

SEQ ID NO: 712781 - DNA, 75 bp, synthetic construct
  source 1..75: mol_type = other DNA
atgaagttgaccaaaaggaaccctaacaaaataaaacgggagtccgatgcttctgaactcactatcagtgaagtg

SEQ ID NO: 712782 - DNA, 75 bp, synthetic construct
  source 1..75: mol_type = other DNA
cttttagagtctacttgtgttcttgctgtgactcaatttgggttgttattggtttctcattttgcgtcacaaact

SEQ ID NO: 712783 - DNA, 75 bp, synthetic construct
  source 1..75: mol_type = other DNA
tattatttcttattgtgtctcattttgggttaatgtcaagtaacgtggctcttttagagtctacttgtgttcttg

SEQ ID NO: 712784 - DNA, 75 bp, synthetic construct
  source 1..75: mol_type = other DNA
ggttttggtgtaaaggtaagtttgacgaaaaaaacctatgtaatccagagaagagtgtcttctggtactcgtgat

SEQ ID NO: 712785 - DNA, 75 bp, synthetic construct
  source 1..75: mol_type = other DNA
cgaagagcttacgtcatatgctgttgtgaaaaggttgctaaaccatcgcaacactacagacccgacagaaagata

SEQ ID NO: 712786 - DNA, 75 bp, synthetic construct
  source 1..75: mol_type = other DNA
aggttctgactgaagaagaagcaagaacgaccagttatgttgatcttgaaaaccgaatgattcgattcttcgaca

SEQ ID NO: 712787 - DNA, 75 bp, synthetic construct
  source 1..75: mol_type = other DNA
gactctgtcaggtgccgcgcaggaatgattggtgccggattaacaaagtgcggtgagttacgccccggcacacgt

SEQ ID NO: 712788 - DNA, 75 bp, synthetic construct
  source 1..75: mol_type = other DNA
tctgcagtcagcaagcaagttacgtcagagtgggcgtgtggctcaccgttgtgaaggagatacacgcagacattt

SEQ ID NO: 712789 - DNA, 75 bp, synthetic construct
  source 1..75: mol_type = other DNA
tcctgcggtatctgcagccagacgcgaggacccgtacttcaaagccagttacgacaacgtggactacagccagat

SEQ ID NO: 712790 - DNA, 75 bp, synthetic construct
  source 1..75: mol_type = other DNA
ttctgcagtcagcaagcaagttacgtcagagtggccgtgtggctcactgttgtgaagggaaaacacgcagacatt

SEQ ID NO: 712791 - DNA, 75 bp, synthetic construct
  source 1..75: mol_type = other DNA
gtgaacatgagtcttttgaatgacgttcagaaattcattgaagcccatccgggctgtacttccggagacattgcg

SEQ ID NO: 712792 - DNA, 75 bp, synthetic construct
  source 1..75: mol_type = other DNA
gaagaactggagtcaaggggcttataccgtcgtgctgcaaccgtgtggatggcggcattccgtgaaagccactcc

SEQ ID NO: 712793 - DNA, 75 bp, synthetic construct
  source 1..75: mol_type = other DNA
agcgcaggatccggaaccacaaccagttcgtgaaaccagacctgtgcgcaatttctatgtcggcactaacgaccc

SEQ ID NO: 712794 - DNA, 75 bp, synthetic construct
  source 1..75: mol_type = other DNA
atgagtctattaaatgacgttcagaaattcattgaagcccatccggggtgtacttccggcgacattgcggatgct

SEQ ID NO: 712795 - DNA, 75 bp, synthetic construct
  source 1..75: mol_type = other DNA
gctgcaacgtcaggagttgagcgacaattttcatacaataaaagacaactggcaccgtttaatgaatcgtcagcg

SEQ ID NO: 712796 - DNA, 75 bp, synthetic construct
  source 1..75: mol_type = other DNA
ctacggcgaggataagaataccgataatcctgaccaacgtatcgctgaagatatccttctattgatcagcaaaac

SEQ ID NO: 712797 - DNA, 75 bp, synthetic construct
  source 1..75: mol_type = other DNA
atgagtctgttgaatgacgttcagaaattcattgaagcccatccggggtgtacttccggggacattgcggatgct

SEQ ID NO: 712798 - DNA, 75 bp, synthetic construct
  source 1..75: mol_type = other DNA
atgagtctcttaaatgacgttcagaaattcattgaagcccatccggggtgtacttccggagacattgcggatgct

SEQ ID NO: 712799 - DNA, 75 bp, synthetic construct
  source 1..75: mol_type = other DNA
atgagtctattcaatgacgttcagaaattcattgaagcccatccggggtgtacttccggagacattgcggatgct

SEQ ID NO: 712800 - DNA, 75 bp, synthetic construct
  source 1..75: mol_type = other DNA
tgctattgcccgtgcgcgtgacaaattgcgttcaatgcaattgctggcacgtcagggtattgacctgcctgtcac

SEQ ID NO: 712801 - DNA, 75 bp, synthetic construct
  source 1..75: mol_type = other DNA
gtttcctgttctcttccgcttcctcgcccactcgctcactaacgttcggtcgctggggctgcggcgagcggtgcc

SEQ ID NO: 712802 - DNA, 75 bp, synthetic construct
  source 1..75: mol_type = other DNA
tggcgatccaagcccggatggtcagggtacgctgctgatcaaacgtggtatcgaagtcggtcacatcttccagct

SEQ ID NO: 712803 - DNA, 75 bp, synthetic construct
  source 1..75: mol_type = other DNA
atgtgcaaatgtaataccgtcacccgcgacgatattccgtttgccatctggtcagggcttcgccccgacaccccg

SEQ ID NO: 712804 - DNA, 75 bp, synthetic construct
  source 1..75: mol_type = other DNA
accagcgatttaatcgacatggtcggtggtgcgccgctggtggtcaagctggttgaaggcacgcagggaattggt

SEQ ID NO: 712805 - DNA, 75 bp, synthetic construct
  source 1..75: mol_type = other DNA
gtgcaggaatatatcaaagaggcgcaagggcgcgatattcgctgtctggtcgtcggtgatgaagtggttgcggcg

SEQ ID NO: 712806 - DNA, 75 bp, synthetic construct
  source 1..75: mol_type = other DNA
gtggtgcgccgctggtggttaagctggttgaaggtacgcagggaattggtgtcgtgctggcggagacgcgtcagg

SEQ ID NO: 712807 - DNA, 75 bp, synthetic construct
  source 1..75: mol_type = other DNA
aagcggttgaaggcagtagcttcccgctggttgcgctgctggtgcgcggtgaccacgagctgaacgaagttaaag

SEQ ID NO: 712808 - DNA, 75 bp, synthetic construct
  source 1..75: mol_type = other DNA
ccatctgaactgtggcaagagagtggtcgttgggaacagtatggcccggaattgctgcgtattgctgaccgtggt

SEQ ID NO: 712809 - DNA, 75 bp, synthetic construct
  source 1..75: mol_type = other DNA
ggagctatccgctcaatgagtcggtcgccattgcccgggcgcgtgacaaattgcgttccatgcaactgttggcgc

SEQ ID NO: 712810 - DNA, 75 bp, synthetic construct
  source 1..75: mol_type = other DNA
gtggcaaatcccgcactattcgccgtattcagtccatccattatctggatcgtaaagacccagaaatgcaggagc

SEQ ID NO: 712811 - DNA, 75 bp, synthetic construct
  source 1..75: mol_type = other DNA
gacggcgatgggtcaggctaacgcgctggcggtgctggctgtcggcgataagggctgcttccttaatgcgccgga

SEQ ID NO: 712812 - DNA, 75 bp, synthetic construct
  source 1..75: mol_type = other DNA
ttgccatcgaattttcccgcgtcaccgaatctgcggcgctggctggctacaaatggttaggacgcggcgataaaa

SEQ ID NO: 712813 - DNA, 75 bp, synthetic construct
  source 1..75: mol_type = other DNA
gcattaccattggtatcttcccgctcctggtactggcggctgtcttcaacagactgacgctgtctgttctgagag

SEQ ID NO: 712814 - DNA, 75 bp, synthetic construct
  source 1..75: mol_type = other DNA
agcaccaacagcaccacgtcgtttggtcagatgatgtaccagaccggcagtggcgcaactgccacacagacccgt

SEQ ID NO: 712815 - DNA, 75 bp, synthetic construct
  source 1..75: mol_type = other DNA
attactcctacggcaacatgcagacggaaaacgtgaacggcttcagctggagcaccaacagcaccacgtcgtttg

SEQ ID NO: 712816 - DNA, 75 bp, synthetic construct
  source 1..75: mol_type = other DNA
cggattttccagtgtgtacagccatttcgcttcctctgctatcagcccgacgccagtgcggcaggcagtgtggtt

SEQ ID NO: 712817 - DNA, 75 bp, synthetic construct
  source 1..75: mol_type = other DNA
ccgccccggtctgaaacgcgctttaaagtgcgttaatagcggagacaccctggtcgtgtggaaactggacaggct

SEQ ID NO: 712818 - DNA, 75 bp, synthetic construct
  source 1..75: mol_type = other DNA
acctggtccaagttcaccgggtggataatgtgccggtcggactggcgatgccactttcactgacgacccgtatcg

SEQ ID NO: 712819 - DNA, 75 bp, synthetic construct
  source 1..75: mol_type = other DNA
gggggggggccccccccccacacatcaataatcccgcccttcccctgtgctacacttcgcgccattccttactgc

SEQ ID NO: 712820 - DNA, 75 bp, synthetic construct
  source 1..75: mol_type = other DNA
atccgcggcaagtcacgcaccattcgccgcattcagtccatccactatctggatcgcaaagacccggaaatgcag

SEQ ID NO: 712821 - DNA, 75 bp, synthetic construct
  source 1..75: mol_type = other DNA
gcagcataaatcaacagtattctgatctgcaaaaacatcataattcagagcaatcttcgcaaatgaatacgtata

SEQ ID NO: 712822 - DNA, 75 bp, synthetic construct
  source 1..75: mol_type = other DNA
aaatcaggtgtggtaaaactgtttgaccctctcactccggaaatgttacgggcgctaatccgcgaaatgaaagga

SEQ ID NO: 712823 - DNA, 75 bp, synthetic construct
  source 1..75: mol_type = other DNA
cttcaaatacctggttgacccgcagatgctcggtgtttccaacagtatgatttaccagctgacggactatatcgg

SEQ ID NO: 712824 - DNA, 75 bp, synthetic construct
  source 1..75: mol_type = other DNA
atattgtaaaagggcagtattctgaactgcaaaatcaccataaaacagagaaattatctcagaataataaatata

SEQ ID NO: 712825 - DNA, 75 bp, synthetic construct
  source 1..75: mol_type = other DNA
cggcatcaatgcaacgcgtcagattgcggcggcacaacaggaaatggcccgggaagcatcgaacagagcagaaag

SEQ ID NO: 712826 - DNA, 75 bp, synthetic construct
  source 1..75: mol_type = other DNA
atgaagagcgagaaagtcaaaagataatacctgagccatcaggagaggctgtgaaaaaaatgattgatggtaaaa

SEQ ID NO: 712827 - DNA, 75 bp, synthetic construct
  source 1..75: mol_type = other DNA
tgttcggggcgaatctgatagtgaaaagcaccgattttctctcccggaatcccgaaattatcaacctgtttcagg

SEQ ID NO: 712828 - DNA, 75 bp, synthetic construct
  source 1..75: mol_type = other DNA
gtatcgggcatgcgatggtggtcagctacgagatgatattcacccaaccggacagcgtcacctacagcaagacag

SEQ ID NO: 712829 - DNA, 75 bp, synthetic construct
  source 1..75: mol_type = other DNA
gtattgacataagtgagctaccttcagatgttacttatatcggaaaatatatgctctcttccggaagtaaaaaag

SEQ ID NO: 712830 - DNA, 75 bp, synthetic construct
  source 1..75: mol_type = other DNA
tcagttcgatcccgtatgtattgacataaatgagctatctccagatgttatttatatcgggcaatatatgctctc

SEQ ID NO: 712831 - DNA, 75 bp, synthetic construct
  source 1..75: mol_type = other DNA
acgctggaagatctgatggcctccgctgacccctacacgctgattttttcccgacccagcccgctacggggcgtt

SEQ ID NO: 712832 - DNA, 75 bp, synthetic construct
  source 1..75: mol_type = other DNA
aatacctgaaccatcagaagaaactgtgaaaaaaatgattgatgagaaaaagaatcaactgaagggatcattatg

SEQ ID NO: 712833 - DNA, 75 bp, synthetic construct
  source 1..75: mol_type = other DNA
tcggtgcagattattgataacagtgacctggttcaggttcatcgtgtggacaatgtaccggtcgggctggcgatg

SEQ ID NO: 712834 - DNA, 75 bp, synthetic construct
  source 1..75: mol_type = other DNA
agcccagcctttttggtgtgcgtgttgatgttggcgctaaggttggtgggcgagccagtattgacggtagtgatc

SEQ ID NO: 712835 - DNA, 75 bp, synthetic construct
  source 1..75: mol_type = other DNA
aaggacgcgtaggtggaaggcccaacgcattaaaactgcatgaacgagagcagattgggcggctattggcgaagg

SEQ ID NO: 712836 - DNA, 75 bp, synthetic construct
  source 1..75: mol_type = other DNA
aatcagcggcactgcctgccttaacgtcggcggtcgcctgctggaaaccgacagccaggggcgcgtggtttacgc

SEQ ID NO: 712837 - DNA, 75 bp, synthetic construct
  source 1..75: mol_type = other DNA
gctggtgcaggttacccggcggatggcggaactgattgtcgaagtgattgacggaacgctctcgccgctcgcgca

SEQ ID NO: 712838 - DNA, 75 bp, synthetic construct
  source 1..75: mol_type = other DNA
aatctggctggagggcgtacaactgccgctgcgcaatttgccggtggcgatcccgattgatgaaacggatctggt

SEQ ID NO: 712839 - DNA, 75 bp, synthetic construct
  source 1..75: mol_type = other DNA
attatatgatcaaccaactcaaagaagagaatttattgaaagttgtattaccgcagctaaaccatcttggggata

SEQ ID NO: 712840 - DNA, 75 bp, synthetic construct
  source 1..75: mol_type = other DNA
tggttataacgtttcattcgaagaagaaacggagttaccagaggttgttcctgctgaggatgagactcaaagtct

SEQ ID NO: 712841 - DNA, 75 bp, synthetic construct
  source 1..75: mol_type = other DNA
tgattaaagaaatcaaagagcgcataggcagcttggacgtgcgagacaatattgagcgccgggcttatgaaatag

SEQ ID NO: 712842 - DNA, 75 bp, synthetic construct
  source 1..75: mol_type = other DNA
gtgcagtttccggcgcaaaccgtgcgcgccacggtgattggcgcgggcgcacataccctttcgctctctggcagc

SEQ ID NO: 712843 - DNA, 75 bp, synthetic construct
  source 1..75: mol_type = other DNA
atgttatcgccaccagcccgccgacccgttctgttttgcgatattggcccacttctggcaacggcgctgcatgac

SEQ ID NO: 712844 - DNA, 75 bp, synthetic construct
  source 1..75: mol_type = other DNA
catcaccggcgaaagtgcgaaaacccgcaacgcccgcccggcggtgatgacgctctctcaatcgctgggtgattt

SEQ ID NO: 712845 - DNA, 75 bp, synthetic construct
  source 1..75: mol_type = other DNA
ccggtgttctttacccctgtcgacaaacagggcggattaaaagaagcggaactgaaaactttaatccttgagcaa

SEQ ID NO: 712846 - DNA, 75 bp, synthetic construct
  source 1..75: mol_type = other DNA
aatcagcggcaccgcctgcctcaacgtcggcggtcgcctgctggaaaccgacagccaggggcgcgtggtttacgc

SEQ ID NO: 712847 - DNA, 75 bp, synthetic construct
  source 1..75: mol_type = other DNA
tgtcgcaggtgccgcgctacgaattcattaaacgcgaaattagctggcaaagcccggtattctttacccctgtcg

SEQ ID NO: 712848 - DNA, 75 bp, synthetic construct
  source 1..75: mol_type = other DNA
gaaaccagacctgtgcgcaatttctatgtcggcactaacgatccccgggtgaattttgtgcctgacccgccaggc

SEQ ID NO: 712849 - DNA, 75 bp, synthetic construct
  source 1..75: mol_type = other DNA
tggtaaaggaatggagagcgtaccttcgggtggtggcagtcaggatattattgctgaccatcagggacatcaggc

SEQ ID NO: 712850 - DNA, 75 bp, synthetic construct
  source 1..75: mol_type = other DNA
cggtgcagattattgataacagtgacctggtcaaagtccatcgggtggataatgtgccggtcggtctggcgatgc

SEQ ID NO: 712851 - DNA, 75 bp, synthetic construct
  source 1..75: mol_type = other DNA
tactatcgaacaacgtacacaggacagcggaattcagaataatgtaaaagaccaagttgataatatgctcacaac

SEQ ID NO: 712852 - DNA, 75 bp, synthetic construct
  source 1..75: mol_type = other DNA
ccgtactgaaagcatgagtgggcagatgagtgaagacctgtcgcaacagtttgcacagtatgtaatgaaacacgc

SEQ ID NO: 712853 - DNA, 75 bp, synthetic construct
  source 1..75: mol_type = other DNA
gatgtgcatgctggatggcagtttgagccgaagtttatgggggttggcggaggagtgggaggaaaagttggcgga

SEQ ID NO: 712854 - DNA, 75 bp, synthetic construct
  source 1..75: mol_type = other DNA
ttactcctacggcaacatgcagacggaaaacgtgaacggcttcagctggagcaccaacagcaccacgtcgtttgg

SEQ ID NO: 712855 - DNA, 75 bp, synthetic construct
  source 1..75: mol_type = other DNA
tattaaaagcaattgcatggaacgaatcaaaaaacaaaaacggaataaaaagtaaaataaacaaaaacggaacgt

SEQ ID NO: 712856 - DNA, 75 bp, synthetic construct
  source 1..75: mol_type = other DNA
ttcatctcatttagatttattaagcaaatttaatatatctgaagatgatttattgaatgatgcctgtataaacat

SEQ ID NO: 712857 - DNA, 75 bp, synthetic construct
  source 1..75: mol_type = other DNA
atttctatgtcggcactaacgattcccgggtgattttgtgcctgactcgccaggcggaaaaactggtcagggaga

SEQ ID NO: 712858 - DNA, 75 bp, synthetic construct
  source 1..75: mol_type = other DNA
agtgagaggtgatgtttctggcgaggcttatgtaggagccagaggtggtgttggattcgagctctttggtaatgg

SEQ ID NO: 712859 - DNA, 75 bp, synthetic construct
  source 1..75: mol_type = other DNA
tcggacagatgtcgcggcagctggcgaatggaggcatgagcacgcagacgcgggatggctcgatggtctgggaca

SEQ ID NO: 712860 - DNA, 75 bp, synthetic construct
  source 1..75: mol_type = other DNA
atgaaaaaaataatactgagtatcattctcatttcaaattactgttatgcttctgattgttttgaaattacagga

SEQ ID NO: 712861 - DNA, 75 bp, synthetic construct
  source 1..75: mol_type = other DNA
tatcggtgccagcgcctcgttgtgggaatgtatgcttaatcagtggctgggacgcttgtatcaaaatcaggatgc

SEQ ID NO: 712862 - DNA, 75 bp, synthetic construct
  source 1..75: mol_type = other DNA
aaggatgatcacgagtggagcaaacatagaagaactgtgtaaaaaaatcactcacattgtttaccatgacgtaat

SEQ ID NO: 712863 - DNA, 75 bp, synthetic construct
  source 1..75: mol_type = other DNA
tgttcaagaacagttgaacaatctgttccatggggaaaggataataatagaagaacaaaagcatactgtaaaaat

SEQ ID NO: 712864 - DNA, 75 bp, synthetic construct
  source 1..75: mol_type = other DNA
tagaggcggtcacaaccgcaaggactaccacctcaccctcgacacagccaaagagcttgcgatggttgacgactg

SEQ ID NO: 712865 - DNA, 75 bp, synthetic construct
  source 1..75: mol_type = other DNA
aacccggcggcgttagttatttttggttctcagttggctgataaaactcaccagatactcgagaaaacaaatata

SEQ ID NO: 712866 - DNA, 75 bp, synthetic construct
  source 1..75: mol_type = other DNA
gctgagggaaaagatagaacaggccgtagaagagttgggttatattcccaacagaactgctggcgcccttgcatc

SEQ ID NO: 712867 - DNA, 75 bp, synthetic construct
  source 1..75: mol_type = other DNA
ccttcgctaacgtggtaatgctattagttgccgccggtgtttttgcccagggccttagcaccattggctttatcc

SEQ ID NO: 712868 - DNA, 75 bp, synthetic construct
  source 1..75: mol_type = other DNA
ccaacttctggtgatgtggtgctggcggcgcaggcttccgaaatgccgttaattgacttcgccttcaaaacgacg

SEQ ID NO: 712869 - DNA, 75 bp, synthetic construct
  source 1..75: mol_type = other DNA
tttcctccgcaacgggcctgggcgttttactgatggcaacgttgttcccggtcatggtgaacgtgggtattagtc

SEQ ID NO: 712870 - DNA, 75 bp, synthetic construct
  source 1..75: mol_type = other DNA
atgctggtgctggttatcctgacgatgctggcggcggtgactacgggttccggcaatgcgccattctatgcattc

SEQ ID NO: 712871 - DNA, 75 bp, synthetic construct
  source 1..75: mol_type = other DNA
atttgtatgctgattgcctccattctggagttcctccgcagctttaatacccagaaagttttctctggtctggaa

SEQ ID NO: 712872 - DNA, 75 bp, synthetic construct
  source 1..75: mol_type = other DNA
tgccattatggggcacaaagttttacctgccagccagacttcaacgggctacagcgccacggatatcgttgaata

SEQ ID NO: 712873 - DNA, 75 bp, synthetic construct
  source 1..75: mol_type = other DNA
atgccagaggtacaaacagatcatccagagacggcggagttaagcaagccacagctacgcatggtcgatctcaac

SEQ ID NO: 712874 - DNA, 75 bp, synthetic construct
  source 1..75: mol_type = other DNA
tgccagaaacggtgacagcggcaaatggaaccgtctttgaacgaccgaaattgtggaaggagctgccatcgacct

SEQ ID NO: 712875 - DNA, 75 bp, synthetic construct
  source 1..75: mol_type = other DNA
tgtacattatcaaccgctgttaagcgaactccaggcattgtacgacgaacacccaagtcgtgcgataaagaccga

SEQ ID NO: 712876 - DNA, 75 bp, synthetic construct
  source 1..75: mol_type = other DNA
gctggcttactactacttttcgctgcatctggatgacggcgttaaccgtaagaatcaaactgacgccgcgtggga

SEQ ID NO: 712877 - DNA, 75 bp, synthetic construct
  source 1..75: mol_type = other DNA
gctggagtcattgtatgaagccaaccgcggcaatgcgatgaaaacggttcagggctggcccgtcgcctcaagtta

SEQ ID NO: 712878 - DNA, 75 bp, synthetic construct
  source 1..75: mol_type = other DNA
aaatgcggcgaagctgaaaaaaggcgaaacgctacaggtgaaggtgacggtaaaagatgctcagggcaatccatt

SEQ ID NO: 712879 - DNA, 75 bp, synthetic construct
  source 1..75: mol_type = other DNA
gatccaacccgcggcgcaatcgagatgaatggcacgctctacggaacatcgcaaccgtctttagtctatgcaggt

SEQ ID NO: 712880 - DNA, 75 bp, synthetic construct
  source 1..75: mol_type = other DNA
ttacgctgtcatcgactgcctatgatgagggccgaactgccagcaatggtggtacccccacgtcatctgtgaaaa

SEQ ID NO: 712881 - DNA, 75 bp, synthetic construct
  source 1..75: mol_type = other DNA
gatgatcttattgtagatgtcgtcacaccgacagcagccagcatttcctttgctcaggatacggcaaaatggctt

SEQ ID NO: 712882 - DNA, 75 bp, synthetic construct
  source 1..75: mol_type = other DNA
ttactgaaacatgatgtttataacgaacaacatgcggcagtttcgctcgatcgtttcgcgtcatttagtcaaccg

SEQ ID NO: 712883 - DNA, 75 bp, synthetic construct
  source 1..75: mol_type = other DNA
ggaaacgttcactacgcgttctggtactgccttcaaacgccccttactctctgctgaaagatcgtcgggccagtc

SEQ ID NO: 712884 - DNA, 75 bp, synthetic construct
  source 1..75: mol_type = other DNA
cgccagaatgtacagttgtcgaacagaactatcactgtaatcaacgctgcgggaacgtcggcaagagtggatact

SEQ ID NO: 712885 - DNA, 75 bp, synthetic construct
  source 1..75: mol_type = other DNA
atgacgttacgggatggcctgtatcacgcgcctatatctccagtacggttgttgcctattacactcaaacattta

SEQ ID NO: 712886 - DNA, 75 bp, synthetic construct
  source 1..75: mol_type = other DNA
aggcgctttcacaattaagcgaaaaagagcaactgatcctctccatgtattaccagcatgagatgaatctcaaag

SEQ ID NO: 712887 - DNA, 75 bp, synthetic construct
  source 1..75: mol_type = other DNA
ttaatttatcgaatggatcaagctccagggcattatcaaacaccgtggcatttgtgtcctgtctggtaaaccctc

SEQ ID NO: 712888 - DNA, 75 bp, synthetic construct
  source 1..75: mol_type = other DNA
cacactctacggaacatcgcaaccgtctttagtctatgccggtactacggatgcgcagggttttgcgactgtgga

SEQ ID NO: 712889 - DNA, 75 bp, synthetic construct
  source 1..75: mol_type = other DNA
cgggcagctatgattcgacgataaaagcgatgaaagtaaaggtgggggaagaggcttctttacgtctgacgatta

SEQ ID NO: 712890 - DNA, 75 bp, synthetic construct
  source 1..75: mol_type = other DNA
gaaatctcacaagttgcgattggtgacgtttatatttctgaactaagaaatgaaaccaataaaaaagcctttaaa

SEQ ID NO: 712891 - DNA, 75 bp, synthetic construct
  source 1..75: mol_type = other DNA
gctggcttactactacttttcgctgcatctggatgacggtgttaaccgtaagaatcaaactgacgctgcgtggga

SEQ ID NO: 712892 - DNA, 75 bp, synthetic construct
  source 1..75: mol_type = other DNA
aagtgccacgatggatgttattttcactgtgataaccagtccgaactcaccgaaagcaaaatactggggtcatat

SEQ ID NO: 712893 - DNA, 75 bp, synthetic construct
  source 1..75: mol_type = other DNA
atgtcatcagtaccagtgacaaaatgtcataggggtagtgacaaaatgtcacccgtgttagataaaacattagat

SEQ ID NO: 712894 - DNA, 75 bp, synthetic construct
  source 1..75: mol_type = other DNA
ccaaagaagaaagtagttagtgaaaataagaagcaaaggattaagcctaaaatgtactatgcaggtggaggtatc

SEQ ID NO: 712895 - DNA, 75 bp, synthetic construct
  source 1..75: mol_type = other DNA
tgaaaaagccattaagagggtagagaagaaaaagagattcgagcttgcaagacaaaagaacaaagtatcgggttt

SEQ ID NO: 712896 - DNA, 75 bp, synthetic construct
  source 1..75: mol_type = other DNA
ttccttttgttatcaaacgcaaagatgctgaaaaccgccagggtgtggtgaacaatactgcgcctgtaaaactgg

SEQ ID NO: 712897 - DNA, 75 bp, synthetic construct
  source 1..75: mol_type = other DNA
cagttcgtgccttcggtattttccggtgataaacatgagtcccggagtgaacgttatacgtatattccaacaata

SEQ ID NO: 712898 - DNA, 75 bp, synthetic construct
  source 1..75: mol_type = other DNA
cccgccactgatgatgagttggaccccttcgatgattaccttgatgatgaagaagaccctgaagaggaattgaaa

SEQ ID NO: 712899 - DNA, 75 bp, synthetic construct
  source 1..75: mol_type = other DNA
agtgtggcagcatagaaaatgcaccgacatacaatgaattagagttgttgcatactgtttttaattcactgggat

SEQ ID NO: 712900 - DNA, 75 bp, synthetic construct
  source 1..75: mol_type = other DNA
gcataccaacagtatcaggatcgtttccacgaactgaaagtctcactcccgaaacttcaggatgaatgctggtgg

SEQ ID NO: 712901 - DNA, 75 bp, synthetic construct
  source 1..75: mol_type = other DNA
ttttggcatctcaattctgctcatactgatatgcagtggcttattaaccgcgggcgctctgctcagaaaagcttt

SEQ ID NO: 712902 - DNA, 75 bp, synthetic construct
  source 1..75: mol_type = other DNA
gccgatgttgtgttattagggccgcagatcgcttatatgttacctgaaattcagcgtttgttacctaacaaacct

SEQ ID NO: 712903 - DNA, 75 bp, synthetic construct
  source 1..75: mol_type = other DNA
gtagaagagttgggttatattcccaacagaactgctggcgcccttgcatctggtcacagtgatacagtcgccgta

SEQ ID NO: 712904 - DNA, 75 bp, synthetic construct
  source 1..75: mol_type = other DNA
tcggtatcgatatcggcaccaccaccacccaggtgatcttctcccacctggagctggttaaccgtgcggcggtgt

SEQ ID NO: 712905 - DNA, 75 bp, synthetic construct
  source 1..75: mol_type = other DNA
ttcatgggccaatggcatcctggggcgttgatgcacccggtgaggtgcgtcatacccatgaactgccttcgcgtt

SEQ ID NO: 712906 - DNA, 75 bp, synthetic construct
  source 1..75: mol_type = other DNA
gaggccaccttcaaaaagctggttatcgatgctggtcaacgattcctcaagccgttaaaccctcaatacccgatc

SEQ ID NO: 712907 - DNA, 75 bp, synthetic construct
  source 1..75: mol_type = other DNA
tgacaatgaacttagggccatttatgcgcaccaggggagtagcgcattacatgatgctattggctggccagtgtc

SEQ ID NO: 712908 - DNA, 75 bp, synthetic construct
  source 1..75: mol_type = other DNA
cccatacctatgaagggatcactgatgctaacggagaggccactctgacgctgacccagccaggcggcgtggggg

SEQ ID NO: 712909 - DNA, 75 bp, synthetic construct
  source 1..75: mol_type = other DNA
atggactcaattatccccaaaaaatacagtacgctttttatttctggtccggatgccattatgatggcgatgaaa

SEQ ID NO: 712910 - DNA, 75 bp, synthetic construct
  source 1..75: mol_type = other DNA
cgagaattatttctgttaacggtgcggcggcccactgcgccagcgtcggcgatattgtcatcatcgccagcttcg

SEQ ID NO: 712911 - DNA, 75 bp, synthetic construct
  source 1..75: mol_type = other DNA
ttgtcatcatcgccagcttcgttaccatgccagatgaagaagctcgttttttttttcccaatgtcgcctattttg

SEQ ID NO: 712912 - DNA, 75 bp, synthetic construct
  source 1..75: mol_type = other DNA
cctgcaggcaagccgatgccgattgtcatccccagttacaacggcgcgcgtaaacaggctaacctgacgccgttg

SEQ ID NO: 712913 - DNA, 75 bp, synthetic construct
  source 1..75: mol_type = other DNA
tggcaggcagcgaaccgattcccaaatcactaaaaatccagatggcttgctgcctggtggcggcgggcgaagtgg

SEQ ID NO: 712914 - DNA, 75 bp, synthetic construct
  source 1..75: mol_type = other DNA
caatctgattgatcgcgaaggaacgcgggtgctgtatgaaaaacaggacgatgcaggcagtgagctactgatact

SEQ ID NO: 712915 - DNA, 75 bp, synthetic construct
  source 1..75: mol_type = other DNA
ggcggcattccgtgaaagtcactcccagccagaacgaaacaactttctggcgcgtcgagaaacgaagtatgaata

SEQ ID NO: 712916 - DNA, 75 bp, synthetic construct
  source 1..75: mol_type = other DNA
cgcgtcgtgaacggtgtttacggaaaagcagtaagcaggctgcatcaggtgaagagtggtatctctcagggaatt

SEQ ID NO: 712917 - DNA, 75 bp, synthetic construct
  source 1..75: mol_type = other DNA
tgtggagcagcggcgttacgtgccgaattgattgccggatttgcgcatactgaatggttgggattgaccgtattt

SEQ ID NO: 712918 - DNA, 75 bp, synthetic construct
  source 1..75: mol_type = other DNA
tgaaagatcttattgcttacctcgaagagaagccggaaatggcggaacatctggcggcggttaaggcttatcgcg

SEQ ID NO: 712919 - DNA, 75 bp, synthetic construct
  source 1..75: mol_type = other DNA
caagcgactgtggtgcatatgttgcactcagttcggccatgaagagcctctctgtgaagcttaccaaggtttgta

SEQ ID NO: 712920 - DNA, 75 bp, synthetic construct
  source 1..75: mol_type = other DNA
aataaggagttaggtacaattcctgctgatgttgcggatgctttaatctgggcttgcgaccaattaattgatggt

SEQ ID NO: 712921 - DNA, 75 bp, synthetic construct
  source 1..75: mol_type = other DNA
cagccagaacgaaacaattttctggcgcatcgtgagcggtgcttacggaaaagcagcaagcgcgctgcatcgggt

SEQ ID NO: 712922 - DNA, 75 bp, synthetic construct
  source 1..75: mol_type = other DNA
gtgatcaccgccggaacggcgattcgcgagtcgatggaaattattcaggctaatggcgcgacgcttgcaggcgtg

SEQ ID NO: 712923 - DNA, 75 bp, synthetic construct
  source 1..75: mol_type = other DNA
tgaaagatctgattgcctatctggaagagaagccggaaatggcggaacatctggcggcggttaaggcctatcgcg

SEQ ID NO: 712924 - DNA, 75 bp, synthetic construct
  source 1..75: mol_type = other DNA
tatggcgccacgagcgtgcgttttgcttattctcgatgaaactgcctgcatccttagccgttatggtgatccgca

SEQ ID NO: 712925 - DNA, 75 bp, synthetic construct
  source 1..75: mol_type = other DNA
cgtggtttaaaggtgatatttcttctcctgccgacagttggtatgtgtcacaaacaccgttaatcaaaaccggct

SEQ ID NO: 712926 - DNA, 75 bp, synthetic construct
  source 1..75: mol_type = other DNA
tgtgatcggtggaactttatttacccataaggttggtaaacgtattcgtccgcttaatgtggaaaaacaacgtag

SEQ ID NO: 712927 - DNA, 75 bp, synthetic construct
  source 1..75: mol_type = other DNA
ataaatatgacgaacttgctgaactggctgcggttatcgatcgcttgtatgagttccatcaactcactgaacagc

SEQ ID NO: 712928 - DNA, 75 bp, synthetic construct
  source 1..75: mol_type = other DNA
catcatacactaaatcagtaagttggcagcatcaccgtctttcatttggcttcatccagtcacttagcatgctga

SEQ ID NO: 712929 - DNA, 75 bp, synthetic construct
  source 1..75: mol_type = other DNA
cctgaactttcatgtttcgccaggcaaatggctattactgaaaggctactctggtgcgggaaaaaccacactgct

SEQ ID NO: 712930 - DNA, 75 bp, synthetic construct
  source 1..75: mol_type = other DNA
gtatgttgatagcaaagtatctctgtctgctgaagcccttttggctgcgtaagaataataaaacttcagtgctgt

SEQ ID NO: 712931 - DNA, 75 bp, synthetic construct
  source 1..75: mol_type = other DNA
atgagtggcgcttttaacaacgatggtcgggacatatctcccttaattgcaacctcttgggagcgatgcattaag

SEQ ID NO: 712932 - DNA, 75 bp, synthetic construct
  source 1..75: mol_type = other DNA
atgagtggcgcttttaacaacgatggtcggggcatatctcccttaattgcaacctcctgggagcgatgcaataag

SEQ ID NO: 712933 - DNA, 75 bp, synthetic construct
  source 1..75: mol_type = other DNA
aaatgtcggcgttacttggaattggtcgcaccacgctgtggcgaaaaatgaaacaacatggcattgatgcgggtc

SEQ ID NO: 712934 - DNA, 75 bp, synthetic construct
  source 1..75: mol_type = other DNA
gcaggcagaagatctggagtccagaggtttattccgtcgtgctgcaacggtgtggatggcggcattccgtgaaag

SEQ ID NO: 712935 - DNA, 75 bp, synthetic construct
  source 1..75: mol_type = other DNA
aaagcaatcctggatgtacggccggtgatattgcgaatgcgtttgcatactttccacgtccccgtgtactgaata

SEQ ID NO: 712936 - DNA, 75 bp, synthetic construct
  source 1..75: mol_type = other DNA
ctcaacccgcctgaaaattgatgacgatgcgcttgcccgcctggtttcttgtgcatggcccggcaatgattttga

SEQ ID NO: 712937 - DNA, 75 bp, synthetic construct
  source 1..75: mol_type = other DNA
ccccgttgcggcctggctgaaattaacctgcctcaattgcaaccgggttcttccattatgcctggtaaggttaac

SEQ ID NO: 712938 - DNA, 75 bp, synthetic construct
  source 1..75: mol_type = other DNA
acgcggttccggcacgcgggagattgtcgattatctgttgctgtcacatttaccgaagtttgagatggcgatgga

SEQ ID NO: 712939 - DNA, 75 bp, synthetic construct
  source 1..75: mol_type = other DNA
tggaagacgagctggtggttttcgccgcgccgacttcgccgttggcccgtggtccggtcaccttagaacagctgg

SEQ ID NO: 712940 - DNA, 75 bp, synthetic construct
  source 1..75: mol_type = other DNA
gcaattttttctgcatgtgtaggattttacaatcaaaactttactactgttaataaagacaactttgtcaaagca

SEQ ID NO: 712941 - DNA, 75 bp, synthetic construct
  source 1..75: mol_type = other DNA
aacagtgcttaccagactatgcgtaaacataacgaaccttccctggaggcagaacgcgatgcgttgcgggaggaa

SEQ ID NO: 712942 - DNA, 75 bp, synthetic construct
  source 1..75: mol_type = other DNA
aatacgccgccggcagatggagctggatattctgaaaaaagcggaggaaatcataaaaaatctatggtcaccccc

SEQ ID NO: 712943 - DNA, 75 bp, synthetic construct
  source 1..75: mol_type = other DNA
gcgccgggtgcgaagtttagctatgcctccgccaattatgatgtgttgggcgcggtgattgaaaatgtgacggga

SEQ ID NO: 712944 - DNA, 75 bp, synthetic construct
  source 1..75: mol_type = other DNA
ttgtgttatgcgcattgctgataagcgcaatgctgcctggggggtcatgggcagaatctgcatggcaagactctt

SEQ ID NO: 712945 - DNA, 75 bp, synthetic construct
  source 1..75: mol_type = other DNA
gcttaccagcccggattcgccaaaagccaaattctgggggcatatggctgaaacggcgacaggcgatgacggtct

SEQ ID NO: 712946 - DNA, 75 bp, synthetic construct
  source 1..75: mol_type = other DNA
attaacggaaaataacgaagtgtggtcacgtgtcagtcaggccaacacttccagcaccagtaaaggtggctgtgg

SEQ ID NO: 712947 - DNA, 75 bp, synthetic construct
  source 1..75: mol_type = other DNA
accgaaggtggcaaaacaggtgcaatcattgaacgttcgcgatttttgaaagaaaacggtcaatggtactatatt

SEQ ID NO: 712948 - DNA, 75 bp, synthetic construct
  source 1..75: mol_type = other DNA
cgtcttgaaggcgtcgagatgccattagtcattcttactgccgctgaggctttggtgcgccttgaagagctaagg

SEQ ID NO: 712949 - DNA, 75 bp, synthetic construct
  source 1..75: mol_type = other DNA
tgccggatttgcgcataccgaatggttagggctgaccgtatttgagcgttcatatcacgaaggagataacgtagg

SEQ ID NO: 712950 - DNA, 75 bp, synthetic construct
  source 1..75: mol_type = other DNA
gacaaacatatcccctgacagaattactgcgtgttctgggtcttgctgtagcagttatttttatcaccgtgctgc

SEQ ID NO: 712951 - DNA, 75 bp, synthetic construct
  source 1..75: mol_type = other DNA
gcaggaacacctgcgggttgtaaaccttggtgctactgcgattggtacctgtgttactgctcacccggattatcc

SEQ ID NO: 712952 - DNA, 75 bp, synthetic construct
  source 1..75: mol_type = other DNA
ttatgtagtgagctggaacgcgcgcagcataccgcgcggctggttctcagtgaccgccagctccctgtacaaacc

SEQ ID NO: 712953 - DNA, 75 bp, synthetic construct
  source 1..75: mol_type = other DNA
atgcgactgtggttaattcgtcatggcgaaacgcaagcgaatgtcgatggtctgtacagcggtcatgcgcccacc

SEQ ID NO: 712954 - DNA, 75 bp, synthetic construct
  source 1..75: mol_type = other DNA
cacgaagcataccatacaggcaaatccctccatcagatagtggttgtcgaacgtaagctactcacacaggaagaa

SEQ ID NO: 712955 - DNA, 75 bp, synthetic construct
  source 1..75: mol_type = other DNA
tcactgaaatgccaatgagtcaggagcctttcttcatcattgccttcggttatgtgaaaaaagcagctgcgatgg

SEQ ID NO: 712956 - DNA, 75 bp, synthetic construct
  source 1..75: mol_type = other DNA
tgcttgaagctgttgaacacctcgtaggagcattctacaaaaaggctgacgagttcagcacagtgctcaagatgg

SEQ ID NO: 712957 - DNA, 75 bp, synthetic construct
  source 1..75: mol_type = other DNA
atggatgttaccgcaaaatacgaattgattgggttgatggcctatcccatccgccacagtttatcgcctgaaatg

SEQ ID NO: 712958 - DNA, 75 bp, synthetic construct
  source 1..75: mol_type = other DNA
ggagcaattgaaggattaaaagctctaaaaatgcgcggaactggtgtatcaatgccgaacaaacaactggcgtgt

SEQ ID NO: 712959 - DNA, 75 bp, synthetic construct
  source 1..75: mol_type = other DNA
gtgtattggtgtcagtcgtgcggtattgtataaatggaaagatgaaattatcggcaacagtacttaccagactat

SEQ ID NO: 712960 - DNA, 75 bp, synthetic construct
  source 1..75: mol_type = other DNA
atgcgactgtggttaattcgtcatggtgaaacgcaagcgaatatcgatggtctttacagcggtcatgcgcccacc

SEQ ID NO: 712961 - DNA, 75 bp, synthetic construct
  source 1..75: mol_type = other DNA
cgggccatattcgcgccattaaagagagcggttttgatatcaaaggcaaaacgatggtgctgctaggtgccggtg

SEQ ID NO: 712962 - DNA, 75 bp, synthetic construct
  source 1..75: mol_type = other DNA
tcaaaatgcgcggaactggtgtatcgatgccgaacaaacaactggcgtgtgaatatgttgatgaattaacgccag

SEQ ID NO: 712963 - DNA, 75 bp, synthetic construct
  source 1..75: mol_type = other DNA
gccttgtttaccttcaaaacgcatatggcagggtttgtctgggatgccgcgcaactggaaaataacccctatacc

SEQ ID NO: 712964 - DNA, 75 bp, synthetic construct
  source 1..75: mol_type = other DNA
cacagacaaaagaagaactccctcagtttagcgcgccgaccattttactggcggagaacatttatccctccacgg

SEQ ID NO: 712965 - DNA, 75 bp, synthetic construct
  source 1..75: mol_type = other DNA
agtccggtttcccacagcgctttaattgcccgtgaactgggcattagttgggtttgtcagcaaggtgaaaaactg

SEQ ID NO: 712966 - DNA, 75 bp, synthetic construct
  source 1..75: mol_type = other DNA
agaatatttatcgggtttatttatcacgacttcaatcaaaattaaatgttatatctgcaattccgacaagaaaac

SEQ ID NO: 712967 - DNA, 75 bp, synthetic construct
  source 1..75: mol_type = other DNA
gattgcgaaagggccagaagctgaagaggcactgattgctttccgtcagctggctgaagataactttggtgaaac

SEQ ID NO: 712968 - DNA, 75 bp, synthetic construct
  source 1..75: mol_type = other DNA
ttgctccacctactctgcgtcccgttccgcctgtttcgggtaaagccttttattatcaaccggttttatgtacgg

SEQ ID NO: 712969 - DNA, 75 bp, synthetic construct
  source 1..75: mol_type = other DNA
tcggcctgctcgcttttctgctgccttgtgcactggcattgagcacaactgttcatgccgaaactaacaaactgg

SEQ ID NO: 712970 - DNA, 75 bp, synthetic construct
  source 1..75: mol_type = other DNA
tcctaaaaatcgaagtcgtcaacggcaaggccgttattttctccctgcatgttgcctgccatttcaagcgcatgc

SEQ ID NO: 712971 - DNA, 75 bp, synthetic construct
  source 1..75: mol_type = other DNA
gatgaaggttttgatctaacgttaaagacgtttgaaaacatattgcatcgcatacgaaaagaaagggccgagaaa

SEQ ID NO: 712972 - DNA, 75 bp, synthetic construct
  source 1..75: mol_type = other DNA
gattgcgaaaggaccagaagctgaagaggcactgatcgccttccgtcagctggctgaagataactttggtgaaac

SEQ ID NO: 712973 - DNA, 75 bp, synthetic construct
  source 1..75: mol_type = other DNA
ggtgagttctttgaattcaacataggggctgtcaccatgactactctcccaaccctctctcaacctgaaattgcc

SEQ ID NO: 712974 - DNA, 75 bp, synthetic construct
  source 1..75: mol_type = other DNA
cgagtgactctcggaggagaagatgtccgcctgttagtcccgactacatttatgaatctcagcggcaaagcagtc

SEQ ID NO: 712975 - DNA, 75 bp, synthetic construct
  source 1..75: mol_type = other DNA
aagtttatcggtgagaatttttcatgggaagctaaattgagcccatatatccagaaaattaaggagtctgttaaa

SEQ ID NO: 712976 - DNA, 75 bp, synthetic construct
  source 1..75: mol_type = other DNA
taatattttaccctcaccctaatcttgctgattacattagtgacttaaatattccagattacgttaaaattggta

SEQ ID NO: 712977 - DNA, 75 bp, synthetic construct
  source 1..75: mol_type = other DNA
gataatgcggagcatttctatcgatatatatcccaaaaacatcctgatataaatatatactttcttttgagcaaa

SEQ ID NO: 712978 - DNA, 75 bp, synthetic construct
  source 1..75: mol_type = other DNA
ttaaacaattcaaaaaacaaagtgcaatatcttgacaataacattaataaatataaatacatcaagtgtatcttt

SEQ ID NO: 712979 - DNA, 75 bp, synthetic construct
  source 1..75: mol_type = other DNA
attattggcggcatggaacatgttcgctattgcggctcccccattccactgagttttgatgaatgcggtaagagt

SEQ ID NO: 712980 - DNA, 75 bp, synthetic construct
  source 1..75: mol_type = other DNA
accaacaacactatgccgatgcctgcaaactgcgcggcgatcagcctctgcccatcatcgccacgggacatttaa

SEQ ID NO: 712981 - DNA, 75 bp, synthetic construct
  source 1..75: mol_type = other DNA
tcgtcgctgccatggcattagctgcagagcaggcgggtgcggtcgccattcgcattgaaggtgtggcaaatctgc

SEQ ID NO: 712982 - DNA, 75 bp, synthetic construct
  source 1..75: mol_type = other DNA
ataccgtacacaaggctacaaacaggcagtcgttgcaccagagcctcttgctgtgcttcagcaaggccgcgtcat

SEQ ID NO: 712983 - DNA, 75 bp, synthetic construct
  source 1..75: mol_type = other DNA
gttactcccgcgcctgcaccgcgctatgtagcaccaaattctgatatcaatgcaagtaaagacctttattccatt

SEQ ID NO: 712984 - DNA, 75 bp, synthetic construct
  source 1..75: mol_type = other DNA
ttccgtaaagagatcaaacgtctgagaacggaatctgatggctggttctttgatgtatggcagccggatcatatc

SEQ ID NO: 712985 - DNA, 75 bp, synthetic construct
  source 1..75: mol_type = other DNA
ctgcactggcattaacttctggttctgtcttcgctgctgattctggtgatggtactgttaaatttactggtgaga

SEQ ID NO: 712986 - DNA, 75 bp, synthetic construct
  source 1..75: mol_type = other DNA
tggttcgagctctggttgagttgctgttcaatgatcccgaggtcaccaagatccaaacggacccgtcgccgagca

SEQ ID NO: 712987 - DNA, 75 bp, synthetic construct
  source 1..75: mol_type = other DNA
cgtgaccaacagcaacgattccgtcacactgcgcctcatgactgagcatgaccttgcgatgctctatgagtggct

SEQ ID NO: 712988 - DNA, 75 bp, synthetic construct
  source 1..75: mol_type = other DNA
gctcacatttcaaatggttataaacatatttatatagcgattaattcaccagagatatttctgcttgtttgtccc

SEQ ID NO: 712989 - DNA, 75 bp, synthetic construct
  source 1..75: mol_type = other DNA
attaggctgtttacaaaaataaaccacttgatacatacgggagaaggtataaattgttcatttcatattgaacaa

SEQ ID NO: 712990 - DNA, 75 bp, synthetic construct
  source 1..75: mol_type = other DNA
ctggcgttaggggtttatccaatggtttcattggcagaggctcggaagaggcgcgatgccgcaaagaaactggta

SEQ ID NO: 712991 - DNA, 75 bp, synthetic construct
  source 1..75: mol_type = other DNA
ggaggctaatgcttcagtggtgggctgatttcttagagcaaaacatcattaaaagcatcaaaccatttgaatata

SEQ ID NO: 712992 - DNA, 75 bp, synthetic construct
  source 1..75: mol_type = other DNA
caaagcctgatatgttttttagagatatgattaagaaaagacgtggtgatacaataaaagattccaataataaaa

SEQ ID NO: 712993 - DNA, 75 bp, synthetic construct
  source 1..75: mol_type = other DNA
tttcaaatatagagcagttgatgcaactaatagaaaacataattattaatgggaatgatcatctagctgaagcca

SEQ ID NO: 712994 - DNA, 75 bp, synthetic construct
  source 1..75: mol_type = other DNA
atgaaaggtttgcattattaattagagacattaatctttataattgggctattacacaatatcccaatgtggata

SEQ ID NO: 712995 - DNA, 75 bp, synthetic construct
  source 1..75: mol_type = other DNA
ctggggtctggcggcgtgatgttgcctaaccactcaccgttggtgatcgccgaacagttcggcacgctcaatacg

SEQ ID NO: 712996 - DNA, 75 bp, synthetic construct
  source 1..75: mol_type = other DNA
cgtcatatgagcggcgatattgataatttcccccgcgatgtcgcggagctggtggactggtttgacgcccgcgat

SEQ ID NO: 712997 - DNA, 75 bp, synthetic construct
  source 1..75: mol_type = other DNA
gtctggctgaaaagcgcggctatcatcgctactggctggcagaacaccacaatatgaccggcattgccagtgctg

SEQ ID NO: 712998 - DNA, 75 bp, synthetic construct
  source 1..75: mol_type = other DNA
gcagtttctgttgtgggatgcacagcgccgtgctggcatcagcgatgctgaaattaccgctgctatggaagataa

SEQ ID NO: 712999 - DNA, 75 bp, synthetic construct
  source 1..75: mol_type = other DNA
cactggcatcactggaagcaaaaccaataggtgcattccacattgcaaaacagcaagttgacggcacaagtgact

SEQ ID NO: 713000 - DNA, 75 bp, synthetic construct
  source 1..75: mol_type = other DNA
gcccgcgattcagccagggggctggaagataagctggaggcgctgaacaatggcagaccgaaggaaatcaggact

SEQ ID NO: 713001 - DNA, 75 bp, synthetic construct
  source 1..75: mol_type = other DNA
ctggctcttggggtctaccctgctgtctctcttgctgatgcccgtaaccgtagagatgatgccagaagattaatt

SEQ ID NO: 713002 - DNA, 75 bp, synthetic construct
  source 1..75: mol_type = other DNA
agatactttcgttattttagaaggcattatatctctgcgtagagaagaaaacgtacttatcggtattaccctggc

SEQ ID NO: 713003 - DNA, 75 bp, synthetic construct
  source 1..75: mol_type = other DNA
tattttcaagtgacgttaatagcgaagacacattcgttattttagaaggtgttatctctctgcgtagagaagaaa

SEQ ID NO: 713004 - DNA, 75 bp, synthetic construct
  source 1..75: mol_type = other DNA
aaaacaaacagttttaaggaatatattatcggtgatagaattaaaaaaacaaagtgagtatagtcatgtgatttt

SEQ ID NO: 713005 - DNA, 75 bp, synthetic construct
  source 1..75: mol_type = other DNA
gactggaatgacgagttacgctcacgtattggtgtaatgaattatattcatcaacgtacacggatatcacgttct

SEQ ID NO: 713006 - DNA, 75 bp, synthetic construct
  source 1..75: mol_type = other DNA
atcaactctggcgtgacgctttttactggttagcctggcaaaatcgaattctggaattacgcgatgttcagctca

SEQ ID NO: 713007 - DNA, 75 bp, synthetic construct
  source 1..75: mol_type = other DNA
atgcccgtcaaggatttgacgggcattactgcaaaggacgcgcaaatattatctgtagttaaacctcttcaggaa

SEQ ID NO: 713008 - DNA, 75 bp, synthetic construct
  source 1..75: mol_type = other DNA
gtttctggacgggatagctgacgggcctgttccgttccgctatcctgccggcgattatcacgctgatcttttacc

SEQ ID NO: 713009 - DNA, 75 bp, synthetic construct
  source 1..75: mol_type = other DNA
caaaatacattagacatacagcaaaaaaaataaagtttgaaggagtgaaaaaatccagaaaggtctaccctggag

SEQ ID NO: 713010 - DNA, 75 bp, synthetic construct
  source 1..75: mol_type = other DNA
ttgctgctggtattgacccctctgaaaagaaaaaatactgaaaaggtagagcaaagcggcgctcttgcttttgag

SEQ ID NO: 713011 - DNA, 75 bp, synthetic construct
  source 1..75: mol_type = other DNA
gaggaactgtaatcatggtaactcatgatcttgagttggttaacgataagatgaatctaattcaattgctgaatt

SEQ ID NO: 713012 - DNA, 75 bp, synthetic construct
  source 1..75: mol_type = other DNA
taataaccgcaagggaaaggattaatgatatcttggtgtctgttggattatccaatattaataacaatgtatcat

SEQ ID NO: 713013 - DNA, 75 bp, synthetic construct
  source 1..75: mol_type = other DNA
aaaaattgtcgctcatggcagtgcccaggcgttgcaggcgaatcctgatccgcgcgtacgtcagtttctggacgg

SEQ ID NO: 713014 - DNA, 75 bp, synthetic construct
  source 1..75: mol_type = other DNA
tgctaccggataacctgacccgtaccgactctattctgcgtgggctggttgatgatattccggaagaagactggg

SEQ ID NO: 713015 - DNA, 75 bp, synthetic construct
  source 1..75: mol_type = other DNA
cgatcgcgaaggcctcgtctacgcccatgaaggcaacaaaggctttgccgaacttgccgctgaaggtgcgtacaa

SEQ ID NO: 713016 - DNA, 75 bp, synthetic construct
  source 1..75: mol_type = other DNA
tcgaacaaaatatatcgttatgggcaaagtgaaaccaatgatacattcctaaacaggcatcggagtgacaccatt

SEQ ID NO: 713017 - DNA, 75 bp, synthetic construct
  source 1..75: mol_type = other DNA
agttatccagaaacgtttgttggtaaaaactgacgaagcaaaagcggcgctggcaaaagtgtggcaagagaaagg

SEQ ID NO: 713018 - DNA, 75 bp, synthetic construct
  source 1..75: mol_type = other DNA
gaatcggaattaaatcaccaaattaacattacttatgatctagagagttatgttaaccaaacagtggatttagct

SEQ ID NO: 713019 - DNA, 75 bp, synthetic construct
  source 1..75: mol_type = other DNA
ctacccggactcgccgctgaaagacaaaatggagtactacatcgagcctgcggaacaaacgccggaagtgcaggc

SEQ ID NO: 713020 - DNA, 75 bp, synthetic construct
  source 1..75: mol_type = other DNA
ttggacgatgaaacagagcttctgctaccggacaacctaacacgtaccgactcaattctacgtggattggtagac

SEQ ID NO: 713021 - DNA, 75 bp, synthetic construct
  source 1..75: mol_type = other DNA
aataagaagttcagatcaaattgtggtactgacttgataagttatatcatcggatgccaaatgggccgctactcc

SEQ ID NO: 713022 - DNA, 75 bp, synthetic construct
  source 1..75: mol_type = other DNA
taaaacttaatgataaaattaatgaaaactatggcttggaaaatgatattttaatctcttcttcagccatcacga

SEQ ID NO: 713023 - DNA, 75 bp, synthetic construct
  source 1..75: mol_type = other DNA
aggggggaacctggactgttgtatcaaccaccggtttctcaatgagatatatgccaaaaggattcctttttgacc

SEQ ID NO: 713024 - DNA, 75 bp, synthetic construct
  source 1..75: mol_type = other DNA
taatagatttttaagactgtggtttgaagttaactttcatagtgtatttttgggtgctttaacgagagaagaagc

SEQ ID NO: 713025 - DNA, 75 bp, synthetic construct
  source 1..75: mol_type = other DNA
cacagctatctggctttgcgctgatgatgatggccagagatgacgataagcgtatttttacccgtaatgtgcgac

SEQ ID NO: 713026 - DNA, 75 bp, synthetic construct
  source 1..75: mol_type = other DNA
tgccagaatggcattcttgatgagttcgatggcaacctgctgaaaacgctgttcctgatccgttatgtggaaacg

SEQ ID NO: 713027 - DNA, 75 bp, synthetic construct
  source 1..75: mol_type = other DNA
ggctattggctgcatgatgggccgctattcccttgatcgcgaaggcttggtctacgcccacgaaggtaacaaagg

SEQ ID NO: 713028 - DNA, 75 bp, synthetic construct
  source 1..75: mol_type = other DNA
aaaacgatcgtttaaagactgccgctgccgatgacttccaaaaaatccccggtgcaccgattgcgtattggctca

SEQ ID NO: 713029 - DNA, 75 bp, synthetic construct
  source 1..75: mol_type = other DNA
tgaatatcgtttcgctgcaggaaagtaaactggatatcgctgaactgtggaccaagctgaactttcatcagcagg

SEQ ID NO: 713030 - DNA, 75 bp, synthetic construct
  source 1..75: mol_type = other DNA
tggcgccactgtgcctatctgtactttcacattacagaaagatcatgtcgcagattttataggaagttatgttcg

SEQ ID NO: 713031 - DNA, 75 bp, synthetic construct
  source 1..75: mol_type = other DNA
cgtatatgggaagtaagttccagacacctgatgtgaaaaaatatttgaaagataattttctgggatatgacaaag

SEQ ID NO: 713032 - DNA, 75 bp, synthetic construct
  source 1..75: mol_type = other DNA
tgggttgtatcgtctgactgttgagggtgatattcagcagaaagaagcggcggcagaactgatcccgtgtatcca

SEQ ID NO: 713033 - DNA, 75 bp, synthetic construct
  source 1..75: mol_type = other DNA
ttggacgatgaaactgagcttcttctaccagacaacctaacgcgtaccgactcaattctgcgtggattggtagac

SEQ ID NO: 713034 - DNA, 75 bp, synthetic construct
  source 1..75: mol_type = other DNA
gccggaggctgcttcaattactcaacaagcaataaatatagccaaagctgattgggacagtttagaggtttcatg

SEQ ID NO: 713035 - DNA, 75 bp, synthetic construct
  source 1..75: mol_type = other DNA
atatgaagatgtataaaaagcgcccaatctactggctattcagctccggcaaagagaaagcctttgagtgcctgg

SEQ ID NO: 713036 - DNA, 75 bp, synthetic construct
  source 1..75: mol_type = other DNA
ctggctattcagctcaggtaaagagaaggcgtttgagtgcctggtgtatctgcaccgttataatgaaggcacatt

SEQ ID NO: 713037 - DNA, 75 bp, synthetic construct
  source 1..75: mol_type = other DNA
gtttgccttcaataaaggtggtgattttaggaagtggtatggtaataactatttggttgtaaattgggagaatga

SEQ ID NO: 713038 - DNA, 75 bp, synthetic construct
  source 1..75: mol_type = other DNA
ttcccgtaaacaacggaaggttacgggattgtgcatcggatgagtttaagaacataccaggtagcccaatagcat

SEQ ID NO: 713039 - DNA, 75 bp, synthetic construct
  source 1..75: mol_type = other DNA
taacgggcaggcactaaaatcattcgtcgataataatggaaagttactgtccagacctcagaatgagtcgacgta

SEQ ID NO: 713040 - DNA, 75 bp, synthetic construct
  source 1..75: mol_type = other DNA
ctcccgcccctgtgacgccactgatgccgatgccggacatcacacaggagcgttttttacgtcttccggaagtga

SEQ ID NO: 713041 - DNA, 75 bp, synthetic construct
  source 1..75: mol_type = other DNA
gtgacgattaaattgattgtcggcctggcgaaccccggcgctgaatacgccgcaacgcgacataatgctggtgcc

SEQ ID NO: 713042 - DNA, 75 bp, synthetic construct
  source 1..75: mol_type = other DNA
cattaagtgtactttctgttctttctttcggcgcattcgctgccgactccattgatgctgcccaggcacagaatc

SEQ ID NO: 713043 - DNA, 75 bp, synthetic construct
  source 1..75: mol_type = other DNA
cgctttatccgtctgcccgaagtgatgcatctgtgcggcctgtcccggtcgaccatttacgacctcatcagccgc

SEQ ID NO: 713044 - DNA, 75 bp, synthetic construct
  source 1..75: mol_type = other DNA
ggggaatttccgccacaggtgagtcttggcggtaaaaatgtggcctggctgcactctgaagtcaccgcatggatg

SEQ ID NO: 713045 - DNA, 75 bp, synthetic construct
  source 1..75: mol_type = other DNA
tagtaacagccactggggccgtaccacacgcgaacgcaatctctataacctgctgattaaacaaggtgccgattg

SEQ ID NO: 713046 - DNA, 75 bp, synthetic construct
  source 1..75: mol_type = other DNA
gatgaatcgcagcagcaacgtctgcagcatcttttcgccacgacattgcataccctcgccggagaacacgaagca

SEQ ID NO: 713047 - DNA, 75 bp, synthetic construct
  source 1..75: mol_type = other DNA
gatgaatcgcagcagcaacgtctgcagcatcttttcaccacgacgttgcataccctcgccggagaacacgaagca

SEQ ID NO: 713048 - DNA, 75 bp, synthetic construct
  source 1..75: mol_type = other DNA
tcactactgatgagtatctgcatgatattcagcgcaaaatccaggcattaaccgaatcattgcctgtcgaagtat

SEQ ID NO: 713049 - DNA, 75 bp, synthetic construct
  source 1..75: mol_type = other DNA
ggcgcaacggcctaccagattactgaagctcgtagcggtgacacctggcacgctacggctgaactgtacaaataa

SEQ ID NO: 713050 - DNA, 75 bp, synthetic construct
  source 1..75: mol_type = other DNA
taaaagccgcgaagctgaacaccaggcctttcttgactggctgctggaaacagcgcaaacccatcaggtggatgc

SEQ ID NO: 713051 - DNA, 75 bp, synthetic construct
  source 1..75: mol_type = other DNA
attattaccaacaacattatgcagatgcctgcaaactgcgcggcgatcaacctctgcccatcatcgcaacggggc

SEQ ID NO: 713052 - DNA, 75 bp, synthetic construct
  source 1..75: mol_type = other DNA
gccggtctctgataccgttcatgagcgctttatccgtctgcccgaagtgatgcatctgtgcggcctgtcccggtc

SEQ ID NO: 713053 - DNA, 75 bp, synthetic construct
  source 1..75: mol_type = other DNA
ggactggacattgacgaccgtgccgcacagctgtctggttttgcgatgctgatgctggcgcgtctggatgaccgt

SEQ ID NO: 713054 - DNA, 75 bp, synthetic construct
  source 1..75: mol_type = other DNA
tatttcttatcgggtggaagaaataaaactcataacaacgatctttacgttagatacttctgggaagtttctttg

SEQ ID NO: 713055 - DNA, 75 bp, synthetic construct
  source 1..75: mol_type = other DNA
agtgtgaaaaatttcggcgattgttatagcggcttgataacaaaaggaactgatgagtttgtacgctacgctcac

SEQ ID NO: 713056 - DNA, 75 bp, synthetic construct
  source 1..75: mol_type = other DNA
ttttctaaagtcaatctcacacaaagtcctaatactaaaactagcgggaaatggtttccttacaataaaggcggt

SEQ ID NO: 713057 - DNA, 75 bp, synthetic construct
  source 1..75: mol_type = other DNA
aaaagtttttgaggattctactcctttaggcgaaattgcccctgtgcgacaaggtattgctacggctaataatga

SEQ ID NO: 713058 - DNA, 75 bp, synthetic construct
  source 1..75: mol_type = other DNA
atttgtttgcgatgtttatgcagcatgcattttctttactcaaagagaatggttttaatgcgcaagtgaatatgc

SEQ ID NO: 713059 - DNA, 75 bp, synthetic construct
  source 1..75: mol_type = other DNA
tttccgaagcagatcccgcttggcggtaaaaatgtcgcctgggcacagtctgaggtcagcgcatggatggcagac

SEQ ID NO: 713060 - DNA, 75 bp, synthetic construct
  source 1..75: mol_type = other DNA
tagggggtaaaaatgtcgcctggctacagtctgaaatcacggcgtggatggcagaacgtgtcgcgcaccgcaacc

SEQ ID NO: 713061 - DNA, 75 bp, synthetic construct
  source 1..75: mol_type = other DNA
atgcacactgctttttcttccccgtcttctgctcctgccgcgcctctgatgccggcctctgacgccgttcatgag

SEQ ID NO: 713062 - DNA, 75 bp, synthetic construct
  source 1..75: mol_type = other DNA
ttaagctcgttcaatgcagacaaccgctaccaactgctgaagcgaacgttggcaagatttactcaggccaaaacc

SEQ ID NO: 713063 - DNA, 75 bp, synthetic construct
  source 1..75: mol_type = other DNA
ggaaagatgatctttgtgatgccggtaatgtggttctgggtgctggtggtgtgccgcttggttgaaccagaacgt

SEQ ID NO: 713064 - DNA, 75 bp, synthetic construct
  source 1..75: mol_type = other DNA
tttcggctcacctgcgatgccgctgtccataaggcattctttgaggcaaagcagcgatacggtgctccccgcctt

SEQ ID NO: 713065 - DNA, 75 bp, synthetic construct
  source 1..75: mol_type = other DNA
atggtttctttaagtaaaaaccagacggtatcactcagcaaacaatccactgctctcagccagcttcagttcgga

SEQ ID NO: 713066 - DNA, 75 bp, synthetic construct
  source 1..75: mol_type = other DNA
atcaactctggcgagacgctttttactggttagcctggcaaaatagaattctggaattacgcgacgttcagctca

SEQ ID NO: 713067 - DNA, 75 bp, synthetic construct
  source 1..75: mol_type = other DNA
taaggcaactaaagaatttcaccaaagatattcaggtataaaagcggctcatttcgaaaggttattgagtgaaaa

SEQ ID NO: 713068 - DNA, 75 bp, synthetic construct
  source 1..75: mol_type = other DNA
atctacaagaaatattatcagagaataaagatccttatttagtaaaagagtttaatgtatggataaaagaaatta

SEQ ID NO: 713069 - DNA, 75 bp, synthetic construct
  source 1..75: mol_type = other DNA
ggcctggtatatagctttcttgaaggatacagtttccgcgacagcgcccgttttgcggtagcctgcgcggcaatt

SEQ ID NO: 713070 - DNA, 75 bp, synthetic construct
  source 1..75: mol_type = other DNA
actgcctgcgtgcgattacgatcaaatggaggccgcgtttaacgaactggtaaagcccccgaaagaccgacatca

SEQ ID NO: 713071 - DNA, 75 bp, synthetic construct
  source 1..75: mol_type = other DNA
ttcagcgggaagccgatcgggtagtcccggaaagcaccgggcagtctgtgggacgagtggattatccggatgtgt

SEQ ID NO: 713072 - DNA, 75 bp, synthetic construct
  source 1..75: mol_type = other DNA
gacgccgttgactgggtgcttaaagaggccagcctggctgtaaatactggtatcaaaggagaaaatgacgctggc

SEQ ID NO: 713073 - DNA, 75 bp, synthetic construct
  source 1..75: mol_type = other DNA
ctgtgggatacggaatatgatgaatggggagaatgggaagattgcggggaatgtgcttttgaaggatttgttgag

SEQ ID NO: 713074 - DNA, 75 bp, synthetic construct
  source 1..75: mol_type = other DNA
catgtgcagcactgtcacgtgccagcaccagcatcaataacccaacactttccgttaataacgcgcaatatctgt

SEQ ID NO: 713075 - DNA, 75 bp, synthetic construct
  source 1..75: mol_type = other DNA
aaagctaccggctggctgatacgctatggtgcagtcacgctattattaagctggatgcccgtggttggcgattta

SEQ ID NO: 713076 - DNA, 75 bp, synthetic construct
  source 1..75: mol_type = other DNA
gctcctggacacaggtacagaaaatactggggtgcagccgtggcacaataagcagtgcgctaaaacgtaaaaccg

SEQ ID NO: 713077 - DNA, 75 bp, synthetic construct
  source 1..75: mol_type = other DNA
aagctttaaataagctggaagtagatgttaatgatggtttgcgagatttaataaacatatattgtgctgctattg

SEQ ID NO: 713078 - DNA, 75 bp, synthetic construct
  source 1..75: mol_type = other DNA
cgtttgatacctatcttgatggcgatctgatccatatcgagaaaatcacactcgatatcacggataacagcgccg

SEQ ID NO: 713079 - DNA, 75 bp, synthetic construct
  source 1..75: mol_type = other DNA
ccgttgactgtagttttgacggtgaactgatccatttcgataaaatttcactcgatttaactgacaacacagccg

SEQ ID NO: 713080 - DNA, 75 bp, synthetic construct
  source 1..75: mol_type = other DNA
gaagtcgtgctggttgcaatgttgctttccggggtaagtcatccctgggttttagttttaacagcaacaatgggt

SEQ ID NO: 713081 - DNA, 75 bp, synthetic construct
  source 1..75: mol_type = other DNA
aggtggcggatattgcgcatacacagggagaactgaatgcgttgaaggccgcgaaggaagcaaccggcgaaacac

SEQ ID NO: 713082 - DNA, 75 bp, synthetic construct
  source 1..75: mol_type = other DNA
aggcatatctggcaaaactgcgtgatacgccggaatacaaaaaggaacaggaaaagtatggtaccggcagcgata

SEQ ID NO: 713083 - DNA, 75 bp, synthetic construct
  source 1..75: mol_type = other DNA
gcggtggtggcagcttcggggataaatttcagggtaacatgccgggtggcatgatatccgccggaggtcacagcg

SEQ ID NO: 713084 - DNA, 75 bp, synthetic construct
  source 1..75: mol_type = other DNA
atgaccaaacgtatttcagggatgtcctttgacatctatctggacggcgacctgatccacattgaaaaaatttcg

SEQ ID NO: 713085 - DNA, 75 bp, synthetic construct
  source 1..75: mol_type = other DNA
cccgggcacagggaaaggcacaacggttaaaccgctgctgcaaatactggggcagtacgccgcccacattaacgg

SEQ ID NO: 713086 - DNA, 75 bp, synthetic construct
  source 1..75: mol_type = other DNA
tgcattaagccagcttcatttcggtctcggttgggatccggttaagaaaaaaggtcttcttggaggattgtttgg

SEQ ID NO: 713087 - DNA, 75 bp, synthetic construct
  source 1..75: mol_type = other DNA
agggaaaggcacaacggttaaaccgctgctgcaaatactggggcagtacgccgcccacattaacggggcgggaca

SEQ ID NO: 713088 - DNA, 75 bp, synthetic construct
  source 1..75: mol_type = other DNA
agaaatgaaggtggaaacctttggtaacaagctgcagctcaacagcgttctggatggtgatccgaagggtggcag

SEQ ID NO: 713089 - DNA, 75 bp, synthetic construct
  source 1..75: mol_type = other DNA
gccgagggtgaaattgaagtcagttccaaagtgctgcaggttctgacagccaaagcccgttcagcggggtcatgg

SEQ ID NO: 713090 - DNA, 75 bp, synthetic construct
  source 1..75: mol_type = other DNA
gatacggaatatgatgaatggggagaatgggaagattgcggggaatgtgcttttgaaggatttgttgaggaagag

SEQ ID NO: 713091 - DNA, 75 bp, synthetic construct
  source 1..75: mol_type = other DNA
ctgatcaagcgggcgttgagaagtacaccacagaggttgtggttaacgtcggcggtactatgcagatgttaggcg

SEQ ID NO: 713092 - DNA, 75 bp, synthetic construct
  source 1..75: mol_type = other DNA
cactaactcatgtggcagccgtgcctgcccgtcctgcggaaaaaaggccacagacctgtggacagcgacacagct

SEQ ID NO: 713093 - DNA, 75 bp, synthetic construct
  source 1..75: mol_type = other DNA
gagcaagtggggaattttaaaagtggggagcaaaagtggggagtggtggggaatgaacagaaaaaacagagataa

SEQ ID NO: 713094 - DNA, 75 bp, synthetic construct
  source 1..75: mol_type = other DNA
ggaaaatttaccgtgtgaatgtttaaaaaaattttgtgctaattcatattctctcaattcaggatttagggaagg

SEQ ID NO: 713095 - DNA, 75 bp, synthetic construct
  source 1..75: mol_type = other DNA
gctggagactaaatacaagttcagcataaaaaaccgtacaattttaattagagatatcgactctagccaagagaa

SEQ ID NO: 713096 - DNA, 75 bp, synthetic construct
  source 1..75: mol_type = other DNA
tcccaattctaaataatgatgtggttattaattatgacgggagggaatgcttaataaagcgcagaaagggtattt

SEQ ID NO: 713097 - DNA, 75 bp, synthetic construct
  source 1..75: mol_type = other DNA
ggcaggcattgcacgccgcgcgtcgcattcaggcgcaaacgtactttatcgatttaccttgctgggcgcagagtg

SEQ ID NO: 713098 - DNA, 75 bp, synthetic construct
  source 1..75: mol_type = other DNA
atggcgctggcgcaattgcgcggtcatacattgccgttacgcagcgactggctggatgctctggcaggctcgctg

SEQ ID NO: 713099 - DNA, 75 bp, synthetic construct
  source 1..75: mol_type = other DNA
ttgaaggcccggccgattttaatgaccgggttgatgagctatttttggcccaccagcttcctgtggctatctaca

SEQ ID NO: 713100 - DNA, 75 bp, synthetic construct
  source 1..75: mol_type = other DNA
aagtgagtctgcatatattagttttctaacggttagccaacggcggtctttgtttttacatgcagggttaagtga

SEQ ID NO: 713101 - DNA, 75 bp, synthetic construct
  source 1..75: mol_type = other DNA
tcacgctcacctgcatagctggcaggcgctttgccatatcctgcgcgatctacatagcggcgttaatttacccgg

SEQ ID NO: 713102 - DNA, 75 bp, synthetic construct
  source 1..75: mol_type = other DNA
tgctgatgctctcaactgccagcgtgaaacctttatggctcgctggattgcatgggctatgcggcaaaacaatgg

SEQ ID NO: 713103 - DNA, 75 bp, synthetic construct
  source 1..75: mol_type = other DNA
gagatatcgactctagccaagagaataatctaccattacttgccactgatcaatacctatcacttcttcgaggta

SEQ ID NO: 713104 - DNA, 75 bp, synthetic construct
  source 1..75: mol_type = other DNA
cttcatggcgaaaaaatcgccacgaaccaggcaggggatgttcagaacgtcaatcctggtcagccagcaggcacg

SEQ ID NO: 713105 - DNA, 75 bp, synthetic construct
  source 1..75: mol_type = other DNA
gattatccggatgtgttcgaacaggtctggcgggagtacccgttgcgtgccggggcaaacccgaagaaatccgct

SEQ ID NO: 713106 - DNA, 75 bp, synthetic construct
  source 1..75: mol_type = other DNA
acctgatggtgacgcaggctatgcactctggaatcatacgcatactgctactctagaagattataaacttaaggg

SEQ ID NO: 713107 - DNA, 75 bp, synthetic construct
  source 1..75: mol_type = other DNA
ggccagccagaaaaacgaagggcaaaatattctgcagctggcgattcgttcgcgctttaagtttatttatcgccc

SEQ ID NO: 713108 - DNA, 75 bp, synthetic construct
  source 1..75: mol_type = other DNA
gggcagccaattgcaacagtgatggcagtgtatatccacctcctggtgagcgcgtcacgaaatgtcacgcacatg

SEQ ID NO: 713109 - DNA, 75 bp, synthetic construct
  source 1..75: mol_type = other DNA
atgccggatagtcgcaaagccaggcggattgctgatcccgggcttcaaccggagcgcacatcgctggcgtggttt

SEQ ID NO: 713110 - DNA, 75 bp, synthetic construct
  source 1..75: mol_type = other DNA
caacaggctaatgaagccagactgaactctcagcaagctcagtttgaagcatcaatggcaaacgatgaagttaat

SEQ ID NO: 713111 - DNA, 75 bp, synthetic construct
  source 1..75: mol_type = other DNA
ttggcaccattaccctacctgaccattcaggtggcggtttacggattaattttcttcctgccgacccaggttgcg

SEQ ID NO: 713112 - DNA, 75 bp, synthetic construct
  source 1..75: mol_type = other DNA
atgctgcgtgctaaaggagagaatattatgcaaaaacttgaaaaccggtgtgatctgctgctaattcagcatcag

SEQ ID NO: 713113 - DNA, 75 bp, synthetic construct
  source 1..75: mol_type = other DNA
agtaaagcggttggcagactgcttgctgctggcggcatatacaatgggaatatcgaaggattcagggaaacagca

SEQ ID NO: 713114 - DNA, 75 bp, synthetic construct
  source 1..75: mol_type = other DNA
caacgccggagaatacctcctgcccgcagtgggggctcaaacgtgctattacaccttgttttggtgcccgcctgg

SEQ ID NO: 713115 - DNA, 75 bp, synthetic construct
  source 1..75: mol_type = other DNA
aaagaaagatggtggaacgctatcaaaagtaataaccttgctgatgactatcttgatttcccgttccctgagcgt

SEQ ID NO: 713116 - DNA, 75 bp, synthetic construct
  source 1..75: mol_type = other DNA
tgaagcctccgtaagttatcaaaacagcaaagaaatcactataacattaaagacggataaccacagttatattgg

SEQ ID NO: 713117 - DNA, 75 bp, synthetic construct
  source 1..75: mol_type = other DNA
cttctgaacaggatggacttgaatgccacaggcttggcgcagaaattattggaaccaccctgtcgggttatactg

SEQ ID NO: 713118 - DNA, 75 bp, synthetic construct
  source 1..75: mol_type = other DNA
agattcatcgtttagatcttattgcatatatcattcagtctggtgctgaagtggataacttttatcgaattaccc

SEQ ID NO: 713119 - DNA, 75 bp, synthetic construct
  source 1..75: mol_type = other DNA
tccggctgaatttacgccaacgggaatggtgatgtttatacagggttcagagatgaccccggtggaaacaaagct

SEQ ID NO: 713120 - DNA, 75 bp, synthetic construct
  source 1..75: mol_type = other DNA
tgaggataagaaaaacaacaaacaattattaaaacttgttatgaattacagtattgacctcttacacgctgataa

SEQ ID NO: 713121 - DNA, 75 bp, synthetic construct
  source 1..75: mol_type = other DNA
gcccgcaccgcctgatgaacgggttactgctggcgacgttgatattaatagccggatggctggcactcaaacccg

SEQ ID NO: 713122 - DNA, 75 bp, synthetic construct
  source 1..75: mol_type = other DNA
ttaacaccgagctgttgcaaccgcgtcgtgaaacgctggaaatggtggttcgcgatctctatccacgcggcggtc

SEQ ID NO: 713123 - DNA, 75 bp, synthetic construct
  source 1..75: mol_type = other DNA
atggcgtttggttcttactcgacggcgatgctcaaaggcattgttgatattccggtgtatcctttgaaaggctac

SEQ ID NO: 713124 - DNA, 75 bp, synthetic construct
  source 1..75: mol_type = other DNA
cagatggcacgccggttgtggggcgtacacgctttaaaaatttgtggctgaataccggtcacggcacgctcggct

SEQ ID NO: 713125 - DNA, 75 bp, synthetic construct
  source 1..75: mol_type = other DNA
cagcacgacatggtactccatggaatactgaagagttacagcgtcttctcgtatccatagcggagggcgtctcgc

SEQ ID NO: 713126 - DNA, 75 bp, synthetic construct
  source 1..75: mol_type = other DNA
gagccagcgctggccgaagtggcacacaaactcaccggtggcctgcaactgcccaatgacgaaaccggcgattgc

SEQ ID NO: 713127 - DNA, 75 bp, synthetic construct
  source 1..75: mol_type = other DNA
atgcgagttgtcatactgggaagtggtgtggtaggcgttgccagcgcctggtatttaaatcaggcaggacatgag

SEQ ID NO: 713128 - DNA, 75 bp, synthetic construct
  source 1..75: mol_type = other DNA
atggtgacaagccagatcacgatgatgaccatcatcctgatgatgaaccgccaccgccgccacgaggtggtcgtc

SEQ ID NO: 713129 - DNA, 75 bp, synthetic construct
  source 1..75: mol_type = other DNA
gccagtgattccgccagggagctggaagataaactggaggcgctaagaaatgcgcaaccgcgagagatccgcacg

SEQ ID NO: 713130 - DNA, 75 bp, synthetic construct
  source 1..75: mol_type = other DNA
ctggaaaactgcgatatctccactttcaaaaatgtggaaatcagctttaacggcgttggcgatgcagacaacagc

SEQ ID NO: 713131 - DNA, 75 bp, synthetic construct
  source 1..75: mol_type = other DNA
accgtattgatatttactgagagctcagatcaactttccagggcaacagatcgcgtacccggtttgccggccagt

SEQ ID NO: 713132 - DNA, 75 bp, synthetic construct
  source 1..75: mol_type = other DNA
tcagcggacaatgatggcgctgcgtcgccatatgagtggtgatattgataatttcccccgcgatgttgctgagct

SEQ ID NO: 713133 - DNA, 75 bp, synthetic construct
  source 1..75: mol_type = other DNA
tcaaaccgtcggcacgactggaaaaaccatacgcgatggtgtgcatcaatattatcgccgccgatagcaaccgcg

SEQ ID NO: 713134 - DNA, 75 bp, synthetic construct
  source 1..75: mol_type = other DNA
acccgcgccgcgacattagcgatggattatggcttcactgttcttaatctctataaactttatctgatcgtcgat

SEQ ID NO: 713135 - DNA, 75 bp, synthetic construct
  source 1..75: mol_type = other DNA
cagaggtaacggaagttgtaccagtcgtttgcgatgtatgtaaagggaagggagtgataagtgccaggtgtcgtt

SEQ ID NO: 713136 - DNA, 75 bp, synthetic construct
  source 1..75: mol_type = other DNA
ctgggccagccgttctcgcgctgttcggccatcagattgggagcattggacggagataatggagagtgtgcctgc

SEQ ID NO: 713137 - DNA, 75 bp, synthetic construct
  source 1..75: mol_type = other DNA
ttatggcggctattggtaccaccagcaatcgtgagcggtttggcctggcggccttcttcgggaaggccggtatca

SEQ ID NO: 713138 - DNA, 75 bp, synthetic construct
  source 1..75: mol_type = other DNA
attttagccccaggggggcgcgcattatcaacgatgtgaaagaaacttccccggaacgtctcactggaaccgatg

SEQ ID NO: 713139 - DNA, 75 bp, synthetic construct
  source 1..75: mol_type = other DNA
gcagctatcattattcattaagtgacagggagaaagagatggttacctcattattgcaacaccccgaaatgcggt

SEQ ID NO: 713140 - DNA, 75 bp, synthetic construct
  source 1..75: mol_type = other DNA
atgaaaaaatggcctttatttaatggcccgcaccgcctgatgaacgggttactgctggcgacgttgatattaata

SEQ ID NO: 713141 - DNA, 75 bp, synthetic construct
  source 1..75: mol_type = other DNA
cggccatgttgagcaggccacgttctggacggggctacgtccgatgacgccagatggcacgccggttgtggggcg

SEQ ID NO: 713142 - DNA, 75 bp, synthetic construct
  source 1..75: mol_type = other DNA
ggagattgtgactaacatctggcacgggcgcgatgaagccaaacgccagggcaataaaccgctgtcgcaggcgct

SEQ ID NO: 713143 - DNA, 75 bp, synthetic construct
  source 1..75: mol_type = other DNA
accgaaggttttctcgatgcctggttctcacgagaaaaacattgcctgccggagattgtgactaacatctggcac

SEQ ID NO: 713144 - DNA, 75 bp, synthetic construct
  source 1..75: mol_type = other DNA
agaatggcgacgcctccgcgctcgattttgaactggaatacgtcgccagccgcccgcagctactggaaaaactca

SEQ ID NO: 713145 - DNA, 75 bp, synthetic construct
  source 1..75: mol_type = other DNA
gtgcagttcgatctgcgaatgctgcaaaaacatgctgagagataccgcattccgctgcgtctggggcgtgataac

SEQ ID NO: 713146 - DNA, 75 bp, synthetic construct
  source 1..75: mol_type = other DNA
ccacccgccacggtgagctgtactgcatcggcctggaaggttgcgggcagcgcatcgtttatatgctggggccag

SEQ ID NO: 713147 - DNA, 75 bp, synthetic construct
  source 1..75: mol_type = other DNA
aagattgcgagctggtgacgcagatcttccacaaaactgaaatcatgccgtttttactcgaacgggcgacggtga

SEQ ID NO: 713148 - DNA, 75 bp, synthetic construct
  source 1..75: mol_type = other DNA
gtaccggacgtaatccgaagactggcgataaagtagaactggaaggaaaatacgttcctcactttaaaccaggta

SEQ ID NO: 713149 - DNA, 75 bp, synthetic construct
  source 1..75: mol_type = other DNA
ccttatcaacggttcgcacttctgcgccacgaacatggaagaagtacgcgtgctgacagcaacacgcaatacggg

SEQ ID NO: 713150 - DNA, 75 bp, synthetic construct
  source 1..75: mol_type = other DNA
cgtgacacgcaggcttacagggatgaaatggcgaagtatggtaccggcagtgaaattcagcggggtatccaggcc

SEQ ID NO: 713151 - DNA, 75 bp, synthetic construct
  source 1..75: mol_type = other DNA
gtgcaattcgatctgcgaatgctgcaaaaacatgccgagcgttatcgtattccgctgcggctggggcgcgataac

SEQ ID NO: 713152 - DNA, 75 bp, synthetic construct
  source 1..75: mol_type = other DNA
aacggctgaccagcgcattagaactggagtatgaaactcatttctgccgttttctgatgccaaccattcgcggag

SEQ ID NO: 713153 - DNA, 75 bp, synthetic construct
  source 1..75: mol_type = other DNA
ctgcgctggggaaataccctcaagagtcgctgtcacgaacggtgcaatagtgatccacacccaacgcctgaaatc

SEQ ID NO: 713154 - DNA, 75 bp, synthetic construct
  source 1..75: mol_type = other DNA
agtgagctggagtggcgcgagcacggctttaaaaacggcgtcttttttgcccaggccaaagggcgactgattatc

SEQ ID NO: 713155 - DNA, 75 bp, synthetic construct
  source 1..75: mol_type = other DNA
ccattcgcatgtgcatattccagcatcagtatctggcagagcacaaaacaccgggtcagactctcctgaagccga

SEQ ID NO: 713156 - DNA, 75 bp, synthetic construct
  source 1..75: mol_type = other DNA
cctatcacggctccaactcgcaccaggcagaaaagtactggctgcgggaagtggttgaaggcgtgctgaggcaat

SEQ ID NO: 713157 - DNA, 75 bp, synthetic construct
  source 1..75: mol_type = other DNA
tggcgtcagaatttaatatggcgcgcgggccggtaaaattttatgatttcgttcgcatgggcgcagtgggggttt

SEQ ID NO: 713158 - DNA, 75 bp, synthetic construct
  source 1..75: mol_type = other DNA
gaatgccgggcaaatctcccccggatatgctgcaccgtgggcggcaccaggtgtgcctttaaaagcgattaaatg

SEQ ID NO: 713159 - DNA, 75 bp, synthetic construct
  source 1..75: mol_type = other DNA
atgacgacctgtttgacccgactgcactatctacgttaccaaaagagtatcgtaccaagataataaggaggtcgg

SEQ ID NO: 713160 - DNA, 75 bp, synthetic construct
  source 1..75: mol_type = other DNA
tttgtcagaatgggggctgtaggtttatatagtaattgtgtaccatatagtgacttcattgaacaaaatgtaaat

SEQ ID NO: 713161 - DNA, 75 bp, synthetic construct
  source 1..75: mol_type = other DNA
tcgtcctttgcaatatcagaaccgtggcaccattaaatatgtctggaccataaacggcccggaaccgctggacta

SEQ ID NO: 713162 - DNA, 75 bp, synthetic construct
  source 1..75: mol_type = other DNA
ttaggcgaaggcaaatctatcgataacccgtgggatcggatggacgaaattgaccgccgtttcgccgaagataaa

SEQ ID NO: 713163 - DNA, 75 bp, synthetic construct
  source 1..75: mol_type = other DNA
aagattgcgagctggtgacgcagatcttccacaaaactgaaatcatgccatttttactcgaacgagcgacggtga

SEQ ID NO: 713164 - DNA, 75 bp, synthetic construct
  source 1..75: mol_type = other DNA
tttttctgcttctgccggaggagtatggcccagcctttccagcaatcgtcgattgttataccagtccacccgcgt

SEQ ID NO: 713165 - DNA, 75 bp, synthetic construct
  source 1..75: mol_type = other DNA
ggcgactatctgaccgaagagatgagcaacagggaaatcgaggtcatcagggcgtgcagcaaagccggaaataac

SEQ ID NO: 713166 - DNA, 75 bp, synthetic construct
  source 1..75: mol_type = other DNA
ctataagctgtatctgatcgtcgataaagagaatgaaaaagcgattcacatttaccgcaagcttggctttacggt

SEQ ID NO: 713167 - DNA, 75 bp, synthetic construct
  source 1..75: mol_type = other DNA
gtgcctacaaaaccttcccagccgacagtgacggcatcctgccgctgatggatgacgattggtttgaggacgacg

SEQ ID NO: 713168 - DNA, 75 bp, synthetic construct
  source 1..75: mol_type = other DNA
tccgtggaagcgaaggtccgcgcaatgcagtagctaccgggctactcatttcctggcacaaggagtcggctcatg

SEQ ID NO: 713169 - DNA, 75 bp, synthetic construct
  source 1..75: mol_type = other DNA
ggcttaaatgatcgttatctggcagaagaaatcaaaaagtacccgttggcaaaagtagaaagcctgttccattta

SEQ ID NO: 713170 - DNA, 75 bp, synthetic construct
  source 1..75: mol_type = other DNA
ctggcgttattctgcaacgcgatgatggcgtgctggtcagtaaccgactggaaattcctttacccattgttgatg

SEQ ID NO: 713171 - DNA, 75 bp, synthetic construct
  source 1..75: mol_type = other DNA
ggttctgttaatctgcctgaaggggtgataacgaaaaagtcaggtactctgatattccaggggcatccggtgatt

SEQ ID NO: 713172 - DNA, 75 bp, synthetic construct
  source 1..75: mol_type = other DNA
attatttctaataataacaaaaataaatctgaattaacacttaaattacaaacactaaatgaaaatgacattagt

SEQ ID NO: 713173 - DNA, 75 bp, synthetic construct
  source 1..75: mol_type = other DNA
tcggcaactcatcaacagaggttgcgctggcaacgctcagtgcaactggagagttgtcgctcgtgagtagcgccc

SEQ ID NO: 713174 - DNA, 75 bp, synthetic construct
  source 1..75: mol_type = other DNA
ctctatggtgaaatccgaccgtctgcaaatggcgatgatcgccagtgaaattaagcaaaaactgcatgttgatgt

SEQ ID NO: 713175 - DNA, 75 bp, synthetic construct
  source 1..75: mol_type = other DNA
acaaggattataacccactgattggtcgtaccggtgttgacgtgggaagaagcttctccggagatgactggaaaa

SEQ ID NO: 713176 - DNA, 75 bp, synthetic construct
  source 1..75: mol_type = other DNA
atgtcagcggctctgacacgatgagcttcggatacaccaaaaacacctatactgcggttggtacaaataataata

SEQ ID NO: 713177 - DNA, 75 bp, synthetic construct
  source 1..75: mol_type = other DNA
caggaggctctcgtacaggcaacgaaaaaagtcggcatcaatgtcagcgatatttcacttattcgtatcaacgaa

SEQ ID NO: 713178 - DNA, 75 bp, synthetic construct
  source 1..75: mol_type = other DNA
ccggcggacacaccctacattctggtggtgtcatcggcatttgattttgccgatatcgcaacgatgataaacgcc

SEQ ID NO: 713179 - DNA, 75 bp, synthetic construct
  source 1..75: mol_type = other DNA
tccgtggtagtgaaggcccgcgcaatgcggtagctaccgggctactgatttcctggcacagggagttggctcatg

SEQ ID NO: 713180 - DNA, 75 bp, synthetic construct
  source 1..75: mol_type = other DNA
atcatggggatatagaggcggtactcttgatttaaatggaaataatgtaaactttactcgtcttcaggctgcaga

SEQ ID NO: 713181 - DNA, 75 bp, synthetic construct
  source 1..75: mol_type = other DNA
atgtcaattaaaacaattaagtatttctcaacaattattgtagcggttgttgcgattcttgccggatggtggcta

SEQ ID NO: 713182 - DNA, 75 bp, synthetic construct
  source 1..75: mol_type = other DNA
ggtgcgccagcacaaattacgctgtatagcgacaacagaaagttacagggtcacgtttccagtattgggcgggcc

SEQ ID NO: 713183 - DNA, 75 bp, synthetic construct
  source 1..75: mol_type = other DNA
atgaagacctttgcgctacagggcgacacgctcgacgccatctgtgtccggtattacgggcgcactgagggcgtg

SEQ ID NO: 713184 - DNA, 75 bp, synthetic construct
  source 1..75: mol_type = other DNA
tgctgacgctgggggcgataatcatatttttctctggtcgcgtgtgggctggtgatagcgcaccagaaaaaagag

SEQ ID NO: 713185 - DNA, 75 bp, synthetic construct
  source 1..75: mol_type = other DNA
gctgccacatggcaccgccgtcgaactgcccgacgttcagaccgcgcccgtggctgaaactgtcaatctgtggga

SEQ ID NO: 713186 - DNA, 75 bp, synthetic construct
  source 1..75: mol_type = other DNA
ccgtccgctttacgctggataaagtcccaggcgatgtcacgctggtgtcgggcaccacctgtagcattgccgtag

SEQ ID NO: 713187 - DNA, 75 bp, synthetic construct
  source 1..75: mol_type = other DNA
agcagaagattgaggaaagctctcaaccttatatgtttcatggacaacttaatggttatatggatgtaaatatac

SEQ ID NO: 713188 - DNA, 75 bp, synthetic construct
  source 1..75: mol_type = other DNA
ctcgaaaatcgcaacggactttatggattcaggttataaatccttcctgacggaagtcaataatctgaacaaacg

SEQ ID NO: 713189 - DNA, 75 bp, synthetic construct
  source 1..75: mol_type = other DNA
tttgttaatagtagtctgcttctcgaaaaaggagcaaaactgacagcacagagtggtattttcacaaataacact

SEQ ID NO: 713190 - DNA, 75 bp, synthetic construct
  source 1..75: mol_type = other DNA
tcatgatgaagggtgtttgacttattcggatcactccaattataagcactgtgatagctggtttttggttgatgt

SEQ ID NO: 713191 - DNA, 75 bp, synthetic construct
  source 1..75: mol_type = other DNA
gaccagggaatgcaattgagtatgaaagacaaagactatcacccactaattggtcgaacaggcgtggatgtaggt

SEQ ID NO: 713192 - DNA, 75 bp, synthetic construct
  source 1..75: mol_type = other DNA
accagttgaatgttaccggcaaactgcagggcagcaataatactattcttgttaacttttttaacaaagcagcca

SEQ ID NO: 713193 - DNA, 75 bp, synthetic construct
  source 1..75: mol_type = other DNA
cgagacgcagaaaaaggctattgttgccacggcattgatcgcgattgctgccctcttggttgcggtgatttagat

SEQ ID NO: 713194 - DNA, 75 bp, synthetic construct
  source 1..75: mol_type = other DNA
aggacgtgatgcaataccgcaagatatcgctggctgaccgttttgtattatgggccagcgctataactacactga

SEQ ID NO: 713195 - DNA, 75 bp, synthetic construct
  source 1..75: mol_type = other DNA
tggcgaaagtgccgcaaagctctgtcgaccagatgtctcccgcagatctgaatgcggcggcgtggcttgtggccg

SEQ ID NO: 713196 - DNA, 75 bp, synthetic construct
  source 1..75: mol_type = other DNA
atgcgcgtcgcccaggaagagattttcgggccggtcgcctgcctgctgccgtttaaagacgaagccgaaggtctg

SEQ ID NO: 713197 - DNA, 75 bp, synthetic construct
  source 1..75: mol_type = other DNA
gaatccattgctaatgccctcgatgtagcccttcccgttctccttgaaacaactgatcttgatgaacacagtctt

SEQ ID NO: 713198 - DNA, 75 bp, synthetic construct
  source 1..75: mol_type = other DNA
ttggaaattcttcaacggaagtcgcgctggcgacgttgaataacgctggcacgctgtcgattatcggcagcgccc

SEQ ID NO: 713199 - DNA, 75 bp, synthetic construct
  source 1..75: mol_type = other DNA
atgcatggcgggaacaacatgattatcaagctgtttcacgccgtctggttaatatgtgtcaaggcttagctaaag

SEQ ID NO: 713200 - DNA, 75 bp, synthetic construct
  source 1..75: mol_type = other DNA
tcgggccggtcgcctgcctgctgccgtttaaagacgaagccgaaggcttacgcctggcaaacgacgtggagtacg

SEQ ID NO: 713201 - DNA, 75 bp, synthetic construct
  source 1..75: mol_type = other DNA
aatttttcgcggaagtctgccagcagatgaacggcaagacttatccggtcgacgacaagatgctcaactacacgc

SEQ ID NO: 713202 - DNA, 75 bp, synthetic construct
  source 1..75: mol_type = other DNA
gcaggaaggggacgaattagcctcccagattgaacagcaaatgaaaaaactggagaaacaggtaaaggatcttca

SEQ ID NO: 713203 - DNA, 75 bp, synthetic construct
  source 1..75: mol_type = other DNA
gtgagctggcgctggaagccggtattccggcgggcgtgctgaacgtggtacagggctacggcgcaaccgcagggg

SEQ ID NO: 713204 - DNA, 75 bp, synthetic construct
  source 1..75: mol_type = other DNA
cgcgccaaccgtctgcgcgtgggcgatccgaacgatccgaatacccaggttggggcgcttatcagccagcaacac

SEQ ID NO: 713205 - DNA, 75 bp, synthetic construct
  source 1..75: mol_type = other DNA
cctctggcggtgaagcggagatcaatcaggcggtagcggcagcgaaagaggcgttcccgaaatgggccaatctgc

SEQ ID NO: 713206 - DNA, 75 bp, synthetic construct
  source 1..75: mol_type = other DNA
ggagtgaagccacccggcataaactcggacaggaagcgaaggagttgctcgcagaactccagaaattacagcaga

SEQ ID NO: 713207 - DNA, 75 bp, synthetic construct
  source 1..75: mol_type = other DNA
cagctggcgcgaattctgcacccgtttgtcggcgtggttatgttttcctcgttcatcatcatgtttttccgttac

SEQ ID NO: 713208 - DNA, 75 bp, synthetic construct
  source 1..75: mol_type = other DNA
tcgtaagatcgtcgtcaacgaggaagtaggtgacaccgagcgttataacttcggtcagaaatgcgttttctgggc

SEQ ID NO: 713209 - DNA, 75 bp, synthetic construct
  source 1..75: mol_type = other DNA
aatcccggtgatccgattcgcgttaatactgcattcatttgccgcagtggcgttaattgtggttatcatggtgca

SEQ ID NO: 713210 - DNA, 75 bp, synthetic construct
  source 1..75: mol_type = other DNA
cacgcccaggcgtttgaactggctcgccaggaatttgattatctttctgcggaagagattgctgaagaaatacgc

SEQ ID NO: 713211 - DNA, 75 bp, synthetic construct
  source 1..75: mol_type = other DNA
cacgccgggcaactataccttcatcctgaaggggacgaaggaggtgccacgccgtctgttgcaggaaaaacgcaa

SEQ ID NO: 713212 - DNA, 75 bp, synthetic construct
  source 1..75: mol_type = other DNA
tacctcggccagaaaccgacgacggttatcgaccttaccgatgattctccggtcgtcgtgcgtgaaggcgtaggt

SEQ ID NO: 713213 - DNA, 75 bp, synthetic construct
  source 1..75: mol_type = other DNA
aaattgacagcgattcgctgtacctcgatgaaatcacgctcaccagcgagcaagacgcgtcgctacgttacggtc

SEQ ID NO: 713214 - DNA, 75 bp, synthetic construct
  source 1..75: mol_type = other DNA
attgaacgcgcgctggccatgaactggctggcgaaatatatggcgacaatgcctccagttgttttgcctgcgcct

SEQ ID NO: 713215 - DNA, 75 bp, synthetic construct
  source 1..75: mol_type = other DNA
ctggtgagcggcgtgattatctggcgtccttattttgcgcctgctttctcaatcccggcgatccgattcgcgtta

SEQ ID NO: 713216 - DNA, 75 bp, synthetic construct
  source 1..75: mol_type = other DNA
gcggcaggactgtttatcttcagtcagcaggataacgaaccggtggcgctggtgactaaatttgcaggcgctgag

SEQ ID NO: 713217 - DNA, 75 bp, synthetic construct
  source 1..75: mol_type = other DNA
gcgcaggagatgaatttgccgtgcaaaacgttgttgaaagggttggatgaagctatcgcccggcgcggaactaaa

SEQ ID NO: 713218 - DNA, 75 bp, synthetic construct
  source 1..75: mol_type = other DNA
cgagcaatatccggctacaaagtagtgaaacgccgcaggagattttccgcaacaatcttgatgcgttagtcgatg

SEQ ID NO: 713219 - DNA, 75 bp, synthetic construct
  source 1..75: mol_type = other DNA
cggtgggaaggcgaacatttcggcgagggctgtcggggtaaagcattaaaacccaatgaatcgaacgttgctctg

SEQ ID NO: 713220 - DNA, 75 bp, synthetic construct
  source 1..75: mol_type = other DNA
tccttgctcatgagtcccacatgtctgctctctcccgtctggctatgaagaacggctttggcggtgaggatgcag

SEQ ID NO: 713221 - DNA, 75 bp, synthetic construct
  source 1..75: mol_type = other DNA
ctggttaagacgatgctcaatggagtacttaaggacgctcaggagaatatcccattccctgttgagctgctgccg

SEQ ID NO: 713222 - DNA, 75 bp, synthetic construct
  source 1..75: mol_type = other DNA
tttagccgaagccggacaggatgctccccggaaaaagaccggcaataacgccagacaggcgaaaaaggctcgcgc

SEQ ID NO: 713223 - DNA, 75 bp, synthetic construct
  source 1..75: mol_type = other DNA
caatccattgtgttactggatagcctgacggcgccagcgtggtatctgggcggaggtacgttgttgtcgatgctg

SEQ ID NO: 713224 - DNA, 75 bp, synthetic construct
  source 1..75: mol_type = other DNA
tggttcatgcagtggccggtacagatttagccgaagccgaagccgaagccgaagccgaagccgaagccgaagccg

SEQ ID NO: 713225 - DNA, 75 bp, synthetic construct
  source 1..75: mol_type = other DNA
aacggtgtgcttaaagacgctcaggagaatatcccattcccggtagagcttctgccgacccgcaatagtttaccg

SEQ ID NO: 713226 - DNA, 75 bp, synthetic construct
  source 1..75: mol_type = other DNA
ctgggtaccgacatcgcttactacaacggtgaggacaaaggcgtcttcatgatggctaagcgcttcacggctctg

SEQ ID NO: 713227 - DNA, 75 bp, synthetic construct
  source 1..75: mol_type = other DNA
caatagagcttccggtcctgactggtagcctgacagctaaggcagacactatcatggacgcgctgtatgagaaca

SEQ ID NO: 713228 - DNA, 75 bp, synthetic construct
  source 1..75: mol_type = other DNA
tcatgagtcccatatgtccgctctctcccgtctggctatgaagaacggctttggtggagaggatgcagtaaagga

SEQ ID NO: 713229 - DNA, 75 bp, synthetic construct
  source 1..75: mol_type = other DNA
agtgtgcttaaagacgctcaggataacattccgttcccggttgagttgctgcctacccgtaacagcttaccgaca

SEQ ID NO: 713230 - DNA, 75 bp, synthetic construct
  source 1..75: mol_type = other DNA
gcagggcttcggtggcgaagacgctattgtcgatatgctgggtacagacatcgcctactacaacggtgcagaccg

SEQ ID NO: 713231 - DNA, 75 bp, synthetic construct
  source 1..75: mol_type = other DNA
ctggcagaagtgcgttgcagtcgtgcgcagtttcgtcgtgcggggttcctgttcatgcggggacgccagcaggtt

SEQ ID NO: 713232 - DNA, 75 bp, synthetic construct
  source 1..75: mol_type = other DNA
gttaatgcgcccatcggtaaaccgccggtcttttatcgcgccgatagcgaatgggcggcactgttcgcgtcgtta

SEQ ID NO: 713233 - DNA, 75 bp, synthetic construct
  source 1..75: mol_type = other DNA
ccctgctggaaaaattaaccgccctgctgggacgccagccagaactgcccgactggatttatgacggggtaacgc

SEQ ID NO: 713234 - DNA, 75 bp, synthetic construct
  source 1..75: mol_type = other DNA
atggatacgccacgcccacagttattagattttcaatttcatcagaataacgacagtcttaccctacgttttcag

SEQ ID NO: 713235 - DNA, 75 bp, synthetic construct
  source 1..75: mol_type = other DNA
acagtgaaaactacccacagttagattcccgcatcaagcaatggaaagaagaaggcgtgcagttcctcgcctaca

SEQ ID NO: 713236 - DNA, 75 bp, synthetic construct
  source 1..75: mol_type = other DNA
ccggtagccagaaatattccaccatgatgtgggcgggcgaccagaacgtcgactggagtctggacgatggcctgg

SEQ ID NO: 713237 - DNA, 75 bp, synthetic construct
  source 1..75: mol_type = other DNA
atgcataacgcctggcccgcgctgtgggcgaagtgtaactacgaagcccttgaagaaacgggcaagctcggcgag

SEQ ID NO: 713238 - DNA, 75 bp, synthetic construct
  source 1..75: mol_type = other DNA
gcagaaggtcaggtcgtttctccggtaaactttaactctccggggcaggtcgttattgccggtcataaagaagcg

SEQ ID NO: 713239 - DNA, 75 bp, synthetic construct
  source 1..75: mol_type = other DNA
agtctgttgaatacatggcagcgcaaggcgtagaacatctttatgaagtcggcccgggcaaagtgcttactggcc

SEQ ID NO: 713240 - DNA, 75 bp, synthetic construct
  source 1..75: mol_type = other DNA
gcgtctggttgagatgcgcggcaagttcatgcaagaagccgtaccggaaggcacgggcgctatggcggcaatcat

SEQ ID NO: 713241 - DNA, 75 bp, synthetic construct
  source 1..75: mol_type = other DNA
tgtgggcgggcgaccagaacgtcgactggagtctcgacgatggcctggcgtcggtcgtcccggcagcgctgtcgc

SEQ ID NO: 713242 - DNA, 75 bp, synthetic construct
  source 1..75: mol_type = other DNA
gccgtggttctgacattagcgccacgctgaatatctctgccgacgatcagggccgtttattgctggaactacaaa

SEQ ID NO: 713243 - DNA, 75 bp, synthetic construct
  source 1..75: mol_type = other DNA
caccgcgtctttgatcgcgtcagcgccgtcgtcggtgaacaggtatggaatttcgccgattttgcgacctcgcaa

SEQ ID NO: 713244 - DNA, 75 bp, synthetic construct
  source 1..75: mol_type = other DNA
ctcaagataacatcccgttccctgtagaagtcctgccgacccgtaacagcttaccgactccaatcattgctcaca

SEQ ID NO: 713245 - DNA, 75 bp, synthetic construct
  source 1..75: mol_type = other DNA
tggcggaatttgctgggaagatggtcaggattgctaacgaattaccgatgatagagcaagaggctaaatcatacg

SEQ ID NO: 713246 - DNA, 75 bp, synthetic construct
  source 1..75: mol_type = other DNA
atcagagagagtgagtatgcgtctctttgcgacatgtgcaaaagccagttggatctggtgcatatcgttattgat

SEQ ID NO: 713247 - DNA, 75 bp, synthetic construct
  source 1..75: mol_type = other DNA
tgttccgcgatggcgcggacggcgtaatcagtcgcgggaaagccgaacctggcgataaaaccatgtgtgatgtgt

SEQ ID NO: 713248 - DNA, 75 bp, synthetic construct
  source 1..75: mol_type = other DNA
tcagcaagcttggcgtggttcagtcggtgtttctgattaccgaggaatagtcagcccagcttacttagttctttc

SEQ ID NO: 713249 - DNA, 75 bp, synthetic construct
  source 1..75: mol_type = other DNA
atcatgtcacagagcttcttgccccctatcgcttagaaagcaatcagcgcaagatgattagctggggaagttggt

SEQ ID NO: 713250 - DNA, 75 bp, synthetic construct
  source 1..75: mol_type = other DNA
agcggtttgatgaagaataactacgaagagtacttgcgttcgataagtggtgaaaagacattatctctgaaagca

SEQ ID NO: 713251 - DNA, 75 bp, synthetic construct
  source 1..75: mol_type = other DNA
gaactggatgaattcaaccgtgtaggtattcgcgcggagctgtcccggccagtttcctacaatgacaaaaacgtg

SEQ ID NO: 713252 - DNA, 75 bp, synthetic construct
  source 1..75: mol_type = other DNA
ggtcatgatgaactacacatccgggcattgttaaatcaggccgcacatagccataccaaagaatcattgaaacag

SEQ ID NO: 713253 - DNA, 75 bp, synthetic construct
  source 1..75: mol_type = other DNA
ttttctcttacccgcgctattaaccctggttggctggataatcgcgctacatctggcagattatcaatttcgcca

SEQ ID NO: 713254 - DNA, 75 bp, synthetic construct
  source 1..75: mol_type = other DNA
tgcaggttacttttgctgagaaaaccgcagtttccgccgccagtttttcggttaatgctggcgagacatttagtt

SEQ ID NO: 713255 - DNA, 75 bp, synthetic construct
  source 1..75: mol_type = other DNA
tctgctggtcagtcacgatgccgatgtcatcgcgcatatgtctgatcgagcggcattgatgtccgagggaaaaat

SEQ ID NO: 713256 - DNA, 75 bp, synthetic construct
  source 1..75: mol_type = other DNA
ttattgctcctcatcaacctgaccctattgttcagaacggtgatgtaccgcagtttacaccggatatcgatctcg

SEQ ID NO: 713257 - DNA, 75 bp, synthetic construct
  source 1..75: mol_type = other DNA
gtatttattttgcattctaaatagtgatgttttcaaaatgttatcagggacatttcttacatcaacaattaatca

SEQ ID NO: 713258 - DNA, 75 bp, synthetic construct
  source 1..75: mol_type = other DNA
tgaaattaaatggcggattatatatatcaggctcaccaattgttagtttaaatgtggagatagggccaaatggct

SEQ ID NO: 713259 - DNA, 75 bp, synthetic construct
  source 1..75: mol_type = other DNA
atgacgagccagagtgtactgcctcctaacgcagtaacaccagaaagagcgctggaagccgttttatctcacgtc

SEQ ID NO: 713260 - DNA, 75 bp, synthetic construct
  source 1..75: mol_type = other DNA
aaggggaattttttatagctgggactccttacgcaaaaataggcgtaaatataccggcagatggtgatggtggcg

SEQ ID NO: 713261 - DNA, 75 bp, synthetic construct
  source 1..75: mol_type = other DNA
cgcctattacaacggtgaagaccgtggcgtcttcatgatggctaagcgttttacggctctgagcttcggttgctt

SEQ ID NO: 713262 - DNA, 75 bp, synthetic construct
  source 1..75: mol_type = other DNA
cctatgccaacagtctgcaacgcaccgttgcgacggcacaattctttatcaccggcgctttccctgggtgcgaca

SEQ ID NO: 713263 - DNA, 75 bp, synthetic construct
  source 1..75: mol_type = other DNA
tggaagtaacgcattacacagatcctgaagttctggccattgttaaagattttcatgtcagaggtaactttgctt

SEQ ID NO: 713264 - DNA, 75 bp, synthetic construct
  source 1..75: mol_type = other DNA
ccatgaagcgacgatgctccagttactatcaagtcaggttccaccagacgcgttcccgatcctgcgtaacgtgat

SEQ ID NO: 713265 - DNA, 75 bp, synthetic construct
  source 1..75: mol_type = other DNA
acccccgacagccatgggtatccgcaagcctcaccggcggatcttcgcccgcaatgtctggcactaaaccctctg

SEQ ID NO: 713266 - DNA, 75 bp, synthetic construct
  source 1..75: mol_type = other DNA
cagcttgccgcatatctgcaaacctccctgaccgcaacgcaagaggagattaccggctacgcacaaacgctccac

SEQ ID NO: 713267 - DNA, 75 bp, synthetic construct
  source 1..75: mol_type = other DNA
gaagcggcacaactggattcccggcgtcgcgcattcagaaaaaacgccgtctgtgatatctgccatgcctggctg

SEQ ID NO: 713268 - DNA, 75 bp, synthetic construct
  source 1..75: mol_type = other DNA
cgcgaacgcctgcggggactggcgctcatcctgcgcccggcatcccttcatatctaccgtacagagaaaccgtaa

SEQ ID NO: 713269 - DNA, 75 bp, synthetic construct
  source 1..75: mol_type = other DNA
atctacccgacaggtaaaggtgccgggtcaatgctgaacgcgtttattacgcacgttcagcaagtctcaacagta

SEQ ID NO: 713270 - DNA, 75 bp, synthetic construct
  source 1..75: mol_type = other DNA
tccgtgtgacagccttaactcctggccgaataattacctggagcagtatccccgaaaaattgcctgttacctcgc

SEQ ID NO: 713271 - DNA, 75 bp, synthetic construct
  source 1..75: mol_type = other DNA
ctcctggccgaatcattacctggggcagtatccccgaaaggttgcctgttacctcgccagcatcagtaaactgga

SEQ ID NO: 713272 - DNA, 75 bp, synthetic construct
  source 1..75: mol_type = other DNA
cctgaagtggcgaataagaagagtgctgctgccagcgaaagtacgttttccctgcttctgcaacataaagcgact

SEQ ID NO: 713273 - DNA, 75 bp, synthetic construct
  source 1..75: mol_type = other DNA
aactgggtttaccgtcctccgacactgaaatctctgacacatgtcctgcgtacgatgaagaagcccgttctctgg

SEQ ID NO: 713274 - DNA, 75 bp, synthetic construct
  source 1..75: mol_type = other DNA
ggaggaagttgctccacctactctgcgtcccgttccgcctgtttcgggtaaagccttttattatcaaccagtttt

SEQ ID NO: 713275 - DNA, 75 bp, synthetic construct
  source 1..75: mol_type = other DNA
ctgcatcgcaccctgctccatctgacacagacaaaagaagaactaccgcaatttagcgcaccaaccattttgctg

SEQ ID NO: 713276 - DNA, 75 bp, synthetic construct
  source 1..75: mol_type = other DNA
tcagaagccgataagtcattgtggattgatctcattaacaccgattgtatttggtatgatatgataattaatcct

SEQ ID NO: 713277 - DNA, 75 bp, synthetic construct
  source 1..75: mol_type = other DNA
atgtatgattttgtgattattggcggcggcatcatcggcatgtcgaccgccatgcaactgattgacgtctatccg

SEQ ID NO: 713278 - DNA, 75 bp, synthetic construct
  source 1..75: mol_type = other DNA
cactctgtacgtggcgaaatttaacgacgacggcaaaggcgagtggctaccgctggtgttcggacaaaatgggct

SEQ ID NO: 713279 - DNA, 75 bp, synthetic construct
  source 1..75: mol_type = other DNA
aatcctgttcatcatgatggccatatacaaggaggctacagcgttcccctgattattaccgccagtgacatcacg

SEQ ID NO: 713280 - DNA, 75 bp, synthetic construct
  source 1..75: mol_type = other DNA
ttcatcatgatggccatgtgcagggtggctacagtgttcccctgattattaccgccagtgacatcacgtctcacc

SEQ ID NO: 713281 - DNA, 75 bp, synthetic construct
  source 1..75: mol_type = other DNA
aagaaaggcagctttgcttcccgtaaaacggatgacatgttgttgttacaggaaacagaacgtgcgctggcggat

SEQ ID NO: 713282 - DNA, 75 bp, synthetic construct
  source 1..75: mol_type = other DNA
aatgaacccgttatggtttttaacggggagaggaatgtaccggcagacagtctgaaaccgcagcctctgattctt

SEQ ID NO: 713283 - DNA, 75 bp, synthetic construct
  source 1..75: mol_type = other DNA
aactcgttgttccaactgatggcggtgcctttgcagtcgccggactatagctgtatcagcaagcgcgccaagacc

SEQ ID NO: 713284 - DNA, 75 bp, synthetic construct
  source 1..75: mol_type = other DNA
ccgatggttaaagcgaaagacgagcgccgcgagcgtcgcgatgatttcgcaaacgaaaccgcagatgatgctgaa

SEQ ID NO: 713285 - DNA, 75 bp, synthetic construct
  source 1..75: mol_type = other DNA
gtgcctgtcagttcaccaggctggcactggagtctctcatcccaacggacaggtatatcgtgcgggtgtacagca

SEQ ID NO: 713286 - DNA, 75 bp, synthetic construct
  source 1..75: mol_type = other DNA
cggcggcaaacggtatcgaacgcgagtggctaaacgccgacgaactgcgcgagcgcgaaccgaatatcaccgggc

SEQ ID NO: 713287 - DNA, 75 bp, synthetic construct
  source 1..75: mol_type = other DNA
tcgccggacggcaagctgattgacgattttctgtttgtcaccaccccgcgcacgatccacacctgtaatgcgccc

SEQ ID NO: 713288 - DNA, 75 bp, synthetic construct
  source 1..75: mol_type = other DNA
tttttgggcgtgcatctcacccgcatgatcgacggcagcgtgaccgtcgggccaaacgcggtgctggctttcaaa

SEQ ID NO: 713289 - DNA, 75 bp, synthetic construct
  source 1..75: mol_type = other DNA
ggcggataaatcctctccgaaggtgatattcctgcacatgatggggtttcatccgaacccgtgtgaccggcttca

SEQ ID NO: 713290 - DNA, 75 bp, synthetic construct
  source 1..75: mol_type = other DNA
cattatggtttttaacggagacaggaatgtaccggcagacagtctgaaaccgcagccacttattcttcctgacca

SEQ ID NO: 713291 - DNA, 75 bp, synthetic construct
  source 1..75: mol_type = other DNA
aacgcattatggtttttaacggagagaggtatgtacaggaagacagtctgaaaccgcagccgcttattcttccgg

SEQ ID NO: 713292 - DNA, 75 bp, synthetic construct
  source 1..75: mol_type = other DNA
tcagtatgtgcagaacatggtatccggaattctttatccagagaaagttgccgttggtgaatcaataaattctga

SEQ ID NO: 713293 - DNA, 75 bp, synthetic construct
  source 1..75: mol_type = other DNA
cgggggagttagttcttctggcttgtcttgtccgcttgcggagtgatgccgggcaatggcaagtctgcctgaccg

SEQ ID NO: 713294 - DNA, 75 bp, synthetic construct
  source 1..75: mol_type = other DNA
acctcgccagcatcagtaaactggataactttctcgggcagcttgatggtatccttcgccggcattcccgtcatt

SEQ ID NO: 713295 - DNA, 75 bp, synthetic construct
  source 1..75: mol_type = other DNA
aactgtgccaacggatttacgccgtggggcacctatctgacgtgtgaagagaactggtccgatattttcgtaaaa

SEQ ID NO: 713296 - DNA, 75 bp, synthetic construct
  source 1..75: mol_type = other DNA
acaactgattctggaaaataatatttttggtctcgatatcgacgaccgagcggcacagctttccggctttgcatt

SEQ ID NO: 713297 - DNA, 75 bp, synthetic construct
  source 1..75: mol_type = other DNA
agcattgaacccgaaagtattaaagtactcgacccggcctgcggctccggtcatattttgatagaagcctataat

SEQ ID NO: 713298 - DNA, 75 bp, synthetic construct
  source 1..75: mol_type = other DNA
aattttatgaaaaaaacggtggcatttatccatcaaaatttagagataaagctggtatttgttggtctaaaatca

SEQ ID NO: 713299 - DNA, 75 bp, synthetic construct
  source 1..75: mol_type = other DNA
gccactgtatttagaaacaaccacatttcgacttaccaaggttcattctcttatgtcgaaaacggtaatataaat

SEQ ID NO: 713300 - DNA, 75 bp, synthetic construct
  source 1..75: mol_type = other DNA
agcattgaacccgaaagtattaaagtgctcgacccggcctgcggttccggtcatattttgattgaagcctataat

SEQ ID NO: 713301 - DNA, 75 bp, synthetic construct
  source 1..75: mol_type = other DNA
atgccccacaggcccgtaacgatttccgcgatgcggtgattcagaagctaacgacgcttgggatcgctgcagata

SEQ ID NO: 713302 - DNA, 75 bp, synthetic construct
  source 1..75: mol_type = other DNA
cctatgtgttttccgaaatcctctttggatatctggaatattcttggctatgcgaatagcaaagtaatagatata

SEQ ID NO: 713303 - DNA, 75 bp, synthetic construct
  source 1..75: mol_type = other DNA
gtctgaatattgtctctttgcaggaaagcctgcatctggatatcgccaaactctggcagcaactgaatttccacc

SEQ ID NO: 713304 - DNA, 75 bp, synthetic construct
  source 1..75: mol_type = other DNA
attccgactggttcgacgacgatgtcaccgctcgtgtaaaagagtttgtccaaaccgtatggggtgaagagcacc

SEQ ID NO: 713305 - DNA, 75 bp, synthetic construct
  source 1..75: mol_type = other DNA
ctgtggcagaagctcaacttccaccagcagaacaagaccggaagcataggggatatgtttgccgaaaatactgca

SEQ ID NO: 713306 - DNA, 75 bp, synthetic construct
  source 1..75: mol_type = other DNA
cgactccattctgcgtgggctggttgatgatattccggaagaagactgggagcaggtagaggttatcggctggct

SEQ ID NO: 713307 - DNA, 75 bp, synthetic construct
  source 1..75: mol_type = other DNA
tttagcgaactgcgtagctatgacgaccgcctgcgtcactatgctgatatgagaatcagtattgatctcgacgat

SEQ ID NO: 713308 - DNA, 75 bp, synthetic construct
  source 1..75: mol_type = other DNA
tttaaaagaggctttacttagaaaatatgctaatgatacaattgaaatcaaccgctgtcattcaattgaatcgga

SEQ ID NO: 713309 - DNA, 75 bp, synthetic construct
  source 1..75: mol_type = other DNA
tattcagcaggcgtggattctggcacagcgatatgatgcggtggtggcgaatccgccgtatatgggaagcaaata

SEQ ID NO: 713310 - DNA, 75 bp, synthetic construct
  source 1..75: mol_type = other DNA
aaaaagcgcccaatctactggctattcagctccggtaaagagaaagccttcgagtgcctggtgtatctgcatcgc

SEQ ID NO: 713311 - DNA, 75 bp, synthetic construct
  source 1..75: mol_type = other DNA
aaccttcccggcagacaatgacggcatcctgccgctgatggatgacgagtggtttgaggacgacgtcacctctcg

SEQ ID NO: 713312 - DNA, 75 bp, synthetic construct
  source 1..75: mol_type = other DNA
cctattttgagcgaaaagcagacattagcatccttcttatagaaaaggtaaacctgcttctatttgttaatcaat

SEQ ID NO: 713313 - DNA, 75 bp, synthetic construct
  source 1..75: mol_type = other DNA
cgacagttttaccctacattttcaacagcgtcttattttaacccatagcaaagataatccttgtttatggattgg

SEQ ID NO: 713314 - DNA, 75 bp, synthetic construct
  source 1..75: mol_type = other DNA
aacagttttcctacttcgatctgcgtggcaaaccgttcccgctatggaccagtgaacaaggcgttggtcgcaata

SEQ ID NO: 713315 - DNA, 75 bp, synthetic construct
  source 1..75: mol_type = other DNA
aatctgatttgtttgcgatgtttatgcaacgtgcttttttctttctaaaagaaaatggatttaatgcacaggtta

SEQ ID NO: 713316 - DNA, 75 bp, synthetic construct
  source 1..75: mol_type = other DNA
atcagctgctgatgcgcacgttgaaacgctttgtgaatgcaaaaacgctgggctcactgattcaggtgccgcagg

SEQ ID NO: 713317 - DNA, 75 bp, synthetic construct
  source 1..75: mol_type = other DNA
ttttctgatactgcaaacaaagaatcgctgtatgttactatactgatatcagaactaatatcatattccatcggc

SEQ ID NO: 713318 - DNA, 75 bp, synthetic construct
  source 1..75: mol_type = other DNA
agagttcaataacaaggaaataattagagaatatggactagaatcagagctaaactataaagtttctttagaaga

SEQ ID NO: 713319 - DNA, 75 bp, synthetic construct
  source 1..75: mol_type = other DNA
tgtaaactgggaaaatgatggccgtgaacttcttgattttgcagcaagcctgtatggttctccaaccagaacaat

SEQ ID NO: 713320 - DNA, 75 bp, synthetic construct
  source 1..75: mol_type = other DNA
gtctagtgatttttcaattagatatagcccaactggttttatatcagaaaccaaaggtgctgtttgttttgctga

SEQ ID NO: 713321 - DNA, 75 bp, synthetic construct
  source 1..75: mol_type = other DNA
agtgtgcgcagggattatatgtcagtgtatggctatcccgtaccaaccacaccgtggctgaatacggcacccggt

SEQ ID NO: 713322 - DNA, 75 bp, synthetic construct
  source 1..75: mol_type = other DNA
cagcatcagtaaactggataactttctcggtcagcttgatggtatccttcgccggtattcccgtcattttgccat

SEQ ID NO: 713323 - DNA, 75 bp, synthetic construct
  source 1..75: mol_type = other DNA
cagcacggggctgacaactggaaaatcctgccgggtgtaccgttgtatgacacgattgttatcgttactggtgag

SEQ ID NO: 713324 - DNA, 75 bp, synthetic construct
  source 1..75: mol_type = other DNA
tgaaaattacgattctacaggtggaagtcgcgaacctgcgtccgaacccctggaataccaactccgttggggcgc

SEQ ID NO: 713325 - DNA, 75 bp, synthetic construct
  source 1..75: mol_type = other DNA
attgcctcaatggtttgttcggcattgatgatgcgaaagatgcagatacagacgagcataaacatcagcagaacg

SEQ ID NO: 713326 - DNA, 75 bp, synthetic construct
  source 1..75: mol_type = other DNA
cgacgactgtctggaaatcgccgtgctgaaaggtgacatgggcgacgtgcagcattttgccgatgacgttatcgc

SEQ ID NO: 713327 - DNA, 75 bp, synthetic construct
  source 1..75: mol_type = other DNA
acaaagtaaatgcctggtataactttgcttttactcaaaaagagcaagatgaagctaaaaaggagattattaaag

SEQ ID NO: 713328 - DNA, 75 bp, synthetic construct
  source 1..75: mol_type = other DNA
tattaacttttggtttaatgaatgtggtttaagtaaatctgaggttataaacgaagtaattaactggaagaattt

SEQ ID NO: 713329 - DNA, 75 bp, synthetic construct
  source 1..75: mol_type = other DNA
cattcaatccgctgacagacgaagataatgaactcattatggtttttaacggagacaagaatgtaccgacagaca

SEQ ID NO: 713330 - DNA, 75 bp, synthetic construct
  source 1..75: mol_type = other DNA
cttctctgtagctggccgtcattctggctgttggtgaattaccccagtcccggtatgttgctgacggtagttttc

SEQ ID NO: 713331 - DNA, 75 bp, synthetic construct
  source 1..75: mol_type = other DNA
cttgttgtattgctccttccatctcatctccaatcccagggatgccacagggaaagccagctaatactaggtgtg

SEQ ID NO: 713332 - DNA, 75 bp, synthetic construct
  source 1..75: mol_type = other DNA
cttgaagcgctggaagcgctctcccgcggcgatgacgagccgatcggtgaggacaaacgcgagaaaatcgagcga

SEQ ID NO: 713333 - DNA, 75 bp, synthetic construct
  source 1..75: mol_type = other DNA
atagctgcatattctcaacttggagcttttgatagtgatgtcagaaagaagattaactttcacgttgaatctatt

SEQ ID NO: 713334 - DNA, 75 bp, synthetic construct
  source 1..75: mol_type = other DNA
gggctgagtgcaaaggcagaaaaagtgtggacagggcatcacctgaaagtggttcgttatgccgtggataacgtg

SEQ ID NO: 713335 - DNA, 75 bp, synthetic construct
  source 1..75: mol_type = other DNA
ttacagtctggacaatgtctccctgtcggcccgaatggtgcgtgaaagcgatttctggcagcccggaacacgtgc

SEQ ID NO: 713336 - DNA, 75 bp, synthetic construct
  source 1..75: mol_type = other DNA
gaggatagcgatcgccgcggctggtggggggattccggggaggaatcccaactgggatcccggctgtggctgcta

SEQ ID NO: 713337 - DNA, 75 bp, synthetic construct
  source 1..75: mol_type = other DNA
ctttaacaaagaggaagaaaaacaaaacctccttaatgcatacacacagttaaatgctattgatcaaaacattcg

SEQ ID NO: 713338 - DNA, 75 bp, synthetic construct
  source 1..75: mol_type = other DNA
tcaatcccaatgcacaagtaatagctgccacacattctccagaagtagcttcaaaatacaggagtgcaattttta

SEQ ID NO: 713339 - DNA, 75 bp, synthetic construct
  source 1..75: mol_type = other DNA
atgacggcgatcgtaaatgaatcggtgggcgtaaagaaaaagcccagcggtaagcgggtgatttttgcctcggcg

SEQ ID NO: 713340 - DNA, 75 bp, synthetic construct
  source 1..75: mol_type = other DNA
gtgaaagaccggcgctggcggaccatgttacgtgtgcttcgcgcatcgggtttcgtgcttctcatgatcggcttc

SEQ ID NO: 713341 - DNA, 75 bp, synthetic construct
  source 1..75: mol_type = other DNA
gcttcaaggtgacgtttgatgcgtcagatcgggtcatcgaacagaagactctcgaaacccatgaggtcgtcgagt

SEQ ID NO: 713342 - DNA, 75 bp, synthetic construct
  source 1..75: mol_type = other DNA
caaaatttttacctctccactacgaccgaaagtctgcgcaggcttacaagccagtgttgaaatgtgcggcaacac

SEQ ID NO: 713343 - DNA, 75 bp, synthetic construct
  source 1..75: mol_type = other DNA
ttttccctatgttttggctatatctggtgtttttagcaggatacgcaggaataaaaaatgaaaaatatacaacaa

SEQ ID NO: 713344 - DNA, 75 bp, synthetic construct
  source 1..75: mol_type = other DNA
atccttagtgtatcatggctggtattgttcctaaaatattcacgattctcacttagattgatgttattatgcctg

SEQ ID NO: 713345 - DNA, 75 bp, synthetic construct
  source 1..75: mol_type = other DNA
ctcttaatcaggtcgataacttatttattctgccggtcgctgagtgtatttcgctcggttgggatagcagccgcc

SEQ ID NO: 713346 - DNA, 75 bp, synthetic construct
  source 1..75: mol_type = other DNA
tgattcagtcgctggttttgaagctaatggcggttttctgcttgcctccgatttacaaattaatggcaaagaatt

SEQ ID NO: 713347 - DNA, 75 bp, synthetic construct
  source 1..75: mol_type = other DNA
tacaattttaataaagttgccttagccatcgacaaccgcccaagcagttacgaaattgctcaggcatgcgcgttc

SEQ ID NO: 713348 - DNA, 75 bp, synthetic construct
  source 1..75: mol_type = other DNA
tacatctcaatgaagaatttattcacgttgaaccacaatggctggatgaacgccgtttcgtaccgatcgtcactg

SEQ ID NO: 713349 - DNA, 75 bp, synthetic construct
  source 1..75: mol_type = other DNA
agaactaaaattggatcgccttatgttattgaggctctttcagatatgtcttgcaaagatggtggggggatagca

SEQ ID NO: 713350 - DNA, 75 bp, synthetic construct
  source 1..75: mol_type = other DNA
gctgaaagcagtagtctatgcgcagcaattctattagtagagcatacccttaagaaacttgtggatttatcagca

SEQ ID NO: 713351 - DNA, 75 bp, synthetic construct
  source 1..75: mol_type = other DNA
gaaaatggttgcgaggagatatacttggactgttatgtgctgaaacattgaatataaaatctattgcgattccaa

SEQ ID NO: 713352 - DNA, 75 bp, synthetic construct
  source 1..75: mol_type = other DNA
atgacgatttactggagacgctggacagcctgagccagcgtcgtggttataacaaccgttccgaggcgatccgcg

SEQ ID NO: 713353 - DNA, 75 bp, synthetic construct
  source 1..75: mol_type = other DNA
caaaagcattatcgcgtcagctcaagaaaatcctcaagaatttatcgaaagaataggctttgtcgatcttcatgt

SEQ ID NO: 713354 - DNA, 75 bp, synthetic construct
  source 1..75: mol_type = other DNA
aggccagaggcggcgagattatctataacgccgaagtcagcagccttagtgagcataaaagcggcgtggtgatac

SEQ ID NO: 713355 - DNA, 75 bp, synthetic construct
  source 1..75: mol_type = other DNA
ttggtggtaagcgaacagccatgctcctgtggcagtgcgacaatggcgattgcacgtatcgaagggcgacaggat

SEQ ID NO: 713356 - DNA, 75 bp, synthetic construct
  source 1..75: mol_type = other DNA
gcgtgaataatcgctggttaagtctcgatttttacgatctgctagcgccatttcaggcgcaactcaaacttctcc

SEQ ID NO: 713357 - DNA, 75 bp, synthetic construct
  source 1..75: mol_type = other DNA
cgacgactgtctggaaatcgccgtgttgaaaggtgacatgggcgacgtgcagcattttgccgatgacgtcatcgc

SEQ ID NO: 713358 - DNA, 75 bp, synthetic construct
  source 1..75: mol_type = other DNA
ttacggtgctacgccgagtctgatacaaatgaaaaagctgaaaaatatgttaagtggatattgaaaagtatcgaa

SEQ ID NO: 713359 - DNA, 75 bp, synthetic construct
  source 1..75: mol_type = other DNA
ggggacaactgacacattacgtgaaatgcagcgatatgaacaactgagtcagcacggtgctgacagatggaaaat

SEQ ID NO: 713360 - DNA, 75 bp, synthetic construct
  source 1..75: mol_type = other DNA
tggggacaactgacacattgcgtgaaatgcagcgttataaacaactgagtcagcacggggctgacagctggaaaa

SEQ ID NO: 713361 - DNA, 75 bp, synthetic construct
  source 1..75: mol_type = other DNA
atacacgcatctctgttattgcttctgatgcggagcataccgttttcctcaagaaaggcagcttcgcttcccgta

SEQ ID NO: 713362 - DNA, 75 bp, synthetic construct
  source 1..75: mol_type = other DNA
ttgtcagctttgtagaggggcaattgacactggaaccacgggtgatgatgacaaaaacccgcgcctgggcgctgg

SEQ ID NO: 713363 - DNA, 75 bp, synthetic construct
  source 1..75: mol_type = other DNA
tcagtcagcgacagtactaatcctgttcatcatgatggccatgtgcagggtggctacagtgttcccctgattatt

SEQ ID NO: 713364 - DNA, 75 bp, synthetic construct
  source 1..75: mol_type = other DNA
catctctgttattgcttctgatgcggagcataccgttttcctcaagaaaggcagctttgcttcccgtaaaacgga

SEQ ID NO: 713365 - DNA, 75 bp, synthetic construct
  source 1..75: mol_type = other DNA
gacgcccgcattgcgttgctggaaaaagagcccggcccggcctgtcaccagacgggccacaacagcggcgtgatc

SEQ ID NO: 713366 - DNA, 75 bp, synthetic construct
  source 1..75: mol_type = other DNA
ttaacaagcatgttactttaaatattattactgacctaccacatccaaatgaatctgctattctgacttatataa

SEQ ID NO: 713367 - DNA, 75 bp, synthetic construct
  source 1..75: mol_type = other DNA
ttggcgcatacggagattaacgttaaccagaccaaccatgtaggctggacgccgctactggaagcgattgtgctt

SEQ ID NO: 713368 - DNA, 75 bp, synthetic construct
  source 1..75: mol_type = other DNA
atgttgccgatatactccgataaatatcagaaaactgttttgtccggacaacacaccacggatttattgttttta

SEQ ID NO: 713369 - DNA, 75 bp, synthetic construct
  source 1..75: mol_type = other DNA
ataccaacactaacaattaaagaaaagataaatttagatagtaaactgcctgataaagaagcatatcaggcagcc

SEQ ID NO: 713370 - DNA, 75 bp, synthetic construct
  source 1..75: mol_type = other DNA
catgcaactgattgatgtctatccggatgcccgcattgcgttgctggaaaaagagtccgacccggcctgtcacca

SEQ ID NO: 713371 - DNA, 75 bp, synthetic construct
  source 1..75: mol_type = other DNA
ctggccacgacctcgtcgatggagaaacagcgtctggcacatgtctccattggtcatgtgctgatgcgaaacctg

SEQ ID NO: 713372 - DNA, 75 bp, synthetic construct
  source 1..75: mol_type = other DNA
attatcgggcgcgcaacttcccggggacgctggattatgccgagcagcaacgctggctggagcaccgccgccagg

SEQ ID NO: 713373 - DNA, 75 bp, synthetic construct
  source 1..75: mol_type = other DNA
tgtttggggcatggcgcggcaataccagctgggtggcaccgctggcgtggcatcctgaaaatcgcaatgccgtaa

SEQ ID NO: 713374 - DNA, 75 bp, synthetic construct
  source 1..75: mol_type = other DNA
cctacaggcacaggggcagagttgcacgctggtgatcaacgaccgcgtgtttaaaccgtttctggatgaaatgct

SEQ ID NO: 713375 - DNA, 75 bp, synthetic construct
  source 1..75: mol_type = other DNA
atatcggcaaaacagttaacgccattgtgagcatggctaaagcagggaaattgccagccgtgtatatggcagacc

SEQ ID NO: 713376 - DNA, 75 bp, synthetic construct
  source 1..75: mol_type = other DNA
ttagttatcacgtattggcgcttattgttcgttgatgctgattttctcgtcgcttttttcttgagtaagttatat

SEQ ID NO: 713377 - DNA, 75 bp, synthetic construct
  source 1..75: mol_type = other DNA
ttcgcaccgatagcgaattcaatgtcatcggcgaacccgaagtcttttactgcaagcccgcggatgactatttac

SEQ ID NO: 713378 - DNA, 75 bp, synthetic construct
  source 1..75: mol_type = other DNA
atcaacgaccgcgtgtttaaaccgtttctggatgaaatgctggcgacgctaaaaagcatcgacgatccgcagctt

SEQ ID NO: 713379 - DNA, 75 bp, synthetic construct
  source 1..75: mol_type = other DNA
tttcagcgttaacccgctacaactgcccggcgagcgcacgattctgtgtatctcgcacagccacaacacctttga

SEQ ID NO: 713380 - DNA, 75 bp, synthetic construct
  source 1..75: mol_type = other DNA
gccactcatcatcaggcgatccaccatcaggcgatcgatcaggtcgtactgatcaatctggataaacgcccggat

SEQ ID NO: 713381 - DNA, 75 bp, synthetic construct
  source 1..75: mol_type = other DNA
attggtcactatttcaataagttacccgttgtcacaaagccatccgcattacccatcgccgacaccatcggcttt

SEQ ID NO: 713382 - DNA, 75 bp, synthetic construct
  source 1..75: mol_type = other DNA
atatcgtcagcgatccgctgctccgcaatgcctatttgagtctacataacgccactcatcaccaagggatcaacc

SEQ ID NO: 713383 - DNA, 75 bp, synthetic construct
  source 1..75: mol_type = other DNA
ttaaaccgtttctggatgaaatgctggcaacgctaaaaagcatcgacgatccgcagctcaaaggcatgcgcttgt

SEQ ID NO: 713384 - DNA, 75 bp, synthetic construct
  source 1..75: mol_type = other DNA
gctgagttatggattaatcgacgtgagtgggacaagtatgcagctcaactagtcgatgaagctccgacagagtgg

SEQ ID NO: 713385 - DNA, 75 bp, synthetic construct
  source 1..75: mol_type = other DNA
tctcaatatgggaaaaaccgaccgcagcgccaacccttcgccgggcaacgataagggcggtctcgcaaacgtggt

SEQ ID NO: 713386 - DNA, 75 bp, synthetic construct
  source 1..75: mol_type = other DNA
tctcaatatgggaaaaaccgaccgcagcgccaacccttcgccgggcaacgaaaatggcggtctcgcaaacgtggt

SEQ ID NO: 713387 - DNA, 75 bp, synthetic construct
  source 1..75: mol_type = other DNA
gcacacgcagagtggcaagagcgcgacccggaaaagcacaccttcgacgttgaggactacgtttcgtatgcccag

SEQ ID NO: 713388 - DNA, 75 bp, synthetic construct
  source 1..75: mol_type = other DNA
gcaattgttgaagtgctgtcgcccggtcaactcccgactaaacgcgaattaatttacgccgcgacgccagccaga

SEQ ID NO: 713389 - DNA, 75 bp, synthetic construct
  source 1..75: mol_type = other DNA
tctcaatatgggaaaaaccgaccgcagcgccaacccttcgccgggcaacgagaaaggcggcctcgcaaacgtggt

SEQ ID NO: 713390 - DNA, 75 bp, synthetic construct
  source 1..75: mol_type = other DNA
tctcaatatgggaaaaaccgaccgcagcgccaacccttcgccgggcaacgacaaaggcgggctcgcaaacgtggt

SEQ ID NO: 713391 - DNA, 75 bp, synthetic construct
  source 1..75: mol_type = other DNA
cgctcgcgctcgctattcgaaacgcttaaacgcgatatcgccagccgctttgccgaggaacgccaacaaacgctc

SEQ ID NO: 713392 - DNA, 75 bp, synthetic construct
  source 1..75: mol_type = other DNA
ttcacttgatgattacgttaattcagggcgttttgaccgagttaaaattgctaaaaaacacacagcagtgttaac

SEQ ID NO: 713393 - DNA, 75 bp, synthetic construct
  source 1..75: mol_type = other DNA
tgtgatatctatccgtaagccatcattaacgcgctttactatagatgattatgtccgaacagggcgttttgataa

SEQ ID NO: 713394 - DNA, 75 bp, synthetic construct
  source 1..75: mol_type = other DNA
gagaagaaaagctgagtggaattcttggcgcgttacgcggtaaatatattaattgcttagttaccaattgccaaa

SEQ ID NO: 713395 - DNA, 72 bp, synthetic construct
  source 1..72: mol_type = other DNA
atgcgctacgcttatcaggcctacgagttcagtgctctacgtaggccggataaggcgttcacgccgcatccg

SEQ ID NO: 713396 - DNA, 75 bp, synthetic construct
  source 1..75: mol_type = other DNA
gattgagcagatcgaaaaagtggcgatcaaatcccgcgcaccgatcctgcttaacggcccgaccggggcgggtaa

SEQ ID NO: 713397 - DNA, 75 bp, synthetic construct
  source 1..75: mol_type = other DNA
ggcttacgaagattcgtcatcactattgcgatgcgtttatggatggcaaggcgggagaacgggcggcgatggtga

SEQ ID NO: 713398 - DNA, 75 bp, synthetic construct
  source 1..75: mol_type = other DNA
aaactcaccttctggaaattctggtttttaggttcgattccgtgggcgcgtaaaacggtcactccagcgagtttg

SEQ ID NO: 713399 - DNA, 75 bp, synthetic construct
  source 1..75: mol_type = other DNA
acgcagcacagtttggtgcgctggttgataaattccgtgcagacctggcggatatggcaggccagtgcgtcggtg

SEQ ID NO: 713400 - DNA, 75 bp, synthetic construct
  source 1..75: mol_type = other DNA
gtcgaacaaaagcagcactgaagaagaacccgaaaaatgtgctgtttgccgtggtgtggatgcagggggaatttg

SEQ ID NO: 713401 - DNA, 75 bp, synthetic construct
  source 1..75: mol_type = other DNA
caccattgaagataatatcgaattctttgccgccaccatcgaatccaaagcgaagctggtgtatgaccaggtttc

SEQ ID NO: 713402 - DNA, 75 bp, synthetic construct
  source 1..75: mol_type = other DNA
ctggttccgtgaccaggttgaggcaggacgtcagcaactcgagcgcggcgatgtgcttccccatgacatggtcga

SEQ ID NO: 713403 - DNA, 75 bp, synthetic construct
  source 1..75: mol_type = other DNA
gaatcgacgctgaactgaaggatgcttttatggccgctgcaaaaagcatggaccgtaatggctctcagttaattc

SEQ ID NO: 713404 - DNA, 75 bp, synthetic construct
  source 1..75: mol_type = other DNA
tgtctcgcgaggtagtggagaatattaagctcctgccagaacgcaatcttttcatgaaaggtattcttagttggg

SEQ ID NO: 713405 - DNA, 75 bp, synthetic construct
  source 1..75: mol_type = other DNA
ttgattggaatcggcgttcttggtgaatatattggcagaatttatacagaagttaagcatcgtccgcgttatgtt

SEQ ID NO: 713406 - DNA, 75 bp, synthetic construct
  source 1..75: mol_type = other DNA
ttatggctcgtggatgattatcaacacaatagcctttggtaaccctgttcgaggatacccgtcacttcttgtatc

SEQ ID NO: 713407 - DNA, 75 bp, synthetic construct
  source 1..75: mol_type = other DNA
gggtgtggacaagccgctgtataaggaccttatcggtcgaacaaaagcagcactgaagaagaatccgaaaaatgt

SEQ ID NO: 713408 - DNA, 75 bp, synthetic construct
  source 1..75: mol_type = other DNA
tacagtgacgcgaccggcgcttcagagagttccacccgctggggtgtgggcaggccgctgtataaggatctcatc

SEQ ID NO: 713409 - DNA, 75 bp, synthetic construct
  source 1..75: mol_type = other DNA
aatatattggcagaatttatacagaagttaagcatcgtccgcgctatattctgaaaggaggggaatgtggtaaat

SEQ ID NO: 713410 - DNA, 75 bp, synthetic construct
  source 1..75: mol_type = other DNA
gggctttgatccggcgaatgccgacgcgctggcagcgttgctgaaaacgcacggtctgcatgtcgatgctgaaga

SEQ ID NO: 713411 - DNA, 75 bp, synthetic construct
  source 1..75: mol_type = other DNA
atccgggacaatacgtattactactgtagaacatgcagcaaaaacgatattgttaccagctatgcgcacattcct

SEQ ID NO: 713412 - DNA, 75 bp, synthetic construct
  source 1..75: mol_type = other DNA
cagccgagcgaggccgatcgcgcgaaaggtcagtttgatagtgaaggtctaatggatttgagcaaactggaaggt

SEQ ID NO: 713413 - DNA, 75 bp, synthetic construct
  source 1..75: mol_type = other DNA
caggccatagcgcccaggtgaactggttccatgctgcagaaaatggcgatgttcacgcctttgccgatgaagtta

SEQ ID NO: 713414 - DNA, 75 bp, synthetic construct
  source 1..75: mol_type = other DNA
gcttacagagattcgtcatcactattgcgatgcgtttatggatggcaaggcgggtgaacgggcggcggtggtgat

SEQ ID NO: 713415 - DNA, 75 bp, synthetic construct
  source 1..75: mol_type = other DNA
cggaaaaactgccgctgggcaaaaaacgcaatatgctcaacgaactggcgcgcggcgaatacatcctctgcatgg

SEQ ID NO: 713416 - DNA, 75 bp, synthetic construct
  source 1..75: mol_type = other DNA
atgcttcagcaccacaggataaggtttcgtatgttgtcagctatcgctatccacaggatgaaagagaaaaatcct

SEQ ID NO: 713417 - DNA, 75 bp, synthetic construct
  source 1..75: mol_type = other DNA
aaagatttaatcgaagccgaagatcgtgaaaacgttaacctttcccaatttgaaactgatggccaattacccgtc

SEQ ID NO: 713418 - DNA, 75 bp, synthetic construct
  source 1..75: mol_type = other DNA
aaatacaaagatgcaaactggacgcctcctgaactttggaatcatggtattgctggggcatttcttgactacaat

SEQ ID NO: 713419 - DNA, 75 bp, synthetic construct
  source 1..75: mol_type = other DNA
agggttcgcatggaaggccagcttttattgaatacgatagatctgatcctcgacgcagctattgacgggcacggt

SEQ ID NO: 713420 - DNA, 75 bp, synthetic construct
  source 1..75: mol_type = other DNA
aaactaactataggtcaatacgatactgaatcctctattttcgactctttccatttttctggcatttcgttgaaa

SEQ ID NO: 713421 - DNA, 75 bp, synthetic construct
  source 1..75: mol_type = other DNA
ccttgacctccaatgggtattaattgataaccaaactgcagtttgcgtgacaccagagcaattaacattattagg

SEQ ID NO: 713422 - DNA, 75 bp, synthetic construct
  source 1..75: mol_type = other DNA
cggggctgcgccagcgccaggaagatatcgaaccgaacctggattatgaagtggagcgccacgccgcgcttactg

SEQ ID NO: 713423 - DNA, 75 bp, synthetic construct
  source 1..75: mol_type = other DNA
ccggcattgccacgcgtaacccccacttcaaccgcatgattgagcagatcgaaaaagtggcgattaaatcccgcg

SEQ ID NO: 713424 - DNA, 75 bp, synthetic construct
  source 1..75: mol_type = other DNA
ggatatggctgccacgctggcagtgcctttcacaggtgacgggcgcgatgctgcagagatcctgcgtacactgcc

SEQ ID NO: 713425 - DNA, 75 bp, synthetic construct
  source 1..75: mol_type = other DNA
ccagctttttgacgtttcgcgccagggcaaagccagcgtcaacgacgcagatcggctacgcaaatacctggcgcg

SEQ ID NO: 713426 - DNA, 75 bp, synthetic construct
  source 1..75: mol_type = other DNA
tgggcgctgaggcagaaaacatcgacctctttgaccgtatgcaactggaacatgttatagctatctgccggcagg

SEQ ID NO: 713427 - DNA, 75 bp, synthetic construct
  source 1..75: mol_type = other DNA
tcagcttatcgccggaacggtgcgcgatttgcgccagctggttgccgaaggcaaatttcgcgaagatctgtacgc

SEQ ID NO: 713428 - DNA, 75 bp, synthetic construct
  source 1..75: mol_type = other DNA
gtccaacgatattaaagttgcgaccaacctggcgcgtaacatggttacccagtggggcttctctgagaaactcgg

SEQ ID NO: 713429 - DNA, 75 bp, synthetic construct
  source 1..75: mol_type = other DNA
gaacgacaacctggatattcttcatgcgatgaaagatgcactcatgaaatatgagaccatcgacgcaccgcagat

SEQ ID NO: 713430 - DNA, 75 bp, synthetic construct
  source 1..75: mol_type = other DNA
tgatgacctgatggcacgtcgcgatgtacgtccgccagcaggctgggaagaaccaggcgcttctaacaattctgg

SEQ ID NO: 713431 - DNA, 75 bp, synthetic construct
  source 1..75: mol_type = other DNA
ccagatcagtaccctgtacggcggtcgtctggcagaagagatcatctacggaccggaacatgtttctaccggggc

SEQ ID NO: 713432 - DNA, 75 bp, synthetic construct
  source 1..75: mol_type = other DNA
atgcagggcggcggtggcaaaggtgctatgtcgttcggtaagagcaaagcacgtatgttgacggaagatcagatc

SEQ ID NO: 713433 - DNA, 75 bp, synthetic construct
  source 1..75: mol_type = other DNA
tggtcacgatgaacgtgaacagactctgaaccagatgctggttgagatggatggcttcgaaggtaacgaaggtat

SEQ ID NO: 713434 - DNA, 75 bp, synthetic construct
  source 1..75: mol_type = other DNA
atgcgtaaaacagtggcttttggctttgtcggaacggtgctggattatgccgggcgcggcagtcagcgctggtcg

SEQ ID NO: 713435 - DNA, 75 bp, synthetic construct
  source 1..75: mol_type = other DNA
tatcggatgcatcagattgcgctgcatggctacttcaaaactggactaatgatgttggtaggtagtatcaaccgc

SEQ ID NO: 713436 - DNA, 75 bp, synthetic construct
  source 1..75: mol_type = other DNA
tgaacgtaacgctggtagaagcgggcgaacgtattttgcctgcattaccgccacgtatctctgctgcggcccaca

SEQ ID NO: 713437 - DNA, 75 bp, synthetic construct
  source 1..75: mol_type = other DNA
cgtgctgacgcaaaccatggtcaccagtgctgatgaaggcggcctgcacactaaagatggtgaatatattgaggc

SEQ ID NO: 713438 - DNA, 75 bp, synthetic construct
  source 1..75: mol_type = other DNA
gtcatccgctgaaaggcgatcgttctttctatgctgaactgacacaatacatcacttttggtgacgaccactttg

SEQ ID NO: 713439 - DNA, 75 bp, synthetic construct
  source 1..75: mol_type = other DNA
tcagacgggccgaagctgacggggtacacttttcgattccggtgacaccacacaccttccggcaccgctatatca

SEQ ID NO: 713440 - DNA, 75 bp, synthetic construct
  source 1..75: mol_type = other DNA
ctaaagatggcgaatatattgaggctgatctgatggtgtgggctgccgggatcaaagcgccagacttcctgaaag

SEQ ID NO: 713441 - DNA, 75 bp, synthetic construct
  source 1..75: mol_type = other DNA
cctctttgatcggctgcaactggaacacgttatcgctatctgccgccaggcaaagtcgctttctgctgccggacg

SEQ ID NO: 713442 - DNA, 75 bp, synthetic construct
  source 1..75: mol_type = other DNA
ggcaaagccagcgtcaacgacgcggatcggctacgcaaatacctggcgcgttttggtctgacgtgggaagccgtg

SEQ ID NO: 713443 - DNA, 75 bp, synthetic construct
  source 1..75: mol_type = other DNA
tcgactggaattattgcacgacgcccgctcgcgctcgctatttgaaacgcttaaacgcgatatcgccagcgtttc

SEQ ID NO: 713444 - DNA, 75 bp, synthetic construct
  source 1..75: mol_type = other DNA
atggctactttaaaaccgggttaatgatgcttgtgggcagtatcaaccgcgttatccgtccgcgtctgaaactgc

SEQ ID NO: 713445 - DNA, 75 bp, synthetic construct
  source 1..75: mol_type = other DNA
ataaagatcatggttcgctggtatcgctgtcgaacttctccaccgtcggtagcctgatgggtaacctgacgcgcg

SEQ ID NO: 713446 - DNA, 75 bp, synthetic construct
  source 1..75: mol_type = other DNA
atgagttaacgaaacttggcgttcgcgtgctgacgcaaaccatggtcaccagtgctgatgaaggcggcctgcaca

SEQ ID NO: 713447 - DNA, 75 bp, synthetic construct
  source 1..75: mol_type = other DNA
cgcagaaagaatcgacggcttaccacgaagcgggtcacgcgattatcggtcgcctggtgccggaacacgatccgg

SEQ ID NO: 713448 - DNA, 75 bp, synthetic construct
  source 1..75: mol_type = other DNA
cagcttaccattgattatggtttgaccgatgtcgtttctgaacgttttgatgcaggcgtccgtctgggtggggag

SEQ ID NO: 713449 - DNA, 75 bp, synthetic construct
  source 1..75: mol_type = other DNA
cggtgaaactgcaggcggcaaagcagtgactgattcagttttgatttctgtgaaggataataaagtcgcagtaca

SEQ ID NO: 713450 - DNA, 75 bp, synthetic construct
  source 1..75: mol_type = other DNA
gaacggatgccgtatttgaacttgacttcaccggtaataatttaaaatggaataagctagctcccgtctcatcac

SEQ ID NO: 713451 - DNA, 75 bp, synthetic construct
  source 1..75: mol_type = other DNA
actgcaggcggcaaagcagtgatggattcagttttaatttctgtgaaggataataaagtcacagtacaaaactaa

SEQ ID NO: 713452 - DNA, 75 bp, synthetic construct
  source 1..75: mol_type = other DNA
ggggataagcaatgattctcttatatttgccggaggggccggattcaaaggttcacgagaaaattaccagaacgg

SEQ ID NO: 713453 - DNA, 75 bp, synthetic construct
  source 1..75: mol_type = other DNA
cccgccttgagccttccgttgctgccgcaaaagcggggatcctgccgctggattttttctggactgatgcacaga

SEQ ID NO: 713454 - DNA, 75 bp, synthetic construct
  source 1..75: mol_type = other DNA
tgatttctttcaaaaggttgatgagaaaatattatcaccatatcgcgtttttttagaaaaaaatacagataagga

SEQ ID NO: 713455 - DNA, 75 bp, synthetic construct
  source 1..75: mol_type = other DNA
gcaattgttgaagtgctgtcgcccggtcaacgcccgactaaacgcgtattaatttacgccgcgacgccagccaga

SEQ ID NO: 713456 - DNA, 75 bp, synthetic construct
  source 1..75: mol_type = other DNA
gcaattgttgaagtgctgtcgcccggtcaacgcccgactaaacgcgaattaatttacgccgcgacgccagccagt

SEQ ID NO: 713457 - DNA, 75 bp, synthetic construct
  source 1..75: mol_type = other DNA
gttcacgagaaaattaccagaactgtaagaactatgcgcatgaaggcctgaaaaaatcatatagcgctgatattc

SEQ ID NO: 713458 - DNA, 75 bp, synthetic construct
  source 1..75: mol_type = other DNA
agaagaaatataagtatcctaaatactcattttttgttcgtgatgttatcaataaaagcattaatgagataattg

SEQ ID NO: 713459 - DNA, 75 bp, synthetic construct
  source 1..75: mol_type = other DNA
gatacttcacgacaaaacatttcccgctgccgggcaggttgccccggctctctctcttgatggctctattcagtc

SEQ ID NO: 713460 - DNA, 75 bp, synthetic construct
  source 1..75: mol_type = other DNA
taaatcgggtgaattatcgcaaggtcgggcctacggagtatcattgccctggaataatagtctattaattattgg

SEQ ID NO: 713461 - DNA, 75 bp, synthetic construct
  source 1..75: mol_type = other DNA
atgccgtatgtcgcaagcttcggcgatgtgccggaaggtcagccgatggtgtatctgaacagcttattgaatgtt

SEQ ID NO: 713462 - DNA, 75 bp, synthetic construct
  source 1..75: mol_type = other DNA
atgaactcgctgggtgatgcgttaaaagcggcagatcaacacgcgaaagcggaagctatcggtcaggccgatatg

SEQ ID NO: 713463 - DNA, 75 bp, synthetic construct
  source 1..75: mol_type = other DNA
ctgggatttggttatgcggcattcgatctgccacctgagccattaatggttctttcaaccgtcattgctgcactg

SEQ ID NO: 713464 - DNA, 75 bp, synthetic construct
  source 1..75: mol_type = other DNA
cgaggcgggtcatgcgattatcggtcgcttggtaccggaacacgatccggtgcacaaagtaacgattatcccgcg

SEQ ID NO: 713465 - DNA, 75 bp, synthetic construct
  source 1..75: mol_type = other DNA
tagcgaaagcgaaacatatgtccgatgaaactgcacgtatcatcgaccaggaagtgaaagcactgatcgagcgta

SEQ ID NO: 713466 - DNA, 75 bp, synthetic construct
  source 1..75: mol_type = other DNA
aacaaaaggtgaagtgaagggcaatatcccgattctcgatattcagtacggcaacgtctggagcaatatcagcga

SEQ ID NO: 713467 - DNA, 75 bp, synthetic construct
  source 1..75: mol_type = other DNA
atgatctacggcatgccgcgctggtggcgttgcctgttccgggacatggagcgggcgaaccaattgggatcctta

SEQ ID NO: 713468 - DNA, 75 bp, synthetic construct
  source 1..75: mol_type = other DNA
taccttacctggcgagcaatttttaacccatgcagtcagagtgcttgacgccatcaacaccgcaggtcaggcgct

SEQ ID NO: 713469 - DNA, 75 bp, synthetic construct
  source 1..75: mol_type = other DNA
atgattgctttaattgttaataatattttgcaatcaagttatcataatcaaacaacttcacttgtcagcgacacc

SEQ ID NO: 713470 - DNA, 75 bp, synthetic construct
  source 1..75: mol_type = other DNA
cgaaatgaataaattaaagcaggcacgatattccattggcattgccatgagtgaagaaaaatacagcggaattat

SEQ ID NO: 713471 - DNA, 75 bp, synthetic construct
  source 1..75: mol_type = other DNA
cgatattccattggcattgccatgagtgaagaaaaatacagcggaattgttggtgcactgcgtggaaatatatta

SEQ ID NO: 713472 - DNA, 75 bp, synthetic construct
  source 1..75: mol_type = other DNA
ccactgctgcactggggatcttgccttccgttattggtcagtttcatcagcaacaaaaagagaccactctgcaag

SEQ ID NO: 713473 - DNA, 75 bp, synthetic construct
  source 1..75: mol_type = other DNA
catgtcgtatggtgaaggccttccgctgccggagacatatgaccgtccggacccgcgtattaagcagctggcgcg

SEQ ID NO: 713474 - DNA, 75 bp, synthetic construct
  source 1..75: mol_type = other DNA
atggtgtggatggacaggcgtttgacctggtgaaatgggccaatactgctaatggactcaacaggtttgtcatta

SEQ ID NO: 713475 - DNA, 75 bp, synthetic construct
  source 1..75: mol_type = other DNA
ccggcgaatgcgggcattcttcttgttccgtgctgccgtggtggttcagctttcaccaccggaaccgatggcaca

SEQ ID NO: 713476 - DNA, 75 bp, synthetic construct
  source 1..75: mol_type = other DNA
caaaacggaaaagaatatccatttcgtaccgttcatgaccgatgagaacggggtgaatgtgccgacgaacaaacc

SEQ ID NO: 713477 - DNA, 75 bp, synthetic construct
  source 1..75: mol_type = other DNA
gcgtcggtggctctgctggcggtgttccctggatatgcggggacacgacgtatttctggaagcagaagaacgaat

SEQ ID NO: 713478 - DNA, 75 bp, synthetic construct
  source 1..75: mol_type = other DNA
cggtaaatcacgcagcacagtttggtgcgctggttgataaattccgtgcagacctggcggatatggcaggccagt

SEQ ID NO: 713479 - DNA, 75 bp, synthetic construct
  source 1..75: mol_type = other DNA
atgagaatggacagaacacgccaacgaatgctccgacggaagatccggatattgtggctgtcgggtattacggtg

SEQ ID NO: 713480 - DNA, 75 bp, synthetic construct
  source 1..75: mol_type = other DNA
aagctgggttcattcggtgcatttaataacgagtggcatacgctggcattccgttttgccggtaataacagcatt

SEQ ID NO: 713481 - DNA, 75 bp, synthetic construct
  source 1..75: mol_type = other DNA
caagggtaatccagaccagaacacgaagctgggttcattcggtgcatttaataacgagtggcatacgctggcatt

SEQ ID NO: 713482 - DNA, 75 bp, synthetic construct
  source 1..75: mol_type = other DNA
ggacgtcggcaaactggacgtcagcagaccgtgcgagccatttcagctcatgggcacgcagggggattatttctg

SEQ ID NO: 713483 - DNA, 75 bp, synthetic construct
  source 1..75: mol_type = other DNA
aaagagacatatccaaccgagtacggtgttgtctatggcgcatacaaaaacaagcaggctaaaaacatcttcttt

SEQ ID NO: 713484 - DNA, 75 bp, synthetic construct
  source 1..75: mol_type = other DNA
agaacggggaaccgttcatgctgtctcagtcacctgtcggttcttttgcggcagacaagttacgcctgaccgata

SEQ ID NO: 713485 - DNA, 75 bp, synthetic construct
  source 1..75: mol_type = other DNA
atgacatttaaacattatgatgttgtcagggcggcgtcgccgtcagaccttgctgatgcacttgcgcaaaaaatt

SEQ ID NO: 713486 - DNA, 75 bp, synthetic construct
  source 1..75: mol_type = other DNA
gttgcacaaaatggtcgagtcctttatcaaactaccgtttcaccagggccatttaccatttctgatttggggcaa

SEQ ID NO: 713487 - DNA, 75 bp, synthetic construct
  source 1..75: mol_type = other DNA
actattcgccctggggtcgcatgaatattaacggtagcgtgcagccaaatcagtataactcggtcactgcgggtt

SEQ ID NO: 713488 - DNA, 75 bp, synthetic construct
  source 1..75: mol_type = other DNA
taaccagaattttgccgatggccgttctgtaaatcacgacagcgaactggcacgtacatatttgtatcgtccaat

SEQ ID NO: 713489 - DNA, 75 bp, synthetic construct
  source 1..75: mol_type = other DNA
gatgtgcaggacatgagcgggataaaccacccgaaagctgatctggcaaaaggccagtacgggactgtcggtcag

SEQ ID NO: 713490 - DNA, 75 bp, synthetic construct
  source 1..75: mol_type = other DNA
cagcggcaataaagctctgcgaattgagaaaaataacagcgcgaaatcctggtcaatgtactgtgatattgctgc

SEQ ID NO: 713491 - DNA, 75 bp, synthetic construct
  source 1..75: mol_type = other DNA
atcagatcgtcggagtgatccgcatggaaaatggccgtttcccgccactgggagtaagcgtaacggataaagcat

SEQ ID NO: 713492 - DNA, 75 bp, synthetic construct
  source 1..75: mol_type = other DNA
atcgggtattacggttcaaaatggcgaacggacagaagcacctggacatctcaggacagggccagtcatttcagt

SEQ ID NO: 713493 - DNA, 75 bp, synthetic construct
  source 1..75: mol_type = other DNA
ggtgacaccgggaggtgctgcatgtatctataacgatattatcccggcagatcactgtctccatgatgtggagga

SEQ ID NO: 713494 - DNA, 75 bp, synthetic construct
  source 1..75: mol_type = other DNA
agggggacagattcgctgccgctttaaggcttcgggagcgctggcggcgaaccagtatgttatggcgttttactg

SEQ ID NO: 713495 - DNA, 75 bp, synthetic construct
  source 1..75: mol_type = other DNA
tgtgaagtcacgccgccaaaccaaagtaacattagtgaaagcgcgataattttaccttgtaaaacagtcaaataa

SEQ ID NO: 713496 - DNA, 75 bp, synthetic construct
  source 1..75: mol_type = other DNA
gcatcgctggcggtgagtcgtattcgctgggatgatgacgaagaaaatcagtattacttctctttctctctgccg

SEQ ID NO: 713497 - DNA, 75 bp, synthetic construct
  source 1..75: mol_type = other DNA
atattacttctctttctctctacctttacaacaaaaccgcaacatctcctacagtatgcagcgtacgggaagcag

SEQ ID NO: 713498 - DNA, 75 bp, synthetic construct
  source 1..75: mol_type = other DNA
cacgcagtatgaaacagtctatggagcatataaaaatctgaccgcacagaatattttctttgtgccgttcctgac

SEQ ID NO: 713499 - DNA, 75 bp, synthetic construct
  source 1..75: mol_type = other DNA
ctggccattgagtgcgggctggcgacggagtctgctgccggaaaactctccatcacccgtgccacccgggccctg

SEQ ID NO: 713500 - DNA, 75 bp, synthetic construct
  source 1..75: mol_type = other DNA
gtcagcagcataatggtttattcacagccatggttcagcagttcagaaccgacctgtcttcgcttgctgcgcagt

SEQ ID NO: 713501 - DNA, 75 bp, synthetic construct
  source 1..75: mol_type = other DNA
gacagcggcaataaagctctgcgaattgagaaaaataacagcgcgaaatcctggtcaatgtactgtgatattgct

SEQ ID NO: 713502 - DNA, 75 bp, synthetic construct
  source 1..75: mol_type = other DNA
caagccgctgtataaggacctcattggtcgtacaaaagccgcgctggcgaagaatccgaaaaatgtgctgcttgc

SEQ ID NO: 713503 - DNA, 75 bp, synthetic construct
  source 1..75: mol_type = other DNA
tcgatctgcaggcattaaaacagaatctgtccattgtccgccaggccgcgccgcacgcgggtggtaaaagcgaac

SEQ ID NO: 713504 - DNA, 75 bp, synthetic construct
  source 1..75: mol_type = other DNA
atgagaacggggtgaatgtgccgacgaacaaaccggaagaagacccggacattccgggtatcgggtattacggtt

SEQ ID NO: 713505 - DNA, 75 bp, synthetic construct
  source 1..75: mol_type = other DNA
ctgtcaaaggggcagtacggaaccgtggggcaggggctgcatatcgccaaaaaactgctgccgtttataccggcg

SEQ ID NO: 713506 - DNA, 75 bp, synthetic construct
  source 1..75: mol_type = other DNA
cctggcatcacagggctggcgctattatcacaaaccggcgggcggagacagtgttaacaaaaacattgctgaagc

SEQ ID NO: 713507 - DNA, 75 bp, synthetic construct
  source 1..75: mol_type = other DNA
gtggggtcatggtatctggagcatgatgccggtactggcgctgaactgctgaaaaatggcggtttaatcagctgc

SEQ ID NO: 713508 - DNA, 75 bp, synthetic construct
  source 1..75: mol_type = other DNA
tggtgaaggtcttccgctgccggagacatatgaccgtccggacccgcgtattaagcagctggcgcgtcgcagtac

SEQ ID NO: 713509 - DNA, 75 bp, synthetic construct
  source 1..75: mol_type = other DNA
gaactctgatgagtctgctggcgtccggcgaagaccttgcatcacagggctggcgctattatcacaaaccggaga

SEQ ID NO: 713510 - DNA, 75 bp, synthetic construct
  source 1..75: mol_type = other DNA
ggttctgcattcacccagggcgctgaggggacattcagtgcggacacgggggctagccaggattcggcacgctgg

SEQ ID NO: 713511 - DNA, 75 bp, synthetic construct
  source 1..75: mol_type = other DNA
tgccgacagccggagaggctgctgcgcagggctggaccattaaggacggcggaattcagttgtcgggtggtgtat

SEQ ID NO: 713512 - DNA, 75 bp, synthetic construct
  source 1..75: mol_type = other DNA
tttgacatgaacgccgccacctacgcacagcaacctgcgctgtttacagccatgctgaagcagtttcgtgctgac

SEQ ID NO: 713513 - DNA, 75 bp, synthetic construct
  source 1..75: mol_type = other DNA
acatatgaccgtccggacccgcgtattaaacagctggcgcgtcgcagcactgtcacgccgggtggtgcgtcctgt

SEQ ID NO: 713514 - DNA, 75 bp, synthetic construct
  source 1..75: mol_type = other DNA
gacggaagatccggatattgtggctgtcgggtattacggtgcggcatcccgtacccagggcagttttgtctcgac

SEQ ID NO: 713515 - DNA, 75 bp, synthetic construct
  source 1..75: mol_type = other DNA
cttgtcagttgtcgttttaaactcgatggcgcgcttacggctaatcagtacgcactggcgctgtactggccggtt

SEQ ID NO: 713516 - DNA, 75 bp, synthetic construct
  source 1..75: mol_type = other DNA
gtgagtttgacatgagcgccgccacccacgtacagcaacctgcgctgtttacagccatgctgacacagtttcgtg

SEQ ID NO: 713517 - DNA, 75 bp, synthetic construct
  source 1..75: mol_type = other DNA
tatcaaaggcggcgacatatacgttgctgattgacagtgtgaaggtggaagtgaacaacgcggatgccgcggcat

SEQ ID NO: 713518 - DNA, 75 bp, synthetic construct
  source 1..75: mol_type = other DNA
tgcaactgaacaaaccggaaagccacatctggtttctggagcatgatgcagccgggcagggggcagagttgctga

SEQ ID NO: 713519 - DNA, 75 bp, synthetic construct
  source 1..75: mol_type = other DNA
ctgccggagacatatgaccgtccggacccgcgtattaagcagctggcgcgccgcagtacggtgacaccgggcggt

SEQ ID NO: 713520 - DNA, 75 bp, synthetic construct
  source 1..75: mol_type = other DNA
ccgggcagtcaaacggtatggcgtatggtgaagggcttccgctgccggagacatatgaccgtccggacccgcgta

SEQ ID NO: 713521 - DNA, 75 bp, synthetic construct
  source 1..75: mol_type = other DNA
gtatgcatcagtatacggagggtataagggtaaggagtcgcagaacattttctttgtaccgttaatgacggatga

SEQ ID NO: 713522 - DNA, 75 bp, synthetic construct
  source 1..75: mol_type = other DNA
atcgggggcggcggacaaactgcaactgaccgatatatcaaaatcggcgacgtatatgctgctgattgacagcat

SEQ ID NO: 713523 - DNA, 75 bp, synthetic construct
  source 1..75: mol_type = other DNA
gacagccacttcgagtacgcgaagcgcgcgctggaggctgggaaaaatgtgctggtcgaaaaaccgtttactccg

SEQ ID NO: 713524 - DNA, 75 bp, synthetic construct
  source 1..75: mol_type = other DNA
gctggtcgaaaaaccgttcactccgacacttgcgcaggcgaaagagctgtttgcactggcgaaaagcaaagggct

SEQ ID NO: 713525 - DNA, 75 bp, synthetic construct
  source 1..75: mol_type = other DNA
gcgccaaattacgtcaaggaatctgaagttcttaccaatctggaaatccttgaacgcggatttgagcaagcctct

SEQ ID NO: 713526 - DNA, 75 bp, synthetic construct
  source 1..75: mol_type = other DNA
cgtgtggtatgggaaaacaaacaacgcaaaaagcaggggctggataccctgggcatggatgaactgatagcgaaa

SEQ ID NO: 713527 - DNA, 75 bp, synthetic construct
  source 1..75: mol_type = other DNA
tgggtggtcagacagatgtcgttgaatatgtacgcgcagagcgtgttgctggcatctcaaaatttaatggctgga

SEQ ID NO: 713528 - DNA, 75 bp, synthetic construct
  source 1..75: mol_type = other DNA
cgaaaaaagcgattgaaagcggcaagctgggagagattgttgaagtggaaagccattttgactattaccgcccgg

SEQ ID NO: 713529 - DNA, 75 bp, synthetic construct
  source 1..75: mol_type = other DNA
ttccctatatcccacagaatgccgggatacttctggtgccctgttgtcgtggcggggcagcattcaccactggag

SEQ ID NO: 713530 - DNA, 75 bp, synthetic construct
  source 1..75: mol_type = other DNA
tcaccttcagaagctgaaacagtaaccacaacaacactgctgtcttaccgtgccagtgagtctgaagggaagctg

SEQ ID NO: 713531 - DNA, 75 bp, synthetic construct
  source 1..75: mol_type = other DNA
cttaatcagccggacaaaagcggcactggcgaagaccccgaaaaaccgcctgcttgccgtggtgtggatgcaggg

SEQ ID NO: 713532 - DNA, 75 bp, synthetic construct
  source 1..75: mol_type = other DNA
caaggaatctgaagttcttactaatctggaaatccttgaacgcggttttgaacaagtctctccctccacagtgac

SEQ ID NO: 713533 - DNA, 75 bp, synthetic construct
  source 1..75: mol_type = other DNA
agccattttgactattaccgcccggtggcagaaaccaaacctgggctgccgcaggatggcgcgttctatggcctt

SEQ ID NO: 713534 - DNA, 75 bp, synthetic construct
  source 1..75: mol_type = other DNA
atccatttcaccagcgatctcgacgaagtgctaaacgatcccgatgttaagctggttgttgtctgcacccacgcg

SEQ ID NO: 713535 - DNA, 75 bp, synthetic construct
  source 1..75: mol_type = other DNA
attaacgctctggctgtttcagatcctctagtggttccgctgtcatttacacgaaactttggtaaagaaccagca

SEQ ID NO: 713536 - DNA, 75 bp, synthetic construct
  source 1..75: mol_type = other DNA
gcgggtatccctccatgcttgtatcaatacttttcctgggtggagtgcaactgatcgggattggtgttctcggtg

SEQ ID NO: 713537 - DNA, 75 bp, synthetic construct
  source 1..75: mol_type = other DNA
taggaggttcgaccgacatcgtcgaatattcacgcgcagagcgtgttgctggtaattcaaaattcaatggatgga

SEQ ID NO: 713538 - DNA, 75 bp, synthetic construct
  source 1..75: mol_type = other DNA
ttattccacgcccgaaagtgccgaccagcaaattcgcgaaatattgccggtggctcatgatgttgcggaactgcg

SEQ ID NO: 713539 - DNA, 75 bp, synthetic construct
  source 1..75: mol_type = other DNA
aatatatcggcagaatttatattgaaaccaaacaacgtccaaaatatgttctaaaaaatgtcaggaaagacagca

SEQ ID NO: 713540 - DNA, 75 bp, synthetic construct
  source 1..75: mol_type = other DNA
aatactgtttttaggtggaattcagatgattggaataggagtattaggtgaatatattggacgcacatacattga

SEQ ID NO: 713541 - DNA, 75 bp, synthetic construct
  source 1..75: mol_type = other DNA
cgctggttgttccgctgtcatttacacgaaactttggtaaagaaccagcattgtttgcagggctagaccatgcaa

SEQ ID NO: 713542 - DNA, 75 bp, synthetic construct
  source 1..75: mol_type = other DNA
cttattgggattggcgttcttggtgaatatattggaagaatatatatcgagtctaaaaagcgacctaaatacatt

SEQ ID NO: 713543 - DNA, 75 bp, synthetic construct
  source 1..75: mol_type = other DNA
gataaccagcttctctacattcccgctgcgcatgtggacctatataggcctgttcgttgctggcgctgcgttcct

SEQ ID NO: 713544 - DNA, 75 bp, synthetic construct
  source 1..75: mol_type = other DNA
aagcaaagacgccacggaatcaattattaacgttctggctgtttcagatccgctagttgttccgctgtcatttac

SEQ ID NO: 713545 - DNA, 75 bp, synthetic construct
  source 1..75: mol_type = other DNA
ccacggcacctgctcgcgcccggaagaagctgcatcgctggcactggcgcgcaggcatttaaaacagcgcaccga

SEQ ID NO: 713546 - DNA, 75 bp, synthetic construct
  source 1..75: mol_type = other DNA
agcgacagggctttagtgatatcgagaaaaaagcgactgataacattaaccactacttcaataagttacccgtag

SEQ ID NO: 713547 - DNA, 75 bp, synthetic construct
  source 1..75: mol_type = other DNA
tcaatggcaccttttgctatcaccgtaactacctgaaaaagcaccgttacgacgacgattgtaatttaggcgagg

SEQ ID NO: 713548 - DNA, 75 bp, synthetic construct
  source 1..75: mol_type = other DNA
gcatgacgcaggcacgggtgacagtctgttacagaaaggcggtttaattcgttgtcgctttaaagcgcagggcga

SEQ ID NO: 713549 - DNA, 75 bp, synthetic construct
  source 1..75: mol_type = other DNA
atgtaccacaatgcgaaagtggcgacaaacaacctgaaactgggaagctttggcgcatttgataacgaatggcat

SEQ ID NO: 713550 - DNA, 75 bp, synthetic construct
  source 1..75: mol_type = other DNA
ctcccgttttgatttcgccattcatgtggcacatgcccgttcgaagggactgcgccggcgcatgccaccggtact

SEQ ID NO: 713551 - DNA, 75 bp, synthetic construct
  source 1..75: mol_type = other DNA
acagaccttaatgtgatgtaccacaagggaaatgctggtcagaacacgaagctggggtcattcggcgcatttgat

SEQ ID NO: 713552 - DNA, 75 bp, synthetic construct
  source 1..75: mol_type = other DNA
aaagacctgaatgtgatgtaccacaatgcgaaggactcaacaaaaaatcagaaactggggacatttggcgcattt

SEQ ID NO: 713553 - DNA, 75 bp, synthetic construct
  source 1..75: mol_type = other DNA
gcgaacagggaacgccaggatatagttaccctggtgaaacggcagctgacgcgtgaaatctcggaagggcgcttt

SEQ ID NO: 713554 - DNA, 75 bp, synthetic construct
  source 1..75: mol_type = other DNA
ctgtggtggtgaagccgtcggatggagaaggcgcagttatcagcaccaccagcaacccggagtattactttgttg

SEQ ID NO: 713555 - DNA, 75 bp, synthetic construct
  source 1..75: mol_type = other DNA
cggcggtgctggatattggctgtggtgaagggtattacacacacgcatttgccgatgtgttgcccgaaatcacca

SEQ ID NO: 713556 - DNA, 75 bp, synthetic construct
  source 1..75: mol_type = other DNA
gacggctcattcagtgaggccagcggtgcttccgctgattcttcacgctggggagccggtaaacccctgtatcag

SEQ ID NO: 713557 - DNA, 75 bp, synthetic construct
  source 1..75: mol_type = other DNA
atttaataacgaatggcatacgctgggcttccgttttgccggtaacaacagtattgaggtgacgccggtcattga

SEQ ID NO: 713558 - DNA, 75 bp, synthetic construct
  source 1..75: mol_type = other DNA
agcacgcaacggcaatactggatattggctgtggggaagggtactacactcatgcttttgccgaggcattgccgg

SEQ ID NO: 713559 - DNA, 75 bp, synthetic construct
  source 1..75: mol_type = other DNA
tctcgaaggtagcgataaaagcggcggcgaaacgctatccgcaggtcactttttgtgttgcttccagccaccgtt

SEQ ID NO: 713560 - DNA, 75 bp, synthetic construct
  source 1..75: mol_type = other DNA
cgataccagtatggacgccataatacgtatttacgcgccgtgtaaagcagaagaattagcgcgagtagtgaagcc

SEQ ID NO: 713561 - DNA, 75 bp, synthetic construct
  source 1..75: mol_type = other DNA
ataaagatttattcaccgccatggtacaacagttcagggctgagctgtcatcacttgctggacagtgcgtgagcg

SEQ ID NO: 713562 - DNA, 75 bp, synthetic construct
  source 1..75: mol_type = other DNA
ggcgctgaggctgaccaaacaggcaggaaggtcttcgtggtttatgcagcatgatgccggtaatggcgcagacct

SEQ ID NO: 713563 - DNA, 75 bp, synthetic construct
  source 1..75: mol_type = other DNA
accatcaaaaccgtccacgccacccgcagacaccacgacgatgagtacgctatttgcttaccgggcatctgagtc

SEQ ID NO: 713564 - DNA, 75 bp, synthetic construct
  source 1..75: mol_type = other DNA
aggcggtaaaacgcgaagttgagcgtcgtgtgaaggagcgcatgattctgtcacgtaaccgtaattacagccggc

SEQ ID NO: 713565 - DNA, 75 bp, synthetic construct
  source 1..75: mol_type = other DNA
ccatgcaggacggacggctgaactgatgggtggggaacaggttgtgatgccgccggatgagaagccgtcaccgga

SEQ ID NO: 713566 - DNA, 75 bp, synthetic construct
  source 1..75: mol_type = other DNA
agacggtgtacggcagttacaaaaacaaaacggaaaagaatattcactttgtgccgttcatgaccgatgagaacg

SEQ ID NO: 713567 - DNA, 75 bp, synthetic construct
  source 1..75: mol_type = other DNA
aaatcagcatggcatatggtgaaggccttccgctgccggagacatatgaccgtccggacccgcgcattaagcagc

SEQ ID NO: 713568 - DNA, 75 bp, synthetic construct
  source 1..75: mol_type = other DNA
tgccggtactggcgctgaactgctgaaaaatggcggcttaatcagttgccgctttaaggcatccggtgaactggt

SEQ ID NO: 713569 - DNA, 75 bp, synthetic construct
  source 1..75: mol_type = other DNA
ccacaacaacactgctgtcttaccgtgccagtgagtctgaagggaagctgaccgaacagggctggagtgcaggtg

SEQ ID NO: 713570 - DNA, 75 bp, synthetic construct
  source 1..75: mol_type = other DNA
cgcgctggggtgtggacaagccgctgtataaggaccttatcggtcgaacaaaagcagcactgaagaagaacccga

SEQ ID NO: 713571 - DNA, 75 bp, synthetic construct
  source 1..75: mol_type = other DNA
gagagtttgacatgagcgccgccacccacgcacagcaacctgcgctgtttacagccatgctgaagcagtttcgtg

SEQ ID NO: 713572 - DNA, 75 bp, synthetic construct
  source 1..75: mol_type = other DNA
taccggattcttacgatgctccggatccgcgcattaaacagctggcgcgccgtagcacggtaactccgggtggag

SEQ ID NO: 713573 - DNA, 75 bp, synthetic construct
  source 1..75: mol_type = other DNA
gaatctgatgcatcacaggaaagccggaaacacgaagctgggggagttcggcgattacggtaacgactggcagac

SEQ ID NO: 713574 - DNA, 75 bp, synthetic construct
  source 1..75: mol_type = other DNA
agtgctcacactggacggcttctgcaaactgcgccgtgagctggatgcgcaaccgacaggtttccttgacagccg

SEQ ID NO: 713575 - DNA, 75 bp, synthetic construct
  source 1..75: mol_type = other DNA
atcgacttcgacgtgcgtaaggcgcgtccttattctggctatgaaaacttcgactttgaaatcccggttggtggt

SEQ ID NO: 713576 - DNA, 75 bp, synthetic construct
  source 1..75: mol_type = other DNA
cgtggtctgcgtcgacgcatgccaccggtgctgcgtcgacgggctattgatgcgctcctgcaggggctgtgtttc

SEQ ID NO: 713577 - DNA, 75 bp, synthetic construct
  source 1..75: mol_type = other DNA
tgattatggtggatttagctggagatatttcgccattactggaactggatagcgacatgctgcgcgagcgtctgt

SEQ ID NO: 713578 - DNA, 75 bp, synthetic construct
  source 1..75: mol_type = other DNA
ggcgcgttgttgctggtcattgccgatctgctggcacgaatcattcatccgccgctggagcttccggcaggcgtg

SEQ ID NO: 713579 - DNA, 75 bp, synthetic construct
  source 1..75: mol_type = other DNA
gatcgctttgataaccatggctatgatcagtatttctatgataatacagtggggctaaatggtattccaacattg

SEQ ID NO: 713580 - DNA, 75 bp, synthetic construct
  source 1..75: mol_type = other DNA
atgggtaaccaatggcaacaaaaatatcttcttgagtacaatgagttggtatcaaatttcccttcacctgaaaga

SEQ ID NO: 713581 - DNA, 75 bp, synthetic construct
  source 1..75: mol_type = other DNA
gatcgccctgcacagttcgcagccattcgcaccgataacgaattcaatgtcatcggcgaacccgaagtcttttac

SEQ ID NO: 713582 - DNA, 75 bp, synthetic construct
  source 1..75: mol_type = other DNA
cccatcgtaataaacacaaactgatggcgttgattgatgttccgcagatgaaacccctggttcacgtttccggaa

SEQ ID NO: 713583 - DNA, 75 bp, synthetic construct
  source 1..75: mol_type = other DNA
gaacacagtaacgcccatgatgcgatggccgacgtttacgcgaccatcgccatggcgaagctggtgaaggcccaa

SEQ ID NO: 713584 - DNA, 75 bp, synthetic construct
  source 1..75: mol_type = other DNA
ttcgcaccgatagcgaattcaatatcatcggcgaaccagaggttttttattgcaagcctgcagatgattatttac

SEQ ID NO: 713585 - DNA, 75 bp, synthetic construct
  source 1..75: mol_type = other DNA
cagccacgcctgtttgattatctctttacccatcgtaataaacacaaactaatggcgttgattgatgttccgcag

SEQ ID NO: 713586 - DNA, 75 bp, synthetic construct
  source 1..75: mol_type = other DNA
ctatgcagaagagattcagatgctggcgcagcagtatgccgacgataaagaaaaagtcgcattgttgaaggcact

SEQ ID NO: 713587 - DNA, 75 bp, synthetic construct
  source 1..75: mol_type = other DNA
cagccgatgaagctggcgctcaccggcgtggcgctttctgcatgctgggccagcctgacggattatctgatgctc

SEQ ID NO: 713588 - DNA, 75 bp, synthetic construct
  source 1..75: mol_type = other DNA
ggtgacattgcggatgcttttgcaggttactcacgacagcgcgttctgcagtcagcaagcaagttacgtcagagt

SEQ ID NO: 713589 - DNA, 75 bp, synthetic construct
  source 1..75: mol_type = other DNA
tatccggaaaacggcagaagaaaaagtgaaagccgctgaacgggagatggcagtgcctgcttccccgtcagagct

SEQ ID NO: 713590 - DNA, 75 bp, synthetic construct
  source 1..75: mol_type = other DNA
gtgcttctcattcagaggcagaggcgattatgcgcggtatgacgaatgctgaaatagacgcgcttctggagaagc

SEQ ID NO: 713591 - DNA, 75 bp, synthetic construct
  source 1..75: mol_type = other DNA
gcatgacgaagggtgcagagagttaaccgaatacaaacgagccaaggcagcaatcagcaaggctctgggaggtga

SEQ ID NO: 713592 - DNA, 75 bp, synthetic construct
  source 1..75: mol_type = other DNA
ctggtcaccgtaatgctaatattaatgcagactaccgccttctggaattaatagtcatcaaccagcacaaaccat

SEQ ID NO: 713593 - DNA, 75 bp, synthetic construct
  source 1..75: mol_type = other DNA
ttagatataagcgatgcaaggaaaaaagcattcaaaaatcctgataatgatcccagagggccttgggcatcaaca

SEQ ID NO: 713594 - DNA, 75 bp, synthetic construct
  source 1..75: mol_type = other DNA
tgcaacatatcgaaaccctgatcacccacttcctgcaagtgtcgtggggtccggtgatgcctgccaatgaatctt

SEQ ID NO: 713595 - DNA, 75 bp, synthetic construct
  source 1..75: mol_type = other DNA
ggaaactcctatacagggaaccgcaatgtccgatttgagcagaaacgaaatacaggcacttctgaaggcaaataa

SEQ ID NO: 713596 - DNA, 75 bp, synthetic construct
  source 1..75: mol_type = other DNA
cgatgtgctgaccggaagtgatgacggtcgccacagcaacacctctctggcgtggggagctggcgtgcagtttaa

SEQ ID NO: 713597 - DNA, 75 bp, synthetic construct
  source 1..75: mol_type = other DNA
agtccgatccggatcgcttctcggttgctgtatccatcgacgggaagctccagaatgaccccgcatggaaagaca

SEQ ID NO: 713598 - DNA, 75 bp, synthetic construct
  source 1..75: mol_type = other DNA
aggcaccacggcctccgtcggaaccggtgataattttgaacggttacttggcgcttctcattcagaggcagaggc

SEQ ID NO: 713599 - DNA, 75 bp, synthetic construct
  source 1..75: mol_type = other DNA
ccccggcagtgatgatctgaacgggattaacgtgaaataccgttatgagtttacggatacgttggggctggtgac

SEQ ID NO: 713600 - DNA, 75 bp, synthetic construct
  source 1..75: mol_type = other DNA
cttcagataacgtggatgcacagctttataatggctttttcagtgacgccgatcgcgcagcaatgaaaattgtgc

SEQ ID NO: 713601 - DNA, 75 bp, synthetic construct
  source 1..75: mol_type = other DNA
gcgtaaaagcggcgcgcatttctaacttgtcacgggaccttgcccgttcactttcgacggtggcggtgcgtgtcg

SEQ ID NO: 713602 - DNA, 75 bp, synthetic construct
  source 1..75: mol_type = other DNA
atggcaatctgtatgtgtttggcggcattggcaaaaatagcgagggcttgactcaggtatttaatgacgtacaca

SEQ ID NO: 713603 - DNA, 75 bp, synthetic construct
  source 1..75: mol_type = other DNA
tatcgcaaggtcgggcctacggagtatcattgccctggaataatagtctattaattattggcggtgaaactgcag

SEQ ID NO: 713604 - DNA, 75 bp, synthetic construct
  source 1..75: mol_type = other DNA
atggttacgttttggggaaattatgaggggatctctcagcgctatgctataaagcgattagacgctgggctgaca

SEQ ID NO: 713605 - DNA, 75 bp, synthetic construct
  source 1..75: mol_type = other DNA
taagcaaggttttcggtatgccaagcattccggagaaggtaactgccatcggctacgctgacggttcaaacccct

SEQ ID NO: 713606 - DNA, 75 bp, synthetic construct
  source 1..75: mol_type = other DNA
tttcgatggcgctgaagaactggatccgttgttcgatcaggcggtgcagtttgtcactgaaaaacgcaaagcgtc

SEQ ID NO: 713607 - DNA, 75 bp, synthetic construct
  source 1..75: mol_type = other DNA
cgagggcaataaaatctggcttattaatggtgaggtaaaaccaggactacggactgatgccgtatttcaacttga

SEQ ID NO: 713608 - DNA, 75 bp, synthetic construct
  source 1..75: mol_type = other DNA
tttgataaaaaagcagaagattatttcttcaataagtttctgctgtcttttgaaccttcaacactgcaatggagt

SEQ ID NO: 713609 - DNA, 75 bp, synthetic construct
  source 1..75: mol_type = other DNA
ttgtccacaacggtaaagcttatattacaggtggcgttaaccagaatatatttaatggatactttgaggatctta

SEQ ID NO: 713610 - DNA, 75 bp, synthetic construct
  source 1..75: mol_type = other DNA
cctgtgccttttaaaagcggtactggagtgattgataacaacactgtctacattggtttaggtagcgcaggagca

SEQ ID NO: 713611 - DNA, 75 bp, synthetic construct
  source 1..75: mol_type = other DNA
aaactgcaggcggcaaagcggtgacggattcagttttgatctctgtgaaggataataaagtcacagtacaaaact

SEQ ID NO: 713612 - DNA, 75 bp, synthetic construct
  source 1..75: mol_type = other DNA
ttgtacacaacggcaaagcctatattactggcggcgttaaccaaaatatctttaatggctattttgaagatctca

SEQ ID NO: 713613 - DNA, 75 bp, synthetic construct
  source 1..75: mol_type = other DNA
gctgttaaggctcgagatgagcatattgactcccttcgccaggctatgcagcttctggagcacaagcacgaacct

SEQ ID NO: 713614 - DNA, 75 bp, synthetic construct
  source 1..75: mol_type = other DNA
gctgaattttataaccccaatacgggcgtcagaaatgacgccttttttattgcagaaaagcgagaggtaattatg

SEQ ID NO: 713615 - DNA, 75 bp, synthetic construct
  source 1..75: mol_type = other DNA
attggatctcagatagaaattgacgatgttcgctggagcaataataagaaaaacagcggcaagtttaaactcgcc

SEQ ID NO: 713616 - DNA, 75 bp, synthetic construct
  source 1..75: mol_type = other DNA
aaaagagtcataatgtgggtaactccgaagacgtcagcatgttgcgtttaaggcaggaagatccgccggttcact

SEQ ID NO: 713617 - DNA, 75 bp, synthetic construct
  source 1..75: mol_type = other DNA
aatggccaaacctctggaaaagaataaaatgacatatgaaaataacaaaaaaacccatcagcagcatattgaaat

SEQ ID NO: 713618 - DNA, 75 bp, synthetic construct
  source 1..75: mol_type = other DNA
aaccttgctcgttatgctgcaaaaaaagcctctgaagaagatatcaacagactgaaagatattctttctgttcac

SEQ ID NO: 713619 - DNA, 75 bp, synthetic construct
  source 1..75: mol_type = other DNA
cagggcggcggttttgaaccgggcatgaagcaaaaaaccaccaaagacccgatcaaaaacgaagcgaacaacggt

SEQ ID NO: 713620 - DNA, 75 bp, synthetic construct
  source 1..75: mol_type = other DNA
gcacgaatcattcatccgccgctggagcttccggcaggcgtgctgaccgccattatcggcgcaccgtggtttgtc

SEQ ID NO: 713621 - DNA, 75 bp, synthetic construct
  source 1..75: mol_type = other DNA
cgcgcccgcaggatgtgaacaacgccctgctgtggctgaccggcagcttatggggccgtgactggagctttgtga

SEQ ID NO: 713622 - DNA, 75 bp, synthetic construct
  source 1..75: mol_type = other DNA
tctccaggtgaccccatcctctggtggtcgcccgatcctcgcgcggtgctttggcctgaatcactgcatatcagc

SEQ ID NO: 713623 - DNA, 75 bp, synthetic construct
  source 1..75: mol_type = other DNA
tcgcttttttgatgctggagcggatctcgcgtgattctaatatctgggaaggtgataaaggggtccgtaatacac

SEQ ID NO: 713624 - DNA, 75 bp, synthetic construct
  source 1..75: mol_type = other DNA
agttctggcgcgacggcgaacacgtcatcagcgacatcctcgactactcagccggagccggattcagagacatct

SEQ ID NO: 713625 - DNA, 75 bp, synthetic construct
  source 1..75: mol_type = other DNA
tggcatcatccgggtttggtgttgattcacgcggagggagttgaaacgcctcagcctgaactgaccgaggcggta

SEQ ID NO: 713626 - DNA, 75 bp, synthetic construct
  source 1..75: mol_type = other DNA
tgatggtagcactcgtctcgaagacaaccttttgtttaaagctggttctcgtcaatctatggactatatggaact

SEQ ID NO: 713627 - DNA, 75 bp, synthetic construct
  source 1..75: mol_type = other DNA
ggtcgaaataacgttttaagtcttcgtgactcaaaaggatttttagccgaatttgaacgtctatgggataatact

SEQ ID NO: 713628 - DNA, 75 bp, synthetic construct
  source 1..75: mol_type = other DNA
gttatttgctgtctaagaccgcaaactattttgatgatccaggtgctcgtaatcttgattactttggtgcattcc

SEQ ID NO: 713629 - DNA, 75 bp, synthetic construct
  source 1..75: mol_type = other DNA
cttccgtagttctgctcctgccactatctggcacgaaagtgttgatgaccaaaattatcgtcttgctactggtta

SEQ ID NO: 713630 - DNA, 75 bp, synthetic construct
  source 1..75: mol_type = other DNA
tgccgtcgattttggtatgcgtcgtatccctaacaattggggacaagcaattattcgtgttggatctgcggaaaa

SEQ ID NO: 713631 - DNA, 75 bp, synthetic construct
  source 1..75: mol_type = other DNA
ggtgattggggtaatcagtggcgagtggaagcgccaatattcgtcgatcatggctatgttggacaagactgttat

SEQ ID NO: 713632 - DNA, 75 bp, synthetic construct
  source 1..75: mol_type = other DNA
ggggatcgatggtagtacccgcatcgaagataacttagttttcagagcgggatcacgtcaatcaatggactatat

SEQ ID NO: 713633 - DNA, 75 bp, synthetic construct
  source 1..75: mol_type = other DNA
gaccgcaatattcacgctaaagtagatgaaattaaacaaactactgatgcaaccatcgcagcaaatcacgcagaa

SEQ ID NO: 713634 - DNA, 75 bp, synthetic construct
  source 1..75: mol_type = other DNA
aagattatgaatatatacctgaaattaatttatgggagctttcttttgataaaagacctgttagaggggtacgtt

SEQ ID NO: 713635 - DNA, 75 bp, synthetic construct
  source 1..75: mol_type = other DNA
aatcatcatgaatgccgaaagtggcgattcgtctatatatttgctgggtacttgtgccgataataacaactggta

SEQ ID NO: 713636 - DNA, 75 bp, synthetic construct
  source 1..75: mol_type = other DNA
attatacctaaatcagatgaataatagctctgaacgattctctatcaataattggggaaattcagaagttggtcg

SEQ ID NO: 713637 - DNA, 75 bp, synthetic construct
  source 1..75: mol_type = other DNA
tgaattaatccattggggtaacagtaatacaggacgcaataacgttttgagtatgcgagattccaaaggtttctt

SEQ ID NO: 713638 - DNA, 75 bp, synthetic construct
  source 1..75: mol_type = other DNA
tgcgcgtgaatgaatggttcagcgcgtatgtgatcgctggtgtgacttacagccgtgtgtcgactttttccgggg

SEQ ID NO: 713639 - DNA, 75 bp, synthetic construct
  source 1..75: mol_type = other DNA
gatcgccacagcaacacgtctctggcgtggggagctggcgtgcagtttaacccgaccgaatccgtgaccattgat

SEQ ID NO: 713640 - DNA, 75 bp, synthetic construct
  source 1..75: mol_type = other DNA
atacccgctggcatgaagattcagtgcgtaaccgctggttcagcgtgatggcggggccatctgtacgcgtgaatg

SEQ ID NO: 713641 - DNA, 75 bp, synthetic construct
  source 1..75: mol_type = other DNA
agaggcgctggagtggggcaccactggcgcgggcctgcgtgctaccgggatcgacttcgacgtgcgtaaggcgcg

SEQ ID NO: 713642 - DNA, 75 bp, synthetic construct
  source 1..75: mol_type = other DNA
tcagcgtggtattttcccgtggttttctccaggcgaccccatcctctggtggtcgcccgatccccgcgcggtgct

SEQ ID NO: 713643 - DNA, 75 bp, synthetic construct
  source 1..75: mol_type = other DNA
ggctgcgccagcgatcgcgaagaagggacctggattacgcgtgacgtcgtcgaagcctaccatcgtcttcacgaa

SEQ ID NO: 713644 - DNA, 75 bp, synthetic construct
  source 1..75: mol_type = other DNA
gaacctggatcacgcgtggcgtggtcgaagcctaccatcgccttcacgaactcggtcatgcccactccattgaag

SEQ ID NO: 713645 - DNA, 75 bp, synthetic construct
  source 1..75: mol_type = other DNA
ttggtgctactgcgattggtacctgtgttaccgctcacccggattatcccgctttagccgtgaaatatctggccc

SEQ ID NO: 713646 - DNA, 75 bp, synthetic construct
  source 1..75: mol_type = other DNA
ccatcagatagtggttgtcgaacgtaagctactcacacaggaagaatgggagaagacattcaatctggataatct

SEQ ID NO: 713647 - DNA, 75 bp, synthetic construct
  source 1..75: mol_type = other DNA
tatcagaccgaactttaacctaaaaagtggtgctgatacccagagtcgaactggggacctcacccttaccaaggg

SEQ ID NO: 713648 - DNA, 75 bp, synthetic construct
  source 1..75: mol_type = other DNA
tctgacagaacattaaatgattatgctgttatttttatcagggatgcactgaacgccagtgagcatattattatt

SEQ ID NO: 713649 - DNA, 75 bp, synthetic construct
  source 1..75: mol_type = other DNA
cacactctgagagcgattgaaaacttctatatcagcaacaacaaaatcagtgatattcctgaatttgttcgcggt

SEQ ID NO: 713650 - DNA, 75 bp, synthetic construct
  source 1..75: mol_type = other DNA
atcgtcttgccactggcggtacagattcaggtcaacaattattgctgacaacaaccgggttacatgtcaagagat

SEQ ID NO: 713651 - DNA, 75 bp, synthetic construct
  source 1..75: mol_type = other DNA
caaccagtcatcgggaaatggcgggcgatgccttcgctgaacgcaacggctgcggttttacctttggcgacggtt

SEQ ID NO: 713652 - DNA, 75 bp, synthetic construct
  source 1..75: mol_type = other DNA
cctgtactacgggcactgaaacggatgatggcgatgcggcactatatgcgttcgcaaaccgtagaaggcgtaact

SEQ ID NO: 713653 - DNA, 75 bp, synthetic construct
  source 1..75: mol_type = other DNA
taataaccaaaatcttcgccaacccggtgataccgcagattgacgactactacgaacctttcacattcgactacg

SEQ ID NO: 713654 - DNA, 75 bp, synthetic construct
  source 1..75: mol_type = other DNA
acgatcaggcgaaagaaggattgctcaatgttgcgccgatcctcgccctgcttggcggtcgcttaaaacaacgcg

SEQ ID NO: 713655 - DNA, 75 bp, synthetic construct
  source 1..75: mol_type = other DNA
tgagcgccagtgcgacgtgtttctcgatccgcacgatccctcggtgatcgaagaagccctgaaacaaggtatccc

SEQ ID NO: 713656 - DNA, 75 bp, synthetic construct
  source 1..75: mol_type = other DNA
gatccgcacgatccatcagtgatcgaagaagccctgaaacaaggtatcccgcaaaacgtgattgaggcagcccag

SEQ ID NO: 713657 - DNA, 75 bp, synthetic construct
  source 1..75: mol_type = other DNA
gacaccatcggcggcatggtgatatgtgacagttctgaacaggccaaacagatgtttgaattgttcaacgccgac

SEQ ID NO: 713658 - DNA, 75 bp, synthetic construct
  source 1..75: mol_type = other DNA
cttcgccactaaagcaatcgagcgcaaactgaacgctggtgtgaagaaaggcatcatctggcacacccagggcag

SEQ ID NO: 713659 - DNA, 75 bp, synthetic construct
  source 1..75: mol_type = other DNA
tcaccttatcgactcacgcgaagccttcacccgcgacatcaaagcgtcgcaggcgctgcacaatcaccacggcaa

SEQ ID NO: 713660 - DNA, 75 bp, synthetic construct
  source 1..75: mol_type = other DNA
gtacggtcagtttgaaaataccttcatgatgtatttgccgcgcttgtgcgaacactgccttaacccaagctgtgt

SEQ ID NO: 713661 - DNA, 75 bp, synthetic construct
  source 1..75: mol_type = other DNA
atgattgttcatccactcgataggccagcggcaaaagtggcatggtttagcgagcggatttgcggaaaaaaacgt

SEQ ID NO: 713662 - DNA, 75 bp, synthetic construct
  source 1..75: mol_type = other DNA
tcagaccaacaaagatcacaaccgcccgaccaaccgcctctgcaccgcgctgttgagccgcgatcggctggcatt

SEQ ID NO: 713663 - DNA, 75 bp, synthetic construct
  source 1..75: mol_type = other DNA
accaaactccggacatttctatccctgctgcgacgcaacaggcgcttgagaaagtgaatgcgaccaaatctgcat

SEQ ID NO: 713664 - DNA, 75 bp, synthetic construct
  source 1..75: mol_type = other DNA
cattaaatacgttattggtcatctgtgttcttcttctacccagcctgcgtcagatatctatgaagatgaaggtat

SEQ ID NO: 713665 - DNA, 75 bp, synthetic construct
  source 1..75: mol_type = other DNA
tctgatgatctcgccgggggcaaccaacccggaactgacccagcgcggttatcaacacatcatgcgtactgccgg

SEQ ID NO: 713666 - DNA, 75 bp, synthetic construct
  source 1..75: mol_type = other DNA
tgatcgcccgcctgaaaaaagaaaacatcgacttcgtttactacggcggttactacccggaaatggggcagatgc

SEQ ID NO: 713667 - DNA, 75 bp, synthetic construct
  source 1..75: mol_type = other DNA
gtgaagtggatgtggtgcgggctgctgataagcctgccgctggcggcgaaggatctgggagtgcagggtgacctc

SEQ ID NO: 713668 - DNA, 75 bp, synthetic construct
  source 1..75: mol_type = other DNA
agccggaagtttgaactcaaaacaatcccggcccgggtgacgctggcggaagatcgtcgccgtctgcgggtggat

SEQ ID NO: 713669 - DNA, 75 bp, synthetic construct
  source 1..75: mol_type = other DNA
atggcccgggagcaggaagcattcaaacagcgtgtcatagaaaacaccctgcgtcctaagccggtggaagggctg

SEQ ID NO: 713670 - DNA, 75 bp, synthetic construct
  source 1..75: mol_type = other DNA
gtgaaagatttaaaagctaacggtgcaaacaccgtgattgggccgctgaactgggatgaaaaaggcgatcttaag

SEQ ID NO: 713671 - DNA, 75 bp, synthetic construct
  source 1..75: mol_type = other DNA
tgctgatttccggcgtagcacaggcaaaaaatctggggacatggggggaaatgtaccctattgctgagcaggaca

SEQ ID NO: 713672 - DNA, 75 bp, synthetic construct
  source 1..75: mol_type = other DNA
tcccggcccgggtgacgctggcggaagatcgtcgccgtctgcgggtagatacgttcgccctggatacgccggagg

SEQ ID NO: 713673 - DNA, 75 bp, synthetic construct
  source 1..75: mol_type = other DNA
gttggtcactatgccaaaacgctatgaccaggatccggcaaacaaaggcatcgttgatgcgctgaaagcagacaa

SEQ ID NO: 713674 - DNA, 75 bp, synthetic construct
  source 1..75: mol_type = other DNA
catcattcacgacaaacaacagtatggcgaagggctggcacgttcggtgcaggacgggctgaaagcggctaacgc

SEQ ID NO: 713675 - DNA, 75 bp, synthetic construct
  source 1..75: mol_type = other DNA
tctgatgatctcgccgggagcgaccaacccggagctgacccaacgcggttatcaacacatcatgcgtactgccgg

SEQ ID NO: 713676 - DNA, 75 bp, synthetic construct
  source 1..75: mol_type = other DNA
tgcagtgtccgcaaaccagatggaactgtttggatagtttgcgaacatcggctatgttctactcgccagaaaaag

SEQ ID NO: 713677 - DNA, 75 bp, synthetic construct
  source 1..75: mol_type = other DNA
tcagggcgcaccacgccctgaactattcgaaggatcatttttacgtttagataatagttctgttacgataatgcc

SEQ ID NO: 713678 - DNA, 75 bp, synthetic construct
  source 1..75: mol_type = other DNA
aaagagctggcgggattgcggttgttaaacttgatcaaaataccctacaagtcattatcggcactaaagtcatcg

SEQ ID NO: 713679 - DNA, 75 bp, synthetic construct
  source 1..75: mol_type = other DNA
cggcaactcgattggcggcatgagcgggcgcttaatcagcggtgtatttactgacttctttaactggcgaattgc

SEQ ID NO: 713680 - DNA, 75 bp, synthetic construct
  source 1..75: mol_type = other DNA
agatctgaaagcccataactggacattatgtattttagctttcaaggaagatacatcggatgaaccacgtccagg

SEQ ID NO: 713681 - DNA, 75 bp, synthetic construct
  source 1..75: mol_type = other DNA
atgcagactatgtaatgagaaatttttcgggtaggggaagagttgatgaggtcctgcttgagatgcaaggtggtg

SEQ ID NO: 713682 - DNA, 75 bp, synthetic construct
  source 1..75: mol_type = other DNA
gttttcctgttgaagtcagtcagctgctggctaaatatcagattgaagcgtggcaacttatttttgaagtcaccg

SEQ ID NO: 713683 - DNA, 75 bp, synthetic construct
  source 1..75: mol_type = other DNA
atttattactttgtgttccgttggaccattcttaaatttaacctgatgaccgtaggccgtgaagagtccagtcct

SEQ ID NO: 713684 - DNA, 75 bp, synthetic construct
  source 1..75: mol_type = other DNA
ggcaaaattaattccactactggctattcccgtaattaaaaccattcttgattttattgttagccttggtttgtt

SEQ ID NO: 713685 - DNA, 75 bp, synthetic construct
  source 1..75: mol_type = other DNA
acggcaccctgaacatgtttatggcatacgtcaaagagaatgcggtcattccgctggatttggcggggaaaatgg

SEQ ID NO: 713686 - DNA, 75 bp, synthetic construct
  source 1..75: mol_type = other DNA
tccgcgaggcggtgttctctttggggatcgattatatgcagggttatcttattggtaagccgcaaccgttaattg

SEQ ID NO: 713687 - DNA, 75 bp, synthetic construct
  source 1..75: mol_type = other DNA
ccaacctcggtatgtcaggctcgttttcctgttgaagtcagtcagttgctggataaatatcagattgaagcgtgg

SEQ ID NO: 713688 - DNA, 75 bp, synthetic construct
  source 1..75: mol_type = other DNA
attacatcggctaccgattgatgctttcgccctggcatgtcagccaggccgtcgtcgggttgttatcgttagcct

SEQ ID NO: 713689 - DNA, 75 bp, synthetic construct
  source 1..75: mol_type = other DNA
gcacgggtacggaatccggtattcagccgcagtacggcgtgccgtatggcgtcacgcttaacccattcctttcac

SEQ ID NO: 713690 - DNA, 75 bp, synthetic construct
  source 1..75: mol_type = other DNA
atggcaattaacaataccggctcgcgacgattactcgtcacgctaacagccctttttgcagcgctttgcgggctg

SEQ ID NO: 713691 - DNA, 75 bp, synthetic construct
  source 1..75: mol_type = other DNA
tgaaagaagcctgggtgttccgtactggcgatgtgaagcagccgaacgatccgggcgaaatcaccaatgaagtga

SEQ ID NO: 713692 - DNA, 75 bp, synthetic construct
  source 1..75: mol_type = other DNA
cccaagtgggggtagatattctaaaggagggcgggaatgccgttgatgctgccgtggcagtgggctacgcgctgg

SEQ ID NO: 713693 - DNA, 75 bp, synthetic construct
  source 1..75: mol_type = other DNA
attgaagccggccagccgacaatatgttcagaaacctgtgtcgggtcgtatccgttatcttggcgtgctgctgta

SEQ ID NO: 713694 - DNA, 75 bp, synthetic construct
  source 1..75: mol_type = other DNA
acgatgccgacgcgattgaacgtgcggcaagtaccgagaacgagaaagatctctaccagcgtcagctggatgtgt

SEQ ID NO: 713695 - DNA, 75 bp, synthetic construct
  source 1..75: mol_type = other DNA
catgaacagtaagcaatggcccggtaaagccgctattggtcgtctgaaaggagatgaactggcgcaatataattt

SEQ ID NO: 713696 - DNA, 75 bp, synthetic construct
  source 1..75: mol_type = other DNA
tctggcggctatcggctgtttcgcgctggcctcggcgtcgatgttctggaaaatcctcccggaatcacgccattt

SEQ ID NO: 713697 - DNA, 75 bp, synthetic construct
  source 1..75: mol_type = other DNA
cgttggcgcattcattgctttgatgctggtggtggcgattctgattggaacacgtttacatcatcgcctgcatgc

SEQ ID NO: 713698 - DNA, 75 bp, synthetic construct
  source 1..75: mol_type = other DNA
tgaccgtcggactgttcgtcatcacgttttttaatccaggcgcaaatctctttgtcgtggttcaaaccagtctgg

SEQ ID NO: 713699 - DNA, 75 bp, synthetic construct
  source 1..75: mol_type = other DNA
ccggtcgacgcgcaggggtgctgaccggactgggcgtggcgctgggcgatgcattttattccgggttgggtttgt

SEQ ID NO: 713700 - DNA, 75 bp, synthetic construct
  source 1..75: mol_type = other DNA
catgaacagtaagcaatggcccggtaaagccgctattggtcgtctgaaaggtgaggaactggcgcaatataattt

SEQ ID NO: 713701 - DNA, 75 bp, synthetic construct
  source 1..75: mol_type = other DNA
atgaaacaaaagaaagcctggagtttttttcagagcctgggaaaggcatttatgtatcccatcgctctgctaagt

SEQ ID NO: 713702 - DNA, 75 bp, synthetic construct
  source 1..75: mol_type = other DNA
gtgcggctatcctgctgtcgggttgtggtgaaaaaggtgactttgagaaagcgataaatgccaagatcgggcagg

SEQ ID NO: 713703 - DNA, 75 bp, synthetic construct
  source 1..75: mol_type = other DNA
gtcttgctgctcttttatctggatgcgatgaaaaaggcgattttgagaaagcgatcaacgcgaaaatatcacaat

SEQ ID NO: 713704 - DNA, 75 bp, synthetic construct
  source 1..75: mol_type = other DNA
cgttaaagaacgctggattgacttaacggaggtttcgaagtgggcaagaaagaacaaggatcattatctctccca

SEQ ID NO: 713705 - DNA, 75 bp, synthetic construct
  source 1..75: mol_type = other DNA
atggcgttaaaatgacacaagtgacctatacgtggaaactcgatgacgttccgagctgggtggataaaaaagctt

SEQ ID NO: 713706 - DNA, 75 bp, synthetic construct
  source 1..75: mol_type = other DNA
atacgtggaaactggttgacgttccgggctggattgacaaaaaagcattcgccagcgttaaagggatgaatgaat

SEQ ID NO: 713707 - DNA, 75 bp, synthetic construct
  source 1..75: mol_type = other DNA
cttgccaagccacgacttgattcgacaggcacaggaacgaattcagtgatcctcgatggatttgttgagcagggc

SEQ ID NO: 713708 - DNA, 75 bp, synthetic construct
  source 1..75: mol_type = other DNA
gctttggcatctataacgtgcatatgggcttcgatccagctaatgccgacgcgctggcagcgctgctgaaaacgc

SEQ ID NO: 713709 - DNA, 75 bp, synthetic construct
  source 1..75: mol_type = other DNA
tgccgtggtgggtcaccctggcacgccataatctggaaaaagaagcgccagatggtgttgctaccgaaatgctgg

SEQ ID NO: 713710 - DNA, 75 bp, synthetic construct
  source 1..75: mol_type = other DNA
aaatatggcgacatgatcaaccaccgtctgctgaaagcggttatcaaaggcgaaactgcgacgcgtccacaggat

SEQ ID NO: 713711 - DNA, 75 bp, synthetic construct
  source 1..75: mol_type = other DNA
aataacaaaaccaagacagaactagcccaaaagacttatataaacatgaccgagagggccaaaaaaaggcaaaaa

SEQ ID NO: 713712 - DNA, 75 bp, synthetic construct
  source 1..75: mol_type = other DNA
gtcagagtatttggaagaaccacttgtgaagcaagaatagatgacaattgcgtagattatatatatgtaagattt

SEQ ID NO: 713713 - DNA, 75 bp, synthetic construct
  source 1..75: mol_type = other DNA
actttggcctcggtctggaagcgtatgccacctggacttcaccgattcgtaagtatggcgacatgatcaaccatc

SEQ ID NO: 713714 - DNA, 75 bp, synthetic construct
  source 1..75: mol_type = other DNA
gttaaggggatggctgaccccgaagaagcgaaaattattctggtgaagaccaataacggctgggctgctcggtaa

SEQ ID NO: 713715 - DNA, 75 bp, synthetic construct
  source 1..75: mol_type = other DNA
agcaataacggtcatgaggtgatttcagggatgaaacgagtgaatatcgatagcattctgaatgttcttacaagt

SEQ ID NO: 713716 - DNA, 75 bp, synthetic construct
  source 1..75: mol_type = other DNA
gcggcagaagaaaaagacttaattgaaaacgatggtatgaagaagtgcccattctgtgcagagttaatcaaaagc

SEQ ID NO: 713717 - DNA, 75 bp, synthetic construct
  source 1..75: mol_type = other DNA
gcaacatctccccaggcgacatggcgcggtaactttcgcgaactttctgccagcgttacgcgcatggcgacgttt

SEQ ID NO: 713718 - DNA, 75 bp, synthetic construct
  source 1..75: mol_type = other DNA
gagcagcgcgcatccacttacccaatgcggttgagaaaatagccttcgatcgctttcatgtggcgaaacaaccgg

SEQ ID NO: 713719 - DNA, 75 bp, synthetic construct
  source 1..75: mol_type = other DNA
cgaagtggggaattatacccagagtgcggttgatgcattgtaccggttcaggtcagataaactgtgtgctgatat

SEQ ID NO: 713720 - DNA, 75 bp, synthetic construct
  source 1..75: mol_type = other DNA
ccggcgttaattgttaactggttaacgtcacctggaggcaccaggcactgcatcacaaaattcattgttgaggac

SEQ ID NO: 713721 - DNA, 75 bp, synthetic construct
  source 1..75: mol_type = other DNA
gtgggcgttgagattgaactgcataacccgtgggatttcgaagaggtttacgcctgcctgcatgatttcgcccgt

SEQ ID NO: 713722 - DNA, 75 bp, synthetic construct
  source 1..75: mol_type = other DNA
gcgttaaaatgacgcaagtgacctatacgtggaaactggatggtgtgccgggctgggttgataaaagtgccttct

SEQ ID NO: 713723 - DNA, 75 bp, synthetic construct
  source 1..75: mol_type = other DNA
tctggtcatcggacagatcaggacggatgagaaatccaatgaaattacagctatccctgaacttcttaacatgct

SEQ ID NO: 713724 - DNA, 75 bp, synthetic construct
  source 1..75: mol_type = other DNA
cctctttgatcgactgcaactggaacacgttatcgctatctgccgtcaggcaaagtcgctttccgctgccggacg

SEQ ID NO: 713725 - DNA, 75 bp, synthetic construct
  source 1..75: mol_type = other DNA
gcatgatttcgcccgtggttacgcttttcaacctgataaagaagactatttaattcacatcaccactggcaccca

SEQ ID NO: 713726 - DNA, 75 bp, synthetic construct
  source 1..75: mol_type = other DNA
ccgcgcggcgcaggtgaagtgacgattatcgatctcgatttaagccgttataacgccatcgccagccgctttgcc

SEQ ID NO: 713727 - DNA, 75 bp, synthetic construct
  source 1..75: mol_type = other DNA
tggctgggcgaatcagtggatcgtcgaaccctgaaagacgtggttgagctatggttcaaactacatggtaaatct

SEQ ID NO: 713728 - DNA, 75 bp, synthetic construct
  source 1..75: mol_type = other DNA
cgcggtcaactgacacacgttctgcgccatacgtttgcagcgcatttcatgatgtcgggtggaaatatccttgct

SEQ ID NO: 713729 - DNA, 75 bp, synthetic construct
  source 1..75: mol_type = other DNA
tggctcggtaagaaagaagaccgccgacgcttaagtgagattatccagctttggcataatttacatggacaggcg

SEQ ID NO: 713730 - DNA, 75 bp, synthetic construct
  source 1..75: mol_type = other DNA
tctgggcaatccccttgcaaccgatctcacatctaaaatgtttgcccattatcgagataaacgactgacaggtga

SEQ ID NO: 713731 - DNA, 75 bp, synthetic construct
  source 1..75: mol_type = other DNA
tgcccgtacaaaaaaatctacttcaactggaaaagcggcaagtcagaaaaatgtatcttctgttatccgcgaatt

SEQ ID NO: 713732 - DNA, 75 bp, synthetic construct
  source 1..75: mol_type = other DNA
gcggctggatttgcgagctatatcccaatggcccgaaaggaaagcgcatcaggaaaaaatttgccactaaagggg

SEQ ID NO: 713733 - DNA, 75 bp, synthetic construct
  source 1..75: mol_type = other DNA
atgacgatcagaaaacagccgaacggaaagtggttgtgtgaatgctacccaaacgggcgagatggcaaacgcgta

SEQ ID NO: 713734 - DNA, 75 bp, synthetic construct
  source 1..75: mol_type = other DNA
gaaaatggttgtgtgagtgctatcccaatggacgcaatggtaagcgcgtgcgtaagcaatttgctacgaaaggcg

SEQ ID NO: 713735 - DNA, 75 bp, synthetic construct
  source 1..75: mol_type = other DNA
ctggcgggttggtcgtatggcgcgtttcttgcggcgggcgccacgttcatcagcagcgtgccggaaccagcggac

SEQ ID NO: 713736 - DNA, 75 bp, synthetic construct
  source 1..75: mol_type = other DNA
atataaaaatgactatgcgatatgctcatctcgccccggaccatcttgagactgcattaagatttaacccattag

SEQ ID NO: 713737 - DNA, 75 bp, synthetic construct
  source 1..75: mol_type = other DNA
gtactgcgcgatattctgggccacgccgatattaaaatgacaatgatttacgcccacttcgcacccgaccacctg

SEQ ID NO: 713738 - DNA, 75 bp, synthetic construct
  source 1..75: mol_type = other DNA
cagatattaaaatgacaatggtttacgctcattttgccccagaacatcttgaagatgctgtgaccaaaaatcctc

SEQ ID NO: 713739 - DNA, 75 bp, synthetic construct
  source 1..75: mol_type = other DNA
cctttgcgcttgaacaaatggcgcgcctggtagaagcgcgtctggctgatttccgtattaaagccgatgttgtca

SEQ ID NO: 713740 - DNA, 75 bp, synthetic construct
  source 1..75: mol_type = other DNA
agaacccggcactgatttccgtcgcactcagtttgtggcaacagggcaaaatcgccccggacagttgggtaatcg

SEQ ID NO: 713741 - DNA, 75 bp, synthetic construct
  source 1..75: mol_type = other DNA
taagcggctgattgagacggcgcggctttacggcattgaactgtatctgatgaccaaacaattcggtcgtaatcc

SEQ ID NO: 713742 - DNA, 75 bp, synthetic construct
  source 1..75: mol_type = other DNA
actcatgccgaacctggtcatgcgctgacgggcaccattccggcaaaccaacagggtgaccagcctgagcgcgta

SEQ ID NO: 713743 - DNA, 75 bp, synthetic construct
  source 1..75: mol_type = other DNA
gacccgaaaatgctggagctttcggtttatgaaggcattccgcatctgttaacggaagtcgttaccgacatgaaa

SEQ ID NO: 713744 - DNA, 75 bp, synthetic construct
  source 1..75: mol_type = other DNA
gcagtatcaacagctgcaacaaccggttgcaccgcagccgcagtatcagcagccacaacagccagttgcgccaca

SEQ ID NO: 713745 - DNA, 75 bp, synthetic construct
  source 1..75: mol_type = other DNA
gtgtccggtattcaccatggcgaaccagaaatagttggtcgttatgacagcctcggcaaccctctggaggcgtaa

SEQ ID NO: 713746 - DNA, 75 bp, synthetic construct
  source 1..75: mol_type = other DNA
ccgaactccacgttgccggtacgtgttcatggtgcttttgttcgcgatcaggaagttcatgccgtggtgcaggac

SEQ ID NO: 713747 - DNA, 75 bp, synthetic construct
  source 1..75: mol_type = other DNA
acgttgccggtgcgtgtccacggtgcattcgtgcgtgaccaggaagtccatgccgtggtgcaagactggaaagca

SEQ ID NO: 713748 - DNA, 75 bp, synthetic construct
  source 1..75: mol_type = other DNA
acatctggcaccggatcacctggaaactgcattacggtttaatccgctggctacactaccaacatcaacagcaac

SEQ ID NO: 713749 - DNA, 75 bp, synthetic construct
  source 1..75: mol_type = other DNA
caagcgactgattgagacggcacggctttacggcattgagctgtatttgatgaccaagcagtttggtcgtaaccc

SEQ ID NO: 713750 - DNA, 75 bp, synthetic construct
  source 1..75: mol_type = other DNA
cttgtcatcaggttgctgacgccgttgaacagggcaccgacgtcatcaccgtgtttactctcgacaaagcgcggg

SEQ ID NO: 713751 - DNA, 75 bp, synthetic construct
  source 1..75: mol_type = other DNA
aatattccgacccgtatcgcctttaccgtatccagtaagattgactcacgtaccattcttgatcaggctggcgcg

SEQ ID NO: 713752 - DNA, 75 bp, synthetic construct
  source 1..75: mol_type = other DNA
cagcggcgatgcctgatgagcacgaacttacccaactggcgctgccgttgcctgagcaggcgcagcttgatgagc

SEQ ID NO: 713753 - DNA, 75 bp, synthetic construct
  source 1..75: mol_type = other DNA
tcaagaactgtatgacgaactacctaaaaacagggggagattatttaccccatgcagaaaatcctttgagcgtgc

SEQ ID NO: 713754 - DNA, 75 bp, synthetic construct
  source 1..75: mol_type = other DNA
gggccatcaactatcgaaataccggattacctatacaaagaccaagggtaaaaaaaaccgtaccgtaccgatatc

SEQ ID NO: 713755 - DNA, 75 bp, synthetic construct
  source 1..75: mol_type = other DNA
cgccggacgcagcgggcgtcgcgtgcgtaaacagttcgctaccaaaggcgaagcattagcttttgagcgtcacac

SEQ ID NO: 713756 - DNA, 75 bp, synthetic construct
  source 1..75: mol_type = other DNA
caacaccgactgcgttttatataaaagtacacgacacagataatgtcgcgatcattgttaatgataatggcctta

SEQ ID NO: 713757 - DNA, 75 bp, synthetic construct
  source 1..75: mol_type = other DNA
tgaacgcgatctgctaccgaaatacccgaacgtcgatggcgtggtggggctgaatcatttgtacggttgtggcgt

SEQ ID NO: 713758 - DNA, 75 bp, synthetic construct
  source 1..75: mol_type = other DNA
ccagagggccagtgcacccacgtactgcgccatacattcgccagccattttatgatgaacggcggaaatatactg

SEQ ID NO: 713759 - DNA, 75 bp, synthetic construct
  source 1..75: mol_type = other DNA
ttgctgctctgctctcaggaagttgttttagcgccgccgccgcgcctcctgcgccgccgccgcgcctcctgcgcc

SEQ ID NO: 713760 - DNA, 75 bp, synthetic construct
  source 1..75: mol_type = other DNA
ggcacccgccaaagcgacccgcgatatgttcctcgatgatcagggcaacccggacagcaaaaaatcactcacttc

SEQ ID NO: 713761 - DNA, 75 bp, synthetic construct
  source 1..75: mol_type = other DNA
tgattgccgaaaatggcccggacgaattctacaaaggcacgatagcggagcagatcgctcaggagatgcagaaaa

SEQ ID NO: 713762 - DNA, 75 bp, synthetic construct
  source 1..75: mol_type = other DNA
aaactggcgcgcgatggttttatcgttaacgacgcgctggccgacgatctcaaaacttacggcagtgaagtgctg

SEQ ID NO: 713763 - DNA, 75 bp, synthetic construct
  source 1..75: mol_type = other DNA
gagaaaggatttagcccggatacgctcaagctgctggaagcaaaaggtcagaaagtggcgctgaaagaggcgatg

SEQ ID NO: 713764 - DNA, 75 bp, synthetic construct
  source 1..75: mol_type = other DNA
aacctggcaaagagcctggagatgattgccgaaaacggcccggacgaattctacaaaggcacaatagcggagcag

SEQ ID NO: 713765 - DNA, 75 bp, synthetic construct
  source 1..75: mol_type = other DNA
ccggcagtgggctacgcatctgatctactggtgcgctgcggtgcaacggtgatgttctcggaagtaacggaagta

SEQ ID NO: 713766 - DNA, 75 bp, synthetic construct
  source 1..75: mol_type = other DNA
acagggcgcgttgacgctggatatcgtgatggccgacgatccgtcgccatcagcggcgatgcctgatgagcacga

SEQ ID NO: 713767 - DNA, 75 bp, synthetic construct
  source 1..75: mol_type = other DNA
tttctctcctgatggtcactgtcgtccctttgacgcctcggctgagggcacctgggccggtaacggtctcggctg

SEQ ID NO: 713768 - DNA, 75 bp, synthetic construct
  source 1..75: mol_type = other DNA
tcgcaactgctcggagagtgtaaaaggcatgaccaccctgatttagaaccagtggtaagaatctgtctcgccact

SEQ ID NO: 713769 - DNA, 75 bp, synthetic construct
  source 1..75: mol_type = other DNA
cccgcggtcagatgcgcgttgaagcccgtcatcctgctggcgagtggctgccgctatcgcccgccgcgcctcttc

SEQ ID NO: 713770 - DNA, 75 bp, synthetic construct
  source 1..75: mol_type = other DNA
gcatcgccctgctggcgccgcgcgtggatgagtcatggctacgcgacgtggagggcgggcagacgcgcgtctgcc

SEQ ID NO: 713771 - DNA, 75 bp, synthetic construct
  source 1..75: mol_type = other DNA
tcagcgaaatcgacgattgccattaccgtctgcatatgaacctcgaccttttgcagttgtgtaagttcacagaga

SEQ ID NO: 713772 - DNA, 75 bp, synthetic construct
  source 1..75: mol_type = other DNA
acattccggctaatggtgaaattattcgttatggcgaagtgattggttacgccgtgcgcgcaatcccacgcggaa

SEQ ID NO: 713773 - DNA, 75 bp, synthetic construct
  source 1..75: mol_type = other DNA
aacccaaactttggcggcgaggtgatggtgattggcctcggatgcgagaaattgcaaccagagcgcctgctggtc

SEQ ID NO: 713774 - DNA, 75 bp, synthetic construct
  source 1..75: mol_type = other DNA
gcactcggctccattgctaaatcgggtaaaagtgcaattgttgaagtgctgtcgcccggtcaacgcccgactaaa

SEQ ID NO: 713775 - DNA, 75 bp, synthetic construct
  source 1..75: mol_type = other DNA
tgccttttctggcgtaacggcaaacccggcggttggtatgcgtctgatctactggtgcgctgcggcgcaacggtg

SEQ ID NO: 713776 - DNA, 75 bp, synthetic construct
  source 1..75: mol_type = other DNA
tgcgttttctggcgtaacggcaaacccggcggttggctatgcgtctgatctactggtgcgctgcggcgcaacggt

SEQ ID NO: 713777 - DNA, 75 bp, synthetic construct
  source 1..75: mol_type = other DNA
ggcacggatgatgtacaaggtattccgctggagaacgccagtattgtcagcttgcaggatgaaaagcatgtcggt

SEQ ID NO: 713778 - DNA, 75 bp, synthetic construct
  source 1..75: mol_type = other DNA
tggatttggcgctaagaaaaactttgccacctatgatctgatttgtaaggcatccggttggattagctttatttc

SEQ ID NO: 713779 - DNA, 75 bp, synthetic construct
  source 1..75: mol_type = other DNA
ttgacgggaaaggtgactggcgaatgaagtgggcgacttacataccgggacatcctgatgctaatgatggttgga

SEQ ID NO: 713780 - DNA, 75 bp, synthetic construct
  source 1..75: mol_type = other DNA
cagaattaatcgaaggcatggaagtttccattgatgtaagcacttgtgatgctgatttaggtaatcgctatttcg

SEQ ID NO: 713781 - DNA, 75 bp, synthetic construct
  source 1..75: mol_type = other DNA
gcatcaggtttaaaatggaaagaagttgctgaagaaatgaacacgacaaaatatagcgcaattgcatattataga

SEQ ID NO: 713782 - DNA, 75 bp, synthetic construct
  source 1..75: mol_type = other DNA
tcatcaggtctaaaatggcgtgaggtagctgaaaaaatggatactaccttagatagtgctatggcttattatcgt

SEQ ID NO: 713783 - DNA, 75 bp, synthetic construct
  source 1..75: mol_type = other DNA
aatcccgctttcgctctgctttctcgccggtctggcgatcatttttactatagctgtcatctggaaaacgccctg

SEQ ID NO: 713784 - DNA, 75 bp, synthetic construct
  source 1..75: mol_type = other DNA
atgaacccttatatttatcttggtggtgcaatacttgcagaggttattggtacaaccttaatgaagttttcagag

SEQ ID NO: 713785 - DNA, 75 bp, synthetic construct
  source 1..75: mol_type = other DNA
aatgtgaatttccaccaacacaagaagtaataaaatttgatggagtagatgttattatcgaaacagggattcata

SEQ ID NO: 713786 - DNA, 75 bp, synthetic construct
  source 1..75: mol_type = other DNA
acctgccagccattataggcatgatgttgatttgtgccggtgtgttagtcattaacttgttgtcacgaagtgcac

SEQ ID NO: 713787 - DNA, 75 bp, synthetic construct
  source 1..75: mol_type = other DNA
acaggtacaaggggaatacgtggagttgagcgacggcactttatcgtggttagggaacgtcttgttctggatgcc

SEQ ID NO: 713788 - DNA, 75 bp, synthetic construct
  source 1..75: mol_type = other DNA
aagtttccattgatgtaagcacttgtgatgctgatttaggtaatcgctatttcggtaccgtcaccgaggcgttag

SEQ ID NO: 713789 - DNA, 75 bp, synthetic construct
  source 1..75: mol_type = other DNA
ctattgtgcatcattttggttattagctcagacactggcttatatacctacagggattgcttatgctatctggtc

SEQ ID NO: 713790 - DNA, 75 bp, synthetic construct
  source 1..75: mol_type = other DNA
aagatatagagaacattatcgatgatattgtttctgaaaccttttctaatacacactgcaaacttataattgatt

SEQ ID NO: 713791 - DNA, 75 bp, synthetic construct
  source 1..75: mol_type = other DNA
cattcgtgcgccgcacaaaatcaagttcggtgtttctggctgtactcgtgaatgttctgaagcccagggcaaaga

SEQ ID NO: 713792 - DNA, 75 bp, synthetic construct
  source 1..75: mol_type = other DNA
gttctggtcggcgaacgcgcaatcaccatcaaccgtcaggagaaagtgatccactccagcgccggacgtaccgtt

SEQ ID NO: 713793 - DNA, 75 bp, synthetic construct
  source 1..75: mol_type = other DNA
gtcctggcgttgtttgagctgggcattgaactctttgctctcatcaacttttgcgtaacgttcctggggaaactt

SEQ ID NO: 713794 - DNA, 75 bp, synthetic construct
  source 1..75: mol_type = other DNA
gcggtggttgcattccgttggttactcaggtgctgaacgccgaactggcgaaacagggcatcgaagtcaacaaca

SEQ ID NO: 713795 - DNA, 75 bp, synthetic construct
  source 1..75: mol_type = other DNA
gatcattgacgacaaactggggctgaacgcacatctggaagaagagatggcgcgcctgcgtgaagcggtagtgtg

SEQ ID NO: 713796 - DNA, 75 bp, synthetic construct
  source 1..75: mol_type = other DNA
gcggcatcgattacctgaaagcggtgatcattgacgacaaactggggctgaacgcacatctggaagaagagatgg

SEQ ID NO: 713797 - DNA, 75 bp, synthetic construct
  source 1..75: mol_type = other DNA
ccgtggcctcattgacgtcggtggcgaaactgccgttcacctacgccaaagatgggatctcgtacaccttctcca

SEQ ID NO: 713798 - DNA, 75 bp, synthetic construct
  source 1..75: mol_type = other DNA
ttcaccgtcactcggcgaactgctgttacaagggaaaaataaccttcaggccccgtggcttgggatcaccgcctt

SEQ ID NO: 713799 - DNA, 75 bp, synthetic construct
  source 1..75: mol_type = other DNA
actcggtgaactgctgggtaatgactccaacttattgatagtgttttatgttcagataatgcccgatgactttgt

SEQ ID NO: 713800 - DNA, 75 bp, synthetic construct
  source 1..75: mol_type = other DNA
tctaacgttgtgtatggtaagaaaactggtaacaccccagacggtcgtcgtgctggcgcgccgttcggaccgggt

SEQ ID NO: 713801 - DNA, 75 bp, synthetic construct
  source 1..75: mol_type = other DNA
gtcggcctgctggatgggtatttccaccacgaagcggatgtcgaaggcggtcaacacctcaacgtcaacgtaatg

SEQ ID NO: 713802 - DNA, 75 bp, synthetic construct
  source 1..75: mol_type = other DNA
ccgtagcctcattgacgtcggtggcgaaactgccattcacctacgccaaagatgggatctcgtacaccttctcca

SEQ ID NO: 713803 - DNA, 75 bp, synthetic construct
  source 1..75: mol_type = other DNA
gagattgatgcaccgctctctggctggcatccggcagagggtgaagatgccagtttttcacaatcgatcaattac

SEQ ID NO: 713804 - DNA, 75 bp, synthetic construct
  source 1..75: mol_type = other DNA
gaacctgttcaaatactgcgcctctggtaagcatattccgaagtccatccttgtcatgcgcaaagcaggcggcaa

SEQ ID NO: 713805 - DNA, 75 bp, synthetic construct
  source 1..75: mol_type = other DNA
gccacgcagcgtgtcgcccggacacaggcagggtacggcacggccagcctgaacaccgtgctctacaacgccgga

SEQ ID NO: 713806 - DNA, 75 bp, synthetic construct
  source 1..75: mol_type = other DNA
atggaaactaaaccggatgtattaccggcgcataatgacggcccgcagacaaatggcacctcccgctcacgccgc

SEQ ID NO: 713807 - DNA, 75 bp, synthetic construct
  source 1..75: mol_type = other DNA
ctctacgcggctgaaaattgatgacgatgccctcgctcgcctggtttcttgtgcatggccaggcaacgattttga

SEQ ID NO: 713808 - DNA, 75 bp, synthetic construct
  source 1..75: mol_type = other DNA
gctatcgttagcggctatctctggtcaggccgtgaaaacgatggccgatcaacatttcaaacaggcactctggaa

SEQ ID NO: 713809 - DNA, 75 bp, synthetic construct
  source 1..75: mol_type = other DNA
catacaacgtcaaagcaaaaattcagctggcgctgctgaaattacagcgcgccggactctggctttattctgttg

SEQ ID NO: 713810 - DNA, 75 bp, synthetic construct
  source 1..75: mol_type = other DNA
tccctgacaatatgttaagtgggtcaggaacggctgctaaacccatcaatgcctttaaaggtaatgtgacgctgg

SEQ ID NO: 713811 - DNA, 75 bp, synthetic construct
  source 1..75: mol_type = other DNA
agcgactggctcttctttcactattacatacgataatgtgccagcagcggaatgtgtgaaaataaccactgcggc

SEQ ID NO: 713812 - DNA, 75 bp, synthetic construct
  source 1..75: mol_type = other DNA
gcaagcgtctcaacgtgcacaggctgaaagcaataacatagcaacaatccaagctggtgttaaagcgctttatac

SEQ ID NO: 713813 - DNA, 75 bp, synthetic construct
  source 1..75: mol_type = other DNA
cgccttcaagcatctgacggaagaaatgcgccgcacgctacaggatatttcaagactgtcagatcgaaattcccg

SEQ ID NO: 713814 - DNA, 75 bp, synthetic construct
  source 1..75: mol_type = other DNA
gtcaaagctgcaggaggggtgctggatgtcgcagaaactgcaacacaatgtgaaagcggtgggaatagcaacaca

SEQ ID NO: 713815 - DNA, 75 bp, synthetic construct
  source 1..75: mol_type = other DNA
tggttcaacaccaataaatgcattcaaaggaaatgttgtggttgaatcagcagatacaggaccttctgcggctgc

SEQ ID NO: 713816 - DNA, 75 bp, synthetic construct
  source 1..75: mol_type = other DNA
ccgttaacgctggcaattgcccgtgaggttggcaatttactgctgacagatagtttactggctgaaaccaaccgc

SEQ ID NO: 713817 - DNA, 75 bp, synthetic construct
  source 1..75: mol_type = other DNA
tcgcgaatgtttgcagcccggtttgcgagcggattaacgggtaaggggtttaatatttccagccatcagcccgaa

SEQ ID NO: 713818 - DNA, 75 bp, synthetic construct
  source 1..75: mol_type = other DNA
taataccttcgtgctgaaaccatcagaaaaagatccctctctggcgctcgcgctggcaaaactactgaaagaggc

SEQ ID NO: 713819 - DNA, 75 bp, synthetic construct
  source 1..75: mol_type = other DNA
gacgccagaaaacgagatggggccgctgatctccgccgcacaccgcagcaaagtgttgggctatatcgacagtgg

SEQ ID NO: 713820 - DNA, 75 bp, synthetic construct
  source 1..75: mol_type = other DNA
cgtgggatacggacaataccgacctcgatcttcatgtcgttacgcctgacggtgaacatgcctggtacggtaaca

SEQ ID NO: 713821 - DNA, 75 bp, synthetic construct
  source 1..75: mol_type = other DNA
ctgaaggcagcaacagcgtgcaggtcatcagcccagatgggcaaagccgacaaaaaatgcagttttactcaacgc

SEQ ID NO: 713822 - DNA, 75 bp, synthetic construct
  source 1..75: mol_type = other DNA
cgagcagcttcttactggggtgacaggctacgttgtagataaaaagacaacgagaactgacaagcatggcgaatt

SEQ ID NO: 713823 - DNA, 75 bp, synthetic construct
  source 1..75: mol_type = other DNA
cagttacgcaggaaagcgatgagaagcgtctttccctccgctttgcctgtgccggagaaccagtggtcgggcggc

SEQ ID NO: 713824 - DNA, 75 bp, synthetic construct
  source 1..75: mol_type = other DNA
gaaaaagattactatgaggccgccggtaagcgttttgaccccgattatgacgacgagggggctatctgggaacag

SEQ ID NO: 713825 - DNA, 75 bp, synthetic construct
  source 1..75: mol_type = other DNA
tttattttgcaaccattgatcgggcttacttcctcgacaaacacaatttttatgtttctgaagccagaaaacgtt

SEQ ID NO: 713826 - DNA, 75 bp, synthetic construct
  source 1..75: mol_type = other DNA
ctttatgacactgcagaacttctggactgaccgggcaacggacttcacccagacggcgaaactggcccggctgaa

SEQ ID NO: 713827 - DNA, 75 bp, synthetic construct
  source 1..75: mol_type = other DNA
acagctctgttgattacaaccttttcattaaagggttaaatgatgcaattgattcagtctcggaaactttaaggc

SEQ ID NO: 713828 - DNA, 75 bp, synthetic construct
  source 1..75: mol_type = other DNA
acgtttatttgctttagggcaatgcgcttgtggtaatgattggccaacaaagtttcaggatattaaaattgaaag

SEQ ID NO: 713829 - DNA, 75 bp, synthetic construct
  source 1..75: mol_type = other DNA
tgctgcgggccttcttcatcagcgaaaagcaaccacccactggcgctacactgaacaactccagcaccgttaccc

SEQ ID NO: 713830 - DNA, 75 bp, synthetic construct
  source 1..75: mol_type = other DNA
attattattcctggctggcgcggaatagatgccaaagtgccggagatgctatgccagtcattgcgcgaggcacac

SEQ ID NO: 713831 - DNA, 75 bp, synthetic construct
  source 1..75: mol_type = other DNA
ttttgctgttgctgcggtagaaccaggtgcgctacaagccaccggggggatccacgtggttgctgatggtggact

SEQ ID NO: 713832 - DNA, 75 bp, synthetic construct
  source 1..75: mol_type = other DNA
cgtattcagagccggggcgatccgatacgggcatttttcgcttttgacccggcccgtactggcattgtgctttgt

SEQ ID NO: 713833 - DNA, 75 bp, synthetic construct
  source 1..75: mol_type = other DNA
ataccctatatgagtattgcggattataaaggtgtggataaaacatcaagtaatcgccaaatccgctggcgctgg

SEQ ID NO: 713834 - DNA, 75 bp, synthetic construct
  source 1..75: mol_type = other DNA
ggcaaaataatacccgtgttgttccggacgatgtacgcaaggtctttgccgaatacgcgagctggcgccgatttt

SEQ ID NO: 713835 - DNA, 75 bp, synthetic construct
  source 1..75: mol_type = other DNA
gaagcttctcatccttccccgcatgggcagaatatttaatcgcggattcgtttgagagttcacggacttttgaaa

SEQ ID NO: 713836 - DNA, 75 bp, synthetic construct
  source 1..75: mol_type = other DNA
atggtggtgggggaaggattactcagcgctgcgcgcttcgccctacgggtcgttgcctgcggcaacgctctctcg

SEQ ID NO: 713837 - DNA, 75 bp, synthetic construct
  source 1..75: mol_type = other DNA
tcagaccaccaaaggtgttctggaaacaggtatctaccgtggcgtagtcagcatttatctgtctcaggatatcta

SEQ ID NO: 713838 - DNA, 75 bp, synthetic construct
  source 1..75: mol_type = other DNA
agttactcgctagtcaggtttttagtgactggtttaacggcgagtcaggcctcgactactcgattttcaacaaag

SEQ ID NO: 713839 - DNA, 75 bp, synthetic construct
  source 1..75: mol_type = other DNA
atggtggtgggggaaggattactcagcgctgcgcgcttcgcccttcggggcgttgcctgcggcaacgctctctcg

SEQ ID NO: 713840 - DNA, 75 bp, synthetic construct
  source 1..75: mol_type = other DNA
gaagcttctcatccttccccgcatgggcagaatatttgattgcggattcgcttgagagttcagggacttttgaaa

SEQ ID NO: 713841 - DNA, 75 bp, synthetic construct
  source 1..75: mol_type = other DNA
ggggcaaatcgctggttataccaacgcgatgaatgtgatctacggtccggctgtaccgaaagtctccgacattca

SEQ ID NO: 713842 - DNA, 75 bp, synthetic construct
  source 1..75: mol_type = other DNA
aagcgctggagtcgatgattaagcacgaggcgacccgtccgctggttttctcgcctggttactatcagactcgtc

SEQ ID NO: 713843 - DNA, 75 bp, synthetic construct
  source 1..75: mol_type = other DNA
ggacgcacagcaaaagcttgctcaatacattcaacaagttgatgaccgagtgaatgaagagctggagaaagacct

SEQ ID NO: 713844 - DNA, 75 bp, synthetic construct
  source 1..75: mol_type = other DNA
tgtgaatcctgtaccaatgattcagacgggtaatgccggtgatactcagctgtaccagcaagtcatgagccaaga

SEQ ID NO: 713845 - DNA, 75 bp, synthetic construct
  source 1..75: mol_type = other DNA
cacattcttacggataccaatactcgtgatgttggggtcgatagtttggctgcgaacgtaaaactactcagtgag

SEQ ID NO: 713846 - DNA, 75 bp, synthetic construct
  source 1..75: mol_type = other DNA
tagatcccaacaaaaagcggtgggttgctatttctggtggcgttttcgttctttttgctgtcgtaacaatcttct

SEQ ID NO: 713847 - DNA, 75 bp, synthetic construct
  source 1..75: mol_type = other DNA
cgcaggaagtggtggcgcaggagcagaaagatttgcgtatccgccagattcaggaagcgttgcagtacgcgaatc

SEQ ID NO: 713848 - DNA, 75 bp, synthetic construct
  source 1..75: mol_type = other DNA
aagcgctggagtcgatgattaagcatgaagcgacccgtccgttggtgttctcaccaaactactatcagacacgtc

SEQ ID NO: 713849 - DNA, 75 bp, synthetic construct
  source 1..75: mol_type = other DNA
aatcaccttgattctggcggtgctgctgggcggcatggttggcgcggggattgtgttggggcgtaatgctctgcg

SEQ ID NO: 713850 - DNA, 75 bp, synthetic construct
  source 1..75: mol_type = other DNA
gaaaaaggcaattaccttgattctggcggtgctgctgggcggcatggttggcgcggggcgtaacgctctgcgtaa

SEQ ID NO: 713851 - DNA, 75 bp, synthetic construct
  source 1..75: mol_type = other DNA
atcaggaagaacctgaaaaactgaccattgagcctaccgttaaaaatcagtccttacctttagcggtttcttatg

SEQ ID NO: 713852 - DNA, 75 bp, synthetic construct
  source 1..75: mol_type = other DNA
tctcctagctactaccagactcgtcaaaaccttttggatatcgaaagcctgaaggttgatgatcttaatataaat

SEQ ID NO: 713853 - DNA, 75 bp, synthetic construct
  source 1..75: mol_type = other DNA
aatgaccaaaatctggtcaaatgacacgaccaaagacgtgaaaatgcagttagtttctcctgcacaactggttca

SEQ ID NO: 713854 - DNA, 75 bp, synthetic construct
  source 1..75: mol_type = other DNA
cgcaaagaagctacagcgtgaccagggagccggacatatccgttgttaagctgggcgatggttatgagcaaagac

SEQ ID NO: 713855 - DNA, 75 bp, synthetic construct
  source 1..75: mol_type = other DNA
caatggataacgtgcaaaggctttttgtctgtcggcaatggagcatgactaaagacgggcctttgtacacgctaa

SEQ ID NO: 713856 - DNA, 75 bp, synthetic construct
  source 1..75: mol_type = other DNA
tgtttgccgtagctggagtatgacaaaggacgggcctgtatacacgctaaacgcaacgtttgagcaagttattaa

SEQ ID NO: 713857 - DNA, 75 bp, synthetic construct
  source 1..75: mol_type = other DNA
atccaggtcaatatcgacagcaaaaaaatgcccccttctgaacaggttgaagaagaggaagatagcggtccgctg

SEQ ID NO: 713858 - DNA, 75 bp, synthetic construct
  source 1..75: mol_type = other DNA
attcaggtcaacatcgacagtaaaaaaatgcctccttctgaacaggttgaagaagaggaagatagcggtccgctg

SEQ ID NO: 713859 - DNA, 75 bp, synthetic construct
  source 1..75: mol_type = other DNA
tgtctgtcggcaatggagcatgactaaagacgggcctttgtacacgctaaacgcaacgtttgagcaagttattaa

SEQ ID NO: 713860 - DNA, 75 bp, synthetic construct
  source 1..75: mol_type = other DNA
cgcgttgaaggcattaaaaccttcgaagaactgctggcgaaacacggcaaaggttacggttgtgaagtttgtaaa

SEQ ID NO: 713861 - DNA, 75 bp, synthetic construct
  source 1..75: mol_type = other DNA
tagaactggaaaaccgctacaaaggcatccgcgcaccgcacaaaatcaagttcggtgtctctggttgtacccgtg

SEQ ID NO: 713862 - DNA, 75 bp, synthetic construct
  source 1..75: mol_type = other DNA
aagaactgctggcaaaacacggcaaaggctacggttgtgaagtgtgtaaacccaccatcggttcgctgctggcgt

SEQ ID NO: 713863 - DNA, 75 bp, synthetic construct
  source 1..75: mol_type = other DNA
acataaagaaattacgaaaaaaaattggccttacccagacagagtgtggtgagatttttggcgtaggcttaagta

SEQ ID NO: 713864 - DNA, 75 bp, synthetic construct
  source 1..75: mol_type = other DNA
ctccggctgtacccgtgaatgttcagaagctcagggtaaagacgtgggtattatcgccaccgaaaaaggctggaa

SEQ ID NO: 713865 - DNA, 75 bp, synthetic construct
  source 1..75: mol_type = other DNA
agaaagacgatctgccggagatctggcgtcagctgattgaagctggcttcgaaaccggtcatgcctatgcgaaag

SEQ ID NO: 713866 - DNA, 75 bp, synthetic construct
  source 1..75: mol_type = other DNA
ccggcctgaactggcaggagaaaaccctgaccctgaaaccgacatcactgaaaggtttattgattgctctgccga

SEQ ID NO: 713867 - DNA, 75 bp, synthetic construct
  source 1..75: mol_type = other DNA
accgatgccttcccgcgacgcgctggtgcggatctggcaggaagtggcgctggcgcgggaagatgcttccccctg

SEQ ID NO: 713868 - DNA, 75 bp, synthetic construct
  source 1..75: mol_type = other DNA
aagctaaagaaaatctggcaagagctgggcgtgccgccgtggctacgtgacaccacgccactgctgttttatggc

SEQ ID NO: 713869 - DNA, 75 bp, synthetic construct
  source 1..75: mol_type = other DNA
catactgcattaaagttcaaaatggtctggaacttacctactccttccgaaaaatcagtaagggaaaagttacga

SEQ ID NO: 713870 - DNA, 75 bp, synthetic construct
  source 1..75: mol_type = other DNA
tgcaggctccgcattggcagtacaaaaggatattactgtaacggccaacgttgatgccgctctggatatgacaca

SEQ ID NO: 713871 - DNA, 75 bp, synthetic construct
  source 1..75: mol_type = other DNA
acgatcgtaactttctgcgcctgcgcgtagtgccgttattgcagcagcgttggccgcattttgccgaagcaacgg

SEQ ID NO: 713872 - DNA, 75 bp, synthetic construct
  source 1..75: mol_type = other DNA
cgtgacaccacgccactgctgttttatggcgaaacgctgattgcggcggcaggggtatttgtgacgcaagaaggt

SEQ ID NO: 713873 - DNA, 75 bp, synthetic construct
  source 1..75: mol_type = other DNA
atgtaaatatcaacctcgtcaccctgaatgccaaaggcagcgaaaagcagcacgagctacagttgcggattcagg

SEQ ID NO: 713874 - DNA, 75 bp, synthetic construct
  source 1..75: mol_type = other DNA
cagacgccagttgggccgtggacgttgacgcgcgatgttgcgctggattaccgcaatcaggaacaaaaaatcagc

SEQ ID NO: 713875 - DNA, 75 bp, synthetic construct
  source 1..75: mol_type = other DNA
gcgcgcatcgtggtgcacgatctgccggaaagcgcagtaggcgtctccagcgatgtggtgatgcttaacgataac

SEQ ID NO: 713876 - DNA, 75 bp, synthetic construct
  source 1..75: mol_type = other DNA
ctgttacagctgggatagcctatgcatttgctgtggctggtgctgttgcactccctgctatctatgccgcaaaga

SEQ ID NO: 713877 - DNA, 75 bp, synthetic construct
  source 1..75: mol_type = other DNA
ttcttcctgagtataaatatgttcccatgattgtcggtcagaggattgttgagaaaatagaaaaacgctctttca

SEQ ID NO: 713878 - DNA, 75 bp, synthetic construct
  source 1..75: mol_type = other DNA
gagaaaatagaaaaacgctctttcattgattttctggcgcacgacgatattgatttatatacagtacctgcaatc

SEQ ID NO: 713879 - DNA, 75 bp, synthetic construct
  source 1..75: mol_type = other DNA
tataacggagggctgacgccggaagagtcagagaacagataccatttttactgtaaaaccgtggccagtattact

SEQ ID NO: 713880 - DNA, 75 bp, synthetic construct
  source 1..75: mol_type = other DNA
ttatacgagcaggcagttccggcagttattgtggcgataccagatcaggcagagtatgagccggcgcggaaactg

SEQ ID NO: 713881 - DNA, 75 bp, synthetic construct
  source 1..75: mol_type = other DNA
ggggaaactgctgggataacagtcctatggaacgcttcttccgcagtctgaaaacagaatgggtgccgacggatg

SEQ ID NO: 713882 - DNA, 75 bp, synthetic construct
  source 1..75: mol_type = other DNA
cctggcgtgaatcccgtggggatattggtaaaggaatggagagcgtaccttcgggtggtggcagccaggatatta

SEQ ID NO: 713883 - DNA, 75 bp, synthetic construct
  source 1..75: mol_type = other DNA
ttctgaactacaaaatcatcataaaacagaagcattaactcagaataataaatataatgaagaaaagctggctca

SEQ ID NO: 713884 - DNA, 75 bp, synthetic construct
  source 1..75: mol_type = other DNA
tgaaatactccgacctggcgtccactgccggatatatatctgtcatgatacccccgttgtcatggatgatggtaa

SEQ ID NO: 713885 - DNA, 75 bp, synthetic construct
  source 1..75: mol_type = other DNA
tttattctggtagagaagtttgcttatggcattaaagatcctatctaccagaaaacgctgatcgaaaccggtcat

SEQ ID NO: 713886 - DNA, 75 bp, synthetic construct
  source 1..75: mol_type = other DNA
tattaccagcagccagggcaacaactggcaacctggattgttccaccgggccaatacttcatgatgggtgacaac

SEQ ID NO: 713887 - DNA, 75 bp, synthetic construct
  source 1..75: mol_type = other DNA
ttcattctggtggagaaatttgcttatggcattaaagatccgatctatcaaaaaacgttgatcgaaaccggtcat

SEQ ID NO: 713888 - DNA, 75 bp, synthetic construct
  source 1..75: mol_type = other DNA
ttgttgaccacttcagggctggttattctgccacaggcgttgaagctggtaattcctgggctggtaaataccatc

SEQ ID NO: 713889 - DNA, 75 bp, synthetic construct
  source 1..75: mol_type = other DNA
ttaccgggcgataaagtcacttacgatccggttgcgaaagaggtgactattcaaccgggatgcagttccggtcag

SEQ ID NO: 713890 - DNA, 75 bp, synthetic construct
  source 1..75: mol_type = other DNA
tcaatatttcatgatgggtgataaccgcgataacagcgcggacagccgttattggggctttgtgccggaagctaa

SEQ ID NO: 713891 - DNA, 75 bp, synthetic construct
  source 1..75: mol_type = other DNA
cggagattgcagaacgtcgtcgggcgatggcctggtcttttgtgcaggaacaggtacagcctagtgttgataatg

SEQ ID NO: 713892 - DNA, 75 bp, synthetic construct
  source 1..75: mol_type = other DNA
tgcagcctggtgttgataatgcctggcgtgaatcccgtggggatatcggaaaaggaatggaaagcataccttcgg

SEQ ID NO: 713893 - DNA, 75 bp, synthetic construct
  source 1..75: mol_type = other DNA
aagccctttgtttatacgaagaagataaacaaaggattgctttttaaccttgttaattctttaaaaaatttaatt

SEQ ID NO: 713894 - DNA, 75 bp, synthetic construct
  source 1..75: mol_type = other DNA
ggttacacacttcaagaactcacgcggctggctggaaacaccagacgggcaattttttaaacctgagcctagcaa

SEQ ID NO: 713895 - DNA, 75 bp, synthetic construct
  source 1..75: mol_type = other DNA
cggtaaaggaatggagagcgtaccttcgggcggtggcagccaggatattattgcagaccatcaggggcatcaggg

SEQ ID NO: 713896 - DNA, 75 bp, synthetic construct
  source 1..75: mol_type = other DNA
gctggctcaggaaagaatacctggtgctgatagtccgaaagagcttttagagaaagcaaagagttaccagcataa

SEQ ID NO: 713897 - DNA, 75 bp, synthetic construct
  source 1..75: mol_type = other DNA
ccactttcactgacgacccgtatcgggcatgcgatggtggccggctatgagatggttttcgctcagccggacagc

SEQ ID NO: 713898 - DNA, 75 bp, synthetic construct
  source 1..75: mol_type = other DNA
gatcccgccattatcctggatgatggtcaggggactcggggccggattttccagtgtgtacagccatttcgcttc

SEQ ID NO: 713899 - DNA, 75 bp, synthetic construct
  source 1..75: mol_type = other DNA
tggtgattcggccagcctggtgaatctggccaccacgtcatcgatggagaagcaacgtctggcacatgtctccat

SEQ ID NO: 713900 - DNA, 75 bp, synthetic construct
  source 1..75: mol_type = other DNA
atgcgaagcagaacggtgctccggtggtgttgtcggaagtctctcagatacagctgaaatactccgacctggcat

SEQ ID NO: 713901 - DNA, 75 bp, synthetic construct
  source 1..75: mol_type = other DNA
gcctgtaatatgttcggtatttcgaacgatatcgccatgcaggtggttgccgtcggctttatcatcggcgtattg

SEQ ID NO: 713902 - DNA, 75 bp, synthetic construct
  source 1..75: mol_type = other DNA
cgtggccaaccccgggatgtcgtgttccatagcgaccagggaagccagtatacaggccttaaatatcaacaactt

SEQ ID NO: 713903 - DNA, 75 bp, synthetic construct
  source 1..75: mol_type = other DNA
agaataaagcaaagtgtcagtcggcggggaaactgctgggataatagcccaatggaacgcttcttccgcagtctg

SEQ ID NO: 713904 - DNA, 75 bp, synthetic construct
  source 1..75: mol_type = other DNA
atccggtctcgaaagagctgacgattcaaccgggatgcagttccggccaggcgtgtgaaaacgcgctgccggtca

SEQ ID NO: 713905 - DNA, 75 bp, synthetic construct
  source 1..75: mol_type = other DNA
atggccgaggccttgttcggcgcatcccgcggagcgcgcgatgtgattcaggtggttatcgatcacaatgtggga

SEQ ID NO: 713906 - DNA, 75 bp, synthetic construct
  source 1..75: mol_type = other DNA
tagtcgtggcgagatttttcttgcactgcgtgatttaagcagcaagttggtggtggaagactcgctggagttggc

SEQ ID NO: 713907 - DNA, 75 bp, synthetic construct
  source 1..75: mol_type = other DNA
ttgatgagtgcctcgggcgaaacccggttgtacatcgatccgaagtgcaaacacctcatcgactcgctggagaag

SEQ ID NO: 713908 - DNA, 75 bp, synthetic construct
  source 1..75: mol_type = other DNA
gctgcaggatgaattaccgctgttggatcgcatcattactcatattgatcagttttttattcgccatcagaaaaa

SEQ ID NO: 713909 - DNA, 75 bp, synthetic construct
  source 1..75: mol_type = other DNA
accgctaagtaaagcggcggatatcctcttcccggttatctctgacagtatccgccagcaagcgcttccagcgta

SEQ ID NO: 713910 - DNA, 75 bp, synthetic construct
  source 1..75: mol_type = other DNA
cgtggggacgcacgtcgggcggattcttgccattatggtgaatttattcaacccacaaaaaatactgattggttc

SEQ ID NO: 713911 - DNA, 75 bp, synthetic construct
  source 1..75: mol_type = other DNA
caactggccgcacagattgcaggcgggccggatctgctggaggtgggcgaactgcccaccggcccggtgatctac

SEQ ID NO: 713912 - DNA, 75 bp, synthetic construct
  source 1..75: mol_type = other DNA
ctgacggcctgctgatccagccgctgatcggcagcctgcccaacatcatggccccggagtggttcgacggcctca

SEQ ID NO: 713913 - DNA, 75 bp, synthetic construct
  source 1..75: mol_type = other DNA
ggccttacagcttgccacgcagatcgctggaggcccggacttgctggaagtcggagaatttcctgttgggccagt

SEQ ID NO: 713914 - DNA, 75 bp, synthetic construct
  source 1..75: mol_type = other DNA
agcccgatacgcttcgtggtgtggcactgcactttgtggtgctcgatgaatttcaggatatgaagcctgacacct

SEQ ID NO: 713915 - DNA, 75 bp, synthetic construct
  source 1..75: mol_type = other DNA
tgtccgggcgcgtttactacccgttcgatcgtaacgtgcatgtaaaaccgcttcagttcaaccctcggttgccta

SEQ ID NO: 713916 - DNA, 75 bp, synthetic construct
  source 1..75: mol_type = other DNA
gacaatcgtgttgaagaacggttcggagatcgccctcaaaggtgctgataagcctgacactctgcgcggcgtagc

SEQ ID NO: 713917 - DNA, 75 bp, synthetic construct
  source 1..75: mol_type = other DNA
tttaatgcctccggtattacttggccattacctgaatcactttcagtcgcccaactcgatgccatactttatgcc

SEQ ID NO: 713918 - DNA, 75 bp, synthetic construct
  source 1..75: mol_type = other DNA
gtcagcgaatgccgatactgcactgataagcagtgccttgcggatggcgtatgaggtgcgtggtcagccgcggga

SEQ ID NO: 713919 - DNA, 75 bp, synthetic construct
  source 1..75: mol_type = other DNA
ctgatagtgatgttctgcaagccatgatttctgctaaaattgataacaatgaataccttaagcaatacgatatca

SEQ ID NO: 713920 - DNA, 75 bp, synthetic construct
  source 1..75: mol_type = other DNA
ataccgttgaacaaagtcttcttgatcaggtactcatttcagaaaaaaacatatataccgttaatggttatggca

SEQ ID NO: 713921 - DNA, 75 bp, synthetic construct
  source 1..75: mol_type = other DNA
gtcgacaaggacgaggcccggcagcaaattaatgattacatattgaactactacaacagtgtcagacctcaccat

SEQ ID NO: 713922 - DNA, 75 bp, synthetic construct
  source 1..75: mol_type = other DNA
aattcttataccgctgagtttgataagaaaaaattaaagattgtattcttagaaaaagacgcacaggcggagttc

SEQ ID NO: 713923 - DNA, 75 bp, synthetic construct
  source 1..75: mol_type = other DNA
ggactgaaatatcaacaacttctctggcgttacaggataaagcaaagtgtcagccgacggggaaactgctgggat

SEQ ID NO: 713924 - DNA, 75 bp, synthetic construct
  source 1..75: mol_type = other DNA
cgacaaggacgaggcccggcagcaaattaatgattacatattgaactactacaacagtatcagacctcaccatta

SEQ ID NO: 713925 - DNA, 75 bp, synthetic construct
  source 1..75: mol_type = other DNA
ttgttctcgacctgttcgcaagaaaaccagtgggctgggccatgtcgttctcgccggacagcaggctcaccatga

SEQ ID NO: 713926 - DNA, 75 bp, synthetic construct
  source 1..75: mol_type = other DNA
ggactatatcgttggatattacagcgcactaagaccgcacgaatataacggtgggttacccccaaacgaatcgga

SEQ ID NO: 713927 - DNA, 75 bp, synthetic construct
  source 1..75: mol_type = other DNA
actggaaaagactgtatgaagagggcttactgtatgatgaggatctccaggaatgtcaggccgttccggtagcaa

SEQ ID NO: 713928 - DNA, 75 bp, synthetic construct
  source 1..75: mol_type = other DNA
cgcacgccgcagccgtgtggaatgggaaaacagacaacgcaaaaagcaggggctggataccctgggtatggatga

SEQ ID NO: 713929 - DNA, 75 bp, synthetic construct
  source 1..75: mol_type = other DNA
gcgtgaaatctcggaagggcgcttcactgccaatcgtgaggcggtaaaacgcgaagtggagcgtcgtgtgaagga

SEQ ID NO: 713930 - DNA, 75 bp, synthetic construct
  source 1..75: mol_type = other DNA
agctcaaacattccttcctatggtgcagtccctgaagggtatgggcgctctttcagatgctgagggtaaaaaatt

SEQ ID NO: 713931 - DNA, 75 bp, synthetic construct
  source 1..75: mol_type = other DNA
gggcgtattgtgatgacctcatcggtgatgggattaatctccacaccgggtcgcggcgcttacgcagccagtaaa

SEQ ID NO: 713932 - DNA, 75 bp, synthetic construct
  source 1..75: mol_type = other DNA
aaagcgctgggcggcggtttcccggtcggtgcgttgttggcaaccgaagagtgcgcccgcgtgatgaccgttggc

SEQ ID NO: 713933 - DNA, 75 bp, synthetic construct
  source 1..75: mol_type = other DNA
atggttgcagaacaactcatctgagcttactcgtgccggagtagaccctcttgatgtggcgaaaatgtatcagca

SEQ ID NO: 713934 - DNA, 75 bp, synthetic construct
  source 1..75: mol_type = other DNA
tatcctgagcagtttgacgctgtaagaaacggcatgaaatttgtcgatgaagaccagcgttccactgtcggtaca

SEQ ID NO: 713935 - DNA, 75 bp, synthetic construct
  source 1..75: mol_type = other DNA
cagcaggagcagcaaagaattaacgaaaccattcgcaataatgacatgacgaatgcgagggctattagggggcaa

SEQ ID NO: 713936 - DNA, 75 bp, synthetic construct
  source 1..75: mol_type = other DNA
cgaagcgagccgtccgttggtgttctcgtcaacctactatcagactcgtcaaaacctgctggatatcgaaagctt

SEQ ID NO: 713937 - DNA, 75 bp, synthetic construct
  source 1..75: mol_type = other DNA
aggtgcgcagaaacagctggcgcagtatatccagcaagttgacgaccaggtaaatgaagaactggaacaagacct

SEQ ID NO: 713938 - DNA, 75 bp, synthetic construct
  source 1..75: mol_type = other DNA
gtgctgctgggcgggatgattggtgccggtgttgtgttgggccgcaacgcgttgcgtaactacaaaccgaaagca

SEQ ID NO: 713939 - DNA, 75 bp, synthetic construct
  source 1..75: mol_type = other DNA
gccagcaaagcttttttacaggggcttcgcgaactgtgtgaccgccacaacgccttgctgatttttgatgaggta

SEQ ID NO: 713940 - DNA, 75 bp, synthetic construct
  source 1..75: mol_type = other DNA
ggcgagtaagttctggcataccggcaacggttacaccaacgagccggtactgcgactggcgaaaaaattgatcga

SEQ ID NO: 713941 - DNA, 75 bp, synthetic construct
  source 1..75: mol_type = other DNA
gaaagacaacatcgcgctgcgtatgaaaaacttacaggattctctgaagacccaggaagtggtcgctcaggagca

SEQ ID NO: 713942 - DNA, 75 bp, synthetic construct
  source 1..75: mol_type = other DNA
cagaactgtaactgtcggcgggaagcttcatggcgctggggctaatgcgttctacgaaggtatcgacaacgaggg

SEQ ID NO: 713943 - DNA, 75 bp, synthetic construct
  source 1..75: mol_type = other DNA
agattcgactccttcaggagaatcacggaatcaggttggagcatatacctcaaaatcaggcattcaatttacggt

SEQ ID NO: 713944 - DNA, 75 bp, synthetic construct
  source 1..75: mol_type = other DNA
aatggagcgttcaggtcgcaataacatcggccttcaggcgttgcagggactgggtagtgtcgctcaaacatatca

SEQ ID NO: 713945 - DNA, 75 bp, synthetic construct
  source 1..75: mol_type = other DNA
ccatgatggggggtgatgcatttagcaagtggattggaaacaatgcaaccagattgtctaatcagggggtagacc

SEQ ID NO: 713946 - DNA, 75 bp, synthetic construct
  source 1..75: mol_type = other DNA
tacaaagagggccaggaatgtacttctgtcaccagtcctgaccaaggtcctttcgcccgggatgttaggttgaat

SEQ ID NO: 713947 - DNA, 75 bp, synthetic construct
  source 1..75: mol_type = other DNA
gaaagttttggcagaggatttgaaaacatttgtgaagcattagcattaattgcaaaaaatcatgacgatgtacag

SEQ ID NO: 713948 - DNA, 75 bp, synthetic construct
  source 1..75: mol_type = other DNA
aaatccacaaggtttcacagagtttgttgatcaccttggaatggctgctcttggtccagaacaatattttcaggc

SEQ ID NO: 713949 - DNA, 75 bp, synthetic construct
  source 1..75: mol_type = other DNA
tggcgcgggaagatgcttccccctgtttacgtttgggcgcgtttgaaatccgccgctatcagtcgcaactgtggt

SEQ ID NO: 713950 - DNA, 75 bp, synthetic construct
  source 1..75: mol_type = other DNA
aagctgaagaaaatctggcaagagctgggcgtgccgccatggctacgtgacaccacgccactgctgttttatggc

SEQ ID NO: 713951 - DNA, 75 bp, synthetic construct
  source 1..75: mol_type = other DNA
atgaaaggggcggttgggaataatgagcgcacagttcaactagcagacggaagaactgtaaccgtaggcgggaaa

SEQ ID NO: 713952 - DNA, 75 bp, synthetic construct
  source 1..75: mol_type = other DNA
ctggcgtcatcctgaacacgctcaaccagaagcgtaatgaggcggttggtaagtacgttcagcaaaacggtatca

SEQ ID NO: 713953 - DNA, 75 bp, synthetic construct
  source 1..75: mol_type = other DNA
cggcagcaatctcaacctgcacaggtatcacagccagcagccagcagtaacttttcttcactatggggtgattaa

SEQ ID NO: 713954 - DNA, 75 bp, synthetic construct
  source 1..75: mol_type = other DNA
ggcgctggggctaatgcgttctacgaaggcatcgacaacgaggggaatatggttcgcgttcctgccagttcaatc

SEQ ID NO: 713955 - DNA, 75 bp, synthetic construct
  source 1..75: mol_type = other DNA
agcggcacaaaagcagctggcgcaatacattcagcaggtagacgaacaaacggcgaaggaacttgcgctcgacct

SEQ ID NO: 713956 - DNA, 75 bp, synthetic construct
  source 1..75: mol_type = other DNA
cggtgccttaccgcttggcgataccccaactgggcgcacttacgatgtaagcgtcttgaataaattggctggggt

SEQ ID NO: 713957 - DNA, 75 bp, synthetic construct
  source 1..75: mol_type = other DNA
tgaaatactctgacctggtgtccacagccggatatatctccgtcatgattcctccgttgtcatgggtgatgataa

SEQ ID NO: 713958 - DNA, 75 bp, synthetic construct
  source 1..75: mol_type = other DNA
ctcatgctgaatgggggattaaacctgaaattcttggcgtcggtggtggattaggcgtcagagggggattcaagg

SEQ ID NO: 713959 - DNA, 75 bp, synthetic construct
  source 1..75: mol_type = other DNA
gctggttattgaacgtcggcacggtagaacttgattctgcttgtctggcgaaattgccgcagacggagcaatcgc

SEQ ID NO: 713960 - DNA, 75 bp, synthetic construct
  source 1..75: mol_type = other DNA
gagcaattatctgtccgggctatcgcacagcagttaagactcagttattcccccattcacaatctctttcaacga

SEQ ID NO: 713961 - DNA, 75 bp, synthetic construct
  source 1..75: mol_type = other DNA
tcaacaaagcacttgagcgtttttattttcgcttaagtgcatcaggcgttcatgctgaacgtgcagcccgtgact

SEQ ID NO: 713962 - DNA, 75 bp, synthetic construct
  source 1..75: mol_type = other DNA
acatggcctctgctgtacgccattctgaacagtgccatgacattctatgcgaagcagaacggtgccccggtggtg

SEQ ID NO: 713963 - DNA, 75 bp, synthetic construct
  source 1..75: mol_type = other DNA
agaatgcccggggctgacagtccacaggaactgatgaaaagggcaaaggaatatcaggataagtataagcaataa

SEQ ID NO: 713964 - DNA, 75 bp, synthetic construct
  source 1..75: mol_type = other DNA
gtggggaatggttacggaataacctgaatgccatcgctgcctttatgagtacccggacgtgggattccattgaaa

SEQ ID NO: 713965 - DNA, 75 bp, synthetic construct
  source 1..75: mol_type = other DNA
cgtcatgatatcgatgccagagctacacaagactttaaagaggccagcgattactttaccagtcgcaaggtcagt

SEQ ID NO: 713966 - DNA, 75 bp, synthetic construct
  source 1..75: mol_type = other DNA
caagtattgactggagtgatgaggatgcgcatcaggccagcagtggttcacgggccagccatgatgcccgtcatg

SEQ ID NO: 713967 - DNA, 75 bp, synthetic construct
  source 1..75: mol_type = other DNA
ggttgataatatggtcacagaatatcggggcaatatcggagatactcagaacagcatccgcggcgaggaaaatat

SEQ ID NO: 713968 - DNA, 75 bp, synthetic construct
  source 1..75: mol_type = other DNA
gcaggaaccgtcactggtggatgcagagctggactggcaggaaaatagcgggcaattgattgtgctggcacggga

SEQ ID NO: 713969 - DNA, 75 bp, synthetic construct
  source 1..75: mol_type = other DNA
tcaataaagcacttgagcgctttcattttcgcttaagcgcatcaggcactcatgctgaacgcgcagctcaagagt

SEQ ID NO: 713970 - DNA, 75 bp, synthetic construct
  source 1..75: mol_type = other DNA
atgggcaaagaatataaaactctcataaacaaagcacttgagcgtttttattttcgcttaagtgcatcaggtact

SEQ ID NO: 713971 - DNA, 75 bp, synthetic construct
  source 1..75: mol_type = other DNA
cgctctggtcagcggacgactgagtgtgctgacccaggggcaagcgggtaaaggcaacgcggtgcttaattttgg

SEQ ID NO: 713972 - DNA, 75 bp, synthetic construct
  source 1..75: mol_type = other DNA
ccgccattatttcccagccggatgcggcgcagattaccacatacgcgaatgcactgaatatcctttatggtagtg

SEQ ID NO: 713973 - DNA, 75 bp, synthetic construct
  source 1..75: mol_type = other DNA
attaacgttaatggcccggggctacggcgctggcatggcactatcttccaacacaattaccgctggcggtgctgc

SEQ ID NO: 713974 - DNA, 75 bp, synthetic construct
  source 1..75: mol_type = other DNA
ttaataaagcacttgagcgctttcattttcgcttaaacacgtcaggcccccacgctgaacacgcagcccatgatt

SEQ ID NO: 713975 - DNA, 75 bp, synthetic construct
  source 1..75: mol_type = other DNA
attatcaccatgaagagaatatttttacgttatggcgcagtttacgctttggcgataatctccaggtatggctgg

SEQ ID NO: 713976 - DNA, 75 bp, synthetic construct
  source 1..75: mol_type = other DNA
gtgaagcgaaacaggcggacctcattttatatgcccgtttacctgcgcagctaagtggaagtctgactgacccaa

SEQ ID NO: 713977 - DNA, 75 bp, synthetic construct
  source 1..75: mol_type = other DNA
cgatggagcctggcatctggggactcgcggccccgttacgttgcgaattgccgaagtgattaatctggtgacagc

SEQ ID NO: 713978 - DNA, 75 bp, synthetic construct
  source 1..75: mol_type = other DNA
ggcgataatctccaggcgtggctggaacagaatgcccgtatcccggaaaatgactgcccgtcaggaaaagaatgt

SEQ ID NO: 713979 - DNA, 75 bp, synthetic construct
  source 1..75: mol_type = other DNA
cggcgacctgtgtcattacgtattgctgaagtggttaacctggtgacggcaaaaaatattactgccgatcttcag

SEQ ID NO: 713980 - DNA, 75 bp, synthetic construct
  source 1..75: mol_type = other DNA
cgttgatgttttgggcggtaacgtactaatgaaacaattgcgtatgccgcagcacgacccagcgttgctacgcct

SEQ ID NO: 713981 - DNA, 75 bp, synthetic construct
  source 1..75: mol_type = other DNA
tgccgtaagtgaattttctttgaggtatgctatatatgtacggaaaggatttaaaatagttcttcatcatgttaa

SEQ ID NO: 713982 - DNA, 75 bp, synthetic construct
  source 1..75: mol_type = other DNA
atcagcctgaagacccgtaacgccatcattttctctccacacccgcgtgcaaaagatgcaactaacaaagctgct

SEQ ID NO: 713983 - DNA, 75 bp, synthetic construct
  source 1..75: mol_type = other DNA
cggtgtaatctgtgcttctgaacagtctgttgttgttgttgactctgtttatgacgcagtacgtgaacgtttcgc

SEQ ID NO: 713984 - DNA, 75 bp, synthetic construct
  source 1..75: mol_type = other DNA
tcgtgactgaccgcttcctgttcaacaatggttatgctgatcagatcacttccgtactgaaagcagcaggcgttg

SEQ ID NO: 713985 - DNA, 75 bp, synthetic construct
  source 1..75: mol_type = other DNA
cgaaaatgggcgtcaaagcaaaaatgatcgcggtgaccaccacttccggtaccggttcagaagttacgccgtttg

SEQ ID NO: 713986 - DNA, 75 bp, synthetic construct
  source 1..75: mol_type = other DNA
tttgggtggtggttccccgatggatgccgcgaagatcatgtgggtcatgtacgagcatccggaaactcacttcga

SEQ ID NO: 713987 - DNA, 75 bp, synthetic construct
  source 1..75: mol_type = other DNA
caacggttatgcagaccagataacctctgtgctgaaagccgctggcgttgaaacggaagtcttctttgaagttga

SEQ ID NO: 713988 - DNA, 75 bp, synthetic construct
  source 1..75: mol_type = other DNA
catttatgcattttgctttgatggcgaatgttacatcaaacgacttcaaaaaattggaagcaagatcatggtctt

SEQ ID NO: 713989 - DNA, 75 bp, synthetic construct
  source 1..75: mol_type = other DNA
aatcagtacaatactggactacaggaaagacgtttcccagaagcgataaacttgcacaactatcagtaattagtg

SEQ ID NO: 713990 - DNA, 75 bp, synthetic construct
  source 1..75: mol_type = other DNA
gttggaaatcgggcattcaaaaatatagaaataggtaacgccagaggagacagtatggctcccacaatctcacct

SEQ ID NO: 713991 - DNA, 75 bp, synthetic construct
  source 1..75: mol_type = other DNA
tccgtactgaaagcggctggcgttgaaactgaagtcttcttcgaagtagaagctgacccaaccctgagcatcgtg

SEQ ID NO: 713992 - DNA, 75 bp, synthetic construct
  source 1..75: mol_type = other DNA
aacccacggcggctatctgttgcagggtaaagagctgaaagctgttcaggatgttatcctgaaaaacggtgcgct

SEQ ID NO: 713993 - DNA, 75 bp, synthetic construct
  source 1..75: mol_type = other DNA
caacaatcaacgaagtgatcgcccgacgaatggccaaaaagcagcagatgcagtggagtagaaagggcgcgcatt

SEQ ID NO: 713994 - DNA, 75 bp, synthetic construct
  source 1..75: mol_type = other DNA
tggaagcttacgtttccgtactggcatctgagttctccgacggccaggccctgcaggcactgaaactgctgaaag

SEQ ID NO: 713995 - DNA, 75 bp, synthetic construct
  source 1..75: mol_type = other DNA
ttgagttgaaggaacgttcagcaaaaattaaagaactaaaaaattattctattacacctcatgctgcttcattca

SEQ ID NO: 713996 - DNA, 75 bp, synthetic construct
  source 1..75: mol_type = other DNA
ggcaaaaaacctgaaggttatttcaaaatatggcgtagggttagataacatagatgtcgattacgcaaatagtaa

SEQ ID NO: 713997 - DNA, 75 bp, synthetic construct
  source 1..75: mol_type = other DNA
ggccttttgtgggtaaaggcaaggtctatattgataagttaaaatccgcaggttatcaagttgaatgtaataaca

SEQ ID NO: 713998 - DNA, 75 bp, synthetic construct
  source 1..75: mol_type = other DNA
caaacaccatgcgaaacatcacgctcaaaaacacaactccagcacattagactggctgaaggcctatacaatacc

SEQ ID NO: 713999 - DNA, 75 bp, synthetic construct
  source 1..75: mol_type = other DNA
tggctattccgggatggcagtttctgacacagccatcaccggaggagcagcattttacctggggggatggttgta

SEQ ID NO: 714000 - DNA, 75 bp, synthetic construct
  source 1..75: mol_type = other DNA
tgaaatatatcagtacagcgatgtaatttctctgcatttacctttactggacagtactcgcaatataattaacga

SEQ ID NO: 714001 - DNA, 75 bp, synthetic construct
  source 1..75: mol_type = other DNA
cttcctgggtgtatgtcactcaatggcgcacaaactgggctcccagttccatattccgcacggactggccaacgc

SEQ ID NO: 714002 - DNA, 75 bp, synthetic construct
  source 1..75: mol_type = other DNA
cttccgaaatctatctacttccgtcgtggctctctgccaatcgcactggatgaagtgattaccgatggtcacaaa

SEQ ID NO: 714003 - DNA, 75 bp, synthetic construct
  source 1..75: mol_type = other DNA
caaatcgctgatcagccttaagacgcgtaacggcatcatcttctctccacatccacgagcaaaaaattccaccaa

SEQ ID NO: 714004 - DNA, 75 bp, synthetic construct
  source 1..75: mol_type = other DNA
tacattaataaaagccagattcctgactatataatacttaaatcactggatgaaatatatcagtgtagcgatatc

SEQ ID NO: 714005 - DNA, 75 bp, synthetic construct
  source 1..75: mol_type = other DNA
cgaaaatgggtgtgaaagcgaaaatgatcgctgtcaccaccacttctggtacaggttctgaagtcactccgtttg

SEQ ID NO: 714006 - DNA, 75 bp, synthetic construct
  source 1..75: mol_type = other DNA
actgatggccacaaacgtgcgctcattgtgactgaccgcttcctgttcaacaatggttatgctgatcagatcact

SEQ ID NO: 714007 - DNA, 75 bp, synthetic construct
  source 1..75: mol_type = other DNA
tcaaatcataagtcagttgatgttatatgttatcgtggcaccgaagtatttggagccatgttagattgtgaaccc

SEQ ID NO: 714008 - DNA, 75 bp, synthetic construct
  source 1..75: mol_type = other DNA
aactgccgctcgccgcgctggtgcctcccgttaaacacgcagggcaatgcgcagagcgctcaccgcgcgtatgcc

SEQ ID NO: 714009 - DNA, 75 bp, synthetic construct
  source 1..75: mol_type = other DNA
ctttcaccgaacagctgcaagaggctgatggactgatagtcgctacgcctgtgtataaagccgcctattccgggg

SEQ ID NO: 714010 - DNA, 75 bp, synthetic construct
  source 1..75: mol_type = other DNA
cgtttcgacagcccggctctgaaaactttcactgcacaactgcaagaggctgacgggctgattgtcgcgaccccc

SEQ ID NO: 714011 - DNA, 75 bp, synthetic construct
  source 1..75: mol_type = other DNA
caaaataaaggacaaattacccttgacggggttgctatgcagcaactggatccctgttttgttcgggataaggtt

SEQ ID NO: 714012 - DNA, 75 bp, synthetic construct
  source 1..75: mol_type = other DNA
atattagaccgcatattagaaccagatctttctttaaaaatggtcaagcatatagtggagatgtttcttactacg

SEQ ID NO: 714013 - DNA, 75 bp, synthetic construct
  source 1..75: mol_type = other DNA
gatcgatatgagttcaatcgctccgctggcaagtcgtgaaatcagcgaagcactgaaagcgaaaggtattgatat

SEQ ID NO: 714014 - DNA, 75 bp, synthetic construct
  source 1..75: mol_type = other DNA
ggcgagtgtgactatgacgcgtttgacgatgcgtaccgtggcgaggcggaaagcgaggaagcctacgcacaggag

SEQ ID NO: 714015 - DNA, 75 bp, synthetic construct
  source 1..75: mol_type = other DNA
atgacgagctgaaaagccgctcttatgccgcactggaaaagctgggcgtaacgccgtccgaggttctgcgccaaa

SEQ ID NO: 714016 - DNA, 75 bp, synthetic construct
  source 1..75: mol_type = other DNA
cggatccgggatgagggacaggctcgaatccggggagacagggaaacactgcatgcagcgaccggttataccgac

SEQ ID NO: 714017 - DNA, 75 bp, synthetic construct
  source 1..75: mol_type = other DNA
cgctgaaaaccctccttgacctgctacctgaacgggctctgcaaggcaaagtggtactgccgctggcgacaggcg

SEQ ID NO: 714018 - DNA, 75 bp, synthetic construct
  source 1..75: mol_type = other DNA
cccgtcttgataccgcgctagaaactttctggcaggcattgcaccgccgcgatgttcaggttcctgaccttctgt

SEQ ID NO: 714019 - DNA, 75 bp, synthetic construct
  source 1..75: mol_type = other DNA
atgaggtgccggagccgttgcgcagctatttcgattttgaagcctgggcgcgtgacctgttcagcagcggctatg

SEQ ID NO: 714020 - DNA, 75 bp, synthetic construct
  source 1..75: mol_type = other DNA
acagataggtaacgcagttcctgtccggttaggtaaagttgcaggggaagctgctatggaacttcttcatcgtat

SEQ ID NO: 714021 - DNA, 75 bp, synthetic construct
  source 1..75: mol_type = other DNA
taggtattcgctcaacgcgttttgagtctgcgaattcttatctcgattggggtaatgaactgaaggaacccgcct

SEQ ID NO: 714022 - DNA, 75 bp, synthetic construct
  source 1..75: mol_type = other DNA
gtgtcagcacattattacgggctcacgggcgtctgacctgtggggttctggcagagaaaatgcaaatgccaccct

SEQ ID NO: 714023 - DNA, 75 bp, synthetic construct
  source 1..75: mol_type = other DNA
attcgtgcaagagtggtcttaagttctttgaagctggaattttaaatgtaccatcaattgtttcaccaatccctg

SEQ ID NO: 714024 - DNA, 75 bp, synthetic construct
  source 1..75: mol_type = other DNA
atgctgttgcgtgaggaaggaatgacgatccatgtgcgggtcacctgggagaaaggtgatgccgcacgatttgta

SEQ ID NO: 714025 - DNA, 75 bp, synthetic construct
  source 1..75: mol_type = other DNA
tcttgatggcgaaccgttgagtgggcaaaactttcatattgaaatacttccggcggcgttgcgttgtcgattacc

SEQ ID NO: 714026 - DNA, 75 bp, synthetic construct
  source 1..75: mol_type = other DNA
accgctggccagcaggccaaactgatgttccacaatcacttccattcgtgaatgctgagaaatctatctcagaag

SEQ ID NO: 714027 - DNA, 75 bp, synthetic construct
  source 1..75: mol_type = other DNA
gcatgagctggatgaagtgggcgttgtcggcttcaaatgcttcgttgcgacctgtggcgatcgcggtatcgacaa

SEQ ID NO: 714028 - DNA, 75 bp, synthetic construct
  source 1..75: mol_type = other DNA
cggagtatgacatgaccggtgcatggttttaccgggttctgtggcggttcagggcctattacgggcaggtcattc

SEQ ID NO: 714029 - DNA, 75 bp, synthetic construct
  source 1..75: mol_type = other DNA
agcaactgaatactgttctgctggtcattctgggaacttatcttattcataatgatgacccacataaccgaatca

SEQ ID NO: 714030 - DNA, 75 bp, synthetic construct
  source 1..75: mol_type = other DNA
cctcgatggtctattttctgcgtgatgcggttgatgcaggcgtgctgacggaatgtaacggtttttatgatattc

SEQ ID NO: 714031 - DNA, 75 bp, synthetic construct
  source 1..75: mol_type = other DNA
tgtaactggtcaacgatggatgaccgcagcaatgaacgcattaaaggttagtcgcccagctaacatgagtgctat

SEQ ID NO: 714032 - DNA, 75 bp, synthetic construct
  source 1..75: mol_type = other DNA
ctatatatagctcagccagtacacgtgccggaggaaatgaatctggcacgcgcacagaaagatgtgggttttaat

SEQ ID NO: 714033 - DNA, 75 bp, synthetic construct
  source 1..75: mol_type = other DNA
acattggtgagccttctgtcctgaaccgtgcaggtggtgcgccgacgctggcggtaggtatcgctcacgtgttcc

SEQ ID NO: 714034 - DNA, 75 bp, synthetic construct
  source 1..75: mol_type = other DNA
ataaatggctttttatataacctacgtaactttaactatgcactatatgaaacagccacaaagaacaaaagcaaa

SEQ ID NO: 714035 - DNA, 75 bp, synthetic construct
  source 1..75: mol_type = other DNA
gaccaactgaataaagagacaacttttgcgcttgatgccgatggcaatatcacgctggatgaaaatcagggaagc

SEQ ID NO: 714036 - DNA, 75 bp, synthetic construct
  source 1..75: mol_type = other DNA
ataggctttaacccgctatttatcgccatgggattttttgatcttattggtgctttttttctggtcacttttatt

SEQ ID NO: 714037 - DNA, 75 bp, synthetic construct
  source 1..75: mol_type = other DNA
gcttcttctacatggcaagccagtacaaagagaagattgctaacggtactgacctgacggcgcagcagattgcca

SEQ ID NO: 714038 - DNA, 75 bp, synthetic construct
  source 1..75: mol_type = other DNA
aaaaaaccgactctctggttgccggtatcatcggtactgcgggctgtgtgggtctgtggggctacctgctgtatc

SEQ ID NO: 714039 - DNA, 75 bp, synthetic construct
  source 1..75: mol_type = other DNA
atgaaacgtgcggcagcacagagtgcggcgctgtccggtctgttccagccgtacagtgtgggtaaattcaacgcc

SEQ ID NO: 714040 - DNA, 75 bp, synthetic construct
  source 1..75: mol_type = other DNA
gtcgatgtgttgcgtcctgatggtcgtcatcgcaccaaaaaattcgctaacaccactaaagggcacgatgagctg

SEQ ID NO: 714041 - DNA, 75 bp, synthetic construct
  source 1..75: mol_type = other DNA
tatccgcaacgcggaaggtcagcgacgctggcgctgccggaattctgaacccgatgccggaaaggtgcttaatac

SEQ ID NO: 714042 - DNA, 75 bp, synthetic construct
  source 1..75: mol_type = other DNA
atgagcaagaaatttacaaagactattctttcatctgctgttgccggactgatgctggtgagttctggggccatg

SEQ ID NO: 714043 - DNA, 75 bp, synthetic construct
  source 1..75: mol_type = other DNA
ccgtacagtgtgggtaaattcaacgccacggcagccctgggtggttacagtgacaaacaggctgtggctgttggt

SEQ ID NO: 714044 - DNA, 75 bp, synthetic construct
  source 1..75: mol_type = other DNA
tccatcggcagtgggacagaggcaagctgttgcacaaataattggagaaatgcatcggtatagcattaatgtccc

SEQ ID NO: 714045 - DNA, 75 bp, synthetic construct
  source 1..75: mol_type = other DNA
atggcagagccagcatgggctgtaatgagcttttgggtgccattatatcttgcaaaagcatatggcatggacctt

SEQ ID NO: 714046 - DNA, 75 bp, synthetic construct
  source 1..75: mol_type = other DNA
cacacagataaccgccgacggtgatctacaggtgaacggttatgctgaaaacacctatgtggatagtggcggact

SEQ ID NO: 714047 - DNA, 75 bp, synthetic construct
  source 1..75: mol_type = other DNA
ctaactgactctacgatcacaggcccctacgcttatagctacgttggcgatggcgggcaaaccaatcacatcacc

SEQ ID NO: 714048 - DNA, 75 bp, synthetic construct
  source 1..75: mol_type = other DNA
tggaaagaattcgcgcatggttctatcgtcaaccatccgcacaacagcaaaagataaaaaagtacggaacaattt

SEQ ID NO: 714049 - DNA, 75 bp, synthetic construct
  source 1..75: mol_type = other DNA
ttccggattcatacgatgctccggatccgcgcattaaacagctggcgcgccgcagtacagttacgccgggtgggg

SEQ ID NO: 714050 - DNA, 75 bp, synthetic construct
  source 1..75: mol_type = other DNA
ctgactaactccaccatcactggtccctatgcctatagctacgttggcgatggtgggcaaaccaatcacatcacg

SEQ ID NO: 714051 - DNA, 75 bp, synthetic construct
  source 1..75: mol_type = other DNA
ctggccattactgcgcgtgctggcgctcatttctaccgcgcccattttgagcgaacgcagcgtgccgaaacgggt

SEQ ID NO: 714052 - DNA, 75 bp, synthetic construct
  source 1..75: mol_type = other DNA
cgttaattgcgcctttttgcgaacatttattcagtgagatttttaatttgctggctgatattattagtgaattgc

SEQ ID NO: 714053 - DNA, 75 bp, synthetic construct
  source 1..75: mol_type = other DNA
tgctgttgttcctgacatttaacggccatttatggttgatttcgctgctggtcgatacgtttcacactctgccta

SEQ ID NO: 714054 - DNA, 75 bp, synthetic construct
  source 1..75: mol_type = other DNA
ttatgctggcattaccgcttattaccctgctgctgacgctgaatctggcgctgggattgcttaatcgtatggctc

SEQ ID NO: 714055 - DNA, 75 bp, synthetic construct
  source 1..75: mol_type = other DNA
gcattgcgcttggttttaccatgcaatttgcctttgccgctgtgcgaaccgctggcgaaattatcggtctgcaaa

SEQ ID NO: 714056 - DNA, 75 bp, synthetic construct
  source 1..75: mol_type = other DNA
acccagaagctattgctgaagtgattgctgcaggtgcagaaacagcctctacggctaaagcgatcgctgaacagt

SEQ ID NO: 714057 - DNA, 75 bp, synthetic construct
  source 1..75: mol_type = other DNA
tatcagaccttcgatttttggaattttagcggtacctggtcaatatcagtggaattgtttttttatgccctgttt

SEQ ID NO: 714058 - DNA, 75 bp, synthetic construct
  source 1..75: mol_type = other DNA
ggttccggcattaaagcaggatcgtatttgcctgtttaccgtcagcgatgacggtcatctggtggcgcaggaccc

SEQ ID NO: 714059 - DNA, 75 bp, synthetic construct
  source 1..75: mol_type = other DNA
gcgtcctggcgtatcgtatcgccccggacgatggcgcgctgacctttgctgcagagtctgcgctgccggggagcc

SEQ ID NO: 714060 - DNA, 75 bp, synthetic construct
  source 1..75: mol_type = other DNA
aggattacataggacaccacctgaataaccttcagctggacctgcgtacattctcgctggtggatccacataacc

SEQ ID NO: 714061 - DNA, 75 bp, synthetic construct
  source 1..75: mol_type = other DNA
tgggtctgcctgcactgcgtgtggttccgtctgcggacgtgaacgtaacgctgtctatggcattgggcgtattta

SEQ ID NO: 714062 - DNA, 75 bp, synthetic construct
  source 1..75: mol_type = other DNA
gaagaggctgtaagagctttgattaaaatgaataaaattgaaagtagaattgagcagattaaaaaagtgacagag

SEQ ID NO: 714063 - DNA, 75 bp, synthetic construct
  source 1..75: mol_type = other DNA
atccggctggagaaagcgggcttgctgtacaagatttgccagaactttgccaagatcgacctgcacccggacgtg

SEQ ID NO: 714064 - DNA, 75 bp, synthetic construct
  source 1..75: mol_type = other DNA
acgagatcaacttcaaccgcttcttctaccagtaccagcctccgcgcaagctgcatgatattgatgaagacctga

SEQ ID NO: 714065 - DNA, 75 bp, synthetic construct
  source 1..75: mol_type = other DNA
atcatctgttccccgtaatatgcacttcacaatgactgacggtagtaaatgggtagtgcctacgatcgtgatcgc

SEQ ID NO: 714066 - DNA, 75 bp, synthetic construct
  source 1..75: mol_type = other DNA
tgccggggcaggtgcagccgatggtggtcagcccggacaaacgttacctctacgttggtgtccgtccggagtttc

SEQ ID NO: 714067 - DNA, 75 bp, synthetic construct
  source 1..75: mol_type = other DNA
agagggcttccagccaactgaaacccagccgcgcggctttaacgtcgatcacagcggcaagtacctgattgctgc

SEQ ID NO: 714068 - DNA, 75 bp, synthetic construct
  source 1..75: mol_type = other DNA
cggcgcgtggtgaccttcagacccggacagaagttaaagagccgtgtcgaaaacgcttcgcccaaagacgagtaa

SEQ ID NO: 714069 - DNA, 75 bp, synthetic construct
  source 1..75: mol_type = other DNA
atgtaggactgcctccctgttttattgcccgaaggccctttctcacgcgaacaggcggttggcgtcacaacagct

SEQ ID NO: 714070 - DNA, 75 bp, synthetic construct
  source 1..75: mol_type = other DNA
accacgctggagttcacaccagctgaagtggcggcacaacgtcaggcatggattagcgaatggcaacgcgccgtc

SEQ ID NO: 714071 - DNA, 75 bp, synthetic construct
  source 1..75: mol_type = other DNA
gctgccagcaagcagccggagctggcgcaaaaattcctccagtttatggtttctccggcttttcagaatgcgatc

SEQ ID NO: 714072 - DNA, 75 bp, synthetic construct
  source 1..75: mol_type = other DNA
cccggcgtaccgtcagaatttaaggtgatggtcgagcacgaaatcctgccgcgcctgcgcgagcgtttttcttta

SEQ ID NO: 714073 - DNA, 75 bp, synthetic construct
  source 1..75: mol_type = other DNA
tgttgctgtgcacagcgcccgtttttgcgaaacctgttctgaccgtctatacctacgactccttcgctgccgact

SEQ ID NO: 714074 - DNA, 75 bp, synthetic construct
  source 1..75: mol_type = other DNA
ccggcggctggaataatgacactttcgtaccgtttgattacggctatttcgccttcgtctatgacaagaacaaac

SEQ ID NO: 714075 - DNA, 75 bp, synthetic construct
  source 1..75: mol_type = other DNA
tggcgggtgatttatgaagatccgcgcaccagtacgccggggctgggtctgctgttgtggatgcaaaaagtctat

SEQ ID NO: 714076 - DNA, 75 bp, synthetic construct
  source 1..75: mol_type = other DNA
atgtgggactgtccccctgttttattgcccgaaggccctttctcacgcgaacaggcggttggcgtcacaacagct

SEQ ID NO: 714077 - DNA, 75 bp, synthetic construct
  source 1..75: mol_type = other DNA
atgtcggactgactccctgttttattgcccgaaggccctttctcacgcgaacaggcggttggcgtcacaacagct

SEQ ID NO: 714078 - DNA, 75 bp, synthetic construct
  source 1..75: mol_type = other DNA
atgttggactgccgccctgttttattgcccgaaggccctttctcacgcgaacaggcggttggcgtcacaacagct

SEQ ID NO: 714079 - DNA, 75 bp, synthetic construct
  source 1..75: mol_type = other DNA
gcacgaaggctggctggcggagatggagcgctatttccgcgaacgtggtcggataatggcgccgagcaatcgtaa

SEQ ID NO: 714080 - DNA, 75 bp, synthetic construct
  source 1..75: mol_type = other DNA
tgcccgaaggccctttctcacgcgaacaggcgatggctgtcacaacagcttaccgcaatgtgtttactgaagatg

SEQ ID NO: 714081 - DNA, 75 bp, synthetic construct
  source 1..75: mol_type = other DNA
gcgatctggttatctgccgtcaggtggttgagaaggaagctcaggagcaaggcaaaccactggaggcgcactggg

SEQ ID NO: 714082 - DNA, 75 bp, synthetic construct
  source 1..75: mol_type = other DNA
acgttgaagaccggtattgatgaactggacgcaaaaacaggcggcatggagcccggcgacctggtatttattgcg

SEQ ID NO: 714083 - DNA, 75 bp, synthetic construct
  source 1..75: mol_type = other DNA
ttgcccgttttgaagacgaagactgggcacgtttctcacagggcgtgggacgaatgacggggcgtaatatctgga

SEQ ID NO: 714084 - DNA, 75 bp, synthetic construct
  source 1..75: mol_type = other DNA
gtgtaatgatatgccggaacttgccccggtgattactgataccgggcgcaaaacctgggtgaagtcgtcactgga

SEQ ID NO: 714085 - DNA, 75 bp, synthetic construct
  source 1..75: mol_type = other DNA
tcgcctctcacgatggcatcgggctaaacccgctacggggcttgttgcctgaaagcgaaatattagagctggtcg

SEQ ID NO: 714086 - DNA, 75 bp, synthetic construct
  source 1..75: mol_type = other DNA
gcaactcggtgaatgcagtcatttaatgtttgattttgtctgcaaccatatgtcggcaaaaagtgaatggtttaa

SEQ ID NO: 714087 - DNA, 75 bp, synthetic construct
  source 1..75: mol_type = other DNA
atgacaacaccagtctggcgtaacgatgatctggaaggcgctgtcattggcgcgttctttctgcgtggggcagat

SEQ ID NO: 714088 - DNA, 75 bp, synthetic construct
  source 1..75: mol_type = other DNA
tgcttccggaagtggttgagcgtgttgaatgccggaatcaggggctggagaaatccaggacgttgatgaccggta

SEQ ID NO: 714089 - DNA, 75 bp, synthetic construct
  source 1..75: mol_type = other DNA
gctcgtccttcgatgggtaaaaccgaactggcgctggatatcatcgacaaggtgactgagcaggggcatggtgtt

SEQ ID NO: 714090 - DNA, 75 bp, synthetic construct
  source 1..75: mol_type = other DNA
ttctggccacactaccggcggaggttttttctgttcgaccgtaccgggatatctacagaggcatctgcagacagg

SEQ ID NO: 714091 - DNA, 75 bp, synthetic construct
  source 1..75: mol_type = other DNA
acgagcgtatagggatatctacacaggcatctgccgacaggctcgtgtttcaggtgtgattgatcctgtgctgct

SEQ ID NO: 714092 - DNA, 75 bp, synthetic construct
  source 1..75: mol_type = other DNA
tgaatgccggaatcaggggctggagaaatccaggacgttgatgaccggtattgatgagctggacgcaaaaacagg

SEQ ID NO: 714093 - DNA, 75 bp, synthetic construct
  source 1..75: mol_type = other DNA
aggggcttaaaggcctggcaaaatccggcggattaccggtggttgcgctgagccagctttcccgtggtgtggagt

SEQ ID NO: 714094 - DNA, 75 bp, synthetic construct
  source 1..75: mol_type = other DNA
tcgcgtctcatgatggtattggacttaacccactgcgaggcttgttgcctgaaagcgagatattagcgctagtcg

SEQ ID NO: 714095 - DNA, 75 bp, synthetic construct
  source 1..75: mol_type = other DNA
attacagaatttacgtgatgcgcatacctgtgaagcagccgaggatgctctgaaggatgctcaaaacatgatggc

SEQ ID NO: 714096 - DNA, 75 bp, synthetic construct
  source 1..75: mol_type = other DNA
ttgaagatgaagactgggcgcgtttctcacaaggggtggggcggatgaccgggcgcaatatctggatggtggacc

SEQ ID NO: 714097 - DNA, 75 bp, synthetic construct
  source 1..75: mol_type = other DNA
attgctctgagccagctctcccgcggcgtggaatccagacccaataaacgtcccatgaactcagacctgaaaaac

SEQ ID NO: 714098 - DNA, 75 bp, synthetic construct
  source 1..75: mol_type = other DNA
aattcgccgttacagcgatacgcgacgcctgcatccgctctccagcaaaaacctgtcgctggaaagtgctatcga

SEQ ID NO: 714099 - DNA, 75 bp, synthetic construct
  source 1..75: mol_type = other DNA
agcaactggctgactacttccgctcgcgcggtaaaaacgtccagtcacgccatcgtacgctggaaaaacgtaaac

SEQ ID NO: 714100 - DNA, 75 bp, synthetic construct
  source 1..75: mol_type = other DNA
agatggcgaacatccagattggtgaacgtatggtgtctgctgccgggggaatgccggtatcccgtcttaagtctg

SEQ ID NO: 714101 - DNA, 75 bp, synthetic construct
  source 1..75: mol_type = other DNA
gcgtggaatccagacccaataaacgtcccatgaactcagacctgaaaaactccggggaaatcgaggctgatgccg

SEQ ID NO: 714102 - DNA, 75 bp, synthetic construct
  source 1..75: mol_type = other DNA
cgcccatgcgattttgttaagtttccccggtgtgccagcgatatatattcaaagcattctggggtcgcgtaatga

SEQ ID NO: 714103 - DNA, 75 bp, synthetic construct
  source 1..75: mol_type = other DNA
cacatttaatcagttttaccatcaatggctgcaaagcattttttcacatgttcatttgttaccgttttatccatg

SEQ ID NO: 714104 - DNA, 75 bp, synthetic construct
  source 1..75: mol_type = other DNA
tctctggggacgatttaccgacgtttttataacggacattttctgcctgtagaccaggaaagcgcacaggttctt

SEQ ID NO: 714105 - DNA, 75 bp, synthetic construct
  source 1..75: mol_type = other DNA
acgagcgtatcgggatatctacacaggcatctgcagacaggctcgtgtttcaggtgtgattgatcctgtgctgct

SEQ ID NO: 714106 - DNA, 75 bp, synthetic construct
  source 1..75: mol_type = other DNA
atgacaaaccagacaaatccggcgtggcgtaatgatgacctggaaggcgctgtcattggtgcgttttttctgcga

SEQ ID NO: 714107 - DNA, 75 bp, synthetic construct
  source 1..75: mol_type = other DNA
acatcattctgatgctttacagggatgaggtgtacaacccggagacacaggcgagaggcatagcagaaatcaaca

SEQ ID NO: 714108 - DNA, 75 bp, synthetic construct
  source 1..75: mol_type = other DNA
ttagtattcagtgggccacagatctttctgttggaggatggataaaactgtttatggactggatgtattctcatg

SEQ ID NO: 714109 - DNA, 75 bp, synthetic construct
  source 1..75: mol_type = other DNA
aaaaaccggtgacagcgcataacgaaacgctgcatgtgctggagttgcgcgagcccacgtatgacgaaatcgagg

SEQ ID NO: 714110 - DNA, 75 bp, synthetic construct
  source 1..75: mol_type = other DNA
cgtgtttggctaatgatatcggccttcctttacctgactttaaaatcgtatttgtgccagaggaacttatagagt

SEQ ID NO: 714111 - DNA, 75 bp, synthetic construct
  source 1..75: mol_type = other DNA
gaacgcggaagacctgtggggggatttcaagcataccgacttcggcaagatcattttgccgtttactctgctgcg

SEQ ID NO: 714112 - DNA, 75 bp, synthetic construct
  source 1..75: mol_type = other DNA
cttcgcaagctgatttcatttggaagaacgcggaagacctgtggggggatttcaagcataccgacttcggcaaga

SEQ ID NO: 714113 - DNA, 75 bp, synthetic construct
  source 1..75: mol_type = other DNA
ttttctgctggggggcatatcgcctcaacgggtggggaatcagatttgtgatttcaaacgtacttctgacagtaa

SEQ ID NO: 714114 - DNA, 75 bp, synthetic construct
  source 1..75: mol_type = other DNA
ctggaaagaggccaatctgggtgaagaccataaaaaagtgcccaacgatgtggcgacccatcccatcattatcgg

SEQ ID NO: 714115 - DNA, 75 bp, synthetic construct
  source 1..75: mol_type = other DNA
gccaattaatttctacgatgtgcattatgcatttacccactacgtggcacatcaggcggcaataccgacgacatg

SEQ ID NO: 714116 - DNA, 75 bp, synthetic construct
  source 1..75: mol_type = other DNA
ccgataccgacaacgacaaattgagttatgcgcgcaagcactatccatcagaaccgcaaacactgattcattatc

SEQ ID NO: 714117 - DNA, 75 bp, synthetic construct
  source 1..75: mol_type = other DNA
cgtgcctggctaatgatatcggccttcctttacctgactttaaaatcgtatttgtaccagaggaacttgtagagt

SEQ ID NO: 714118 - DNA, 75 bp, synthetic construct
  source 1..75: mol_type = other DNA
gccgctgacctcactcacacaaatacaggatgaagcactggcagcgatcctggcgcgtcatcggggagtctggtc

SEQ ID NO: 714119 - DNA, 75 bp, synthetic construct
  source 1..75: mol_type = other DNA
tcaatgccgctgatacttcgtacgagacattaatggcgctgagcggtggtcacggctttgatgatatttttgtct

SEQ ID NO: 714120 - DNA, 75 bp, synthetic construct
  source 1..75: mol_type = other DNA
ctggttcttggggcggcactcggcgtatctccggcaaaaataatgtttggcgaggattcagacgctgtatttcgc

SEQ ID NO: 714121 - DNA, 75 bp, synthetic construct
  source 1..75: mol_type = other DNA
acttttgcttttttcttgcctgtctatttttgccgcatgcaaaggtttcattacactattaactaacggtgtgct

SEQ ID NO: 714122 - DNA, 75 bp, synthetic construct
  source 1..75: mol_type = other DNA
atgagtaatcaggaaccggctactatcctgctgatcgacgatcatccgatgctgcgaactggcgtgaaacagctt

SEQ ID NO: 714123 - DNA, 75 bp, synthetic construct
  source 1..75: mol_type = other DNA
cacatgctgaaaaaaatgaagcttaaatctcgtgtggaagccgcagtatgggtgcatcaggaacgtattttctga

SEQ ID NO: 714124 - DNA, 75 bp, synthetic construct
  source 1..75: mol_type = other DNA
atgacaacaccagtctggcgtaatgatgacctggaaggcgctgtcattggcgcattctttctgcgtggggcagat

SEQ ID NO: 714125 - DNA, 75 bp, synthetic construct
  source 1..75: mol_type = other DNA
cgggctgataaaaacccgaaccacggggcgtcatgaccttgccgtgggtgaaatctcaaaggggcttaaaggcct

SEQ ID NO: 714126 - DNA, 75 bp, synthetic construct
  source 1..75: mol_type = other DNA
atgacaaacccgacaaatccggcgtggcgtaatgatgacctggaaggagctgtcatcggtgcgttttttctgcgt

SEQ ID NO: 714127 - DNA, 75 bp, synthetic construct
  source 1..75: mol_type = other DNA
gtgatcacgcgcacattaatgaaggcataaaaaaaggccgccacctcccccgccccacaaaaaaaaaaaaaaaaa

SEQ ID NO: 714128 - DNA, 75 bp, synthetic construct
  source 1..75: mol_type = other DNA
aaccttggcgacaaggatctcagtcgtgacgactacagctataacgaagacggacgtcgttactttatggcagtg

SEQ ID NO: 714129 - DNA, 75 bp, synthetic construct
  source 1..75: mol_type = other DNA
ggaaactgtcgatcaactacacctacaacgatggtcgtgatgtcagcaacggcgaaaacaaaccgctatccgatc

SEQ ID NO: 714130 - DNA, 75 bp, synthetic construct
  source 1..75: mol_type = other DNA
gcgaaaagtccctctcagggcgcattgtggtattcagcgtctctaaccatgaagaagatgtggtcaccgcactga

SEQ ID NO: 714131 - DNA, 75 bp, synthetic construct
  source 1..75: mol_type = other DNA
gcgcgctaaccgtgccactactgagcgcgatgttaaccagttaaccccacgcgagcgcgatattctcaagctgat

SEQ ID NO: 714132 - DNA, 75 bp, synthetic construct
  source 1..75: mol_type = other DNA
gcacatgctgaagaaaatgaagctaaagtctcgcgtggaagctgcggtatgggtgcatcaggagcgcattttctg

SEQ ID NO: 714133 - DNA, 75 bp, synthetic construct
  source 1..75: mol_type = other DNA
atgcgtgtcatcaccctggcggggagtcctcgttttccttctcgctccagttctttgctggaatatgcgcgggaa

SEQ ID NO: 714134 - DNA, 75 bp, synthetic construct
  source 1..75: mol_type = other DNA
gtgtataaagccgcctattccggtgcgctgaaaaccctgctcgacctgctgccagaacgtgcgttgcaaggcaaa

SEQ ID NO: 714135 - DNA, 75 bp, synthetic construct
  source 1..75: mol_type = other DNA
cgtttcgatagtccggcactcaaaaccttcaccgaacagctgcaacaggccgatgggctgattgtcgccacgcct

SEQ ID NO: 714136 - DNA, 75 bp, synthetic construct
  source 1..75: mol_type = other DNA
tgtgctacaactgagatttgacgagtcactgtcgtacccgcgcatttctggtaagcgccccatctgcgacgtctt

SEQ ID NO: 714137 - DNA, 75 bp, synthetic construct
  source 1..75: mol_type = other DNA
cgattatgcccttaagccagttttaagtacgctgaaagcccaggagatcctgcacggcgtgtttgccgatgactc

SEQ ID NO: 714138 - DNA, 75 bp, synthetic construct
  source 1..75: mol_type = other DNA
cgattacgcccttaaaccggttttaagcgcactgaaagcccaggagatcctgcacggcgtgtttgccgatgactc

SEQ ID NO: 714139 - DNA, 75 bp, synthetic construct
  source 1..75: mol_type = other DNA
gtcggttagctaatgcactgaatattacgctatcaaagctttttgcagagcttgagatgcaacagaattcacttg

SEQ ID NO: 714140 - DNA, 75 bp, synthetic construct
  source 1..75: mol_type = other DNA
agctaaaattgcagaattcgaaaactttgaggctcagactgaaggctatatccttaaccaacttgagtcgggtac

SEQ ID NO: 714141 - DNA, 75 bp, synthetic construct
  source 1..75: mol_type = other DNA
caataagagtattcaatgtgatcgctgaattaacggcagcaatgacggctattcgtgaaacagcccagattgcaa

SEQ ID NO: 714142 - DNA, 75 bp, synthetic construct
  source 1..75: mol_type = other DNA
atgcaaaacacaactcatgataacgtgattctggagctcaccgttcgcaaccatccgggtgtaatgacccacgtt

SEQ ID NO: 714143 - DNA, 75 bp, synthetic construct
  source 1..75: mol_type = other DNA
atgcaaaacacaactcatgacaacgtgattctggaactcaccgttcgcaaccatccgggcgtaatgacccacgtt

SEQ ID NO: 714144 - DNA, 75 bp, synthetic construct
  source 1..75: mol_type = other DNA
tggctaaatctggagttattcaacttcctgcattgcaggttttcgaaaaaatcaataacttaggactacgccgta

SEQ ID NO: 714145 - DNA, 75 bp, synthetic construct
  source 1..75: mol_type = other DNA
ccgctgtggaacaaagtttctgatgaacaactaaaagcgatgctggcaaaacacggcattcgccatgacaccacg

SEQ ID NO: 714146 - DNA, 75 bp, synthetic construct
  source 1..75: mol_type = other DNA
ttcaatgatgatacccataaggatcagaagctagatattctgattgaaagtattcaagcagttagtgatggaatt

SEQ ID NO: 714147 - DNA, 75 bp, synthetic construct
  source 1..75: mol_type = other DNA
acgttaatctggctggcactttcgaaccagatgcaatctataaaggccttaggcgaagaaattgaatacaaagaa

SEQ ID NO: 714148 - DNA, 75 bp, synthetic construct
  source 1..75: mol_type = other DNA
taaatttagatcggacaactattgaggctacgtctagggcatttattgaaaataaaaactattccgtccattcaa

SEQ ID NO: 714149 - DNA, 75 bp, synthetic construct
  source 1..75: mol_type = other DNA
tgcttatttcggagaacagcaaacaaatcagtaccaacgctcttggtatcagagagaatacacaacggatccggg

SEQ ID NO: 714150 - DNA, 75 bp, synthetic construct
  source 1..75: mol_type = other DNA
gtgtagccggagtgtctgcatatatgccggagaccagaagtaataacgcagaagaggtggtaatatcccggatgg

SEQ ID NO: 714151 - DNA, 75 bp, synthetic construct
  source 1..75: mol_type = other DNA
ctcataccgtagtgtggaaaattatttccaccagctatcaggacgaattgactgtgagcctgcatatcacaacag

SEQ ID NO: 714152 - DNA, 75 bp, synthetic construct
  source 1..75: mol_type = other DNA
cactggtaagcgttcgttcatgggctgaatttattggcaccaccagcggctatgactacatcaagccaaaaggag

SEQ ID NO: 714153 - DNA, 75 bp, synthetic construct
  source 1..75: mol_type = other DNA
tgaagatcccggcgcaaccgcaactgatgctcgatatggagcaggcacgtggactgctgcatcgtcaggatgctt

SEQ ID NO: 714154 - DNA, 75 bp, synthetic construct
  source 1..75: mol_type = other DNA
atgggctggaataacgtctccgtgtatgacggcggctggtacgaatggagcagcaatccgaaaaacccggtagca

SEQ ID NO: 714155 - DNA, 75 bp, synthetic construct
  source 1..75: mol_type = other DNA
atgcattttattcaggtaatactagaaatgctagattacttggaagctgattggtttatttcaacaaatggtcaa

SEQ ID NO: 714156 - DNA, 75 bp, synthetic construct
  source 1..75: mol_type = other DNA
ctgttgctcatgtcctgcgcctgatgcgtagcaagtggtcttatccagatattttggaagacgttaacacgcgat

SEQ ID NO: 714157 - DNA, 75 bp, synthetic construct
  source 1..75: mol_type = other DNA
tccgtacagatctggacgaggcgcacaagctggagcgctttggctggtctgttgctgaaatcgccggaaagcttg

SEQ ID NO: 714158 - DNA, 75 bp, synthetic construct
  source 1..75: mol_type = other DNA
actgtcagcctcaaccttaacccgcgtgcgctgagccgcattcaccacaacgctaaggattctctctggttgaaa

SEQ ID NO: 714159 - DNA, 75 bp, synthetic construct
  source 1..75: mol_type = other DNA
tggcaccgccaaaagaatacgcctatccaaaagttcgcaaccctaagctgcaaggtgtcgcctgtaaacacgtga

SEQ ID NO: 714160 - DNA, 75 bp, synthetic construct
  source 1..75: mol_type = other DNA
tgattaatatccgcgtggaagcgtccgatatatccgttcaccagcaccacattgtccgggtacgttttgaagaat

SEQ ID NO: 714161 - DNA, 75 bp, synthetic construct
  source 1..75: mol_type = other DNA
aataaatcagccgaagacattcttaagctggggaaaaagaaaggcggcacgttctttacgcgtgacgatctgaaa

SEQ ID NO: 714162 - DNA, 75 bp, synthetic construct
  source 1..75: mol_type = other DNA
cacaagtaatgctgacgctgtattatggagggataatgggtctagaaaaacaggttttagcaaatataattaata

SEQ ID NO: 714163 - DNA, 75 bp, synthetic construct
  source 1..75: mol_type = other DNA
ctacgtttaattttctgggattcacatgctactggggtaaaacacgaaaaggacactggcgtttaaagttaagca

SEQ ID NO: 714164 - DNA, 75 bp, synthetic construct
  source 1..75: mol_type = other DNA
tatgaatgcattatcccggaagattgtgtcggctcctatttcccggaattccagaaatacgccctcgagatgatc

SEQ ID NO: 714165 - DNA, 75 bp, synthetic construct
  source 1..75: mol_type = other DNA
aattcgctaaaagtaactttcaccatttacgacgctgaaggttcagtagatgtctcttacgaaggcattttgccg

SEQ ID NO: 714166 - DNA, 75 bp, synthetic construct
  source 1..75: mol_type = other DNA
acacgccgccagaagtcgagaaagcgatggaagctaatcaccgtcgcccggcgagtgtttataagggcccagcat

SEQ ID NO: 714167 - DNA, 75 bp, synthetic construct
  source 1..75: mol_type = other DNA
gctatcgcaccatgtaaagaagttctggcagccgcacgtcaaaaaggaattatggttattcatacccgtgaaggc

SEQ ID NO: 714168 - DNA, 75 bp, synthetic construct
  source 1..75: mol_type = other DNA
tgacaaatggattaactgcccacctgataacttcgaaatattaggtgagctaataaccataaaaaaaataacaaa

SEQ ID NO: 714169 - DNA, 75 bp, synthetic construct
  source 1..75: mol_type = other DNA
ccggcgcccccattcccgaaggcttgctgcatgaaggcattttccgtatcgctctgcaacagccagcaggcgctg

SEQ ID NO: 714170 - DNA, 75 bp, synthetic construct
  source 1..75: mol_type = other DNA
ttgaactccattaaaattaacaaactaaaatgtataaatggattaaacgagattatttttaaacctcatgcgtta

SEQ ID NO: 714171 - DNA, 75 bp, synthetic construct
  source 1..75: mol_type = other DNA
tccagcccagatcttgaggaggattctgaagaatggcagttacttgaaaaggactatgacgagtatcaggacttt

SEQ ID NO: 714172 - DNA, 75 bp, synthetic construct
  source 1..75: mol_type = other DNA
attcaaaacgctgggggatgtaattggcccagagagcggttttgttgataaatatccagaagtcatgaatttttc

SEQ ID NO: 714173 - DNA, 75 bp, synthetic construct
  source 1..75: mol_type = other DNA
gcaaccgcgatagccggtgtacgcaaaggcgagaacgacatcgccgtcggtaatatcatcggcgcgaatattttt

SEQ ID NO: 714174 - DNA, 75 bp, synthetic construct
  source 1..75: mol_type = other DNA
tcattatgccagtggccacgcggatggtagttgataacgccacggtgctggcgaattactttgccatcagcgagt

SEQ ID NO: 714175 - DNA, 75 bp, synthetic construct
  source 1..75: mol_type = other DNA
atcgctacgctgaaaaactacatccccgaaagcggtaagattgtcccaagccgtatcaccggtacccgtgcaaaa

SEQ ID NO: 714176 - DNA, 75 bp, synthetic construct
  source 1..75: mol_type = other DNA
gtgaacggtggcagcataaccatgcatctttgcccaaaatgttttggacaaaagatagtatcgatacttcaacca

SEQ ID NO: 714177 - DNA, 75 bp, synthetic construct
  source 1..75: mol_type = other DNA
ctcttccatcaaagcttttttcaaatgggtgtctgccagtgtttccgtaggtagccagaaagtcgatgccggtaa

SEQ ID NO: 714178 - DNA, 75 bp, synthetic construct
  source 1..75: mol_type = other DNA
cgactcaccaggacatccagattgtctatccggtacatctcaatccgaatgtcagagaaccggtcaatcgcattc

SEQ ID NO: 714179 - DNA, 75 bp, synthetic construct
  source 1..75: mol_type = other DNA
aggaagtgacgcgtcttttaaaagacgaaaacgaatatcaagctatgagccgcgcccataacccgtatggtgatg

SEQ ID NO: 714180 - DNA, 75 bp, synthetic construct
  source 1..75: mol_type = other DNA
ctctctgtctgagttgataaataaagagtctaatgcaaacaaatatgtacaggagtacctttcagatattcttta

SEQ ID NO: 714181 - DNA, 75 bp, synthetic construct
  source 1..75: mol_type = other DNA
ggtggttgataacgccacggtgctggcgaattactttgccatcagcgagttgacgatgggtctgacggcaattgc

SEQ ID NO: 714182 - DNA, 75 bp, synthetic construct
  source 1..75: mol_type = other DNA
caataatgaaattttttcccgctggagccagggcgaaaaaattgaaaccctgcgccgccactaccagatgtcaga

SEQ ID NO: 714183 - DNA, 75 bp, synthetic construct
  source 1..75: mol_type = other DNA
agaactggcggcaaattacccgtttatcgaccccgataaaaagatgattctggtgaccggtcacaggcgtgaaag

SEQ ID NO: 714184 - DNA, 75 bp, synthetic construct
  source 1..75: mol_type = other DNA
atggaccagacaacgcggctgtgcgaattcggcagttgcatccggtcacgcagtttactgatcaactacgcggaa

SEQ ID NO: 714185 - DNA, 75 bp, synthetic construct
  source 1..75: mol_type = other DNA
cgtctgtccagataccgcatcaaacgtatattgataatggtttttatgatcgtattgctggtaaggagaagggaa

SEQ ID NO: 714186 - DNA, 75 bp, synthetic construct
  source 1..75: mol_type = other DNA
attttatccgggatacttactttgggacatttttaaatactgaagggctaactgaagttgcagtgaatcgtccaa

SEQ ID NO: 714187 - DNA, 75 bp, synthetic construct
  source 1..75: mol_type = other DNA
tcaattcagggtaacggtgcgctgggaataacagaaaatagctatattggcgcacactggaatttcaacggttat

SEQ ID NO: 714188 - DNA, 75 bp, synthetic construct
  source 1..75: mol_type = other DNA
ccgctatgattttttacgccgttattatgtgcaggcggggcggatggacaaccgcacattatttaatgcgcaagg

SEQ ID NO: 714189 - DNA, 75 bp, synthetic construct
  source 1..75: mol_type = other DNA
agagactatcctgcgccagctggaacattacggcctgcactgggacggcgatgttctctggcaatcgcaacgtca

SEQ ID NO: 714190 - DNA, 75 bp, synthetic construct
  source 1..75: mol_type = other DNA
ctgtttcacaattttcggttgaacctgagagcagggtgacaaggaaggcgtttccggaggaacaaaaggaatttt

SEQ ID NO: 714191 - DNA, 75 bp, synthetic construct
  source 1..75: mol_type = other DNA
cggacttcgagaagaaactgaaagagcgagccgcttctaccgagaacatgctgaacagcgagttcaggaagctag

SEQ ID NO: 714192 - DNA, 75 bp, synthetic construct
  source 1..75: mol_type = other DNA
aaaacacaatcattgatgaaaaaatcatatcacacatactcaaaaacacaggccgtttttgcacgaaaaaaatgc

SEQ ID NO: 714193 - DNA, 75 bp, synthetic construct
  source 1..75: mol_type = other DNA
ttgaatcgttcaagaaatctgtaggtaaatataatacacgtaagattaatgagcaattccttcagttctttgatt

SEQ ID NO: 714194 - DNA, 75 bp, synthetic construct
  source 1..75: mol_type = other DNA
ttgaatcgttcaaaaaatctgtaggtaaatataatacacgtaaaattagtgagcaattttttcagttttctgatt

SEQ ID NO: 714195 - DNA, 75 bp, synthetic construct
  source 1..75: mol_type = other DNA
atccttttacttctttcatacgcatgaagacatacatcatattttcgcaaaaaccagacataccatcagtgaaat

SEQ ID NO: 714196 - DNA, 75 bp, synthetic construct
  source 1..75: mol_type = other DNA
ttcaggctctcatcaaagcaggacagccaggaaagtatggtgatggtcgtggtttgtatcttaagattccatcga

SEQ ID NO: 714197 - DNA, 75 bp, synthetic construct
  source 1..75: mol_type = other DNA
accagaacaatggaaggttttgttgataagcggtcatgcagtggcaacaaaacaggaagctgatgttttgcccgg

SEQ ID NO: 714198 - DNA, 75 bp, synthetic construct
  source 1..75: mol_type = other DNA
ccttgaaggcgaatacgtcaacattcgcgaaagcagcgcgcagatgagcgtgaagcgtatggcaagtctgatcga

SEQ ID NO: 714199 - DNA, 75 bp, synthetic construct
  source 1..75: mol_type = other DNA
gttttaacatccatttcaatttcaacgagaaatatatattacctcaacatcaaatagaaggtaatttaaaaaaca

SEQ ID NO: 714200 - DNA, 75 bp, synthetic construct
  source 1..75: mol_type = other DNA
gtgatggaaaacacgctggggatcagcaaaagtcaggcggattccgatcgtgctctttattattcccgcggattc

SEQ ID NO: 714201 - DNA, 75 bp, synthetic construct
  source 1..75: mol_type = other DNA
tattctaatccaccaacgtttaaaattggtttgaatgcacattatacaaatgatgaaatgattgattttcttgat

SEQ ID NO: 714202 - DNA, 75 bp, synthetic construct
  source 1..75: mol_type = other DNA
gggagagtgaaacttcatatatcaaagatgagtcgagttttcttctttagtgaaaataaatattattctcttgca

SEQ ID NO: 714203 - DNA, 75 bp, synthetic construct
  source 1..75: mol_type = other DNA
tgtatggatacttgggcaattaccaagaactcaatgctaaaaatatggcaacccgaatacagaaagcttggtgca

SEQ ID NO: 714204 - DNA, 75 bp, synthetic construct
  source 1..75: mol_type = other DNA
ctcgacttaacgctgaacaacccagccgcagccttcacggtggacgatgccggtggcgtggagcccagtaaagac

SEQ ID NO: 714205 - DNA, 75 bp, synthetic construct
  source 1..75: mol_type = other DNA
ttattgcatacagcaaagccgacccaaaaaaatattcagatggtgaaggactatacttttgcgtccgcaaacagg

SEQ ID NO: 714206 - DNA, 75 bp, synthetic construct
  source 1..75: mol_type = other DNA
ttatagcaatgctttaaaggacatttcatctatcattgaaaaactgggagcctcaaaaaacaataaaattaattt

SEQ ID NO: 714207 - DNA, 75 bp, synthetic construct
  source 1..75: mol_type = other DNA
tatcttgctttgctgctcttgtttctgctgcgactgctatatacgcaatcaaacagtcgaacttacaaagaagat

SEQ ID NO: 714208 - DNA, 75 bp, synthetic construct
  source 1..75: mol_type = other DNA
ttcaatggtgcgataaatggttaaaaccagaacaatggaaggttttgttgatcagcggtcatgcagtggcaacaa

SEQ ID NO: 714209 - DNA, 75 bp, synthetic construct
  source 1..75: mol_type = other DNA
tggatggcaccggcatgatttacggcatgtatgtcatcagcagggtgagtgaaacagggagtattttctttgcag

SEQ ID NO: 714210 - DNA, 75 bp, synthetic construct
  source 1..75: mol_type = other DNA
tatcgactacagcaacatcactctcggtggcggcaatagcggtacgactcgcatcagcaacgtttctgctggcgt

SEQ ID NO: 714211 - DNA, 75 bp, synthetic construct
  source 1..75: mol_type = other DNA
actacactgcctacaacatggatgcaccgcagaactctgtgggtgaattctccgtaggtagcgaagacggtcaac

SEQ ID NO: 714212 - DNA, 75 bp, synthetic construct
  source 1..75: mol_type = other DNA
gcattcagcgccgcgcacggcactgacgccaccagcaagatcaccaatgtcaaagccggtgacctgacagctggc

SEQ ID NO: 714213 - DNA, 75 bp, synthetic construct
  source 1..75: mol_type = other DNA
cattgctgccgctgacaacagcgtcgcactgggtaccggttccgttgcagatgaagaaaatacaatctctgtagg

SEQ ID NO: 714214 - DNA, 75 bp, synthetic construct
  source 1..75: mol_type = other DNA
ataatagtcttgcgcttgggagcaataccaatgccaacggtattaactctgtcgcgctgggcgcaggttctattg

SEQ ID NO: 714215 - DNA, 75 bp, synthetic construct
  source 1..75: mol_type = other DNA
attaacgaaaccagcaccgacgcggttaacggttcccagttaaatgccacgaatatgttgatccagaatattgcc

SEQ ID NO: 714216 - DNA, 75 bp, synthetic construct
  source 1..75: mol_type = other DNA
cacctcaatcagtgatgccctgctgtgggattctacagcgaacaaattcagcgccaaacacggtggtaccaatag

SEQ ID NO: 714217 - DNA, 75 bp, synthetic construct
  source 1..75: mol_type = other DNA
ccaccagcaccgatgccattaatggtacacaacttcaaagcactgcaagcaccattacgtcctatttgggcggcg

SEQ ID NO: 714218 - DNA, 75 bp, synthetic construct
  source 1..75: mol_type = other DNA
agcaaacgcgattgctatgggtacagagagcgaagctgctgaaaatgcgacggctattggcaataacgcgcatgc

SEQ ID NO: 714219 - DNA, 75 bp, synthetic construct
  source 1..75: mol_type = other DNA
cgtggtaaaaaaagcgggcgcagtaagctgttaatttctgcactggttgcgggtgggttgttgtcgtcgtttgga

SEQ ID NO: 714220 - DNA, 75 bp, synthetic construct
  source 1..75: mol_type = other DNA
cacgctaactcaacggctgaagactcactggcagtcggtgaagactcgctggcaatgggcgcgaaaaccatcgtt

SEQ ID NO: 714221 - DNA, 75 bp, synthetic construct
  source 1..75: mol_type = other DNA
gagcgccaatggtcgttgggtctacaaattacaaggtagtaccaatagccagggtgaatactccgccgcactcgg

SEQ ID NO: 714222 - DNA, 75 bp, synthetic construct
  source 1..75: mol_type = other DNA
acgcttgccggtgtgctttatcccgaactgaccggcggaaagctgacgatgaccacgctcaggctgatggcagat

SEQ ID NO: 714223 - DNA, 75 bp, synthetic construct
  source 1..75: mol_type = other DNA
agttagaaaatggagagcttttactcgtcgtttctcctcagtttaatgccaatgctattcaggattatgcattac

SEQ ID NO: 714224 - DNA, 75 bp, synthetic construct
  source 1..75: mol_type = other DNA
ttgatttgctcatcaccggccgcaatctcacgctgaacagcgccagtgagccggtgttatgcaacaacagggaaa

SEQ ID NO: 714225 - DNA, 75 bp, synthetic construct
  source 1..75: mol_type = other DNA
cagcttgccggtaacaccagtgaaacctacatcgaagataacggtgcgggtattaactatgtacgtaccaacgac

SEQ ID NO: 714226 - DNA, 75 bp, synthetic construct
  source 1..75: mol_type = other DNA
caaatttatcgcggcagtctgtatggcagcggacagattggtcacaccatcgttaacccggatggcgtcgcctgc

SEQ ID NO: 714227 - DNA, 75 bp, synthetic construct
  source 1..75: mol_type = other DNA
cgggcatagtagcggtacatggctgattgcgccggaaggtgactggacgctgtgcctgaacgtgacgcccaccag

SEQ ID NO: 714228 - DNA, 75 bp, synthetic construct
  source 1..75: mol_type = other DNA
agaaagcaataaagagatattgaaattttataatgaagctgattattccaagtacattttcgaaaaactatcttt

SEQ ID NO: 714229 - DNA, 75 bp, synthetic construct
  source 1..75: mol_type = other DNA
gctctgctgtgggatgagacagccaatggcggtaatggtgcatttagcgccgctcacgggaaagataaaactgcc

SEQ ID NO: 714230 - DNA, 75 bp, synthetic construct
  source 1..75: mol_type = other DNA
cgaccaacaccaccaacatcaccaacctgacggattccgttggcgaccttaaggacgattccctgctgtggaaca

SEQ ID NO: 714231 - DNA, 75 bp, synthetic construct
  source 1..75: mol_type = other DNA
cttacattatcccggtaacggcgtccttcatcggcctgccagttaccatcaatggtattggtaccctcgttcttt

SEQ ID NO: 714232 - DNA, 75 bp, synthetic construct
  source 1..75: mol_type = other DNA
aacactgccaatatcgccactaacactacggatattgcgactaataccgccgatatagctacaaacgctagcagt

SEQ ID NO: 714233 - DNA, 75 bp, synthetic construct
  source 1..75: mol_type = other DNA
gtgtgcaggaaacgaagcaatacaccgatcagcgcatggttgagatggataacaaactgtccaaaaccgaaagca

SEQ ID NO: 714234 - DNA, 75 bp, synthetic construct
  source 1..75: mol_type = other DNA
gtacgactcgcatcagcaacgtttctgctggcgtgaataacaacgacgcggtgaactatgcgcagttgaagcaaa

SEQ ID NO: 714235 - DNA, 75 bp, synthetic construct
  source 1..75: mol_type = other DNA
ctacgatctgaccgaagatgcgtccactgagactgccatgctgttcggcgagctgtatcgccacaatggtgagtg

SEQ ID NO: 714236 - DNA, 75 bp, synthetic construct
  source 1..75: mol_type = other DNA
agtcagtgttcacaggacaatgcaggagtgtgtgactgcagcaaccgaacagaaaattcccggtaactgttaccc

SEQ ID NO: 714237 - DNA, 75 bp, synthetic construct
  source 1..75: mol_type = other DNA
gagcaggatgctgtaaataatcgctcaatgcgtaattatgttgatgctgcaatcgccggagttgttggtggtttt

SEQ ID NO: 714238 - DNA, 75 bp, synthetic construct
  source 1..75: mol_type = other DNA
ttgagtttgccgaaggcgatatccgcacccctctggccacggcgtttaagacgctgctggacagcactgagccgg

SEQ ID NO: 714239 - DNA, 75 bp, synthetic construct
  source 1..75: mol_type = other DNA
ttggagccgggcgctacaagaaaatttcggcctcgttctatttgcctgattcgcccaataacccgaagcccggtt

SEQ ID NO: 714240 - DNA, 75 bp, synthetic construct
  source 1..75: mol_type = other DNA
gaaattccgcgcagtaggtcagggttatgctggtggtctggcatctgtatgtgctcagtacggcattaacgcgtc

SEQ ID NO: 714241 - DNA, 75 bp, synthetic construct
  source 1..75: mol_type = other DNA
gtcaaaatattgctgagtcaggtttgtttatccgagttaaagacattaaaaaccctgaatggcacatccagttct

SEQ ID NO: 714242 - DNA, 75 bp, synthetic construct
  source 1..75: mol_type = other DNA
tgggatgtgttcgaaaagctggaagactgctatttcagacaaaaggatccgtcagcgccagtttcatgccagaaa

SEQ ID NO: 714243 - DNA, 75 bp, synthetic construct
  source 1..75: mol_type = other DNA
aaactgctgacctggcgtgaagaaaccggcaaaaccgcgttcgaaactgcgccgcagtttgaaggcaaaatcggc

SEQ ID NO: 714244 - DNA, 75 bp, synthetic construct
  source 1..75: mol_type = other DNA
gtcactgagtttcatggaggtaaaatcgataaaacagtagctaaaaaacagtttattcaatatcactatgaacta

SEQ ID NO: 714245 - DNA, 75 bp, synthetic construct
  source 1..75: mol_type = other DNA
atgcttcgctcacgatgttctacaaagaaatgggctgggacccacagcttggttgtccgacccgcgaaacattgc

SEQ ID NO: 714246 - DNA, 75 bp, synthetic construct
  source 1..75: mol_type = other DNA
cgctggaatttgggtgaagagtactggggctacgcgaaaaataaactctggtcgccgtttggctatccagttcac

SEQ ID NO: 714247 - DNA, 75 bp, synthetic construct
  source 1..75: mol_type = other DNA
gaaaacacgaacgggagctattaaataaaatatgcattctttcaatgctggctcgtttacgtccgatacaaaaag

SEQ ID NO: 714248 - DNA, 75 bp, synthetic construct
  source 1..75: mol_type = other DNA
atatttcagggattgcatctacaccgtcacgaattacggtaactcagaacggatataccgtttattctcgtatgg

SEQ ID NO: 714249 - DNA, 75 bp, synthetic construct
  source 1..75: mol_type = other DNA
gtctggctgtctgaatacactgagaacagcattaatatcaatatggataatgtgccagataatctggaattcgaa

SEQ ID NO: 714250 - DNA, 75 bp, synthetic construct
  source 1..75: mol_type = other DNA
tatctttgctagcactgagtatatggtattcccacttcagtcttgcagaagaactaaatctcgatttcatacagg

SEQ ID NO: 714251 - DNA, 75 bp, synthetic construct
  source 1..75: mol_type = other DNA
gttatgagctggctaaaaaaaatcatacacaggtagtttttgattacagtgcgcagaaactgctgcttgatattc

SEQ ID NO: 714252 - DNA, 75 bp, synthetic construct
  source 1..75: mol_type = other DNA
gatgatgaaacaggacgcttatgatgatgtctttgacaaggaaaaacagtgttatgtactgacccgtaatcccca

SEQ ID NO: 714253 - DNA, 75 bp, synthetic construct
  source 1..75: mol_type = other DNA
caacagcaacgaactggacaaggcgtttcattctgacaccgggctgttctggctgggcagcctggactatggctt

SEQ ID NO: 714254 - DNA, 75 bp, synthetic construct
  source 1..75: mol_type = other DNA
cattgaaacgactggtgcagcttggtctacctatcgcgctggcgttgttctttgaagtgacactgtttgctgtag

SEQ ID NO: 714255 - DNA, 75 bp, synthetic construct
  source 1..75: mol_type = other DNA
ttttcggtcacggactgctgcttgcgttgacgccagtgatcgcgcaattgaatggttctggtcgccgtgaacgca

SEQ ID NO: 714256 - DNA, 75 bp, synthetic construct
  source 1..75: mol_type = other DNA
atcttctgatagttcagaaggtgcagatgatgaataaagagagatgccggacaatcggaagaaaacgttacacca

SEQ ID NO: 714257 - DNA, 75 bp, synthetic construct
  source 1..75: mol_type = other DNA
cccaggcgtatttactgagtaaaacagaccctgctcgttgggattatggtgtaaatggtggacgcctgaaatatt

SEQ ID NO: 714258 - DNA, 75 bp, synthetic construct
  source 1..75: mol_type = other DNA
tattgtcgatgtggcaggccaccagattgcactgaacttcagttcgttgatgttcgttcttccaatgtcactggc

SEQ ID NO: 714259 - DNA, 75 bp, synthetic construct
  source 1..75: mol_type = other DNA
attatcggcctgacatcggcagctattatgatgatgctgcgaatgcgtttcctgcaacgtctgccgtcagccatc

SEQ ID NO: 714260 - DNA, 75 bp, synthetic construct
  source 1..75: mol_type = other DNA
cagaaacatatggacgacattatctccggcgaattctcctccggcatgatggctgactgggccaacgacgataag

SEQ ID NO: 714261 - DNA, 75 bp, synthetic construct
  source 1..75: mol_type = other DNA
ttgtctattggtgatgacggtaaatatcgtcaaatcatcaacgtagccgatggttccgaagcccatgacgccgtt

SEQ ID NO: 714262 - DNA, 75 bp, synthetic construct
  source 1..75: mol_type = other DNA
agcgccgcagatagccttgctctcggtgcccaggctcgtgccacaggttccaactctgttgcattagggacaaat

SEQ ID NO: 714263 - DNA, 75 bp, synthetic construct
  source 1..75: mol_type = other DNA
tcgaaagaatatgcaatggcgctgggtgcaagtagcaaagctgacggcgtagacagcttggcattaggcagacag

SEQ ID NO: 714264 - DNA, 75 bp, synthetic construct
  source 1..75: mol_type = other DNA
gatgccgtggcagccaacaccaccaatatcgccactaacaccaccaacatcaccaacctgactgacgctgttgac

SEQ ID NO: 714265 - DNA, 75 bp, synthetic construct
  source 1..75: mol_type = other DNA
gtagcgccgcatctgcggctaacgcgattgcagtaggccgcaacagtgctgcggcaggcgtagacagtctcgcat

SEQ ID NO: 714266 - DNA, 75 bp, synthetic construct
  source 1..75: mol_type = other DNA
ggtagcaccaaatacttcaagaccaacaccgatggcgtagatgccaacgcgcagggtaaagacagtgttgcgatt

SEQ ID NO: 714267 - DNA, 75 bp, synthetic construct
  source 1..75: mol_type = other DNA
accggggacccaagtgtacagcactggtttacgttgatgacgccaccagtcgtctgatgcagcttcgtttcgtaa

SEQ ID NO: 714268 - DNA, 75 bp, synthetic construct
  source 1..75: mol_type = other DNA
atgatttcgacacaatttaacagggataatcaacatcaaaccatcatcaaaccgtcactccttgccggttgcata

SEQ ID NO: 714269 - DNA, 75 bp, synthetic construct
  source 1..75: mol_type = other DNA
cagatcgataactatatggttgatggtatccccacctattttgaatcgcgctggatctgggcgacgcactttctg

SEQ ID NO: 714270 - DNA, 75 bp, synthetic construct
  source 1..75: mol_type = other DNA
tttctgaggttgatcccgtcgccattgtagataacaagagacttggccatgtgttggatgttgcccgtcaggtcc

SEQ ID NO: 714271 - DNA, 75 bp, synthetic construct
  source 1..75: mol_type = other DNA
agttccatggaagctgcgaacgcatttgccgaagagttcatgaacgattacaaccgtcgtttcgcaaaagcgcct

SEQ ID NO: 714272 - DNA, 75 bp, synthetic construct
  source 1..75: mol_type = other DNA
atacccagtttttggggcgaagtagagactatgataattatatacagatcttttctggtgaagaaggggaggggg

SEQ ID NO: 714273 - DNA, 75 bp, synthetic construct
  source 1..75: mol_type = other DNA
ctttcctgcgcaagaggaacagtgctcaagtacaaccgagacagcaaaggtgagcgtcacgtaatagttaacggc

SEQ ID NO: 714274 - DNA, 75 bp, synthetic construct
  source 1..75: mol_type = other DNA
tacgcttgtgtaccgctgctgaaaccgtttatggcagaactgcagcctggcgatctgggtaaagctattccggaa

SEQ ID NO: 714275 - DNA, 75 bp, synthetic construct
  source 1..75: mol_type = other DNA
aaccagggtctgaacatgcgtgattctggtctggatatctcctatgccctgcgaaaagaagcgattgccgaaaag

SEQ ID NO: 714276 - DNA, 75 bp, synthetic construct
  source 1..75: mol_type = other DNA
gatccgtaaagacatcaccgtcgtaatggttgcgccgaaatgccctggcaccgaagtacgtgaagagtacaaacg

SEQ ID NO: 714277 - DNA, 75 bp, synthetic construct
  source 1..75: mol_type = other DNA
ataacgcgcaactgcgtgatgtgaacgaagcgattcgcagccatgcgattgagcaggtaggtaagaaactgcgcg

SEQ ID NO: 714278 - DNA, 75 bp, synthetic construct
  source 1..75: mol_type = other DNA
aaggcgaaggcatggcgattgccaaagcctgggcggctgcaaccggtggtcaccgtgcgggtgtgctggaatcgt

SEQ ID NO: 714279 - DNA, 75 bp, synthetic construct
  source 1..75: mol_type = other DNA
aaggcgaaggcatggcgatcgctaaagcatgggcggcagcaaccggtggtcaccgtgcgggcgtgctggaatcgt

SEQ ID NO: 714280 - DNA, 75 bp, synthetic construct
  source 1..75: mol_type = other DNA
accagggcatgaagataaacgagaatatgaatattctccgcgagcagaaagagagtctggagaagctgaacgcga

SEQ ID NO: 714281 - DNA, 75 bp, synthetic construct
  source 1..75: mol_type = other DNA
ttgcccgaggggatgaaagccgaaacgaactggacgatggaaaacgggaaacagaatgccgtaaggctgctacag

SEQ ID NO: 714282 - DNA, 75 bp, synthetic construct
  source 1..75: mol_type = other DNA
gagagtctggagaagctgaacgcgaagacatggggcgtgcgttatcacgaggacagcaacgggcgttttcttgtg

SEQ ID NO: 714283 - DNA, 75 bp, synthetic construct
  source 1..75: mol_type = other DNA
atggttgcgccgaaatgcccgggcaccgaagtgcgtgaagagtataaacgtggattcggcgtaccgacgctgatt

SEQ ID NO: 714284 - DNA, 75 bp, synthetic construct
  source 1..75: mol_type = other DNA
agcctgggctgcggctaccggtggtcaccgtgcgggcgtgctggaatcctccttcgttgcggaagtgaaatctga

SEQ ID NO: 714285 - DNA, 75 bp, synthetic construct
  source 1..75: mol_type = other DNA
ccgaagtgcgtgaagagtacaaacgtggattcggcgtaccgacgctgattgccgttcacccggaaaacgatccga

SEQ ID NO: 714286 - DNA, 75 bp, synthetic construct
  source 1..75: mol_type = other DNA
tggcgcaggtgcggcagcgaagctggttacgctggaaaccgtgtcacgctgtatgccagccgggattttgattgg

SEQ ID NO: 714287 - DNA, 75 bp, synthetic construct
  source 1..75: mol_type = other DNA
ggggcagtcgtggaatctcatcaacatgacccgcagtttcctgaatgcctgcacctcgctatggcgcaatggtga

SEQ ID NO: 714288 - DNA, 75 bp, synthetic construct
  source 1..75: mol_type = other DNA
tttgccaaaggtcgggtgatgatgtttgccaacggtcttaagctgctgggggctgccagtatctgctttggcctc

SEQ ID NO: 714289 - DNA, 75 bp, synthetic construct
  source 1..75: mol_type = other DNA
tgcgattgcagtacaaaatcttggcgaaaacagcgccatgctgctgatgctggggatttattcgctggcggtatt

SEQ ID NO: 714290 - DNA, 75 bp, synthetic construct
  source 1..75: mol_type = other DNA
ggggtaaaaaaagcgtcggggcggggaatgcgattgcagtacaaaaccttggcgaaaacagcgccatgttgttga

SEQ ID NO: 714291 - DNA, 75 bp, synthetic construct
  source 1..75: mol_type = other DNA
ctcaatgcgttgctacaggagcggggtaaaaaagcgtcggggcggggaatgcgattgcagtacaaaaccttggcg

SEQ ID NO: 714292 - DNA, 75 bp, synthetic construct
  source 1..75: mol_type = other DNA
cagcatttctttttttgacttcggcgtgtgtgcatgcctcgtctccggccttttttgttgaccgtgttccgctca

SEQ ID NO: 714293 - DNA, 75 bp, synthetic construct
  source 1..75: mol_type = other DNA
gatattctgggaaagataatggggaatataaaagtggtcggcgatttaccttttgcagagtatgagttggaacaa

SEQ ID NO: 714294 - DNA, 75 bp, synthetic construct
  source 1..75: mol_type = other DNA
tgattatcattaacatgatgaagggggagttataccgttcggaaagcctgctaacgctgtggcagcatcacagtc

SEQ ID NO: 714295 - DNA, 75 bp, synthetic construct
  source 1..75: mol_type = other DNA
ttttttgttgaacgtcttccgctcaatgcagcgatacaactggcacaggaagatattttcaggcgtcagtatgcg

SEQ ID NO: 714296 - DNA, 75 bp, synthetic construct
  source 1..75: mol_type = other DNA
ggcactggccgcaaaactgttatcaggtcgttttggggtcagcgtgggttcctcgtcatcgatgggtaattatat

SEQ ID NO: 714297 - DNA, 75 bp, synthetic construct
  source 1..75: mol_type = other DNA
cagggcgctcatcgcaggcatcttctgagagtacgtccggtacgtcctcggggtcgttatccggcagtgtatcgt

SEQ ID NO: 714298 - DNA, 75 bp, synthetic construct
  source 1..75: mol_type = other DNA
tatcaggccgatcaatccggtgtctatcatgagcgtgggggatggctgaaagggcatcacagcggtatgccttac

SEQ ID NO: 714299 - DNA, 75 bp, synthetic construct
  source 1..75: mol_type = other DNA
tcgaagaaaatggtgcaggtattaactatgtgcgtaccaatgacaccggtttaaccttcaccgatgccagcgcac

SEQ ID NO: 714300 - DNA, 75 bp, synthetic construct
  source 1..75: mol_type = other DNA
tgcaccgacttacaccattgcaaataccgattacaacaacgtcggtgaagccctggatgcgctcgataataacgc

SEQ ID NO: 714301 - DNA, 75 bp, synthetic construct
  source 1..75: mol_type = other DNA
ggtgacgactccctgctgtggaacaaaacagctggcgcattcagcgccgcgcacggcactgacgccaccagcaag

SEQ ID NO: 714302 - DNA, 75 bp, synthetic construct
  source 1..75: mol_type = other DNA
cttgctattggacgtttgagcggcggcaatcagcaaaaagcgatcctcgcccgctgtctgttactcaacccgcgc

SEQ ID NO: 714303 - DNA, 75 bp, synthetic construct
  source 1..75: mol_type = other DNA
aactacgttcgtactaacgacaacggtttagcctttaacgatgcaagcgcctctggtgtcggcgctacagctgta

SEQ ID NO: 714304 - DNA, 75 bp, synthetic construct
  source 1..75: mol_type = other DNA
ggttaacgtgggtcagttgaaagtaacggacgcgcaggtttcccagaatacccagagcattactaacctgaacaa

SEQ ID NO: 714305 - DNA, 75 bp, synthetic construct
  source 1..75: mol_type = other DNA
tgataccctggaaaaagatgccctgctctggaatggcacagcattcagcgccaaacacggcaccgaagctaccag

SEQ ID NO: 714306 - DNA, 75 bp, synthetic construct
  source 1..75: mol_type = other DNA
caacgcccaaggtaaagatagcgttgctattggttctgggtccattgctgccgctgacaacagcgtcgcactggg

SEQ ID NO: 714307 - DNA, 75 bp, synthetic construct
  source 1..75: mol_type = other DNA
gcctgttcaatgatgatcccgtacttcatgcaacatggctgtactatcaggaaggtaaaagccagactgaagttg

SEQ ID NO: 714308 - DNA, 75 bp, synthetic construct
  source 1..75: mol_type = other DNA
ataaagcatttagtgccagctatctcgccaaaaacgctgatggctccctaaaggagagctcaggccaaaacaaaa

SEQ ID NO: 714309 - DNA, 75 bp, synthetic construct
  source 1..75: mol_type = other DNA
ccaacatgatgattcagcagaacagcgaaatcatcaatcagattgccggtgacaccagtaaaaactacatcggag

SEQ ID NO: 714310 - DNA, 75 bp, synthetic construct
  source 1..75: mol_type = other DNA
tgtagtaaacggctctcaattgtacgacctgcagcaggatgccctgttgtggaacggcacagcattcagtgccgc

SEQ ID NO: 714311 - DNA, 75 bp, synthetic construct
  source 1..75: mol_type = other DNA
atcagccatcaatgaaagagcaactggcagcagctcttccacgccatatgacggctgaacgtatgatccgtatcg

SEQ ID NO: 714312 - DNA, 75 bp, synthetic construct
  source 1..75: mol_type = other DNA
gggcagtggatactgcagatgcgcgtacagataacgggcaactggtttttaatttgcgtgataaaggggctctgc

SEQ ID NO: 714313 - DNA, 75 bp, synthetic construct
  source 1..75: mol_type = other DNA
gagagtgtgacgaaagtaaggtcggatagtttgccacaaagactgaaaaaccgcctgtcttcattattagtgatg

SEQ ID NO: 714314 - DNA, 75 bp, synthetic construct
  source 1..75: mol_type = other DNA
acggttcaacctagtaaactacctaatgaattagtcaatcgtctatctaatcttctcctgatgaataacaagttt

SEQ ID NO: 714315 - DNA, 75 bp, synthetic construct
  source 1..75: mol_type = other DNA
caggggatggcagtcagtgccggtgcacaggaagagggggcgacagtgccggcaggaatgtcgctggtcagcgga

SEQ ID NO: 714316 - DNA, 75 bp, synthetic construct
  source 1..75: mol_type = other DNA
gaactgcggttaccggcagagggtacacctgcagcatggcaggcagggctgaatgtgacggttacagtacagtga

SEQ ID NO: 714317 - DNA, 75 bp, synthetic construct
  source 1..75: mol_type = other DNA
cagagcgtgacggatgtacagtcaggaacattgccacaggggctgaaagcccggctctcttccttgttactgatg

SEQ ID NO: 714318 - DNA, 75 bp, synthetic construct
  source 1..75: mol_type = other DNA
gaactgcggttgccggcggagggtacacctgcagcatggcaggcggggctgaatgtgacggttacggtacagtga

SEQ ID NO: 714319 - DNA, 75 bp, synthetic construct
  source 1..75: mol_type = other DNA
cttctcgtgcggatattattgatgggggtgaaattcagtttcatggttttgttacggatgaagcaccaaaatgga

SEQ ID NO: 714320 - DNA, 75 bp, synthetic construct
  source 1..75: mol_type = other DNA
cttctgtgtctgattttgaattacaccttccggcagaagggacacctgctcagtggcaggcaaaactgaatgtta

SEQ ID NO: 714321 - DNA, 75 bp, synthetic construct
  source 1..75: mol_type = other DNA
agggggtattggctgacggtcgcgtgatgaatcttgctgcggcatatgcctctgtagtatcggattttgaactgc

SEQ ID NO: 714322 - DNA, 75 bp, synthetic construct
  source 1..75: mol_type = other DNA
atgaaaacaaaatttcattataaaacctttctttctgccattatttcggtggccctgttttattcggcggtgcta

SEQ ID NO: 714323 - DNA, 75 bp, synthetic construct
  source 1..75: mol_type = other DNA
tgaggtggctgagcgaggtggtcccggattcaccccctttattaccttcagcagtaacggacagccttttactgt

SEQ ID NO: 714324 - DNA, 75 bp, synthetic construct
  source 1..75: mol_type = other DNA
catgcagatattcttgatggcggcgaaattcagtttaacggctttgtcacggatgaagcccccaaatggacctgg

SEQ ID NO: 714325 - DNA, 75 bp, synthetic construct
  source 1..75: mol_type = other DNA
cgctcgccggggatgaacgctttacccggctggcaaatcttgccgctgaacgcttcgcacaactcgatctgaccg

SEQ ID NO: 714326 - DNA, 75 bp, synthetic construct
  source 1..75: mol_type = other DNA
agggaagaacagcgtctgtttggacaagctgcattaacctaccgatatgaagatgaaaataaatctccggtcagt

SEQ ID NO: 714327 - DNA, 75 bp, synthetic construct
  source 1..75: mol_type = other DNA
tggcagcgccatgcaaggaggggaagtcattacagtattgcctcctgttgcagaaagcctcagccagtcatcagg

SEQ ID NO: 714328 - DNA, 75 bp, synthetic construct
  source 1..75: mol_type = other DNA
ccggagggaacaaaaggcaggtccccgcaaaacgtcaaaaccgcggctcccgaaactcaacagatgatgggggct

SEQ ID NO: 714329 - DNA, 75 bp, synthetic construct
  source 1..75: mol_type = other DNA
gattttgctccaatcttactgtaaaagatggtggaacaatttcaactagatataggaatataacgaagcgtttaa

SEQ ID NO: 714330 - DNA, 75 bp, synthetic construct
  source 1..75: mol_type = other DNA
gcattgccagcgcgaagaatgatggagaacggtgaatacgaatatggagctttgcttgagtggttttacgatcaa

SEQ ID NO: 714331 - DNA, 75 bp, synthetic construct
  source 1..75: mol_type = other DNA
catttccgcgcctctgtcccggtgcgtgacccggaaacgggaaatgtgtcggggcagctttctttcaccctgaat

SEQ ID NO: 714332 - DNA, 75 bp, synthetic construct
  source 1..75: mol_type = other DNA
ggattaacaccattgattaccttcagcagtaacggacagactttttccataagtgagggcactggcaccacggcg

SEQ ID NO: 714333 - DNA, 75 bp, synthetic construct
  source 1..75: mol_type = other DNA
tgaggtggcagagcgagggggacccggattaacaccattgattaccttcagcagtaacggacagactttttccat

SEQ ID NO: 714334 - DNA, 75 bp, synthetic construct
  source 1..75: mol_type = other DNA
actgctaaagacgcgatgcagtcaccaggcagggtatggacctgctcttcctgcggctgtcagttgatacttcat

SEQ ID NO: 714335 - DNA, 75 bp, synthetic construct
  source 1..75: mol_type = other DNA
tttgaagtaacgctgtttgccgtcgtggctctgttagtgtctccgctcggtattgttgatgtcgcaggacaccag

SEQ ID NO: 714336 - DNA, 75 bp, synthetic construct
  source 1..75: mol_type = other DNA
ggcgctgcactggttgaacctgagctgtatggaagggtttgataccggttgtgaagagtttgaaaaattaactaa

SEQ ID NO: 714337 - DNA, 75 bp, synthetic construct
  source 1..75: mol_type = other DNA
actcgctggcaatgggtgcgaaaaccattgtgaatggcgataaaggtattggtatcggttatggtgcctatgtgg

SEQ ID NO: 714338 - DNA, 75 bp, synthetic construct
  source 1..75: mol_type = other DNA
gatgccagcgcagcaggcattggctctactgctgtgggttataactctgttgccaaaggcgatagcagcgtggcc

SEQ ID NO: 714339 - DNA, 75 bp, synthetic construct
  source 1..75: mol_type = other DNA
tgccgatgctctgggcgggaacgctgtggtgaatgcggacggcagtatcaccacaccgacttatgccatcgctgg

SEQ ID NO: 714340 - DNA, 75 bp, synthetic construct
  source 1..75: mol_type = other DNA
cactgacgccgttaacggctcacagctcaaaaccaccaacgacaacgtgacgaccaacaccaccaacatcgccac

SEQ ID NO: 714341 - DNA, 75 bp, synthetic construct
  source 1..75: mol_type = other DNA
cactgacgccgttaacggctcacagctcaaaaccaccaacgaaaacgtgccgaccaacaccaccaacatcgccac

SEQ ID NO: 714342 - DNA, 75 bp, synthetic construct
  source 1..75: mol_type = other DNA
tcggtgacgctctggatgcgcttgatgagaacgcgctgctgtgggatgcgaccgccaataacggcgaaggggctt

SEQ ID NO: 714343 - DNA, 75 bp, synthetic construct
  source 1..75: mol_type = other DNA
tgcaaacggtgcagtctcgtccaccagcagcgacgccattaacggttcacaactttatggtgttagtgactacat

SEQ ID NO: 714344 - DNA, 75 bp, synthetic construct
  source 1..75: mol_type = other DNA
ccagcaagatcaccaatgtcaaagccggtgacctgacagctggcagcactgacgccgttaacggctcccagctca

SEQ ID NO: 714345 - DNA, 75 bp, synthetic construct
  source 1..75: mol_type = other DNA
tggtcaaggtagcagcagctccgttgataccggcattgccttgggtagcagctccgtttccagtcgcgtgattgt

SEQ ID NO: 714346 - DNA, 75 bp, synthetic construct
  source 1..75: mol_type = other DNA
gggtataaatctaacgcaaatggattatatagccttgcaataggtaaagaggcgcaaaccaccggtgatgacagc

SEQ ID NO: 714347 - DNA, 75 bp, synthetic construct
  source 1..75: mol_type = other DNA
gacggtgaactgcttggcgcattgtcgatcggtgacgatggtaaatatcgtcaaatcatcaatgttgccgatggt

SEQ ID NO: 714348 - DNA, 75 bp, synthetic construct
  source 1..75: mol_type = other DNA
atgggccgttcaagaaattgatcggcggctggaagtttacaccgttgagtccggaagcgtgccgtatcgagtttc

SEQ ID NO: 714349 - DNA, 75 bp, synthetic construct
  source 1..75: mol_type = other DNA
cactgacgccgttaacggctcccagctcaaaaccaccaacgaaaacgtgacgaccaacaccaccaacatcgccac

SEQ ID NO: 714350 - DNA, 75 bp, synthetic construct
  source 1..75: mol_type = other DNA
gttacgtgatgttgctattgaatgtcacggcacggatcagcttcgcgcccgcttaagcaaaaccctttccagtta

SEQ ID NO: 714351 - DNA, 75 bp, synthetic construct
  source 1..75: mol_type = other DNA
agttgaagcaaagcgtgcaggaaacgaagcaatacaccgatcagcgaatggttgagatggataacaaactgtcta

SEQ ID NO: 714352 - DNA, 75 bp, synthetic construct
  source 1..75: mol_type = other DNA
agcgttcaacgacgccagcgcacagggtgttggcgctacagctataggttataactctgtcgccaaaggcgatag

SEQ ID NO: 714353 - DNA, 75 bp, synthetic construct
  source 1..75: mol_type = other DNA
ttggtaaacaggcggagtcgctcatcggtaaggccggcagtatggcgaccagattcacgggtatgacgggggcag

SEQ ID NO: 714354 - DNA, 75 bp, synthetic construct
  source 1..75: mol_type = other DNA
ttccgttgttgttagcaacataccatcgtttactgttgcggcaggaacacctgctaaggttattaaatgcattgg

SEQ ID NO: 714355 - DNA, 75 bp, synthetic construct
  source 1..75: mol_type = other DNA
cataaaccgaataacaattggcaaaggggtgctaataggtagtaatgtattaattacggatcatagtcatgggaa

SEQ ID NO: 714356 - DNA, 75 bp, synthetic construct
  source 1..75: mol_type = other DNA
gatggtaaatatcgtcaaatcatcaacgtcgcggatggttctgaagcccatgacgctgttactgttcgccagttg

SEQ ID NO: 714357 - DNA, 75 bp, synthetic construct
  source 1..75: mol_type = other DNA
ttgctgtgggatgcgacagccaataacggcgaaggggcttacaacgccagtcatgatggcaaagccagcatcatc

SEQ ID NO: 714358 - DNA, 75 bp, synthetic construct
  source 1..75: mol_type = other DNA
cactgacgccgttaacggctcgcagctcaaaaccaccaacgagaacgtggcgaccaacaccaccaacatcgccac

SEQ ID NO: 714359 - DNA, 75 bp, synthetic construct
  source 1..75: mol_type = other DNA
aaagataaaactgccagtgtaatcactaacgtcgctaacggtgcaatctctgctgccagcagcgacgcgattaac

SEQ ID NO: 714360 - DNA, 75 bp, synthetic construct
  source 1..75: mol_type = other DNA
ggtactaatggtgacgcaagcgtgatcactgatgtcgcagatggtgaaatttcagactccagttctgacgcagta

SEQ ID NO: 714361 - DNA, 75 bp, synthetic construct
  source 1..75: mol_type = other DNA
gcacagccagtaatgcaactggtgataagagtcttgcgcttggtagtaatagcagtgccaacggtattaactctg

SEQ ID NO: 714362 - DNA, 75 bp, synthetic construct
  source 1..75: mol_type = other DNA
tacagctgtaggttataacgcagttgcctctcatgccagcagtgtagccatcggtcaggacagcatcagcgaagt

SEQ ID NO: 714363 - DNA, 75 bp, synthetic construct
  source 1..75: mol_type = other DNA
ataccgtcaaatcatcaacgtcgccgatggttccgaagcccatgacgccgttacggttcgccagctgcaaaatgc

SEQ ID NO: 714364 - DNA, 75 bp, synthetic construct
  source 1..75: mol_type = other DNA
gcgcctcaggtattggtgctacggctgtgggttataactctgttgccgaaggtgatagcagcgtggccattggtc

SEQ ID NO: 714365 - DNA, 75 bp, synthetic construct
  source 1..75: mol_type = other DNA
tagccaacagttatgatgctattaatggctcacaactttatagtttagctgattcatttacgtcataccttggcg

SEQ ID NO: 714366 - DNA, 75 bp, synthetic construct
  source 1..75: mol_type = other DNA
catttggtagcggagctaatgccattggtgactattctcttgctctgggaggaactacctatactggaggcatct

SEQ ID NO: 714367 - DNA, 75 bp, synthetic construct
  source 1..75: mol_type = other DNA
acagtgaacaacctcggtgaagatgcgctgaaatgggatgacaccacaggcgcatttactgccgcacacggcacc

SEQ ID NO: 714368 - DNA, 75 bp, synthetic construct
  source 1..75: mol_type = other DNA
tgctgtgggatgaaactgcaagtgcattcagcgccggtcacggtggcaatgccagcaaaattaccaatgtcgcaa

SEQ ID NO: 714369 - DNA, 75 bp, synthetic construct
  source 1..75: mol_type = other DNA
cgggggagacttacccgaaatctgatttattcaacaaagccaccatgatggtcgggcgagagttaaccgcgcttt

SEQ ID NO: 714370 - DNA, 75 bp, synthetic construct
  source 1..75: mol_type = other DNA
gcgtctggcccggacagtgggaagggaaaatatttatcgatggtgaacaggtagatattcgtaattgccaacaag

SEQ ID NO: 714371 - DNA, 75 bp, synthetic construct
  source 1..75: mol_type = other DNA
aatattttcctgggtaacgaaataacccacaatggtattatggactatgatctgatgacgctacgctgtcagaag

SEQ ID NO: 714372 - DNA, 75 bp, synthetic construct
  source 1..75: mol_type = other DNA
agcactgcaagcaccattacgtcctatttgggcggcggcgcggcaatgagtaatgacggcgtatttaccggtcct

SEQ ID NO: 714373 - DNA, 75 bp, synthetic construct
  source 1..75: mol_type = other DNA
aagctgatggctctatcgactacagcaacatcactctcggtggtggtaacggcggtacgactcgcatcagcaacg

SEQ ID NO: 714374 - DNA, 75 bp, synthetic construct
  source 1..75: mol_type = other DNA
cgacggctattggcaataacgcgcatgcaaaaggggtgaatagcatcgcgatgggctccgggagcattgccgata

SEQ ID NO: 714375 - DNA, 75 bp, synthetic construct
  source 1..75: mol_type = other DNA
aatggtcgttgggtctacaaattacaaggtagtaccaatagccagggtgaatactccgccgcgctcggtgccggt

SEQ ID NO: 714376 - DNA, 75 bp, synthetic construct
  source 1..75: mol_type = other DNA
agataccgatgccgttaacgttggtcagttgaaagtgacggacgcacaggtttcccagaacacccagagcattac

SEQ ID NO: 714377 - DNA, 75 bp, synthetic construct
  source 1..75: mol_type = other DNA
atatcgtaaccaccggtagcactaagtacttcaagaccaacaccgatggcgcagatgccaacgcgcagggtaaag

SEQ ID NO: 714378 - DNA, 75 bp, synthetic construct
  source 1..75: mol_type = other DNA
aaaggcaatagtgcactgtctttaggcaacgaagcgcaagcattaggcgaagatagcgtctcattaggtagaaaa

SEQ ID NO: 714379 - DNA, 75 bp, synthetic construct
  source 1..75: mol_type = other DNA
acgggaaagataaaactgccagtgtaatcactaacgtcgctaacggtgcagtctctgccaccagcagcgatgcca

SEQ ID NO: 714380 - DNA, 75 bp, synthetic construct
  source 1..75: mol_type = other DNA
aaatagccaaatgattaaccagcttgctggtaacactagcgaaacctacatcgaggaaaacggtgcgggtattaa

SEQ ID NO: 714381 - DNA, 75 bp, synthetic construct
  source 1..75: mol_type = other DNA
ctggctctgtggcaaacgaagaaaatacgatctccgtaggttcttccactaaccaacgccgtatcaccaacgttg

SEQ ID NO: 714382 - DNA, 75 bp, synthetic construct
  source 1..75: mol_type = other DNA
tcggtgagttttccgtcggcagtgaggacggtcaacgtcagatcactaacgtcgccgccggttcacaagatactg

SEQ ID NO: 714383 - DNA, 75 bp, synthetic construct
  source 1..75: mol_type = other DNA
aggcacaatgggttcaggaagtgttgccgtcggggcaagagctaatgccggggtggggagtaccgcaattggctt

SEQ ID NO: 714384 - DNA, 75 bp, synthetic construct
  source 1..75: mol_type = other DNA
attaagtgggccaacctacactattggtggtactgactacactaacgtcggtgatgctctggcagccattaacac

SEQ ID NO: 714385 - DNA, 75 bp, synthetic construct
  source 1..75: mol_type = other DNA
accaccaacatcaccaacctgaccaatgatgtcgcggatatcaacaccacgatcacgggcctggaagatgatgcc

SEQ ID NO: 714386 - DNA, 75 bp, synthetic construct
  source 1..75: mol_type = other DNA
ttaccacaaatcagatgatcacccagatagccggcaataccagcaacacgtatgttgaagagcacggggcgggag

SEQ ID NO: 714387 - DNA, 75 bp, synthetic construct
  source 1..75: mol_type = other DNA
tactgccagcaaaatcactaacgttgcagcaggtgaacttagcgcaaccagtaccgacgttgtgaacggcagcca

SEQ ID NO: 714388 - DNA, 75 bp, synthetic construct
  source 1..75: mol_type = other DNA
gccgtagggaacggtgaccttgtggtaacagtggaggatgcgtcaggccgaaaaactaccacaacatatccggtc

SEQ ID NO: 714389 - DNA, 75 bp, synthetic construct
  source 1..75: mol_type = other DNA
agtcgtttatccaattgcactacctaagctttcacgttttatcagcatagcggaaagaataagaacagattacga

SEQ ID NO: 714390 - DNA, 75 bp, synthetic construct
  source 1..75: mol_type = other DNA
cgctgactaatttgagtggaaaggatgtagctggtcttctcgcataccttggtttgggagaagcggcaacgagga

SEQ ID NO: 714391 - DNA, 75 bp, synthetic construct
  source 1..75: mol_type = other DNA
cctgatttacgcggtgaatttattcgtggctgggatgatgggcgtagtgcggatgcggggagaacaatattatcc

SEQ ID NO: 714392 - DNA, 75 bp, synthetic construct
  source 1..75: mol_type = other DNA
aacgccggacgcaaagctgacagcactggtaaatgagaaacgccgggttgcgctgaatatgctctatatcgaccc

SEQ ID NO: 714393 - DNA, 75 bp, synthetic construct
  source 1..75: mol_type = other DNA
ttgcgaccggaaaccgtggaacatctggctacaatgccgcgatgaatgtgcgtattgccagcagaacgcatatca

SEQ ID NO: 714394 - DNA, 75 bp, synthetic construct
  source 1..75: mol_type = other DNA
acgcgactgcagtttgttcttttgccgctgtcagggggaataatacgattgtgttcaaagtcgacaaaccactga

SEQ ID NO: 714395 - DNA, 75 bp, synthetic construct
  source 1..75: mol_type = other DNA
ttcggttatggatcatactcactatatggagttatggaccggtgaagggcttgctgcaaacagcacccgtgcagg

SEQ ID NO: 714396 - DNA, 75 bp, synthetic construct
  source 1..75: mol_type = other DNA
ctgcccgttggtgtgcctgttccgtggccgtcagcaacactgccagagggatggctgaaatgtaacggcgcagca

SEQ ID NO: 714397 - DNA, 75 bp, synthetic construct
  source 1..75: mol_type = other DNA
accaccacggcaatggcggtaatgctgatgatatttcggctggtgtttccggttcacctcccaaaaactttgtca

SEQ ID NO: 714398 - DNA, 75 bp, synthetic construct
  source 1..75: mol_type = other DNA
tttgacgcatcccatgttgttcccacggcgtcagagaaccgaccgcgcaacatcgcattcaactacattgtaagg

SEQ ID NO: 714399 - DNA, 75 bp, synthetic construct
  source 1..75: mol_type = other DNA
ggggccggaaggggtaattacacaatggggtattttcggtttccccgttggacagacagggacgaatgttgtttt

SEQ ID NO: 714400 - DNA, 75 bp, synthetic construct
  source 1..75: mol_type = other DNA
tgacggatattggcgcggcgaaacttgccagcgccgccgcgatcggtgtgccgttaaaaattacccatatggcgg

SEQ ID NO: 714401 - DNA, 75 bp, synthetic construct
  source 1..75: mol_type = other DNA
gatggcggtgcgccttttggtgcagggcgtggattcgttatgtccgtagaaggcccaacattaaccggctttaat

SEQ ID NO: 714402 - DNA, 75 bp, synthetic construct
  source 1..75: mol_type = other DNA
ccacaaaaagggggtagcattgctgattggtgcaactgggttaagaaaacttgggacaaaatctttagttctgaa

SEQ ID NO: 714403 - DNA, 75 bp, synthetic construct
  source 1..75: mol_type = other DNA
gatatttgccagagctaacagtcgttccacccaacattgcacttcctaatgtcgccattattaagaaaggaattc

SEQ ID NO: 714404 - DNA, 75 bp, synthetic construct
  source 1..75: mol_type = other DNA
gtaactgttacgactgcagatgcctggatgaatttcacaactagtgaaatggttgtgggtatttatatcaccccg

SEQ ID NO: 714405 - DNA, 75 bp, synthetic construct
  source 1..75: mol_type = other DNA
gggaatacccacttccctttctctgatttaaataatgtgcagattgctgatttggtgagtaaatttttgaaggaa

SEQ ID NO: 714406 - DNA, 75 bp, synthetic construct
  source 1..75: mol_type = other DNA
gtccgccgtcgtggataaatccggccccgctatcctcttcacccactctcagggtggcggaccaggctggtacac

SEQ ID NO: 714407 - DNA, 75 bp, synthetic construct
  source 1..75: mol_type = other DNA
tttggatgatgatgattattacttatgtaataaagttgaagtccagttacgtcatctaatagttaataacttaga

SEQ ID NO: 714408 - DNA, 75 bp, synthetic construct
  source 1..75: mol_type = other DNA
gggcagccaatccatcatcaactggagagatctttattacgtttcctgtcgcgttctctgcatacccgatgtatg

SEQ ID NO: 714409 - DNA, 75 bp, synthetic construct
  source 1..75: mol_type = other DNA
gcttagcggtgggccgatcatactatacgacggtaacaagaactcagattacatgtgctggctacggtggcttta

SEQ ID NO: 714410 - DNA, 75 bp, synthetic construct
  source 1..75: mol_type = other DNA
tgccctgataggtggcgcaccggcaacgctggatacgctgaaagaaattgcggcagctatcaataatgacccgaa

SEQ ID NO: 714411 - DNA, 75 bp, synthetic construct
  source 1..75: mol_type = other DNA
catcattacgaccgggcagattgacccctcttatacttcagcacaacagccagcagcagtcggtatttcgtcgcc

SEQ ID NO: 714412 - DNA, 75 bp, synthetic construct
  source 1..75: mol_type = other DNA
gaacaggtgatccctgaaaatgaggggggttggtggatacgtgaagtgggtctgtttgatgagtccggggcattg

SEQ ID NO: 714413 - DNA, 75 bp, synthetic construct
  source 1..75: mol_type = other DNA
taaatggccccagtcatttggtgtcctgtttgctgtgtttgctacaaaagtttctggctcgactaacgaagcata

SEQ ID NO: 714414 - DNA, 75 bp, synthetic construct
  source 1..75: mol_type = other DNA
gacaagatgttcacttctcggcggcaaatgttgttccaacagcaaatgaaaatcgtccacgtaacatcaccttta

SEQ ID NO: 714415 - DNA, 75 bp, synthetic construct
  source 1..75: mol_type = other DNA
tgccagcgccgccgcgctcggtgtgccgttaaaaattacccatatggcggtcggcgatggcggcggagtattgcc

SEQ ID NO: 714416 - DNA, 75 bp, synthetic construct
  source 1..75: mol_type = other DNA
ggtttgggagaaggttcagcattacctgttggtgcacctgttccgtggccttcagagacacctccaacaggctgg

SEQ ID NO: 714417 - DNA, 75 bp, synthetic construct
  source 1..75: mol_type = other DNA
gctataaaccgcgactggctgaaggcagcgggcgcacccagaccgtgcgcatggtgctgataaccagcagcacgg

SEQ ID NO: 714418 - DNA, 75 bp, synthetic construct
  source 1..75: mol_type = other DNA
gctataagccgcaactggctgaaggcagcgggcgcacccagaccgtgcgcatggtgctgataaccagcagcacgg

SEQ ID NO: 714419 - DNA, 75 bp, synthetic construct
  source 1..75: mol_type = other DNA
tttcaggagtgtttaatggtctttttgctgttaaacaaacaaatggtttaggtggtgtttctgtagcaaaaagta

SEQ ID NO: 714420 - DNA, 75 bp, synthetic construct
  source 1..75: mol_type = other DNA
attcagcaccaccattaacaatgcgctggcactgaaagcgccgttgtcgagtccggcacttaccggaacgccaac

SEQ ID NO: 714421 - DNA, 75 bp, synthetic construct
  source 1..75: mol_type = other DNA
ctacaagccctgatagagtgtattaatcaacaaaaaaatattattgaagcgttcactattcgcgatgttaaaaag

SEQ ID NO: 714422 - DNA, 75 bp, synthetic construct
  source 1..75: mol_type = other DNA
cacccataagcgaaaaagatccatgcaacatacatatgataccaactgagcgtatggaagagcgtttcagagcca

SEQ ID NO: 714423 - DNA, 75 bp, synthetic construct
  source 1..75: mol_type = other DNA
atgcagccaaacgacatcactttttttcaacgattccaggatgacattctggctgggcgtaaaaccatcacaatc

SEQ ID NO: 714424 - DNA, 75 bp, synthetic construct
  source 1..75: mol_type = other DNA
gggagaaggctctgcattacctgttggtgtgcctgttccgtggccttcagctacaccaccgacaggctggttgaa

SEQ ID NO: 714425 - DNA, 75 bp, synthetic construct
  source 1..75: mol_type = other DNA
gcactcaccggaacgccaaccgcacctactgcggcacagtcggtcaacaatacacagattgccaccacggcattt

SEQ ID NO: 714426 - DNA, 75 bp, synthetic construct
  source 1..75: mol_type = other DNA
cgccaacgccagcagcagggaataacaccacgcagattgcgaccaccgcgtttgttcaggcggctctgacggctc

SEQ ID NO: 714427 - DNA, 75 bp, synthetic construct
  source 1..75: mol_type = other DNA
tgtagctggtcttctcacataccttggtttgggagaagccagatatgtcattcagcgaggagctaatgccaatgg

SEQ ID NO: 714428 - DNA, 75 bp, synthetic construct
  source 1..75: mol_type = other DNA
gtgctggggttaggcaacattggcgcgctggcaggcaaaccggtgatggaaggcaagggcgttctgtttaagaaa

SEQ ID NO: 714429 - DNA, 75 bp, synthetic construct
  source 1..75: mol_type = other DNA
ttccggcgcgggtgctgcagcaatcgcctgtatgaacctgctggtagcgctgggtctgcaaaaacataacatcgt

SEQ ID NO: 714430 - DNA, 75 bp, synthetic construct
  source 1..75: mol_type = other DNA
ccggaatacatcattccaaaaccgtttgatccgcgcttgatcgttaagatcgctcctgcggtggcgaaagcggcg

SEQ ID NO: 714431 - DNA, 75 bp, synthetic construct
  source 1..75: mol_type = other DNA
aggcggtaacgctcaaaattgatccgtctgtggtgctggcaacccggcagtatgttgatgaccagataatccagg

SEQ ID NO: 714432 - DNA, 75 bp, synthetic construct
  source 1..75: mol_type = other DNA
tggctgaaatgcaatggtgcgcctttttctgccgaagagtatccggaactggcaaaagtttatccgacaaataaa

SEQ ID NO: 714433 - DNA, 75 bp, synthetic construct
  source 1..75: mol_type = other DNA
agtttgtgactctaaaggcgttatctatcaggggcgagagccgaacatggcggaaaccaaagccgcttacgcggt

SEQ ID NO: 714434 - DNA, 75 bp, synthetic construct
  source 1..75: mol_type = other DNA
agcccccactgccgcacagtcggttaacaatacacagattgccaccacggcttttgtgaaatcggcgattgcggc

SEQ ID NO: 714435 - DNA, 75 bp, synthetic construct
  source 1..75: mol_type = other DNA
gcggttggtggatacgtgaagtgggcttgtttgatgagtccggggcattaattgccgtgggcaactgcccggaaa

SEQ ID NO: 714436 - DNA, 75 bp, synthetic construct
  source 1..75: mol_type = other DNA
gaaattagtggaaaggtaggtacagaaactcgtcctcgtaacatcgcttttaattatattgtgagggccgcatga

SEQ ID NO: 714437 - DNA, 75 bp, synthetic construct
  source 1..75: mol_type = other DNA
tccacgacgatcagcacggcacggcaatcatcagcactgccgccatcctcaacggcttgcgcgtggtggagaaaa

SEQ ID NO: 714438 - DNA, 75 bp, synthetic construct
  source 1..75: mol_type = other DNA
tgtagctggtcttctcacataccttggtttgggagaaggttcagcattacctgttggtgcgcctgttccgtggcc

SEQ ID NO: 714439 - DNA, 75 bp, synthetic construct
  source 1..75: mol_type = other DNA
gtagggagttagggccagcagcgacagcaggcgacggcggcgttatccgatcacttggcggcagcggcgggacaa

SEQ ID NO: 714440 - DNA, 75 bp, synthetic construct
  source 1..75: mol_type = other DNA
aacaaaccgccatcgccaccatcctctccgatatggacaaggaaattcagaccctgcaacagcgtctggacaaaa

SEQ ID NO: 714441 - DNA, 75 bp, synthetic construct
  source 1..75: mol_type = other DNA
tcagttttagagaagttatacatatctataccgaaaagtatcgtagagcaaaaggctattgctaatgtattaacc

SEQ ID NO: 714442 - DNA, 75 bp, synthetic construct
  source 1..75: mol_type = other DNA
gactggctgctgacgcaactggaagcaatcccgcatatcaaacgtctgcgcatccacagccgtctgccgattgtg

SEQ ID NO: 714443 - DNA, 75 bp, synthetic construct
  source 1..75: mol_type = other DNA
aggaactcatccttggatgagttccggcgaattacacctaaaacaggtgtatgctgtagccgattatataaccga

SEQ ID NO: 714444 - DNA, 75 bp, synthetic construct
  source 1..75: mol_type = other DNA
gctgatttacctactaatgtaggttttgggagtacggaatttcatgtattaagggaaaatgaagactccgattct

SEQ ID NO: 714445 - DNA, 75 bp, synthetic construct
  source 1..75: mol_type = other DNA
aacggtcgagtacggcggggaaagatgtgcctgcgggggataaactgactgaggtgggcgtgattcctgaggatt

SEQ ID NO: 714446 - DNA, 75 bp, synthetic construct
  source 1..75: mol_type = other DNA
gatatctgaatgtgctggatcttgcctggccccggtaccgttataccctgaataattttcctgcgctcagataca

SEQ ID NO: 714447 - DNA, 75 bp, synthetic construct
  source 1..75: mol_type = other DNA
ccagcagcgggccggaggtgatcattgaaacgctgcagatcaccgttggctcagatgttcactacctgtgccagg

SEQ ID NO: 714448 - DNA, 75 bp, synthetic construct
  source 1..75: mol_type = other DNA
ctgccggattcctgaatatcctgaaaaccgcgtggccgcgataccgatacacgcttcctgtgttcccgggactcc

SEQ ID NO: 714449 - DNA, 75 bp, synthetic construct
  source 1..75: mol_type = other DNA
agttgctgacgctggtatctggatatatggtgccgaaactggcgcgcgagattggcggcgaacccagtaaaacgc

SEQ ID NO: 714450 - DNA, 75 bp, synthetic construct
  source 1..75: mol_type = other DNA
cttaaccagagcgttctgttacgtggtgtgaacgataacgcacaaacgctggcaaacctgagtaatgcgttgttc

SEQ ID NO: 714451 - DNA, 75 bp, synthetic construct
  source 1..75: mol_type = other DNA
accaacgcagcacaacagcgcgtactcgctgacaaaaatgaaaaaatagactcactctccaccagactggagaag

SEQ ID NO: 714452 - DNA, 75 bp, synthetic construct
  source 1..75: mol_type = other DNA
ttccccagcaaacatcattccacagaattcctgttctataacctcgacagtcgttatgaggaactgagaagttta

SEQ ID NO: 714453 - DNA, 75 bp, synthetic construct
  source 1..75: mol_type = other DNA
gagcgccagctcaggcggctaaacagcaagcggctccggcagcaggcccgtgcatcagcggctggcgtgaaagaa

SEQ ID NO: 714454 - DNA, 75 bp, synthetic construct
  source 1..75: mol_type = other DNA
gcggctgcagcggcaaaagacgttaacgttccggatatcggcagcgacgaagttgaagtgaccgaaatcctggtc

SEQ ID NO: 714455 - DNA, 75 bp, synthetic construct
  source 1..75: mol_type = other DNA
tttcatgaagctttgtgcagcattagccgccaccatggggctgagtagcaaagccgccgcagagatggccgaatc

SEQ ID NO: 714456 - DNA, 75 bp, synthetic construct
  source 1..75: mol_type = other DNA
gcgcgccagctcaggcggctaaacagaaagcggctccggcagcaggcccgtgcatcagcggctggcgtgaaagaa

SEQ ID NO: 714457 - DNA, 75 bp, synthetic construct
  source 1..75: mol_type = other DNA
gtgcgccagctcaggcggctaaacagcaagcggctccggcagcaggcccttgcatcagcggctggcgtgaaagaa

SEQ ID NO: 714458 - DNA, 75 bp, synthetic construct
  source 1..75: mol_type = other DNA
gagcgccagctcaggcggctaaacaggaagcggctccggcagcaggcccctgcatcagcggctggcgtgaaagaa

SEQ ID NO: 714459 - DNA, 75 bp, synthetic construct
  source 1..75: mol_type = other DNA
gtcctgatggctgacagcatcatcccggcaccgaaacgccgtacaggcattgcggcggcgagacgagcagcaaag

SEQ ID NO: 714460 - DNA, 75 bp, synthetic construct
  source 1..75: mol_type = other DNA
tttagtcaaaatggtcataaacatgattttggtatcgagctcccgtttgccgcattgacctcattgaagaaagga

SEQ ID NO: 714461 - DNA, 75 bp, synthetic construct
  source 1..75: mol_type = other DNA
cgatgaatacaaacgctcatgccatgagtccagcattcgtattccctgcgtggcgcggggcgggccgttcagcgg

SEQ ID NO: 714462 - DNA, 75 bp, synthetic construct
  source 1..75: mol_type = other DNA
attatcgctatcggttcctgctctgcgtggggcggtgttgccgcggctggggttaaccctaccggcgcggtcagc

SEQ ID NO: 714463 - DNA, 75 bp, synthetic construct
  source 1..75: mol_type = other DNA
aacaaacataacgctctcgagaagtacaaagggcagtatgtgttggttgtggatggttccatcccattaaaagat

SEQ ID NO: 714464 - DNA, 75 bp, synthetic construct
  source 1..75: mol_type = other DNA
ttgacacccgtcatcaggtttcttcgcccgtcaaaggtgtaacgacagaagtggttgttgcaggtagcgatagca

SEQ ID NO: 714465 - DNA, 75 bp, synthetic construct
  source 1..75: mol_type = other DNA
ttcagaggcatcgctgacatatcgtaactatgtctccacggacctcagtgctccggcatctgtaccgtacacgct

SEQ ID NO: 714466 - DNA, 75 bp, synthetic construct
  source 1..75: mol_type = other DNA
gattttcacgatttaatttcaccagtaactctgtgggtgatggtgtgaattttgttgctgtcagaccgcgaaata

SEQ ID NO: 714467 - DNA, 75 bp, synthetic construct
  source 1..75: mol_type = other DNA
ccgtttaaagcgaaatacctgaaactgacagaaagctcagtgcaatcaggtgatgtggtatcttctttagtcatg

SEQ ID NO: 714468 - DNA, 75 bp, synthetic construct
  source 1..75: mol_type = other DNA
gataccggaactttaaccattaaggggaatattgcagagtctccgtgtaaatttgaagcgggtggtgattcagta

SEQ ID NO: 714469 - DNA, 75 bp, synthetic construct
  source 1..75: mol_type = other DNA
gggcactctggagcagcagactggccgattcctaaatctggatggagtaaggggccggaaggggtaattacacaa

SEQ ID NO: 714470 - DNA, 75 bp, synthetic construct
  source 1..75: mol_type = other DNA
gtcttctcgcataccttggtttgggagaaggtgctccagctattggcgttccgttcttctggccctccgcggcaa

SEQ ID NO: 714471 - DNA, 75 bp, synthetic construct
  source 1..75: mol_type = other DNA
gagcacatctaataacgttcacgtttcaatgatcgtggatgaccaggtcactaataccggtttttatgtccgctg

SEQ ID NO: 714472 - DNA, 75 bp, synthetic construct
  source 1..75: mol_type = other DNA
taccgttggtgtgcctgttccgtggccttcagccactccgcgacaggctggctgaaatgcaacggggcggctttt

SEQ ID NO: 714473 - DNA, 75 bp, synthetic construct
  source 1..75: mol_type = other DNA
cctcattcacagtacgcgccaaaagccagcccgacatttaccggaacccccaaagcgccaacgccagcggcgggg

SEQ ID NO: 714474 - DNA, 75 bp, synthetic construct
  source 1..75: mol_type = other DNA
ggatgttgccggccttctcgcataccttggtttaggagaaggctcagcattgcctgttggcgtacctgttccgtg

SEQ ID NO: 714475 - DNA, 75 bp, synthetic construct
  source 1..75: mol_type = other DNA
gataaaataaccggaaacgataaggcgatagccagtagcaacgataccgtgggttattatctctatttaggtgat

SEQ ID NO: 714476 - DNA, 75 bp, synthetic construct
  source 1..75: mol_type = other DNA
attcgaagcgggtggtgattcagtaagtattaatatgccaactgtaccaaccactgtctttgaaggtaaagctaa

SEQ ID NO: 714477 - DNA, 75 bp, synthetic construct
  source 1..75: mol_type = other DNA
gggatgtggggacaggggaaaatcagataccggacatggcctcttttgccagtggtgatggatggatgaaattac

SEQ ID NO: 714478 - DNA, 75 bp, synthetic construct
  source 1..75: mol_type = other DNA
gtagacgaagaagcaaacctcgcgaactgggtagtgcctgggaaaatggtgcccggtatgggtggcgcgatggat

SEQ ID NO: 714479 - DNA, 75 bp, synthetic construct
  source 1..75: mol_type = other DNA
cagcctgagttcacagataaaatactctccaggaaacccggggcggttcaattggttgtcatgaatcgaagataa

SEQ ID NO: 714480 - DNA, 75 bp, synthetic construct
  source 1..75: mol_type = other DNA
ggtcgtcagacgctgcttggcgcggcggatacgctgattgatctggtgagccgtgaaaaactgcgtcatatcttc

SEQ ID NO: 714481 - DNA, 75 bp, synthetic construct
  source 1..75: mol_type = other DNA
gcggttatcacccaggcgcaacagatggcaggcttcccgtacagcgaaattccgcaccttatcaccgtgggtttt

SEQ ID NO: 714482 - DNA, 75 bp, synthetic construct
  source 1..75: mol_type = other DNA
aatcacatttctgaccatccataaggacaaaaacactggctggcgagtcaactatgacgatgaaaccatcagcgt

SEQ ID NO: 714483 - DNA, 75 bp, synthetic construct
  source 1..75: mol_type = other DNA
gttcctgactattcataaagataaaaatacgggatggagagcaaactatgaagacgagacagtaaacgtaagcat

SEQ ID NO: 714484 - DNA, 75 bp, synthetic construct
  source 1..75: mol_type = other DNA
ccgccaaagctatggatgttggcctttccacaatgacaagatgggtcaaacaactgcgtgatgagcgtcagggca

SEQ ID NO: 714485 - DNA, 75 bp, synthetic construct
  source 1..75: mol_type = other DNA
ctaataccggtttttatgtccgctgccagatgtacgacggaacaccatcaacaagtgctttttcctggagggttt

SEQ ID NO: 714486 - DNA, 75 bp, synthetic construct
  source 1..75: mol_type = other DNA
ccgctaaaaattacccatatggcggtgggcgatggcggtggagtattaccaacgccggacgcaaagcagacggca

SEQ ID NO: 714487 - DNA, 75 bp, synthetic construct
  source 1..75: mol_type = other DNA
tattcgtggctgggatgacggacgtggtatggatacggggagggcaatattatcagctcagggcgatgccatacg

SEQ ID NO: 714488 - DNA, 75 bp, synthetic construct
  source 1..75: mol_type = other DNA
aaagcgcgtgaatacggcatcatcaaccacgatgttgacagcttcgcgccacgtgcctttttctcaaccctgacc

SEQ ID NO: 714489 - DNA, 75 bp, synthetic construct
  source 1..75: mol_type = other DNA
tgcgtaagatagcaaaacaggccacgcagggcgaatggtgcgcatttatttcgtcgggtactggtacgtatgcgg

SEQ ID NO: 714490 - DNA, 75 bp, synthetic construct
  source 1..75: mol_type = other DNA
cactgacgccaatggtacgcagcatattggccttcatccgatcccggatcgttccggtctgtggcgctatctcag

SEQ ID NO: 714491 - DNA, 75 bp, synthetic construct
  source 1..75: mol_type = other DNA
gccgtacggataatggtacggacggtcaggcgtatatggatgatgcgggaaactggcgatgcgggcgtcaggtta

SEQ ID NO: 714492 - DNA, 75 bp, synthetic construct
  source 1..75: mol_type = other DNA
aatctcaggaccggtcgcataactatgggacatggtctggatgttacagaagatgtatttgcaggccgttttgcg

SEQ ID NO: 714493 - DNA, 75 bp, synthetic construct
  source 1..75: mol_type = other DNA
agcaatatgagcaatcctttttttaatgctggtcagtcactggcatcaaaaatgcaacaatcgtctacccgtggc

SEQ ID NO: 714494 - DNA, 75 bp, synthetic construct
  source 1..75: mol_type = other DNA
atgattaaggtcagcgcgctaggttctcgtcatagaaaaacattcgacgatgtaatgacggagccgccaaaatct

SEQ ID NO: 714495 - DNA, 75 bp, synthetic construct
  source 1..75: mol_type = other DNA
agtctgataagtcactaacctatggttcagtatgcagtggtattgaagctgcgacagtagcctggagcaatcttg

SEQ ID NO: 714496 - DNA, 75 bp, synthetic construct
  source 1..75: mol_type = other DNA
gggtatgtcgtggttggtggtgatgttgccccgtcatcagcactaaaactgtattcaagacctattcagaaatta

SEQ ID NO: 714497 - DNA, 75 bp, synthetic construct
  source 1..75: mol_type = other DNA
caactggcgctggggatgctgctggcggtgcaaatagccgcgggcgtgctggcgtttgtggtgatgattgtgctg

SEQ ID NO: 714498 - DNA, 75 bp, synthetic construct
  source 1..75: mol_type = other DNA
atcttttttacagcatatctttcagtttcgttatcggttttattgagcaaaccgtcccgtcaagtggaaatataa

SEQ ID NO: 714499 - DNA, 75 bp, synthetic construct
  source 1..75: mol_type = other DNA
aagacaaatcttgaaattcttgcatggactgacatcacagagaaattatatatatatctaatttggggggttgga

SEQ ID NO: 714500 - DNA, 75 bp, synthetic construct
  source 1..75: mol_type = other DNA
ttcattcaccatatatataataggctatctcggtgggatgatattaatctattacactgctatttttttatgtct

SEQ ID NO: 714501 - DNA, 75 bp, synthetic construct
  source 1..75: mol_type = other DNA
cgagtcggggcgcgcggtgaaggcaaattcgagcgcattagctgggaagaagcctacgacatcatcgcgaccaat

SEQ ID NO: 714502 - DNA, 75 bp, synthetic construct
  source 1..75: mol_type = other DNA
ggtaattcccgccataacattacaaggaaaattattattatggcgaccgccgggattttaaccatacgtgcagca

SEQ ID NO: 714503 - DNA, 75 bp, synthetic construct
  source 1..75: mol_type = other DNA
aaaatgatctggaactatgccggtaactgcctgattaaccagcattctgaaatcaaccgcacccatgaaatcctc

SEQ ID NO: 714504 - DNA, 75 bp, synthetic construct
  source 1..75: mol_type = other DNA
acggtgaaatcgcaacccgtgctatctcgatgctggcgattctgaccggtaacgttggtattaacggggggaaca

SEQ ID NO: 714505 - DNA, 75 bp, synthetic construct
  source 1..75: mol_type = other DNA
cacgccagcctttcatgctggtaacagagcataaaaactatgaaaacgttgtgttagtgggtatggattacgaag

SEQ ID NO: 714506 - DNA, 75 bp, synthetic construct
  source 1..75: mol_type = other DNA
tcaggagaaagcggttcgcggaaccatctctaatcgcctgaaaaacacgattgccagcgaccccacaaaactgga

SEQ ID NO: 714507 - DNA, 75 bp, synthetic construct
  source 1..75: mol_type = other DNA
aaaactcgacttttataccttactggacaattgggtgactaaagggatgaaaccagacgttaagcagcagcacta

SEQ ID NO: 714508 - DNA, 75 bp, synthetic construct
  source 1..75: mol_type = other DNA
gggtgaagggccagatggcgtggctaaaacaccggaatgggcctcgcaaatcaccggtgttccggcagacaaaat

SEQ ID NO: 714509 - DNA, 75 bp, synthetic construct
  source 1..75: mol_type = other DNA
ttcactcaacttacggcaacgttgatgtgctgaaagcggcttgccgtcaggaaatgtggatcaacccgcttgatg

SEQ ID NO: 714510 - DNA, 75 bp, synthetic construct
  source 1..75: mol_type = other DNA
ttgaacaggcacgccagaaatctaatgcccgcatgatcatcatcgatccgcgctataccgacaccggtgccgggc

SEQ ID NO: 714511 - DNA, 75 bp, synthetic construct
  source 1..75: mol_type = other DNA
gcggttgtatcaacgtactgaccactcaacgcccatctcctctcgccaaggggaatccgtcacatacaaacctcg

SEQ ID NO: 714512 - DNA, 75 bp, synthetic construct
  source 1..75: mol_type = other DNA
gatgcgtcacctgtatgcgcagtcgcgggaagcgatccctgagttgccgacctttgaagagttccgcaagcaggg

SEQ ID NO: 714513 - DNA, 75 bp, synthetic construct
  source 1..75: mol_type = other DNA
taacggtgaaatcgcaacccgtgctatctcgatgctggcgattctgaccggtaacgttggtattaatggagggaa

SEQ ID NO: 714514 - DNA, 75 bp, synthetic construct
  source 1..75: mol_type = other DNA
tttgtggctaccgttttatctctcattaccgacgctggtgatcagttatgtgctgggcgtggtgctgaaagggca

SEQ ID NO: 714515 - DNA, 75 bp, synthetic construct
  source 1..75: mol_type = other DNA
tatcaacaccattctgagttacttcgtgatgattaaaccggtgctcggttccagttatcgccagtacatcctgag

SEQ ID NO: 714516 - DNA, 75 bp, synthetic construct
  source 1..75: mol_type = other DNA
acctgcgttttggcgcttggctgacggccgacagcatcatcaactatgtcaacactaacctttccacgctggtgc

SEQ ID NO: 714517 - DNA, 75 bp, synthetic construct
  source 1..75: mol_type = other DNA
acttcggtatcgctaactcgattattcagcgaaaagaaatcagccaccttgaactcaccacgttgtactggctga

SEQ ID NO: 714518 - DNA, 75 bp, synthetic construct
  source 1..75: mol_type = other DNA
acctgcgttttggcgcctggctgacggccgacagcatcatcaactacgtcaataccaacctttccacgctggtgc

SEQ ID NO: 714519 - DNA, 75 bp, synthetic construct
  source 1..75: mol_type = other DNA
caagatcggcatgattgaaaccagctctgtgctggcgggctttaccttcacggtggtgagcgcccatttctggcc

SEQ ID NO: 714520 - DNA, 75 bp, synthetic construct
  source 1..75: mol_type = other DNA
gcggcgccaagtggtcagcgatggcgactatcgtcatcattggcctggggctggtgcagatgaccgtgctggcgc

SEQ ID NO: 714521 - DNA, 75 bp, synthetic construct
  source 1..75: mol_type = other DNA
gtgaatatagggaacggaaaacagtgccgtttctccacggcaggactgaaagcaaatactaacaaagttcaggag

SEQ ID NO: 714522 - DNA, 75 bp, synthetic construct
  source 1..75: mol_type = other DNA
tactgggcacgtctgagagcggaccgctctttactaaagagtcgtctgacactgtgggtatcgtcagtattcctg

SEQ ID NO: 714523 - DNA, 75 bp, synthetic construct
  source 1..75: mol_type = other DNA
cctttagtaccactgtttttgatggtgtatctgtttttctgaacggtagttacagtaagcgtccatatctggaca

SEQ ID NO: 714524 - DNA, 75 bp, synthetic construct
  source 1..75: mol_type = other DNA
aataccaacctttcaacgctggtgctggcgcgtattctcggcgcgggcgtggcagggggatacaacctggcgtac

SEQ ID NO: 714525 - DNA, 75 bp, synthetic construct
  source 1..75: mol_type = other DNA
acttcggtattgctaactcgattattcagcgaaaagaaatcagccaccttgaactcaccacgctgtactggctga

SEQ ID NO: 714526 - DNA, 75 bp, synthetic construct
  source 1..75: mol_type = other DNA
gaataacagcaacgaactggacaaggcgtttcattcagataccggcctgttctggctgggaagcctggattatgg

SEQ ID NO: 714527 - DNA, 75 bp, synthetic construct
  source 1..75: mol_type = other DNA
ggtcggcattattaacttcccggtactgctgggtctgatggtggtgtcgagcaactttgtgccgctggtatttgg

SEQ ID NO: 714528 - DNA, 75 bp, synthetic construct
  source 1..75: mol_type = other DNA
aagctgctgtcggtggtggggattatcaactttccggcgctgctggggctgatggtggtgtcgaataactttgta

SEQ ID NO: 714529 - DNA, 75 bp, synthetic construct
  source 1..75: mol_type = other DNA
ggcaccaaatcgttcctcgaatctctgggatctgatcaggcgaaagacagccagctgatcggtcagtttggtgtt

SEQ ID NO: 714530 - DNA, 75 bp, synthetic construct
  source 1..75: mol_type = other DNA
ctaaagttgacgagtcgctggaaaaactggctgacgaagttgatgagagcgcgaaagaagcggagaaagcactga

SEQ ID NO: 714531 - DNA, 75 bp, synthetic construct
  source 1..75: mol_type = other DNA
aaagtaaatttaatcgttcaggggaagcccgcatcgggcatctggatgaggtcacgcacattatttctgatgagc

SEQ ID NO: 714532 - DNA, 75 bp, synthetic construct
  source 1..75: mol_type = other DNA
aacgtggccgtcgtaccgccgatgaagctgaacccaatcatcacccgcgtgttatttccggcattcgccaaaatt

SEQ ID NO: 714533 - DNA, 75 bp, synthetic construct
  source 1..75: mol_type = other DNA
cgatgcgtgggcgaaagataatccagtgtttgtcggttcttcactgatgtttttgaaagagggcgatcgcgtatc

SEQ ID NO: 714534 - DNA, 75 bp, synthetic construct
  source 1..75: mol_type = other DNA
ctcattacttgaaacctgcaacaactggcagattcagagggcggagattttatctcgcaatccagatatggcaat

SEQ ID NO: 714535 - DNA, 75 bp, synthetic construct
  source 1..75: mol_type = other DNA
caatatagtgttgatgtttttgttaacaatgaaaaaaccggtacggctgagttaaacattacaccggcagatgaa

SEQ ID NO: 714536 - DNA, 75 bp, synthetic construct
  source 1..75: mol_type = other DNA
gtgatggcgaactgcgcgttcgtgtctctttcgataaagacaagcgcacgctgaccatctccgataacggcgtgg

SEQ ID NO: 714537 - DNA, 75 bp, synthetic construct
  source 1..75: mol_type = other DNA
atgaatgttgacggcctgaaaacgggtcatacttctggtgccgggtttaatctcattgcttcggctgtagatggg

SEQ ID NO: 714538 - DNA, 75 bp, synthetic construct
  source 1..75: mol_type = other DNA
gactccaacccctccgggtcggcgcgtactgcaaccacgcccggcagtatttcactttgagtctgtaacacggag

SEQ ID NO: 714539 - DNA, 75 bp, synthetic construct
  source 1..75: mol_type = other DNA
tgaggtggttggcatcggtcaggaagtgaaaggcttcaagatcggcgatcgcgtttctggcgaaggccatatcac

SEQ ID NO: 714540 - DNA, 75 bp, synthetic construct
  source 1..75: mol_type = other DNA
aaatccccgacaatatttccgatgacttagccgcaatttttgatcccttcggtaacgccgtgcataccgcgctgt

SEQ ID NO: 714541 - DNA, 75 bp, synthetic construct
  source 1..75: mol_type = other DNA
tgataccgcttcagcgtaaaatcatgaacgccgtgaacagcgatcccgatataccggaacacctttatcttcgtt

SEQ ID NO: 714542 - DNA, 75 bp, synthetic construct
  source 1..75: mol_type = other DNA
aaatcacagatgaaagtgatgccagtgatatccgggaagtcgaaacccgcgcatttggcttcagcaaagaagccg

SEQ ID NO: 714543 - DNA, 75 bp, synthetic construct
  source 1..75: mol_type = other DNA
ctctttctcagggagtttagtctccaggatttccggggcggttcaggtctggcgctcaatattattgttctgtgg

SEQ ID NO: 714544 - DNA, 75 bp, synthetic construct
  source 1..75: mol_type = other DNA
catcgatgatttccagaaaggctttgacgccatgcgttcaggccagtccggtaaagttattctgagctgggatta

SEQ ID NO: 714545 - DNA, 75 bp, synthetic construct
  source 1..75: mol_type = other DNA
aaggctttgatgtcggtctggaaatgtccggtgcgccgccagcgtttcgtaccatgctcgacaccatgaaccacg

SEQ ID NO: 714546 - DNA, 75 bp, synthetic construct
  source 1..75: mol_type = other DNA
atgtcggtctggaaatgtccggtgcgccgccagcgtttcgtaccatgcttgacaccatgaaccacggcggtcgta

SEQ ID NO: 714547 - DNA, 75 bp, synthetic construct
  source 1..75: mol_type = other DNA
ggtggtcgtacccatttgtgccgcaacacgataggcgttggtgttaatcgcccgggctgctttgccgaatatctg

SEQ ID NO: 714548 - DNA, 75 bp, synthetic construct
  source 1..75: mol_type = other DNA
gccgatcattacccatcgtttctctatcgatgatttccagaagggctttgacgccatgcgttcgggccagtccgg

SEQ ID NO: 714549 - DNA, 75 bp, synthetic construct
  source 1..75: mol_type = other DNA
tatcaccgacgttaatgaatatcgtctcgaactggcgcgcaaaatgggtattacgcgcgcagttaacgtcgcgaa

SEQ ID NO: 714550 - DNA, 75 bp, synthetic construct
  source 1..75: mol_type = other DNA
ccagctggaagcggcagcgtttgactatataacctttggggatattgcgattgccaaaattcgtaacggctgggg

SEQ ID NO: 714551 - DNA, 75 bp, synthetic construct
  source 1..75: mol_type = other DNA
atgagtaaaaagaaaaaataccccgtgctacacgatggcgtggcaaaaaaaacagccagcaaaatggcgtttatt

SEQ ID NO: 714552 - DNA, 75 bp, synthetic construct
  source 1..75: mol_type = other DNA
tatgtcgcctgagctcgagggtgagtttcgtaaaaaaattgaacagtcaaaaggcgcaggaaattttaaatccat

SEQ ID NO: 714553 - DNA, 75 bp, synthetic construct
  source 1..75: mol_type = other DNA
tgggggacatttcggccaaggatgaatttgcgagcgtgaagaacatcagcgcccaggacattctgaacgcgcacc

SEQ ID NO: 714554 - DNA, 75 bp, synthetic construct
  source 1..75: mol_type = other DNA
gcgctttgaagatgatggctatttttgcaccatcgaagtcaccgcaacctcaaccataacgctggagacgctgac

SEQ ID NO: 714555 - DNA, 75 bp, synthetic construct
  source 1..75: mol_type = other DNA
agaaccgattcccggtgtgaaacattctcagcgaggttccaagatgcgcacacctcatctggtgccgctttcaaa

SEQ ID NO: 714556 - DNA, 75 bp, synthetic construct
  source 1..75: mol_type = other DNA
tgctgagcgtggcaggtattacggttcctgatgccatggtggggcgtgatctgcaaaccgcccttgatgcaggtc

SEQ ID NO: 714557 - DNA, 75 bp, synthetic construct
  source 1..75: mol_type = other DNA
cactgattatcacaatatctggtatgacaatgagtatgaccactggcgactcccgattgatcgcctggcgctggc

SEQ ID NO: 714558 - DNA, 75 bp, synthetic construct
  source 1..75: mol_type = other DNA
atgacaaagaaacagcgtaataataaaaaattcaggtccatgaccggcagcaaggttgaatccttcacgccaggg

SEQ ID NO: 714559 - DNA, 75 bp, synthetic construct
  source 1..75: mol_type = other DNA
tatggagggaatcaacagtgacccggatatcaggcgactgggggaggtgaaatttattcttgaatttgatgagcc

SEQ ID NO: 714560 - DNA, 75 bp, synthetic construct
  source 1..75: mol_type = other DNA
atcaacagcgatccggaaattccgcgccacctgcatttgaattttactgaagaaacaacggtgaagggtgcagca

SEQ ID NO: 714561 - DNA, 75 bp, synthetic construct
  source 1..75: mol_type = other DNA
tgaagaagctatacgtaaaaaaatagagagcggtaacgggcttgggaatttccgtaacatgtttatcagtatccc

SEQ ID NO: 714562 - DNA, 75 bp, synthetic construct
  source 1..75: mol_type = other DNA
gtcgcagcaagcaacttgattttatcgtgttacaggagggcgagccgctggtctattcgccgtctgatgttgtgt

SEQ ID NO: 714563 - DNA, 75 bp, synthetic construct
  source 1..75: mol_type = other DNA
tcacatctacaactgggatgagtggtcgcaaaaaactatcccggtgccgatggttgtcggtcatgaatatgtcgg

SEQ ID NO: 714564 - DNA, 75 bp, synthetic construct
  source 1..75: mol_type = other DNA
gtttatgaggtcgacagccagtggggaaaagtgtatatcctgcgtgtattgcatactgcacagaagtggccatag

SEQ ID NO: 714565 - DNA, 75 bp, synthetic construct
  source 1..75: mol_type = other DNA
catgcgcggatacgcgagaaattacgtcaggatattggccgcaaaatgacggcaattggtgaagacctgcccgtt

SEQ ID NO: 714566 - DNA, 75 bp, synthetic construct
  source 1..75: mol_type = other DNA
atgctggccagccaggacaggaagcgcattcgtgagtacattgcggagcagaacctgatggccgccattgaactg

SEQ ID NO: 714567 - DNA, 75 bp, synthetic construct
  source 1..75: mol_type = other DNA
tgttctggtttatgagatcgatagccagtggggaaaagtgtatatcctgcgtgtattgcatactgcacagaagtg

SEQ ID NO: 714568 - DNA, 75 bp, synthetic construct
  source 1..75: mol_type = other DNA
tggccagccaggacaggaagtgcattcgtggatacattacggagcagaacctgatggccgccattgaactggacg

SEQ ID NO: 714569 - DNA, 75 bp, synthetic construct
  source 1..75: mol_type = other DNA
ctgatggccgccattgaactggacgaacggattggttattcagtcagcagcctggccgggcaaccgtataaaggc

SEQ ID NO: 714570 - DNA, 75 bp, synthetic construct
  source 1..75: mol_type = other DNA
agaacttacttatgctgattccggtgcgaaaattgttaataaaggtactgttgaaattcagaatttaggttttgc

SEQ ID NO: 714571 - DNA, 75 bp, synthetic construct
  source 1..75: mol_type = other DNA
actgtagctatcaaaacacagccatctaagaacatcggggctaatatgaaaaaacgtgttaacactgaaaaatca

SEQ ID NO: 714572 - DNA, 75 bp, synthetic construct
  source 1..75: mol_type = other DNA
aaagcgacgaaaggggagaacggtttcgctatcatcacctctaaccttggtagtggtgctaatgctgcttatgcc

SEQ ID NO: 714573 - DNA, 75 bp, synthetic construct
  source 1..75: mol_type = other DNA
actcgataatttattgtcatcgcataatatgacaatgacaacctattataaatatgttcgtaaccgactggaaag

SEQ ID NO: 714574 - DNA, 75 bp, synthetic construct
  source 1..75: mol_type = other DNA
ttaatggttttctgggggcagggaaaactactctgctaaaaaaccttcttacacaggcacacaaacggcgaatga

SEQ ID NO: 714575 - DNA, 75 bp, synthetic construct
  source 1..75: mol_type = other DNA
ggactccccgcggcagcgacccgcatcgcccggagttcggcagcaatctgcatctttatatcgactggcctgtag

SEQ ID NO: 714576 - DNA, 75 bp, synthetic construct
  source 1..75: mol_type = other DNA
tcgatcaaaaagtacgggcggcgtggatgtattacatcgccggacttaaccagagcgaaatcgccagtcagttag

SEQ ID NO: 714577 - DNA, 75 bp, synthetic construct
  source 1..75: mol_type = other DNA
ccacggcgagcctgagttttatcatatgtacagcgaaaaaagcctcacctggaacggtatcacccagcaaaaccg

SEQ ID NO: 714578 - DNA, 75 bp, synthetic construct
  source 1..75: mol_type = other DNA
tcactctatactggcccggtgatcaccagttaccgctatacccattatgactccagcgatgcaggtagtagttat

SEQ ID NO: 714579 - DNA, 75 bp, synthetic construct
  source 1..75: mol_type = other DNA
accgggccattccgcatgtggtgcgcgaatccgtcgatgccatccggcgctgggagccccgctgccagcttatgt

SEQ ID NO: 714580 - DNA, 75 bp, synthetic construct
  source 1..75: mol_type = other DNA
tcgcccggagttcggcagcaatctgcatctttatatcgactggcctgtagaccgggccattccgcatgtggtgcg

SEQ ID NO: 714581 - DNA, 75 bp, synthetic construct
  source 1..75: mol_type = other DNA
cctggccgggcagccgtataaaggccgcaacggtcgtgtggaaggtacccgggaactggttattcacccccattt

SEQ ID NO: 714582 - DNA, 75 bp, synthetic construct
  source 1..75: mol_type = other DNA
ggaactggttattcacccgcattttgttctggtttatgaggtcgacagccagtggggaaaagtgtatatcctgcg

SEQ ID NO: 714583 - DNA, 75 bp, synthetic construct
  source 1..75: mol_type = other DNA
gttgcggttggttttttctggttcgtgagctatctcttttttagttcgcttgccgcgttgttacggaaaaagacg

SEQ ID NO: 714584 - DNA, 75 bp, synthetic construct
  source 1..75: mol_type = other DNA
gcgttgcgttggcagattatattgccggcggtcagcgccagttcgtcgacatgatgaacaattacgcggagaaac

SEQ ID NO: 714585 - DNA, 75 bp, synthetic construct
  source 1..75: mol_type = other DNA
agtctagctgcttctttgttcgtttttaatttatcgtctggttttgcggcggaaaacattcctttttcacctcag

SEQ ID NO: 714586 - DNA, 75 bp, synthetic construct
  source 1..75: mol_type = other DNA
ctgaattgaaaaaaagcaccccaacaaaaaatgaggtgcttgcagcagatgaaatgaaagaagctattcttgatc

SEQ ID NO: 714587 - DNA, 75 bp, synthetic construct
  source 1..75: mol_type = other DNA
atataaaaaaggcaaaacaccactcagccatcgcaattggccgggcgaaccggtgcctgttatcactgaaagcat

SEQ ID NO: 714588 - DNA, 75 bp, synthetic construct
  source 1..75: mol_type = other DNA
agcctttcgtgtggccgcagagggggagttctgcaatgcgcaagatgtagactggccccctgaatctccagacaa

SEQ ID NO: 714589 - DNA, 75 bp, synthetic construct
  source 1..75: mol_type = other DNA
aacaaacccagcctgcaacgtgtggctaaatacagtaaaaacttcccccatgcgacgctcgccgcactggcagaa

SEQ ID NO: 714590 - DNA, 75 bp, synthetic construct
  source 1..75: mol_type = other DNA
caacaagaggggctggaatatgcgactgaggtggtgattgcacgccagtttattgcacggtgttatgagagtgat

SEQ ID NO: 714591 - DNA, 75 bp, synthetic construct
  source 1..75: mol_type = other DNA
agccgcattacttgccctgcgtttactgtatgcacagggacatggagaattactgcaaaccgtggcaaaccgctg

SEQ ID NO: 714592 - DNA, 75 bp, synthetic construct
  source 1..75: mol_type = other DNA
agccatcgcaattggccgggcgaaccggtgcctgttatcactgaaagcatcattcagacactgggtgatgaattg

SEQ ID NO: 714593 - DNA, 75 bp, synthetic construct
  source 1..75: mol_type = other DNA
ccggcaatgtggtccaggcctcgacttatcactaataatcagcctgttaccggtgacgctctggaaattatcggc

SEQ ID NO: 714594 - DNA, 75 bp, synthetic construct
  source 1..75: mol_type = other DNA
ggatgcgctaccaggtctgctgttggctttttcacatcgtccaaaagaaacatttccgttaattttaaattttgg

SEQ ID NO: 714595 - DNA, 75 bp, synthetic construct
  source 1..75: mol_type = other DNA
ctccgcagcggtcacatagaagcgttaattaacatatgggaaaatgacaacttctcacgttatcgtccggaaaag

SEQ ID NO: 714596 - DNA, 75 bp, synthetic construct
  source 1..75: mol_type = other DNA
gaggcactggcccgactaaaagggctaaaaaaagatgccactcaggtgagcaaaaacctgctcccgcgtcttgaa

SEQ ID NO: 714597 - DNA, 75 bp, synthetic construct
  source 1..75: mol_type = other DNA
ccagaccgagacttatcacgaataatcaacctgttactgatgacgctctggaaattattggcgaaatgctgcgct

SEQ ID NO: 714598 - DNA, 75 bp, synthetic construct
  source 1..75: mol_type = other DNA
gaacttacgcttgtaccgcaagcgtacaggtcgtcccaggaacactggacgcaggaacaacaaactacaatcagc

SEQ ID NO: 714599 - DNA, 75 bp, synthetic construct
  source 1..75: mol_type = other DNA
attgcacgccagtttattgcacggtgttatgagagtgatcctctggtagtcacattgcagtatcagaacgaggac

SEQ ID NO: 714600 - DNA, 75 bp, synthetic construct
  source 1..75: mol_type = other DNA
cagattttcacgatgattaccaaacggtaatggcatacaaagtttctgaagtcatcgctgcaatccgcgccgctg

SEQ ID NO: 714601 - DNA, 75 bp, synthetic construct
  source 1..75: mol_type = other DNA
cagcctgatctgcgcgaaatgcgtgaccagtcgcaggaagatccgcgtgaagcacaggctgcacagtgggaactg

SEQ ID NO: 714602 - DNA, 75 bp, synthetic construct
  source 1..75: mol_type = other DNA
cgttacacgcatgattttgtcagcgaaagaagagttggctaatgaaccgcatccgcttgatggcctgtccggtga

SEQ ID NO: 714603 - DNA, 75 bp, synthetic construct
  source 1..75: mol_type = other DNA
tgggtcactcaggatcaggccactctcgttacccaacatggccgtctggtgaagactctgctcggcggcgacaac

SEQ ID NO: 714604 - DNA, 75 bp, synthetic construct
  source 1..75: mol_type = other DNA
cctgtaagccaaacttacaagttaacttttgagcaatggctggaacagcagcatgacaaaattgatgttgattgt

SEQ ID NO: 714605 - DNA, 75 bp, synthetic construct
  source 1..75: mol_type = other DNA
attgctgtatgcaccctggttcagacctgatagggaaggttgaaatgactgagtggttagttgactttgctgccc

SEQ ID NO: 714606 - DNA, 75 bp, synthetic construct
  source 1..75: mol_type = other DNA
ctactgagtttatggctaatgcgccggaaggcgattttgaccgctcattctctgatggcgttctcgaagatatcg

SEQ ID NO: 714607 - DNA, 75 bp, synthetic construct
  source 1..75: mol_type = other DNA
cgattaatatggggggtttatccggcaaatgaaccgcgtcgtttacttaacgcctttcgtgtggccgctgagggg

SEQ ID NO: 714608 - DNA, 75 bp, synthetic construct
  source 1..75: mol_type = other DNA
atggcggcgctagcctgtatcgcgcaaaatgatagccaacagttgctcgacgaaatcgtccaacaagagggactg

SEQ ID NO: 714609 - DNA, 75 bp, synthetic construct
  source 1..75: mol_type = other DNA
attccgggaaagtgcttattttcccagcacagccactgaccacgctaacaccagagcaggttgctgatatcactg

SEQ ID NO: 714610 - DNA, 75 bp, synthetic construct
  source 1..75: mol_type = other DNA
agggcgtggagatgtttgcggagtgtgcatacacgcttgaacatcatgatcacgcagtagccttcgccgctgagc

SEQ ID NO: 714611 - DNA, 75 bp, synthetic construct
  source 1..75: mol_type = other DNA
attcctgaaactccggccaccgatgctttcctggctgaagtacgggcgcagggcgtggatacagctatcgagcac

SEQ ID NO: 714612 - DNA, 75 bp, synthetic construct
  source 1..75: mol_type = other DNA
catcgcagccacaactggcagaagaggtgatgccgtggttaagtacacaagcccaggcagtggtgaatggttatt

SEQ ID NO: 714613 - DNA, 75 bp, synthetic construct
  source 1..75: mol_type = other DNA
tatccagttaaaacttggcgcatcgcttgatggtcgtacggcgatggagagcggtgagagtcagtggatcacttc

SEQ ID NO: 714614 - DNA, 75 bp, synthetic construct
  source 1..75: mol_type = other DNA
aatacctccgtgctgctgcttgaagcgggcggcccggactatcgctttgacttccgcacccagatgcccgcagcg

SEQ ID NO: 714615 - DNA, 75 bp, synthetic construct
  source 1..75: mol_type = other DNA
ttggcccgatggatcgcaccgtcacgccgcagggccgtcgcgccagcaccgcgcgtggctatctcgatcaggcca

SEQ ID NO: 714616 - DNA, 75 bp, synthetic construct
  source 1..75: mol_type = other DNA
gtcgtacggcgatggccagcggtgagagccagtggattacttcacctcaggcgcggcgcgatgtacaacgcctgc

SEQ ID NO: 714617 - DNA, 75 bp, synthetic construct
  source 1..75: mol_type = other DNA
acgtttcactactcacccaaacccaaatgttgggtgtgtcattgtgaaagatggtgaaattgtcggcgaaggtta

SEQ ID NO: 714618 - DNA, 75 bp, synthetic construct
  source 1..75: mol_type = other DNA
ctggagaaaaagccaaaggtgcgactgcgtatgtgacactcgaaccttgcagccatcacggccgtacgccgcctt

SEQ ID NO: 714619 - DNA, 75 bp, synthetic construct
  source 1..75: mol_type = other DNA
cgaacaggactggcaggagttccgcgacgcaattcgcatcacccgggagatcatgcatcaaccggcgctggatca

SEQ ID NO: 714620 - DNA, 75 bp, synthetic construct
  source 1..75: mol_type = other DNA
atctttgacggcaaacgcgcggtaggcgtcgagtggctggaaggcgacagcaccatcccaacccgcgcaacggcc

SEQ ID NO: 714621 - DNA, 75 bp, synthetic construct
  source 1..75: mol_type = other DNA
cttaacggttatcagcaggaaggtttcggcccgatggaccgcaccgtcacgccgcagggccgtcgcgccagcacc

SEQ ID NO: 714622 - DNA, 75 bp, synthetic construct
  source 1..75: mol_type = other DNA
gccgcagggccgccgcgccagcaccgcgcgcggttatctcgatcaggccaaatcgcgcccgaacctgaccattcg

SEQ ID NO: 714623 - DNA, 75 bp, synthetic construct
  source 1..75: mol_type = other DNA
aagagtctggcggcgtattttgtggcgaatgggatgccagtaagagcgaaaaaactgaatcgcgatttgaactaa

SEQ ID NO: 714624 - DNA, 75 bp, synthetic construct
  source 1..75: mol_type = other DNA
tactcacgctatgaccgatcacatcatttttgacggcaaacgcgcggtgggcgtcgagtggctggaaggcgacag

SEQ ID NO: 714625 - DNA, 75 bp, synthetic construct
  source 1..75: mol_type = other DNA
ctgatgatgagtgaagccgagcaattgaataaaggctttctcaagcgcatgcgcaccggctttccttatatccag

SEQ ID NO: 714626 - DNA, 75 bp, synthetic construct
  source 1..75: mol_type = other DNA
acaagttgccaccgtatgacaccgaagagatgcttgaggctatgcgtatttttctggaagaacaggaaggtgagc

SEQ ID NO: 714627 - DNA, 75 bp, synthetic construct
  source 1..75: mol_type = other DNA
ttttctggccgggctggcacttctgaaaatgaatccggcagaggcttaccgactggctgcatgggctgatgatga

SEQ ID NO: 714628 - DNA, 75 bp, synthetic construct
  source 1..75: mol_type = other DNA
ttttaccatgattttaaagagttgaataaattaactgttccttttttaatttattcttttagtaaaaagaaacca

SEQ ID NO: 714629 - DNA, 75 bp, synthetic construct
  source 1..75: mol_type = other DNA
tatcggcaccgcccaaaccggttattgatggcaccgataacagcaatctgcctgaaatcctcgtttcaccaccgt

SEQ ID NO: 714630 - DNA, 75 bp, synthetic construct
  source 1..75: mol_type = other DNA
tccctttacccgcctggttacccagcgattaatatggggggtttatccggcaaatgaaccgcgtcgtttactcaa

SEQ ID NO: 714631 - DNA, 75 bp, synthetic construct
  source 1..75: mol_type = other DNA
gacattgcagtatcagaacgaggactatggctatggttatcgctcagaaacctataacgaattcgatctccgact

SEQ ID NO: 714632 - DNA, 75 bp, synthetic construct
  source 1..75: mol_type = other DNA
ctttgaagcaggcggatttattcgcagccgtgaggaatttgcgttgatcagacatgagataaatgaagggggatc

SEQ ID NO: 714633 - DNA, 75 bp, synthetic construct
  source 1..75: mol_type = other DNA
cattggtgagttgttgaaagataaacaactgaattttgtcgcctgtggtttgcaaagtgcttacgtcagcgagaa

SEQ ID NO: 714634 - DNA, 75 bp, synthetic construct
  source 1..75: mol_type = other DNA
atggcaaaacactaccatcgcctgaaagctgtaaaagattatcaggagattgacgacgtactgttcaagttttcg

SEQ ID NO: 714635 - DNA, 75 bp, synthetic construct
  source 1..75: mol_type = other DNA
cgaaataaacataccggcacatctgcaacagaaaacagtcacagtaagagccagataaaaaggaacattcaggag

SEQ ID NO: 714636 - DNA, 75 bp, synthetic construct
  source 1..75: mol_type = other DNA
aataaagaagtgctgttatgtgcaggcgcgattgcttcaccgcagatcctgcaacgctccggcgtgggtagcgct

SEQ ID NO: 714637 - DNA, 75 bp, synthetic construct
  source 1..75: mol_type = other DNA
ctggcattcccgctacagggtaaacgctacaactgggcctatgaaacggagcccgaaccgtttatgaataaccgt

SEQ ID NO: 714638 - DNA, 75 bp, synthetic construct
  source 1..75: mol_type = other DNA
tattgtcattgagtgtggtgctgatgtggtattgaaatgttgtctgatggcgaaaactccagccaccactcccac

SEQ ID NO: 714639 - DNA, 75 bp, synthetic construct
  source 1..75: mol_type = other DNA
aacttctggcgaaccacactttcctgcattctgggcacgcttttctggctgtggacgggctggacttccggcagt

SEQ ID NO: 714640 - DNA, 75 bp, synthetic construct
  source 1..75: mol_type = other DNA
atcagataaagataaataacgtcagagtccataagtacacaatattgtatacatcaaactgcattatggatattg

SEQ ID NO: 714641 - DNA, 75 bp, synthetic construct
  source 1..75: mol_type = other DNA
ctgaaagaagagaaaattgaagcgcaagtcgataaatcttcgttaatggcatgcaccagcgataccttcaacagc

SEQ ID NO: 714642 - DNA, 75 bp, synthetic construct
  source 1..75: mol_type = other DNA
caaggttcaggcccgcgttcgtttgcctgagtgcgataacctgcgcactaactggcttaacgtgctacagcgcaa

SEQ ID NO: 714643 - DNA, 75 bp, synthetic construct
  source 1..75: mol_type = other DNA
ctcccggatattggcgagcaggtggaggttctgctggatgataacggcgaggatggcgtggtgctgggggctgtc

SEQ ID NO: 714644 - DNA, 75 bp, synthetic construct
  source 1..75: mol_type = other DNA
aagcaaccaggttttgcttaacttgttagccgaaaaaggaaaagttagtgtggtgacatctgcatctgtaactac

SEQ ID NO: 714645 - DNA, 75 bp, synthetic construct
  source 1..75: mol_type = other DNA
gtgtatctcttgatgtctggaaagatattgaagaatcaatcaaattgattcttggtgatgaaggtacatatacac

SEQ ID NO: 714646 - DNA, 75 bp, synthetic construct
  source 1..75: mol_type = other DNA
aagtttcagtattagtgtgttacccagtgtatacacaacaaaaaatacgatcagttctgatagttccggttccgg

SEQ ID NO: 714647 - DNA, 75 bp, synthetic construct
  source 1..75: mol_type = other DNA
tttcttcactggtacgaatagaaaactcctatgcgtggggactggctggttataccgcgctgatcattgtgatca

SEQ ID NO: 714648 - DNA, 75 bp, synthetic construct
  source 1..75: mol_type = other DNA
gaaactaaacgcttcagtataagtatattaccgggtggtaaatatacatcaaaaaactctatcagttcggacagc

SEQ ID NO: 714649 - DNA, 75 bp, synthetic construct
  source 1..75: mol_type = other DNA
catcagaacatcagcttatggatgttaattatcagggcgcgctttccacgtttcttgataaagttgcggcaaact

SEQ ID NO: 714650 - DNA, 75 bp, synthetic construct
  source 1..75: mol_type = other DNA
tcagcggcgcgcctgcagtaactgaagcctacgtgaacgagttttcccgtttatggggcgaaggaaaggacgtgg

SEQ ID NO: 714651 - DNA, 75 bp, synthetic construct
  source 1..75: mol_type = other DNA
tggcttaagcccgcagggaatgcagatcccgcgtagcccacggcaaattgtgatgctccagcgcaaagccagcaa

SEQ ID NO: 714652 - DNA, 75 bp, synthetic construct
  source 1..75: mol_type = other DNA
aatctggcggtggtcggcgcaggtccggcggggctggcgtttgccatcaatgcggcggcgcgtggtcatcaggta

SEQ ID NO: 714653 - DNA, 75 bp, synthetic construct
  source 1..75: mol_type = other DNA
atgcacaccgggctggaggaatacccggacggtgccgagcggctggcagcgttttatgccgaacgcgcccgtcac

SEQ ID NO: 714654 - DNA, 75 bp, synthetic construct
  source 1..75: mol_type = other DNA
atcgatcatccgaaggtattgagttatctcgatgtactgcgcgacaaagcgccggtaggcaacaaagttgccatc

SEQ ID NO: 714655 - DNA, 75 bp, synthetic construct
  source 1..75: mol_type = other DNA
cgatggcgcgaccgtttctcgctgatgcggagctgctgtcaaaagcgcaatcgggacgagccgatgagatcaaca

SEQ ID NO: 714656 - DNA, 75 bp, synthetic construct
  source 1..75: mol_type = other DNA
tggtgaatctaccagccagaatattgccgagttctgcacagaatggggcatcgacagcagcctgcaacaagccgg

SEQ ID NO: 714657 - DNA, 75 bp, synthetic construct
  source 1..75: mol_type = other DNA
ttaataccgcgattgcctttgtttttcgtgccgttgtgattaagtttgtgctttttactgcggtctatcttttta

SEQ ID NO: 714658 - DNA, 75 bp, synthetic construct
  source 1..75: mol_type = other DNA
ggatcacttatggggtcgaggggcagttcagaactgtcgttgcggccacaagtaagagcaaggctgcttcaattc

SEQ ID NO: 714659 - DNA, 75 bp, synthetic construct
  source 1..75: mol_type = other DNA
tctgatgtcttttgatgttgttttgcccatgatggtttcagccatgtttacgcgtttctttatacgccgcattcc

SEQ ID NO: 714660 - DNA, 75 bp, synthetic construct
  source 1..75: mol_type = other DNA
cgtgctgacgctctttttttatcgtcgtggtgattccagacataaaccgctgatgtcgtggctggcctggctgct

SEQ ID NO: 714661 - DNA, 75 bp, synthetic construct
  source 1..75: mol_type = other DNA
cgtcgtgactccagacacaaaccgctgatgtcatggctggcctggttgttgatgacggtatatgcgcttccgcca

SEQ ID NO: 714662 - DNA, 75 bp, synthetic construct
  source 1..75: mol_type = other DNA
ttttaacctgctgttctgcgtgctggtaatacgcgcacgcggtaacgtttcaaaaatccttgtattacgaaggcg

SEQ ID NO: 714663 - DNA, 75 bp, synthetic construct
  source 1..75: mol_type = other DNA
tttcttgataaagttgcggcaaactacaacctgtactggacatatgagtctggcaggattgctttttcaaacgag

SEQ ID NO: 714664 - DNA, 75 bp, synthetic construct
  source 1..75: mol_type = other DNA
gttgggaaagtcgatattcgtaaactcgaacactacgcgcagaatgacccggacgcctacggctattccggtgcg

SEQ ID NO: 714665 - DNA, 75 bp, synthetic construct
  source 1..75: mol_type = other DNA
tattgagcgccaacggtgagcgtagcccggtcaacgatcatccgttctgtcttttcaatccgcaggaagatgctc

SEQ ID NO: 714666 - DNA, 75 bp, synthetic construct
  source 1..75: mol_type = other DNA
gtttaacaaaaaaaaaaataaaagtattatacaagccagtctttgatatatctggaaagttagatgaagatttgt

SEQ ID NO: 714667 - DNA, 75 bp, synthetic construct
  source 1..75: mol_type = other DNA
cgaagagttgctaccggtcatttcatttaatgccaaaacatcgactgatgagcagaagaaacacgacgattttgt

SEQ ID NO: 714668 - DNA, 75 bp, synthetic construct
  source 1..75: mol_type = other DNA
ggagaaaatcgagaaaccggcggggatcagtaatccaaaagatttccgcaacgagattgttaacttcgtactgcg

SEQ ID NO: 714669 - DNA, 75 bp, synthetic construct
  source 1..75: mol_type = other DNA
tttccgtaataacaaaaacaacgaagccttcctcgaccgtgtttacatcgtgaaggtgccgtattgcttgcgcat

SEQ ID NO: 714670 - DNA, 75 bp, synthetic construct
  source 1..75: mol_type = other DNA
ttttgttgttgcttttggttcatataatttttgacttttatttgcaaactgaggagatggttagagaaaaggcat

SEQ ID NO: 714671 - DNA, 75 bp, synthetic construct
  source 1..75: mol_type = other DNA
attgttgagcactttcttgccagatggtttgtagccctgatttttgtcccttttctgttaattggcactttggca

SEQ ID NO: 714672 - DNA, 75 bp, synthetic construct
  source 1..75: mol_type = other DNA
gttaataaagataactctcaatttggggatgtaattccttttgattctgcttatgacacatcttatggaggtctg

SEQ ID NO: 714673 - DNA, 75 bp, synthetic construct
  source 1..75: mol_type = other DNA
atgaaaaaggagacttagttttaactttacaagatgtaatattcttatcaaacagagccgataaaaaacccagcc

SEQ ID NO: 714674 - DNA, 75 bp, synthetic construct
  source 1..75: mol_type = other DNA
gcctttagcgacgtactgggtactcaggtccgcgacatgtttgtaaaagatgttccgcagggcgatgaactgctg

SEQ ID NO: 714675 - DNA, 75 bp, synthetic construct
  source 1..75: mol_type = other DNA
ctttatttacattttttcattttgcaatagatgtcgcaaagtcgattacctctctgaaagtaaagggtttttatt

SEQ ID NO: 714676 - DNA, 75 bp, synthetic construct
  source 1..75: mol_type = other DNA
gctggcctgctggcgcgtcaggctgggcctggcagccgaagtagctttgctcatgccaccagcccactgaccgga

SEQ ID NO: 714677 - DNA, 75 bp, synthetic construct
  source 1..75: mol_type = other DNA
tgtggaaactgaagcgccgtggtgaagcggataacaagggttcgatgtggtggctgattcaggctggtgaaagtg

SEQ ID NO: 714678 - DNA, 75 bp, synthetic construct
  source 1..75: mol_type = other DNA
agtgggagcgagtctgtgccgctctgcgggagctgaacaagtgccgggatattctccgggatattaccgccacca

SEQ ID NO: 714679 - DNA, 75 bp, synthetic construct
  source 1..75: mol_type = other DNA
tgtggtggcagctcgccttggaatcagtcgtgaagaggctgtcaacgaactgtggaaactgaaacgccgtggaga

SEQ ID NO: 714680 - DNA, 75 bp, synthetic construct
  source 1..75: mol_type = other DNA
tgtttcaacctcaaattttgcggcaacaagcggcaccccttcatttacaggatatctgaatgggaacggcgactc

SEQ ID NO: 714681 - DNA, 75 bp, synthetic construct
  source 1..75: mol_type = other DNA
gttggcgcacttatcggacgaactgaagcggcagtgagaacgaaggcacgggagctgggcatcagcatgatgtta

SEQ ID NO: 714682 - DNA, 75 bp, synthetic construct
  source 1..75: mol_type = other DNA
ggcgtctgattcgcgtgaatcagggcggtaaatttcggtactgcataccgggcgctgatttaccggcagagccga

SEQ ID NO: 714683 - DNA, 75 bp, synthetic construct
  source 1..75: mol_type = other DNA
cggaaacacaggaagaaataaaaacggaaagtgtggcggtcacagtgcagtcacagccgtcgttcaccagaaaac

SEQ ID NO: 714684 - DNA, 75 bp, synthetic construct
  source 1..75: mol_type = other DNA
taaatattcaatgggattataccagtaatgccagcgtgacgattcatacgtcaccagcatattctgctaataagc

SEQ ID NO: 714685 - DNA, 75 bp, synthetic construct
  source 1..75: mol_type = other DNA
acggtaaccatgccacaggcgagttctgttgtttcaattacgttgattggtggtgcgggatttaacgtggggtca

SEQ ID NO: 714686 - DNA, 75 bp, synthetic construct
  source 1..75: mol_type = other DNA
ggcgctgatttaccggcagagccggaagctgcatccgtagcggacaccgatggtaaagcctttcctcagccagca

SEQ ID NO: 714687 - DNA, 75 bp, synthetic construct
  source 1..75: mol_type = other DNA
ggcaaaaggtcaggttcagaagtgggagcgagtctgcgccgcgctacgggagctgaacaagtgccgggatattct

SEQ ID NO: 714688 - DNA, 75 bp, synthetic construct
  source 1..75: mol_type = other DNA
tttactgaaacgcgagcggatgacctgattttgccatcgctgcatgtggctaaccgcgagttgcgccgggcaaaa

SEQ ID NO: 714689 - DNA, 75 bp, synthetic construct
  source 1..75: mol_type = other DNA
ccgttgcaagctcatgcgcagcgggttgccatcgcttcaaccgggattattcgcgacggcagcttgctggcgctg

SEQ ID NO: 714690 - DNA, 75 bp, synthetic construct
  source 1..75: mol_type = other DNA
gcggggcacatcgggcatacgcttgccgatccacacggcccggtctgtggctgtggacgcacaggttgcgtggag

SEQ ID NO: 714691 - DNA, 75 bp, synthetic construct
  source 1..75: mol_type = other DNA
tagctgaatttggcgggctgcgacataaagcataccgcctgggcggcgatgaattcgctatggtgctctatgatg

SEQ ID NO: 714692 - DNA, 75 bp, synthetic construct
  source 1..75: mol_type = other DNA
tatcaatgacacatgggggcacgcgacgggcgatcaggtcttgatcgagatagccatacggttaatggaatttag

SEQ ID NO: 714693 - DNA, 75 bp, synthetic construct
  source 1..75: mol_type = other DNA
catttaaaggtgatgccagcgatgtgaaccgccccgggtttcctggagagtgttttatctgtgaactcaggctgc

SEQ ID NO: 714694 - DNA, 75 bp, synthetic construct
  source 1..75: mol_type = other DNA
atggataacgataattctcctgataagagacctacgtttaaaagagcattacgcaacatcagcatgaccagcata

SEQ ID NO: 714695 - DNA, 75 bp, synthetic construct
  source 1..75: mol_type = other DNA
tcgatcttaataatggccatcaaaccactatgacattaagcattggttacgctatgaccattgagcatgcctccg

SEQ ID NO: 714696 - DNA, 75 bp, synthetic construct
  source 1..75: mol_type = other DNA
cgggctgcaacataaagcataccgcataggcggcgatgaattcgcgatggtcctctttggtgtacagtcggaatc

SEQ ID NO: 714697 - DNA, 75 bp, synthetic construct
  source 1..75: mol_type = other DNA
tcgcgacggcagcttgctggcgctgaatccgcataatcttggtggattgctacactttccgttagtcaaaacgct

SEQ ID NO: 714698 - DNA, 75 bp, synthetic construct
  source 1..75: mol_type = other DNA
cgacctggcttgcgccggttcaggtggttatcatgaacattactgattctcagtctgaatacgttaacgaattga

SEQ ID NO: 714699 - DNA, 75 bp, synthetic construct
  source 1..75: mol_type = other DNA
atgtcacaacctatttttaacgataagcaatttcaggaagcgctttcacgtcagtggcagcgttatggcttaaat

SEQ ID NO: 714700 - DNA, 75 bp, synthetic construct
  source 1..75: mol_type = other DNA
tcgcgccattggtgtggcgctgaacgataccgcctctaaagtgctgcatgatcaaacaggcaagcatcacaaatg

SEQ ID NO: 714701 - DNA, 75 bp, synthetic construct
  source 1..75: mol_type = other DNA
gataccgcctctaaagtgttgcgtgctcaaacaggcaagcatcacaaatgtgggtgtacataccagggcggctaa

SEQ ID NO: 714702 - DNA, 75 bp, synthetic construct
  source 1..75: mol_type = other DNA
gcggcggtgtggtcagcggcggcaaactgctgactggccctggaggtctggcgggacatatcgggcatacgctgg

SEQ ID NO: 714703 - DNA, 75 bp, synthetic construct
  source 1..75: mol_type = other DNA
gcgattgcttctggtcgcggcattgcggcggcagcgcaaggtgaactcatgggcgcggatgcgagaactattttc

SEQ ID NO: 714704 - DNA, 75 bp, synthetic construct
  source 1..75: mol_type = other DNA
ggaacaacttaccgatttgccgaccattgccattaacgacgcgcaggccgcagcatgggcggagtatcaggcgct

SEQ ID NO: 714705 - DNA, 75 bp, synthetic construct
  source 1..75: mol_type = other DNA
aatgaatcatgtacatgccggatttaccgcaacgaccggaatcatccgatctgcgttaccgactggatggatgaa

SEQ ID NO: 714706 - DNA, 75 bp, synthetic construct
  source 1..75: mol_type = other DNA
ggcaaaggggaggtttcaactgctgacgtcaaagagttgctactggccacccgatatctgatgctgactacggat

SEQ ID NO: 714707 - DNA, 75 bp, synthetic construct
  source 1..75: mol_type = other DNA
agcccagctcctcggagccaggccaattcacgatggtcgagctacgccgaaccgtcactgatgggaaagctgaaa

SEQ ID NO: 714708 - DNA, 75 bp, synthetic construct
  source 1..75: mol_type = other DNA
ctatcgatgaacgccgtgtcaccttcctcggcttcgacgccgctactgaagcgcgttatctcggttatgtacgct

SEQ ID NO: 714709 - DNA, 75 bp, synthetic construct
  source 1..75: mol_type = other DNA
atgcaaagcgttaccccaacatcgcaatacctgaaggcgctcaatgaaggtagccatcaacccgacgacgtacaa

SEQ ID NO: 714710 - DNA, 75 bp, synthetic construct
  source 1..75: mol_type = other DNA
atcggactggacgtgtattgcttaatcagtttgtctctgcggctgtttccgcgatgaccaccaacgttgtgcggc

SEQ ID NO: 714711 - DNA, 75 bp, synthetic construct
  source 1..75: mol_type = other DNA
ttgccatcgcttcaaccggaattattcgcgacggcagcttattggcgctaaatccgcataatctcggtggattac

SEQ ID NO: 714712 - DNA, 75 bp, synthetic construct
  source 1..75: mol_type = other DNA
gtggtacaaaactggctgctgcactggttgatgacacccttaacatttttgcccggcgtgaaattcccacgccgg

SEQ ID NO: 714713 - DNA, 75 bp, synthetic construct
  source 1..75: mol_type = other DNA
catccgcagtcagtgattcactcaatggtgcgttatcaggacggcagtgttctggcgcagttgggtgaaccggat

SEQ ID NO: 714714 - DNA, 75 bp, synthetic construct
  source 1..75: mol_type = other DNA
acagatgcgtgaactggatcgcgagtttggcgagctgaaagaagaaacctgccgcactatcatcgacattatgga

SEQ ID NO: 714715 - DNA, 75 bp, synthetic construct
  source 1..75: mol_type = other DNA
cttaatgtgtggcatgcctgcccgcgtcagtaccatttgagcgccaacgaaattaatcaaattatcaacgcctga

SEQ ID NO: 714716 - DNA, 75 bp, synthetic construct
  source 1..75: mol_type = other DNA
cctcggctttgacgccgccactgaagcacgttacctcggttatgtccgctttatggttaatgtggaagggcgcta

SEQ ID NO: 714717 - DNA, 75 bp, synthetic construct
  source 1..75: mol_type = other DNA
gggcgatcggctgaagtttgagttccagcgttgcctgtcacgtctgcaagagatgcaaagcgaagagtatctgaa

SEQ ID NO: 714718 - DNA, 75 bp, synthetic construct
  source 1..75: mol_type = other DNA
tgggaaatcgtcgttttcgatgaacaggggcggcgttgctgcacttgtcggctgggtacggcagttttgggatga

SEQ ID NO: 714719 - DNA, 75 bp, synthetic construct
  source 1..75: mol_type = other DNA
acattcgagcgtcgtcagaactgtcccaggccgaagcagagaaggttcttggattcctgaaacagaaagccacgg

SEQ ID NO: 714720 - DNA, 75 bp, synthetic construct
  source 1..75: mol_type = other DNA
gtctgccagccgctgcatcttgggcggcaaaatcagagctgggaaatcgttgttttcgatgaacaggggcggcgt

SEQ ID NO: 714721 - DNA, 75 bp, synthetic construct
  source 1..75: mol_type = other DNA
cggcgctggcggaaacgctgggatcgatggccggatttatgatgactcgcgacgggcaatgcgtggtaggcacgg

SEQ ID NO: 714722 - DNA, 75 bp, synthetic construct
  source 1..75: mol_type = other DNA
gaatcagacgctggctgtgtcatttgctacgctatgcgtcgacgcccgtagccaacatgactatattgcgctttc

SEQ ID NO: 714723 - DNA, 75 bp, synthetic construct
  source 1..75: mol_type = other DNA
tctccgctcaatgatgaaacgcgcgaacagatggataaactgtggctggcgctggcgggggcaaagcgagaaaaa

SEQ ID NO: 714724 - DNA, 75 bp, synthetic construct
  source 1..75: mol_type = other DNA
ttccagcgttgcctgtcacgtctgcaagagatgcaaagcgaagagtatctgaagcgcgagcatttggcgggttaa

SEQ ID NO: 714725 - DNA, 75 bp, synthetic construct
  source 1..75: mol_type = other DNA
attcccaatacgcaacaaagtatgttgctgttgtgcttaagtctggctgtgctgggattttttctcggcattgaa

SEQ ID NO: 714726 - DNA, 75 bp, synthetic construct
  source 1..75: mol_type = other DNA
gccttaatccttggacgaaagaaatttacgccttccctgataagcagaacggcatcgttccggtggtgggcgttg

SEQ ID NO: 714727 - DNA, 75 bp, synthetic construct
  source 1..75: mol_type = other DNA
gtggaggtgacggtatacgatcgccatccagaaatcggaggcttgctcacctttggcattccttctttcaaactg

SEQ ID NO: 714728 - DNA, 75 bp, synthetic construct
  source 1..75: mol_type = other DNA
ttgccctaatggcgcaatcagccacgttgatgacagcattcaggtcaatcagcaaaagtgtattggctgtaaatc

SEQ ID NO: 714729 - DNA, 75 bp, synthetic construct
  source 1..75: mol_type = other DNA
ggcgcataaatgcgacctttgtgcagggcgcgaaaacggtcctgcctgtgttgagaattgcccggcggacgcgct

SEQ ID NO: 714730 - DNA, 75 bp, synthetic construct
  source 1..75: mol_type = other DNA
ctcaaggatttaacagcgacaacaacgcattacaccttttctggcaggacggagataaagtcttaccgcttgagc

SEQ ID NO: 714731 - DNA, 75 bp, synthetic construct
  source 1..75: mol_type = other DNA
ccgctcgatcccgtgcgttatatctctaatcacagctccggcaagatgggttttgctatcgccgccgccgctgcc

SEQ ID NO: 714732 - DNA, 75 bp, synthetic construct
  source 1..75: mol_type = other DNA
tttctggcccggtttcgctaccgacgccaccgtttgtgaaacgtattgacgtgataaccgcactggagatggaag

SEQ ID NO: 714733 - DNA, 75 bp, synthetic construct
  source 1..75: mol_type = other DNA
atggatgacaccagccgggacccggcaataaccgaagatgaaatcagggcgctgcaattttctgccggggatgta

SEQ ID NO: 714734 - DNA, 75 bp, synthetic construct
  source 1..75: mol_type = other DNA
tgtttctgatatggctatagactcggtagcggcctttgttacaccaaccgggattgtagtcagtcccgacattgg

SEQ ID NO: 714735 - DNA, 75 bp, synthetic construct
  source 1..75: mol_type = other DNA
gctggcctggcaggctgagaacgaccgcacggtggacaggcactatctgcaggggatattccgcctgccgggaga

SEQ ID NO: 714736 - DNA, 75 bp, synthetic construct
  source 1..75: mol_type = other DNA
gccgtccgtggcgcggatttagtggtaaccgcgatggcggaagggcgtcatgcggcgcaggggattattgactgg

SEQ ID NO: 714737 - DNA, 75 bp, synthetic construct
  source 1..75: mol_type = other DNA
gcgatgaccaccaatgtcgcgcgtcgtaaagagaaccatcttccggcactttatcagcagttgtttttgctgatg

SEQ ID NO: 714738 - DNA, 75 bp, synthetic construct
  source 1..75: mol_type = other DNA
tgataaccgaagatgaaatcagggcgctgcaattttctgcctgggatgtagcggaaatagagcagactattctct

SEQ ID NO: 714739 - DNA, 75 bp, synthetic construct
  source 1..75: mol_type = other DNA
gattaccgccggcccgacgcgtgaaccgctcgatccggtgcgttatatctctaatcacagctccggcaagatggg

SEQ ID NO: 714740 - DNA, 75 bp, synthetic construct
  source 1..75: mol_type = other DNA
gttaaactgcacggcggcgaaccagctaacttcctggacgttggcggcggcgcaaccaaagagcgtgtaaccgaa

SEQ ID NO: 714741 - DNA, 75 bp, synthetic construct
  source 1..75: mol_type = other DNA
gcgcggtagcggaagtgggtgttaacgtaccggtcgtggtacgtctggaaggtaacaacgccgaactcggcgcga

SEQ ID NO: 714742 - DNA, 75 bp, synthetic construct
  source 1..75: mol_type = other DNA
ccttgccgaaggcgaagaagccctcagcttcagcgaatttaaacaggcgctttccagttcggcaaaatctaacgg

SEQ ID NO: 714743 - DNA, 75 bp, synthetic construct
  source 1..75: mol_type = other DNA
aaaatggcggatatgattcgcgggaaggaagcgttgccgaggagcacggcgggatattttgtggcaaatgggatg

SEQ ID NO: 714744 - DNA, 75 bp, synthetic construct
  source 1..75: mol_type = other DNA
agccgcgaggaatttgcgtggccgaatattcagtatcacttcctgccggtggccattaactacaacggctcgaac

SEQ ID NO: 714745 - DNA, 75 bp, synthetic construct
  source 1..75: mol_type = other DNA
cctggcgatgggcaccatggacatcgttaaactgcacggcggcgaaccagctaacttcctggacgttggcggcgg

SEQ ID NO: 714746 - DNA, 75 bp, synthetic construct
  source 1..75: mol_type = other DNA
tggctgggcaagcgtctggtaacgtatcaaacagacgccaatggacaaccggttaaccagattctggttgaagcg

SEQ ID NO: 714747 - DNA, 75 bp, synthetic construct
  source 1..75: mol_type = other DNA
tacgaagaatacttcgaaggccttgccgaaggcgaagaagctctcagcttcagtgagtttaaacaggcgctttcc

SEQ ID NO: 714748 - DNA, 75 bp, synthetic construct
  source 1..75: mol_type = other DNA
tatctggcccggtttcactaccgacgccgccgtttgtgcaacgtattgatgtgatgaccgcgctggagatggaag

SEQ ID NO: 714749 - DNA, 75 bp, synthetic construct
  source 1..75: mol_type = other DNA
agaaactggctgacagtggcctgaatattattgcagcaaaaggtctgacggatgcagctcagcaggttgttgccg

SEQ ID NO: 714750 - DNA, 75 bp, synthetic construct
  source 1..75: mol_type = other DNA
gggtctggaaggtaaactggttcagcagttcaccaaaatcttcatgggtctggcgaccattttcctggagcgcga

SEQ ID NO: 714751 - DNA, 75 bp, synthetic construct
  source 1..75: mol_type = other DNA
cctggcgatgggcacgatggacatcgttaaattgcacggcggtgaaccggctaacttcctcgatgttggcggtgg

SEQ ID NO: 714752 - DNA, 75 bp, synthetic construct
  source 1..75: mol_type = other DNA
ctagtcctgcgcgggctggactggactacagacaaagccacagccctcgcacaggatctgcgcccggtgatcccg

SEQ ID NO: 714753 - DNA, 75 bp, synthetic construct
  source 1..75: mol_type = other DNA
gaagtggaaattattgcctgcggaaaaaatagcgcctatacgctcaaaaaatatgacgatgccatgaaaacggtg

SEQ ID NO: 714754 - DNA, 75 bp, synthetic construct
  source 1..75: mol_type = other DNA
acccctcgccagtggtggctggcagtgagcgaagctctggctgaaatgttacgcgctcagcctttcgccaaaccg

SEQ ID NO: 714755 - DNA, 75 bp, synthetic construct
  source 1..75: mol_type = other DNA
gaacaaattccataacgtcaccaatggtattacccctcgtcgctggatcaaacagtgcaacccggcacttgcggc

SEQ ID NO: 714756 - DNA, 75 bp, synthetic construct
  source 1..75: mol_type = other DNA
tacctctccaaaacctggatttggatcaccggcctgctggtcgccatgttcggcggaggactgatgtggctggct

SEQ ID NO: 714757 - DNA, 75 bp, synthetic construct
  source 1..75: mol_type = other DNA
gtttttatggttgccattaccttttgctgtatttagcgcactctcattctggtcgccagatatcagtatgacagg

SEQ ID NO: 714758 - DNA, 75 bp, synthetic construct
  source 1..75: mol_type = other DNA
ttggcagaacctctggcacttcgaaccaggattattactgccctgaaggaagagctggcaccctggatcaaagag

SEQ ID NO: 714759 - DNA, 75 bp, synthetic construct
  source 1..75: mol_type = other DNA
agttgtggccgaacaaattccataacgtcactaatggtattactccgcgtcgctggatcaaacagtgcaacccgg

SEQ ID NO: 714760 - DNA, 75 bp, synthetic construct
  source 1..75: mol_type = other DNA
aggattcattgaagtcttatgacatcaacctgacagacctgctggaagaagagatcgacccggcgttggggaacg

SEQ ID NO: 714761 - DNA, 75 bp, synthetic construct
  source 1..75: mol_type = other DNA
cggcaatatgaaactggcgctcaatggtgcgcttactgtcggtacgctggatggtgcgaacgttgaaatcgccga

SEQ ID NO: 714762 - DNA, 75 bp, synthetic construct
  source 1..75: mol_type = other DNA
tcaatggcgactgtcgggcagtctgccactggttatggtcttaactatcagtatggtttattccgtcaatccttt

SEQ ID NO: 714763 - DNA, 75 bp, synthetic construct
  source 1..75: mol_type = other DNA
agtgtgggccaaactggcggtggtgcacgacaaacaagtgcatatggcgaacctgtgtgtggttggcggtttcgc

SEQ ID NO: 714764 - DNA, 75 bp, synthetic construct
  source 1..75: mol_type = other DNA
ctcgatcagttgattaatctggaaaaattcgctgatgacgcgaaattccgccagcaatatcgcgaaatcaaacag

SEQ ID NO: 714765 - DNA, 75 bp, synthetic construct
  source 1..75: mol_type = other DNA
cagcggtatcgcctgttctatgcctttcgcgatgctcggtttcgccgttgactttggtcgctggaaaaccggcat

SEQ ID NO: 714766 - DNA, 75 bp, synthetic construct
  source 1..75: mol_type = other DNA
ccctgctcgacatcacccgcgacctgctggcctggcaggctgagaacgaccgcacggtggacaggcactatctgc

SEQ ID NO: 714767 - DNA, 75 bp, synthetic construct
  source 1..75: mol_type = other DNA
cgcctcgttaccgatccggatgaagccctgcgccagctgtaccgacagctaatccttggtcagaccttcgggtct

SEQ ID NO: 714768 - DNA, 75 bp, synthetic construct
  source 1..75: mol_type = other DNA
gcattcataacctgatcgttaccgtatctgaaccgacctttgctgccaccgaacagatgatggcgcaccctaaaa

SEQ ID NO: 714769 - DNA, 75 bp, synthetic construct
  source 1..75: mol_type = other DNA
ttcataaaaaactgatcgaggcgctgaaagtgcgtgccggtcgcgaaaacacctccgtcaatgcgctcgccgaac

SEQ ID NO: 714770 - DNA, 75 bp, synthetic construct
  source 1..75: mol_type = other DNA
cgtccggtggatggcccttacctgaaggggactttccgactggccggggtaaactggagggaagagtttgacgcc

SEQ ID NO: 714771 - DNA, 75 bp, synthetic construct
  source 1..75: mol_type = other DNA
cttcggtatcgacggactacggatttttatgccggcggaggcctttgagacgctggtccgtgagctcaccatagg

SEQ ID NO: 714772 - DNA, 75 bp, synthetic construct
  source 1..75: mol_type = other DNA
ggccacggcagacaggctgtggcttaccggcagtttccgtttcggtccctgtgtggcagatgtggcaaatgctgt

SEQ ID NO: 714773 - DNA, 75 bp, synthetic construct
  source 1..75: mol_type = other DNA
caggccgccactgcgcgcagcagaggtgctgccgctggccgtgcgtctctggcaaagaatgtgcgaccgcagtga

SEQ ID NO: 714774 - DNA, 75 bp, synthetic construct
  source 1..75: mol_type = other DNA
ctcccaccgtctcgtgccttccctgggcattactgatatcgccggggcgctttcactgcgccagtggccgttggc

SEQ ID NO: 714775 - DNA, 75 bp, synthetic construct
  source 1..75: mol_type = other DNA
cgtcgatgaaacggcggatattgtgaaagccgccgaagatatcatcaacggcgcttcatttgattacaacctgcc

SEQ ID NO: 714776 - DNA, 75 bp, synthetic construct
  source 1..75: mol_type = other DNA
atgaataactctgaattagaaacactgatccgcaatattctgcgtgaacaacttgtccccgcaacaccacgaatg

SEQ ID NO: 714777 - DNA, 75 bp, synthetic construct
  source 1..75: mol_type = other DNA
tgactgtcaccacggtgcacagggccaaaggcctggaatgggacacagtgaggctgcatgaggattttcaggagc

SEQ ID NO: 714778 - DNA, 75 bp, synthetic construct
  source 1..75: mol_type = other DNA
atgcacacggggctggaggaatacccggacggcgctgaacggctggcggcgttttatgctgaacgtgcccgtcac

SEQ ID NO: 714779 - DNA, 75 bp, synthetic construct
  source 1..75: mol_type = other DNA
atgtcgtcatttgattacctgaaaaccgctattaagcaacaaggctgcacgttacagcaggttgctgatgccagc

SEQ ID NO: 714780 - DNA, 75 bp, synthetic construct
  source 1..75: mol_type = other DNA
ccccagtgcgcaaaagctggaggcgttacaccgttttttggggctggagtttccccgccagaagaaaacgatcgg

SEQ ID NO: 714781 - DNA, 75 bp, synthetic construct
  source 1..75: mol_type = other DNA
tcggcagttcggtggatcgcaaagagttccagaacttgctggtggagatgctcgaagagaacaatatcgaattcg

SEQ ID NO: 714782 - DNA, 75 bp, synthetic construct
  source 1..75: mol_type = other DNA
ttatgcaatgggttaaaaacgatgtgggtgaaattttcattcgtcagtttgaaagctttgtcagccgttttttgg

SEQ ID NO: 714783 - DNA, 75 bp, synthetic construct
  source 1..75: mol_type = other DNA
tatgccaataaagtggcatttatcgataccgattttgtcaccactcaggcgttctgcaaaaagtacgaagggcgg

SEQ ID NO: 714784 - DNA, 75 bp, synthetic construct
  source 1..75: mol_type = other DNA
aaaaggcattcagccggacctgatctacacctcggaagaagccgatgcgccgcagtatatggaacatctggggat

SEQ ID NO: 714785 - DNA, 75 bp, synthetic construct
  source 1..75: mol_type = other DNA
tgtatcggggcattactggcggtgctgtttttatgggcagcctggggactggttgatgtttaccggggctgggca

SEQ ID NO: 714786 - DNA, 75 bp, synthetic construct
  source 1..75: mol_type = other DNA
tgctctttctctgggcggcctgggcgctgctggatgtctgggcgggctggagtaatgagaaggtccgcagcgcaa

SEQ ID NO: 714787 - DNA, 75 bp, synthetic construct
  source 1..75: mol_type = other DNA
gcgcatgcacgaacatgccgctaaatttgaaactgaaatcatttttgatcacatcagcaaagtagatttgcagaa

SEQ ID NO: 714788 - DNA, 75 bp, synthetic construct
  source 1..75: mol_type = other DNA
tcaacaaaaagccttttacgttcattctggaaacagaacgtggtcttaatctttccattcaggccgttccccgtg

SEQ ID NO: 714789 - DNA, 75 bp, synthetic construct
  source 1..75: mol_type = other DNA
aactgttatccggtcgataaagttattcgcatggataataacgaaatcccggcaggacttaaaacagcaccgtaa

SEQ ID NO: 714790 - DNA, 75 bp, synthetic construct
  source 1..75: mol_type = other DNA
tcaacaaaaagccctttacgttcattctggaaacagagcgtggtctgaatctttccattcaggccgttccccgtg

SEQ ID NO: 714791 - DNA, 75 bp, synthetic construct
  source 1..75: mol_type = other DNA
ggtgatcaggtctattttacctggcaaggcggcgaacctactctcgcgggtcttgatttttttcgtaaggttatt

SEQ ID NO: 714792 - DNA, 75 bp, synthetic construct
  source 1..75: mol_type = other DNA
cagcagcaaccgaacagaaaattccaggcaactgttatccggtcgataaagttatttaccagaataataacgaaa

SEQ ID NO: 714793 - DNA, 75 bp, synthetic construct
  source 1..75: mol_type = other DNA
actcaggcggcccggcagacaatgcaggtggcttcttcggctgcaacagcagcatcagcccatgcgcagacggtg

SEQ ID NO: 714794 - DNA, 75 bp, synthetic construct
  source 1..75: mol_type = other DNA
tgattggtgttattgctctgtcgctcgctgggtgtgcaagatcaactgattttgttaggttggctgataataagt

SEQ ID NO: 714795 - DNA, 75 bp, synthetic construct
  source 1..75: mol_type = other DNA
cggaacgccgctggtgacaattgaagcggcgctggaaagcgcggggcaaatgctcccctgtgagccgccgcatta

SEQ ID NO: 714796 - DNA, 75 bp, synthetic construct
  source 1..75: mol_type = other DNA
atacgtctgaaggttgttttgaaattggtgtcaatatcagtaaccctgtatttactgaagatgccattaacaaga

SEQ ID NO: 714797 - DNA, 75 bp, synthetic construct
  source 1..75: mol_type = other DNA
atgtacgcaaaatcctttattgcattcgatggcaacggacgtctgaccggtgcccgtaccgtacagactgcgccg

SEQ ID NO: 714798 - DNA, 75 bp, synthetic construct
  source 1..75: mol_type = other DNA
tccaggagtcctgcaaggataatctggttgttgaaagtaatggagatatttacgaatgcgatcattttgtctatc

SEQ ID NO: 714799 - DNA, 75 bp, synthetic construct
  source 1..75: mol_type = other DNA
ggcgatcaggtctatttcacctggcaaggcggtgagcccactctggctggtctggattttttccaaaaagttatt

SEQ ID NO: 714800 - DNA, 75 bp, synthetic construct
  source 1..75: mol_type = other DNA
agcgtgcagttgactgcacaaaaaaagttgatatcaaaaaaatgccagcaatgtgtttacaagccaatttgtaat

SEQ ID NO: 714801 - DNA, 75 bp, synthetic construct
  source 1..75: mol_type = other DNA
atcacctgaagatggtccgctttgtcgtggaaaataaaacgctgtctgccctgaatatccgggaaagtgatttct

SEQ ID NO: 714802 - DNA, 75 bp, synthetic construct
  source 1..75: mol_type = other DNA
ggaaatataggggcaaatccatctggcaatcaggtctattttacctggcaaggcggtgaacccactctggctggc

SEQ ID NO: 714803 - DNA, 75 bp, synthetic construct
  source 1..75: mol_type = other DNA
agcacgaagctaactgcgcagaaaaaattaatctcgacaagatgtcaacactgtgtatacaaaccaatatgtaac

SEQ ID NO: 714804 - DNA, 75 bp, synthetic construct
  source 1..75: mol_type = other DNA
tcctgggttcaggcccggcgggatacaccgctgctgtctacgcggcgcgcgccaacctgcaacctgtgctgatta

SEQ ID NO: 714805 - DNA, 75 bp, synthetic construct
  source 1..75: mol_type = other DNA
tgccggtaaccgcagcagcgcggtggtggtggcgtccggccatcagtcataccggattaacggtctgagcagcgg

SEQ ID NO: 714806 - DNA, 75 bp, synthetic construct
  source 1..75: mol_type = other DNA
accagtggggccttaatattctcctgacggagaaggggatcttcctggatgcaaagggccagaatgttgaggtca

SEQ ID NO: 714807 - DNA, 75 bp, synthetic construct
  source 1..75: mol_type = other DNA
ctggtgatacataacattggcgcaggtgcgcaggaagaagatgtgctgtttagctggcggatggtggggcattat

SEQ ID NO: 714808 - DNA, 75 bp, synthetic construct
  source 1..75: mol_type = other DNA
acggcacaagatataaaagcatctgacaaagctatgtctaaaaataataggttaaaaatagaaaccattcattcg

SEQ ID NO: 714809 - DNA, 75 bp, synthetic construct
  source 1..75: mol_type = other DNA
catcccggaaattccccagccgcagccgctgaatccgcaaggcgaagcggtggcgaatgattttatcccccgtaa

SEQ ID NO: 714810 - DNA, 75 bp, synthetic construct
  source 1..75: mol_type = other DNA
gggcagttcgtccgtctgggtgaggacgggattgtggtggaggccgccgggcagccggtgacggtgaacagtgcc

SEQ ID NO: 714811 - DNA, 75 bp, synthetic construct
  source 1..75: mol_type = other DNA
agcttacctatcctggcggtgatgtcccgcaagaacgcggggtatgttccgatgtggtgatccgcgccctgcgca

SEQ ID NO: 714812 - DNA, 75 bp, synthetic construct
  source 1..75: mol_type = other DNA
atgaaagtttcactggcgttggtcagccttctgatggcatttaccagccactccttaaaatcccccgccgttcca

SEQ ID NO: 714813 - DNA, 75 bp, synthetic construct
  source 1..75: mol_type = other DNA
aacagcaagccaaagcgatcagggagtggctaaacgctcataacaagagcctgatagctgacgttacgttaatga

SEQ ID NO: 714814 - DNA, 75 bp, synthetic construct
  source 1..75: mol_type = other DNA
ctgttttacgatccggcatatgtgcagcttacctatcctggcggcgatgtcccgcaggagcgcggcgtatgttct

SEQ ID NO: 714815 - DNA, 75 bp, synthetic construct
  source 1..75: mol_type = other DNA
ggcgcaggcgcgcaggaagaagatgtgctgtttagctggcggatggtggggcattatcgttattttgttaaataa

SEQ ID NO: 714816 - DNA, 75 bp, synthetic construct
  source 1..75: mol_type = other DNA
ctggtgatacataacatcgatgcaggcgcgcaagaagaagacgtgctgtttagctggcgaattgtcgggcactat

SEQ ID NO: 714817 - DNA, 75 bp, synthetic construct
  source 1..75: mol_type = other DNA
ttttcctggctggaaacgttacgccctgacgtcctgaaaattgataagtcattcaccgccgcaattggttcagac

SEQ ID NO: 714818 - DNA, 75 bp, synthetic construct
  source 1..75: mol_type = other DNA
gtgaacatcttaattgcatggccatacggtatgtaccgcgatctgtttatgcgcgcggcacgcaaagttagcccg

SEQ ID NO: 714819 - DNA, 75 bp, synthetic construct
  source 1..75: mol_type = other DNA
gcactggcctatgtggctgccgctcgcggttacaaactcaccctgaccatgccagaaaccatgagtattgaacgc

SEQ ID NO: 714820 - DNA, 75 bp, synthetic construct
  source 1..75: mol_type = other DNA
atcagcgttagcggccctggcgcgacagcgctggcgttgcatcatcttcccagccagtttccactggcggtactg

SEQ ID NO: 714821 - DNA, 75 bp, synthetic construct
  source 1..75: mol_type = other DNA
ctgataagaaagcggcagcagagaaagctgcagccgacaaaaaagcagcagaaaaagcggctgctgaaaaggcag

SEQ ID NO: 714822 - DNA, 75 bp, synthetic construct
  source 1..75: mol_type = other DNA
cttcggtagtgaaaaactatccgaagtcaccgaaggctgcagatgcgatgtttaaagtcggcgtcatcatgcagg

SEQ ID NO: 714823 - DNA, 75 bp, synthetic construct
  source 1..75: mol_type = other DNA
gtgaacatcttaattgcatggccatacggcatgtatcgcgatctgtttatgcgggcagcacgcaaagttagcccg

SEQ ID NO: 714824 - DNA, 75 bp, synthetic construct
  source 1..75: mol_type = other DNA
tactggtttagtgctcatccgattcagcaattaatcctcgaaatcaccgagcgtgatgcgcttctggatgtcgat

SEQ ID NO: 714825 - DNA, 75 bp, synthetic construct
  source 1..75: mol_type = other DNA
tgtgtttattcctatcgcggaagaacatcatttaattgtgccactgacccgctatgtgatggcagaaaccattcg

SEQ ID NO: 714826 - DNA, 75 bp, synthetic construct
  source 1..75: mol_type = other DNA
tgtttgtacgatttgcgcactcgttacgctcgcttcgaccctgagcgtgcgatttatttcacagcgtaacttaaa

SEQ ID NO: 714827 - DNA, 75 bp, synthetic construct
  source 1..75: mol_type = other DNA
ctggtacaaaacggtacactttactgctccagcatctttggctatcgcaatgttccggttcatgatattcaggcc

SEQ ID NO: 714828 - DNA, 75 bp, synthetic construct
  source 1..75: mol_type = other DNA
ctggttcaaaacggtacgctctattgctccagtatttttggctatcgaaatgtccctgtttatgatattcaagcc

SEQ ID NO: 714829 - DNA, 75 bp, synthetic construct
  source 1..75: mol_type = other DNA
ttactggatgttgattatcggattgcccgcgagctgcatcgtaaaaacgtcaaactggcgattgatgacttcggc

SEQ ID NO: 714830 - DNA, 75 bp, synthetic construct
  source 1..75: mol_type = other DNA
tttgaacacactgacgacgggctgacagcgcacggtcagcagtgtccttatgtcaggccggagcgcagagaggta

SEQ ID NO: 714831 - DNA, 75 bp, synthetic construct
  source 1..75: mol_type = other DNA
tcgtaccggatgccttacccgtggtgcgtaaagccagccggcactgcagacaatgtcatcacgattattatgggg

SEQ ID NO: 714832 - DNA, 75 bp, synthetic construct
  source 1..75: mol_type = other DNA
gaaaacacgaacgggagctattaaataaaatatgcattctttcaatgctggcccttcttgaacttggtattatcg

SEQ ID NO: 714833 - DNA, 75 bp, synthetic construct
  source 1..75: mol_type = other DNA
caatgtcagcacgattattatggggaacgctattgtacacactgtcatacagggcacttcagtgaggaggtggta

SEQ ID NO: 714834 - DNA, 75 bp, synthetic construct
  source 1..75: mol_type = other DNA
atgtacgcaaaatcctttattgcattcgatggcaacggacgtctgaccggtgcccgtactgcacagactgcgcca

SEQ ID NO: 714835 - DNA, 75 bp, synthetic construct
  source 1..75: mol_type = other DNA
caatgcctgcacgattattatggggaacgctattgtacacactgtcatacagggcgtttcagtgaggaggcagtg

SEQ ID NO: 714836 - DNA, 75 bp, synthetic construct
  source 1..75: mol_type = other DNA
ttaacgatgcccgcaatgaagtcaaaaatagcgtactggtcgataacggcgatttgattcaggggagtccgctgg

SEQ ID NO: 714837 - DNA, 75 bp, synthetic construct
  source 1..75: mol_type = other DNA
tataaggcattaaatacgctggactataccgtcggcacgcttggcaaccacgagtttaactacggtctggattac

SEQ ID NO: 714838 - DNA, 75 bp, synthetic construct
  source 1..75: mol_type = other DNA
ggcgtttattaaagagaaaggacaatatccgatgaagaaagtcgcgaccgatgatatcggctttgcgatttatca

SEQ ID NO: 714839 - DNA, 75 bp, synthetic construct
  source 1..75: mol_type = other DNA
cgtcagcaagccaatcggtaaatccgccgacaatatgtatagctatctggcgctggtgcaggacgatccgaccgt

SEQ ID NO: 714840 - DNA, 75 bp, synthetic construct
  source 1..75: mol_type = other DNA
ttaacgatgcccgcaatgaagtcaaaaatagcgtgctggtggataacggcgacttgatccagggaagtccgctgg

SEQ ID NO: 714841 - DNA, 75 bp, synthetic construct
  source 1..75: mol_type = other DNA
agccgatcacgatgccacccgccagtttgtcagcaaacctatcggaaaatctgccgacaatatgtatagctatct

SEQ ID NO: 714842 - DNA, 75 bp, synthetic construct
  source 1..75: mol_type = other DNA
cgcttgattaagcgtctgcagcaattcgtaccggatgccttacccgtggtgcgtaaagccagctggcactgcaga

SEQ ID NO: 714843 - DNA, 75 bp, synthetic construct
  source 1..75: mol_type = other DNA
tccacaactggcattaggtaaatcaacaaaagcgatgtttaccgcctacagaaaagtcgtgccatttgtcgagca

SEQ ID NO: 714844 - DNA, 75 bp, synthetic construct
  source 1..75: mol_type = other DNA
cacgacttcgttgggttcggcgcatcatcaagaagcgcttgagttccggccaggttaaacctgaactgactgaaa

SEQ ID NO: 714845 - DNA, 75 bp, synthetic construct
  source 1..75: mol_type = other DNA
gccgatcctgatgggcgtaacgatgttcttcattcagaagatgtcgccgaccacagtgaccgacccgatgcagca

SEQ ID NO: 714846 - DNA, 75 bp, synthetic construct
  source 1..75: mol_type = other DNA
catgataaaggttcattaccatttcttgaggggcatctgttcgaagtggcagagcgcggtggtcctggttttacg

SEQ ID NO: 714847 - DNA, 75 bp, synthetic construct
  source 1..75: mol_type = other DNA
gaggccaatatttctggcgataaaatcgaccatggaggctgtgtgaatacgctaaccactctgcgcccttcacca

SEQ ID NO: 714848 - DNA, 75 bp, synthetic construct
  source 1..75: mol_type = other DNA
atcggagtctaccaaagccgcaataaacactcttattcgcatggggttcacatgggacggtggagcttactggca

SEQ ID NO: 714849 - DNA, 75 bp, synthetic construct
  source 1..75: mol_type = other DNA
agcagtactgcacacactgccagaccgggcgcttcagtgaggacggggagcagaatgaacggtataaaaacgggg

SEQ ID NO: 714850 - DNA, 75 bp, synthetic construct
  source 1..75: mol_type = other DNA
ttgatggcaacagacgtctgacgggcgcccgtaccgcacagactgcaccttacgatcgctacacctgccaccttt

SEQ ID NO: 714851 - DNA, 75 bp, synthetic construct
  source 1..75: mol_type = other DNA
ttgatggcaacggacgtctgacgggcgcccgtactgcacaggccgcatcttatgctaactacacctgccacttgt

SEQ ID NO: 714852 - DNA, 75 bp, synthetic construct
  source 1..75: mol_type = other DNA
cggcacaggacccgtactacatcctgccgatcctgatgggcgtaacgatgttattcattcagaagatgtcgccga

SEQ ID NO: 714853 - DNA, 75 bp, synthetic construct
  source 1..75: mol_type = other DNA
ttatggccgcctgaagcaatccatcaatttgccgccgcatcttgacaccggaagcagcaacttcgcactgcacac

SEQ ID NO: 714854 - DNA, 75 bp, synthetic construct
  source 1..75: mol_type = other DNA
ggcagcgaaagcggcggcagatgctaaagcgaaggccgaagcagatgctaaagctgcggaagaagcagcgaagaa

SEQ ID NO: 714855 - DNA, 75 bp, synthetic construct
  source 1..75: mol_type = other DNA
cagttgaccttccgtaatgccgccgatctttatctctatcccaatacgctgattgtggtgaaagccagcggtaaa

SEQ ID NO: 714856 - DNA, 75 bp, synthetic construct
  source 1..75: mol_type = other DNA
cgcttgattaatcgtctgcagcaattcgttccggatgccttacccgtggtccgtaaagccagctggcactgcagg

SEQ ID NO: 714857 - DNA, 75 bp, synthetic construct
  source 1..75: mol_type = other DNA
gcaatacgacactgaacgtccttggtttgaacacactgacgatgggctgactgagcacggtcatgagtgccctta

SEQ ID NO: 714858 - DNA, 75 bp, synthetic construct
  source 1..75: mol_type = other DNA
cggaacgccgctggtggcgattgaagcggcgctggagagcgccgggcaaatgcttccctgcgagccgccgcatta

SEQ ID NO: 714859 - DNA, 75 bp, synthetic construct
  source 1..75: mol_type = other DNA
cgcttgattcatcgtctgcagcaattcgttccggatgccttacccgtggttcgtaaagccagctggcactgcagt

SEQ ID NO: 714860 - DNA, 75 bp, synthetic construct
  source 1..75: mol_type = other DNA
cgcttgattcatcgtctgcagcaattcgttccggatgccttacccgtggtacgtaaagccagctggcactgcagg

SEQ ID NO: 714861 - DNA, 75 bp, synthetic construct
  source 1..75: mol_type = other DNA
cgcttgattaatcgtctgcagcaattcgttccggatgccttacccgtggtgcgtaaagccagctggcactgcagc

SEQ ID NO: 714862 - DNA, 75 bp, synthetic construct
  source 1..75: mol_type = other DNA
cttccgagctttctggtggtcagcaacagcgtgtggcgattgcccgtgcgctggcggtgaagccgaaaatgatgc

SEQ ID NO: 714863 - DNA, 75 bp, synthetic construct
  source 1..75: mol_type = other DNA
aatattcggcggcctgtttttttcctgcagcgtgatggccggagccggtacgctggcccccaccgtggtgccaat

SEQ ID NO: 714864 - DNA, 75 bp, synthetic construct
  source 1..75: mol_type = other DNA
acatcaggcgcttctgcaatatatccgcccgggtgcacagaaccagatgaaagttattctggctgaagaagcgaa

SEQ ID NO: 714865 - DNA, 75 bp, synthetic construct
  source 1..75: mol_type = other DNA
tcgacaaaggccggattgcggaagatggcaatccacaggtgttgatcaagaatccgccaagccagcgtttgcagg

SEQ ID NO: 714866 - DNA, 75 bp, synthetic construct
  source 1..75: mol_type = other DNA
tcgacaaaggccggattgcggaggatggcgatccgcaggggttgatcaaaaatccgccgagccagcgcttgcagg

SEQ ID NO: 714867 - DNA, 75 bp, synthetic construct
  source 1..75: mol_type = other DNA
tcgacaagggtcgtattgctgaagatggcgacccgcaggtgttgattaagaacccaccaagccagcgtttgcagg

SEQ ID NO: 714868 - DNA, 75 bp, synthetic construct
  source 1..75: mol_type = other DNA
cgcttgattcatcgtctgcagcaattcgttccggatgccttacccgtggtgcgtaaagccagctggcactgcaga

SEQ ID NO: 714869 - DNA, 75 bp, synthetic construct
  source 1..75: mol_type = other DNA
atgtacgcaaaatcctttttcgctcttgatcgcaacggacgtctgacgggcgcccgtactgaacaggccgcacct

SEQ ID NO: 714870 - DNA, 75 bp, synthetic construct
  source 1..75: mol_type = other DNA
atgtacgcaaaatcctttttcgctcttgatagcaacggacgtctgacgggcgcccgtactgcacaggccgcacct

SEQ ID NO: 714871 - DNA, 75 bp, synthetic construct
  source 1..75: mol_type = other DNA
atgtacgcaaaatcctttatcgctcttgattgcaacggacgtctgacgggcgcccgtactgcacaggccgcacct

SEQ ID NO: 714872 - DNA, 75 bp, synthetic construct
  source 1..75: mol_type = other DNA
ccggtgctttcagctgccgcaccgtttaaagttggtggtcgcaaaaatgacccggcaagctatgtggaggtggaa

SEQ ID NO: 714873 - DNA, 75 bp, synthetic construct
  source 1..75: mol_type = other DNA
tttgaacacactggcgaagggctggctgagcacggtcatgagtgcccttatgttagaccggagcgcagagaaata

SEQ ID NO: 714874 - DNA, 75 bp, synthetic construct
  source 1..75: mol_type = other DNA
atgtacgcaaaatcctttctcgctcttgattgcaacggacgtctgacgggcgcccgtactgaacaggccgcacct

SEQ ID NO: 714875 - DNA, 75 bp, synthetic construct
  source 1..75: mol_type = other DNA
caatgtcaccacgattattatggggagctgtactgcacacactgccagaccgggcggttcagtgaggaggcggta

SEQ ID NO: 714876 - DNA, 75 bp, synthetic construct
  source 1..75: mol_type = other DNA
cgcttgattgatcgtctgcagcaattcgttccggatgccttacccgtggtccgtaaagccagctggcactgcaga

SEQ ID NO: 714877 - DNA, 75 bp, synthetic construct
  source 1..75: mol_type = other DNA
cgcttgattgatcgtctgcagcaattcgttccggatgccttacccgtggtacgtaaagccagctggcactgcagc

SEQ ID NO: 714878 - DNA, 75 bp, synthetic construct
  source 1..75: mol_type = other DNA
cgtgaactgctggggggcgaagaggttgcgggtcagttctggcagcaattgcgtgaacaacaactgccgttcttc

SEQ ID NO: 714879 - DNA, 75 bp, synthetic construct
  source 1..75: mol_type = other DNA
caatgtcaccacgattattatggggagcggtactgcacacactgccagaccgggcgtttcagtgaggaggcggta

SEQ ID NO: 714880 - DNA, 75 bp, synthetic construct
  source 1..75: mol_type = other DNA
caatgtcaccacgattattatggggagccgtactgcacacactgccagaccgggcgattcagtgaggaggtggta

SEQ ID NO: 714881 - DNA, 75 bp, synthetic construct
  source 1..75: mol_type = other DNA
taaccgtcacggaaaccaccgatctgagcacgatgatcaccgatattgattcggcggttatcggcgtcgtttgta

SEQ ID NO: 714882 - DNA, 75 bp, synthetic construct
  source 1..75: mol_type = other DNA
gtgaaggaataccgcgagcaattctcccagcgtgaaatgatggttatctggcctaatttcatctgctacgacacc

SEQ ID NO: 714883 - DNA, 75 bp, synthetic construct
  source 1..75: mol_type = other DNA
tgcacaaacaatctgcccaccacgttgaactgctggtcgatggccagcatatcctgtgcctgtacgtgctggaag

SEQ ID NO: 714884 - DNA, 75 bp, synthetic construct
  source 1..75: mol_type = other DNA
atggctcaggattaccaccacggagtgcgcgttgttgaagtcagcgaaggcactcgatccattaccacggtgagc

SEQ ID NO: 714885 - DNA, 75 bp, synthetic construct
  source 1..75: mol_type = other DNA
cagggcaccgataccgacgccgacgaactgaacgcagcaggcgttaccacgctgatcaagcaggacggctaccgc

SEQ ID NO: 714886 - DNA, 75 bp, synthetic construct
  source 1..75: mol_type = other DNA
ccgtgggtgcccatgctgttgggatgcgagccaaaatcgacgcaacgcagggctggcataaaaccatttccaacg

SEQ ID NO: 714887 - DNA, 75 bp, synthetic construct
  source 1..75: mol_type = other DNA
gcggttgtattaacgtactgaccactcaacgtccgtctcctctcgctaaggggaatccgtcacatacaaaccttg

SEQ ID NO: 714888 - DNA, 75 bp, synthetic construct
  source 1..75: mol_type = other DNA
attcttgtgcagcgtcgtaccgagacaaaagactttttacccggcatgttagatgcgaccgctggtggtgtggtc

SEQ ID NO: 714889 - DNA, 75 bp, synthetic construct
  source 1..75: mol_type = other DNA
aaattagtgaggtatgctggctgaccccggaagaaatcaccgctcgttgcgatgaattcacgccagattcactga

SEQ ID NO: 714890 - DNA, 75 bp, synthetic construct
  source 1..75: mol_type = other DNA
aatggataacaatcgacgcgccactggaaaaactaccattattagtacgtgcaggtgcaggtattcctcttagtg

SEQ ID NO: 714891 - DNA, 75 bp, synthetic construct
  source 1..75: mol_type = other DNA
ggatgcgccggattgcaacgttatgttcagacatggagtggagacaaccgaaccaactgggatacccttcgatac

SEQ ID NO: 714892 - DNA, 75 bp, synthetic construct
  source 1..75: mol_type = other DNA
tataacgcagtaagcacagatcctctctataaacatattccatttacaattactcatcgtagcgatattagcttt

SEQ ID NO: 714893 - DNA, 75 bp, synthetic construct
  source 1..75: mol_type = other DNA
acgactacacaccagtgccgccacttgaaaatctgatgctgcgccagcgcatcaccgatcagtacctggtgaatt

SEQ ID NO: 714894 - DNA, 75 bp, synthetic construct
  source 1..75: mol_type = other DNA
ttaatgatgagttgtatctgtcaatttcgaagctccaggagcatgcagcactggtctacaaaatcttctgcgctc

SEQ ID NO: 714895 - DNA, 75 bp, synthetic construct
  source 1..75: mol_type = other DNA
gattttcgccgtggatagcattccggctatcttcgccgttaccactgacccgttcattgtgctgacctcaaacct

SEQ ID NO: 714896 - DNA, 75 bp, synthetic construct
  source 1..75: mol_type = other DNA
tgtattttgcttcttatggcctatgtgggtctctgtgctgcggtggtctggtttgtagtgccctggctgaaggcc

SEQ ID NO: 714897 - DNA, 75 bp, synthetic construct
  source 1..75: mol_type = other DNA
cgccgaagaactggcctcattcattgcctactggcaggcggaaggcaaagtctttcaccatgtacagtggcagca

SEQ ID NO: 714898 - DNA, 75 bp, synthetic construct
  source 1..75: mol_type = other DNA
atttacgatcactgcccttactgcctcaaagcccgcatgattttcggcctgaaaaatatccccgtcgaattacat

SEQ ID NO: 714899 - DNA, 75 bp, synthetic construct
  source 1..75: mol_type = other DNA
cgtaatctgacgctggtagccggaatcaactggccaagccgcgttgctgattaccgcgataatatggcgaaacag

SEQ ID NO: 714900 - DNA, 75 bp, synthetic construct
  source 1..75: mol_type = other DNA
agttttccgcagatgcattccggcgctttattatccggacgctgactgacgatattccgcctgacggagatccta

SEQ ID NO: 714901 - DNA, 75 bp, synthetic construct
  source 1..75: mol_type = other DNA
cggcggatgatgcggacgcgaagctgttcccgctgaataagcccacactgctgacccgcgtcaatgacgtgctgg

SEQ ID NO: 714902 - DNA, 75 bp, synthetic construct
  source 1..75: mol_type = other DNA
tgcgcgccaaaattgacgagcagaccggatggcacaaaagcctgtccaacgtgggcgttaacggtgtcaccggaa

SEQ ID NO: 714903 - DNA, 75 bp, synthetic construct
  source 1..75: mol_type = other DNA
cagacataaagacgcttttgaggcatacatgcttgggtacgactatgcaatgagcagtgctctgctcaaagttgc

SEQ ID NO: 714904 - DNA, 75 bp, synthetic construct
  source 1..75: mol_type = other DNA
aggccggtaaaaaaggcacgctggcggcatcgttgcaggctatcgccgaccagtcaaaaccggtcaccgttgttg

SEQ ID NO: 714905 - DNA, 75 bp, synthetic construct
  source 1..75: mol_type = other DNA
cacgatggctgaagcgattacctaccgccagaaattcaacgaacgtgaagtgatgctcttatggccggacttcat

SEQ ID NO: 714906 - DNA, 75 bp, synthetic construct
  source 1..75: mol_type = other DNA
cgcaccgctggagaaactgccgctgatggttcgtgccggggctggtctaccgctcagcaaacgcatcacctatgt

SEQ ID NO: 714907 - DNA, 75 bp, synthetic construct
  source 1..75: mol_type = other DNA
atggctggaaacacaattggacaactctttcacgtaaccaccttcggcgaatcgcacgggctggcgctcggctgc

SEQ ID NO: 714908 - DNA, 75 bp, synthetic construct
  source 1..75: mol_type = other DNA
atggctggaaacacaataggacaactctttcgcgtaaccaccttcggcgaatcgcacgggctggcgctcggctgt

SEQ ID NO: 714909 - DNA, 75 bp, synthetic construct
  source 1..75: mol_type = other DNA
tcgatcgcaaactggcgcaggaagaggtgtggattcgccaggggatcaaagcacgccgtacccgtaatgaaggcc

SEQ ID NO: 714910 - DNA, 75 bp, synthetic construct
  source 1..75: mol_type = other DNA
ctgcgtgaagcccttctgtcctggcttgcgaagggtgaaaaaattaattattccgcacaggatagcgacatttta

SEQ ID NO: 714911 - DNA, 75 bp, synthetic construct
  source 1..75: mol_type = other DNA
atgcggcttcgcgggatgataatcgcgagaaattcaccccggcacagaacctgatttacacccgccgacgtgcag

SEQ ID NO: 714912 - DNA, 75 bp, synthetic construct
  source 1..75: mol_type = other DNA
acacctacgaacaaaaatacggtctgcgtgattatcgcggcggcgggcgctcttccgctcgtgaaactgccatgc

SEQ ID NO: 714913 - DNA, 75 bp, synthetic construct
  source 1..75: mol_type = other DNA
gtcacctcgtgcctggtgaatcctcgtgcctgccatgaaaccaaaatgccgatccttcccgccatgcagaaaaaa

SEQ ID NO: 714914 - DNA, 75 bp, synthetic construct
  source 1..75: mol_type = other DNA
tagaggtaatggggtccgaagggtatttgatcaacgagtttcttaccctgcgcaccaaccagcgtagcgaccagt

SEQ ID NO: 714915 - DNA, 75 bp, synthetic construct
  source 1..75: mol_type = other DNA
aggggagtccaccagccagaatatcaccgagttttgtaaagagtggggaatcgacagtagcctgcaacagggtgg

SEQ ID NO: 714916 - DNA, 75 bp, synthetic construct
  source 1..75: mol_type = other DNA
tcgaagaagccagccgctccggtaaaatagtctttgaaatggaagatgtttgctatcaggttgagggcaaacaac

SEQ ID NO: 714917 - DNA, 75 bp, synthetic construct
  source 1..75: mol_type = other DNA
gcaacgtggcgacaaaattgcgttgattggcccgaatggttgcggaaaaaccacgttgttaaaactgatgctggg

SEQ ID NO: 714918 - DNA, 75 bp, synthetic construct
  source 1..75: mol_type = other DNA
cgactggctggaaggttttctgaaaacgttcaacggtacgattattttcatctcccacgaccgttcatttattcg

SEQ ID NO: 714919 - DNA, 75 bp, synthetic construct
  source 1..75: mol_type = other DNA
ggcgaaccacactttcctgcattctgggaacgcttttctggctgtggacgggctggacttccggcagtggtgcaa

SEQ ID NO: 714920 - DNA, 75 bp, synthetic construct
  source 1..75: mol_type = other DNA
cggcaaaatacgccgacattctgctgccagacctgatgaccgttgagcaggaagatattattcctaacgattacg

SEQ ID NO: 714921 - DNA, 75 bp, synthetic construct
  source 1..75: mol_type = other DNA
gataacccggtcaagacgtcaatctcctgctttagctggacggatgctattgatcatggtccgcaaatgacggct

SEQ ID NO: 714922 - DNA, 75 bp, synthetic construct
  source 1..75: mol_type = other DNA
atgacgatgtactgaaaaagatccgcacgcttgaatgttccgcatcattcactgcccgcaatttttcggtgagtg

SEQ ID NO: 714923 - DNA, 75 bp, synthetic construct
  source 1..75: mol_type = other DNA
tgtgttcaactggaactacgacaaagtgccgcagccgaaagtgatgagccaggcatttcacaatgctggtttgca

SEQ ID NO: 714924 - DNA, 75 bp, synthetic construct
  source 1..75: mol_type = other DNA
gcaacctggctggtgatgaaaagcgaaaatccgcttcaggataaaatgcgcagcgtcgcgaaaaaactgctgctg

SEQ ID NO: 714925 - DNA, 75 bp, synthetic construct
  source 1..75: mol_type = other DNA
ttcagtaaagcctgcggcaaaccggttaactatcattttgcaccacgtcgcgcgggcgaccttccggcctactgg

SEQ ID NO: 714926 - DNA, 75 bp, synthetic construct
  source 1..75: mol_type = other DNA
tggcgttacgggcggaatatcgcgttaaacaactgaccaaacggcaaaaagagcgtctggtagcggaaggcgcag

SEQ ID NO: 714927 - DNA, 75 bp, synthetic construct
  source 1..75: mol_type = other DNA
agcggcatggctgcaacgcaaaaatgagctggcagcggccgaacaggaatatctgcggcttctgtcaggagaagg

SEQ ID NO: 714928 - DNA, 75 bp, synthetic construct
  source 1..75: mol_type = other DNA
acgcgccttcgcgggatgataatcgtaaaaaattcactcctgcacagaacatgatttacacccgccgacgtgccg

SEQ ID NO: 714929 - DNA, 75 bp, synthetic construct
  source 1..75: mol_type = other DNA
ctgcgtggcggcgttaccaccgccgccacagtttgaacctgcagactccagtttgtatgcaatgcaaattcagcg

SEQ ID NO: 714930 - DNA, 75 bp, synthetic construct
  source 1..75: mol_type = other DNA
catcgggtattccggacggaatcgcgttacggggaggaagttttttcagatactcccggaacgcctggcttgatg

SEQ ID NO: 714931 - DNA, 75 bp, synthetic construct
  source 1..75: mol_type = other DNA
agcgtctgaatgctggcaaaaccgtgcgaagctttctgatcaccgccgtcgagcttttgaccgaggcggtaaatc

SEQ ID NO: 714932 - DNA, 75 bp, synthetic construct
  source 1..75: mol_type = other DNA
atcactgtggtacatggggaaagtgataaaaatgatgatcaacgcttttggtgataaccgcaattttcgcgtgca

SEQ ID NO: 714933 - DNA, 75 bp, synthetic construct
  source 1..75: mol_type = other DNA
atttttcatggttcgcggtgatattagccctgtggtacatggggaaggtcatgaaaatgatgatcaatgcgtttg

SEQ ID NO: 714934 - DNA, 75 bp, synthetic construct
  source 1..75: mol_type = other DNA
gtgctgatttccgcaccgcgtatcgggcaatttctgcgtgaagatcgtctgattgctttagtgcgccagcgtctg

SEQ ID NO: 714935 - DNA, 75 bp, synthetic construct
  source 1..75: mol_type = other DNA
gatcattatcggcatggtctggagcattcgcttcaaaaccatttcaccgcataaccaccgtaagatcctgcgttt

SEQ ID NO: 714936 - DNA, 75 bp, synthetic construct
  source 1..75: mol_type = other DNA
tgaataaagaggcgattaagaaaaaattaccgctggcattgatttctttggctgtattcctggttggtgtggtca

SEQ ID NO: 714937 - DNA, 75 bp, synthetic construct
  source 1..75: mol_type = other DNA
gctatctgctgctgccgttaatctacctgttggttaacgtgaagctggcgcagctgggggagagcttccccatta

SEQ ID NO: 714938 - DNA, 75 bp, synthetic construct
  source 1..75: mol_type = other DNA
gccgcagctctggctattgaaaagatgcagatccctgcgaaatccggcgctgcgttacctgcgtccattccgctg

SEQ ID NO: 714939 - DNA, 75 bp, synthetic construct
  source 1..75: mol_type = other DNA
ttactgactcactggccgcgctgaattgttcggtcattccggcgcatccgtggataaacggactggggcaacaga

SEQ ID NO: 714940 - DNA, 75 bp, synthetic construct
  source 1..75: mol_type = other DNA
tgcgttacctgcgtccattccgctgtctgtatcaaccagcagggcagctttatctgctgcggcaatcagccaggc

SEQ ID NO: 714941 - DNA, 75 bp, synthetic construct
  source 1..75: mol_type = other DNA
gctgcatctaccccaggcgcagcgcgacagccaggtagaaacctggattgccagcctgaacccgctcacccaggc

SEQ ID NO: 714942 - DNA, 75 bp, synthetic construct
  source 1..75: mol_type = other DNA
tttgattatataaagtttgtttcagacgcagaacaacaggagacaacgaagcatgatgtcgtgcacattaaccag

SEQ ID NO: 714943 - DNA, 75 bp, synthetic construct
  source 1..75: mol_type = other DNA
ttactgattcattgtctgccctgaactgttccatcgttcccgcgcatccgtgggtttatgggctgggacagcaga

SEQ ID NO: 714944 - DNA, 75 bp, synthetic construct
  source 1..75: mol_type = other DNA
cagcttggcgagagcttcccgataactatcgtcaccttcttacccgctctgctgttgctgtttgtcgagcgcatc

SEQ ID NO: 714945 - DNA, 75 bp, synthetic construct
  source 1..75: mol_type = other DNA
taggcgtagcggtactggcttatatagtgaagggattagtttttctataccaatcaatcaattataaaaaaatct

SEQ ID NO: 714946 - DNA, 75 bp, synthetic construct
  source 1..75: mol_type = other DNA
caggttaagggacatgacctgacgaaatgggtctggcagaatgaatctgaactgcgccctgaaaacacgcaaaat

SEQ ID NO: 714947 - DNA, 75 bp, synthetic construct
  source 1..75: mol_type = other DNA
gctgattgccggtgttgactggcagcaggttaagggacatgacctgacgaaatgggtctggcagaatgaatctga

SEQ ID NO: 714948 - DNA, 75 bp, synthetic construct
  source 1..75: mol_type = other DNA
gtttccgcaaagctggagggaatgccatttacaagcgttctgcaaacaatatcgcgttagctatgaccgtgctca

SEQ ID NO: 714949 - DNA, 75 bp, synthetic construct
  source 1..75: mol_type = other DNA
atttcgtttccagaaaagagttaaattacaataccaaattctcgagaaaattcccaatatctcccaaaaactata

SEQ ID NO: 714950 - DNA, 75 bp, synthetic construct
  source 1..75: mol_type = other DNA
tgcagaagtactacggcgacaaccatgtgctgaagggcgtcgatctggatatcgacatgggggaagtgatctcga

SEQ ID NO: 714951 - DNA, 75 bp, synthetic construct
  source 1..75: mol_type = other DNA
cgcataccgatgccgttttacgtattgagcgcggcgggttgaagtcgccggatgcgtcggaagaggcgatagcgc

SEQ ID NO: 714952 - DNA, 75 bp, synthetic construct
  source 1..75: mol_type = other DNA
gggttggtgatgactcttagccgcagtgccggggcgcataccgacgccgttttacgtattgagcgtggtggtttg

SEQ ID NO: 714953 - DNA, 75 bp, synthetic construct
  source 1..75: mol_type = other DNA
cgcagattattctcaccggcggcagcagtttgatagcgacgatttcgaaatatcttatttacagtaatagctatg

SEQ ID NO: 714954 - DNA, 75 bp, synthetic construct
  source 1..75: mol_type = other DNA
caaattgcgacccaattttatgagcgaatactactgtcacatgacaaatcagccatgctgcaacaacacgctcct

SEQ ID NO: 714955 - DNA, 75 bp, synthetic construct
  source 1..75: mol_type = other DNA
gcttgacccgttgcgtcgtgaagtgagcatcacggcgctgaccgacgacaaggcattaatgatgattggctgtga

SEQ ID NO: 714956 - DNA, 75 bp, synthetic construct
  source 1..75: mol_type = other DNA
gacgccactctcactcgaagaacgcaacgatttgctggattatggaaactggcggatgaatggtctgcgctgctc

SEQ ID NO: 714957 - DNA, 75 bp, synthetic construct
  source 1..75: mol_type = other DNA
tgggcgagttcgcgcagctgcgtgacagcctgatcagtgatgtggccagcgggctgaatgatttgcaggggaaaa

SEQ ID NO: 714958 - DNA, 75 bp, synthetic construct
  source 1..75: mol_type = other DNA
tttatggtcatcggaaaatcctcaagccagaacatttagactggcaagaatatgcattattgctgctcaatagca

SEQ ID NO: 714959 - DNA, 75 bp, synthetic construct
  source 1..75: mol_type = other DNA
gacaccgccagcacgttaaaggctgcaagtgaagagattcagcaattagtagatgatttagcaaaaagtgctatt

SEQ ID NO: 714960 - DNA, 75 bp, synthetic construct
  source 1..75: mol_type = other DNA
agttctattattaataaggataaccgaaaacctctaaagattgagtcaatagttgacttggatgattatgttgga

SEQ ID NO: 714961 - DNA, 75 bp, synthetic construct
  source 1..75: mol_type = other DNA
gtcatatgcgaatttgcgaaccttttggcccggagcaacgacaaggattatggctctatcacgttatcgaaccgg

SEQ ID NO: 714962 - DNA, 75 bp, synthetic construct
  source 1..75: mol_type = other DNA
tagaaaaacagcctgagtggtacgtgaaagctgtcagaaaaactatcgcggcgttgccgggtggttacgctgaag

SEQ ID NO: 714963 - DNA, 75 bp, synthetic construct
  source 1..75: mol_type = other DNA
gaaagtaatgacgcccgcgagtgtgcagctccgggcgccgtggcgtgtcgtgactgtggagaaactaacgcatga

SEQ ID NO: 714964 - DNA, 75 bp, synthetic construct
  source 1..75: mol_type = other DNA
ggtcgcgccagcagcggcggattagccaaacgagatgtgaacatggtcagtgaacctgacagccaaattccaccg

SEQ ID NO: 714965 - DNA, 75 bp, synthetic construct
  source 1..75: mol_type = other DNA
aaaagttagcggttcagctgcgtaaacgtaaccacagaaacgaggagttaaccgtgggtaagcatcactggaaag

SEQ ID NO: 714966 - DNA, 75 bp, synthetic construct
  source 1..75: mol_type = other DNA
ttaacgacgagctgtacctctcaatttcgaagctgcaggagcatgcagcactggtctacaaaattttttgcattt

SEQ ID NO: 714967 - DNA, 75 bp, synthetic construct
  source 1..75: mol_type = other DNA
aaatttggaatcactacccgaaaaccagaagaacgaatgagagaacaaaccagaaagagcaacttcactcaccgc

SEQ ID NO: 714968 - DNA, 75 bp, synthetic construct
  source 1..75: mol_type = other DNA
tagtcattatctggcggtactttatcgctttaaagatgaaagtggcaaagagcaatttagcggcgcagtagtgaa

SEQ ID NO: 714969 - DNA, 75 bp, synthetic construct
  source 1..75: mol_type = other DNA
tgccctggtccacttacgtccgtttgctttctgttaaaaacgctgacgctcgtagcttttatgagaaagagacac

SEQ ID NO: 714970 - DNA, 75 bp, synthetic construct
  source 1..75: mol_type = other DNA
tctggcgagtgaatataagatgcaactacctgatgaaaaacgactcgcggatgaactcgttcgaacacaggcggt

SEQ ID NO: 714971 - DNA, 75 bp, synthetic construct
  source 1..75: mol_type = other DNA
aattcagctatagcgatgccggacagatgaatatgtatctcaactacgccaaagagcactggacactaccggatg

SEQ ID NO: 714972 - DNA, 75 bp, synthetic construct
  source 1..75: mol_type = other DNA
gcaggtaagccgcatggcggcagccgccgcagaactcagcacggtaaaaatgcagttgccggttaaagccgatgt

SEQ ID NO: 714973 - DNA, 75 bp, synthetic construct
  source 1..75: mol_type = other DNA
atgacaaacatgatctcatatcagggacttgttcgcaccttccttaaagaacctcgcaataaagaatcgttgttc

SEQ ID NO: 714974 - DNA, 75 bp, synthetic construct
  source 1..75: mol_type = other DNA
ccgcgctgtttctgacgggctgcatgacgaagccgcaaaactcgccgcgagattggcagcaagtgaacgcgcccg

SEQ ID NO: 714975 - DNA, 75 bp, synthetic construct
  source 1..75: mol_type = other DNA
ccctgggctgacccggagaaaattccttacaccatcatgggcccttatctgacgcctttgtttgaacgcgccttt

SEQ ID NO: 714976 - DNA, 75 bp, synthetic construct
  source 1..75: mol_type = other DNA
attggctttttttggtgccgtagtgaaaaccggggcgacacaagcaatccgcgattttggtggttttcagcaaat

SEQ ID NO: 714977 - DNA, 75 bp, synthetic construct
  source 1..75: mol_type = other DNA
acggcactaatgctactggggaaaagtgaactgtacgcttttttgaccaatattgttgtttttcgcatcgatccg

SEQ ID NO: 714978 - DNA, 75 bp, synthetic construct
  source 1..75: mol_type = other DNA
agccatgctgcaacaacacgctcctgccgagatgcatattcttccgcaacaggcgatacgcgatccctttgtgct

SEQ ID NO: 714979 - DNA, 75 bp, synthetic construct
  source 1..75: mol_type = other DNA
ggtcgcgaaggtgcgatgattcttttagctgcccttgccgcctcctgttttgcccaacgttttacgccacgctag

SEQ ID NO: 714980 - DNA, 75 bp, synthetic construct
  source 1..75: mol_type = other DNA
ctatcgtcacttttttacctgtcttgttactgctgtttttagagcgcatcagcgttaaaaaattgatgattgcct

SEQ ID NO: 714981 - DNA, 75 bp, synthetic construct
  source 1..75: mol_type = other DNA
gcgcgccagctcaggcggctaaacaggaagcggctccggcagcaggcccatgcatcagcggctggcgtgaaagaa

SEQ ID NO: 714982 - DNA, 75 bp, synthetic construct
  source 1..75: mol_type = other DNA
atagatgaacgaaaacgtgcagctgctgttagcgaaagtacacctgctggagcggcggtaaagaaagaaagccaa

SEQ ID NO: 714983 - DNA, 75 bp, synthetic construct
  source 1..75: mol_type = other DNA
acagaggagcaccgtctggtatacgcggttactgatgattcactgctcattgcagcatgtcgttatcattattga

SEQ ID NO: 714984 - DNA, 75 bp, synthetic construct
  source 1..75: mol_type = other DNA
catgggatgattatctgtactggcaggaaacagataagcgaattgttaaaaagatcaatgaacttatcaaagata

SEQ ID NO: 714985 - DNA, 75 bp, synthetic construct
  source 1..75: mol_type = other DNA
gcgagttgcgcccggaaccggcggatgagattgcgcaagcgttgcttaataacacgtatgcggtgtttaacgtgc

SEQ ID NO: 714986 - DNA, 75 bp, synthetic construct
  source 1..75: mol_type = other DNA
atccacgcgccagtaaaacccgcgatgtcatcgcaaaactaccgctggcatcgttgttgctggaaaccgacgcgc

SEQ ID NO: 714987 - DNA, 75 bp, synthetic construct
  source 1..75: mol_type = other DNA
atgatttcggtgttctggaatttatttagaggaatctatgcgagggaaaaacgcattgggttattgtttttgctg

SEQ ID NO: 714988 - DNA, 75 bp, synthetic construct
  source 1..75: mol_type = other DNA
gaagcgatggaagtgctgcgctacggcagccgcccgtatattttaccgcctctccttctccgtcctgcattgcga

SEQ ID NO: 714989 - DNA, 75 bp, synthetic construct
  source 1..75: mol_type = other DNA
ccgacagccacgccagtatttatgatgcctgctctctcggcggcgcggaaattattcgttttcgccataacgacg

SEQ ID NO: 714990 - DNA, 75 bp, synthetic construct
  source 1..75: mol_type = other DNA
gctgcccgggtatttgccgtactgtgcgagttacgcccggaacccgcagatgagattgccgacgtgttgcttaat

SEQ ID NO: 714991 - DNA, 75 bp, synthetic construct
  source 1..75: mol_type = other DNA
gcgattatcatcgttgaaggcatctacagtatgctcggtgacgttgcgccgctggcggaaattgttgatatcaaa

SEQ ID NO: 714992 - DNA, 75 bp, synthetic construct
  source 1..75: mol_type = other DNA
ggcaccaccggttctcgtatggcaaacggcagttatgcgccgcatctggcgttagagaaagagattgccgagttt

SEQ ID NO: 714993 - DNA, 75 bp, synthetic construct
  source 1..75: mol_type = other DNA
gccttgctggcgagcgactgcaatttagtgacaacgggttaacgccgtttggtacctgtattgatgaagtgtatt

SEQ ID NO: 714994 - DNA, 75 bp, synthetic construct
  source 1..75: mol_type = other DNA
ggtggcggtgggggagatcggcctggatctctttggtgacgatccgcaatttgagaggcagcagtggttgcttga

SEQ ID NO: 714995 - DNA, 75 bp, synthetic construct
  source 1..75: mol_type = other DNA
gatgatatccgtaataatcaggatgcgatggcggaaaccatcgaaaacaacgtgcgcaaaaccatcgtggatgaa

SEQ ID NO: 714996 - DNA, 75 bp, synthetic construct
  source 1..75: mol_type = other DNA
gggagatcgctttaaggagcgagaaattgccaatgcggtgcgagaagaaacgacggggtatgatgtggatattca

SEQ ID NO: 714997 - DNA, 75 bp, synthetic construct
  source 1..75: mol_type = other DNA
acctgtttcaggccatttgccgcgtgaaccgcttggatggcgatgataaagaatacggttacatcattgattaca

SEQ ID NO: 714998 - DNA, 75 bp, synthetic construct
  source 1..75: mol_type = other DNA
tatcgcctgaacgtggtggcgattgaagtaccatcgctgcgtcagcggcgggaagatattcctctgctggcaaac

SEQ ID NO: 714999 - DNA, 75 bp, synthetic construct
  source 1..75: mol_type = other DNA
atgtcgctggcgattaacgcgcgtttactgcgcgccagtatgctggacgtcgccggtcagcgtcacgtcacctgg

SEQ ID NO: 715000 - DNA, 75 bp, synthetic construct
  source 1..75: mol_type = other DNA
ggtggatgccgatccaagtgaaacccttatggattttgaagaactaggactgcttgagttgattattgaacgcgg

SEQ ID NO: 715001 - DNA, 75 bp, synthetic construct
  source 1..75: mol_type = other DNA
cacaattcatttcaactaccgtagatgaagatgtagcagtacgataccgtgaaccaggccaaactacagttacat

SEQ ID NO: 715002 - DNA, 75 bp, synthetic construct
  source 1..75: mol_type = other DNA
tgtcatcgcaaaattaccgctggcatcgttgttgctggaaaccgacgcgccagatatgccgctcaacggttttca

SEQ ID NO: 715003 - DNA, 75 bp, synthetic construct
  source 1..75: mol_type = other DNA
tgtatggcgcgttagggttgcatccggggatgttagaaaaacatagcgatgcatcgctggagcagttacagcagg

SEQ ID NO: 715004 - DNA, 75 bp, synthetic construct
  source 1..75: mol_type = other DNA
acataaactcgattttcacctgagtcgcgtgtgtaacaaagcgcgcttgctgcaaattatccatgattttattgt

SEQ ID NO: 715005 - DNA, 75 bp, synthetic construct
  source 1..75: mol_type = other DNA
ttgaagcagcaaaacgccatatcgcaaggcgagaaggcggcatcatttggcacacgcaaggttctggcaaaagcc

SEQ ID NO: 715006 - DNA, 75 bp, synthetic construct
  source 1..75: mol_type = other DNA
cctgcaacccgcctggcagcgcattgattcacggttaattttgattgcgcaaacactgggctggtcgcgggccaa

SEQ ID NO: 715007 - DNA, 75 bp, synthetic construct
  source 1..75: mol_type = other DNA
ctcgtggcgctcgcacagctttgcgcctcgccatacacgccgtgggcatgaaacgcgttcaggcgtaccggaaca

SEQ ID NO: 715008 - DNA, 75 bp, synthetic construct
  source 1..75: mol_type = other DNA
tcttagccgttcgccgctggagcagaatatcattcagccactggtgttaaggaaggtgcgaataagcaggtcatt

SEQ ID NO: 715009 - DNA, 75 bp, synthetic construct
  source 1..75: mol_type = other DNA
gtttgccgtactgttggcaacgctaattcatcattttggcgaacaaattattgatttcgtcgcgggtgatgccac

SEQ ID NO: 715010 - DNA, 75 bp, synthetic construct
  source 1..75: mol_type = other DNA
gggattggcggacagcttcaatatggtcattatggctttttttgcagctatcgatcttggtactactgtcgttgt

SEQ ID NO: 715011 - DNA, 75 bp, synthetic construct
  source 1..75: mol_type = other DNA
ggaacactaacggggcgtaacacagcaaccgggaattatacatacgagttcaacctgaaactaatcccggagggc

SEQ ID NO: 715012 - DNA, 75 bp, synthetic construct
  source 1..75: mol_type = other DNA
aacgtggtgaatatgccgccgggtaattcgcaaccgcgcggcgattttctctatcacagcatttgtaactgggtt

SEQ ID NO: 715013 - DNA, 75 bp, synthetic construct
  source 1..75: mol_type = other DNA
cgtggcgcagttttttaatatcacgcccaatcatctgtcaaaactgtttgctcagcatggaacgatgcgttttat

SEQ ID NO: 715014 - DNA, 75 bp, synthetic construct
  source 1..75: mol_type = other DNA
agatggctggcgttttgttaggaaaagaggtgcgtaaacgtaaaaacacctcaggaaaaaatcgcaattattcaa

SEQ ID NO: 715015 - DNA, 75 bp, synthetic construct
  source 1..75: mol_type = other DNA
gtgatgtttatatcaagcttagagggaagttacctataattggtcaaaggaaaagtttttatgactttgtttcta

SEQ ID NO: 715016 - DNA, 75 bp, synthetic construct
  source 1..75: mol_type = other DNA
aatttagaaagttaattaataatccaaaggctttttttgcagatgcaaagattgtaaaaaaagttgctagtaata

SEQ ID NO: 715017 - DNA, 75 bp, synthetic construct
  source 1..75: mol_type = other DNA
gtgcattagcgttaagtgtcgggttaactctctcggcgtcatttcaggccgtcgcgtcatttcaggccgtcgcgt

SEQ ID NO: 715018 - DNA, 75 bp, synthetic construct
  source 1..75: mol_type = other DNA
ctgctgcgtaacggcaaaccactggaagtagaagtgacgctcgataccagcacctcttcgtcggccagcgctgaa

SEQ ID NO: 715019 - DNA, 75 bp, synthetic construct
  source 1..75: mol_type = other DNA
atgctggaaaaagtgcttccggcagtggtgagcgtacgggtggaaggaacggccagtcagggacagaaaatcccg

SEQ ID NO: 715020 - DNA, 75 bp, synthetic construct
  source 1..75: mol_type = other DNA
tgagttcaacatgaaagaggtaccagaaggcagttataacgtggtgattaatgcccaagatacattcaacaatac

SEQ ID NO: 715021 - DNA, 75 bp, synthetic construct
  source 1..75: mol_type = other DNA
tggcgcattcaccctgttctatatgtcgatcaacatcggctcgttgatagcgttatcgctggcccctgtgatcgc

SEQ ID NO: 715022 - DNA, 75 bp, synthetic construct
  source 1..75: mol_type = other DNA
attccagagcttaggtgaactgtttattagcgcccttggcctggcgatgattgctgccctggtgccgcagcattt

SEQ ID NO: 715023 - DNA, 75 bp, synthetic construct
  source 1..75: mol_type = other DNA
attatcttcttccgtcaggcattcaagttggataaaaccgggcgcaataaaatgtttgtcgcctttatcctgatg

SEQ ID NO: 715024 - DNA, 75 bp, synthetic construct
  source 1..75: mol_type = other DNA
cctctcgatgccgatgaaatttactctcggcatgtttatgtgctcgctgggatttctgactgccgccgctgcggg

SEQ ID NO: 715025 - DNA, 75 bp, synthetic construct
  source 1..75: mol_type = other DNA
cggctatgtggcaacatttaccgcagtaccagacaacattaccgatccgcttgagacgttgcccgtctataccaa

SEQ ID NO: 715026 - DNA, 75 bp, synthetic construct
  source 1..75: mol_type = other DNA
cgggatgtggttcctgacgcaggctgccgcattcttgctgggtggttatgtggcaacattcacggcggtaccgga

SEQ ID NO: 715027 - DNA, 75 bp, synthetic construct
  source 1..75: mol_type = other DNA
tatgatgtgaaaacctcgtttatccgcaacggctccggtagcaccctggcaaaagtcgatgctgaaaagaaaaac

SEQ ID NO: 715028 - DNA, 75 bp, synthetic construct
  source 1..75: mol_type = other DNA
ggtgttttgactctgaacttgatatcgggtcttgatcggtacgagcgagtgacggtcacacgagacagcgataaa

SEQ ID NO: 715029 - DNA, 75 bp, synthetic construct
  source 1..75: mol_type = other DNA
tggttgcaactgcccttgctactgtatcttcggcacatgctcaggtatttagctactcatttacagataccaata

SEQ ID NO: 715030 - DNA, 75 bp, synthetic construct
  source 1..75: mol_type = other DNA
cgcatctgggtaacaaaggcaaagacctctcgatgccgatgaaatttactctcggtatgtttatgtgctcgctgg

SEQ ID NO: 715031 - DNA, 75 bp, synthetic construct
  source 1..75: mol_type = other DNA
ggcctggcaacaacagcaaaccagcaacacgcccaccgcaccgctaacgcgtgaaaatgacaccattaatctggt

SEQ ID NO: 715032 - DNA, 75 bp, synthetic construct
  source 1..75: mol_type = other DNA
tttattgtgtttatcaccgcatggaaagaacatgcggtggaagcgttcgaactggaagcatttgactacattctc

SEQ ID NO: 715033 - DNA, 75 bp, synthetic construct
  source 1..75: mol_type = other DNA
ataaggttttatgtgatgctcttaaccagtcacaagtaactcaaaatgagatgagagagctttatctttcaagag

SEQ ID NO: 715034 - DNA, 75 bp, synthetic construct
  source 1..75: mol_type = other DNA
gtgagcaatatcaacttaataacaacatgtacaaacggtaaacactacgatagtggggatatattgagtctgagt

SEQ ID NO: 715035 - DNA, 75 bp, synthetic construct
  source 1..75: mol_type = other DNA
caaagacaatgttgtaccttataaagcgacctttgctgttggatatgacgaatcaataccattatattctcaaga

SEQ ID NO: 715036 - DNA, 75 bp, synthetic construct
  source 1..75: mol_type = other DNA
gcgaacgccgcgattactactggaactggtcagaagatgaaggctggcagtcacagtttgatcaaaaagatctga

SEQ ID NO: 715037 - DNA, 75 bp, synthetic construct
  source 1..75: mol_type = other DNA
gtcagccggagaatggcctctaccactttacctggccactcgatagcaatgcggcaaccggtatgtggcatattc

SEQ ID NO: 715038 - DNA, 75 bp, synthetic construct
  source 1..75: mol_type = other DNA
attcagagtgaacaagataatgacagtaatcttgatttaaaattaaacgaaattactcttgctcataatagctcc

SEQ ID NO: 715039 - DNA, 75 bp, synthetic construct
  source 1..75: mol_type = other DNA
ggtcaggaaggcatgaccttcagcacacaacctgcaggtacgccggataccgactggttagctgataaagacatc

SEQ ID NO: 715040 - DNA, 75 bp, synthetic construct
  source 1..75: mol_type = other DNA
ttcggtaactccatacagacggacgccggtgccagcaaccgaatttgcagctgaattgcgtaagagtgacgtgtt

SEQ ID NO: 715041 - DNA, 75 bp, synthetic construct
  source 1..75: mol_type = other DNA
ggaaaataaaaaagtaacccaaaatattgttttttcaccgcctgtatcagcaaaggtaaaacctgaagatctgct

SEQ ID NO: 715042 - DNA, 75 bp, synthetic construct
  source 1..75: mol_type = other DNA
cacggcgagtcgcggccttatgtggaaacaggcctgccctgtcggaacgcggaagactttcgcgcctgttctgtt

SEQ ID NO: 715043 - DNA, 75 bp, synthetic construct
  source 1..75: mol_type = other DNA
taatcgctttaacaaacatgttggatgggcagcgaatcaggaactgttccatctggaaaccaagacagacgatgt

SEQ ID NO: 715044 - DNA, 75 bp, synthetic construct
  source 1..75: mol_type = other DNA
gaagttcacaagccgttgtgtgcggtaggcgcgccagcgagggttcgcaaagccgttgtgaaaatgctgatggcg

SEQ ID NO: 715045 - DNA, 75 bp, synthetic construct
  source 1..75: mol_type = other DNA
ccgcccgcagttcgccttgaaatcggtttacgattaccgtactgacacgactgtaaaacaacccattgttgatga

SEQ ID NO: 715046 - DNA, 75 bp, synthetic construct
  source 1..75: mol_type = other DNA
tcccgtttgctgcaaatgcaacgtgataacggcggctttgcgctgtgggataaaaacggtgacgaagagtactgg

SEQ ID NO: 715047 - DNA, 75 bp, synthetic construct
  source 1..75: mol_type = other DNA
ctggcaggataatagcgacggtagcggtgcggtacgaccagaccgtgtcacgatgaaactggataaagccagtta

SEQ ID NO: 715048 - DNA, 75 bp, synthetic construct
  source 1..75: mol_type = other DNA
gaaagtaacgcgttgttcctggctgcccgtacgattcaggatttaccgggtaaatggcaggcgcaaacctctttc

SEQ ID NO: 715049 - DNA, 75 bp, synthetic construct
  source 1..75: mol_type = other DNA
tacgctggtggtacgtcctggcgataaatctcgctccgcgacgccaaaacgcgcggttggggtgttgcatctgcc

SEQ ID NO: 715050 - DNA, 75 bp, synthetic construct
  source 1..75: mol_type = other DNA
tactactggaactggtcagaagatgaaggctggcaatcacagtttgatcaaaaagatctgattgaaaatgaacaa

SEQ ID NO: 715051 - DNA, 75 bp, synthetic construct
  source 1..75: mol_type = other DNA
agaatctggcgaacggtagcgccagcctggagcaaagtggtggcgaagtgcaaaacttactgaaccagatgcagc

SEQ ID NO: 715052 - DNA, 75 bp, synthetic construct
  source 1..75: mol_type = other DNA
gtttatcccggtgcgagcattgccgggttatggcgatggagaaattcaggccaccattagcgggttagcgttacc

SEQ ID NO: 715053 - DNA, 75 bp, synthetic construct
  source 1..75: mol_type = other DNA
gtgggaataccgcaattctctggcgaactggcaatcagacaagctgctgcagatggcggacctggtctataccgg

SEQ ID NO: 715054 - DNA, 75 bp, synthetic construct
  source 1..75: mol_type = other DNA
tgggcatcaaaggcgacagtgatgagaagcgccgtgcggcagttgatatcggcatttcccgtttgctgcaaatgc

SEQ ID NO: 715055 - DNA, 75 bp, synthetic construct
  source 1..75: mol_type = other DNA
acagcaagcagttctttatgtttggcccgcgcgatctttatcgccctggcgaaacggtaattctcaatgggttat

SEQ ID NO: 715056 - DNA, 75 bp, synthetic construct
  source 1..75: mol_type = other DNA
aaacgctatggtgcagatatttacgatatttatggtcaggtcattgaaggtcagggacgcctggcggcactgcgc

SEQ ID NO: 715057 - DNA, 75 bp, synthetic construct
  source 1..75: mol_type = other DNA
gcccactgcgcgacaacgcgttgatgctctccttactggaagagaacaaactgctgccagatgagcagaacacct

SEQ ID NO: 715058 - DNA, 75 bp, synthetic construct
  source 1..75: mol_type = other DNA
atgggcgtttatgttgacaaggaattcagggttaagcgtaagtcctctgaagctggccgcaagtctgctttcgcc

SEQ ID NO: 715059 - DNA, 75 bp, synthetic construct
  source 1..75: mol_type = other DNA
ggccgggacctggggaccggttgcttcggtggcgatgattacccgtgatggccgttcctggaatgagtttgagta

SEQ ID NO: 715060 - DNA, 75 bp, synthetic construct
  source 1..75: mol_type = other DNA
acaatgatgcgccgaaaccgtatcaggccggaacctggggaccggttgcctcggtggcgatgattactcgtgatg

SEQ ID NO: 715061 - DNA, 75 bp, synthetic construct
  source 1..75: mol_type = other DNA
ggcaatccgcgttgacatcgataactggcgttgggctggtgtaccattctacctgcgtaccggtaaacgtctgcc

SEQ ID NO: 715062 - DNA, 75 bp, synthetic construct
  source 1..75: mol_type = other DNA
gaagcccttgctaaactaaattcaagtgtacgagaagcaattgctaaagctaaagttcacacatccaccagcatt

SEQ ID NO: 715063 - DNA, 75 bp, synthetic construct
  source 1..75: mol_type = other DNA
aaattcaatgaagcccttgctaaactaaattcaagtgtacgagaagcaattgctaaagccagaggtcatacatcc

SEQ ID NO: 715064 - DNA, 75 bp, synthetic construct
  source 1..75: mol_type = other DNA
cgcaccaatgtgcgtgaaaaaacagtacgcgggcaatacaccgcaggcttcgctcagggcaaaaaagtaccaggc

SEQ ID NO: 715065 - DNA, 75 bp, synthetic construct
  source 1..75: mol_type = other DNA
tcatgtctttaacggcatgggttacgatggcgataatatttcgccgcatctggcatgggatgatgttcctgcggg

SEQ ID NO: 715066 - DNA, 75 bp, synthetic construct
  source 1..75: mol_type = other DNA
acacagatccaaaactggctttagatgccgcgtttaagctggcccagttcacccaccgcaagatcggcagcattg

SEQ ID NO: 715067 - DNA, 75 bp, synthetic construct
  source 1..75: mol_type = other DNA
ccggggaatatatttccgaacgcgagctgccgctggcgattgccagtacgccgatcccgctggggcaaagtcagg

SEQ ID NO: 715068 - DNA, 75 bp, synthetic construct
  source 1..75: mol_type = other DNA
gcgtattatgcagcaactggcagaagaggggaaaaccatggtggtagtgactcacgaaatgggctttgctcgcca

SEQ ID NO: 715069 - DNA, 75 bp, synthetic construct
  source 1..75: mol_type = other DNA
attaacttcctcgaaaagccgagcgaaggatcgatcgtggttaatggtcagacgatcaatctggtgcgtgacaaa

SEQ ID NO: 715070 - DNA, 75 bp, synthetic construct
  source 1..75: mol_type = other DNA
tcatgtctttaacggcatgggttacgatggcgataatatttcaccgcatctggcgtgggatgatgttcctgcggg

SEQ ID NO: 715071 - DNA, 75 bp, synthetic construct
  source 1..75: mol_type = other DNA
atgtcacgttataaaacaggtcataaacaaccactatttcgttattcagttctggcccgctgcgtggcgtgggca

SEQ ID NO: 715072 - DNA, 75 bp, synthetic construct
  source 1..75: mol_type = other DNA
aatctcagttttacgggctatctgctaaagctgggtcaatggataattcaaaattcaatgaggagttggctcggt

SEQ ID NO: 715073 - DNA, 75 bp, synthetic construct
  source 1..75: mol_type = other DNA
ctttaaagtcaatggaagggaaaattaataagacctttgaccgtctggaagctagagcaagaaacacaaaagttt

SEQ ID NO: 715074 - DNA, 75 bp, synthetic construct
  source 1..75: mol_type = other DNA
atgaatgcaggtcttaaacgagattccgcacagagagccgctaagtttgtacttggtgataaagcatctgaggct

SEQ ID NO: 715075 - DNA, 75 bp, synthetic construct
  source 1..75: mol_type = other DNA
agctccagatgagaaatttctcgcaaataaaacagtcgatgattcaaagcgaacagaaagtgaaaattggtattc

SEQ ID NO: 715076 - DNA, 75 bp, synthetic construct
  source 1..75: mol_type = other DNA
aacattttataaagctaaagactcttaacaagggggttgagaaaacatactggggggctgattttggggacttat

SEQ ID NO: 715077 - DNA, 75 bp, synthetic construct
  source 1..75: mol_type = other DNA
gattggtagcggggcacttcgtggtgcagggaatacgaaaataccgctactgattaacggtagcctgaatattct

SEQ ID NO: 715078 - DNA, 75 bp, synthetic construct
  source 1..75: mol_type = other DNA
gtactctgccttggatcctgttaaaaacaccttacaaaaacggcacggtcattaccgctacggattattatttta

SEQ ID NO: 715079 - DNA, 75 bp, synthetic construct
  source 1..75: mol_type = other DNA
tattgatgaaagaaccacatcgcatattaatcgtatgcaggaagataccttgattagctcagcttacccagagga

SEQ ID NO: 715080 - DNA, 75 bp, synthetic construct
  source 1..75: mol_type = other DNA
gaataaagcttttaaagttaatcctacgcctttaaatgattctctcaaactaatggaaaagaatgttgataaaac

SEQ ID NO: 715081 - DNA, 75 bp, synthetic construct
  source 1..75: mol_type = other DNA
aattgtttaacaatgccacaatgaatattgcaagattcaatcatccagaattaaacaacattaagcaagaagcat

SEQ ID NO: 715082 - DNA, 75 bp, synthetic construct
  source 1..75: mol_type = other DNA
aaattcaatgagaagttggctcagttaaattcttcagtccgagaagcaattgctaaagccagaggtcatacatcc

SEQ ID NO: 715083 - DNA, 75 bp, synthetic construct
  source 1..75: mol_type = other DNA
acagggattatgaacctgacaagagcaatcacaacgttaggtacaagagctaatcaggtggctggtcaggtagct

SEQ ID NO: 715084 - DNA, 75 bp, synthetic construct
  source 1..75: mol_type = other DNA
cggacagcaacgactggccgccgtgcaacgggccatgcagcagggggccgcgaatgataactggtttgaaccgga

SEQ ID NO: 715085 - DNA, 75 bp, synthetic construct
  source 1..75: mol_type = other DNA
gaaaacatcgatcatgtgaaaaacatggtcttttcaccaccaccagaagttggagtaagcagggaagacgctctg

SEQ ID NO: 715086 - DNA, 75 bp, synthetic construct
  source 1..75: mol_type = other DNA
gaaaagactccggaatgtttacaaggttgtggattttggggagacttcatatcagaataaggcaggggaaaaacg

SEQ ID NO: 715087 - DNA, 75 bp, synthetic construct
  source 1..75: mol_type = other DNA
cggtgcttgatgcgcggcgcgaagctgatgccctgcgtcgtcgctatccggtggcgcagggagccggacgctggc

SEQ ID NO: 715088 - DNA, 75 bp, synthetic construct
  source 1..75: mol_type = other DNA
ggtaacgcaacagcacaatggctggttgatggtcgatgatgcccacggcacgggcgtatcggggagcaggggcgc

SEQ ID NO: 715089 - DNA, 75 bp, synthetic construct
  source 1..75: mol_type = other DNA
cgatgccctgcgtcgccgttatccagtggcgcaaggagccggacgctggctggtggcggatgatcgccagtatct

SEQ ID NO: 715090 - DNA, 75 bp, synthetic construct
  source 1..75: mol_type = other DNA
tgcgtttctgttgcgtttgttggtagccgtattggtgatgtcaggcgtgctgttaggtatgttacacatcatgcc

SEQ ID NO: 715091 - DNA, 75 bp, synthetic construct
  source 1..75: mol_type = other DNA
cctgagactcaactctcttttctacacgtctccgatttagcgcaagctgtgggtcagtggttgtgcgccgatact

SEQ ID NO: 715092 - DNA, 75 bp, synthetic construct
  source 1..75: mol_type = other DNA
gtgcgaatggttggtattcctctgccggtactcacctgccttgcggatatcagtaccgcgttgagtcgcctggca

SEQ ID NO: 715093 - DNA, 75 bp, synthetic construct
  source 1..75: mol_type = other DNA
tgattactccagaacatatcgtggagaaaacatcgatcatgtgaaaaacatggtcttttcaccaccaccagaagc

SEQ ID NO: 715094 - DNA, 75 bp, synthetic construct
  source 1..75: mol_type = other DNA
tacaactggacacctacaaaagaagtcacttttaaaatcactggctcgggtaaaactcccgcagggatcaaaaat

SEQ ID NO: 715095 - DNA, 75 bp, synthetic construct
  source 1..75: mol_type = other DNA
ccgtcagctcgatgaccatgttttctcgcgtgcttggctttgcacgtgacgcaattgtcgccagaatatttggcg

SEQ ID NO: 715096 - DNA, 75 bp, synthetic construct
  source 1..75: mol_type = other DNA
ttaatggtcgacgatgcccacgggacgggcgttatcggtgagcaggggcgcggcagttgctggcagcaaaagatg

SEQ ID NO: 715097 - DNA, 75 bp, synthetic construct
  source 1..75: mol_type = other DNA
cccgacagggtggagcaggaagtaacgcgacatcggtaactaaggggagtacccagagcgtaccgtccggtgttg

SEQ ID NO: 715098 - DNA, 75 bp, synthetic construct
  source 1..75: mol_type = other DNA
tgcagtgctcgccaacatggattctatttggcgatgaagacaagcagccatcaccacctattgaggagccagttg

SEQ ID NO: 715099 - DNA, 75 bp, synthetic construct
  source 1..75: mol_type = other DNA
gtacctgcagcgcgtgacgttgcaggagggcgcgacggttgaagaagctattcgcgccagtggtttgctggaatt

SEQ ID NO: 715100 - DNA, 75 bp, synthetic construct
  source 1..75: mol_type = other DNA
gagtgacccaatggtattggttaaactcattcagcaactgggcaatgccagtgaatgggtcttagcccagttgga

SEQ ID NO: 715101 - DNA, 75 bp, synthetic construct
  source 1..75: mol_type = other DNA
gtaaagcagcgttgttactggcggctgtgcctgccctcaggtcactgctacaaccaataatacagccgaaaaaga

SEQ ID NO: 715102 - DNA, 75 bp, synthetic construct
  source 1..75: mol_type = other DNA
acccagagcgtaccgtctggtgttgtgggatatacagccagtaatccttacggggcaagtgttgatggaatgatg

SEQ ID NO: 715103 - DNA, 75 bp, synthetic construct
  source 1..75: mol_type = other DNA
gaagctgttttactccaggcagaacaacagcgcgccagcctcttaaaggccagtaagccgcgtttgctggaacgt

SEQ ID NO: 715104 - DNA, 75 bp, synthetic construct
  source 1..75: mol_type = other DNA
tccgggcatgtcagcggttatagcgtggtgcatcaggcgctggaagaagaactggccgagtggcttggctattcg

SEQ ID NO: 715105 - DNA, 75 bp, synthetic construct
  source 1..75: mol_type = other DNA
aagtccggcgcagcttcgtcgttttgctcataacgatgtcgctcatctggcgcgcctgcttgcttcctcctgtcc

SEQ ID NO: 715106 - DNA, 75 bp, synthetic construct
  source 1..75: mol_type = other DNA
atatcgtttgccaaaaactggggctatggtggcgtatacatggccaacctgttcgcgttcgttcacaccgaccgc

SEQ ID NO: 715107 - DNA, 75 bp, synthetic construct
  source 1..75: mol_type = other DNA
gcaccactaccgtgactcaccgcttcactaaaaatctgcgtcatcacgtagaaaatgccgatctattgatcgttg

SEQ ID NO: 715108 - DNA, 75 bp, synthetic construct
  source 1..75: mol_type = other DNA
actggtatatggggcttaaatatttctattcatccatctttgttcatcagttagggatggaaaaaggtaatacgt

SEQ ID NO: 715109 - DNA, 75 bp, synthetic construct
  source 1..75: mol_type = other DNA
actcacctgccttgcggatatcagtaccgcattgagtcgcctggcaggtaaagaacccatgctgacccgctcgaa

SEQ ID NO: 715110 - DNA, 75 bp, synthetic construct
  source 1..75: mol_type = other DNA
ggccgtgcattctgcgaaaaactggcgcagcaggcgggtattgatcagtcacatccggcgctgcagcgctggtat

SEQ ID NO: 715111 - DNA, 75 bp, synthetic construct
  source 1..75: mol_type = other DNA
acggggatctctataaaattttcgccagccgcaggcgttgctgcgagcagcgccagtctgatgaaaacgggttta

SEQ ID NO: 715112 - DNA, 75 bp, synthetic construct
  source 1..75: mol_type = other DNA
tttttaactataagccaatgcatattaatttttggcctgtccaccattttgaagaaaatattgaacaggatggtc

SEQ ID NO: 715113 - DNA, 75 bp, synthetic construct
  source 1..75: mol_type = other DNA
atgcctgataacagcgcagctatcgttatcgatattggcaccaccaattgcaaagtcacctgcttttcctgcctg

SEQ ID NO: 715114 - DNA, 75 bp, synthetic construct
  source 1..75: mol_type = other DNA
tgcgtgctgtgtggaagtcagatgcgttttacggggctgaagcggggataccgtctgacagagctggtagtgatg

SEQ ID NO: 715115 - DNA, 75 bp, synthetic construct
  source 1..75: mol_type = other DNA
cgcgaagtggggatggactgcataagcgctaacttaagggttgaaccatctgaagaatgcgacgcctcggtgcct

SEQ ID NO: 715116 - DNA, 75 bp, synthetic construct
  source 1..75: mol_type = other DNA
aaacgcttgattatcaaagcccgttggctaccacgcgctatacgttgccggagctgttagatcactcacagcagc

SEQ ID NO: 715117 - DNA, 75 bp, synthetic construct
  source 1..75: mol_type = other DNA
ttttattattgaaaatcgcctgaccaaaccagaacaactgactggctttaatagcgaaggctatttctttgacga

SEQ ID NO: 715118 - DNA, 75 bp, synthetic construct
  source 1..75: mol_type = other DNA
gcctccgcagattagcacgctgatgcgcatcagcgacaaactggcgggtatcaacgccgctcgctttcatgactg

SEQ ID NO: 715119 - DNA, 75 bp, synthetic construct
  source 1..75: mol_type = other DNA
agagtttgctgaatcaatgaaagataataaaggagaagaatattatctgttcttggatgaggtgagaaggaatct

SEQ ID NO: 715120 - DNA, 75 bp, synthetic construct
  source 1..75: mol_type = other DNA
ctgacctcgcagatggtggaatacggccaggtgaaacgtggtgagttgggtattatgggcactgagctgaactcc

SEQ ID NO: 715121 - DNA, 75 bp, synthetic construct
  source 1..75: mol_type = other DNA
atcgtgaaggttacttctttgatgaagccacctccagcaatagcgaactggtgtttaaacgctacgagctgcatt

SEQ ID NO: 715122 - DNA, 75 bp, synthetic construct
  source 1..75: mol_type = other DNA
acgtgcgcaaaggcgaatggtcagcgaaagcggcggcgttgttacacgttccctgttcagcatttgcgccattgg

SEQ ID NO: 715123 - DNA, 75 bp, synthetic construct
  source 1..75: mol_type = other DNA
aactggttgccggagccagtgcggtggtccattgcgccgggcaagtgcgcggacacaaagaggatgtctttactc

SEQ ID NO: 715124 - DNA, 75 bp, synthetic construct
  source 1..75: mol_type = other DNA
aactggttgccggagccagcgcggtggtccattgcgccgggcaagtgcgcggacacaaagaagagatttttaccc

SEQ ID NO: 715125 - DNA, 75 bp, synthetic construct
  source 1..75: mol_type = other DNA
tccatattacgtgggtaggatcagatatcaaggtttaaaaaaatgccggagcattccggcatcaatattaacatt

SEQ ID NO: 715126 - DNA, 75 bp, synthetic construct
  source 1..75: mol_type = other DNA
ctggcagcgcatacaacaactggccgccgccgcccgccagggagctgtacggatggtcggcgttcctctgccgtt

SEQ ID NO: 715127 - DNA, 75 bp, synthetic construct
  source 1..75: mol_type = other DNA
ctggcaacacgtacgacagcttgccgccgacgcccgttgtggttccgtgcgaatggttggtattcctctgccggt

SEQ ID NO: 715128 - DNA, 75 bp, synthetic construct
  source 1..75: mol_type = other DNA
cgaactctcctggtatgcaaaatctaaattcgtagccgaacaacgactggcagcaatggctggcgaaatcacgct

SEQ ID NO: 715129 - DNA, 75 bp, synthetic construct
  source 1..75: mol_type = other DNA
tgcaaccaggtgaacacgccggatgggtcagcaagtcactctgcaaaacgctgggattcacacaaccggtcagcg

SEQ ID NO: 715130 - DNA, 75 bp, synthetic construct
  source 1..75: mol_type = other DNA
aatcgtgggtatgcggattacctggcggggaactggtcgcttgatgacattcccgtctttattccgcatcttcgc

SEQ ID NO: 715131 - DNA, 75 bp, synthetic construct
  source 1..75: mol_type = other DNA
atgttaattgccagcgtctcactgggattaaccatggaatttgccaactgcttcgcctgttttaatgtgcctggc

SEQ ID NO: 715132 - DNA, 75 bp, synthetic construct
  source 1..75: mol_type = other DNA
cggatacctcatctaacgccctgttcgccgcgctgcaagccaccgcagcacaacaaattggcgtctctgacctgt

SEQ ID NO: 715133 - DNA, 75 bp, synthetic construct
  source 1..75: mol_type = other DNA
ttatctggctgaaaatgaaaccgtctgacgctatcagcaccttcggcaacacgctgaaagagctggcgctgccca

SEQ ID NO: 715134 - DNA, 75 bp, synthetic construct
  source 1..75: mol_type = other DNA
atctggcaacgcttagcgaggcagacagtgcggcactttatgacatctgcggtctaccactacacagcaattact

SEQ ID NO: 715135 - DNA, 75 bp, synthetic construct
  source 1..75: mol_type = other DNA
acgcacctatcaatgcttatgaaatgggtaatgactccaacttattgatagtgttttatgttcagataatgcccg

SEQ ID NO: 715136 - DNA, 75 bp, synthetic construct
  source 1..75: mol_type = other DNA
atctgccagttagttgcgttaatcactatcggtctcttgtttatcggtgttttaaatgcacctatcaatgcttat

SEQ ID NO: 715137 - DNA, 75 bp, synthetic construct
  source 1..75: mol_type = other DNA
ggtttatctggttgggctatggatctcatgcccattgctaagtggaaaaggctattttcttggcgtgttaatgac

SEQ ID NO: 715138 - DNA, 75 bp, synthetic construct
  source 1..75: mol_type = other DNA
aggtctggggaacaggacgcagactgacggaaaagctgaatgcgctgggtattaacacagcactgcagctggcgc

SEQ ID NO: 715139 - DNA, 75 bp, synthetic construct
  source 1..75: mol_type = other DNA
acgggcccgtcccaccccgacatggacctcgatgcccgaacggacgttagatttcgagttctaggcgttctgcga

SEQ ID NO: 715140 - DNA, 75 bp, synthetic construct
  source 1..75: mol_type = other DNA
tggcaaatgaaacgggaaatgctatcgccttcgtatacaacacaatggactgagatccccattgcttcattctga

SEQ ID NO: 715141 - DNA, 75 bp, synthetic construct
  source 1..75: mol_type = other DNA
ccatgggggtgggcattgcgcctacaaaaacactggctaaaagtgcacagtgggcaacaaagcaatggccacagt

SEQ ID NO: 715142 - DNA, 75 bp, synthetic construct
  source 1..75: mol_type = other DNA
tgttgttcagtatgcagagcgggctgcagagaaactacgtggggaacgtcagtattgccggcaggtgacgacatt

SEQ ID NO: 715143 - DNA, 75 bp, synthetic construct
  source 1..75: mol_type = other DNA
tcaccaacggcgaacagggagtgaattaccatcgtaacgtcaggcatcacccacttttcgcctgcaaccgacttg

SEQ ID NO: 715144 - DNA, 75 bp, synthetic construct
  source 1..75: mol_type = other DNA
agctgcgtctgataaaagccggaatgaataaggatcagatatatcaactggcaggtcgtcctcattttggtgaag

SEQ ID NO: 715145 - DNA, 75 bp, synthetic construct
  source 1..75: mol_type = other DNA
caggtctgatggcggttattctgaccgggtgcggtaacctcagtaatgtttcaccggaaggaacaactgacgaac

SEQ ID NO: 715146 - DNA, 75 bp, synthetic construct
  source 1..75: mol_type = other DNA
aaaaacgctggctaaaagtgcccagtgggcaacaaagcaatggccacagttttccggtgtggtcgcgctgacggc

SEQ ID NO: 715147 - DNA, 75 bp, synthetic construct
  source 1..75: mol_type = other DNA
gctttcgaaaatattaaacaagttattgatgacatggcgaccgatgccactatgtttgacgttaacaaaaagtaa

SEQ ID NO: 715148 - DNA, 75 bp, synthetic construct
  source 1..75: mol_type = other DNA
aaaaaaatcggcatagataactatgtttacatgctgtggcgctataatgattgctgcgtcaggtatatacccaac

SEQ ID NO: 715149 - DNA, 75 bp, synthetic construct
  source 1..75: mol_type = other DNA
agtcagaaaacatatgcattctttggatgaaagaaaaatccatcctggtgaatattttactttgattggtaatag

SEQ ID NO: 715150 - DNA, 75 bp, synthetic construct
  source 1..75: mol_type = other DNA
atcaccaagctggatctgagctattcagaaacctttaatcaaacgcatctggcagatgcctatgaacgtctgctg

SEQ ID NO: 715151 - DNA, 75 bp, synthetic construct
  source 1..75: mol_type = other DNA
acaggcaaggaatgttgatgaaaaccatgggccaggacgctatgtgcgaacgcaggttcagttatttcatgccta

SEQ ID NO: 715152 - DNA, 75 bp, synthetic construct
  source 1..75: mol_type = other DNA
aggcagggttttatgatgttcacttatgggagtttccgatcctggtgatgcttaagctcctcattatgggggatt

SEQ ID NO: 715153 - DNA, 75 bp, synthetic construct
  source 1..75: mol_type = other DNA
cgcaaaaaaataggcaatgataattatgtctatatgttgtggcgttacaatgactgttgcgtcagatatatacca

SEQ ID NO: 715154 - DNA, 75 bp, synthetic construct
  source 1..75: mol_type = other DNA
tgctgatactgccgacaaatttgccctgactacccagctattacagattacttttccctatattttgctgatctc

SEQ ID NO: 715155 - DNA, 75 bp, synthetic construct
  source 1..75: mol_type = other DNA
atttcgaccaaagtaaatatgacagtattgtctggaatccaatcacttattatccggtgccgaaaccttctactc

SEQ ID NO: 715156 - DNA, 75 bp, synthetic construct
  source 1..75: mol_type = other DNA
atgcgtaccacatcaattgcgaaagttgcagctttatgcggcttgttggctctgtctggttgtgcctctaaaatc

SEQ ID NO: 715157 - DNA, 75 bp, synthetic construct
  source 1..75: mol_type = other DNA
gacacagttatatcgttaacccgctctcacgatgaaataggatgcacagttatcattccagtaccggagttaatt

SEQ ID NO: 715158 - DNA, 75 bp, synthetic construct
  source 1..75: mol_type = other DNA
atgagaataaaacactcgaatatgataaatatgaatatgaatatgaatatgaatatgaatatgatgaaagaagcc

SEQ ID NO: 715159 - DNA, 75 bp, synthetic construct
  source 1..75: mol_type = other DNA
ttctgattataggcgaaactggaactggaaaatcaacacttttagcagaattgctaatcaatgacactgacgtta

SEQ ID NO: 715160 - DNA, 75 bp, synthetic construct
  source 1..75: mol_type = other DNA
gacctgtcaacgctgcgggcgtttatcaccaacggcgaacagggagtgaattaccatcgtaacgtctggcatcac

SEQ ID NO: 715161 - DNA, 75 bp, synthetic construct
  source 1..75: mol_type = other DNA
ctatgatgaaggtaaccttttctctgcaccgcgcgcatggtggatgctgcgcacttttggcgtggagaaagtgtc

SEQ ID NO: 715162 - DNA, 75 bp, synthetic construct
  source 1..75: mol_type = other DNA
tgacccggaaattcagattattgatgcccgcatggcgccacccgggcaggaagatcgcaacgttgcccaggaata

SEQ ID NO: 715163 - DNA, 75 bp, synthetic construct
  source 1..75: mol_type = other DNA
cttgctacgctggatgtgccaaacgtgaaactgtacgacggcgcatggagtgaatggggggcgcgagcagattta

SEQ ID NO: 715164 - DNA, 75 bp, synthetic construct
  source 1..75: mol_type = other DNA
agcctggcttgcggtatttcttggttctgcgctcttctgggtgcttgtcgcactgctaatttggaaagtgtgggg

SEQ ID NO: 715165 - DNA, 75 bp, synthetic construct
  source 1..75: mol_type = other DNA
agcctggctggcggtatttcttggttctgcacttttctgggtggttgtcgcactgctgatttggaaagtgtgggg

SEQ ID NO: 715166 - DNA, 75 bp, synthetic construct
  source 1..75: mol_type = other DNA
ccggcagcgcgttttaatgctgaagttgatgaacctcgcccaggtttacgtcgtgggcatattcccggcgcgctg

SEQ ID NO: 715167 - DNA, 75 bp, synthetic construct
  source 1..75: mol_type = other DNA
atggtcgtttcggtgttgaagttaagctccatgatgaacggcttagcaccgtggaagcgcgctccggtctgttcg

SEQ ID NO: 715168 - DNA, 75 bp, synthetic construct
  source 1..75: mol_type = other DNA
ctctgcctgcagctttggcaacaaggtggtttgaacgccaacaaagcagcattgttattggcggctgtgcctgcc

SEQ ID NO: 715169 - DNA, 75 bp, synthetic construct
  source 1..75: mol_type = other DNA
tgcccccggtcaaataaatgtggcggtacagggcattgaaggtgatgaggtgagtctgggtagtttggccgagtt

SEQ ID NO: 715170 - DNA, 75 bp, synthetic construct
  source 1..75: mol_type = other DNA
cttcgttcggaaaaattagggcaattagatgaattatttacgcgtatttgtcatttgattgcattgcttactatt

SEQ ID NO: 715171 - DNA, 75 bp, synthetic construct
  source 1..75: mol_type = other DNA
gaaggtgcgacagttgaagaggcgattcgcgccagcggtttgttagaactgcgtacggatattgatcttgctaaa

SEQ ID NO: 715172 - DNA, 75 bp, synthetic construct
  source 1..75: mol_type = other DNA
tgatggcgatcgggtggagatttatcgtcctctcattgccgatccgaaagagctgcgcaggcaacgagcagaaaa

SEQ ID NO: 715173 - DNA, 75 bp, synthetic construct
  source 1..75: mol_type = other DNA
ttggcgtgggcgccgggccaacgaagaccctcgcaaaatcagcccagtgggcctcaaaagagtggaaacagtttc

SEQ ID NO: 715174 - DNA, 75 bp, synthetic construct
  source 1..75: mol_type = other DNA
aatttcgtaaaatcaattcactcgaaagcctggaaaaactctacgatcatcttaattacaccctgacggacgatc

SEQ ID NO: 715175 - DNA, 75 bp, synthetic construct
  source 1..75: mol_type = other DNA
agtttcgtaaaatcaattctctcgaaagtctggaaaaactctacgaccaccttaattacaccctgacggacgatc

SEQ ID NO: 715176 - DNA, 75 bp, synthetic construct
  source 1..75: mol_type = other DNA
atcgcttacctgattgtcgcggtgctggtggtgatttcccagccgtttaaagcgaaaaaacgtgatctgttcggt

SEQ ID NO: 715177 - DNA, 75 bp, synthetic construct
  source 1..75: mol_type = other DNA
cggcattcatccggaaaaacttcagcgtcattcttgagcgtacggtacgcgaactcaacggcgagtcctgcatat

SEQ ID NO: 715178 - DNA, 75 bp, synthetic construct
  source 1..75: mol_type = other DNA
atgcgcctggagaagaaaatacatgtattttccagcaattatgcactgtaccacagtatgagccagcgggttatg

SEQ ID NO: 715179 - DNA, 75 bp, synthetic construct
  source 1..75: mol_type = other DNA
ttttggtgaacgaatcacagacaaagatgccatgcaccaggctgttgttcagtatgcagagcgggccgcagagaa

SEQ ID NO: 715180 - DNA, 75 bp, synthetic construct
  source 1..75: mol_type = other DNA
tgaatctgttcgatgatactcagccccgaagcaacagtaatcagctgatgaaagtcgtggacggtattaaccatt

SEQ ID NO: 715181 - DNA, 75 bp, synthetic construct
  source 1..75: mol_type = other DNA
gccgcgcgtggagcagtacagcatcgacgagatgtttctggatatccgcggtatagacagctgcatcgattatga

SEQ ID NO: 715182 - DNA, 75 bp, synthetic construct
  source 1..75: mol_type = other DNA
aaatccgcagagaacgcggaaactgctttcactgcagccggttgaagaaatctggggggtgggtaaccgtattgc

SEQ ID NO: 715183 - DNA, 75 bp, synthetic construct
  source 1..75: mol_type = other DNA
atgttgcgatttttgaaccaatgttcacaaggccggggcgcgtggctgttgatggcgtttactgctctggcactg

SEQ ID NO: 715184 - DNA, 75 bp, synthetic construct
  source 1..75: mol_type = other DNA
agttctgcaggcatattgccgtttttgtgaagacgtcaccgttcgctgttaacgaaccgtattacgggaatgtgg

SEQ ID NO: 715185 - DNA, 75 bp, synthetic construct
  source 1..75: mol_type = other DNA
gccacgcgttgagcagtactccattgatgagatgtttctggacattcgcggtatagacagctgcatcgatttcga

SEQ ID NO: 715186 - DNA, 75 bp, synthetic construct
  source 1..75: mol_type = other DNA
acgtatcaggtgccgcagccgatggtggaatcgatgtatgttcctcaatggcgggcgactggcgtggctgaagat

SEQ ID NO: 715187 - DNA, 75 bp, synthetic construct
  source 1..75: mol_type = other DNA
gctgcgacttattttcaattcttttctcacttaattttagtgttgaggatattacagggctaactccggccaaat

SEQ ID NO: 715188 - DNA, 75 bp, synthetic construct
  source 1..75: mol_type = other DNA
gaaaatgacgcatgcacaacgaattaactcagattacaaacttgagcgaaaggttaatcgaattacagcgataag

SEQ ID NO: 715189 - DNA, 75 bp, synthetic construct
  source 1..75: mol_type = other DNA
tgaatagacttattggcccgcaagaagaggctaagaggtcaaggcagctttcgcaataccttaatcaagcgggca

SEQ ID NO: 715190 - DNA, 75 bp, synthetic construct
  source 1..75: mol_type = other DNA
ggggttttctatcttccgtattgcactggtggcgctggttgccgggatattgtggactgtttcgttaggcgcgat

SEQ ID NO: 715191 - DNA, 75 bp, synthetic construct
  source 1..75: mol_type = other DNA
attaacgccatacccgttgattaagtatgccagcaatggcagggattcgtacaaccttaaaatagttatgaggtt

SEQ ID NO: 715192 - DNA, 75 bp, synthetic construct
  source 1..75: mol_type = other DNA
ttgataaacctgatctctctttactgaaagttgctgattatccgagtattatcctgttggccatgacactgggat

SEQ ID NO: 715193 - DNA, 75 bp, synthetic construct
  source 1..75: mol_type = other DNA
gcatgctgccacagagttagcagaaggattacggctaaatttatttatgaagagccctttcgatcctgttgagga

SEQ ID NO: 715194 - DNA, 75 bp, synthetic construct
  source 1..75: mol_type = other DNA
atcacctcagctttagacgaaatatatggtggtatatgtaaaaaggcgcatgctgccacagagttagcagaagga

SEQ ID NO: 715195 - DNA, 75 bp, synthetic construct
  source 1..75: mol_type = other DNA
tatgccagtaaagaatcctgccatcaggcaagagacgagcaaaaaatttccggaatgtctcccgttaaacaaagt

SEQ ID NO: 715196 - DNA, 75 bp, synthetic construct
  source 1..75: mol_type = other DNA
tttacgttaccaccgcccgcgccctgcgtcgctgcggcgttcccggctggggcgtctttaccaataaagaactgc

SEQ ID NO: 715197 - DNA, 75 bp, synthetic construct
  source 1..75: mol_type = other DNA
attggtgagttttattttatttgctgcgcgtacacttaaaatatccaatccgataatggatcttcatgcttttaa

SEQ ID NO: 715198 - DNA, 75 bp, synthetic construct
  source 1..75: mol_type = other DNA
gcacactggtcgaactttcgccgtttatcgccttattgggagggattgttggcctggggcagttatcgaaaaaca

SEQ ID NO: 715199 - DNA, 75 bp, synthetic construct
  source 1..75: mol_type = other DNA
ccttctccgctagtctgtaatgccggcgcctttgttataggtttctctgctgctggcggcattttacaacttggc

SEQ ID NO: 715200 - DNA, 75 bp, synthetic construct
  source 1..75: mol_type = other DNA
ttctcgaccttttatgtgattgtggtgtggatgcccaaatatgcgatggcttttgctggtatgtcagaagctgag

SEQ ID NO: 715201 - DNA, 75 bp, synthetic construct
  source 1..75: mol_type = other DNA
gccggagcctttgttatcggtttctcagcagctggcggcattttacagctcggcgtttcggtcatgtcagagttt

SEQ ID NO: 715202 - DNA, 75 bp, synthetic construct
  source 1..75: mol_type = other DNA
gcctatttaatttccggtatcggtctgggtcgtctgatcagcattttattcttcggtgtaatctccgataaattt

SEQ ID NO: 715203 - DNA, 75 bp, synthetic construct
  source 1..75: mol_type = other DNA
ccgcgattattgttttcattcgctattaccgcgtgtttattattccccaaaatgatatccggttaggtgagcgtt

SEQ ID NO: 715204 - DNA, 75 bp, synthetic construct
  source 1..75: mol_type = other DNA
tgttgctcaataacatctggtacggctatgggctgattattccgggtattctgtttgtactgatcacgctgatgc

SEQ ID NO: 715205 - DNA, 75 bp, synthetic construct
  source 1..75: mol_type = other DNA
ggaatcgattttacatgtaccgtgcactcccgcgttggcgtgctaacttaacgctgggtgaaaattacattaatt

SEQ ID NO: 715206 - DNA, 75 bp, synthetic construct
  source 1..75: mol_type = other DNA
tattgatatttcccgattctcgcaagtgggatatatcatgcccgggcaatatcaaatggaattaatagtgaatgg

SEQ ID NO: 715207 - DNA, 75 bp, synthetic construct
  source 1..75: mol_type = other DNA
cagatatcttcagtccttggcgatatattggtgccagtctggagagtgatgatcgcatgttgccgccaaagctac

SEQ ID NO: 715208 - DNA, 75 bp, synthetic construct
  source 1..75: mol_type = other DNA
acacttaattatagcagcagcatgagtaacgatcgttacactaacaccgtagggtacagcggtaccctggatggt

SEQ ID NO: 715209 - DNA, 75 bp, synthetic construct
  source 1..75: mol_type = other DNA
aaaggagatgtataccgttacgtttaataagaacttcgtagactcaaatacatccgttaacctgcagtacagcca

SEQ ID NO: 715210 - DNA, 75 bp, synthetic construct
  source 1..75: mol_type = other DNA
gtgatctcgcaacagaatcgaattctttatgattcaactgtcccggctggaccattttcgatccaagatctggat

SEQ ID NO: 715211 - DNA, 75 bp, synthetic construct
  source 1..75: mol_type = other DNA
atgcaaaaatgggatataaagttatcccgggtgatgaaaatgcaccactcaaacgtatgactctgcaaccgtcat

SEQ ID NO: 715212 - DNA, 75 bp, synthetic construct
  source 1..75: mol_type = other DNA
tcacacctctgtttcgccctgatacaccggaagagtacaaaccgacagttcgcgcgcagctggagaagaagctgc

SEQ ID NO: 715213 - DNA, 75 bp, synthetic construct
  source 1..75: mol_type = other DNA
aaaagaggcactggaagccgcagccgaaccagacgatcttagcgagtgggctgatatgcagtttctgttgtggga

SEQ ID NO: 715214 - DNA, 75 bp, synthetic construct
  source 1..75: mol_type = other DNA
atttagtcaaggtgaaatcgtggccgcatattggaactgggttgtaaatccaattgattacaaaaaatatagagc

SEQ ID NO: 715215 - DNA, 75 bp, synthetic construct
  source 1..75: mol_type = other DNA
aaagggttatttcaattcttttacatgaatggtgttgagggggtatgtgagccgtcacactggatgccgctacca

SEQ ID NO: 715216 - DNA, 75 bp, synthetic construct
  source 1..75: mol_type = other DNA
ggtgagcctcgcttgcacattaaagaacccggcaactctccggtaattccggatggtttatctgaactcgctacg

SEQ ID NO: 715217 - DNA, 75 bp, synthetic construct
  source 1..75: mol_type = other DNA
ttacggttctgcgctgggcatacgcggtgaaactgaatctggaagggttagagcacattgcggcatttatgcaac

SEQ ID NO: 715218 - DNA, 75 bp, synthetic construct
  source 1..75: mol_type = other DNA
gcctgtgttttgctgggctatctgttatggcgcgcctggaggaacaccattccccgcgaagatggcgttcgcaaa

SEQ ID NO: 715219 - DNA, 75 bp, synthetic construct
  source 1..75: mol_type = other DNA
gcggatcagtcgacgatcaatagtgaagcgctcatcaacagcctgacaatggggctggtggcgacattcatcgct

SEQ ID NO: 715220 - DNA, 75 bp, synthetic construct
  source 1..75: mol_type = other DNA
tgctatggctggaatgggggccacagcgtcgccagttgtggttattgttgcccattttattaccggcactgccat

SEQ ID NO: 715221 - DNA, 75 bp, synthetic construct
  source 1..75: mol_type = other DNA
ggatggttggataagctgtagtgagcgaatgcctgaaaagaatcggaacgtgcttatttcggtgaatttcgatag

SEQ ID NO: 715222 - DNA, 75 bp, synthetic construct
  source 1..75: mol_type = other DNA
cctgctgctgatgctgttactcgccgcctacgttttgctgggttatctgttatggcgcgcctggcgacgcacgat

SEQ ID NO: 715223 - DNA, 75 bp, synthetic construct
  source 1..75: mol_type = other DNA
ttgcacaaacgctgggctggtcacaagccaaaatattctgttatgtgaaattcccgcttatgctacgccccgcgc

SEQ ID NO: 715224 - DNA, 75 bp, synthetic construct
  source 1..75: mol_type = other DNA
gatcctcttggcgggtctgcaccattcagttctgtgtttatggatgcatgtcgagggctcggcactgcaaaactt

SEQ ID NO: 715225 - DNA, 75 bp, synthetic construct
  source 1..75: mol_type = other DNA
gttgggatattctctactgtatatttaatacctgtgtttttggggcaggttcgcggattaaatgccgaagagata

SEQ ID NO: 715226 - DNA, 75 bp, synthetic construct
  source 1..75: mol_type = other DNA
atgaggcgttgtttaaatgcattatggcttttgctttttgtttctgtcggagctatcagtggcgatgaagcgttt

SEQ ID NO: 715227 - DNA, 75 bp, synthetic construct
  source 1..75: mol_type = other DNA
gagcgatgcttatcatcacgattaccaatatgaagtaaataaaatcacacaaatgctgtcagctcgtttgaagga

SEQ ID NO: 715228 - DNA, 75 bp, synthetic construct
  source 1..75: mol_type = other DNA
ggtattacaacaacaggacgtatgctctatcgaaacttgaaaatcacctcagctttagacgaaatatatggtggc

SEQ ID NO: 715229 - DNA, 75 bp, synthetic construct
  source 1..75: mol_type = other DNA
atatctatattgatcagataataactgtctcaggggtggcaaattcttccggattcgcccttgccgcattactta

SEQ ID NO: 715230 - DNA, 75 bp, synthetic construct
  source 1..75: mol_type = other DNA
ttttctggttaattttgataaacctgatctctctttactgaaagttgctgattatccgagtattatcctgttggc

SEQ ID NO: 715231 - DNA, 75 bp, synthetic construct
  source 1..75: mol_type = other DNA
tgccagcgttcaccagtacggtgaagtcgataacgtggtgccgggtgcccgtgcacgctacccggtgcgtgaact

SEQ ID NO: 715232 - DNA, 75 bp, synthetic construct
  source 1..75: mol_type = other DNA
gcgttatctatgtcaatcttaaaaaatggcatgaagcaaatttgacaccgtatttactcaaacttttacgagggg

SEQ ID NO: 715233 - DNA, 75 bp, synthetic construct
  source 1..75: mol_type = other DNA
tcacgtatcaaggtgaatctgctgaagctgcgcagaagcagctggcgcaatacattcagcaagtagacgagcaaa

SEQ ID NO: 715234 - DNA, 75 bp, synthetic construct
  source 1..75: mol_type = other DNA
cgctggataatcaggaagaacctgaaaaactgaccattgagcctaccgttaaaaatcagtccttacctttagcgg

SEQ ID NO: 715235 - DNA, 75 bp, synthetic construct
  source 1..75: mol_type = other DNA
ggacgcacaaatgaaattggcccaatacattcagcaagttgatgataaagtaaatcaagagctagaaaaggatct

SEQ ID NO: 715236 - DNA, 75 bp, synthetic construct
  source 1..75: mol_type = other DNA
aggccaggtggcggataaggttcatgcttcgtactactgcacccgcaatgatctggaactggtggctgtctgtga

SEQ ID NO: 715237 - DNA, 75 bp, synthetic construct
  source 1..75: mol_type = other DNA
tgaaagacggggagatcgcgccagtaaaactgccaccaaacctgtcctcacaaattttactgcagcgcccggata

SEQ ID NO: 715238 - DNA, 75 bp, synthetic construct
  source 1..75: mol_type = other DNA
tgcagtttgcatctgatctgcgtaataatcgctgttttaaagctgcttataatgatgctctgttagagcttgatc

SEQ ID NO: 715239 - DNA, 75 bp, synthetic construct
  source 1..75: mol_type = other DNA
cgcgcggcattttttccgtctataagcctgaccggtaatgactccaacttattgatagtgttttatgttcagata

SEQ ID NO: 715240 - DNA, 75 bp, synthetic construct
  source 1..75: mol_type = other DNA
ttcaacccttaccgggcctcggaggcagcggccagaaaactggcggggctgatggcgcagtatggtggtgacatg

SEQ ID NO: 715241 - DNA, 75 bp, synthetic construct
  source 1..75: mol_type = other DNA
agttccgcctgatggaggcctgtgagcgtcttgaggtagagcatggcttgcaaagaacgtttcatggtctggagg

SEQ ID NO: 715242 - DNA, 75 bp, synthetic construct
  source 1..75: mol_type = other DNA
gccattttggcccgccgtcagggcctcgaccagatcaagcgcgagagtgcggctttcaatgcgcaggtgaagcag

SEQ ID NO: 715243 - DNA, 75 bp, synthetic construct
  source 1..75: mol_type = other DNA
gaaagattggcaggatatatataatcaaacccaagatttaactgatttaagaaagcgttatggtattaccgggta

SEQ ID NO: 715244 - DNA, 75 bp, synthetic construct
  source 1..75: mol_type = other DNA
ttcccataggcgatgcttagcgtacaattttttccgttttgtgagctgcccctacatgccgctggcgcggcatcc

SEQ ID NO: 715245 - DNA, 75 bp, synthetic construct
  source 1..75: mol_type = other DNA
tgacctgcgcaaaatggtcatcccgggtgggaatgctgcgtgtggaattcagcgcggagtttaaacaggtggtga

SEQ ID NO: 715246 - DNA, 75 bp, synthetic construct
  source 1..75: mol_type = other DNA
gcgcgagcggcttttttcccgtccattaccctgaccagtggtctctcctcaagcagtacggagctgtccagcctc

SEQ ID NO: 715247 - DNA, 75 bp, synthetic construct
  source 1..75: mol_type = other DNA
ctccaacgtttcacagagctatttcagccagcaactggcgtacgaacaactccgtattgcgcgggaaacgctgaa

SEQ ID NO: 715248 - DNA, 75 bp, synthetic construct
  source 1..75: mol_type = other DNA
tatggagcaaaaagaacgaattgaaaataaaaagaatgaggaggatttttataattttatgtggggtcgctcata

SEQ ID NO: 715249 - DNA, 75 bp, synthetic construct
  source 1..75: mol_type = other DNA
acccgcgatatcgccgtgctggaagatgccggcgtaccgtaccagctgctggaatccagccgtctggcggaagtg

SEQ ID NO: 715250 - DNA, 75 bp, synthetic construct
  source 1..75: mol_type = other DNA
tgagcccggcgcaagagcgtaacctggagcgtttgtgcgagtgtcgtgttatcgaccgcaccggccttattttag

SEQ ID NO: 715251 - DNA, 75 bp, synthetic construct
  source 1..75: mol_type = other DNA
acccgcgatatcgccgtgctggaggatgcaggcgtaccgtatcaactgctggaatccagccgcctggcggaagta

SEQ ID NO: 715252 - DNA, 75 bp, synthetic construct
  source 1..75: mol_type = other DNA
tcgctgaccattccaattgcgcaggaagatggtgcgccggtatccaccattcttgatgaaacctacaaaatcgcc

SEQ ID NO: 715253 - DNA, 75 bp, synthetic construct
  source 1..75: mol_type = other DNA
accacttgcctgcttcgaccgcggatatggctgccgctcatctgcatgcgatggcgctggcacagttgcgcggat

SEQ ID NO: 715254 - DNA, 75 bp, synthetic construct
  source 1..75: mol_type = other DNA
tgtggcgcgaatgcccgcaggaaattaacacgccggaattgccctcgctggcagatgccgttacaggttgttatc

SEQ ID NO: 715255 - DNA, 75 bp, synthetic construct
  source 1..75: mol_type = other DNA
ccggataattggtaagcatctggccgtccctcgctggcaggagacatgtgattattataatcagatgatggagcg

SEQ ID NO: 715256 - DNA, 75 bp, synthetic construct
  source 1..75: mol_type = other DNA
tctggctaaggggatttatacgccagctcttgtggtggatcacatcattcccatcaatggcggcggtgatgttct

SEQ ID NO: 715257 - DNA, 75 bp, synthetic construct
  source 1..75: mol_type = other DNA
cgcgcgtgggtattcccggcagtgggacaaataccgcgccctgtacctgagcaaaaacccgttatgcgtgcgttg

SEQ ID NO: 715258 - DNA, 75 bp, synthetic construct
  source 1..75: mol_type = other DNA
acccgcgatattgccgtgctggaagatgctggcgtaccgtatcagctgctggaatccagccgcctggcggaagtg

SEQ ID NO: 715259 - DNA, 75 bp, synthetic construct
  source 1..75: mol_type = other DNA
ttgtttaaaaaagaagtgaaatcagaagtgtctttgtggaaatggggggctctgttgctctctgttcctcttata

SEQ ID NO: 715260 - DNA, 75 bp, synthetic construct
  source 1..75: mol_type = other DNA
acgtctccattggttgcattaattgtggcggctttgttgtttggtttttatcactattcaggtggtgctttactt

SEQ ID NO: 715261 - DNA, 75 bp, synthetic construct
  source 1..75: mol_type = other DNA
gctcttgtggtggatcacatcattcccatcaatggcggcggtgatgttctcttctggcctgagtggaaccaccag

SEQ ID NO: 715262 - DNA, 75 bp, synthetic construct
  source 1..75: mol_type = other DNA
cggatttccgacagttatccggagtggagatacgcccgaatccggcagagggaatgctgtacatcaatatgccgc

SEQ ID NO: 715263 - DNA, 75 bp, synthetic construct
  source 1..75: mol_type = other DNA
atgttctggatgccgcagacagacagaatattgatttttcccggttctcccgggccggctatattatgccaggac

SEQ ID NO: 715264 - DNA, 75 bp, synthetic construct
  source 1..75: mol_type = other DNA
gcagtcccgttcgctgagctataacgggactgcaggtgccaactttggtgcctggcgtctgcgtgcggattatca

SEQ ID NO: 715265 - DNA, 75 bp, synthetic construct
  source 1..75: mol_type = other DNA
cgggccggctatattatgcccggacagtatcagatggaaataagggtgaatggtcaggatatttcaccatcggca

SEQ ID NO: 715266 - DNA, 75 bp, synthetic construct
  source 1..75: mol_type = other DNA
agcgacaaaatgtacgctggttatttaccttgtcagcattaatgctgctggcgcttcttttaagcctttgtgctg

SEQ ID NO: 715267 - DNA, 75 bp, synthetic construct
  source 1..75: mol_type = other DNA
tgcagggggaatgtccggtggaacacgtcttcttgttgacacggatggtgtgggaggtgtaccggttgatggcgg

SEQ ID NO: 715268 - DNA, 75 bp, synthetic construct
  source 1..75: mol_type = other DNA
gaacgccggtgtgagcagtggcggcagccagccatcgcagagtcagatgagcgcgtactacaaccacagcagtcc

SEQ ID NO: 715269 - DNA, 75 bp, synthetic construct
  source 1..75: mol_type = other DNA
acagctccgtgcgtggccgcctggatgttgaagttatcgagcaggacgggcggaaaaaaacgttccaggtggaca

SEQ ID NO: 715270 - DNA, 75 bp, synthetic construct
  source 1..75: mol_type = other DNA
cctggagccgtttctacatgtaccgcgccatcccgcgctggcgcgcaaatctcacactgggtgagaactacatca

SEQ ID NO: 715271 - DNA, 75 bp, synthetic construct
  source 1..75: mol_type = other DNA
agaaccgggataacgattcggcgtttgttcgtctgtccgtgccgtggggaaccggtacggccagctacagcggca

SEQ ID NO: 715272 - DNA, 75 bp, synthetic construct
  source 1..75: mol_type = other DNA
tgacctgaatgagttcggtacggtatctgctgacgtgacctggtccgtggcccgcattccgggagaagatacaaa

SEQ ID NO: 715273 - DNA, 75 bp, synthetic construct
  source 1..75: mol_type = other DNA
ggtggtggaatcggtcctgacggaaggggccattggttacagggagtttgaagtcctgaaaggaagtcgtctgtt

SEQ ID NO: 715274 - DNA, 75 bp, synthetic construct
  source 1..75: mol_type = other DNA
gatacgcctgttggcgaccaggctgcccgcctttccgtggggcaggcgcagcgcgtggcggtggcccgagcgtta

SEQ ID NO: 715275 - DNA, 75 bp, synthetic construct
  source 1..75: mol_type = other DNA
gctgatggtggcgttgatcccggtgttgttgtggatttgctgtcagtccagaccgatgaatatgttagcacttgg

SEQ ID NO: 715276 - DNA, 75 bp, synthetic construct
  source 1..75: mol_type = other DNA
agccgggaggaggcccggcatctggaagcgttcctggcagagcacgggggctggaaggcatttctgtggacgccg

SEQ ID NO: 715277 - DNA, 75 bp, synthetic construct
  source 1..75: mol_type = other DNA
ccccgttgggaggtcacggcgctggaatcgtttctggcagagcacggaggctggaaagcctttctgtggacgccg

SEQ ID NO: 715278 - DNA, 75 bp, synthetic construct
  source 1..75: mol_type = other DNA
tccttccgtcagggaggtgcgctttggtgatggctattcccagcgtgcgcctgccgggctgaatgctgacctgaa

SEQ ID NO: 715279 - DNA, 75 bp, synthetic construct
  source 1..75: mol_type = other DNA
tgacctgtgccgcctggtcatcacgggttcgcatgctgagggttgaattcagggcagagtttaagcaggtggtga

SEQ ID NO: 715280 - DNA, 75 bp, synthetic construct
  source 1..75: mol_type = other DNA
tgacctgtgccgcctggtcatcacgggttcgcatgctgagggttgaattcagagcggagtttaagcaggtggtga

SEQ ID NO: 715281 - DNA, 75 bp, synthetic construct
  source 1..75: mol_type = other DNA
tcaggagataaggcagaaaaaaaattgccgcaggcctgtctgacatcagatatggtcagactgatggggttaaca

SEQ ID NO: 715282 - DNA, 75 bp, synthetic construct
  source 1..75: mol_type = other DNA
tgacctgtgccgcctggtcatcacgggttcgcatgctgggggttgaattcagggcggagtttaagcaggtggtga

SEQ ID NO: 715283 - DNA, 75 bp, synthetic construct
  source 1..75: mol_type = other DNA
tgacctgtgccgcctggtcatcacgggttcgcatgctgcgggttgaattcagggccgagtttaagcaggtggtga

SEQ ID NO: 715284 - DNA, 75 bp, synthetic construct
  source 1..75: mol_type = other DNA
tgacctgtgccgcctggtcatcacgggttcgcatgctgtgggttgaattcagggctgagtttaagcaggtggtga

SEQ ID NO: 715285 - DNA, 75 bp, synthetic construct
  source 1..75: mol_type = other DNA
gttgcttaaagagttcgaccttaagcactacatgttccacaccaaaccggaagatttaaccgacagcgagcgcca

SEQ ID NO: 715286 - DNA, 75 bp, synthetic construct
  source 1..75: mol_type = other DNA
atatcgtaaccattgattatcgcgtgcgcggttttacccgtgacattaacggtatgaagcactttatcgaccatg

SEQ ID NO: 715287 - DNA, 75 bp, synthetic construct
  source 1..75: mol_type = other DNA
cagatcgcgacagaattgcgatgatttctgaactggcgaacgccagcggtattgccggtatgtgcggcggccagg

SEQ ID NO: 715288 - DNA, 75 bp, synthetic construct
  source 1..75: mol_type = other DNA
cgacaaaacagaacaccccggcccactgccagaaacggtggttgcccatctcgataaaagtcatatttgcgtaca

SEQ ID NO: 715289 - DNA, 75 bp, synthetic construct
  source 1..75: mol_type = other DNA
gtctgatgatataaaggcgctgtatgacatggtggatgtaaacgtctatcaggaaaatatcttccataccaaaat

SEQ ID NO: 715290 - DNA, 75 bp, synthetic construct
  source 1..75: mol_type = other DNA
aagacttaaccgacagcgagcgccaggaaattaccgctgcgctgtggaaagaaatgcgcgagatttattacgggc

SEQ ID NO: 715291 - DNA, 75 bp, synthetic construct
  source 1..75: mol_type = other DNA
gcggtgaacaagccgtgttgagtcagcatctgggcgatttaagcgacgatggtatccagatgcagtggcgcgaag

SEQ ID NO: 715292 - DNA, 75 bp, synthetic construct
  source 1..75: mol_type = other DNA
atgccttaacgaagttggggtgatgttgcctgcgaatccactgcaacatttgttgttgcaggaactgcaatgccc

SEQ ID NO: 715293 - DNA, 75 bp, synthetic construct
  source 1..75: mol_type = other DNA
gctcaccacgcccgccgcgccgattgttctggtggataaaatatatgttccggaactttgtgacgatatcgcccc

SEQ ID NO: 715294 - DNA, 75 bp, synthetic construct
  source 1..75: mol_type = other DNA
cgacgatgcccgccagtcgctgaaacaactggctgaacaatcactcgatacctcggcactggaagcgctagcgga

SEQ ID NO: 715295 - DNA, 75 bp, synthetic construct
  source 1..75: mol_type = other DNA
cgtattcatcgtcataaaactggcgcattgattcgcgccgccgttcgccttggtgcattaagcgccggagataaa

SEQ ID NO: 715296 - DNA, 75 bp, synthetic construct
  source 1..75: mol_type = other DNA
cgtgaaccttttacctggccacaactgcccactgagttcactatccgccagagcgcaggtggcgccatgaatacg

SEQ ID NO: 715297 - DNA, 75 bp, synthetic construct
  source 1..75: mol_type = other DNA
tgtcggtttaactaccgctgcggatatttgggtaacagcagcgatcggtatggtgattggcagcggcatgtatga

SEQ ID NO: 715298 - DNA, 75 bp, synthetic construct
  source 1..75: mol_type = other DNA
aataattggtatagaagcctatcctggtaccgctgagatccacgctaagattggatataaagttatccccgggga

SEQ ID NO: 715299 - DNA, 75 bp, synthetic construct
  source 1..75: mol_type = other DNA
ccagactacagaaactcgattaaagagtctatctctgcaattgaatctttatgcaggaaaatcacgggcaatgat

SEQ ID NO: 715300 - DNA, 75 bp, synthetic construct
  source 1..75: mol_type = other DNA
cgtgccgcacccgagcgttgagcgacccgatattatcaagatggactacgggatgacagatggttcgatcagaat

SEQ ID NO: 715301 - DNA, 75 bp, synthetic construct
  source 1..75: mol_type = other DNA
acagttcaatccggatgctcctgatgagcgttgggtaacggacataacctacatcaggacccacgaaggctggct

SEQ ID NO: 715302 - DNA, 75 bp, synthetic construct
  source 1..75: mol_type = other DNA
tcgacatcggcattcatatgctggatgcggcgatgtatgtgctgggctttccggcggtgaaaagcgtgaatgcgc

SEQ ID NO: 715303 - DNA, 75 bp, synthetic construct
  source 1..75: mol_type = other DNA
gatcagggcagtcagtacacaagccatgagtggcagtcgttcctgaaatcacacggcctggagggtagcatgagc

SEQ ID NO: 715304 - DNA, 75 bp, synthetic construct
  source 1..75: mol_type = other DNA
ccgcgcgacatggaaaactattgtgaatggaaattagtagcaaaatacactgtcgattataaaggtgttttctga

SEQ ID NO: 715305 - DNA, 75 bp, synthetic construct
  source 1..75: mol_type = other DNA
gactctcgaccacagaccagaaacgaaaccagactgttgagcagagcatttctctcagaccggaacagtcccttg

SEQ ID NO: 715306 - DNA, 75 bp, synthetic construct
  source 1..75: mol_type = other DNA
cgtttattggcgcgatgaccgtgcagtttatcggcggcgcgcgtctgctggaaaccgcggcgggtatcccttatg

SEQ ID NO: 715307 - DNA, 75 bp, synthetic construct
  source 1..75: mol_type = other DNA
acaatggtgaatttattatagtctgtgtacttcaatttgcattttggaggctctgctacatggaaggaaacacaa

SEQ ID NO: 715308 - DNA, 75 bp, synthetic construct
  source 1..75: mol_type = other DNA
ttattgatgaggttgtaaataagtacaacgcagtaccgtttttaggctatgagattgtttttggtctggatggtc

SEQ ID NO: 715309 - DNA, 75 bp, synthetic construct
  source 1..75: mol_type = other DNA
gggcaaaagataaggcaacagggaaacgggtagctatcctgattaatgaggccaattatatgtttgtactccagc

SEQ ID NO: 715310 - DNA, 75 bp, synthetic construct
  source 1..75: mol_type = other DNA
gagcgcgggcggcgccatgaatacgcaaattgttcccgatgccgccacttgccctgcttgccttgccgaaatgaa

SEQ ID NO: 715311 - DNA, 75 bp, synthetic construct
  source 1..75: mol_type = other DNA
ctaaacccgcaatatccaatgattccatgcaatgatagctgtttcgtagtagggaaagttatcgccagccagtgg

SEQ ID NO: 715312 - DNA, 75 bp, synthetic construct
  source 1..75: mol_type = other DNA
caagctttcctgatggaatgttaatcttggttgaccctgaacaacctgttgatcctggtgatttctgtatcgcta

SEQ ID NO: 715313 - DNA, 75 bp, synthetic construct
  source 1..75: mol_type = other DNA
cccaaaaagccagtgattctgcattctggcttgaggttgaaggaaactcaatgacagctccggcaggatcgaaac

SEQ ID NO: 715314 - DNA, 75 bp, synthetic construct
  source 1..75: mol_type = other DNA
cacgtggttgtgattcttatttggctaaatgctttgtttatgcctatttggtcggcctcatgggtattacctgcg

SEQ ID NO: 715315 - DNA, 75 bp, synthetic construct
  source 1..75: mol_type = other DNA
tgtggcatttagtctcggtaaacgtgatcgacggcgagccagagtagcaacacggcaatcattggtgatcatgac

SEQ ID NO: 715316 - DNA, 75 bp, synthetic construct
  source 1..75: mol_type = other DNA
gtgctgagcacttttctggtcagttggctgggaaaagatgcaatggcgggcgttgggttggcggacagcttcaac

SEQ ID NO: 715317 - DNA, 75 bp, synthetic construct
  source 1..75: mol_type = other DNA
tgcaataagcggtaaagcatccaaaatgatccgtcagacaatacgaggatggaaatggaagcaacgaaccacgct

SEQ ID NO: 715318 - DNA, 75 bp, synthetic construct
  source 1..75: mol_type = other DNA
atgagccaaccaaaacagcgggaagagtccatgaatcatcatccaaaaccatttatgatttccaagatcgcggtc

SEQ ID NO: 715319 - DNA, 75 bp, synthetic construct
  source 1..75: mol_type = other DNA
cgagcattaagcacattgagttccgtgacgatcgctttgtggcggcggttgccgttgatgaataccaaccggtaa

SEQ ID NO: 715320 - DNA, 75 bp, synthetic construct
  source 1..75: mol_type = other DNA
gcgttcatctcatcagtatcgtgctttctgtcggctttttagccctgcgtttttggttacgctaccaggagcatt

SEQ ID NO: 715321 - DNA, 75 bp, synthetic construct
  source 1..75: mol_type = other DNA
gtgccgccggttgtcgatacggtgttattgttaagcggcattgcgttgatggctaaagcgcacatcctgccattt

SEQ ID NO: 715322 - DNA, 75 bp, synthetic construct
  source 1..75: mol_type = other DNA
attgcggctcttatcaacttacccggaagtgcgctcggctctgcttctacgatcattacaggccgaaggttgggt

SEQ ID NO: 715323 - DNA, 75 bp, synthetic construct
  source 1..75: mol_type = other DNA
cggataaatactgttttacagaactgaatgaatcgccccgtcttcgccggcaatggcaggatgtcctggatgagt

SEQ ID NO: 715324 - DNA, 75 bp, synthetic construct
  source 1..75: mol_type = other DNA
ttaccggagtggtaaaggtgcgcatgtccatggggcatgaagtggtcgggcactggtttaatgaagaggtgaaag

SEQ ID NO: 715325 - DNA, 75 bp, synthetic construct
  source 1..75: mol_type = other DNA
tggcagaacatcactggccgctggatggcggtgatgtcattgcgttgacgctcgacggtatcggtatgggggaga

SEQ ID NO: 715326 - DNA, 75 bp, synthetic construct
  source 1..75: mol_type = other DNA
gtctggcagctggcacagcaattaaatcttcacggcgatgtctgtaatgacggcgatggcgtggaagtccggctg

SEQ ID NO: 715327 - DNA, 75 bp, synthetic construct
  source 1..75: mol_type = other DNA
cggataaatactgttttacagagctgaatgaatcctcccgtcttcgccggcagtggctggatgttctggaggagt

SEQ ID NO: 715328 - DNA, 75 bp, synthetic construct
  source 1..75: mol_type = other DNA
tggctgtccactattggactaacggcaatagcctggttgactgccccttttgccggagttatggcgtcgttttat

SEQ ID NO: 715329 - DNA, 75 bp, synthetic construct
  source 1..75: mol_type = other DNA
cgaatttgttgcaggtgatgcctcgacggaagtgaaagcactggcgctgacttacctggagctaacggtaatcag

SEQ ID NO: 715330 - DNA, 75 bp, synthetic construct
  source 1..75: mol_type = other DNA
ttggggcacatcttaacggcgaaaaatattttgtcaaacccgatttttaaaaaacctaactgtttgccgtttcta

SEQ ID NO: 715331 - DNA, 75 bp, synthetic construct
  source 1..75: mol_type = other DNA
cgcttgctgttcctatctttatggagaatgcctgtgtcctgttgatgggcgtgctgagcacttttctggtcagtt

SEQ ID NO: 715332 - DNA, 75 bp, synthetic construct
  source 1..75: mol_type = other DNA
cagctggctgggaaaagatgcgatggccggcgtggggttggcggacagcttcaatatggtcattatggctttttt

SEQ ID NO: 715333 - DNA, 75 bp, synthetic construct
  source 1..75: mol_type = other DNA
gcatattgatttacggccttttctcctggccgggactgggatttgtcggggcagggctgggtttaaccatttctc

SEQ ID NO: 715334 - DNA, 75 bp, synthetic construct
  source 1..75: mol_type = other DNA
aacaggaaatgctgacgcgactgagtgcaattgtgcagcgtcgcctgcaactccagcagcaacaaagcgataaaa

SEQ ID NO: 715335 - DNA, 75 bp, synthetic construct
  source 1..75: mol_type = other DNA
gtggcggcctccaacgagctgccggaagcagacagcagtctggaagcgttatatgaccgcatgctgattcgtctg

SEQ ID NO: 715336 - DNA, 75 bp, synthetic construct
  source 1..75: mol_type = other DNA
agagctactgcaggagaacgtggtcggtttacctgcagaagaggagcaatcagacaaaagctttccgtttgatgt

SEQ ID NO: 715337 - DNA, 75 bp, synthetic construct
  source 1..75: mol_type = other DNA
aaacctctgaaacaaatgcaaagacttcagcagacaatgctgcttcctctaaggcggcagccgcatcgtcagcca

SEQ ID NO: 715338 - DNA, 75 bp, synthetic construct
  source 1..75: mol_type = other DNA
aagagttcgttttaaagaacgcgcaagaagaggagaggtcagtgcgcatctcatttattttattcatccacaact

SEQ ID NO: 715339 - DNA, 75 bp, synthetic construct
  source 1..75: mol_type = other DNA
aaaagaaacagctctttgagaaactggggattcagagcgatattactttctggcgcgatattttctttcagtaca

SEQ ID NO: 715340 - DNA, 75 bp, synthetic construct
  source 1..75: mol_type = other DNA
tcatttgtcattgcccggtaacgtatccgagaaagagcgactgctactcaagctgctgatgcaggggatgtcggt

SEQ ID NO: 715341 - DNA, 75 bp, synthetic construct
  source 1..75: mol_type = other DNA
ggacaatttccatattggcatcaacgtctcggcgggctgttttttggctgcgggatttgaaaaagagtgtctgaa

SEQ ID NO: 715342 - DNA, 75 bp, synthetic construct
  source 1..75: mol_type = other DNA
ctaaatggtcagacacctttaaatcttgaagctgttatcaagtttgcaggtttactgcaagtcccgcctgagtca

SEQ ID NO: 715343 - DNA, 75 bp, synthetic construct
  source 1..75: mol_type = other DNA
atgaaaagaaaatccctgtcagagatcgacctgcaagccgcccagagactgaaagaaatctggacggcgaaaaaa

SEQ ID NO: 715344 - DNA, 75 bp, synthetic construct
  source 1..75: mol_type = other DNA
gtgcaaagaccatttcacatcaaaagaaacagctctttgagaaactggggattcagagcgatattactttctggc

SEQ ID NO: 715345 - DNA, 75 bp, synthetic construct
  source 1..75: mol_type = other DNA
gcgccagtggcctgagccaaaagatggtgagcctcgcttgcacattaaagaacccggcaactctccggtaactcc

SEQ ID NO: 715346 - DNA, 75 bp, synthetic construct
  source 1..75: mol_type = other DNA
gtggatcacttttcatccgtcgttgacattggccccattggtccactgaaacacctctcaaaagaggcactggaa

SEQ ID NO: 715347 - DNA, 75 bp, synthetic construct
  source 1..75: mol_type = other DNA
gttagctgctgactttaaaaacaactacccaccaagcatccccaacactcaggtcggcgtatatggcgactggtt

SEQ ID NO: 715348 - DNA, 75 bp, synthetic construct
  source 1..75: mol_type = other DNA
gaatgctttggtgatgatgattgcgaaacttgtgactgtagcgggagaatcgaaatcaaggttccagtcagttgg

SEQ ID NO: 715349 - DNA, 75 bp, synthetic construct
  source 1..75: mol_type = other DNA
tgcccgttaatgctacgccctgcgcttatcgcattcgctgtcggtttttcggtgagtattgcgcaatatatgccg

SEQ ID NO: 715350 - DNA, 75 bp, synthetic construct
  source 1..75: mol_type = other DNA
gacgctggcggtaataagctggcagtggttaacccagggcgatactgaccaacagacgaaaggcgtgcttgcctg

SEQ ID NO: 715351 - DNA, 75 bp, synthetic construct
  source 1..75: mol_type = other DNA
ccaccgatggaccgatttggcatcggtctgggtttcaccctggcggtaaaagaaagcgcatttctgctgtggatc

SEQ ID NO: 715352 - DNA, 75 bp, synthetic construct
  source 1..75: mol_type = other DNA
acgtaattgcccaggttgtcggcggtattgttgcggcggcgctgctgtatttaattgccagtggtaaaacgggtt

SEQ ID NO: 715353 - DNA, 75 bp, synthetic construct
  source 1..75: mol_type = other DNA
tgggatccggcaacttacagcgtcgaagattcgctgtttggcaccattgaatttcataacggcggcattctgtgg

SEQ ID NO: 715354 - DNA, 75 bp, synthetic construct
  source 1..75: mol_type = other DNA
aaaataaattgaagatcaacatggagcgccagtggactgaaccaaaagatggtgatccttgtttgcacattaaag

SEQ ID NO: 715355 - DNA, 75 bp, synthetic construct
  source 1..75: mol_type = other DNA
cgtggagttgaacgacggcactttatcgtggttagggaacgccttgttctggatgccgctaccagaaccgccgca

SEQ ID NO: 715356 - DNA, 75 bp, synthetic construct
  source 1..75: mol_type = other DNA
atgttcagaaaattagcagctgaatgttttggtactttctggcttgtatttggtggctgcggtagcgcagtgctg

SEQ ID NO: 715357 - DNA, 75 bp, synthetic construct
  source 1..75: mol_type = other DNA
ggttgctatcttccagggcggctgggcattagaacaactgtggttcttctgggtggtgccaattgtcggcggtat

SEQ ID NO: 715358 - DNA, 75 bp, synthetic construct
  source 1..75: mol_type = other DNA
atccggagatcatatccgccactggtaataacagtcacaaatatattaatgacaaccactatcaccatattgtca

SEQ ID NO: 715359 - DNA, 75 bp, synthetic construct
  source 1..75: mol_type = other DNA
gtacaaaacgccaaactttttccggatcaaaaaacctttgccgacgccgtgccaaacagcgatccgctgatgatc

SEQ ID NO: 715360 - DNA, 75 bp, synthetic construct
  source 1..75: mol_type = other DNA
gcgatccgctgatgatccttgctgattatcggatgcagcaaaaccagagcggatttgatctgcgccatttcgtta

SEQ ID NO: 715361 - DNA, 75 bp, synthetic construct
  source 1..75: mol_type = other DNA
aacttaaagacggcaccatccttaaccgctactgggatgatcgtgatacaccgcgtccagagtcatgggtagaag

SEQ ID NO: 715362 - DNA, 75 bp, synthetic construct
  source 1..75: mol_type = other DNA
ccaaaagaaggcgagaagcatgtcccgccgaagggacagtcgctgcgtgaacatattgatggactttggccggta

SEQ ID NO: 715363 - DNA, 75 bp, synthetic construct
  source 1..75: mol_type = other DNA
aaggctggtatgccgattacgacctgaaaagtcataaagtgcgcaatcagttaaccgcggccgccctgttcccgc

SEQ ID NO: 715364 - DNA, 75 bp, synthetic construct
  source 1..75: mol_type = other DNA
cctgcaagccggacaacaggaaaaacgcgttgtaaaacttcaggatggtacccttctcaaccgctactgggacga

SEQ ID NO: 715365 - DNA, 75 bp, synthetic construct
  source 1..75: mol_type = other DNA
gccagcgttgcaacacgtctcgatatcaccacccacagcctttacgcctggataaagaagtacggtccggatcct

SEQ ID NO: 715366 - DNA, 75 bp, synthetic construct
  source 1..75: mol_type = other DNA
tggttatcgcaaaatccatctggatctgcgggacagcgggcaacagtgcggagtgaacagagtctggcgactgat

SEQ ID NO: 715367 - DNA, 75 bp, synthetic construct
  source 1..75: mol_type = other DNA
tgaacgcactgctgatggctgtatggcggcgtaatcccgaaaaaaaggtgctggttcattcggatcagggcagtc

SEQ ID NO: 715368 - DNA, 75 bp, synthetic construct
  source 1..75: mol_type = other DNA
accttacgcaccaccagcatcgtaccggtcgatctgaacagcctgatgtttaaaatggaaaaaaatcctcgcccg

SEQ ID NO: 715369 - DNA, 75 bp, synthetic construct
  source 1..75: mol_type = other DNA
accgcacgaccggtgaaagcatttcagacgttgaccatatcagccagagcatcggggatattctgcgcacgcccg

SEQ ID NO: 715370 - DNA, 75 bp, synthetic construct
  source 1..75: mol_type = other DNA
gtgctggttcattcggatcagggcagtcagtacacaagccatgagtggcagtcgttcctgaaatcacacggcctg

SEQ ID NO: 715371 - DNA, 75 bp, synthetic construct
  source 1..75: mol_type = other DNA
acgaaaacacatctgctgcaacccggcggcctgaacaccacgtcggtgaaaagtggacaacaatgggatgcgcca

SEQ ID NO: 715372 - DNA, 75 bp, synthetic construct
  source 1..75: mol_type = other DNA
tcgcctcatcaattatcttcgccagtttaatgttagtgggatgtaaagaaaaaatatattctgtagaatattact

SEQ ID NO: 715373 - DNA, 75 bp, synthetic construct
  source 1..75: mol_type = other DNA
tcaataaaaaagaaggccagataccgaagctgcggctggctgcgcaaacggcttcacggattctgagtctgttac

SEQ ID NO: 715374 - DNA, 75 bp, synthetic construct
  source 1..75: mol_type = other DNA
tcaataaaaaagaaggccagataccaaagctgcggctggctgcgcaaacggcttcacggattctaagtctgttac

SEQ ID NO: 715375 - DNA, 75 bp, synthetic construct
  source 1..75: mol_type = other DNA
cccactgtggcgaaagctgtggctaaacgtaatgccgcaggatgaagccgatttacctttaccaaaaacctttga

SEQ ID NO: 715376 - DNA, 75 bp, synthetic construct
  source 1..75: mol_type = other DNA
ctggaagctgaaaagctacgggaagcattgctgtcattagaacaccctttccagtttggcccagattcaccttca

SEQ ID NO: 715377 - DNA, 75 bp, synthetic construct
  source 1..75: mol_type = other DNA
caaacaacgaagtttaataaagaccattttatcaagcgtggtgtaacggaatacctgtgtcctcattgttcagcg

SEQ ID NO: 715378 - DNA, 75 bp, synthetic construct
  source 1..75: mol_type = other DNA
cgggacattctgctgacaccgcagggtagccgtattgcccgtcgtgaatatggttccctgctgtcggcactgata

SEQ ID NO: 715379 - DNA, 75 bp, synthetic construct
  source 1..75: mol_type = other DNA
agagccgggattcagacatcaactcttcactatcgaatcaagaaagggtggccattagatcgcgcgcttaacgcc

SEQ ID NO: 715380 - DNA, 75 bp, synthetic construct
  source 1..75: mol_type = other DNA
gtgcaaaacgccaaactttttcctgatcaaaaaacctttgccgacgccgtgcccaacagcgacccgctaatgatc

SEQ ID NO: 715381 - DNA, 75 bp, synthetic construct
  source 1..75: mol_type = other DNA
gacaggatgatagacacactgaaggatctctgtgtatcagagcgcaaggatgtggcctgggcgctggcggcagaa

SEQ ID NO: 715382 - DNA, 75 bp, synthetic construct
  source 1..75: mol_type = other DNA
gtagccgcattgctcgtcgtgaatatggttccctgctgtcgtcgctaatagaccagccacaaaatccggcattac

SEQ ID NO: 715383 - DNA, 75 bp, synthetic construct
  source 1..75: mol_type = other DNA
cgccttacgctggactccatcaccatcagcggcaattttgacggatctatggtggttgagcttatcggacacagc

SEQ ID NO: 715384 - DNA, 75 bp, synthetic construct
  source 1..75: mol_type = other DNA
gtggatgccatcgctctgggtaatggtagccagtcgagaggcttaaacaccattgccttaggcacagccagtaat

SEQ ID NO: 715385 - DNA, 75 bp, synthetic construct
  source 1..75: mol_type = other DNA
cggtacttacaacggtgaatcggcagttgctttaggtgtatcgatggtgagcgccaatggtcgttgggtctacaa

SEQ ID NO: 715386 - DNA, 75 bp, synthetic construct
  source 1..75: mol_type = other DNA
caaaaccgcacgttaacgtaggtactatcggccacgttgaccaaggtaaaaccacactgaccgctgcaatcacta

SEQ ID NO: 715387 - DNA, 75 bp, synthetic construct
  source 1..75: mol_type = other DNA
gtgagtctggcaccggaaaatcaaccagtttaagaaacttaccaccagaaaaaacattaatcatacagtgcataa

SEQ ID NO: 715388 - DNA, 75 bp, synthetic construct
  source 1..75: mol_type = other DNA
atgcgctgggtggtgacgcagaagtcaacgctgacggcaccatcaccgcaccgacttacaccattgcgaacgccg

SEQ ID NO: 715389 - DNA, 75 bp, synthetic construct
  source 1..75: mol_type = other DNA
taaatgcaatgagagaggatatgacaaatttacctcgatagggaaaaacgcatgggatgtgttcagggctgctgg

SEQ ID NO: 715390 - DNA, 75 bp, synthetic construct
  source 1..75: mol_type = other DNA
agtgtacattctgtccaaagatgaaggcggtcgtcatactccgttctttaaaggctaccgtccgcagttctactt

SEQ ID NO: 715391 - DNA, 75 bp, synthetic construct
  source 1..75: mol_type = other DNA
acctacggcggtgctgctcgcgcattcgaccagatcgataacgcgccggaagaaaaggctcgtggtatcaccatc

SEQ ID NO: 715392 - DNA, 75 bp, synthetic construct
  source 1..75: mol_type = other DNA
acttctcacgttgaatacgacaccccgacccgtcactacgcacacgtagactgcccggggcgcagcttacgctga

SEQ ID NO: 715393 - DNA, 75 bp, synthetic construct
  source 1..75: mol_type = other DNA
ctggaactggctggcttcctggattcttacattccggaaccagagcgtgcgattgacaagccgttcctgctgccg

SEQ ID NO: 715394 - DNA, 75 bp, synthetic construct
  source 1..75: mol_type = other DNA
tatcggccacgttgaccaaggtaaaacgaccctgaccgctgcaatcactaccgtactggctaaaacctacggcgg

SEQ ID NO: 715395 - DNA, 75 bp, synthetic construct
  source 1..75: mol_type = other DNA
aaacagtatgaagcgcaaggctttgaagtggtgattccgaaaaccaatattctggcggaattcccggtggcgtgg

SEQ ID NO: 715396 - DNA, 75 bp, synthetic construct
  source 1..75: mol_type = other DNA
gcctgtcggaagatggcatcaccatcacctttgatcgtgaagtggcgctggcgcgtgaagatgcacagtttatta

SEQ ID NO: 715397 - DNA, 75 bp, synthetic construct
  source 1..75: mol_type = other DNA
gaattaaaagacttgaagcagaaaatgaagctttgaaggcattaaatgaacgctatttagagcagttcaaagtat

SEQ ID NO: 715398 - DNA, 75 bp, synthetic construct
  source 1..75: mol_type = other DNA
gcgccggaagaaaaagctcgtggtatcaccatcaacacttctcacgttgaatacgacaccccgacccgtccacta

SEQ ID NO: 715399 - DNA, 75 bp, synthetic construct
  source 1..75: mol_type = other DNA
ggcgcgatcctggtagttgctgcgactgacggcccgatgccgcagactcgtgagcacatccctgctgggtcgtca

SEQ ID NO: 715400 - DNA, 75 bp, synthetic construct
  source 1..75: mol_type = other DNA
accactctgaccgctgcaatcaccaccgtactggctaaaacctacggcggtgctgctcgtgcattcgaccagatc

SEQ ID NO: 715401 - DNA, 75 bp, synthetic construct
  source 1..75: mol_type = other DNA
actactctgaccgctgcaatcactaccgtactggctaaaacctacggcggtgctgctcgtgcattcgaccagatc

SEQ ID NO: 715402 - DNA, 75 bp, synthetic construct
  source 1..75: mol_type = other DNA
acaactctgaccgctgcaatcacaaccgtactggctaaaacctacggcggtgctgctcgtgcattcgaccagatc

SEQ ID NO: 715403 - DNA, 75 bp, synthetic construct
  source 1..75: mol_type = other DNA
caagtgacagcagggcataacctcgctcttgcctgtaaattaccttattcgggtgaaaaagtcattaaagacttt

SEQ ID NO: 715404 - DNA, 75 bp, synthetic construct
  source 1..75: mol_type = other DNA
acgactctgaccgctgcaatcacgaccgtactggctaaaacctacggcggtgctgctcgtgcattcgaccagatc

SEQ ID NO: 715405 - DNA, 75 bp, synthetic construct
  source 1..75: mol_type = other DNA
tcagtttattgataatgatttgtacgaagtagataaaaaaatatgctcttactatgggtttgaaaaaaatgagac

SEQ ID NO: 715406 - DNA, 75 bp, synthetic construct
  source 1..75: mol_type = other DNA
tatcggccacgttgaccatggtaaaaccaccctgaccgctgcaatcaccaccgtactggctaaaacctacggcgg

SEQ ID NO: 715407 - DNA, 75 bp, synthetic construct
  source 1..75: mol_type = other DNA
tatcggccacgttgaccatggtaaaaccacactgaccgctgcaatcacaaccgtactggctaaaacctacggcgg

SEQ ID NO: 715408 - DNA, 75 bp, synthetic construct
  source 1..75: mol_type = other DNA
ggtgttcgcgcattaggtattcgcggctgtgccgtgtcgatgccgtttaaagaaagctgtatgtcctttctcgat

SEQ ID NO: 715409 - DNA, 75 bp, synthetic construct
  source 1..75: mol_type = other DNA
tatcggccacgttgaccatggtaaaacgacgctgaccgctgcaatcaccaccgtactggctaaaacctacggcgg

SEQ ID NO: 715410 - DNA, 75 bp, synthetic construct
  source 1..75: mol_type = other DNA
tatcggccacgttgaccatggtaaaaccacgctgaccgctgcaatcacgaccgtactggctaaaacctacggcgg

SEQ ID NO: 715411 - DNA, 75 bp, synthetic construct
  source 1..75: mol_type = other DNA
caaaaccgcacgttaacgtaggtactatcggccacgttgaccaaggtaaaacaaccctgaccgctgcaatcacta

SEQ ID NO: 715412 - DNA, 75 bp, synthetic construct
  source 1..75: mol_type = other DNA
tgacgacggcaggctgaccgggtttaacaccgactatatcgcggtgaaaagcctgattacccaccaccagctcaa

SEQ ID NO: 715413 - DNA, 75 bp, synthetic construct
  source 1..75: mol_type = other DNA
tatcggccacgttgaccatggtaaaacaacactgaccgctgcaatcaccaccgtactggctaaaacctacggcgg

SEQ ID NO: 715414 - DNA, 75 bp, synthetic construct
  source 1..75: mol_type = other DNA
caaaaccgcacgttaacgtgggtactatcggccacgttgaccaaggtaaaacaactctgaccgctgcaatcacca

SEQ ID NO: 715415 - DNA, 75 bp, synthetic construct
  source 1..75: mol_type = other DNA
caaaaccgcacgttaacgtcggtactatcggccacgttgaccaaggtaaaacaacactgaccgctgcaatcacta

SEQ ID NO: 715416 - DNA, 75 bp, synthetic construct
  source 1..75: mol_type = other DNA
gataacgcgccggaagaaaaagcgcgtggtatcaccatcaacacttcccacgttgaatacgacaccccgacccgt

SEQ ID NO: 715417 - DNA, 75 bp, synthetic construct
  source 1..75: mol_type = other DNA
tatcggccacgttgaccagggtaaaacgactctgaccgctgcaatcaccaccgtactggctaaaacctacggcgg

SEQ ID NO: 715418 - DNA, 75 bp, synthetic construct
  source 1..75: mol_type = other DNA
tatcggccacgttgaccagggtaaaaccactctgaccgctgcaatcacgaccgtactggctaaaacctacggcgg

SEQ ID NO: 715419 - DNA, 75 bp, synthetic construct
  source 1..75: mol_type = other DNA
tatcggccacgttgaccacggtaaaaccactctgaccgctgcaatcaccaccgtactggctaaaacctacggcgg

SEQ ID NO: 715420 - DNA, 75 bp, synthetic construct
  source 1..75: mol_type = other DNA
taatagcggctggtttactggctggctgcggcgagaaaacaccaaaatgtagtagtaatgatgcaaaaaatctgg

SEQ ID NO: 715421 - DNA, 75 bp, synthetic construct
  source 1..75: mol_type = other DNA
agagtgggaagcgaaaatcctggaactggctggcttcctggattcctatattccggaaccagagcgtgcgattga

SEQ ID NO: 715422 - DNA, 75 bp, synthetic construct
  source 1..75: mol_type = other DNA
cggtactgcgaactctgttcagtccaccaccagcgagtttcgcagctccggtggtgggaagaactcccagtacaa

SEQ ID NO: 715423 - DNA, 75 bp, synthetic construct
  source 1..75: mol_type = other DNA
caaaaccgcacgttaacgtgggtactatcggccacgttgaccatggtaaaaccaccctgaccgctgcaatcacga

SEQ ID NO: 715424 - DNA, 75 bp, synthetic construct
  source 1..75: mol_type = other DNA
caaaaccgcacgttaacgtcggtactatcggccacgttgaccagggtaaaaccactctgaccgctgcaatcacga

SEQ ID NO: 715425 - DNA, 75 bp, synthetic construct
  source 1..75: mol_type = other DNA
aggttgaaggtgcgtatcgcctgatacgtaacccgtctgtgtccccgcaagccgttgccgaagccggatttaccg

SEQ ID NO: 715426 - DNA, 75 bp, synthetic construct
  source 1..75: mol_type = other DNA
ggcacgccgactatgttaaaaacatgatcaccggtgctgctcagatgcggccgactctcgtctttgtcgggttcg

SEQ ID NO: 715427 - DNA, 75 bp, synthetic construct
  source 1..75: mol_type = other DNA
atgaaaagattgacagtctgttgactgcaacatcagaaggtatgtcaggtaaatactcagacagtatttcattaa

SEQ ID NO: 715428 - DNA, 75 bp, synthetic construct
  source 1..75: mol_type = other DNA
gggctgctggctgatagaggaataccacaaggcgtgaaaaagtggtggtacatgtgtggaatcgctgcgaatgca

SEQ ID NO: 715429 - DNA, 75 bp, synthetic construct
  source 1..75: mol_type = other DNA
tatcggccacgttgaccagggtaaaactacactgaccgctgcaatcaccaccgtactggctaaaacctacggcgg

SEQ ID NO: 715430 - DNA, 75 bp, synthetic construct
  source 1..75: mol_type = other DNA
tatcggccacgttgaccacggtaaaactaccctgaccgctgcaatcacaaccgtactggctaaaacctacggcgg

SEQ ID NO: 715431 - DNA, 75 bp, synthetic construct
  source 1..75: mol_type = other DNA
cgtcgcgaggcgattcgtgaatcgctgttggatgaagcccagggcgcagactgcctgatggttaaacctgccggg

SEQ ID NO: 715432 - DNA, 75 bp, synthetic construct
  source 1..75: mol_type = other DNA
gggcaccatcaagccgcacaccaagttcgaatctgaagtgtacattctgtccaaagatgaaggcggtcgtcatac

SEQ ID NO: 715433 - DNA, 75 bp, synthetic construct
  source 1..75: mol_type = other DNA
ccgggcaccatcaagccgcacaccaagttcgaatctgaagtgtacattctgtccaaagatgaaggcggtcgtcat

SEQ ID NO: 715434 - DNA, 75 bp, synthetic construct
  source 1..75: mol_type = other DNA
gtggtatcaccatcaacacttctcacgttgaaggtaaaacaacgctgaccgctgcaatcactaccgtactggcta

SEQ ID NO: 715435 - DNA, 75 bp, synthetic construct
  source 1..75: mol_type = other DNA
gtaacatcgttgagtgatgtgcgggtgagtttccccggtgctgaagagccggtaaaacgctggcaggggaatctg

SEQ ID NO: 715436 - DNA, 75 bp, synthetic construct
  source 1..75: mol_type = other DNA
agtgattacaaatggatatcggaaaattccgggcttgcggctcagtcaaatgctttcatttcaggaagggaactt

SEQ ID NO: 715437 - DNA, 75 bp, synthetic construct
  source 1..75: mol_type = other DNA
attgactgggttcctacttcgatgaccgcttacctggcgggagggatgtttttacagtggctgttaggaccactg

SEQ ID NO: 715438 - DNA, 75 bp, synthetic construct
  source 1..75: mol_type = other DNA
ctgtatgtccgcgatacgtcctggcagtggcagccccgcgctgtgcggatgagtacaccagacgccgtgcaggcc

SEQ ID NO: 715439 - DNA, 75 bp, synthetic construct
  source 1..75: mol_type = other DNA
cgtattgcggcccggggagaacttgcccgggggcaggtgcgttacggggaaatcacgttcacgatgcgccatctt

SEQ ID NO: 715440 - DNA, 75 bp, synthetic construct
  source 1..75: mol_type = other DNA
ctggtatggcaggacaatatcactgccggtcagggctggagtgtggtcagcggagaggtgagtccgggggcagaa

SEQ ID NO: 715441 - DNA, 75 bp, synthetic construct
  source 1..75: mol_type = other DNA
ttcctgaatcagaaactgaacatgatggaatgcctgttttctggagattccaagcgacagttgaagaagatggaa

SEQ ID NO: 715442 - DNA, 75 bp, synthetic construct
  source 1..75: mol_type = other DNA
ggctaaagtaattgtggagactgagcgcctattcaattctctgagtattcaggaaaaagaggttttagcatttgc

SEQ ID NO: 715443 - DNA, 75 bp, synthetic construct
  source 1..75: mol_type = other DNA
gttggtatcaaagagacggtcaggtactggctaagccgggcaccatcaagccgcacaccaagttcgaatctgaag

SEQ ID NO: 715444 - DNA, 75 bp, synthetic construct
  source 1..75: mol_type = other DNA
gccgatgaccattacggttaacgccgggaaaacacagttcattattcagaaccacagccagaaggcgctggagtg

SEQ ID NO: 715445 - DNA, 75 bp, synthetic construct
  source 1..75: mol_type = other DNA
gtgtctggaaatataggggcaaatccactggatgtgaacgttgatcagttcgatactgaagctttccgtaccgat

SEQ ID NO: 715446 - DNA, 75 bp, synthetic construct
  source 1..75: mol_type = other DNA
gcgtatttgcaactgatactctggaactgaccagtggcaacgttaaagataacaacggtaatgtttacgcaggtg

SEQ ID NO: 715447 - DNA, 75 bp, synthetic construct
  source 1..75: mol_type = other DNA
caaaaccgcacgttaacgtcggtactatcggccacgttgaccaaggtaaaactacactgaccgctgcaatcacga

SEQ ID NO: 715448 - DNA, 75 bp, synthetic construct
  source 1..75: mol_type = other DNA
gcagaacgttacggcgtacaggcgctggttaccggtgaagcgctcggccaggtgtccaagccagacgctgaccaa

SEQ ID NO: 715449 - DNA, 75 bp, synthetic construct
  source 1..75: mol_type = other DNA
gatggtgcgtgccgcatctaaagtggctgaacgttacggcgtacaggcgctggtcaccggcgaagcactcggcca

SEQ ID NO: 715450 - DNA, 75 bp, synthetic construct
  source 1..75: mol_type = other DNA
gctgaccaatccggatgtgactgtccatctggaagttgaagacgatcgtctcctgctgatcaaaggtcgttacga

SEQ ID NO: 715451 - DNA, 75 bp, synthetic construct
  source 1..75: mol_type = other DNA
cgtattctccatctccggtcgtggtaccgttgttaccgggcgtgtagaacgcggtatcatcaaagttggtgaaga

SEQ ID NO: 715452 - DNA, 75 bp, synthetic construct
  source 1..75: mol_type = other DNA
actggctaagccgggcaccatcaagccgcacactaagttcgaatctgaagtgtacattctgtccaaagatgaagg

SEQ ID NO: 715453 - DNA, 75 bp, synthetic construct
  source 1..75: mol_type = other DNA
atgaatactacatttgcacttgttctgacggtttttcttgtttccggtgaaccggttgacatggttactggcgta

SEQ ID NO: 715454 - DNA, 75 bp, synthetic construct
  source 1..75: mol_type = other DNA
gtcgaagggattgatgtggtttcactgccgttctacaagttgagcaccaaatttggcgatctcgaccagaacaga

SEQ ID NO: 715455 - DNA, 75 bp, synthetic construct
  source 1..75: mol_type = other DNA
gctctgaaagcgctggaaggcgacgcagagtgggaagcgaaaatcctggaactggctggcttcctggattcttaa

SEQ ID NO: 715456 - DNA, 75 bp, synthetic construct
  source 1..75: mol_type = other DNA
actactctgaccgctgcaatcaccaccgtactggctaaaacctacggtggtgctgctcgtgcattcgaccagatc

SEQ ID NO: 715457 - DNA, 75 bp, synthetic construct
  source 1..75: mol_type = other DNA
ggcgctgcacgacaaccgcgacctgctcggtcatgtgcatattgccgataaccatcgttaccagccgggcagcgg

SEQ ID NO: 715458 - DNA, 75 bp, synthetic construct
  source 1..75: mol_type = other DNA
actggtaccatcgaactgccggaaggcgtagagatggtaatgccgggcgacaacatcaaatggttgttaccctga

SEQ ID NO: 715459 - DNA, 75 bp, synthetic construct
  source 1..75: mol_type = other DNA
gctaagccgggcaccatcaagccgcacaccaagttcgaatctgaagtgtacatcctgtccaaagatgaaggcggt

SEQ ID NO: 715460 - DNA, 75 bp, synthetic construct
  source 1..75: mol_type = other DNA
acaacgctgaccgctgcaatcactaccgtactggctaaaacctatggcggtgctgctcgcgcattcgaccagatc

SEQ ID NO: 715461 - DNA, 75 bp, synthetic construct
  source 1..75: mol_type = other DNA
ggcgctgcatgacaaccgcgacctgctcggtcatgtgcatattgccgataaccatcgctaccagccgggcagcgg

SEQ ID NO: 715462 - DNA, 75 bp, synthetic construct
  source 1..75: mol_type = other DNA
tatgaagggcgtatccgggcagaaaatcctgcccaggcgtaccgtgattcgttggcctggttgcgcacctgctaa

SEQ ID NO: 715463 - DNA, 75 bp, synthetic construct
  source 1..75: mol_type = other DNA
agaagtcaaagcagcaatcaaagaaaccggtttaccggtgaccaccgcctgcggtggctatgacggctggattgg

SEQ ID NO: 715464 - DNA, 75 bp, synthetic construct
  source 1..75: mol_type = other DNA
gccgatatcactgcgatcaaacgtctttccgatatgggcttcaaagtcaccgtcaccggtggcctggcgctggaa

SEQ ID NO: 715465 - DNA, 75 bp, synthetic construct
  source 1..75: mol_type = other DNA
cgattcacgtctttatcgcgggccgtagtatccgtgatgccgcttctccggtggaagccgcacgtcagttcaaac

SEQ ID NO: 715466 - DNA, 75 bp, synthetic construct
  source 1..75: mol_type = other DNA
tccgtttgtgcagctggccaccctgaaacagcgggcggaaaaggcggccagaacggcaggacgaatgccgtccgg

SEQ ID NO: 715467 - DNA, 75 bp, synthetic construct
  source 1..75: mol_type = other DNA
accatgcccgggatgctgctcagcttcctgttgccatcgattatccggcagcgctggcactccgccagatgtcga

SEQ ID NO: 715468 - DNA, 75 bp, synthetic construct
  source 1..75: mol_type = other DNA
aaagcgctctacccgcacaaaatcgtactggcagacgccaaaattgctgatgcaggcaaaatcctttcgcgtatg

SEQ ID NO: 715469 - DNA, 75 bp, synthetic construct
  source 1..75: mol_type = other DNA
agcatccgtgatgccgcttctccggttgaagccgcgcgtcagttcaaacgttccatcgccgaactgtggggctaa

SEQ ID NO: 715470 - DNA, 75 bp, synthetic construct
  source 1..75: mol_type = other DNA
gttgccggtggccattgattatccggcggcactggcgttgcgtcagatggcgctcgtacaggatgaactgccgaa

SEQ ID NO: 715471 - DNA, 75 bp, synthetic construct
  source 1..75: mol_type = other DNA
tgtttgcgctggatgtggctgcacggcaccgggtgcagttttcgatgcctgagtccgatactgtcacaatgctga

SEQ ID NO: 715472 - DNA, 75 bp, synthetic construct
  source 1..75: mol_type = other DNA
aaaacacaatagcggtgcttttgcgtatgggttgtcagaggacggtttcggaaagctggaccgcgccagaaaggc

SEQ ID NO: 715473 - DNA, 75 bp, synthetic construct
  source 1..75: mol_type = other DNA
cgcttgatgttgccgcacggcaccgggtgcagtttcagatgccgggtactgatgctgtggccatgctcaaaggaa

SEQ ID NO: 715474 - DNA, 75 bp, synthetic construct
  source 1..75: mol_type = other DNA
acattaaagaaccaaagcggagcaatcctcaaaaccgccttatgtgggcgttattgcaggacgtatcgcgtcagg

SEQ ID NO: 715475 - DNA, 75 bp, synthetic construct
  source 1..75: mol_type = other DNA
gtggaggccgctgcggccgacggggttacgttctcagtaccggtgacaccccatacgttccgtcactcctacgcg

SEQ ID NO: 715476 - DNA, 75 bp, synthetic construct
  source 1..75: mol_type = other DNA
atgaagcaaatatacatacttcgcaacgaagcaatcagaaataacgccataggcgccattctctcactacccatc

SEQ ID NO: 715477 - DNA, 75 bp, synthetic construct
  source 1..75: mol_type = other DNA
cagctctggcacttcgccagatgtcgatggttcatgatgaactgccgaaatatctgctggctccggaagtgagtg

SEQ ID NO: 715478 - DNA, 75 bp, synthetic construct
  source 1..75: mol_type = other DNA
aacaacggaccgaaaaagccgccaggacggcaggaagaatgccagccggtcagcagactcaccggctggtcccgc

SEQ ID NO: 715479 - DNA, 75 bp, synthetic construct
  source 1..75: mol_type = other DNA
cgtcaacatcaaccggctttcaaagttgatgtggtagataccaccggtgcgggtgatgtttttcacggtgcgctg

SEQ ID NO: 715480 - DNA, 75 bp, synthetic construct
  source 1..75: mol_type = other DNA
atgaagcactggcgctgacgcggggggatttttcgctcgcgcctccgtatccgtttgtgcagctggccactctga

SEQ ID NO: 715481 - DNA, 75 bp, synthetic construct
  source 1..75: mol_type = other DNA
gctggatgtggttgcacggcacagggtgcagttttcgatgcctgagtccgatgcggtcacaatgctgaaaaacaa

SEQ ID NO: 715482 - DNA, 75 bp, synthetic construct
  source 1..75: mol_type = other DNA
cagggcgtcacattcagcgaacaatcccgcaatgaaatcgagtgggcaaagcgctgggggaacagcaatgcgaaa

SEQ ID NO: 715483 - DNA, 75 bp, synthetic construct
  source 1..75: mol_type = other DNA
ggtaaatacgtggcgagaaattatacggaagttggtggcgggccagcggcgacggcagcggttgcggcggcaagg

SEQ ID NO: 715484 - DNA, 75 bp, synthetic construct
  source 1..75: mol_type = other DNA
aaaaatattcttctcaaattacagttagttataaggatttccttaactgcttctcctcaccatcatgttattttc

SEQ ID NO: 715485 - DNA, 75 bp, synthetic construct
  source 1..75: mol_type = other DNA
ctggttccgctctccgactcctggtacgtcagccagctgcagacgatggtggcaacactgaaaatccccatggaa

SEQ ID NO: 715486 - DNA, 75 bp, synthetic construct
  source 1..75: mol_type = other DNA
gtcgcgtcggtgatgacgacacgggcaacagcctgctggcagagctggaatcctggggcgttaacacccgttaca

SEQ ID NO: 715487 - DNA, 75 bp, synthetic construct
  source 1..75: mol_type = other DNA
ctgtgactggctggagaatggcgggcgacagcatcaaccggccttcaaagttgatgtggtagataccacaggtgc

SEQ ID NO: 715488 - DNA, 75 bp, synthetic construct
  source 1..75: mol_type = other DNA
tggacggtgatattacgccgcaggatatcagtgagctggtggcgttaagcgatcatgccgctttttcagaaccgg

SEQ ID NO: 715489 - DNA, 75 bp, synthetic construct
  source 1..75: mol_type = other DNA
actatgtggagcgattttgcctacggtcgcaatgcggtgtacccggaagggcatcatggaaacgccgtactgtca

SEQ ID NO: 715490 - DNA, 75 bp, synthetic construct
  source 1..75: mol_type = other DNA
ataagggaattaacgggctggcattccactggtataccggcgaccatttttcgcaaatacagtatctggcccagt

SEQ ID NO: 715491 - DNA, 75 bp, synthetic construct
  source 1..75: mol_type = other DNA
cgtgcagtatctgcgtccgcgcctcgcccggcagggtatggatgagatggagatctatatctgggatcacgataa

SEQ ID NO: 715492 - DNA, 75 bp, synthetic construct
  source 1..75: mol_type = other DNA
atccacacatgaagctgatggcttcgccgtggagtccgccggcgtttatgaaaactaataacgatatgaacggtg

SEQ ID NO: 715493 - DNA, 75 bp, synthetic construct
  source 1..75: mol_type = other DNA
cgattcatgtgtttatcgctggtcgcagtatccgtgatgccgcttctccggttgaagctgcgcgtcagttcaaac

SEQ ID NO: 715494 - DNA, 75 bp, synthetic construct
  source 1..75: mol_type = other DNA
ttttagcatttgtctttgcacccacccatgggcttttggcaaatcgtcagcgtgcgcataaggtgctggaggatc

SEQ ID NO: 715495 - DNA, 75 bp, synthetic construct
  source 1..75: mol_type = other DNA
ggcatgtgccagaacctggatgaaaaccttgggcgtatcgtcgattacctgaaggccagcggcgaatacgacaac

SEQ ID NO: 715496 - DNA, 75 bp, synthetic construct
  source 1..75: mol_type = other DNA
agcctttgccgagtgggtgaaagcctcgccgcatgatgacgataaaccgattttgctgccgggtgagtgggaagt

SEQ ID NO: 715497 - DNA, 75 bp, synthetic construct
  source 1..75: mol_type = other DNA
gggcgccagctcaggcggctaaacagcaagcggctccggcagcaggcccatgcatcagcggctggcgtgaaagaa

SEQ ID NO: 715498 - DNA, 75 bp, synthetic construct
  source 1..75: mol_type = other DNA
gggcgccagctcaggcggctaaacagaaagcggctccggcagcaggcccctgcatcagcggctggcgtgaaagaa

SEQ ID NO: 715499 - DNA, 75 bp, synthetic construct
  source 1..75: mol_type = other DNA
ctgtgatttttccctgggcaattacgcgtatgtcgattccagcgctgacctgcagcagggacggctctccttttc

SEQ ID NO: 715500 - DNA, 75 bp, synthetic construct
  source 1..75: mol_type = other DNA
ttgtgtcaacaggaggcattttctgtcaatgtggttgataccactggagcaggcgatgtttttcacggcgcactc

SEQ ID NO: 715501 - DNA, 75 bp, synthetic construct
  source 1..75: mol_type = other DNA
ccgctgttgctcgattacgccaccagcgccattgcatttggcaaaacccgcgtcgcctggtataaatccccgtgc

SEQ ID NO: 715502 - DNA, 75 bp, synthetic construct
  source 1..75: mol_type = other DNA
aagcgattcatgtgatgtgcgtgcacctcggcttgcgggaggcgcaccgtcaggcgcagcttgcgatgcttgctg

SEQ ID NO: 715503 - DNA, 75 bp, synthetic construct
  source 1..75: mol_type = other DNA
tggcgatgcgttgtcgcactctattgtcccgggtgttgcgggggcatatatgctggggcttccgttttctctggg

SEQ ID NO: 715504 - DNA, 75 bp, synthetic construct
  source 1..75: mol_type = other DNA
accgggtgtttatctcgtactgttctccctcgaagaaaaaaagccgggctgacattctggaaatggaaaatctgg

SEQ ID NO: 715505 - DNA, 75 bp, synthetic construct
  source 1..75: mol_type = other DNA
accgggtattcttctcgtactgttctccctcgaagaaaaaagccgggctgacattctggaaatggaaaacctggt

SEQ ID NO: 715506 - DNA, 75 bp, synthetic construct
  source 1..75: mol_type = other DNA
gatgcacaggcctttatcgatattgtcggggagatgattaaccataacccggactccctgtacccgaaaagacgt

SEQ ID NO: 715507 - DNA, 75 bp, synthetic construct
  source 1..75: mol_type = other DNA
cctattatatgaacgcggcagcgacacggttcccgctgccggaggggatgaatctgcccctgaccctgcggcatt

SEQ ID NO: 715508 - DNA, 75 bp, synthetic construct
  source 1..75: mol_type = other DNA
atgaacgtgctcctggaacccttcagctatgaatatacgctcaatgcgatgtgggtctcggcgatggtccgcggt

SEQ ID NO: 715509 - DNA, 75 bp, synthetic construct
  source 1..75: mol_type = other DNA
caaaacgcgcgaagagctgaatcaggaagctcgtgaccgcaagcgtcagaaaaaacgtcgtggtcatgcgccggg

SEQ ID NO: 715510 - DNA, 75 bp, synthetic construct
  source 1..75: mol_type = other DNA
ttttcgacgagaatcacgcccgtgctattggattatatccaggaagattaaaaatcctcttcttcacactgctgg

SEQ ID NO: 715511 - DNA, 75 bp, synthetic construct
  source 1..75: mol_type = other DNA
ggacaggatttacgtcaaaaacgccagtgccagtgcgcccacagcgctgccgctgcggacctggcgacatctttc

SEQ ID NO: 715512 - DNA, 75 bp, synthetic construct
  source 1..75: mol_type = other DNA
atgaaaccatcatcttcaaactcacgcggcaaaggtcacgcaaaagcgcgtcgtaaaacgcgcgaagagctgaat

SEQ ID NO: 715513 - DNA, 75 bp, synthetic construct
  source 1..75: mol_type = other DNA
gccagaacgcaccaaaagatccacgtattggcagtaaaacccctattccattgggcgtgactgaaaaagtcacca

SEQ ID NO: 715514 - DNA, 75 bp, synthetic construct
  source 1..75: mol_type = other DNA
caccgaaagatccacgtattggcagtaaaacccctattccattgggcgtgactgaaaaagtcaccaaacagcaca

SEQ ID NO: 715515 - DNA, 75 bp, synthetic construct
  source 1..75: mol_type = other DNA
atgacaaagctgaccattaaccgaaaaccgaaaggcatttacggcacgctgcagaaaacgacgcaggcgatacag

SEQ ID NO: 715516 - DNA, 75 bp, synthetic construct
  source 1..75: mol_type = other DNA
ggggatattcgacgacctgatgcaggatatcgccgtcagggggctggcattcgggccgggggtattacgtgcgac

SEQ ID NO: 715517 - DNA, 75 bp, synthetic construct
  source 1..75: mol_type = other DNA
cgacctgatgcaggatatcgccgccagggggctgacattcgggccgggggcattacgtgcgacgctggcatccta

SEQ ID NO: 715518 - DNA, 75 bp, synthetic construct
  source 1..75: mol_type = other DNA
tggaggctggagcagataaaacagcaaaacatccagcggcaggatacgggaggtggtgagagtgataacagacag

SEQ ID NO: 715519 - DNA, 75 bp, synthetic construct
  source 1..75: mol_type = other DNA
tcctggcgtattcttgaacatgcttcaattaacgatagtgatgaatcattacaacaagcagtaaaacaaaattac

SEQ ID NO: 715520 - DNA, 75 bp, synthetic construct
  source 1..75: mol_type = other DNA
aacaaaattacccgcaagcatggcaatgtgcggagcggatcgccatttttattggtttgcagtatcaacgtaaaa

SEQ ID NO: 715521 - DNA, 75 bp, synthetic construct
  source 1..75: mol_type = other DNA
ccgccagcctcgacagctactacggtgaagcgatggcgattggcgaacgtgcgccggttgcgctgctggatttcg

SEQ ID NO: 715522 - DNA, 75 bp, synthetic construct
  source 1..75: mol_type = other DNA
gcgggcctgtatgaagccgttaaagcggtgggcgaagagctttgtccggcgctgggcctgacgatcccggtgggt

SEQ ID NO: 715523 - DNA, 75 bp, synthetic construct
  source 1..75: mol_type = other DNA
cacgacgtcggcgctggcggtctttctaacgccatgccggaactggtgagcgacggcgggcgcggcggtaaattc

SEQ ID NO: 715524 - DNA, 75 bp, synthetic construct
  source 1..75: mol_type = other DNA
agccgcttaaggtggggatattcgacgacctgatgcaggatatcgccgccagggggctgacattcgggccggggg

SEQ ID NO: 715525 - DNA, 75 bp, synthetic construct
  source 1..75: mol_type = other DNA
aaagtcagcattgatgacgtgattgcgcgtaacttcaatctggatattaaaaacccacatcaggcggaaaccgtc

SEQ ID NO: 715526 - DNA, 75 bp, synthetic construct
  source 1..75: mol_type = other DNA
ccgctggacgtgctgcttggcaaaacgccgaagatgacccgcgatgtacaaacgctgaaagcgaaaggcgacgcg

SEQ ID NO: 715527 - DNA, 75 bp, synthetic construct
  source 1..75: mol_type = other DNA
gaaagatgccgataatctggaatcagcccagcaggcgaagctcaaaatgatttgtgaaaaattgcagttaaaacc

SEQ ID NO: 715528 - DNA, 75 bp, synthetic construct
  source 1..75: mol_type = other DNA
gccttatattgccacagccacattgccctttgtatttcctaataaggtgctgggcgttatccctctggtatcaac

SEQ ID NO: 715529 - DNA, 75 bp, synthetic construct
  source 1..75: mol_type = other DNA
ggattttcccgtttttcatttgcagggccttcacgaggtgatggggttaattatgtaaccattcgtcctcgtaac

SEQ ID NO: 715530 - DNA, 75 bp, synthetic construct
  source 1..75: mol_type = other DNA
tctcgtagtgttaaacgttatggtgaaattagtggaaatgtagatacagaaacccgtccacgaaatattgcattt

SEQ ID NO: 715531 - DNA, 75 bp, synthetic construct
  source 1..75: mol_type = other DNA
ggaaacgccgctgattcgcctggcgcagcagcttgataagcagacgatcagcggtgcagaggtgatagccttaca

SEQ ID NO: 715532 - DNA, 75 bp, synthetic construct
  source 1..75: mol_type = other DNA
ccgctaccggaagcgatactgagcggcaagctgcgctcatcgttttcatcaccattgcctggcaaggccgaaaat

SEQ ID NO: 715533 - DNA, 75 bp, synthetic construct
  source 1..75: mol_type = other DNA
tcgtatcgccaacgaattacttagccgtgctggcattgctattaatggccctgctccggcagatattcgtgttaa

SEQ ID NO: 715534 - DNA, 75 bp, synthetic construct
  source 1..75: mol_type = other DNA
tgtggctggggcggactggcgtactatatggcgtccaaatatgacgtgagcgtggttggcgtcacgatttctgct

SEQ ID NO: 715535 - DNA, 75 bp, synthetic construct
  source 1..75: mol_type = other DNA
ctttaaacgaatgtttacctattatctgaatgcctgtgcaggtgctttccgcgcccgtgatattcagctctggca

SEQ ID NO: 715536 - DNA, 75 bp, synthetic construct
  source 1..75: mol_type = other DNA
gaaaatactggaactggctggcttcctggattcttacattccggaaccagaacgtgcgattgacaagccgttcct

SEQ ID NO: 715537 - DNA, 75 bp, synthetic construct
  source 1..75: mol_type = other DNA
atggaaacgttattaccaaacgttaatacgactgaaggttgttttgaaattggtgtcactatcagtaacacggta

SEQ ID NO: 715538 - DNA, 75 bp, synthetic construct
  source 1..75: mol_type = other DNA
cgcaaaaaccgtaagcgtataaatcgtcttgtggaactctggcctgagttattcaaccgggaaaaaccaaaaccg

SEQ ID NO: 715539 - DNA, 75 bp, synthetic construct
  source 1..75: mol_type = other DNA
cggcagctttccaccgtgcgggcttcgatgctatcgacgtgcatatgagcgacctgctggctggacgcacgggcc

SEQ ID NO: 715540 - DNA, 75 bp, synthetic construct
  source 1..75: mol_type = other DNA
atgtcaggctccgttatacacagccagtctgcagccacgatcccggcagtgtattctgccggacagtctgtgcaa

SEQ ID NO: 715541 - DNA, 75 bp, synthetic construct
  source 1..75: mol_type = other DNA
atgttgctgcgcggcatcgagttcagtttcagatgcccgaagcggatgcggtagccatgctgaaagggaatattt

SEQ ID NO: 715542 - DNA, 75 bp, synthetic construct
  source 1..75: mol_type = other DNA
tacgttccgtcactcctacgcgatgcacatgctgtatgccggcataccactgaaggttttgcagagcctgatggg

SEQ ID NO: 715543 - DNA, 75 bp, synthetic construct
  source 1..75: mol_type = other DNA
gtttgtgcagctggccactctgaagcagcggaccgaaaaagcagccaggacggcaggaagaatgccagccggtca

SEQ ID NO: 715544 - DNA, 75 bp, synthetic construct
  source 1..75: mol_type = other DNA
atgggacataagtccatcagttcaacggaagtctacacgaaggtttttcgctggatgtggctgcccggcaccggg

SEQ ID NO: 715545 - DNA, 75 bp, synthetic construct
  source 1..75: mol_type = other DNA
ctgctccattacgtcccggatctgcgccgcaagatgctgctggccactctgtggaacaccggcgcgcgtattaat

SEQ ID NO: 715546 - DNA, 75 bp, synthetic construct
  source 1..75: mol_type = other DNA
tattgcaggacgtatcacgtcaggtgctttggcatggacagagacttgcgccggaggactggaaagacctgttca

SEQ ID NO: 715547 - DNA, 75 bp, synthetic construct
  source 1..75: mol_type = other DNA
gttcgtccagctggcgaccctcaagcagcgaacggaaaaagccggcagaacggcaggacgtccggcagccggtgc

SEQ ID NO: 715548 - DNA, 75 bp, synthetic construct
  source 1..75: mol_type = other DNA
gccctgctgcattatgtccccgatttgcaccgcaagatgctgctggccacgttgtggaataccggtgcgcgcatt

SEQ ID NO: 715549 - DNA, 75 bp, synthetic construct
  source 1..75: mol_type = other DNA
tgccaggttcttttttaacgcctccggcaacattacctgttgccattgattacccggctgcgctggcactacgtc

SEQ ID NO: 715550 - DNA, 75 bp, synthetic construct
  source 1..75: mol_type = other DNA
cgacaccctccttacatttgccggtagccatcgactatccggcagcgctggcgctgcgccagatggcacttgttc

SEQ ID NO: 715551 - DNA, 75 bp, synthetic construct
  source 1..75: mol_type = other DNA
cggcaggaagaacgcctgccgggcagcagactcaccggctggttccgctctccgactcctggtacgtcagccagc

SEQ ID NO: 715552 - DNA, 75 bp, synthetic construct
  source 1..75: mol_type = other DNA
aaacagacacgcataagtcacaaatcataattatgaattgtgatttattctataaaagaagagaccactgcaata

SEQ ID NO: 715553 - DNA, 75 bp, synthetic construct
  source 1..75: mol_type = other DNA
ctggctggacgcacgggcctggagggtttccacgccctggtagcgtgcggtggtttctcctacggtgatgtgctg

SEQ ID NO: 715554 - DNA, 75 bp, synthetic construct
  source 1..75: mol_type = other DNA
ggtcattgcggcattgaagcagatatcgtaactctgggtgaagatcgcctggccgcgttgtttaacgaagagctg

SEQ ID NO: 715555 - DNA, 75 bp, synthetic construct
  source 1..75: mol_type = other DNA
ccacgtcccgcaaggcaaactcctgctggtgattccgcgtcccggcaccatctctccctggtcttcgaaagcgac

SEQ ID NO: 715556 - DNA, 75 bp, synthetic construct
  source 1..75: mol_type = other DNA
cgaccggttccggcggtgaaatccgcgatgaaggtgccaccgggcgtggcgcaaagccgaaagccggtctggttg

SEQ ID NO: 715557 - DNA, 75 bp, synthetic construct
  source 1..75: mol_type = other DNA
gttgaagtacgtaatgcggcgcacctcgcggcactggaaagcaaagggctggtagcattacgctatgtcgataac

SEQ ID NO: 715558 - DNA, 75 bp, synthetic construct
  source 1..75: mol_type = other DNA
gactggattatcgacggtgaacagcagccgaaatcgctgttcaagatgatcaaaaatactttcgaaaccacgcca

SEQ ID NO: 715559 - DNA, 75 bp, synthetic construct
  source 1..75: mol_type = other DNA
gttgaagtacgcgatgcggcgcatctggcggcgctggaaagcaaagggctggtggcgctgcgctacgtcgataac

SEQ ID NO: 715560 - DNA, 75 bp, synthetic construct
  source 1..75: mol_type = other DNA
cgcgtccgttcagcgcgataacccggaaatggaacgtcgctgtcaggaagtgatcgaccgctgctggcagcttgt

SEQ ID NO: 715561 - DNA, 75 bp, synthetic construct
  source 1..75: mol_type = other DNA
ccacatcggcgcataaagtgatgcccggtaaccagaaagcgcagcagaagcctacaggggcgacaccgtggcggc

SEQ ID NO: 715562 - DNA, 75 bp, synthetic construct
  source 1..75: mol_type = other DNA
gctggcgcaggtttatcgtcagcttggcgacaaaccggcagatgtacgcgacgtcgcgcaactgaaaggcttcta

SEQ ID NO: 715563 - DNA, 75 bp, synthetic construct
  source 1..75: mol_type = other DNA
tgatgaaggcgcaaccggacgcggcgcgaagccgaaagccggcctggtcggtttctccgtatccaacctgcgtat

SEQ ID NO: 715564 - DNA, 75 bp, synthetic construct
  source 1..75: mol_type = other DNA
gtaacacctccgatcgctttgaagcgcgtttcagcctggtagaagtgacccaaagcccgtcgctgctgttgcagg

SEQ ID NO: 715565 - DNA, 75 bp, synthetic construct
  source 1..75: mol_type = other DNA
gtgacatccctgagtgatgtgcgggtgaatttccccggtgctgaggagcaggtgaaacgctggcagggtaatctg

SEQ ID NO: 715566 - DNA, 75 bp, synthetic construct
  source 1..75: mol_type = other DNA
atgaccattaacttccgtcgtagcgcactgcaattaagcgtggctgcgctgttctcttctgcttttatggctaac

SEQ ID NO: 715567 - DNA, 75 bp, synthetic construct
  source 1..75: mol_type = other DNA
cagccagaaggcgctggagtgggagatcctcaaaggcgtgatggtggtggaagagcgggaaaatatcgcccctgg

SEQ ID NO: 715568 - DNA, 75 bp, synthetic construct
  source 1..75: mol_type = other DNA
gttactgacaccaaagcctttaccgacgctattaaagcgggcgatatcgaaaaagcaaaagcgctgtacgcgcca

SEQ ID NO: 715569 - DNA, 75 bp, synthetic construct
  source 1..75: mol_type = other DNA
attacccgaatcaggtaagaaaaataaagtttacctgaaagaggtaaatttacctgaatcaggtaaaaaaagttt

SEQ ID NO: 715570 - DNA, 75 bp, synthetic construct
  source 1..75: mol_type = other DNA
ccggtctgctggaacagaaccgactttcaggtgcaaatcgtaacacactcattgcgggaggaattatggcaaaca

SEQ ID NO: 715571 - DNA, 75 bp, synthetic construct
  source 1..75: mol_type = other DNA
aatgcactgaaaggaccgattactgcgctggcggaagatctggcgcaacttcgcggtgtgctggggctggactaa

SEQ ID NO: 715572 - DNA, 75 bp, synthetic construct
  source 1..75: mol_type = other DNA
tgaccgtgaccgataagcagtgcgaaccgatgaccattacggttaacgccgggaaaacacagttcattattcaga

SEQ ID NO: 715573 - DNA, 75 bp, synthetic construct
  source 1..75: mol_type = other DNA
tggcattcatcgcatcagcttcctgattgacgctgatggcaaaatcgaacatgtctttgacgatttcaaaaccag

SEQ ID NO: 715574 - DNA, 75 bp, synthetic construct
  source 1..75: mol_type = other DNA
aaggttgaaatcccatgaagatatcaatcctgtcactggcgctgagcttgctgaaggagagccacaaacaaaggt

SEQ ID NO: 715575 - DNA, 75 bp, synthetic construct
  source 1..75: mol_type = other DNA
gcctttggcggtattgtggcgatgttttccggttatgcctacgcgcggcttggggcgagttaccccagtaacggc

SEQ ID NO: 715576 - DNA, 75 bp, synthetic construct
  source 1..75: mol_type = other DNA
tccactgaagttacaaaataaattcgctactattgtagagaaagcgcatgctattaaatttcgctatcagcaaag

SEQ ID NO: 715577 - DNA, 75 bp, synthetic construct
  source 1..75: mol_type = other DNA
gctgcttctgacaataacaagactcagagcaccgtctccgaagtcatgagtatcgtctccgctgttaacggtctc

SEQ ID NO: 715578 - DNA, 75 bp, synthetic construct
  source 1..75: mol_type = other DNA
cagggcagcagtgcgttgatgtggattattggcacactattactaagttttattgtggcaatggtaatgaaacgg

SEQ ID NO: 715579 - DNA, 75 bp, synthetic construct
  source 1..75: mol_type = other DNA
aatatcatggacaacatgggcagcgagcgcgagttgccgaaagtgttgaataaatccctgtggcggcagagcacc

SEQ ID NO: 715580 - DNA, 75 bp, synthetic construct
  source 1..75: mol_type = other DNA
tgttggggcaagcggcgttgctaatggaagcctcgacctgggtcgcttttgcttttggcggcattgtggcgatgt

SEQ ID NO: 715581 - DNA, 75 bp, synthetic construct
  source 1..75: mol_type = other DNA
gtgtcaatattgcttcaatgaaccttggtacttccttacagggtgttggtgtggggccgaatattatgaataaca

SEQ ID NO: 715582 - DNA, 75 bp, synthetic construct
  source 1..75: mol_type = other DNA
aaatggttctaagaaaaaataaaatggaaaagggtctttcacttattgaagcatcgatggtgctggctttgtctg

SEQ ID NO: 715583 - DNA, 75 bp, synthetic construct
  source 1..75: mol_type = other DNA
aatggagaagtgctggagaaaccgcgcgacgcagagcatgcggcgcagatgttgcgcaaattatcgggtcagacc

SEQ ID NO: 715584 - DNA, 75 bp, synthetic construct
  source 1..75: mol_type = other DNA
aagggtactgtatattcaggtacactgactccagctaatgcagctactctttgttctgatgtgactaacagtatt

SEQ ID NO: 715585 - DNA, 75 bp, synthetic construct
  source 1..75: mol_type = other DNA
gtgccaaaatcgtcatgtgtcaatattgcttcaatgaaccttggcacttccttacagggtgttggagtgggggta

SEQ ID NO: 715586 - DNA, 75 bp, synthetic construct
  source 1..75: mol_type = other DNA
atgaaaaagggttatcgttgattgaagcatccatggtgcttgctctttctgctattgttatttcaggtgttatgt

SEQ ID NO: 715587 - DNA, 75 bp, synthetic construct
  source 1..75: mol_type = other DNA
ccgaatcaggtaaacacaaaagacaaactaacaaaagacaatataaaaccttattcgtccgagaattctggcgaa

SEQ ID NO: 715588 - DNA, 75 bp, synthetic construct
  source 1..75: mol_type = other DNA
cgaagatccagaaacccgtttacaccccattatgctttcagttgcctggcatctgttgaatcttctgccattgca

SEQ ID NO: 715589 - DNA, 75 bp, synthetic construct
  source 1..75: mol_type = other DNA
atataattggtaatctaaaactagatctttcaacagaaaatgtgaaattatcaggtgatctttcatataacagtg

SEQ ID NO: 715590 - DNA, 75 bp, synthetic construct
  source 1..75: mol_type = other DNA
tcttcacatggaaaatgagagaagagacgcctggaaaaaagttgagcactatctagatactgctgcaagacgtaa

SEQ ID NO: 715591 - DNA, 75 bp, synthetic construct
  source 1..75: mol_type = other DNA
cccggaaaatgtgccgatgaatctgcgcaaaattatctcgaaggcgatccatcgctcttccaaacccgatcttgc

SEQ ID NO: 715592 - DNA, 75 bp, synthetic construct
  source 1..75: mol_type = other DNA
gtgcgtttaatgccggtgctgcgcttgcgtgatgcccgttttatgcgccgtattcgtagtggcacggtgccaaat

SEQ ID NO: 715593 - DNA, 75 bp, synthetic construct
  source 1..75: mol_type = other DNA
tcaaggtcattgagtttgcccagtccgggctaaagccactggttaaatttgcccggcgaatggggattgaatggc

SEQ ID NO: 715594 - DNA, 75 bp, synthetic construct
  source 1..75: mol_type = other DNA
atcgtgcataataaactgcccagtgtatcagaaattctcttgaaggaaaaagaatatagacttccatcaatatat

SEQ ID NO: 715595 - DNA, 75 bp, synthetic construct
  source 1..75: mol_type = other DNA
atttaaatctgacgagccaacaaactgtggctgtttatcaagctgaaattgaatcaaaaatggcgctgatccaaa

SEQ ID NO: 715596 - DNA, 75 bp, synthetic construct
  source 1..75: mol_type = other DNA
atatacggtgtggagtggccatcaggtcacaatgtccgctgggtgcgtgatgagatgagcagtctggtgctgctg

SEQ ID NO: 715597 - DNA, 75 bp, synthetic construct
  source 1..75: mol_type = other DNA
tacatcagtaaaacatttatcttcagttgaaaaattgagaaagttgaatatggatattcaacttggtgatggagt

SEQ ID NO: 715598 - DNA, 75 bp, synthetic construct
  source 1..75: mol_type = other DNA
tgataaccacagaacatcacagttttgtagtatccgtcttcgatgatgtggttcgtgttacagatcctaacttcg

SEQ ID NO: 715599 - DNA, 75 bp, synthetic construct
  source 1..75: mol_type = other DNA
gttgttatacaaaatgctgctgtttcagcaccatcaaaagagttagtcgatattgtatccaaatatgcatcaacg

SEQ ID NO: 715600 - DNA, 75 bp, synthetic construct
  source 1..75: mol_type = other DNA
agcatgtttgccgactggtacgtgagtcctctcgcgttgccgcctggcgtctggggccgagtggcttgagtaccg

SEQ ID NO: 715601 - DNA, 75 bp, synthetic construct
  source 1..75: mol_type = other DNA
caggccggcgtgacagccggaaaatcaaaactcgacctgacgaacactgactggatttatggggtggatttatga

SEQ ID NO: 715602 - DNA, 75 bp, synthetic construct
  source 1..75: mol_type = other DNA
tgtcgataaatgggcaatacgaactacggcaatgattgccagagaacttggcaaacagaaaaacaaggctgcctg

SEQ ID NO: 715603 - DNA, 75 bp, synthetic construct
  source 1..75: mol_type = other DNA
acaaaagacaatataaaacctttttcgtccgagaattctggcgaatcctctgacctgccagaaaacgatcttcct

SEQ ID NO: 715604 - DNA, 75 bp, synthetic construct
  source 1..75: mol_type = other DNA
cattcgttttaaccgtccgtcatcgctgtttgctcgctgctggctgctggtggaaggggaaacggaaacctgggt

SEQ ID NO: 715605 - DNA, 75 bp, synthetic construct
  source 1..75: mol_type = other DNA
atcgttcctccaagcccgatcttgccattgaagtggctatggaagccgggcgccgcggtgtggaatctgtcccca

SEQ ID NO: 715606 - DNA, 75 bp, synthetic construct
  source 1..75: mol_type = other DNA
cgctgctgaaaaaatgttctcacgcgtgctgtggctggcgcgcggtcgcgcggattaaccgcgaaacatcgtggc

SEQ ID NO: 715607 - DNA, 75 bp, synthetic construct
  source 1..75: mol_type = other DNA
agttatacgtgaaaggctatcctcgctaagggaaaattacgatatggaaaaagccatttacatttacaatcagag

SEQ ID NO: 715608 - DNA, 75 bp, synthetic construct
  source 1..75: mol_type = other DNA
tactttaaactgaacgctaatgatgaattcatggggaaagatgaaaaaacagttatacgtgaaaggctatcctcg

SEQ ID NO: 715609 - DNA, 75 bp, synthetic construct
  source 1..75: mol_type = other DNA
cgccgtggtgtggagtccgtaccggcattgctgaaaaaaatgttctcgcgcgtgctgtggctggcgcgcggtcgg

SEQ ID NO: 715610 - DNA, 75 bp, synthetic construct
  source 1..75: mol_type = other DNA
atgcgcgttatcctgcacttccatttatgtctcactttatatcaaatcatgaaattgattgggtcttggatgatg

SEQ ID NO: 715611 - DNA, 75 bp, synthetic construct
  source 1..75: mol_type = other DNA
tcgctgagcggtatgggggccattgagaatgccggggatttggagcatgaggtgctgacgccggaaaagtcctga

SEQ ID NO: 715612 - DNA, 75 bp, synthetic construct
  source 1..75: mol_type = other DNA
gcgcatccgttattacaacatggtcgtatgatgccctgggatgcgggggcggagatggttctgtcgctgagcggt

SEQ ID NO: 715613 - DNA, 75 bp, synthetic construct
  source 1..75: mol_type = other DNA
accggcgtcgatcaccagcttcgtggtgccgaccggttactcttttaaccttgatggttcgacgctgtatcaaag

SEQ ID NO: 715614 - DNA, 75 bp, synthetic construct
  source 1..75: mol_type = other DNA
tagtacagggcgctataaatattactcttgtgaagatgtattaattgagttagcaaagcgtttacgggatggccc

SEQ ID NO: 715615 - DNA, 75 bp, synthetic construct
  source 1..75: mol_type = other DNA
tcttgtgaagatgtattaattgagttagcaaagcgtatacaagatggttctaagagattattagtccttgtagat

SEQ ID NO: 715616 - DNA, 75 bp, synthetic construct
  source 1..75: mol_type = other DNA
ccatgagccttgcgaatatctcccggtaatgatgtccggagacgcaatcatggtcacttcatctttggttcatta

SEQ ID NO: 715617 - DNA, 75 bp, synthetic construct
  source 1..75: mol_type = other DNA
tgattttatttcttttctttttcactcaaaggaacgtatttatcgatatattcgcttgtttatatcagggaaaat

SEQ ID NO: 715618 - DNA, 75 bp, synthetic construct
  source 1..75: mol_type = other DNA
tggtggcagatgatcgccagtatctgaacttttccagtaatgattacctcggtttaagtcatcacccgcaaatta

SEQ ID NO: 715619 - DNA, 75 bp, synthetic construct
  source 1..75: mol_type = other DNA
cttctggttcggcgaccttcatggaaggatgcaaagacagtttaccgattgttattagttatattccggtggcct

SEQ ID NO: 715620 - DNA, 75 bp, synthetic construct
  source 1..75: mol_type = other DNA
cacaaaattttgccccggccacactcgacgaagcgcctgaagaagaggggcaagttgaagcggtaatggatgcag

SEQ ID NO: 715621 - DNA, 75 bp, synthetic construct
  source 1..75: mol_type = other DNA
ctgaggaactcatccaaggtctgtcggacaccgtagctcatcagattctcgggcaatcggtagtctttcccgcgt

SEQ ID NO: 715622 - DNA, 75 bp, synthetic construct
  source 1..75: mol_type = other DNA
gaaagatgagctgattctggcgtactccactgccagctctgaaagcgtactgccgcgaattattgagaagatgga

SEQ ID NO: 715623 - DNA, 75 bp, synthetic construct
  source 1..75: mol_type = other DNA
tttcttgaagctctgaaagccagcggcaagcggcgaattttgctcactaacgcccatccgcacaatctggcggta

SEQ ID NO: 715624 - DNA, 75 bp, synthetic construct
  source 1..75: mol_type = other DNA
atggaatatatgcgccagcaatatcacgacgtgcagcatacgctaaactggtactgtcttgattactggagtgag

SEQ ID NO: 715625 - DNA, 75 bp, synthetic construct
  source 1..75: mol_type = other DNA
acgtagacaccgttctgctggatatggacggcacactactcgacctcgccttcgataattatttctggcaaaaac

SEQ ID NO: 715626 - DNA, 75 bp, synthetic construct
  source 1..75: mol_type = other DNA
gaccaccacgcgctatacgctgccggagctgttagacaattcccagcagttgatccatgaagcgcggaaactgac

SEQ ID NO: 715627 - DNA, 75 bp, synthetic construct
  source 1..75: mol_type = other DNA
gctggcgctggcagttgtaacggtcgcaggtatgctcgctgcgccatgggttatcctggcgacttcgcccggttg

SEQ ID NO: 715628 - DNA, 75 bp, synthetic construct
  source 1..75: mol_type = other DNA
cgtcactgaatgactaccgtcgcctgatcccctcgctaatgttaaggagacgccatgaaagagaaacctgctgtt

SEQ ID NO: 715629 - DNA, 75 bp, synthetic construct
  source 1..75: mol_type = other DNA
gctgtatcaaagtattgccgccatctttattgctcagttgtatggcatcgacctgtctatctggcaggaaatcat

SEQ ID NO: 715630 - DNA, 75 bp, synthetic construct
  source 1..75: mol_type = other DNA
gttggtgatgccaaacagctcgggcgtattggcgcgaaaaccattatctacttcgaggtgatcaccaccgtcgcc

SEQ ID NO: 715631 - DNA, 75 bp, synthetic construct
  source 1..75: mol_type = other DNA
ccaagtgggaacacaaatttgaccgcaaaaaggcgatggcctacgaacgtgaaatgctgggcaaatttgataaga

SEQ ID NO: 715632 - DNA, 75 bp, synthetic construct
  source 1..75: mol_type = other DNA
tctgaacccctgaccatactggcgcaggtgattgcctaccgggaattaatgctgcgccagcgaatcaatgagggg

SEQ ID NO: 715633 - DNA, 75 bp, synthetic construct
  source 1..75: mol_type = other DNA
agccagctactaaagattacctttccctatatcttgctgatctccctggcgtcgctggtgggagcgattctgaat

SEQ ID NO: 715634 - DNA, 75 bp, synthetic construct
  source 1..75: mol_type = other DNA
atgcccgccgttgacctttcacagttaccggaacccgccatcatcgcggagcctgactttgaagcaattctggcg

SEQ ID NO: 715635 - DNA, 75 bp, synthetic construct
  source 1..75: mol_type = other DNA
cggcgctcgatgcgcggcgtgctgctgatgccctgcgtcgccgttatccggtggcgcaaggggcaggacgctggc

SEQ ID NO: 715636 - DNA, 75 bp, synthetic construct
  source 1..75: mol_type = other DNA
caacttcagaaaggagccagccaggtagcgataaaggttgcacaggacggcggtgatgcgcagggagcagtgacg

SEQ ID NO: 715637 - DNA, 75 bp, synthetic construct
  source 1..75: mol_type = other DNA
gccgtgactacaagctggtgctgaagaacggtcgttttgttgccggggctttggcgctgggatttgtcagcctgc

SEQ ID NO: 715638 - DNA, 75 bp, synthetic construct
  source 1..75: mol_type = other DNA
caggattggcagtatagtaccggcacagcaggaagggtacgtacttattggccttgatctcacatacagcgatgg

SEQ ID NO: 715639 - DNA, 75 bp, synthetic construct
  source 1..75: mol_type = other DNA
ggatacgccgcaattcaggaatccttcgaagaggccgtttgtatcaagatcaccgcgctaatggcgaacgtggcg

SEQ ID NO: 715640 - DNA, 75 bp, synthetic construct
  source 1..75: mol_type = other DNA
atggtgatggtcgtcaatctggtgttcgataaccatcccttcacctacgctggcaagatggcgaacataaggatg

SEQ ID NO: 715641 - DNA, 75 bp, synthetic construct
  source 1..75: mol_type = other DNA
ttgtcagagggtaatccgctgaggctgatggcgaatgatggctatgtagcgaaagcgggtcaggccgtgaacaac

SEQ ID NO: 715642 - DNA, 75 bp, synthetic construct
  source 1..75: mol_type = other DNA
ctcgttgtttccgagcaaaccatggcaacaaatgaggcgttgcagccgttttttaacagcgatgaactgtttcgc

SEQ ID NO: 715643 - DNA, 75 bp, synthetic construct
  source 1..75: mol_type = other DNA
tgctgcgccgtgctgttgaaggtactccgttcgagtgcctgaaagatgcgtttgttggtccgaccctgattgcat

SEQ ID NO: 715644 - DNA, 75 bp, synthetic construct
  source 1..75: mol_type = other DNA
accatgaaagaagcttcggctggaaaactggttcgtactctggctgctgtacgcgatgcgaaagaagctgcttaa

SEQ ID NO: 715645 - DNA, 75 bp, synthetic construct
  source 1..75: mol_type = other DNA
ttgccggattcagcaccgttgaccaggcaatgacccgtcgtaaggaacttggtttgcgagaagcacagcttgctc

SEQ ID NO: 715646 - DNA, 75 bp, synthetic construct
  source 1..75: mol_type = other DNA
tatggcgcatttcaaaataccaaaacttcaatcgctaaaattgcccgagtacatggactttgtggcttcccgtcc

SEQ ID NO: 715647 - DNA, 75 bp, synthetic construct
  source 1..75: mol_type = other DNA
taccggatgcgtggttttaatgagctgaaagaaacgctgcacaataatcgcgttaactggatactggatgtcgcc

SEQ ID NO: 715648 - DNA, 75 bp, synthetic construct
  source 1..75: mol_type = other DNA
ctatcaagaccctgattccgggctatctgtctggcctgccgtctaccagccgcgaggcaatggagttactggaag

SEQ ID NO: 715649 - DNA, 75 bp, synthetic construct
  source 1..75: mol_type = other DNA
cgaaaaattacggttatttcatgccgaagcagcagggactttctctgaaagagcttcagaagggggccagcaacg

SEQ ID NO: 715650 - DNA, 75 bp, synthetic construct
  source 1..75: mol_type = other DNA
aaacttcaggaagtagccagcaacgtagcggcggatgcgatcaagaatggccgtgatgctcaggctgaggtggat

SEQ ID NO: 715651 - DNA, 75 bp, synthetic construct
  source 1..75: mol_type = other DNA
agcctcagaatcagaaattgctggaaaacgggtatgcgaattttctccgtattcaaaaggctaagagtgaacagg

SEQ ID NO: 715652 - DNA, 75 bp, synthetic construct
  source 1..75: mol_type = other DNA
ttacgtgcgtcactggcggtcattcgccgtgatgagggggatgcacggcgcgaaaaactggtgtcactcattgcg

SEQ ID NO: 715653 - DNA, 75 bp, synthetic construct
  source 1..75: mol_type = other DNA
tcatccggcgctgcaacgctggtatgcctcaatccacgaaacgcaaaacgatcgtgaagtggtcagtttgtatgc

SEQ ID NO: 715654 - DNA, 75 bp, synthetic construct
  source 1..75: mol_type = other DNA
ggagcagcagcgactccggatgcagaaatacaaccagcgacggcttgagtataacgatatgctggcgcgcgatca

SEQ ID NO: 715655 - DNA, 75 bp, synthetic construct
  source 1..75: mol_type = other DNA
aaatataaccagcgacggcttgagtataacgatatgctggcacgcgatcagtcggtgatggtggcgctggggaaa

SEQ ID NO: 715656 - DNA, 75 bp, synthetic construct
  source 1..75: mol_type = other DNA
gctacagcgccgcgaacaggtcaaagctgaacgccggacatatggtgagaacctccgcagtgctacccattccgc

SEQ ID NO: 715657 - DNA, 75 bp, synthetic construct
  source 1..75: mol_type = other DNA
tcaacaacaacgactggaaactgtctgtcaccgacatcaatctctatgaaaatactgtgcgtctggatgggcagc

SEQ ID NO: 715658 - DNA, 75 bp, synthetic construct
  source 1..75: mol_type = other DNA
tagcgataaaggttgcacaggacggcggtgatgcgcagggagcagtgacgcaatattatgcttcgatgggactgc

SEQ ID NO: 715659 - DNA, 75 bp, synthetic construct
  source 1..75: mol_type = other DNA
ctctggcgattactgcgtctgatggcagttgttattgcaggggcagccgcgtactttgccgcgctggcggtgctg

SEQ ID NO: 715660 - DNA, 75 bp, synthetic construct
  source 1..75: mol_type = other DNA
gcgattgatgcaggtgatcatgatgctgcgactcacctgttcggaaaattatcggatgccaatcctcttaaaata

SEQ ID NO: 715661 - DNA, 75 bp, synthetic construct
  source 1..75: mol_type = other DNA
atgggcaaaaccgaccgcagcgccaacccttcgccgggcaacaaaaaaggcggtctcgcgaacgtggtaaagaaa

SEQ ID NO: 715662 - DNA, 75 bp, synthetic construct
  source 1..75: mol_type = other DNA
gtacgccgtacggcctgatggcggtacccgtcattaaaatggcgacccgcaccgggcaggcgaaccgctggtttg

SEQ ID NO: 715663 - DNA, 75 bp, synthetic construct
  source 1..75: mol_type = other DNA
cagaacaacgggcggcttcgctggcggcgacgctggcttgccgacctgatgagggaccggtgtggatcttcggtt

SEQ ID NO: 715664 - DNA, 75 bp, synthetic construct
  source 1..75: mol_type = other DNA
tgcggcgtgaacgccttatccgacctacggttctacccctgcgtaggcctgataagacgcgccagcgtcgcatca

SEQ ID NO: 715665 - DNA, 75 bp, synthetic construct
  source 1..75: mol_type = other DNA
atgggcaaaaccgaccgcagcgccaacccttcgccgggcaacaaaaagggcggtctcgcaaacgtggtaaagaaa

SEQ ID NO: 715666 - DNA, 75 bp, synthetic construct
  source 1..75: mol_type = other DNA
atgggcaaaaccgaccgcagcgccaacccttcgccgggcaacaaaaatggcggtctcgctaacgtggtaaagaaa

SEQ ID NO: 715667 - DNA, 75 bp, synthetic construct
  source 1..75: mol_type = other DNA
ttttccattggggtttaccctgcggtttcacttgctgatgccagacaacgccgggacgaggctaagaggctgtta

SEQ ID NO: 715668 - DNA, 75 bp, synthetic construct
  source 1..75: mol_type = other DNA
tggtcagaaatcgacttcaacagtaagttatgggtaataccagaaaagcgtgaagcgattgagcgcgtcaaatat

SEQ ID NO: 715669 - DNA, 75 bp, synthetic construct
  source 1..75: mol_type = other DNA
tctttcagcgtagtcgctaaagcttggttctccacgaaaacaaaatggtctaaagattatggtgattccgtatgg

SEQ ID NO: 715670 - DNA, 75 bp, synthetic construct
  source 1..75: mol_type = other DNA
tcgctggtgccgacgaacattgtggcgtcgatggcgaaaggcgaaatgctgccgatcatcttcttctcggtgctg

SEQ ID NO: 715671 - DNA, 75 bp, synthetic construct
  source 1..75: mol_type = other DNA
tccacgcgtggtgcaaaaatgaaacgccagcactttgttcccctttgcaggcaggctattaagatactgaaagag

SEQ ID NO: 715672 - DNA, 75 bp, synthetic construct
  source 1..75: mol_type = other DNA
gcaggctattaagatactgaaagagatccgtcagcttacctatgaagaaggtaatgatgcgggattagtttttac

SEQ ID NO: 715673 - DNA, 75 bp, synthetic construct
  source 1..75: mol_type = other DNA
cgtcgtttccatcggcattggggcaatggtgggggcggggatcttcgcgctgctggggcaggctgcgttgctaat

SEQ ID NO: 715674 - DNA, 75 bp, synthetic construct
  source 1..75: mol_type = other DNA
attatgcagaaactgtccacgctgcagacggcaacaaaacgggcgctgtatgaggccattctgtatcccggcgtg

SEQ ID NO: 715675 - DNA, 75 bp, synthetic construct
  source 1..75: mol_type = other DNA
tgatgcactggatggtgagcttgcaaaggtggtgcagcgtttctctgacgaatacaacgttgcgctgattccggt

SEQ ID NO: 715676 - DNA, 75 bp, synthetic construct
  source 1..75: mol_type = other DNA
ctctcatctgccggcgctgtatctggtagagccgggtgcggagcgttatcagcccctggcgtacgggtttatgac

SEQ ID NO: 715677 - DNA, 75 bp, synthetic construct
  source 1..75: mol_type = other DNA
accttgccaacgggattttgtggctgctgctgatggttatctttttaaaagataaacagatgggaaattcgcacg

SEQ ID NO: 715678 - DNA, 75 bp, synthetic construct
  source 1..75: mol_type = other DNA
atgaaagaaaaaatgatgaaagaaatgaagatgaataaagcattactgccactgttactctgctgctttattttt

SEQ ID NO: 715679 - DNA, 75 bp, synthetic construct
  source 1..75: mol_type = other DNA
cggggacaggacccgattgatggccagctggcgcaggtgattaagggattccgtgaaacctacgggctgagcgtg

SEQ ID NO: 715680 - DNA, 75 bp, synthetic construct
  source 1..75: mol_type = other DNA
cgctacgaagtgaccattgaccgcgaacaagccatcagtaatttgaagcaaatattgccggaagttacggctgaa

SEQ ID NO: 715681 - DNA, 75 bp, synthetic construct
  source 1..75: mol_type = other DNA
ccaaacatgaatggattagatgtgacaaggcatataaaccaattatttcaaagaaaaatataataaagctcaaga

SEQ ID NO: 715682 - DNA, 75 bp, synthetic construct
  source 1..75: mol_type = other DNA
cgttggctttatctacagtctctggtcccagggcagccgtgcgctgatatggattattggcgcactcttactcag

SEQ ID NO: 715683 - DNA, 75 bp, synthetic construct
  source 1..75: mol_type = other DNA
aaggtggtgcagcgtttctctgaggaatatggcatagccctgataccggtcagtatggacggtgcccgcagtgaa

SEQ ID NO: 715684 - DNA, 75 bp, synthetic construct
  source 1..75: mol_type = other DNA
ttgtctggctgaggatgaaaccatctgacgctatcagcaccttcggcagcacgctgaaagaactggctctgccta

SEQ ID NO: 715685 - DNA, 75 bp, synthetic construct
  source 1..75: mol_type = other DNA
ggcaacggcagctcatcagatcggggtctccgatattctgatggttgccgccaacaccacagggggagtaaccgg

SEQ ID NO: 715686 - DNA, 75 bp, synthetic construct
  source 1..75: mol_type = other DNA
ccgcttcgaagggaaacaaaaactcttctctattggtgtttaccctgctgtttctctttctgacgcaagacaacg

SEQ ID NO: 715687 - DNA, 75 bp, synthetic construct
  source 1..75: mol_type = other DNA
tcggttcgatcagcgatgaaaagttatatgataatttactggatgaaccgccccggttttcctggagagtgtttt

SEQ ID NO: 715688 - DNA, 75 bp, synthetic construct
  source 1..75: mol_type = other DNA
ttgagcattcaggctcctggtatcgctgatttccaggctgagactcagggccgcagtgagaaagcaatcattctg

SEQ ID NO: 715689 - DNA, 75 bp, synthetic construct
  source 1..75: mol_type = other DNA
tcggttcgatcagcgatgaaaagttatatgataatttactggaagaattcagaccgtggatcgatgaaacaaaaa

SEQ ID NO: 715690 - DNA, 75 bp, synthetic construct
  source 1..75: mol_type = other DNA
acgtttctcgcgatctgtttgccgccctgaatactccgttcgaacagcagtgggcgaaagataatggcggcgacg

SEQ ID NO: 715691 - DNA, 75 bp, synthetic construct
  source 1..75: mol_type = other DNA
aagacaagtttggctcctggccggaagtgatgaaaactcacttcaccagtggtggcgagttggacaagctgttag

SEQ ID NO: 715692 - DNA, 75 bp, synthetic construct
  source 1..75: mol_type = other DNA
gctgctggcgggccatgtacaggcaacggaactgctgaacagttcttatgacgtctcccgcgagctgtttgccgc

SEQ ID NO: 715693 - DNA, 75 bp, synthetic construct
  source 1..75: mol_type = other DNA
ttaattatgaaggcgccgagcccattgaatggattgataccgtcggtcggttagtggattactccatgtctgatc

SEQ ID NO: 715694 - DNA, 75 bp, synthetic construct
  source 1..75: mol_type = other DNA
gggcgtgacggaattcagcggcacgctgtatgttcctgaagtttcctggcagtggcagccccgcgctgtgcggat

SEQ ID NO: 715695 - DNA, 75 bp, synthetic construct
  source 1..75: mol_type = other DNA
agtccggtatgtttccggctctgttttttctgacttcagccagtgtgctggcacaacccctgattattccgccgg

SEQ ID NO: 715696 - DNA, 75 bp, synthetic construct
  source 1..75: mol_type = other DNA
ttgatgaggcacactcagccattaacaaccctatgattaaccttctggcgcagggtcgtgcagcgaaaattgcac

SEQ ID NO: 715697 - DNA, 75 bp, synthetic construct
  source 1..75: mol_type = other DNA
gttctgttcacctcaatattgctttttttgctgtgcctttatcgttgcaaaacagcagcgccatttttgatggct

SEQ ID NO: 715698 - DNA, 75 bp, synthetic construct
  source 1..75: mol_type = other DNA
actgagcatcagcatgctgcatttgggccatgtcattgtggttattgacccgaagaatgacgctgagtggcgaca

SEQ ID NO: 715699 - DNA, 75 bp, synthetic construct
  source 1..75: mol_type = other DNA
gttacacctaccttgcagcatggggtgcagcggataaagccgacggtggcgataaagccaaaaccgaacagttta

SEQ ID NO: 715700 - DNA, 75 bp, synthetic construct
  source 1..75: mol_type = other DNA
atggacaaaaacatcatcaatctagagtttactctagaagagcaacttatcattattgtcgataagtatatctca

SEQ ID NO: 715701 - DNA, 75 bp, synthetic construct
  source 1..75: mol_type = other DNA
aagcagaggaaatctatgctactgtcagagcacaatatgaaatgaaagtaattgagaaagagttaacccatgaag

SEQ ID NO: 715702 - DNA, 75 bp, synthetic construct
  source 1..75: mol_type = other DNA
aatgactatgtttagctcggtatacaaaagtctgacaagcaatcttctacaacgattaaataacaaagaaggagt

SEQ ID NO: 715703 - DNA, 75 bp, synthetic construct
  source 1..75: mol_type = other DNA
aacagttcgtcagttagacaaactgaattcgttgctggatggtgcgctgaaggccggtcttaacgaaattcgttc

SEQ ID NO: 715704 - DNA, 75 bp, synthetic construct
  source 1..75: mol_type = other DNA
tcgtgacacttgaagaacagcttgttgtcatcatagataaatacatatcaaaacgatatcagccacatgataaaa

SEQ ID NO: 715705 - DNA, 75 bp, synthetic construct
  source 1..75: mol_type = other DNA
catgacgatgtttagttcagtatataaatgccttacaagtaatctgttacagcgattaaacaataaagaagctgt

SEQ ID NO: 715706 - DNA, 75 bp, synthetic construct
  source 1..75: mol_type = other DNA
ggaaacgatagagcgctttattgttactccgggagccattgacccggcaccgccgcacccgactgtcggtggtca

SEQ ID NO: 715707 - DNA, 75 bp, synthetic construct
  source 1..75: mol_type = other DNA
atgccgcacatgcgcgtacaagccgctatctaaccgaaaacacgaaagagcgctaccaccagtgccagaacatca

SEQ ID NO: 715708 - DNA, 75 bp, synthetic construct
  source 1..75: mol_type = other DNA
gtacggaaaaagccgccaaagcctatctgaactggctctatagcccgcaggcgcaaaccatcatcaccgactatt

SEQ ID NO: 715709 - DNA, 75 bp, synthetic construct
  source 1..75: mol_type = other DNA
atggacaaaaacatcatcaattcagagtttactctggaagagcaacttatcattataattgataaatatatctca

SEQ ID NO: 715710 - DNA, 75 bp, synthetic construct
  source 1..75: mol_type = other DNA
atggacaaaaacattatctatccagagtttactctggaagagcaacttatcattatcgtcgataaatatatctca

SEQ ID NO: 715711 - DNA, 75 bp, synthetic construct
  source 1..75: mol_type = other DNA
ccacaggatgcgcgtaatcacggctatacggtgctggatattcagcaagacgggccgaccattcgttatttaatt

SEQ ID NO: 715712 - DNA, 75 bp, synthetic construct
  source 1..75: mol_type = other DNA
gatgatattcttaaacgcttttcaagagttgcaagcacctggtctgacacaattgaaaattacgcgacatggatc

SEQ ID NO: 715713 - DNA, 75 bp, synthetic construct
  source 1..75: mol_type = other DNA
atatggcgaatagtttggctaacggcctggctgcacgcaatgcagccaagcatgactcaaaagtcagagcagcaa

SEQ ID NO: 715714 - DNA, 75 bp, synthetic construct
  source 1..75: mol_type = other DNA
gattatgccaattggttattttgggggctagtcctaataagcatggcatggaattttggcatgatcgctatgaaa

SEQ ID NO: 715715 - DNA, 75 bp, synthetic construct
  source 1..75: mol_type = other DNA
ctgaaatagttcgcttttttgccgtcattggttttttttattatattttaatcaacggcccatccatatcgcaat

SEQ ID NO: 715716 - DNA, 75 bp, synthetic construct
  source 1..75: mol_type = other DNA
gccattacattcttcaaaacagttttaggaattgccctgcaactgttcaccatggttctaattgttggtattgga

SEQ ID NO: 715717 - DNA, 75 bp, synthetic construct
  source 1..75: mol_type = other DNA
attatcaaaatcattctcaccttcgggcatagtagatatagggtttgatattgtttcgagagtcgtagaccaatc

SEQ ID NO: 715718 - DNA, 75 bp, synthetic construct
  source 1..75: mol_type = other DNA
ttaaatcactcaattttgacgtgactttaccgcttaatgtcgtcactgaaatatcaaagcaaattaatttatctg

SEQ ID NO: 715719 - DNA, 75 bp, synthetic construct
  source 1..75: mol_type = other DNA
agcggtgcgccaatttatcatccagtataacattgcaatgcagaagcagcttgctgcacaccctgagttagcaaa

SEQ ID NO: 715720 - DNA, 75 bp, synthetic construct
  source 1..75: mol_type = other DNA
agcaatggcccaaagaggcctgattacgaaggcgcggtaatagcatggaaccggagagcaggagatgaagaaact

SEQ ID NO: 715721 - DNA, 75 bp, synthetic construct
  source 1..75: mol_type = other DNA
accagatccgtaaacaaacagctgctcgtcgtgaaagcagcgaacatgatgaatttgacggtgatagtttaactg

SEQ ID NO: 715722 - DNA, 75 bp, synthetic construct
  source 1..75: mol_type = other DNA
atgctcgcagatatcagatattgggaaaacgatgccacaaataaacattatgcaattgcccattttaatgtatgg

SEQ ID NO: 715723 - DNA, 75 bp, synthetic construct
  source 1..75: mol_type = other DNA
aaagcaggctgataaacaaatcagcgggatgatgacattaggtcagatgtttcagttaatcacgattgacaacaa

SEQ ID NO: 715724 - DNA, 75 bp, synthetic construct
  source 1..75: mol_type = other DNA
ctgctgagtaccagaaaatgaagcgaagtagcaattcttctcgtgtccaacaaactattggaggggagttggcga

SEQ ID NO: 715725 - DNA, 75 bp, synthetic construct
  source 1..75: mol_type = other DNA
gccttcaaatggataaggatcatttaccgctgctggaagaccaagacccagtacgatgaagcgaagtatttgctg

SEQ ID NO: 715726 - DNA, 75 bp, synthetic construct
  source 1..75: mol_type = other DNA
cagagtttctcaatatggattgaatcttatcaaagaacaacaagcaacctcttctgatccagccattacaggagc

SEQ ID NO: 715727 - DNA, 75 bp, synthetic construct
  source 1..75: mol_type = other DNA
tacaaaaaaacattgtcgcatctatcggcaaaatgaaaattgaggatgtacgcccgaaacatatcgactatgttt

SEQ ID NO: 715728 - DNA, 75 bp, synthetic construct
  source 1..75: mol_type = other DNA
tggtggtgaacatatggacagcaaaacggaagctgaatggccgcagtctgaccacgcagaggagcacgaacagac

SEQ ID NO: 715729 - DNA, 75 bp, synthetic construct
  source 1..75: mol_type = other DNA
ggcagtgtttgactgtgaggtccgtcactggtacagcgagccgaagaacggaatcagaggctatgactgttatga

SEQ ID NO: 715730 - DNA, 75 bp, synthetic construct
  source 1..75: mol_type = other DNA
ttgaaattaccggtaaatcggtctgtcttgacgtactgattcagtggattgaaggtggtgatgtgccgcgatacc

SEQ ID NO: 715731 - DNA, 75 bp, synthetic construct
  source 1..75: mol_type = other DNA
caattgttctactagtgctaactaatagattaccacagctcttatcaggaattgttggtggtgcatccttacacg

SEQ ID NO: 715732 - DNA, 75 bp, synthetic construct
  source 1..75: mol_type = other DNA
gattatgctaattggctattttggggattagttctaataagtatggtatggacttttggcatgatcgctatgaaa

SEQ ID NO: 715733 - DNA, 75 bp, synthetic construct
  source 1..75: mol_type = other DNA
ttttaggcataatttttttgttttctgtgaatgcttacgctggtcaattagatagtagcggattacttgatacgt

SEQ ID NO: 715734 - DNA, 75 bp, synthetic construct
  source 1..75: mol_type = other DNA
tcgcgagttgtgctgattggttcgtatactgatttctctcttgcaaaagcaagagaggtcgccagagaactggca

SEQ ID NO: 715735 - DNA, 75 bp, synthetic construct
  source 1..75: mol_type = other DNA
aggaataccgttcactttttggtcttgccagtttgcgttttcagggtgaccaacatttgctggatattgccttct

SEQ ID NO: 715736 - DNA, 75 bp, synthetic construct
  source 1..75: mol_type = other DNA
gcaggttaaaccattgttcgcttttggtaattaatcccggaaataataacgataaacaattttcattgttgcttg

SEQ ID NO: 715737 - DNA, 75 bp, synthetic construct
  source 1..75: mol_type = other DNA
ccgaaaaatggaaatcctgctgggaacgctggtgacaatcgatccggtacgggcagcggtattgtgtgatacgca

SEQ ID NO: 715738 - DNA, 75 bp, synthetic construct
  source 1..75: mol_type = other DNA
taccttgaagccgcaggcagtgaagaacgtatcgatcaccgttctctcagaactcaatgtgctgatgcccttgct

SEQ ID NO: 715739 - DNA, 75 bp, synthetic construct
  source 1..75: mol_type = other DNA
gcaagaagcaggagtctatggtaacaaatcagatattaacaagactgttcgtttcccaaatcgttttgagcaaga

SEQ ID NO: 715740 - DNA, 75 bp, synthetic construct
  source 1..75: mol_type = other DNA
actgccaaaagaactttgttgataaaggaatgattgctgatttcgcattccacgatttagacagtaaaaatcccc

SEQ ID NO: 715741 - DNA, 75 bp, synthetic construct
  source 1..75: mol_type = other DNA
aatgtattgagaagaatagtttttcaaaaaaatttaaagcttgcataaataacataccccctgaagaaactcatc

SEQ ID NO: 715742 - DNA, 75 bp, synthetic construct
  source 1..75: mol_type = other DNA
tggatctcacaccacccaccctacctgaacaggcaaaaaggagtcgctatccgcagttgaggccgccgaggaatc

SEQ ID NO: 715743 - DNA, 75 bp, synthetic construct
  source 1..75: mol_type = other DNA
tgaaccgtgctcccctacatatcagaaagcagaccaagccacgacaaaatggtttgtttaaacgtttcacactac

SEQ ID NO: 715744 - DNA, 75 bp, synthetic construct
  source 1..75: mol_type = other DNA
aggaaatagctgataaatataaaaatgttgttcctcatggtaaaaaatcacgtcgtcagtgcagcaatgatgaag

SEQ ID NO: 715745 - DNA, 75 bp, synthetic construct
  source 1..75: mol_type = other DNA
tggaaatagcaaaccttagtgattgggcattaagtgatgagagaattgtttctcctcatgcttatgagtcagtta

SEQ ID NO: 715746 - DNA, 75 bp, synthetic construct
  source 1..75: mol_type = other DNA
ttgttataggtatatctttgcgtacaatagcacgaaggtacaaatgttcagatggaacaataagaaagaatatac

SEQ ID NO: 715747 - DNA, 75 bp, synthetic construct
  source 1..75: mol_type = other DNA
gatcatcaaattgaggaagcaaagaaggtctacaccacattcagtgagctaccactggaaatcgtggttgatgtc

SEQ ID NO: 715748 - DNA, 75 bp, synthetic construct
  source 1..75: mol_type = other DNA
tcagtattctggtatttatgatgggtggcctgaaccacgccaatccgattcgtatcgtgctggctggcgcggcgc

SEQ ID NO: 715749 - DNA, 75 bp, synthetic construct
  source 1..75: mol_type = other DNA
cttgggcggatcattggctatcccggcgagattagcgtaggaattatggctgcgataatcggcggaccgttcttt

SEQ ID NO: 715750 - DNA, 75 bp, synthetic construct
  source 1..75: mol_type = other DNA
ttcactgccatctcgcgaactgatcgctgattccgttgagtatatggtcaacgcccactgcgccgacgccatggt

SEQ ID NO: 715751 - DNA, 75 bp, synthetic construct
  source 1..75: mol_type = other DNA
atgacgctggatatcgcgatgggtggatcgactaacaccgtacttcacctgctggcggcggcgcaggaagcggaa

SEQ ID NO: 715752 - DNA, 75 bp, synthetic construct
  source 1..75: mol_type = other DNA
gcggcggtagcattggcctgattgaagatggtgacctgatcgccatcgacattccgaatcgtggcattcagttgc

SEQ ID NO: 715753 - DNA, 75 bp, synthetic construct
  source 1..75: mol_type = other DNA
ccggcgaaagtgtacgaaagccaggatgacgcggtagaagcgattcttggcggtaaagttgtcgctggcgatgtg

SEQ ID NO: 715754 - DNA, 75 bp, synthetic construct
  source 1..75: mol_type = other DNA
cgagtcacgcaaccagcttaagcggctgtatgcgcagcagaactggacggaactgctggagcaggccgacctgat

SEQ ID NO: 715755 - DNA, 75 bp, synthetic construct
  source 1..75: mol_type = other DNA
tactggagcaagcctgggccggtagccaggcttatgaaattgttcatctggaaaaccgtgaagaaatcaactggt

SEQ ID NO: 715756 - DNA, 75 bp, synthetic construct
  source 1..75: mol_type = other DNA
gtcagagccaacacgataacctcctgtattggacgtataccaatactgataaatatgagactgcctcttcaatga

SEQ ID NO: 715757 - DNA, 75 bp, synthetic construct
  source 1..75: mol_type = other DNA
tctgcgcgcttacgccagcctggcgaccagtgccgacaaaggtgcggtacgcgataaatcgaaactggggggtta

SEQ ID NO: 715758 - DNA, 75 bp, synthetic construct
  source 1..75: mol_type = other DNA
attccgaaccgtggcattcagttacaggtaagcgatgccgaactggcggcgcgtcgtgaagcgcaggaagcccgt

SEQ ID NO: 715759 - DNA, 75 bp, synthetic construct
  source 1..75: mol_type = other DNA
ggaaatcgacttcaccatgagtgatattgataagctctcccgtaaggttccgcagctgtgtaaagtcgctccaag

SEQ ID NO: 715760 - DNA, 75 bp, synthetic construct
  source 1..75: mol_type = other DNA
gcaggattgccgttgggatacgctggacgacgaccgcgcaaacggctgcatccgctcgctggagcacgcctacag

SEQ ID NO: 715761 - DNA, 75 bp, synthetic construct
  source 1..75: mol_type = other DNA
gcggaccgtaagcagctgttcctcaatgctggtaagcgcattgttgaattgaccaaacgttactacgagcaaaac

SEQ ID NO: 715762 - DNA, 75 bp, synthetic construct
  source 1..75: mol_type = other DNA
tcatcaagctcgatctggtggatgcgatgatccagggcgcagacccgaaagtctctgactcgcagagcgagcagg

SEQ ID NO: 715763 - DNA, 75 bp, synthetic construct
  source 1..75: mol_type = other DNA
atgagcttgtcggcggtatgtacggcgtggcccagggaacgctattttgtggcgagtccatgttcagccggatgg

SEQ ID NO: 715764 - DNA, 75 bp, synthetic construct
  source 1..75: mol_type = other DNA
gtgacggcgtttaacggccccgttgagatggtggcgcagtgcgaatatgttcccgcgtcgcaggtgaaatcatga

SEQ ID NO: 715765 - DNA, 75 bp, synthetic construct
  source 1..75: mol_type = other DNA
gattgcccgttttatcgatgcgatcctcgaaccggggaaagtgatcaactggaacggtaaatcggtaaaactgcc

SEQ ID NO: 715766 - DNA, 75 bp, synthetic construct
  source 1..75: mol_type = other DNA
gcgcatctggcaggacgcgctccagcaggccaaaggactcggcatccatttaccgacctttgatgagttgtggaa

SEQ ID NO: 715767 - DNA, 75 bp, synthetic construct
  source 1..75: mol_type = other DNA
cagtttcagccgtcggtttagcctggtggcatggtgcgaagcgtcgctggagatcctccacgttcatccgttgtc

SEQ ID NO: 715768 - DNA, 75 bp, synthetic construct
  source 1..75: mol_type = other DNA
gcctgtaatcacaaaggttttcgcggacggactgccatccatgagctgatcgtggtggatgccacattgcgtgat

SEQ ID NO: 715769 - DNA, 75 bp, synthetic construct
  source 1..75: mol_type = other DNA
accatcgacatcggtacttcgcagctggcgcaggcgaccagtgcgcacactacgctggtggaaattgagaagtac

SEQ ID NO: 715770 - DNA, 75 bp, synthetic construct
  source 1..75: mol_type = other DNA
aagaaaatggtggtcagctaattgcccgcgattcgcaatatagtgttggtcgcaaggtaaaatatgctaatggaa

SEQ ID NO: 715771 - DNA, 75 bp, synthetic construct
  source 1..75: mol_type = other DNA
tcaaccaggctatggcgggcttttcgtctgcagcgccagcaccgaaacccccacagcaggagcaggctctagcaa

SEQ ID NO: 715772 - DNA, 75 bp, synthetic construct
  source 1..75: mol_type = other DNA
gaatagtgcgattgcgcgagctattagcccattaacaagaaatgttggagactggctgaatggggggattcaaca

SEQ ID NO: 715773 - DNA, 75 bp, synthetic construct
  source 1..75: mol_type = other DNA
taactactgtgtaggctttgagcagttcttgccgtatttgctgggcgagaaagacggtcagccgaaagatgccgc

SEQ ID NO: 715774 - DNA, 75 bp, synthetic construct
  source 1..75: mol_type = other DNA
attaatcgctataaatgacagcggggtaggtaatttatttggaggtgcggctaccagccttgctggtacaagcct

SEQ ID NO: 715775 - DNA, 75 bp, synthetic construct
  source 1..75: mol_type = other DNA
ccaattgaggttgcacaacatgcccaggcagtcaaaaagccacaaaaaacaggcaatcaatcgcaaccgattaat

SEQ ID NO: 715776 - DNA, 75 bp, synthetic construct
  source 1..75: mol_type = other DNA
cttccgcctggggggaacgggtggtgctgcgactgctggacaaaaaccaggctcgcctgacgctggagcgtctgg

SEQ ID NO: 715777 - DNA, 75 bp, synthetic construct
  source 1..75: mol_type = other DNA
aaacagtattattacattgtcaacttcaaccatgtattgcacgcagatctggttgttattgatgggaaaacaaaa

SEQ ID NO: 715778 - DNA, 75 bp, synthetic construct
  source 1..75: mol_type = other DNA
aaatataagctaaaacggatagagcagacaattgataaagcactgggtgaatacccaagggtgatggcaataagg

SEQ ID NO: 715779 - DNA, 75 bp, synthetic construct
  source 1..75: mol_type = other DNA
attgccagaattgaaaattgtagtgtgaagacagtgtatacccatcggcggaatgcagaggccaagctgtactca

SEQ ID NO: 715780 - DNA, 75 bp, synthetic construct
  source 1..75: mol_type = other DNA
acctggaacgttgtcgcgtgctgttgcacctcatcgatatcgatccgattgatggtaccgatccggttgagaatg

SEQ ID NO: 715781 - DNA, 75 bp, synthetic construct
  source 1..75: mol_type = other DNA
cactctggtgccaagcctgggcgtggtacgtatggataacgaaaagagcttcgttgttgccgatattccggggct

SEQ ID NO: 715782 - DNA, 75 bp, synthetic construct
  source 1..75: mol_type = other DNA
acgatgtgcatgcaagagcgccaactgacatcaccacggaagccctgcagcgtatcggtgaactgtatgccatcg

SEQ ID NO: 715783 - DNA, 75 bp, synthetic construct
  source 1..75: mol_type = other DNA
gctgtaccatccgcagggctgccccgcctgtaatcacaaaggttttcgcggacgtaccgctatccatgaactgat

SEQ ID NO: 715784 - DNA, 75 bp, synthetic construct
  source 1..75: mol_type = other DNA
gggcgatcacgcgtttgcaggatatgggcgtggagcctttcctgctctcttccagtctgacgggcgtgatggcgc

SEQ ID NO: 715785 - DNA, 75 bp, synthetic construct
  source 1..75: mol_type = other DNA
gaactgccggaaacggaagatctgctggaaagcgacgacgacgcgccaatcatcaaactgatcaacgctatgctg

SEQ ID NO: 715786 - DNA, 75 bp, synthetic construct
  source 1..75: mol_type = other DNA
atgtctggaaatataggggcaaatccatctccccatgacgcctacttctataaaggactatctgaactgattgtg

SEQ ID NO: 715787 - DNA, 75 bp, synthetic construct
  source 1..75: mol_type = other DNA
gcagacggcgcttgtgcgcgctgatgtcacgaacggtgcaatagtgatccacacccaacgcctgaaatcagatcc

SEQ ID NO: 715788 - DNA, 75 bp, synthetic construct
  source 1..75: mol_type = other DNA
gctgctggtctcgcgtatcaaggtgatggcgcgactggatatcgccgaaaagcgcgtaccgcaggatggccgtat

SEQ ID NO: 715789 - DNA, 75 bp, synthetic construct
  source 1..75: mol_type = other DNA
atcgttaacggcaatgaagtgtatatcagcgtgagtatggggattgcactggcgcctcaggatgcaatgaacgcc

SEQ ID NO: 715790 - DNA, 75 bp, synthetic construct
  source 1..75: mol_type = other DNA
agctcggcggcgaacccggtaaaatatttggtaaaactcattggcgacttatcagtaaagtttctgaagcaggtg

SEQ ID NO: 715791 - DNA, 75 bp, synthetic construct
  source 1..75: mol_type = other DNA
tcagataaccgcgcctcatacgcgttcggtggagtcaccaacaccgccgcgcagggctatccggtaccgcttctt

SEQ ID NO: 715792 - DNA, 75 bp, synthetic construct
  source 1..75: mol_type = other DNA
agactgagaaactcaaaaatttagtgggctcagctcggctgcaaacgtccacacaaattgctgcgaaaaatgatg

SEQ ID NO: 715793 - DNA, 75 bp, synthetic construct
  source 1..75: mol_type = other DNA
gactggttgacgttattcatcagcgttttgtccttgccggagcccaacttgaagatgcggataaagcaaaattaa

SEQ ID NO: 715794 - DNA, 75 bp, synthetic construct
  source 1..75: mol_type = other DNA
cagacacctgatttcactaacacgattttggcgctggaacagagcggtgaattgcttacccgcgtcaccagcgtc

SEQ ID NO: 715795 - DNA, 75 bp, synthetic construct
  source 1..75: mol_type = other DNA
attttgaattaaacacggtgttgaatgaaggtgtattctggactgcgaatcagctcttcggtattaagtttgtcg

SEQ ID NO: 715796 - DNA, 75 bp, synthetic construct
  source 1..75: mol_type = other DNA
aaatatgttcagcgcctgaccgcgaaacgcaacggcggacagggtgtttccacactggcgtggtgtcacggagaa

SEQ ID NO: 715797 - DNA, 75 bp, synthetic construct
  source 1..75: mol_type = other DNA
aacgcaacggcggacagggtgtttccacactggcgtggtgtcatggcgacacgctgctgacagtcctcgaaacac

SEQ ID NO: 715798 - DNA, 75 bp, synthetic construct
  source 1..75: mol_type = other DNA
ggcgggaactgcgcggatatgatgcactgaccagtgcgtatgcccgcgccagaaacagcgggagaatagttctat

SEQ ID NO: 715799 - DNA, 75 bp, synthetic construct
  source 1..75: mol_type = other DNA
gagaaggtgtacaaagtctggcagcagatggcagaagacggttttattaccgatggcggtgatgtggcgctggat

SEQ ID NO: 715800 - DNA, 75 bp, synthetic construct
  source 1..75: mol_type = other DNA
aaatcagttgccgcgagctgacggtcacgcaactggaacaggtgctcgatgccatgaaagaacgcggctttaaga

SEQ ID NO: 715801 - DNA, 75 bp, synthetic construct
  source 1..75: mol_type = other DNA
gccatgaaagaacgcggttttaagaagcagaataaacacccacgccgtcgctttaatgggcatgtaacgccccac

SEQ ID NO: 715802 - DNA, 75 bp, synthetic construct
  source 1..75: mol_type = other DNA
tgaggcgatgcaggatgtggacgatttcgaacagcgggcgctggtggcggaaaatatggatcttcctgctgtacc

SEQ ID NO: 715803 - DNA, 75 bp, synthetic construct
  source 1..75: mol_type = other DNA
tgaagatattccgttgaacaataaacgcgcggtaactaatcggtatggcatcggagttattccatcagtcagcag

SEQ ID NO: 715804 - DNA, 75 bp, synthetic construct
  source 1..75: mol_type = other DNA
ttattctctgaatgccagttggaatggttcattcacggcgactcgtcacggagccgctttccatgactatagtgg

SEQ ID NO: 715805 - DNA, 75 bp, synthetic construct
  source 1..75: mol_type = other DNA
cgctgtacctcctcaactacattgatgatgaagaatatcgtcgcaggatactgactcagcttaaccggggagaag

SEQ ID NO: 715806 - DNA, 75 bp, synthetic construct
  source 1..75: mol_type = other DNA
atccgggcagagcgctgatgaaccgggagctgccgttaatcatcattctgatgttatcgaccattgcatttacct

SEQ ID NO: 715807 - DNA, 75 bp, synthetic construct
  source 1..75: mol_type = other DNA
atacggcattcataatgcgcatacgttcggcagaatggagccacacctgaaagccgactaccgggaagctcagct

SEQ ID NO: 715808 - DNA, 75 bp, synthetic construct
  source 1..75: mol_type = other DNA
cgcccactggccgctggtcagttggttacctgagcgtaatttcaacgtttttatgtttgattatcgcgggtttgg

SEQ ID NO: 715809 - DNA, 75 bp, synthetic construct
  source 1..75: mol_type = other DNA
tcacgggcatgacgttcggttcagcaggtgtcattggcgcgggaatggtctccgctggtatcggaatgatggctg

SEQ ID NO: 715810 - DNA, 75 bp, synthetic construct
  source 1..75: mol_type = other DNA
gcattttatgccgaacaggtacggcgggagaaatttgatcttgatgaggcgcagctcaagccatattttgaatta

SEQ ID NO: 715811 - DNA, 75 bp, synthetic construct
  source 1..75: mol_type = other DNA
aagggtatgagatgagcgaactgcttagcgccgcacttctcgatatgcgctggcattgcctggaagaaaacgaag

SEQ ID NO: 715812 - DNA, 75 bp, synthetic construct
  source 1..75: mol_type = other DNA
tcttaccgtacgttttcgttccattggccctcaaaccccgacttaaacaaaatgcgctgtttgcctggttacggg

SEQ ID NO: 715813 - DNA, 75 bp, synthetic construct
  source 1..75: mol_type = other DNA
attatcgtcggcggatcctgacgcagctaaaccggggggaaggccgccatgctgtggcgagggcgatctgctacg

SEQ ID NO: 715814 - DNA, 75 bp, synthetic construct
  source 1..75: mol_type = other DNA
gacgatcctgacaataaaccatcatatgccttcggtggctcggtgaatacccttgcgatgggtaacccggtcgcg

SEQ ID NO: 715815 - DNA, 75 bp, synthetic construct
  source 1..75: mol_type = other DNA
gcgttatttaagtgaaaatgcccataaagcgggtgctgacattaacgtgctggaacacgcgctcaaactggtggc

SEQ ID NO: 715816 - DNA, 75 bp, synthetic construct
  source 1..75: mol_type = other DNA
ggggacgtatctcggccatattacccggcatatgctgggtttgttccagggtattcctggcgcgcggcagtggcg

SEQ ID NO: 715817 - DNA, 75 bp, synthetic construct
  source 1..75: mol_type = other DNA
ttttcaccctgctcacgctgaccaccgtaccggcccaggccgatattatcgacgacaccattggcaatattcagc

SEQ ID NO: 715818 - DNA, 75 bp, synthetic construct
  source 1..75: mol_type = other DNA
gcgtatcagaatccgggtattctggcggcggtagaccgagagatctttggttcttcggataccgatgccgatccg

SEQ ID NO: 715819 - DNA, 75 bp, synthetic construct
  source 1..75: mol_type = other DNA
atttttggttcctcggataccgatgccgatccggtggcggtagtgcgcgccatgtatccgtacattgagcgtgaa

SEQ ID NO: 715820 - DNA, 75 bp, synthetic construct
  source 1..75: mol_type = other DNA
attcacggtaaaggtgattacctggcgtacagtgaagaagagcatccggtggcgttgcagttgggtggaagcgat

SEQ ID NO: 715821 - DNA, 75 bp, synthetic construct
  source 1..75: mol_type = other DNA
ttcctgaacgcgatcgtgctacaaacctggaagatgcctttaaacagctgttatctgttgccgttgaacagtttc

SEQ ID NO: 715822 - DNA, 75 bp, synthetic construct
  source 1..75: mol_type = other DNA
gccctaaaggggcaggtaaagccccgatgttcaatgtcaggatttcaccagaactgaaagaacagtttgaatcac

SEQ ID NO: 715823 - DNA, 75 bp, synthetic construct
  source 1..75: mol_type = other DNA
cttacccctgcggaaaccgaacgcttgtttagtcgcttgcaagagctgcttgctactggcgtgggtattgttttt

SEQ ID NO: 715824 - DNA, 75 bp, synthetic construct
  source 1..75: mol_type = other DNA
tcgcgcgacgacggctggcagcgtgaagtgagcgacgatcggcgcagacaatatgacgaccgccgtcgccagttt

SEQ ID NO: 715825 - DNA, 75 bp, synthetic construct
  source 1..75: mol_type = other DNA
tattcacgctgttcacgctgttcacgctgttcaccgttccggcccaggccgatattatcgatgacaccattggca

SEQ ID NO: 715826 - DNA, 75 bp, synthetic construct
  source 1..75: mol_type = other DNA
aaaagtactggtactgaatcaggatcgtctgctgctgttgaccaatctcactgtgggtaaaaatgacaaactacg

SEQ ID NO: 715827 - DNA, 75 bp, synthetic construct
  source 1..75: mol_type = other DNA
gaatcacatcttctgtagaagtcgaaggtaaagcaactgaaaatttacacattaaagcaggtgttaatgcgaaat

SEQ ID NO: 715828 - DNA, 75 bp, synthetic construct
  source 1..75: mol_type = other DNA
cagatatatcatgctctctgagactgggagaaccattcattattacacttccagaaacagtcaggctggatgttg

SEQ ID NO: 715829 - DNA, 75 bp, synthetic construct
  source 1..75: mol_type = other DNA
gagactgggagaaccattcatttttacgctgccagaatcagttagagtcgatgttgacatatatcctctcaaaaa

SEQ ID NO: 715830 - DNA, 75 bp, synthetic construct
  source 1..75: mol_type = other DNA
gcaaggaaggaggatttgttccaatggagccatgcaaatgcggtggattccggatggaagatcattgcagtaact

SEQ ID NO: 715831 - DNA, 75 bp, synthetic construct
  source 1..75: mol_type = other DNA
agatgcaacgctgaaacgcatgggaattgacaatacagatggccgatttttcagagattatcctggtgatgattt

SEQ ID NO: 715832 - DNA, 75 bp, synthetic construct
  source 1..75: mol_type = other DNA
atgacaacggacgatcttgcctttgaccaacgccatatctggcacccatacacatccatgacctccccgctgccg

SEQ ID NO: 715833 - DNA, 75 bp, synthetic construct
  source 1..75: mol_type = other DNA
agcaggtggcggctattgaagtacagctgcgcgagcaactggcaccagcccgtgatgccgaaatggttgccgatg

SEQ ID NO: 715834 - DNA, 75 bp, synthetic construct
  source 1..75: mol_type = other DNA
caagttcctctggattagtttttgactacacgaggaatgacgtattaccgatctatggtgaggctggtgatagcg

SEQ ID NO: 715835 - DNA, 75 bp, synthetic construct
  source 1..75: mol_type = other DNA
actggcagctcaacggattaaaaggagataatcttcataagatcggcgaaggtacgctcatcgttgagggtactg

SEQ ID NO: 715836 - DNA, 75 bp, synthetic construct
  source 1..75: mol_type = other DNA
attaaagcaggtgttaatgcgaaatttgacggttacttcaaaaacaattatgaaggtattgtcggtattcgatat

SEQ ID NO: 715837 - DNA, 75 bp, synthetic construct
  source 1..75: mol_type = other DNA
gggttgaaagcgtttacggtgatgtcctgcgataacgtgcgtgaaaacggccatgtggcgaaggtcgcggtactg

SEQ ID NO: 715838 - DNA, 75 bp, synthetic construct
  source 1..75: mol_type = other DNA
cggaatctacggccccccctgtggagaaagaaaccgagagtggaaaggaagatgcgaaaccagattcgcagaatg

SEQ ID NO: 715839 - DNA, 75 bp, synthetic construct
  source 1..75: mol_type = other DNA
tcacacagccaacgtctttcgagcagaaagattgggaaaacagagactttacgtttggtcaactcgttttgaaca

SEQ ID NO: 715840 - DNA, 75 bp, synthetic construct
  source 1..75: mol_type = other DNA
atcttatgattatgaagatgttgatctatttctcgatatacttgaagctacattaaaagcgctcaagtcttccga

SEQ ID NO: 715841 - DNA, 75 bp, synthetic construct
  source 1..75: mol_type = other DNA
gctggactgagtcgtgatattagaaaagaactggtcggtaatgactccaacttattgatagtgttttatgttcag

SEQ ID NO: 715842 - DNA, 75 bp, synthetic construct
  source 1..75: mol_type = other DNA
cagtgtatacccatcggcgtaatgctgaggccaagctgtactcaaaatatataagttggttcagtaaactccagg

SEQ ID NO: 715843 - DNA, 75 bp, synthetic construct
  source 1..75: mol_type = other DNA
gttagaaagcgtagcgataacccaaactgacgccgatcatgccgatgccattgtgcgctttcgtatctttcaaga

SEQ ID NO: 715844 - DNA, 75 bp, synthetic construct
  source 1..75: mol_type = other DNA
gtgatctgcatcgtatcgcggatgccctgcaggcggtccagaaacgtaacttctggcagttacaggctgaaatca

SEQ ID NO: 715845 - DNA, 75 bp, synthetic construct
  source 1..75: mol_type = other DNA
ttttacatcaaaatgcagtaaatgttgcaatcaaatacgagaaaagagacaaaggtaaatgggtcttgaatgatg

SEQ ID NO: 715846 - DNA, 75 bp, synthetic construct
  source 1..75: mol_type = other DNA
gtgatctcctttcatgaaaatacgcaatcctccaccgcacaggaaaaagcccgcgactggtaccgtcagcatcat

SEQ ID NO: 715847 - DNA, 75 bp, synthetic construct
  source 1..75: mol_type = other DNA
tgccatccgtacagcatggatatcaccgtcacccggaacagtccgactggtcagactatgacagccgatgcggaa

SEQ ID NO: 715848 - DNA, 75 bp, synthetic construct
  source 1..75: mol_type = other DNA
acgagtacgactggctgacctcagacgccgctgtggatgaggccattcacatcaatgcatataccttcaccgacg

SEQ ID NO: 715849 - DNA, 75 bp, synthetic construct
  source 1..75: mol_type = other DNA
cctgcaggcggtgcagaaacgtaacttctggcagttgcaggctgaaatcagtcaccggggacgttactgccatcc

SEQ ID NO: 715850 - DNA, 75 bp, synthetic construct
  source 1..75: mol_type = other DNA
cacgcgctgtaaatcatcaaggccacgttattgataatcagcaaaacgtgaacgccaccagcgttaatgcagcta

SEQ ID NO: 715851 - DNA, 75 bp, synthetic construct
  source 1..75: mol_type = other DNA
gatgcaacactgcatgtaaacggtggcgaaattcatgccagcgcggaaggtcaggacatgtacgctgccattgat

SEQ ID NO: 715852 - DNA, 75 bp, synthetic construct
  source 1..75: mol_type = other DNA
ctggcggcctggatgcgtgatttaaacaacgatgtttacttccaggtagcgctattaactactatcggcttgtcg

SEQ ID NO: 715853 - DNA, 75 bp, synthetic construct
  source 1..75: mol_type = other DNA
gtgaccttcatcgtatcgcggatgccctgcaggcggtgcagaaacgtaacttctggcagttacaggctgaaatca

SEQ ID NO: 715854 - DNA, 75 bp, synthetic construct
  source 1..75: mol_type = other DNA
ttctcgaaactggaagcgggcaagctgattctggaaagtattccgttcccattgcgtagcacgctggatgaagtc

SEQ ID NO: 715855 - DNA, 75 bp, synthetic construct
  source 1..75: mol_type = other DNA
cattacgacatgatgttgttagggattgcggtgactttccgcgaaccgctaacgatgcaacatgagcggttagcg

SEQ ID NO: 715856 - DNA, 75 bp, synthetic construct
  source 1..75: mol_type = other DNA
agatgccgttcgatttaatcttaatggatattcaaatgccggacatggacggcattgaactgcaccccaaatgtt

SEQ ID NO: 715857 - DNA, 75 bp, synthetic construct
  source 1..75: mol_type = other DNA
gccggttatcgcggtaacggcgcatgcgatggccgggcaaaaagagaaactgcttggcgcggggatgagtgatta

SEQ ID NO: 715858 - DNA, 75 bp, synthetic construct
  source 1..75: mol_type = other DNA
tcaggtcaatgccgaaaagctcaagcaagatggtattggcgcctgcttgctgaaaccattaacacctacgcgtct

SEQ ID NO: 715859 - DNA, 75 bp, synthetic construct
  source 1..75: mol_type = other DNA
tgaacgggcgaaacagatgccgttcgatttgatcttaatggatattcaaatgccggacatggatggcattcgggc

SEQ ID NO: 715860 - DNA, 75 bp, synthetic construct
  source 1..75: mol_type = other DNA
acgaagttgttaaggctcataatttcatcgtctggaatatatccagtttagataaaaaagatatattgtctatct

SEQ ID NO: 715861 - DNA, 75 bp, synthetic construct
  source 1..75: mol_type = other DNA
tcgcgcgacgacggctggcagcgtcaagtgagcgacgatcgtcgcagacaatatgacgaccgccgccgccagttt

SEQ ID NO: 715862 - DNA, 75 bp, synthetic construct
  source 1..75: mol_type = other DNA
ggacttcagggaggtctgtggcattttcggaattgacctccgccagcgcgttttccggctcagcaacggcaggtt

SEQ ID NO: 715863 - DNA, 75 bp, synthetic construct
  source 1..75: mol_type = other DNA
caagatggtatcggcgcgtgtctgctgaaacccctgacgcctacacgtctgttgcctgtactgaccgagttttgt

SEQ ID NO: 715864 - DNA, 75 bp, synthetic construct
  source 1..75: mol_type = other DNA
aacagctacgtagcggtactaaagaagaagatttggagccggagctgctggaactgttggacgagatggataatg

SEQ ID NO: 715865 - DNA, 75 bp, synthetic construct
  source 1..75: mol_type = other DNA
atattgcgcttgagctggatcttaaatcggttcgcttgcagcaatataaagagatctttatttccagcgtgatga

SEQ ID NO: 715866 - DNA, 75 bp, synthetic construct
  source 1..75: mol_type = other DNA
gtaccaaaggtattgaggggcgtcatgccgtggcagaagactatgcccggtttatgaaagccctgctggtactgg

SEQ ID NO: 715867 - DNA, 75 bp, synthetic construct
  source 1..75: mol_type = other DNA
ggtaccactcactatttgaggtgaccgggcaaacccacccagtgtatctaaccacaggggtaattcaacgatcga

SEQ ID NO: 715868 - DNA, 75 bp, synthetic construct
  source 1..75: mol_type = other DNA
gcccggtttatgaaagccctgctggtactggtgtatcggaggcgaaatcgtagtatatccccagcggtggctgtg

SEQ ID NO: 715869 - DNA, 75 bp, synthetic construct
  source 1..75: mol_type = other DNA
ctaaccgcaccatcatgcaagcctgcatgacggataacgacgtggtcgttgttgaccgtaactgccacaaatcca

SEQ ID NO: 715870 - DNA, 75 bp, synthetic construct
  source 1..75: mol_type = other DNA
cttgtcagaatatataaagctggcaacaacatttattgtttttttaggggtttctaaattttcatatataaatcc

SEQ ID NO: 715871 - DNA, 75 bp, synthetic construct
  source 1..75: mol_type = other DNA
atcttcgaagatattacagcaaagtgtgtttaaacgttgaaacgccagcgcaagggcttcgcttattgaccgcgc

SEQ ID NO: 715872 - DNA, 75 bp, synthetic construct
  source 1..75: mol_type = other DNA
attttcttggcatacgctatgttggtgttaagggggctggcgaacgaacgcattgggtcgagcctttagctgtac

SEQ ID NO: 715873 - DNA, 75 bp, synthetic construct
  source 1..75: mol_type = other DNA
gatgaaaacggtaatgagcagacttggacgggtcagggccgtactcctaaagcaatcgctgctgctatcgaagct

SEQ ID NO: 715874 - DNA, 75 bp, synthetic construct
  source 1..75: mol_type = other DNA
gatgaaaacggtaatgagcagacttggacgggccaaggtcgtactcctaaagcaatcgctgctgctatcgaagct

SEQ ID NO: 715875 - DNA, 75 bp, synthetic construct
  source 1..75: mol_type = other DNA
cctctcgatatggtaaagcaaagcggtttaatgacgtttaatagtacccaaactctggaaaccaacataaaggca

SEQ ID NO: 715876 - DNA, 75 bp, synthetic construct
  source 1..75: mol_type = other DNA
gttgcttgaagatgacggccgccctactcagctccgaacgcatatccctcgacacaacattaatacttttctcgc

SEQ ID NO: 715877 - DNA, 75 bp, synthetic construct
  source 1..75: mol_type = other DNA
gcaactctgattattttgaaacgctggtactgtgcgctgattaaattaaccgggcagactcatcccatctatctg

SEQ ID NO: 715878 - DNA, 75 bp, synthetic construct
  source 1..75: mol_type = other DNA
ttgagcaggaagtgcttaccacctggcccacggaggcaattgctcaggctgaaaacgtggtgttacgtctatccg

SEQ ID NO: 715879 - DNA, 75 bp, synthetic construct
  source 1..75: mol_type = other DNA
ttctgaactgtcagccctgcagcgtattgagcatcttgcctggttgaaagagcaggcagaacaggctgaatccag

SEQ ID NO: 715880 - DNA, 75 bp, synthetic construct
  source 1..75: mol_type = other DNA
ggtcggtagcgccgtagagcgtctggcggatgccttaagacagcaaaatgttaccgtaattaaatcaaccgcctt

SEQ ID NO: 715881 - DNA, 75 bp, synthetic construct
  source 1..75: mol_type = other DNA
agtgctgggtgatgcatccgggcgaaagctggcacggctttaaagatatcccggataactggagcatgctcgacc

SEQ ID NO: 715882 - DNA, 75 bp, synthetic construct
  source 1..75: mol_type = other DNA
gctgattccgctgctgaataccacccagcaaccagcgcttgctgaactgcgcgatcgcgcgacgcgtgaaaaact

SEQ ID NO: 715883 - DNA, 75 bp, synthetic construct
  source 1..75: mol_type = other DNA
cagggtgtaacactaaatgaatcggcttataaaacgacactctggcatgcattgaaagtgggtgaaagcatttta

SEQ ID NO: 715884 - DNA, 75 bp, synthetic construct
  source 1..75: mol_type = other DNA
ctaaagcaaaatcaactcgcactcctcgaccagctaaatacaaatatacagatgaaaacggcaatgagcagactt

SEQ ID NO: 715885 - DNA, 75 bp, synthetic construct
  source 1..75: mol_type = other DNA
gtcggtgaaatccgcgataccgaaaccgcagaaatcgccgttcaggcgtcgctcactgggcacctggtactttcc

SEQ ID NO: 715886 - DNA, 75 bp, synthetic construct
  source 1..75: mol_type = other DNA
cggggactgaacgcgccctttacgctgcggcaaatcgacgaggccgaatttgaacagcggctgaatgcggtctgg

SEQ ID NO: 715887 - DNA, 75 bp, synthetic construct
  source 1..75: mol_type = other DNA
tcacataaatccgatattgtccgggaatggataaagaaggatgccttcggtacaccgcaatatacggtgatgaaa

SEQ ID NO: 715888 - DNA, 75 bp, synthetic construct
  source 1..75: mol_type = other DNA
gggtgaaggttctctcgttgttctttattgacgaagtggccaggtaccgggactactccgctgtcgatgaaaagg

SEQ ID NO: 715889 - DNA, 75 bp, synthetic construct
  source 1..75: mol_type = other DNA
tgtaatcacaaaggatacagagggcgaacagctattcatgagttaattcttgttgacgcaacgctacgtaatttg

SEQ ID NO: 715890 - DNA, 75 bp, synthetic construct
  source 1..75: mol_type = other DNA
cagcgggactcttccgaggcccgccagctgatggaagatctcggttctgctgaggacttttttactctcgcagaa

SEQ ID NO: 715891 - DNA, 75 bp, synthetic construct
  source 1..75: mol_type = other DNA
aattgtcgcggatgacggttacttcagcggcgcaacagaaatggaaaaacgccttgcacgaaaaactttacgtga

SEQ ID NO: 715892 - DNA, 75 bp, synthetic construct
  source 1..75: mol_type = other DNA
ttatgttgaaaattaaagactgcgaaagcacgtatacaaatggatatatgtatcaatatataaataatgccattg

SEQ ID NO: 715893 - DNA, 75 bp, synthetic construct
  source 1..75: mol_type = other DNA
ttgtcactgttctggccgttatcagtgctatcagtgtttccggttgtgacagcaaggaggatgctggcgtgaaag

SEQ ID NO: 715894 - DNA, 75 bp, synthetic construct
  source 1..75: mol_type = other DNA
ccctttcacgaaggaaaaatacttcgaatattcccatgatggcaaactgatgggacgaatgttgataccctctaa

SEQ ID NO: 715895 - DNA, 75 bp, synthetic construct
  source 1..75: mol_type = other DNA
atgaaacgtaaaacaccacctctgctggccctggttgccaccactctgtttctgagcgcctgcgatgacaggagt

SEQ ID NO: 715896 - DNA, 75 bp, synthetic construct
  source 1..75: mol_type = other DNA
catcatcgagcatctggcttatgacacgctagaggacaagtttgatctggatatctttaccacaggtcaaagcaa

SEQ ID NO: 715897 - DNA, 75 bp, synthetic construct
  source 1..75: mol_type = other DNA
gccgtaaatccagagcaggaaagtcactggaactgcacctggagcacctgttcattgaacacggactgcggcact

SEQ ID NO: 715898 - DNA, 75 bp, synthetic construct
  source 1..75: mol_type = other DNA
gacgtaaatcaagggcaggcaaatcacttgaacttcacctagagaagctttttatcgagcacggactacggcatt

SEQ ID NO: 715899 - DNA, 75 bp, synthetic construct
  source 1..75: mol_type = other DNA
ccttcagcagaggcatatcataacgttgaatttcctgtagaaaacttacgtatgctggcagtaaagaccacctgc

SEQ ID NO: 715900 - DNA, 75 bp, synthetic construct
  source 1..75: mol_type = other DNA
ggctgggcgggataagtcaaccgccaatccattacgaggccgctttcagtcgcgcgcagcaagcggcggaacgct

SEQ ID NO: 715901 - DNA, 75 bp, synthetic construct
  source 1..75: mol_type = other DNA
ccttcgtcgaggccaaaactcagcaagcggaatttactcatttaatctggcagatgcgcagtgaacacgtgacat

SEQ ID NO: 715902 - DNA, 75 bp, synthetic construct
  source 1..75: mol_type = other DNA
taataaaaaacccgatttcctgttcccttccgcagaggcttaccacaatgcagagtttcccgcagaaaaactgcg

SEQ ID NO: 715903 - DNA, 75 bp, synthetic construct
  source 1..75: mol_type = other DNA
cgggggctgaacgcgccctttacgctgcggcaaatcgacgaagccgaatttgaacagcggctgaatgcggtctgg

SEQ ID NO: 715904 - DNA, 75 bp, synthetic construct
  source 1..75: mol_type = other DNA
tgttacccgggacgaaggcaccgccgctttacagtgcacttatgatgatcgtttccggattagcctgggccgcct

SEQ ID NO: 715905 - DNA, 75 bp, synthetic construct
  source 1..75: mol_type = other DNA
tgcgctgttactttttggtgccgtacagtttgcgatggtgatccacggattatttaaaggagaatcactctccgc

SEQ ID NO: 715906 - DNA, 75 bp, synthetic construct
  source 1..75: mol_type = other DNA
ttgataaggtcggtggtaacaattatctctatatcaaacgtctttcagcaaacgacactggtgcaacaggagggc

SEQ ID NO: 715907 - DNA, 75 bp, synthetic construct
  source 1..75: mol_type = other DNA
ggcgttgttactttttggtgccgtgcagtttgcgatggtgatgtacggattatttaagggagagtcactgtcagt

SEQ ID NO: 715908 - DNA, 75 bp, synthetic construct
  source 1..75: mol_type = other DNA
ctgccttttctgtttcttcacacccgcacctccctgtccgtatggcgtccattaagtgggttctatctgatggtg

SEQ ID NO: 715909 - DNA, 75 bp, synthetic construct
  source 1..75: mol_type = other DNA
tctgaaatgttatgggctaaaagaagacacactgtcactttttgtggataaaacaaaatcgaatgacaacaataa

SEQ ID NO: 715910 - DNA, 75 bp, synthetic construct
  source 1..75: mol_type = other DNA
gcatattaatttatgaaatacacaagagatcacgcaatagattttttcagttagtatcaacaggaatggtaataa

SEQ ID NO: 715911 - DNA, 75 bp, synthetic construct
  source 1..75: mol_type = other DNA
gagggatagcggcgatactggtagttctttaccattatcgcggtgagttaaatgcatcatatgcacaaaaaggac

SEQ ID NO: 715912 - DNA, 75 bp, synthetic construct
  source 1..75: mol_type = other DNA
gaagcttctttagccaggggcagaatatctggtgcagaaaatatagtaaaaaatgatgcagcccatttctgtgtt

SEQ ID NO: 715913 - DNA, 75 bp, synthetic construct
  source 1..75: mol_type = other DNA
atttgttcaaggagctgattttgagaaaaatacttctggttgtactgggattgctggtgagtaatgcttatgcag

SEQ ID NO: 715914 - DNA, 75 bp, synthetic construct
  source 1..75: mol_type = other DNA
gcttttggtggctcagtcactgtgttctgcgatgaagtctatcagtatgtaattaaggacaaaggcgggcggtat

SEQ ID NO: 715915 - DNA, 75 bp, synthetic construct
  source 1..75: mol_type = other DNA
agacaggcaatggatattatgattgctctcaaaacctttgccggtagctctgattttatccttccttcgcggtac

SEQ ID NO: 715916 - DNA, 75 bp, synthetic construct
  source 1..75: mol_type = other DNA
cgaaatcaatttcaccgaagcgctctggacaatccccaaggagcggatgaagcgccgcaatccccatttggtgtt

SEQ ID NO: 715917 - DNA, 75 bp, synthetic construct
  source 1..75: mol_type = other DNA
tcacccatgaggacttacgggcgctgactgatgcgatcgtggagcgcggggcaccggcaacggccgtgctttgcc

SEQ ID NO: 715918 - DNA, 75 bp, synthetic construct
  source 1..75: mol_type = other DNA
ggatactcgagtgcgcccctcaatcagaaattttgttttttattgttacctatcaaacaacgaaccagatcaaat

SEQ ID NO: 715919 - DNA, 75 bp, synthetic construct
  source 1..75: mol_type = other DNA
cactgcagacatggtttctctataaccagcaggttggtgaaacagctaatgcattgtttattcataaaaatacgt

SEQ ID NO: 715920 - DNA, 75 bp, synthetic construct
  source 1..75: mol_type = other DNA
gcatgggctgagaaatggttacgcggttatcaaatggctgaatcgacgcgtgatatgcggcgttcggtatatcaa

SEQ ID NO: 715921 - DNA, 75 bp, synthetic construct
  source 1..75: mol_type = other DNA
gtgaaaaagatagctgctatatcattaattagtgtttttcttatgtctggttgtgctgtgcataatgatgagaca

SEQ ID NO: 715922 - DNA, 75 bp, synthetic construct
  source 1..75: mol_type = other DNA
ggtgttgtgtgtgagttcgactggaatgatggaaatgaaccgccccggaaatcctggagactaaactccctgaga

SEQ ID NO: 715923 - DNA, 75 bp, synthetic construct
  source 1..75: mol_type = other DNA
atttaaatatgatattgaagtgtcgatagactggccccctgaatctccagacaaccaatatcacttaaataagtg

SEQ ID NO: 715924 - DNA, 75 bp, synthetic construct
  source 1..75: mol_type = other DNA
atgaatcgcacatccctgattaaattaattcatgttgcacgtcgggagttgcaacttgacgatgacacttaccgc

SEQ ID NO: 715925 - DNA, 75 bp, synthetic construct
  source 1..75: mol_type = other DNA
atgccattattatattttaacaccaaagcgtgtcgttggtatttaatgggggaaggtaagatgaaaaagatagct

SEQ ID NO: 715926 - DNA, 75 bp, synthetic construct
  source 1..75: mol_type = other DNA
atgaaaaagatagctgctatatcattaattagtatttttcttatgtctggttgtgctgtgcataatgatgagaca

SEQ ID NO: 715927 - DNA, 75 bp, synthetic construct
  source 1..75: mol_type = other DNA
ttccgttatgaaggaaactgggaaaattatcctgactgggtgcgtaacatctatctgatagagttacctgccagg

SEQ ID NO: 715928 - DNA, 75 bp, synthetic construct
  source 1..75: mol_type = other DNA
cacggttgaaacttttgccggtacggtatgcaaacaaaccgattcagagatgccgaaagagtggacaattaaccg

SEQ ID NO: 715929 - DNA, 75 bp, synthetic construct
  source 1..75: mol_type = other DNA
gtgtatgaaggattttaagacggatatctatttcgtctcaacgtttaaaccatcaacaaagtcggtcgatttact

SEQ ID NO: 715930 - DNA, 75 bp, synthetic construct
  source 1..75: mol_type = other DNA
cgtgaataccgccaccgtgattattgggatctcgcaaatatcttcccttcttttttaatacgtcaacagcaaaag

SEQ ID NO: 715931 - DNA, 75 bp, synthetic construct
  source 1..75: mol_type = other DNA
cgtcaacaaaatcggtcgatttgctcacagttgaaacttttgccggtacggtatgtaaacaaaccgattcagaga

SEQ ID NO: 715932 - DNA, 75 bp, synthetic construct
  source 1..75: mol_type = other DNA
aggactgtatgcctctttccgctatgaaggtgagtgggagcactaccctgaatgggcgcgaaacctctatctgat

SEQ ID NO: 715933 - DNA, 75 bp, synthetic construct
  source 1..75: mol_type = other DNA
tgctcaggcacagcagcttaatgaagatcagattcaggaactgcgcgatatcgtcgcctggcgtttgatgggcaa

SEQ ID NO: 715934 - DNA, 75 bp, synthetic construct
  source 1..75: mol_type = other DNA
atgtcatatctgaatttaagactttaccagcgaaacacacaatgcttacatattcgtaagcctcgtctggctggt

SEQ ID NO: 715935 - DNA, 75 bp, synthetic construct
  source 1..75: mol_type = other DNA
agcaaaaataaatggcagcatatcaatacctggcttgagcgagacataattccgttacgttcccggctgacgctg

SEQ ID NO: 715936 - DNA, 75 bp, synthetic construct
  source 1..75: mol_type = other DNA
agttcaggtgaaatggggggaaggagagaatgcccactgtgttgccgattacaagctaccgccagagagtcagca

SEQ ID NO: 715937 - DNA, 75 bp, synthetic construct
  source 1..75: mol_type = other DNA
tcaatgaatgacgccgtgatgcagattgagcaggaagtcctgaccacctggcctgctgatgccattgcccgggcg

SEQ ID NO: 715938 - DNA, 75 bp, synthetic construct
  source 1..75: mol_type = other DNA
actaaatcagtaagttggcagcatcaccgcaaaaataaatggcagcatatcaatacctggcttgagcgagacata

SEQ ID NO: 715939 - DNA, 75 bp, synthetic construct
  source 1..75: mol_type = other DNA
gcgcgcgcgtggttatattccaccagagttgtgggattcaggtattaatgccggattgctcaattataacttcag

SEQ ID NO: 715940 - DNA, 75 bp, synthetic construct
  source 1..75: mol_type = other DNA
gtatgtatgagtttgtggtgaatgatgctcctgaacagacagaggacgccgggcctgcagagcctgtttctgcgg

SEQ ID NO: 715941 - DNA, 75 bp, synthetic construct
  source 1..75: mol_type = other DNA
ggggactctggttaacaccctttgctccttcaaacgccactatgacgccaacacaccgctggcgcaggtgatgcc

SEQ ID NO: 715942 - DNA, 75 bp, synthetic construct
  source 1..75: mol_type = other DNA
acttattggggaacaaataatattgatgagcaattacaggccggcctgaataccgcgtttgaggatatcaactgg

SEQ ID NO: 715943 - DNA, 75 bp, synthetic construct
  source 1..75: mol_type = other DNA
tggcgcatggcgtttacgagacaatacgacctggagctatagcagtggtgcaaattcttcaggcagtaaaaataa

SEQ ID NO: 715944 - DNA, 75 bp, synthetic construct
  source 1..75: mol_type = other DNA
tatgccgggggaggcgatggtaatagcggaagtacaggctacgccacgctgaattatcgcggtggttacggcaat

SEQ ID NO: 715945 - DNA, 75 bp, synthetic construct
  source 1..75: mol_type = other DNA
gtatgtatgagtttgtgatgaatgatgcccctgaacaggcagaggacgtcgggcctgcagagcctgtttctgcgg

SEQ ID NO: 715946 - DNA, 75 bp, synthetic construct
  source 1..75: mol_type = other DNA
gggcggaaatggcgcgcgtgcgcgagttgatgtactggaacctcgataataccgcccgtagcgagtgggccaatc

SEQ ID NO: 715947 - DNA, 75 bp, synthetic construct
  source 1..75: mol_type = other DNA
ggccagcggcctgatgcagattatgcctggtacagcgacccatacggtgaagatgttctctattcccggttatag

SEQ ID NO: 715948 - DNA, 75 bp, synthetic construct
  source 1..75: mol_type = other DNA
gattttgcatcaactcatgcaacagcgtggtttctacccgatggttgctgcacaacgcatcggcgaagagtatga

SEQ ID NO: 715949 - DNA, 75 bp, synthetic construct
  source 1..75: mol_type = other DNA
ggcgatcgtcgtggcctgaatacctggctggcgcgtttgccgatggaggcgaaagagaaagatgaatggcgttac

SEQ ID NO: 715950 - DNA, 75 bp, synthetic construct
  source 1..75: mol_type = other DNA
aatacagtgctgaccttcgcgcgtactaccggagcgactgattttacccgccagatggcagcggtggcgtttgcc

SEQ ID NO: 715951 - DNA, 75 bp, synthetic construct
  source 1..75: mol_type = other DNA
gaaacgaacatcaacattggcaccagttacctgcaatatgtttatcagcagtttggtaataaccgtattttctcc

SEQ ID NO: 715952 - DNA, 75 bp, synthetic construct
  source 1..75: mol_type = other DNA
gttacgcactcgtattatttgccgcttcgctggcgccttctgtctgggcacatgcgcatctgacgcatcagtatc

SEQ ID NO: 715953 - DNA, 75 bp, synthetic construct
  source 1..75: mol_type = other DNA
ggccggagatggcgcgcgtgcgcgagttgatgtactggaatctcgataacaccgcgcgtagcgagtgggccaatc

SEQ ID NO: 715954 - DNA, 75 bp, synthetic construct
  source 1..75: mol_type = other DNA
gcgttcaggcgacgatcgccggaaaactttgggatcatctggaggagcgattcccactggcctacaacgatcttt

SEQ ID NO: 715955 - DNA, 75 bp, synthetic construct
  source 1..75: mol_type = other DNA
gttatgcgctgacatttctgacagcttcgctgggagtaccttctgcctgggcgcatgcgcacttgacgcatcagt

SEQ ID NO: 715956 - DNA, 75 bp, synthetic construct
  source 1..75: mol_type = other DNA
ggcagtggatttcactgggcggttgatgtcggtactggctgatggtgtgttggtgggcggggagggggctcttgc

SEQ ID NO: 715957 - DNA, 75 bp, synthetic construct
  source 1..75: mol_type = other DNA
ttgccgatatggcgaacattggcggacgtcctggcggggcgattaccgcaggttgcttcctgtcgcgctttaccc

SEQ ID NO: 715958 - DNA, 75 bp, synthetic construct
  source 1..75: mol_type = other DNA
tgttatcacccgcgttatcggcgaacagcagatgaaagagctggggatgcattcctatctggcggtcggtcaggg

SEQ ID NO: 715959 - DNA, 75 bp, synthetic construct
  source 1..75: mol_type = other DNA
ggcgcaaccggtcgcccggtggcgttgctggcacagttcctgctaaaccgcgccgggtttaacggcgaagagtaa

SEQ ID NO: 715960 - DNA, 75 bp, synthetic construct
  source 1..75: mol_type = other DNA
gaagcgcgcgtggtggtggttgaactggaagaagagggtattaaaggcaccggcgaatgcacgccgtatccgcgt

SEQ ID NO: 715961 - DNA, 75 bp, synthetic construct
  source 1..75: mol_type = other DNA
cgtccgggcggcgaacaaggtaaagaagtgattgacggctacggtaaaccggcaacgttctaccagatgcaggac

SEQ ID NO: 715962 - DNA, 75 bp, synthetic construct
  source 1..75: mol_type = other DNA
atgcacagtctggtcatcggacagatcaagacggatgagaaatctaatgagattacagctatccctgaacttctt

SEQ ID NO: 715963 - DNA, 75 bp, synthetic construct
  source 1..75: mol_type = other DNA
gatttcacgtttgaatggaaaggtctgaagaaattatgcgtggcagtctcctttcggtcaataatagcagaacaa

SEQ ID NO: 715964 - DNA, 75 bp, synthetic construct
  source 1..75: mol_type = other DNA
tccagagcatgacagttacgcaatgagtgaaaagagtcacggcagagaagaaatccgtcttcatattgtttgcga

SEQ ID NO: 715965 - DNA, 75 bp, synthetic construct
  source 1..75: mol_type = other DNA
attaaaggaaaaatcatcacaactgatgcgatgggttgccagaaagatattgcagagaagatacaaaaacagggc

SEQ ID NO: 715966 - DNA, 75 bp, synthetic construct
  source 1..75: mol_type = other DNA
tggcggtcggtcagggttcgcaaaacgaatcgctgatgtcggtgattgagtacaaaggcaacgcgtcggaagatg

SEQ ID NO: 715967 - DNA, 75 bp, synthetic construct
  source 1..75: mol_type = other DNA
taaaggccgtaataactactggaaagtgcgtcaggctgtcgagacagcaaaagagacgctctacagtttcgatca

SEQ ID NO: 715968 - DNA, 75 bp, synthetic construct
  source 1..75: mol_type = other DNA
gcgctgatgttggggattgcgcataccctgatgacacaaggcaaacacgacaaagtgttccttgaaaaatacacc

SEQ ID NO: 715969 - DNA, 75 bp, synthetic construct
  source 1..75: mol_type = other DNA
aggcgcgaaattactgaaagtgaagctggataaccatcttatcagtgagcggatggtggcaattcgcacagctgt

SEQ ID NO: 715970 - DNA, 75 bp, synthetic construct
  source 1..75: mol_type = other DNA
atatttctattacccccgattacagacaagcctggaaagtggaacataaattatcggatattctactgttgacta

SEQ ID NO: 715971 - DNA, 75 bp, synthetic construct
  source 1..75: mol_type = other DNA
tccgaaaccactggcacgtggagaataagctgcactggcgtctggacgtggtaatgaatgaagacgactgcaaaa

SEQ ID NO: 715972 - DNA, 75 bp, synthetic construct
  source 1..75: mol_type = other DNA
ataaagacgtcattgcaattgatggaaaaacgctccggcactcttatgacaagagtcgccgcaagggagcgattc

SEQ ID NO: 715973 - DNA, 75 bp, synthetic construct
  source 1..75: mol_type = other DNA
aaggcagggttaagacgtaagatgcgaaaagcagccatggacagaaactatctggcgtcagtctttgcggggagc

SEQ ID NO: 715974 - DNA, 75 bp, synthetic construct
  source 1..75: mol_type = other DNA
acgtttgaatggaaagggctgaagaaattatgcgtggcagtctcctttcggtccataatagcagacaaaagaaag

SEQ ID NO: 715975 - DNA, 75 bp, synthetic construct
  source 1..75: mol_type = other DNA
tacctgatgattcttttctattggatggtacttattcgactacattaacagaggagttaaaacttcaaaacccga

SEQ ID NO: 715976 - DNA, 75 bp, synthetic construct
  source 1..75: mol_type = other DNA
tgcacagacggtagtcatcggtacgcctgatcagatggccaatagtgcatcaacactctggcaggcaggcgcgaa

SEQ ID NO: 715977 - DNA, 75 bp, synthetic construct
  source 1..75: mol_type = other DNA
cgctggcgactgaagcgcgtgcacaaggtttcagtctgatgctgggctgcatgttgtgtacctctcgtgccatta

SEQ ID NO: 715978 - DNA, 75 bp, synthetic construct
  source 1..75: mol_type = other DNA
ggcggatttaggcgttgcgatgcttgaacaaccgcttcctgcgcaggacgatgcggcgctggagaattttattca

SEQ ID NO: 715979 - DNA, 75 bp, synthetic construct
  source 1..75: mol_type = other DNA
tccagagcatgacagttacgcaattagtgaaaagagtcacggcagagaagaaatccgtcttcataatgtttgcga

SEQ ID NO: 715980 - DNA, 75 bp, synthetic construct
  source 1..75: mol_type = other DNA
atgaaaaaaataaatattaatctcatggaaaggtatcttcttctccttgatcgattcgttgataaacttacggaa

SEQ ID NO: 715981 - DNA, 75 bp, synthetic construct
  source 1..75: mol_type = other DNA
atgacattaacaagacgtgaatttattaaacacagcggtattgccgctggggcgctggtggtgacatcggcagca

SEQ ID NO: 715982 - DNA, 75 bp, synthetic construct
  source 1..75: mol_type = other DNA
ctgaaaaaattatgcgtggcagtctcctttcggtcaataatagcagaacaaaagaaagagccagaaatgacggtc

SEQ ID NO: 715983 - DNA, 75 bp, synthetic construct
  source 1..75: mol_type = other DNA
tcacggcagagaagaaatccgtcttcacattgtttgcgatgtccctgatgaacttattgatttcacgtttgaatg

SEQ ID NO: 715984 - DNA, 75 bp, synthetic construct
  source 1..75: mol_type = other DNA
aaggaaaccaggggcggctaaataaagccttcgaggaaaaatttccgctgaaagaattaaataatccagagcatg

SEQ ID NO: 715985 - DNA, 75 bp, synthetic construct
  source 1..75: mol_type = other DNA
ctattgcatgaactttcgcaatttactgcgctgggtgtgcggttgtgccatgttgagcaggagctgcaattaccg

SEQ ID NO: 715986 - DNA, 75 bp, synthetic construct
  source 1..75: mol_type = other DNA
aaatcaaagagatcagctacgatcagtggcatgaaggagagatcgagagcgatatctggcttaacagcgccaact

SEQ ID NO: 715987 - DNA, 75 bp, synthetic construct
  source 1..75: mol_type = other DNA
accgccgtgcggcaaatgctggtctctcatctggggcgtagcttccgccaggggcggcacatcctgcgcgtcctc

SEQ ID NO: 715988 - DNA, 75 bp, synthetic construct
  source 1..75: mol_type = other DNA
gctgctcgcgtcgtcatatgcgcaccctgctcaacaccatgcaggatcgcggctggctgacgtgggaagcggaag

SEQ ID NO: 715989 - DNA, 75 bp, synthetic construct
  source 1..75: mol_type = other DNA
aaccagcctcgatagcctctggtttttcggtgaagatgacgggcagtcaaaatgcgaacgctttaaagtctggct

SEQ ID NO: 715990 - DNA, 75 bp, synthetic construct
  source 1..75: mol_type = other DNA
cgcaaaagcgttaacggaagaagggcgtaaagttcgcgtggtttccatgccgtgtaccgagcgtttcgataatca

SEQ ID NO: 715991 - DNA, 75 bp, synthetic construct
  source 1..75: mol_type = other DNA
gaagcgtttttaggccgcgtcacaccgctggaattgccgttgctcgacagccttgaacgagagttacggcggatg

SEQ ID NO: 715992 - DNA, 75 bp, synthetic construct
  source 1..75: mol_type = other DNA
caggcttatcagtttgcaatcggcggaaaagcagcaaccaccctggtatcccgcacctggactgaaatggttaac

SEQ ID NO: 715993 - DNA, 75 bp, synthetic construct
  source 1..75: mol_type = other DNA
ttctgtaatgattgtaatgagcctcatcttctggcgcaggacaaaaagggcaaacttgtccaatgggaaaataaa

SEQ ID NO: 715994 - DNA, 75 bp, synthetic construct
  source 1..75: mol_type = other DNA
ttatcttaagcctgaagtgtttaatgaaaacggcgggccactaaagctttcggaaatgatgttgttccgggaatt

SEQ ID NO: 715995 - DNA, 75 bp, synthetic construct
  source 1..75: mol_type = other DNA
gtaaagcaatggtgccgcttatccaccactggctgatcattcaggggcaacgcagtatgcgcggcctgcgcatga

SEQ ID NO: 715996 - DNA, 75 bp, synthetic construct
  source 1..75: mol_type = other DNA
cggctaaagtctctacctctatcccggcttcgtttttgtggctgcataaccatttcacatgcatgattgatgaga

SEQ ID NO: 715997 - DNA, 75 bp, synthetic construct
  source 1..75: mol_type = other DNA
acgatactattgccagagttgtatcctgtatcagtcctgcaaaatttcacgagtgctttattaactggatgcgtg

SEQ ID NO: 715998 - DNA, 75 bp, synthetic construct
  source 1..75: mol_type = other DNA
ttcttcatatgataaagacgtcatcgcaattgatggaaaaacactccggcattcttatgacaagagtcgccgcaa

SEQ ID NO: 715999 - DNA, 75 bp, synthetic construct
  source 1..75: mol_type = other DNA
tgaaagaattaaatactccagagcatgacagttacgcaatgagtgaaaagagtcacggcagagaagaaatccgtc

SEQ ID NO: 716000 - DNA, 75 bp, synthetic construct
  source 1..75: mol_type = other DNA
aatccagagcatgacagttacgcaatcagtgaaaagagtcacggcagagaagaaatccgtcttcatattgtttgc

SEQ ID NO: 716001 - DNA, 75 bp, synthetic construct
  source 1..75: mol_type = other DNA
gctggggttacgtgaagaccagctcatcagctttcgctccgaagagataaacgagacagagtgcgagcgggtaac

SEQ ID NO: 716002 - DNA, 75 bp, synthetic construct
  source 1..75: mol_type = other DNA
actggtgcaactcgttggtgataaaaccgccgtgcggcaaatgctgatttctcatctggggcgtagcttccgcca

SEQ ID NO: 716003 - DNA, 75 bp, synthetic construct
  source 1..75: mol_type = other DNA
ggctggctgacgtgggaagcagaagttggacgcggtaaacgctcgcgtttaactttcctctataccggactggcg

SEQ ID NO: 716004 - DNA, 75 bp, synthetic construct
  source 1..75: mol_type = other DNA
tcggcaccggtccgtatgcggtgatccgcaacagcaccaatcaactgaaaattcaggcattcgatgacttcttcg

SEQ ID NO: 716005 - DNA, 75 bp, synthetic construct
  source 1..75: mol_type = other DNA
aagacggatgagaaatctaatgagattacagctatccctgagcttcttaacatgttggacattaaaggaaaaatc

SEQ ID NO: 716006 - DNA, 75 bp, synthetic construct
  source 1..75: mol_type = other DNA
caatgcacagtctggtcatcggacagatcaagacggatgagaaatccaatgagattacagccatccctgaacttc

SEQ ID NO: 716007 - DNA, 75 bp, synthetic construct
  source 1..75: mol_type = other DNA
ctcatctgggacgcagcttccgccaggggcggcacatcctgcgcgttctctactatcgtccgttgcgtaatctgc

SEQ ID NO: 716008 - DNA, 75 bp, synthetic construct
  source 1..75: mol_type = other DNA
cgcagacggttgatgtatcttgcggtaaggttgttcgggaaagggaaatacagcgacacgcaacaggggacctgt

SEQ ID NO: 716009 - DNA, 75 bp, synthetic construct
  source 1..75: mol_type = other DNA
gaaagtcctgggtgttccccgctggcgcagggtgctgatgtatgctgccgtcaggctgtttggtcggggtaatta

SEQ ID NO: 716010 - DNA, 75 bp, synthetic construct
  source 1..75: mol_type = other DNA
gaaacgcagcagaattattttcagggatacggcacattgctattaatcttttgacgaatgagcaggtattccagg

SEQ ID NO: 716011 - DNA, 75 bp, synthetic construct
  source 1..75: mol_type = other DNA
aaaaattaatccatcgtactacggtcgctatgtggatgatattcttttagttttttcatccccggacattaaaaa

SEQ ID NO: 716012 - DNA, 75 bp, synthetic construct
  source 1..75: mol_type = other DNA
acggtgaaaaaggcggaaatcaaggtggagctgctgccgaaatattctgcctgggcagagggcgtgctggctgcc

SEQ ID NO: 716013 - DNA, 75 bp, synthetic construct
  source 1..75: mol_type = other DNA
ggcgcggagctcggcctgcacctggccgacgccgagggcgggagcggcaaccaccgcaacggccgcagcggcaag

SEQ ID NO: 716014 - DNA, 75 bp, synthetic construct
  source 1..75: mol_type = other DNA
cgctggagttaccgttgctcgacagccttgagcgcgagttacggcggatgaccggcgttaccgttgaccgcgaag

SEQ ID NO: 716015 - DNA, 75 bp, synthetic construct
  source 1..75: mol_type = other DNA
gtacatattccgctgccgttacttaaccaggttgaggaaagcgggtttgaatggcagatccctggtctgcgccgc

SEQ ID NO: 716016 - DNA, 75 bp, synthetic construct
  source 1..75: mol_type = other DNA
cggctaaataaagcctttgaggaaaaatttccgctgaaagaattaaataatccagagcatgacagttacgcaatc

SEQ ID NO: 716017 - DNA, 75 bp, synthetic construct
  source 1..75: mol_type = other DNA
cgatgccggtgattatgccggagcgctggaaatcgggcgtcatgcgctgcgtcagggttgggtgatgccaattgg

SEQ ID NO: 716018 - DNA, 75 bp, synthetic construct
  source 1..75: mol_type = other DNA
ggaataccgagaaattcacattgcgttgctgacgggtttgctttcccatatcgggatgaaagatgccgataaaca

SEQ ID NO: 716019 - DNA, 75 bp, synthetic construct
  source 1..75: mol_type = other DNA
ctgaatattccatcgccgatcaagtatttacatgagaagttaccaaacaaagccaagctgggactgtactttaac

SEQ ID NO: 716020 - DNA, 75 bp, synthetic construct
  source 1..75: mol_type = other DNA
tgaaaaaggctttacgttgaccgagagttatcatgaattaccaattcaaaaggataaattgatttttcattattt

SEQ ID NO: 716021 - DNA, 75 bp, synthetic construct
  source 1..75: mol_type = other DNA
gatttgctcaactttgaaaagagcatgttgatcaaagaaggggcggaaaaaatcagcaagctggattacccgaac

SEQ ID NO: 716022 - DNA, 75 bp, synthetic construct
  source 1..75: mol_type = other DNA
aggtcaactacagccagatcgatccggcgttatgccgtgaactctttattcgccatgcgctggtggaaggtgact

SEQ ID NO: 716023 - DNA, 75 bp, synthetic construct
  source 1..75: mol_type = other DNA
atgacagaacaacaaaaattgaccttttctgctttgcagcagcggctggattcgctgatgctgcgtgacagactg

SEQ ID NO: 716024 - DNA, 75 bp, synthetic construct
  source 1..75: mol_type = other DNA
ttaatgccttgcagcagcggctggattcgctaatgctgcgtgacagaatgcgcttttcccgccgtctgcatggtg

SEQ ID NO: 716025 - DNA, 75 bp, synthetic construct
  source 1..75: mol_type = other DNA
atcttgccgctttacgcacgactgtcgaacagcgaacaaaatagggtgttccagtcgcacagcgggcggcgcatt

SEQ ID NO: 716026 - DNA, 75 bp, synthetic construct
  source 1..75: mol_type = other DNA
ccaaagtgcagcgtttgccgattgaacccatttcgcaggcgtctgccaatcagcgtaaaggccgctgtggtcgtg

SEQ ID NO: 716027 - DNA, 75 bp, synthetic construct
  source 1..75: mol_type = other DNA
ccgcactttggaagaaggccagcaggtcgaattctctatcgagaatggggctaaaggcccagcagcagcaaatgt

SEQ ID NO: 716028 - DNA, 75 bp, synthetic construct
  source 1..75: mol_type = other DNA
ggtctgtggtttcgacaataccgaactgcttgtttcggaagtcacgtttactcaggaccagaacggcaccctgac

SEQ ID NO: 716029 - DNA, 75 bp, synthetic construct
  source 1..75: mol_type = other DNA
ctctcctgaaagagtgtgcagaacacagcagcagctggacggaggcgctggatgagttcgaaggtattggccagg

SEQ ID NO: 716030 - DNA, 75 bp, synthetic construct
  source 1..75: mol_type = other DNA
caaagtgaaagcgtggcctgcgctggtggatgaacgtgacagcgtggcgatcaaattgtttgataatccactgga

SEQ ID NO: 716031 - DNA, 75 bp, synthetic construct
  source 1..75: mol_type = other DNA
aaaaccggtacgtcgtaattttgtgcctgcgccaaactacgccgaagcgtttttaggccgcgtgacgccactgga

SEQ ID NO: 716032 - DNA, 75 bp, synthetic construct
  source 1..75: mol_type = other DNA
ggtcaaaaggttaccttctctatagagagtggtgctaaaggtcctgcagcagcaaatgtcatcattactgattaa

SEQ ID NO: 716033 - DNA, 75 bp, synthetic construct
  source 1..75: mol_type = other DNA
gaatgaagacgactgcaaaataagaagaggaaacgcagcagaattattttcagggatacggcacattgctattaa

SEQ ID NO: 716034 - DNA, 75 bp, synthetic construct
  source 1..75: mol_type = other DNA
atggaacttaaaaaactgatggaacatatttctattatccccgattacagacaagccaggaaagtagaacataaa

SEQ ID NO: 716035 - DNA, 75 bp, synthetic construct
  source 1..75: mol_type = other DNA
agtcacagcagagaagaaatccgtcttcatattgtttgcgatgtccctgatgaacttattgatttcacgtttgaa

SEQ ID NO: 716036 - DNA, 75 bp, synthetic construct
  source 1..75: mol_type = other DNA
ctggcacgtggagaataagctgcactggcgtctggacgtggtaatgaatgaagacgactgcaaaataagaagagg

SEQ ID NO: 716037 - DNA, 75 bp, synthetic construct
  source 1..75: mol_type = other DNA
aatcatcacgactgatgcgatgggttgccagaaagatattgcagagaagatacaaaaacagggaggtgattattt

SEQ ID NO: 716038 - DNA, 75 bp, synthetic construct
  source 1..75: mol_type = other DNA
gggaagatatagaggatttcggggaaacacatctcgatttcttgaagcaatatggtgattttgaaaatggtattc

SEQ ID NO: 716039 - DNA, 75 bp, synthetic construct
  source 1..75: mol_type = other DNA
acgtttgtattgaaaggtcttaataaattatgcttggcagtctcctttcggtttataatagcagaacaaaagaaa

SEQ ID NO: 716040 - DNA, 75 bp, synthetic construct
  source 1..75: mol_type = other DNA
aagacggatgagaaatctaatgagattacagccattcctgaacttcttaacatgctggatattaaaggaaaaatc

SEQ ID NO: 716041 - DNA, 75 bp, synthetic construct
  source 1..75: mol_type = other DNA
caatgcacagtgtggttctcggcagattaagacggatgagaaatccaatgagattacagccattcctgaacttct

SEQ ID NO: 716042 - DNA, 75 bp, synthetic construct
  source 1..75: mol_type = other DNA
gatgataaagacgtcatcgcaattgatggaaaaacgctccgacactcttatgacaagagtcgccgcaggggagcg

SEQ ID NO: 716043 - DNA, 75 bp, synthetic construct
  source 1..75: mol_type = other DNA
aaatccgtcttcatattgtttgcgatgtccctgatgaacttattgatttcacgtttgaatggaaaggtctgaaga

SEQ ID NO: 716044 - DNA, 75 bp, synthetic construct
  source 1..75: mol_type = other DNA
atgagatcacagctatccctgaacttcttaacatgctggatattaaaggaaaaatcatcacaactgatgcgatgg

SEQ ID NO: 716045 - DNA, 75 bp, synthetic construct
  source 1..75: mol_type = other DNA
ttatttattcgctgtaaaaggaaaccaggggcggcttaataaagcctttgaggaaaaatttccgctgaaagaatt

SEQ ID NO: 716046 - DNA, 75 bp, synthetic construct
  source 1..75: mol_type = other DNA
tgcctgagcttttaacccggacggatagctactgcggcaggctgctgacaaaatacgcgcttaagctgtcgctga

SEQ ID NO: 716047 - DNA, 75 bp, synthetic construct
  source 1..75: mol_type = other DNA
tactgattatgtcgacagccatcatgatgctgttgcgtattgattatgaaacgcgtctggagaaagcgcaggcgt

SEQ ID NO: 716048 - DNA, 75 bp, synthetic construct
  source 1..75: mol_type = other DNA
ctggatattaaaggaaaaatcatcacaactgatgcgatgggttgccagaaagatattgcagagaagatacaaaaa

SEQ ID NO: 716049 - DNA, 75 bp, synthetic construct
  source 1..75: mol_type = other DNA
gaatgaagacgactacaaaataagaagaggaaacgcagcagaattatttcagggatacggcacattgctattaat

SEQ ID NO: 716050 - DNA, 75 bp, synthetic construct
  source 1..75: mol_type = other DNA
caaaatttcacgagtgctttattaacttgatgcgtgattgtcattcttcagatgataaagacgtcattgcaattg

SEQ ID NO: 716051 - DNA, 75 bp, synthetic construct
  source 1..75: mol_type = other DNA
aacaatatggtgattttgaaaatggtattcctgttcacgataccattgccagagttgtatcctgtatcagtcctt

SEQ ID NO: 716052 - DNA, 75 bp, synthetic construct
  source 1..75: mol_type = other DNA
aaggcagggttaagacgtaagatgcgaaaagcagccatggacagaaactacctggcgtcagtccttgcggggagc

SEQ ID NO: 716053 - DNA, 75 bp, synthetic construct
  source 1..75: mol_type = other DNA
acgtttgaatggaaagggctgaagaaattatgcgtggcagtctcctttcggtccataatagcagaacaaagaaag

SEQ ID NO: 716054 - DNA, 75 bp, synthetic construct
  source 1..75: mol_type = other DNA
aaccactggcaagtggagaataagctgcactggcgtctggacgtggtaatgaatgaagacgactgcaaaataaga

SEQ ID NO: 716055 - DNA, 75 bp, synthetic construct
  source 1..75: mol_type = other DNA
agagaagttcgccacagcaatccgaaaccactggcaagtggagaataagctgcactggcgtctggacgtggtaat

SEQ ID NO: 716056 - DNA, 75 bp, synthetic construct
  source 1..75: mol_type = other DNA
aagacggataagaaatctaatgagattacagctatccctgaacttattaacatgctggatattaaaggaaaaatc

SEQ ID NO: 716057 - DNA, 75 bp, synthetic construct
  source 1..75: mol_type = other DNA
agtcctgcaaaatttcacgagtgctttattaactggatgcgagattgccattcttcagatgataaagacgtcatc

SEQ ID NO: 716058 - DNA, 75 bp, synthetic construct
  source 1..75: mol_type = other DNA
gaaaccactggcacgtggagaataagctgcactggcgtctggacgtggtaatgaatgaagacgactgcaaaataa

SEQ ID NO: 716059 - DNA, 75 bp, synthetic construct
  source 1..75: mol_type = other DNA
tatcccagcctgaaagattcatactggttatcgttgaactatggtatgcaggaggctgctcgccgctacggtgtg

SEQ ID NO: 716060 - DNA, 75 bp, synthetic construct
  source 1..75: mol_type = other DNA
atgcgcgtactgctatttttacttctttcccttttcatgttgccggcattttcggctgataacctgttgcgctgg

SEQ ID NO: 716061 - DNA, 75 bp, synthetic construct
  source 1..75: mol_type = other DNA
tgcaatggagccacggaaaaccactgaacgtactgttgatgcctggccccgataacgcagggggcagtaaggaga

SEQ ID NO: 716062 - DNA, 75 bp, synthetic construct
  source 1..75: mol_type = other DNA
ccagtgatcgaactggtgaatgcgattggtgatcaccaggtgaaaagccgcgttggtgtaccctggtttcagatg

SEQ ID NO: 716063 - DNA, 75 bp, synthetic construct
  source 1..75: mol_type = other DNA
ttgacgactcacaggtaacaagccgcgttggcgtgccctggtttcagatgggctatcagccggggcggtatctgg

SEQ ID NO: 716064 - DNA, 75 bp, synthetic construct
  source 1..75: mol_type = other DNA
tatcccagtctgaaggattcatactggttatcgttgaactatggtatgcagaaagcagcccgccgctatggtgtg

SEQ ID NO: 716065 - DNA, 75 bp, synthetic construct
  source 1..75: mol_type = other DNA
ggtgttagaaagcgtagcgattacccaaatagacgccgaccacgcggatgccgttgtgcgctttcgtgccttcaa

SEQ ID NO: 716066 - DNA, 75 bp, synthetic construct
  source 1..75: mol_type = other DNA
tacgacaatccgatttgttttggcgaagagtcgctattttctcgcgttgatgaaattcgtgtactcgagaaaact

SEQ ID NO: 716067 - DNA, 75 bp, synthetic construct
  source 1..75: mol_type = other DNA
tcaaccggggcggcacaggtgatcatgccgcacgttgtcggttctgtggaggtctatgaacagcagacttcctgg

SEQ ID NO: 716068 - DNA, 75 bp, synthetic construct
  source 1..75: mol_type = other DNA
gtagtagcactacgtcatttcccgacctgcaaaagcaggtagcaaatctgccggtgatcgaactggtaaatgctc

SEQ ID NO: 716069 - DNA, 75 bp, synthetic construct
  source 1..75: mol_type = other DNA
gctacagccagttggctacccagcaagcacaaatcgaccagtgtaaacagtggggcgcagaggccattttgctcg

SEQ ID NO: 716070 - DNA, 75 bp, synthetic construct
  source 1..75: mol_type = other DNA
atgaaattaatacttctgtttttggcgttttttgcaagcttcactactcaggcacaatcaccctcgctgactgct

SEQ ID NO: 716071 - DNA, 75 bp, synthetic construct
  source 1..75: mol_type = other DNA
gatcaaatggtctggcagggggaactggcggttgagcaagcgatcaggcaattacagggacaatcggtgtctgat

SEQ ID NO: 716072 - DNA, 75 bp, synthetic construct
  source 1..75: mol_type = other DNA
tatggtgggctttgcccgcctgatggcggcgcatcgtcatgaaatcgcggcggtgatcattgaaccgattgtcca

SEQ ID NO: 716073 - DNA, 75 bp, synthetic construct
  source 1..75: mol_type = other DNA
ttgcgcggtgcgcagttctggcttgtttttgatgttgagcgcgagggggccgcgattgactggagcgaccggaac

SEQ ID NO: 716074 - DNA, 75 bp, synthetic construct
  source 1..75: mol_type = other DNA
tggcttgatgccgtgattcagcgtgtcgaaatgtacaacgcatcgcttcccgttccgctttctccggctgaatgt

SEQ ID NO: 716075 - DNA, 75 bp, synthetic construct
  source 1..75: mol_type = other DNA
catcgtcatgaaatcgcggcggtgatcattgaaccgattgttcagggcgctggcggaatgcgcatgtaccatccg

SEQ ID NO: 716076 - DNA, 75 bp, synthetic construct
  source 1..75: mol_type = other DNA
gccggctgctttatgcatgggccaacttttatgggcaatccgctggcctgcgcggcagcaaacgccagcctggcg

SEQ ID NO: 716077 - DNA, 75 bp, synthetic construct
  source 1..75: mol_type = other DNA
actcaatgcacagcctgtggaaaggctatctgccagaaaacttgtttgctcccgccccgcaaagccgcatggatg

SEQ ID NO: 716078 - DNA, 75 bp, synthetic construct
  source 1..75: mol_type = other DNA
ggacgcagcggcgatatctggcatggatatctgccggatgcgcgcccgggtttacgttatggttatcgcgtacat

SEQ ID NO: 716079 - DNA, 75 bp, synthetic construct
  source 1..75: mol_type = other DNA
cgtagaacatcggtatgacttgccaggacgaagtggcgatatctggcacggttatctgccggatgcgcgcccggg

SEQ ID NO: 716080 - DNA, 75 bp, synthetic construct
  source 1..75: mol_type = other DNA
gtagtagcacgacgtcatttcccgatctgcaaaagcaggtagcaagtctgccggtgatcgaactggtaaatgcta

SEQ ID NO: 716081 - DNA, 75 bp, synthetic construct
  source 1..75: mol_type = other DNA
gctggagaggataacccagtgattacggctgtctggcagggacctgcacacggattgtgtgtgttccagagatga

SEQ ID NO: 716082 - DNA, 75 bp, synthetic construct
  source 1..75: mol_type = other DNA
gctgattgctgaaccgtgggatatcgcacccggcggctatcaggtggggaatttccctccgctgtttgccgagtg

SEQ ID NO: 716083 - DNA, 75 bp, synthetic construct
  source 1..75: mol_type = other DNA
ttatcaggtgggaaatttcccgccgctgtttgccgagtggaacgatcatttccgcgatgctgcccgtcgtttctg

SEQ ID NO: 716084 - DNA, 75 bp, synthetic construct
  source 1..75: mol_type = other DNA
aattaaaagcatctaaagatatttatcatgaatttgttagcggcaaaatagacagtgacgataagttcgaaactc

SEQ ID NO: 716085 - DNA, 75 bp, synthetic construct
  source 1..75: mol_type = other DNA
gcagctggctgatctggtgaaactgctgggcgaacgctgcaagacgctgaaagagatggcacagagctgccgtta

SEQ ID NO: 716086 - DNA, 75 bp, synthetic construct
  source 1..75: mol_type = other DNA
atggagcactactttgagatccgcgttctgccagatcctgaattttcgagtgaaatgttgatggcagcgttattt

SEQ ID NO: 716087 - DNA, 75 bp, synthetic construct
  source 1..75: mol_type = other DNA
tgttaaggcgttcagtgaaaaaaggctggtttactgaagaacaggcgattgagcgactggcgacgcaaactgaac

SEQ ID NO: 716088 - DNA, 75 bp, synthetic construct
  source 1..75: mol_type = other DNA
ataaataaaggcattctggtcaaagaagggaagcataccatgataaacgcaaatctcttcctaaaaggccagggt

SEQ ID NO: 716089 - DNA, 75 bp, synthetic construct
  source 1..75: mol_type = other DNA
aagcctggcccttacataccccgtttgtgattgctcggggaagtcgtagtgaagcgcgcgtggtggtggtggagt

SEQ ID NO: 716090 - DNA, 75 bp, synthetic construct
  source 1..75: mol_type = other DNA
tggcgcaaattatgagcgtcgtgccgcaattagagaaagggctgacacgggaggaattacaaaaaattctccctg

SEQ ID NO: 716091 - DNA, 75 bp, synthetic construct
  source 1..75: mol_type = other DNA
gtgaaaagtgcgcgccctgtactggctgccatcctgctgtttctggtagtggtggtggatttcaccggacgactg

SEQ ID NO: 716092 - DNA, 75 bp, synthetic construct
  source 1..75: mol_type = other DNA
aattgcacaggcgcttcagttaccactggagcagtatctgtgaaaagtgcgcgccttgtgctggctgccatcctg

SEQ ID NO: 716093 - DNA, 75 bp, synthetic construct
  source 1..75: mol_type = other DNA
ctgccatcctgctgtttctggtagtggcggtggattttaccgggcacctgatgtcgatactggcagatggtgtac

SEQ ID NO: 716094 - DNA, 75 bp, synthetic construct
  source 1..75: mol_type = other DNA
tccgtcgaatttacggctaaggacggtactcgtctgcaaggctggtttatcccctcttcgacgggttccgctgac

SEQ ID NO: 716095 - DNA, 75 bp, synthetic construct
  source 1..75: mol_type = other DNA
gcggtgatcctcgactccacatttgcctcttactcaaccatcgccaaccagatgatccccggcagtggttactta

SEQ ID NO: 716096 - DNA, 75 bp, synthetic construct
  source 1..75: mol_type = other DNA
tcagggagaacgtgagggcatacgtgcggtgatcctcgactccacgtttgcctcttattcgaccatcgccaacca

SEQ ID NO: 716097 - DNA, 75 bp, synthetic construct
  source 1..75: mol_type = other DNA
ttgattgggactctttttcagaagacaacatatttgatgattattctcaagaagatgagtttgatgaaaaagaaa

SEQ ID NO: 716098 - DNA, 75 bp, synthetic construct
  source 1..75: mol_type = other DNA
gccgttgccacatcggcacgaactctgaagccgtgggtgacgttagggatcagtcgtgccacatactatcgaaaa

SEQ ID NO: 716099 - DNA, 75 bp, synthetic construct
  source 1..75: mol_type = other DNA
gatacgcacacaccagaaatacaggccaagagaggccggaaaggtggcatcgctaaaggcgaagcctacgatgac

SEQ ID NO: 716100 - DNA, 75 bp, synthetic construct
  source 1..75: mol_type = other DNA
cgataaacattacgggctggggcgaaactgccatctgttcgaaatgacgcgcaaatgggcttacagggcgattcg

SEQ ID NO: 716101 - DNA, 75 bp, synthetic construct
  source 1..75: mol_type = other DNA
tggaaagacaccttcttcttttggatcgattcgttgataagttggttgaatctggtttcagtgaaaaagatatca

SEQ ID NO: 716102 - DNA, 75 bp, synthetic construct
  source 1..75: mol_type = other DNA
tcggttaaggcgctgaaatacgccgctgcgattgaacgttcgctgtgtgagaaactttgtgctgatgtgaactac

SEQ ID NO: 716103 - DNA, 75 bp, synthetic construct
  source 1..75: mol_type = other DNA
tccacctggaatggcaggtgatggagtggcgcgaggaagcctataccctcgatgaactggcagattatctcgatt

SEQ ID NO: 716104 - DNA, 75 bp, synthetic construct
  source 1..75: mol_type = other DNA
tctccttttgttccactgtttcttggattcctgcaacgctacaaaccagacgcgaaactgggtacttactattcg

SEQ ID NO: 716105 - DNA, 75 bp, synthetic construct
  source 1..75: mol_type = other DNA
tggctggtgatggagtggcgcgaggaagcctataccctcgatgaactggctgattatctcgatttgagcgcctca

SEQ ID NO: 716106 - DNA, 75 bp, synthetic construct
  source 1..75: mol_type = other DNA
ttgacccggacgtggtttccgcttctcaacatacgcaacctggtggattcgccagacgattgaacgggcgattat

SEQ ID NO: 716107 - DNA, 75 bp, synthetic construct
  source 1..75: mol_type = other DNA
tcggttaaggcactgaaatacgccgctgcaattgaacgtgcgctgtgtgagaaacttgacgcagatgtgaactac

SEQ ID NO: 716108 - DNA, 75 bp, synthetic construct
  source 1..75: mol_type = other DNA
atgcctggcgggcgtgcctatcgtccgggcgatgtgttaaccaccatgtccggtcaaaccgtagaagtgctgaat

SEQ ID NO: 716109 - DNA, 75 bp, synthetic construct
  source 1..75: mol_type = other DNA
tacggcgtgatgcgtatggtcgcggagctgcaactgccgattaacgttattggcgtgctggcaggctgcgaaaac

SEQ ID NO: 716110 - DNA, 75 bp, synthetic construct
  source 1..75: mol_type = other DNA
aggatccgcgcgaacgtccaatggacaaacaacaggcgtcagatgagaagcaccgccgcttccacgataaagagt

SEQ ID NO: 716111 - DNA, 75 bp, synthetic construct
  source 1..75: mol_type = other DNA
gacgccgcttggccgccagttgagccagttgccggtggatccgcgtctggcgcgaatggtactggaagcgcaaaa

SEQ ID NO: 716112 - DNA, 75 bp, synthetic construct
  source 1..75: mol_type = other DNA
tctgctcgaagaactgggcgcgatcaccactgatgaacagcaaagtgcttataaactgacgccgctcggtcgtca

SEQ ID NO: 716113 - DNA, 75 bp, synthetic construct
  source 1..75: mol_type = other DNA
tcctctcccacctgctgtacaccatctatttcgccagccagatgacattctcttttttctggccgctaccgttgg

SEQ ID NO: 716114 - DNA, 75 bp, synthetic construct
  source 1..75: mol_type = other DNA
cgtggtcagatcctgacaggcgctgtggtgactgacgggatcaaaaaaggcgtggtatgcgtgcatgaaggtgca

SEQ ID NO: 716115 - DNA, 75 bp, synthetic construct
  source 1..75: mol_type = other DNA
aaagcgctgtcgtcgaatgcatttcgtcgcctgtgtcgtaccgattacctgaactatttgcgcgtgcgcgaatgg

SEQ ID NO: 716116 - DNA, 75 bp, synthetic construct
  source 1..75: mol_type = other DNA
aagtcggcgccagtgaatccgcgatcccccctctgaagatgctactgctggaaggggcgcgtcaggcggcgcttg

SEQ ID NO: 716117 - DNA, 75 bp, synthetic construct
  source 1..75: mol_type = other DNA
cacccggccagacaaagacccgcggctgaatcaccttcatcgggtcacaacccgtaaacagcactggccggagct

SEQ ID NO: 716118 - DNA, 75 bp, synthetic construct
  source 1..75: mol_type = other DNA
cagaaagcacttaacgacgtgactggtcagggatggtggattggacgtcctatcgaaatgccggggtcatatcct

SEQ ID NO: 716119 - DNA, 75 bp, synthetic construct
  source 1..75: mol_type = other DNA
tctggaagccgttcgcgatcatcaggtcgtgattgtggccggggaaaccggttcggggaaaaccactcagctacc

SEQ ID NO: 716120 - DNA, 75 bp, synthetic construct
  source 1..75: mol_type = other DNA
tgctgaactgaacgacacggtggtggatattgcgaagcaggtcgagcaaatcctcactgcggtgttcaatatcaa

SEQ ID NO: 716121 - DNA, 75 bp, synthetic construct
  source 1..75: mol_type = other DNA
agagcacgtcgtgaaatgtctggtcttctatcatccactcgatgcagagtcggtacgtcttgaacaagaggcgct

SEQ ID NO: 716122 - DNA, 75 bp, synthetic construct
  source 1..75: mol_type = other DNA
gggagcaacttatgtcattaaaatccgtcttcatattgtttgcatgtctctgatgaatttattgattttacgttt

SEQ ID NO: 716123 - DNA, 75 bp, synthetic construct
  source 1..75: mol_type = other DNA
ctgaacgacacggtggtggatattgcgaagcaggtcgagcaaatcctcactgcggtgttcaatatcaataaacgt

SEQ ID NO: 716124 - DNA, 75 bp, synthetic construct
  source 1..75: mol_type = other DNA
attcttccgctttatgcacggctttcgaacagcgagcagaaccgcgtcttccagtcgcacagcggacggcgcatt

SEQ ID NO: 716125 - DNA, 75 bp, synthetic construct
  source 1..75: mol_type = other DNA
tcaccaggtggtgatcgtcgccggggaaaccggttccggtaaaacgactcagctaccgaaaatctgtatggagct

SEQ ID NO: 716126 - DNA, 75 bp, synthetic construct
  source 1..75: mol_type = other DNA
gattgaggagttgcgcgtcagctacttcgcgcaacaactcggtacgccgtatccgatttcggataagcgtatttt

SEQ ID NO: 716127 - DNA, 75 bp, synthetic construct
  source 1..75: mol_type = other DNA
tgcggaagagctaaaaacggagccgggcggttgcatcggttacaaagtgcgtttcagcgatcacgtcagtgataa

SEQ ID NO: 716128 - DNA, 75 bp, synthetic construct
  source 1..75: mol_type = other DNA
gatagaagagctgcgcgttagttacttcgctcaacaacttgggacgccttatccgatttcggataagcgtatttt

SEQ ID NO: 716129 - DNA, 75 bp, synthetic construct
  source 1..75: mol_type = other DNA
gcaaaagaaagagcccgaaatgatggtcagatattatatcagttctgctgatttaaccgctgagaagtttgcgac

SEQ ID NO: 716130 - DNA, 75 bp, synthetic construct
  source 1..75: mol_type = other DNA
gctgcccagaaaggcgcccgtgcgcagcgtgtcagtatgccggtgtttgggaccttctggcagcaaaataaactg

SEQ ID NO: 716131 - DNA, 75 bp, synthetic construct
  source 1..75: mol_type = other DNA
catccggcacaccgtttacacagtcagcttaactatgctgagttgcgtaaaaaatatgcggttgccgatcgtgaa

SEQ ID NO: 716132 - DNA, 75 bp, synthetic construct
  source 1..75: mol_type = other DNA
ctgaatattccatcgccgatcaagtacttgcatgaaaagttaccaaacaaagccaagttagggctgtactttaac

SEQ ID NO: 716133 - DNA, 75 bp, synthetic construct
  source 1..75: mol_type = other DNA
gaagcgttcttaggccgcgtcacgccactggagctgccgttgctcgacagccttgagcgcgagctacgtaggatg

SEQ ID NO: 716134 - DNA, 75 bp, synthetic construct
  source 1..75: mol_type = other DNA
cctttcggtccataatagcagaacaaaagaaagagccagaaatgacggtcagatattatatcagttctgctgatt

SEQ ID NO: 716135 - DNA, 75 bp, synthetic construct
  source 1..75: mol_type = other DNA
ccagaaattctacgtactaacctggcctcggttattttgcagatgaccgcactgggcttgggcgatatcgccgca

SEQ ID NO: 716136 - DNA, 75 bp, synthetic construct
  source 1..75: mol_type = other DNA
ataccacaacacgcaagccatcagcaggagatgttggtgcatataccaaagccgaatcagattctcgctatgtac

SEQ ID NO: 716137 - DNA, 75 bp, synthetic construct
  source 1..75: mol_type = other DNA
acagcgtgatgcagaaactggcaatgctgaccgcccctttatccacccccgtgtattctcccgtaaaaattttca

SEQ ID NO: 716138 - DNA, 75 bp, synthetic construct
  source 1..75: mol_type = other DNA
cttgaaactgcgttacgcaatgccggggttaatgatgtgcgtgtgcctgatgacgttatcaggatgcagcgggaa

SEQ ID NO: 716139 - DNA, 75 bp, synthetic construct
  source 1..75: mol_type = other DNA
tagggcaaacaggaagcagggttgcaaatgataaagctgttggctggaactggaatagcggtgtttatgatgcag

SEQ ID NO: 716140 - DNA, 75 bp, synthetic construct
  source 1..75: mol_type = other DNA
atgcaaataataaggttattacagatacaggttgcggaaatatttgtccttgcaggtgctgtggtggaagttatt

SEQ ID NO: 716141 - DNA, 75 bp, synthetic construct
  source 1..75: mol_type = other DNA
tgccctgctgtacagttccgcgtgaattataaaaacggcggtatcttttatcgttcagcgcgtgatggttatggt

SEQ ID NO: 716142 - DNA, 75 bp, synthetic construct
  source 1..75: mol_type = other DNA
gctggctgctttatgcatgggccaacttttatgggtaatccgctggcctgcgcagcagcaaacgccagcctgacg

SEQ ID NO: 716143 - DNA, 75 bp, synthetic construct
  source 1..75: mol_type = other DNA
tgcggaaaccatcagtaacggcgaagccggttgctttatgcacgggccaacttttatgggcaatccgctggcctg

SEQ ID NO: 716144 - DNA, 75 bp, synthetic construct
  source 1..75: mol_type = other DNA
tcgaacaaggcgtgtggatccgtccttttggcaaacttatctacctgatgccgccctatattattcgcccggaac

SEQ ID NO: 716145 - DNA, 75 bp, synthetic construct
  source 1..75: mol_type = other DNA
cgggcaaaagccatcaaccagcgtgccagtgaaaattaccgtagaagccaccagcaggccgcaggcaaatctgat

SEQ ID NO: 716146 - DNA, 75 bp, synthetic construct
  source 1..75: mol_type = other DNA
aaaaaggcgggaaagcaggctgcgggcggactgccttccctggttaatctcccggccacttctgcggcggcgttt

SEQ ID NO: 716147 - DNA, 75 bp, synthetic construct
  source 1..75: mol_type = other DNA
atgacaacggacgatcttgcctttgaccaacgccatatctggcacccgtacacatccatgacctccccgctaccg

SEQ ID NO: 716148 - DNA, 75 bp, synthetic construct
  source 1..75: mol_type = other DNA
atgaaatttcccggcaaacgtaaatccaaacattacttccccgtaaatgcacgcgatccgctgttgcagcaaatc

SEQ ID NO: 716149 - DNA, 75 bp, synthetic construct
  source 1..75: mol_type = other DNA
aaatactctatacttgattcaaattattgcctttatttttgttacgattatttatctgcattcttccaacaaaga

SEQ ID NO: 716150 - DNA, 75 bp, synthetic construct
  source 1..75: mol_type = other DNA
ttcctgtggatttgatttggtatcttatttttgcaaacaagacactactcatagtcttttcccaatgggtttcgg

SEQ ID NO: 716151 - DNA, 75 bp, synthetic construct
  source 1..75: mol_type = other DNA
ccgtcggcctcaatacgcgagtgttacaaaactatccccgtgaactctctggcggaatgggacagcgagtgatga

SEQ ID NO: 716152 - DNA, 75 bp, synthetic construct
  source 1..75: mol_type = other DNA
catcgtacaccaatactgcgggcgcgacagtgactgacttcatccggcgcatcagtgatatgacagacagccgac

SEQ ID NO: 716153 - DNA, 75 bp, synthetic construct
  source 1..75: mol_type = other DNA
ttcagcgaaccctccgtccgtttcatctccgtaacaagacaactggaagaggggcgtttccgttatcaattcaca

SEQ ID NO: 716154 - DNA, 75 bp, synthetic construct
  source 1..75: mol_type = other DNA
gtgacctggtgggaacccgggaggaaatcagggaggcccgggaaatattcctcaccattaacagcgcgcctgaac

SEQ ID NO: 716155 - DNA, 75 bp, synthetic construct
  source 1..75: mol_type = other DNA
tttaaccagtatgagtttagccgcgccatgcgccacaaggattgccagaatccgttgcgtgtctattcgcacatt

SEQ ID NO: 716156 - DNA, 75 bp, synthetic construct
  source 1..75: mol_type = other DNA
gtcgttagcgcaggtgtgtaaatatgccaaccgcgtcagttatcaggtgcttaaccagcattcgccacgcttaac

SEQ ID NO: 716157 - DNA, 75 bp, synthetic construct
  source 1..75: mol_type = other DNA
atcgttagcgcaggtgtgtaaatatgctaaccgtgtgagctatcaggtactgaaccagcattcacctcgtttaac

SEQ ID NO: 716158 - DNA, 75 bp, synthetic construct
  source 1..75: mol_type = other DNA
gccattatttctggcggtagcggcagtgcagaggataaattccgtgcgttcgataaagcaggcatggcatggaca

SEQ ID NO: 716159 - DNA, 75 bp, synthetic construct
  source 1..75: mol_type = other DNA
caaacagacgcggtaattatgatcggtgaaattggtggtaatgcggaagaacgggccgcggaatttattcgccat

SEQ ID NO: 716160 - DNA, 75 bp, synthetic construct
  source 1..75: mol_type = other DNA
cctacgaagctgtagcgcaaaccacggcgctggggcttgggcaatccacctgtattggtattggcggcgatccgg

SEQ ID NO: 716161 - DNA, 75 bp, synthetic construct
  source 1..75: mol_type = other DNA
agacgataaacttactaaaatacgttatacaacaactatcaacgatgtaactctcaaacagcgttacattttaat

SEQ ID NO: 716162 - DNA, 75 bp, synthetic construct
  source 1..75: mol_type = other DNA
agatgtaaaactcaaaaaaatccactatacgacaactgcttatgatgtaacactcaaagaacgttatattttaat

SEQ ID NO: 716163 - DNA, 75 bp, synthetic construct
  source 1..75: mol_type = other DNA
gaagagctggatgctgatacctggcgggccacactgcatattgaggtgtttttaccggcacaggtacctgattcg

SEQ ID NO: 716164 - DNA, 75 bp, synthetic construct
  source 1..75: mol_type = other DNA
gattctggcgtttttttatttggtggtcattggtacgtccctgacatttagtctgtacctaaaaggagcacaatt

SEQ ID NO: 716165 - DNA, 75 bp, synthetic construct
  source 1..75: mol_type = other DNA
caataataacgtcaataatcttgagtggtgcactcaaagcgaaaacatcaaacatgcatacgccaccggattaaa

SEQ ID NO: 716166 - DNA, 75 bp, synthetic construct
  source 1..75: mol_type = other DNA
attcaataaacttatattagaggcatctaaaacccccacacaagatgaaattaaaatacttgagagaagaagtaa

SEQ ID NO: 716167 - DNA, 75 bp, synthetic construct
  source 1..75: mol_type = other DNA
gagctacggtaagctggtgcgccgttatccttcggcgggctctgcctacacttatgcccagaaatccatcagccc

SEQ ID NO: 716168 - DNA, 75 bp, synthetic construct
  source 1..75: mol_type = other DNA
gagctacgggaagttggttcgccgctatccttctgctggctctgcatacacttacgcccagaaatccattagccc

SEQ ID NO: 716169 - DNA, 75 bp, synthetic construct
  source 1..75: mol_type = other DNA
ggttggcgcgattgccctgctggcaatcaacttcgacctggtaatggctacggcgctgatcaactttggtgcgtt

SEQ ID NO: 716170 - DNA, 75 bp, synthetic construct
  source 1..75: mol_type = other DNA
accacgatggttacgcagggctatgagtatcgtcgtgatgacgatatggcgttatggagttctgcagatctgact

SEQ ID NO: 716171 - DNA, 75 bp, synthetic construct
  source 1..75: mol_type = other DNA
ctccaccattaccgtgctggcttccggtatggcggcgcatgcgggtgtggcgcgtctgatgtacgtgatgggtcg

SEQ ID NO: 716172 - DNA, 75 bp, synthetic construct
  source 1..75: mol_type = other DNA
gctgatcggcggtatgatcttcatctttgcgacttacttcctgcagttgtacttcccggatatctctcgttttaa

SEQ ID NO: 716173 - DNA, 75 bp, synthetic construct
  source 1..75: mol_type = other DNA
actgcgctcaaaaccttcaactggcgcagaaataaccctgatctcatcaaacgagcaatgcagcacggtaaacta

SEQ ID NO: 716174 - DNA, 75 bp, synthetic construct
  source 1..75: mol_type = other DNA
tttaggtcacagagatataaaatatcgtcattatttaaatgaatgtatacgtttttttttgaaagcacaattaac

SEQ ID NO: 716175 - DNA, 75 bp, synthetic construct
  source 1..75: mol_type = other DNA
gtacgacaatattattattttgttttttggaaaggcagaaaaaaaaaggtagaaaatatcggcgtttcatttgca

SEQ ID NO: 716176 - DNA, 75 bp, synthetic construct
  source 1..75: mol_type = other DNA
ttctgtaaaaaaaataacattaaaaaaatttttatacaacctcatcctaatttaggacatagagatgcaaagtat

SEQ ID NO: 716177 - DNA, 75 bp, synthetic construct
  source 1..75: mol_type = other DNA
aactgataatcacgccaacccaccttcggcagacgccgtggtcttctcgccggacggtaaatggctggcgtggat

SEQ ID NO: 716178 - DNA, 75 bp, synthetic construct
  source 1..75: mol_type = other DNA
gtttggcccggtcaacgtacaaaagcagcatccgcgtgaatacagcggtagccactggtgcgtgctggtgagtaa

SEQ ID NO: 716179 - DNA, 75 bp, synthetic construct
  source 1..75: mol_type = other DNA
attgataaaaaatataccaatgaattatacattcctaaaaggcttaacacatatacatcaaaaactttttttgat

SEQ ID NO: 716180 - DNA, 75 bp, synthetic construct
  source 1..75: mol_type = other DNA
aacattctaacagaagaaaatacttttctttattggcgatagttttatttattgcgttttcaggtgcctatgcct

SEQ ID NO: 716181 - DNA, 75 bp, synthetic construct
  source 1..75: mol_type = other DNA
ctgcttacaccagtaaggccttagttatcgataccagtccgatagaaaaagagattaacaacattatttctcata

SEQ ID NO: 716182 - DNA, 75 bp, synthetic construct
  source 1..75: mol_type = other DNA
cgttcagcgtgtaccggttgaagtttctcttgatccaaaagaactcatggaacaccccttgcgcattggtttatc

SEQ ID NO: 716183 - DNA, 75 bp, synthetic construct
  source 1..75: mol_type = other DNA
cctacatgggagggtggagttccggaagaaaattattgctcgattagtatgtctatcgcaaaaaacatagataaa

SEQ ID NO: 716184 - DNA, 75 bp, synthetic construct
  source 1..75: mol_type = other DNA
tatacattgatacaaaaattgaaggagctttggaacagttaattcgttattttcaggcacaagtattcaatgtgg

SEQ ID NO: 716185 - DNA, 75 bp, synthetic construct
  source 1..75: mol_type = other DNA
acgtcaaatgtgggttaatgccaactttaaagaaacacaactcacggatgtacggattggtcaatcggtcaatat

SEQ ID NO: 716186 - DNA, 75 bp, synthetic construct
  source 1..75: mol_type = other DNA
atgggtctagcctatatgcagccgatgacgctgtttgatacttttggtatcgtttcaggcctcacggatggtcat

SEQ ID NO: 716187 - DNA, 75 bp, synthetic construct
  source 1..75: mol_type = other DNA
cacaaattaatgccctgcacgggacgttactggagtttggtgaaaccatccacaaaggccgggcagcgatggaac

SEQ ID NO: 716188 - DNA, 75 bp, synthetic construct
  source 1..75: mol_type = other DNA
caccatcgccaatatctggctggtaaaagatactgcagcgtatgccggtaagggcaacaaatggtggcgtgcagt

SEQ ID NO: 716189 - DNA, 75 bp, synthetic construct
  source 1..75: mol_type = other DNA
acctggggactgctggagctggtcaactccgtggttgggctgattattgtgttgattatcagcatggtagcgtaa

SEQ ID NO: 716190 - DNA, 75 bp, synthetic construct
  source 1..75: mol_type = other DNA
cacaccatgaaagcgggcttcggcaacacgctgggggaactggcgatcatcgtggtattcggtgcggtcatcggt

SEQ ID NO: 716191 - DNA, 75 bp, synthetic construct
  source 1..75: mol_type = other DNA
gggcgacacggtggacgctttggcggcgcgctggcgccggtccaggccgctaccgccaccagtgaagcggtaccg

SEQ ID NO: 716192 - DNA, 75 bp, synthetic construct
  source 1..75: mol_type = other DNA
gtggcgacaccaccgggattgtggtgatcacccaaacacatcctatcgatctggtctttactctgccggaaagcg

SEQ ID NO: 716193 - DNA, 75 bp, synthetic construct
  source 1..75: mol_type = other DNA
atgtgcccgtcattcagacgattcccgacagtgtttcataattcctccatttttctcccttattggctggctaca

SEQ ID NO: 716194 - DNA, 75 bp, synthetic construct
  source 1..75: mol_type = other DNA
aaaatacttactttcctgaacaatcaggatattggctcgctggtggcgctaataacgcgccggggaggttccggt

SEQ ID NO: 716195 - DNA, 75 bp, synthetic construct
  source 1..75: mol_type = other DNA
aaattgctgacgttcgttaacagtcaggatctgggtagcctgtttgggattctctctcgcttacgtggaggaggg

SEQ ID NO: 716196 - DNA, 75 bp, synthetic construct
  source 1..75: mol_type = other DNA
cgcttggtgcggttattgtggctgcattgaccattaaaatcctcacgttcgtaaacagccaggatctcggtagca

SEQ ID NO: 716197 - DNA, 75 bp, synthetic construct
  source 1..75: mol_type = other DNA
caggtctgatcctgccgaagttcctcggcaatcttgagcgcccaacgccatcattcctgaaagcagatcaaccgg

SEQ ID NO: 716198 - DNA, 75 bp, synthetic construct
  source 1..75: mol_type = other DNA
ggtttatctgacggatgcagagtataccggtgaagagctggatgcggatacctggcgggccacactgcatattga

SEQ ID NO: 716199 - DNA, 75 bp, synthetic construct
  source 1..75: mol_type = other DNA
aggcggagctgcatattgaagttttcctgcctgctcaggtaccggattcggagctggattcgtggatggaaagcc

SEQ ID NO: 716200 - DNA, 75 bp, synthetic construct
  source 1..75: mol_type = other DNA
taccgttaccagcaccctgaatattccgatcgctcacagtggcttctctgttgggtgggttggtacgtttgccga

SEQ ID NO: 716201 - DNA, 75 bp, synthetic construct
  source 1..75: mol_type = other DNA
ccggatatctctcgttttaaagatccggatgcgtcacagcctgaaatcatgctgtacgttgcgggtaaagcgttc

SEQ ID NO: 716202 - DNA, 75 bp, synthetic construct
  source 1..75: mol_type = other DNA
aagccccccgttcgcgcctgagcgagtatttgccggaagtccgcagtcgcttgctgttactgttttcgcgccagg

SEQ ID NO: 716203 - DNA, 75 bp, synthetic construct
  source 1..75: mol_type = other DNA
tgacgacaatgcgcagcaacatgtcatgccctcaccggtcttctacgcactggacacttttacggtcaacctggg

SEQ ID NO: 716204 - DNA, 75 bp, synthetic construct
  source 1..75: mol_type = other DNA
gtcagtaaaagacacgttgaaaacctggggtctgctggagctggtcaactccgtggttgggctgattattgtgct

SEQ ID NO: 716205 - DNA, 75 bp, synthetic construct
  source 1..75: mol_type = other DNA
cagtaaaagacacgttgaaaacctggggtctgctggagctggtcaactccgtggttgggctgattattgtgttga

SEQ ID NO: 716206 - DNA, 75 bp, synthetic construct
  source 1..75: mol_type = other DNA
tgactattcccagcgttatctgtgcggggctgatcctgccgaagtttctcggtaatcttgagcgcccaacgccgt

SEQ ID NO: 716207 - DNA, 75 bp, synthetic construct
  source 1..75: mol_type = other DNA
tgcgcttgagtttgttggctttggctgtttccgccagcttgccgacgattgcttttgctactgaaaccatgactg

SEQ ID NO: 716208 - DNA, 75 bp, synthetic construct
  source 1..75: mol_type = other DNA
gagcttgatcagtggatggaaagccggatttatccggggatgaatgcgatcccggcactggctggactgattacc

SEQ ID NO: 716209 - DNA, 75 bp, synthetic construct
  source 1..75: mol_type = other DNA
tgaacacggggcgacgctgtttgatggtcgccccgttgtttttgacgaagaggattttcctgcgatcgcggttta

SEQ ID NO: 716210 - DNA, 75 bp, synthetic construct
  source 1..75: mol_type = other DNA
aatacttatccgacaattattttcgatcagttgattagtctcggagataagtatgaaggcgtgaccgcccagcca

SEQ ID NO: 716211 - DNA, 75 bp, synthetic construct
  source 1..75: mol_type = other DNA
catcgaacgaacttccctcggttctctacttgaccatactggcgcatttggcgaaagcgaaaaatatgccgcgcg

SEQ ID NO: 716212 - DNA, 75 bp, synthetic construct
  source 1..75: mol_type = other DNA
ggtgtgtgggaagacgacagtcaggtgaaaagaatgctggtggagtggggaccggttatcccgaaagggaaggtc

SEQ ID NO: 716213 - DNA, 75 bp, synthetic construct
  source 1..75: mol_type = other DNA
aaaagataatggcattgcgattccgttacatctctcaatcatcggtttcgatgatattcccatcgcccgttacac

SEQ ID NO: 716214 - DNA, 75 bp, synthetic construct
  source 1..75: mol_type = other DNA
tacgcccatcgttgcgtttgcctggataatctcagtggtgcccgaatggccacgcgcatgttgctcaataatggt

SEQ ID NO: 716215 - DNA, 75 bp, synthetic construct
  source 1..75: mol_type = other DNA
gctaataggtaatagctatcatgaagcggaaaaagagcgtcatgccattgaggtgttaattcgccagcgttgtaa

SEQ ID NO: 716216 - DNA, 75 bp, synthetic construct
  source 1..75: mol_type = other DNA
gcgcgcggccgtcgtgtggtcgggcgcaaagtggggctgacgcacccgaaagtgcagcaacagctgggtgtcgat

SEQ ID NO: 716217 - DNA, 75 bp, synthetic construct
  source 1..75: mol_type = other DNA
ccgacatgtgttatggcgataacgaaaccattcctttttcccgcgttctgcaaccccgcattgaagcggagatcg

SEQ ID NO: 716218 - DNA, 75 bp, synthetic construct
  source 1..75: mol_type = other DNA
accgaaatggctggataacgatcatcccccttttgagaaacatatgtacggtgtttttatgcatctcaggtactg

SEQ ID NO: 716219 - DNA, 75 bp, synthetic construct
  source 1..75: mol_type = other DNA
gtgatcgacgaagcggttgatttccgtcaggcgatggcgcggctatataaagagttcaccgctgacggtagctgg

SEQ ID NO: 716220 - DNA, 75 bp, synthetic construct
  source 1..75: mol_type = other DNA
ggactgttttctgcggcgtcttatcaaaagaccgttcgggacaagtatgaaggcataccgaccactccatttatt

SEQ ID NO: 716221 - DNA, 75 bp, synthetic construct
  source 1..75: mol_type = other DNA
tgtgtttgagggccgtacactgacggtgacccgttatgacacgtacaacggtaaaccccggatttttgtcgaaca

SEQ ID NO: 716222 - DNA, 75 bp, synthetic construct
  source 1..75: mol_type = other DNA
ttacatctctcaatcatcggtttcgatgatattcccatcgcccgttacaccgacccgcaattaacgaccgtgcgt

SEQ ID NO: 716223 - DNA, 75 bp, synthetic construct
  source 1..75: mol_type = other DNA
ccgatttgaaccgttacaaaaaagactatccgcccagcctgacaaagcggctggatgttgcggagaaggataacc

SEQ ID NO: 716224 - DNA, 75 bp, synthetic construct
  source 1..75: mol_type = other DNA
cgccagctagtcgagcagcagatcctcgaaagcattcagggcagcgggacttacgtcaaagaagagcgggtcaat

SEQ ID NO: 716225 - DNA, 75 bp, synthetic construct
  source 1..75: mol_type = other DNA
aaggtgtgtcaagcaacagccgccgcagaaggtgtatgacgctgcagtgtcgtttgccttcaacgtgggaacggg

SEQ ID NO: 716226 - DNA, 75 bp, synthetic construct
  source 1..75: mol_type = other DNA
aaggtgtgtgaaacaacagccgccgcagaaggtatatgacgctgcggtatcgtttgccttcaacgtgggaacggg

SEQ ID NO: 716227 - DNA, 75 bp, synthetic construct
  source 1..75: mol_type = other DNA
aaaggtgtgtttaatcaggggctggataaccgccgagcgcgggagatggcctggtgtttacagggagcaaactga

SEQ ID NO: 716228 - DNA, 75 bp, synthetic construct
  source 1..75: mol_type = other DNA
gcagcggaagggctgatctccaacgtgctacgtgtggagcgggcactggaaaagtgtgtgaagcaacagccgccg

SEQ ID NO: 716229 - DNA, 75 bp, synthetic construct
  source 1..75: mol_type = other DNA
ccgtatctcctatgccggacgcggcgcgttaagcgacgccaacgccgcaggctggctgacgcggctgtttaacca

SEQ ID NO: 716230 - DNA, 75 bp, synthetic construct
  source 1..75: mol_type = other DNA
gaagaatcgacccagtcgagcaaacaggcgaaaaccaactttggcaaaagcaacagcgttgatatcaccgcgcca

SEQ ID NO: 716231 - DNA, 75 bp, synthetic construct
  source 1..75: mol_type = other DNA
gcgataccgttggcgtggtggtgatggacgtttctgatgcgttttttggcgcactggtgaaagccgtcgatctcg

SEQ ID NO: 716232 - DNA, 75 bp, synthetic construct
  source 1..75: mol_type = other DNA
cgtttgccttcaacgtgggaactagcaatgcctgcagctccacgctggtgaaattgctcaatcagcggcgctggg

SEQ ID NO: 716233 - DNA, 75 bp, synthetic construct
  source 1..75: mol_type = other DNA
aggcaaaaccattacggaacgacaggcagcggaagggctgatctccaatgtgctgcgtgtggagcgggcactgga

SEQ ID NO: 716234 - DNA, 75 bp, synthetic construct
  source 1..75: mol_type = other DNA
atggcacattcgattactgtaagactaaacaagcccgcaagagagtttcaggccggggaaaatatcggattcaac

SEQ ID NO: 716235 - DNA, 75 bp, synthetic construct
  source 1..75: mol_type = other DNA
caggtgtctgctcaaatagaacagtatgaatataaaacatatgatcaaataaaacaagaaatatcaaacagacaa

SEQ ID NO: 716236 - DNA, 75 bp, synthetic construct
  source 1..75: mol_type = other DNA
actatctgcaggagctgcccggcttcgacatggcacatgtcaggacaccggccatgtggaccgaagaaccgcgca

SEQ ID NO: 716237 - DNA, 75 bp, synthetic construct
  source 1..75: mol_type = other DNA
tcccgcagtgaactgctccatgccggcgacaaatccctgccggaatccaactccttcaatccctttgtctacgcc

SEQ ID NO: 716238 - DNA, 75 bp, synthetic construct
  source 1..75: mol_type = other DNA
agaaaggaaaaaaatttttctatgggtattgacccgtcttttgaaagaaggacgcatcaaactggccaagcacgg

SEQ ID NO: 716239 - DNA, 75 bp, synthetic construct
  source 1..75: mol_type = other DNA
tgccggtactgacgctggcgtggatccctcagcaaacgaggcctcatccggtgaggaccacgacgaactcttcga

SEQ ID NO: 716240 - DNA, 75 bp, synthetic construct
  source 1..75: mol_type = other DNA
ctccggtccaaatcaaccggctgatacaggtcgacccgattccgctggcagaactgcggcatctggtgccccggg

SEQ ID NO: 716241 - DNA, 75 bp, synthetic construct
  source 1..75: mol_type = other DNA
gttctcggaaacatactccacctttaccgaaacctacggccacatttttgcccaggatgcgggtgatattgacca

SEQ ID NO: 716242 - DNA, 75 bp, synthetic construct
  source 1..75: mol_type = other DNA
ctggtgcatggttaccacttatcagtaaaactttttttaataaccaacatgataaagcgtataatgccctaaaag

SEQ ID NO: 716243 - DNA, 75 bp, synthetic construct
  source 1..75: mol_type = other DNA
tatatacgtttaaaggatgatggctgttttaatatatctgttggggcatggatactgagtacctcaatcagacaa

SEQ ID NO: 716244 - DNA, 75 bp, synthetic construct
  source 1..75: mol_type = other DNA
ctcgattcggcgctggatttgcgaaacgtcggtgttgccgcaccgtttggtccggtgaatgtacaaaagcagcat

SEQ ID NO: 716245 - DNA, 75 bp, synthetic construct
  source 1..75: mol_type = other DNA
cacaaatttatgcgcgtctgcggaataatagccgggaaaaattagtcggcgtaagaaagacgccgcgtattccga

SEQ ID NO: 716246 - DNA, 75 bp, synthetic construct
  source 1..75: mol_type = other DNA
ttaagatgatccctaataagctggaagggcggggatgccagtgtcagcgactggttaaagtggttgatatcgatg

SEQ ID NO: 716247 - DNA, 75 bp, synthetic construct
  source 1..75: mol_type = other DNA
aaattgcagcgctgtttggctataaaccggcgtcatggcagaccaaagaaaaggctgctcagcgcggcgtaaagc

SEQ ID NO: 716248 - DNA, 75 bp, synthetic construct
  source 1..75: mol_type = other DNA
tgatgtcggtcgcgagctctggttatccctggcggaccttgtccggcatatcatgttcttctccacgacaggggg

SEQ ID NO: 716249 - DNA, 75 bp, synthetic construct
  source 1..75: mol_type = other DNA
agtattaggtatgaatattatcagatctttatattactttttaaattatatatattttgcgataaaaaagagaaa

SEQ ID NO: 716250 - DNA, 75 bp, synthetic construct
  source 1..75: mol_type = other DNA
atggtaccccaataaattggaagaacagtataattgttttctttccggtcacaaaattgtctgctcttattatga

SEQ ID NO: 716251 - DNA, 75 bp, synthetic construct
  source 1..75: mol_type = other DNA
taggctgggggttccggaaagctttcagctttgagccagttattcaaaccccttttgatttgttaaaacaccttg

SEQ ID NO: 716252 - DNA, 75 bp, synthetic construct
  source 1..75: mol_type = other DNA
actcaatcagacctgcttaataagcaattagataaattagcattgttaataaatgatgatattattgatacggat

SEQ ID NO: 716253 - DNA, 75 bp, synthetic construct
  source 1..75: mol_type = other DNA
atggaatttaaagatttaccaacgccattccaggaaatggcatcgaatatagttcgttcacaactggcgactctt

SEQ ID NO: 716254 - DNA, 75 bp, synthetic construct
  source 1..75: mol_type = other DNA
caaatttacaggggcgcacaatagcacatccatatgcacatactttaggctctgtggatatcaaagatcccacaa

SEQ ID NO: 716255 - DNA, 75 bp, synthetic construct
  source 1..75: mol_type = other DNA
agacgatgtggaagtcattaacttcatgaatggaggaaaatcccgcagtgaaatcattctgagtggtgaaaaaac

SEQ ID NO: 716256 - DNA, 75 bp, synthetic construct
  source 1..75: mol_type = other DNA
ggcccataccacgtcggcactcggtcgtatgttcgtcacccagcagagcatgatcctcgcccgtgacctgggcta

SEQ ID NO: 716257 - DNA, 75 bp, synthetic construct
  source 1..75: mol_type = other DNA
tacctttgttgacggaaaggcacagaacgataccacgaggacaatctggtatctctcccgacgttttggccggga

SEQ ID NO: 716258 - DNA, 75 bp, synthetic construct
  source 1..75: mol_type = other DNA
gcgataaagtcttctcaatcattagaaatcataaagatgccatcagcctgctgattttttccatcgttggcgcgc

SEQ ID NO: 716259 - DNA, 75 bp, synthetic construct
  source 1..75: mol_type = other DNA
caaactttatcgttaacggaagtttgattctggtcgtttttttatttggtggtcattggtacgtccctgacattt

SEQ ID NO: 716260 - DNA, 75 bp, synthetic construct
  source 1..75: mol_type = other DNA
ctcactggtgcgtaaatcgcgcccgggcattctggttttctgcgctattttgacatcgctggtcgggactttttt

SEQ ID NO: 716261 - DNA, 75 bp, synthetic construct
  source 1..75: mol_type = other DNA
ctatcgctcacagtaaattaatatcagatgtggaaacgataattacatggaaacaatactcttatcgcattcaca

SEQ ID NO: 716262 - DNA, 75 bp, synthetic construct
  source 1..75: mol_type = other DNA
ataaatacgctaatttatctaacaaggatgatgacggcatgaataaagaaagtgaaattattgatggattaatcg

SEQ ID NO: 716263 - DNA, 75 bp, synthetic construct
  source 1..75: mol_type = other DNA
taggcaaaatgatccacagattccgcgctgatattccgtctttcgaagtggcaacgtttttaagttattacgatt

SEQ ID NO: 716264 - DNA, 75 bp, synthetic construct
  source 1..75: mol_type = other DNA
ctatctggaaagcattgcaaacagtaacggtcaggatgtggataaagacagactgacctctcaggcttttgcccg

SEQ ID NO: 716265 - DNA, 75 bp, synthetic construct
  source 1..75: mol_type = other DNA
agaaacggcattaacgctgatatcggggccagcatggacctggatgacaactggacactgggtctggtcgcacag

SEQ ID NO: 716266 - DNA, 75 bp, synthetic construct
  source 1..75: mol_type = other DNA
gctcaatgatggcgtgagtaaagtcaatggggcaatcagctcttctttgtcttcagtaggtaaagcgctgaatgg

SEQ ID NO: 716267 - DNA, 75 bp, synthetic construct
  source 1..75: mol_type = other DNA
gtaccgaatctgcggtgcgtattacccacatcccaaccgggatcgtgacccaatgccagaacgaccgttcccagc

SEQ ID NO: 716268 - DNA, 75 bp, synthetic construct
  source 1..75: mol_type = other DNA
ggttgaaacccgcaacacgcaggcagtgctggatggcagcctggatcaatttatcgaagcaagtttgaaagctgg

SEQ ID NO: 716269 - DNA, 75 bp, synthetic construct
  source 1..75: mol_type = other DNA
gctatggcttcaggctggaaatttgaaaaatacgatgatttatcgaataaggatgatgacggcatgaataaagaa

SEQ ID NO: 716270 - DNA, 75 bp, synthetic construct
  source 1..75: mol_type = other DNA
gttcaccgtctggtgcgtaaaagcccgttcgactccggcggtcgtcgccacacgtcgtttagttctgcgtttgtt

SEQ ID NO: 716271 - DNA, 75 bp, synthetic construct
  source 1..75: mol_type = other DNA
ctggagatgcagaagaaaaatgccgagaaacaggcgatggaagataacaaatctgacatcggctggggcagccag

SEQ ID NO: 716272 - DNA, 75 bp, synthetic construct
  source 1..75: mol_type = other DNA
cggttggctgcgcacagaaaccggcgttcaccgtctggtgcgtaagagcccgtttgactccggtggccgtcgcca

SEQ ID NO: 716273 - DNA, 75 bp, synthetic construct
  source 1..75: mol_type = other DNA
atgatgaagaaaaatcatattacccgcaccatcattgcatctgctgtattattttcatttaacgctgcagcagcg

SEQ ID NO: 716274 - DNA, 75 bp, synthetic construct
  source 1..75: mol_type = other DNA
ggtgttaactgtacaggctcctgcagctggaaaatctacgttaaaaatggtctggtgacctgggaaagccaacag

SEQ ID NO: 716275 - DNA, 75 bp, synthetic construct
  source 1..75: mol_type = other DNA
atgccagtaagtacagcggtcatctgattgatttcaacgttcgtgccgaacgtatgggctggctaccttctgcgc

SEQ ID NO: 716276 - DNA, 75 bp, synthetic construct
  source 1..75: mol_type = other DNA
atgcgtgcttttggtgaaagtctggtggcttatcgcccgcctatcgacacccgtagcgtcagtgaaatgcgccag

SEQ ID NO: 716277 - DNA, 75 bp, synthetic construct
  source 1..75: mol_type = other DNA
tcgcgtttattctcgccgcagccgcgctggcccttccgtggtttatggttcgccagggctaccgcgagcaagtcc

SEQ ID NO: 716278 - DNA, 75 bp, synthetic construct
  source 1..75: mol_type = other DNA
ggtgttaactgtacaggctcctgcagctggaaaatctacgttaaaaagggtctggtgacctgggaaatccaacag

SEQ ID NO: 716279 - DNA, 75 bp, synthetic construct
  source 1..75: mol_type = other DNA
ggtgttaactgtacaggctcctgcagctggaaaatctacgttaaaaacggtctggttacctgggaaacccaacag

SEQ ID NO: 716280 - DNA, 75 bp, synthetic construct
  source 1..75: mol_type = other DNA
aaaaacggcgtgaacgccgacatcggggcatataccgacctcgatgacaactggacgctgggtctggtagcgcag

SEQ ID NO: 716281 - DNA, 75 bp, synthetic construct
  source 1..75: mol_type = other DNA
aagggcgagaaagtgccggagctgtttattgtcgagttgccgaaagatgaagctggctggaaagcggcaggtgat

SEQ ID NO: 716282 - DNA, 75 bp, synthetic construct
  source 1..75: mol_type = other DNA
tcatccacggcccggaaaatcctgatgaaacatggtattacgactttcatcatcggcgcggagtgattgttgaaa

SEQ ID NO: 716283 - DNA, 75 bp, synthetic construct
  source 1..75: mol_type = other DNA
ttggcggcattgaaaatccgcactttcgcagcgtaaaacatgatccggtactggtgcgccagcttccggtgaaaa

SEQ ID NO: 716284 - DNA, 75 bp, synthetic construct
  source 1..75: mol_type = other DNA
tcgcggtggaccgattgtctggatcagcgaaaccgatgcccgagaactgaccattgtcgataacgactgggtgga

SEQ ID NO: 716285 - DNA, 75 bp, synthetic construct
  source 1..75: mol_type = other DNA
cctctttctcaaaagaagatcaggataaggtctcagtcgataaagccgccgctgccgttgcctggcaggaaagga

SEQ ID NO: 716286 - DNA, 75 bp, synthetic construct
  source 1..75: mol_type = other DNA
tgattagtcatcgcgctaaccctgagtgttacccatcgtttgaggtggcaacatgccgcacagaatataatttcg

SEQ ID NO: 716287 - DNA, 75 bp, synthetic construct
  source 1..75: mol_type = other DNA
cacgctgatcgtttacttccagcatcagtggcaaggctggggcaaacagcccgaagcggcgaaacttaacgctag

SEQ ID NO: 716288 - DNA, 75 bp, synthetic construct
  source 1..75: mol_type = other DNA
agcaagatgacctctaacctgtttggtatgcagaaagtgatgcaggcgctggagcgttacaatctttacttcctc

SEQ ID NO: 716289 - DNA, 75 bp, synthetic construct
  source 1..75: mol_type = other DNA
tttcatttgccgctctgctggcgctctctacccctgtactcgctggcaaacttgccatcgtcattgatgattttg

SEQ ID NO: 716290 - DNA, 75 bp, synthetic construct
  source 1..75: mol_type = other DNA
taactaccgcaattgccaccagtctggatgccatggcggttggtgttggtctggccttcctgcaagttaatatta

SEQ ID NO: 716291 - DNA, 75 bp, synthetic construct
  source 1..75: mol_type = other DNA
tatcggcccgatgctcggaaaaaaagcagaaattctcggcgggctggtgcttatcggtattggcgcccagatcct

SEQ ID NO: 716292 - DNA, 75 bp, synthetic construct
  source 1..75: mol_type = other DNA
cacgctgatcgtttacttccaacatcagtggcaaggctggggcaaacagcccgaagcggcaaaacttaacgctag

SEQ ID NO: 716293 - DNA, 75 bp, synthetic construct
  source 1..75: mol_type = other DNA
cgatcgccttgatgaactgaaagccaaggcgcgccagcctcttactgattatgaggaagaatcaggcgcggatta

SEQ ID NO: 716294 - DNA, 75 bp, synthetic construct
  source 1..75: mol_type = other DNA
gaaagaattcggcgagtctatgccatttgatggtaagcgaatgatttatggtggattcgagtcaatcatcgacga

SEQ ID NO: 716295 - DNA, 75 bp, synthetic construct
  source 1..75: mol_type = other DNA
aaagaggtccgcgacgctgctaatcaaaagatgatgtcggacccacggatgaaagagttcggcgagtcatgccgt

SEQ ID NO: 716296 - DNA, 75 bp, synthetic construct
  source 1..75: mol_type = other DNA
gacagcgtaaccatcggtaatacccaggcgatgcgcgccgcgcaaggcactggcgtgaaggttattaaacggaag

SEQ ID NO: 716297 - DNA, 75 bp, synthetic construct
  source 1..75: mol_type = other DNA
ccagcagcttgctgaatgaaccacaggtcgatacatctacaccgccgaaaaatactgtacccggtgcaccgcgta

SEQ ID NO: 716298 - DNA, 75 bp, synthetic construct
  source 1..75: mol_type = other DNA
gtgttcctcgacgattcgcaaaatgaagcggatattcgtgtacagtttaatcgtgcaattgacctggcgcgtcgc

SEQ ID NO: 716299 - DNA, 75 bp, synthetic construct
  source 1..75: mol_type = other DNA
acttttacattgacaatgactctttaaagtttttcgtcgatgaaccgacctgtgcaacagttgccctggcacaag

SEQ ID NO: 716300 - DNA, 75 bp, synthetic construct
  source 1..75: mol_type = other DNA
gactacaacttcgcaatctggtcaaacaacctgctgaatttgccctttacggcacagttggtaccggatggcagt

SEQ ID NO: 716301 - DNA, 75 bp, synthetic construct
  source 1..75: mol_type = other DNA
ataagcccagcgacgccactctggtaggtaaaacaacgggctctgcttcaggcgtggctgtaaaagtgcattcaa

SEQ ID NO: 716302 - DNA, 75 bp, synthetic construct
  source 1..75: mol_type = other DNA
gggcctatgagtatagtgacgatagctggtatttacgatttcgttttttctggaccccggaatataaaccccaaa

SEQ ID NO: 716303 - DNA, 75 bp, synthetic construct
  source 1..75: mol_type = other DNA
agaatggaaggcaggagaaaagccgccgtgcggagtgtggcttgattgcattggatcaagaagcgatatagtgat

SEQ ID NO: 716304 - DNA, 75 bp, synthetic construct
  source 1..75: mol_type = other DNA
attgagtcacgttgcactctgcctttcttacacattgcggatgccaccggacgtgcaattaccggggccggaatg

SEQ ID NO: 716305 - DNA, 75 bp, synthetic construct
  source 1..75: mol_type = other DNA
gcattggcgaatgaatgttatatagagagcaatgctgaagggccttatgatatggtgataaacccaacacccttc

SEQ ID NO: 716306 - DNA, 75 bp, synthetic construct
  source 1..75: mol_type = other DNA
cccaagtagttccatttactattcggggcgattactgttacgcaagcaaaattacagtgaagttgaaagccacaa

SEQ ID NO: 716307 - DNA, 75 bp, synthetic construct
  source 1..75: mol_type = other DNA
atttaaatttaccgtggatcaacctacatgtagtaccattgctctggattcaaccagccaaaatatcagcggtaa

SEQ ID NO: 716308 - DNA, 75 bp, synthetic construct
  source 1..75: mol_type = other DNA
ttttgttaactatgcagatgctgatttgttatcaacctataccaccactaatggctttgccttattgaaaacaac

SEQ ID NO: 716309 - DNA, 75 bp, synthetic construct
  source 1..75: mol_type = other DNA
ttaatgaccgcctggcgcagtcgctggcaaacaacgatcagaaagccattactgaaacgaccgaacagttaatca

SEQ ID NO: 716310 - DNA, 75 bp, synthetic construct
  source 1..75: mol_type = other DNA
caaccagccaaaatgttagcggtaataaaataaatttgggagactattatatttcccaggttaagcaggaaatca

SEQ ID NO: 716311 - DNA, 75 bp, synthetic construct
  source 1..75: mol_type = other DNA
ggcgcaactggttaaagatggaagtaatggcacaattagccctggggattttaccggtaatgcgacattctcttt

SEQ ID NO: 716312 - DNA, 75 bp, synthetic construct
  source 1..75: mol_type = other DNA
ggacagtggcgcaactggcgcaggcggtcgagcgcgggcagcttgagctgcactaccagccgattgtcgatttgc

SEQ ID NO: 716313 - DNA, 75 bp, synthetic construct
  source 1..75: mol_type = other DNA
gttctccaactcctatggcggcatggttactcactatggcggcgcggcaggtccggtcatctttggcgtgggtta

SEQ ID NO: 716314 - DNA, 75 bp, synthetic construct
  source 1..75: mol_type = other DNA
gaaaatccgcgaaaaaatgctgctcggtgtctttgtgctggcgctgttgggctggattttcagtaaaacgctcgg

SEQ ID NO: 716315 - DNA, 75 bp, synthetic construct
  source 1..75: mol_type = other DNA
aaggggaaaacccgtatgcgaacaagcgtaataccctgacgccaacccagatgcgcaagcgtaagcgcctgatga

SEQ ID NO: 716316 - DNA, 75 bp, synthetic construct
  source 1..75: mol_type = other DNA
gccgattgtggtgattcacggtaaccaggtaaaagacctgccggattcctacaagcgttatctgatgaactattt

SEQ ID NO: 716317 - DNA, 75 bp, synthetic construct
  source 1..75: mol_type = other DNA
tgccccatcagcacgctcaagatcgaccaatcgtttgtcgccggactcgccaacgaccaccgcgaccagaccatc

SEQ ID NO: 716318 - DNA, 75 bp, synthetic construct
  source 1..75: mol_type = other DNA
taattctgatattagcgatcccgtgtattattggctttatgccagccccggcaggattaagtgaactggcgtggg

SEQ ID NO: 716319 - DNA, 75 bp, synthetic construct
  source 1..75: mol_type = other DNA
acgtacagaaggcgaacaagagcaagcgcaatggcgtaaacagattgcggcactgacgcaagaaggcgttgctgc

SEQ ID NO: 716320 - DNA, 75 bp, synthetic construct
  source 1..75: mol_type = other DNA
gtgttggctgaatatgcagtccatgagcaagttggtgcgttcacaaaccagcatttgaacggacatgccggattg

SEQ ID NO: 716321 - DNA, 75 bp, synthetic construct
  source 1..75: mol_type = other DNA
tggtcaccccgctggtgatttacaccatgtatccgccagaaattaagaaggtggataacaaaaccatcgccaaag

SEQ ID NO: 716322 - DNA, 75 bp, synthetic construct
  source 1..75: mol_type = other DNA
catgtatccgccagaaattaagaaggtggataacaaaaccatcgctaaagcgggccttgccgaactgggaccgat

SEQ ID NO: 716323 - DNA, 75 bp, synthetic construct
  source 1..75: mol_type = other DNA
tcggcttaagctccttattatcgaaagttaaattcttcgaatggttagctgaagtcggtaatgctgccaacttac

SEQ ID NO: 716324 - DNA, 75 bp, synthetic construct
  source 1..75: mol_type = other DNA
aaggggaaaacccgtatgcgaacaagcgtaacactctgacgccgacccagatgcgtaagcgtaaacgtctgatga

SEQ ID NO: 716325 - DNA, 75 bp, synthetic construct
  source 1..75: mol_type = other DNA
accgaaggggcgaaagtggaagtggtggaagcccagagcgccactactccggaagagaaagccaccagccgcgaa

SEQ ID NO: 716326 - DNA, 75 bp, synthetic construct
  source 1..75: mol_type = other DNA
gggtaatcgtaatcgtggtggtcatcgccgcattctggttctggcaaggccgcaatgactcccggagtgcagccc

SEQ ID NO: 716327 - DNA, 75 bp, synthetic construct
  source 1..75: mol_type = other DNA
cggtcgcggctggtggcctgatgggagccagcgtatttggtcttgcaaccggtattgattatggcgtggtatttg

SEQ ID NO: 716328 - DNA, 75 bp, synthetic construct
  source 1..75: mol_type = other DNA
gtggtgataccaccgggattgtggtgatcacccagacgcatcctatcgatttagtctttaccctgccggaaagcg

SEQ ID NO: 716329 - DNA, 75 bp, synthetic construct
  source 1..75: mol_type = other DNA
tggcaaaagataaagccacgcttgccaacgcccgccgtgacctggcgcgttatcagcaactggcaaaaaccaatc

SEQ ID NO: 716330 - DNA, 75 bp, synthetic construct
  source 1..75: mol_type = other DNA
aaaacgccgtagtgatcccaacagccgccctgcaaatgggcaatgaaggccattttgtctgggtgctgaatagcg

SEQ ID NO: 716331 - DNA, 75 bp, synthetic construct
  source 1..75: mol_type = other DNA
ggaagacgacttcgacccgcaaagtttgccgatcaaactggcgattgtggggcgtccgaacgtcggtaagtctac

SEQ ID NO: 716332 - DNA, 75 bp, synthetic construct
  source 1..75: mol_type = other DNA
acccgtcgcgtgggtacgtcaatgctgacgcgtatcatgactatggcggttgaagatcaccagccgccgctggtt

SEQ ID NO: 716333 - DNA, 75 bp, synthetic construct
  source 1..75: mol_type = other DNA
cattccgatggaacgtgacggacgtgagtatgtactcattgatactgcgggcgtgcgtaaacgcggaaaaattac

SEQ ID NO: 716334 - DNA, 75 bp, synthetic construct
  source 1..75: mol_type = other DNA
ggctggctggtggtgtcctgacgggggccagcgtctatggatttctgtccggaaccgattacggcgtggtctttg

SEQ ID NO: 716335 - DNA, 75 bp, synthetic construct
  source 1..75: mol_type = other DNA
gattagctggtggagccctaacgggcgctagtatttatggactgctgaccggaactgattacggcgttgtttttg

SEQ ID NO: 716336 - DNA, 75 bp, synthetic construct
  source 1..75: mol_type = other DNA
acttttggcagataataaaaaattacttagtaaagtatataacatggtggaaaaaaaaggtgtccttggatgcaa

SEQ ID NO: 716337 - DNA, 75 bp, synthetic construct
  source 1..75: mol_type = other DNA
gagattctggcggcgctggaaagcgttggtgaaaccaaatgcatttgccgtaacaaatatgccgttcatgagcaa

SEQ ID NO: 716338 - DNA, 75 bp, synthetic construct
  source 1..75: mol_type = other DNA
cttctgagtgtgctgcgccgcctgcgagccctgcagcgcagtgtattacccgacgacgatgagggggatgagaat

SEQ ID NO: 716339 - DNA, 75 bp, synthetic construct
  source 1..75: mol_type = other DNA
gggctgccattatgcagcccggtcgtcaggccagtgccgccggtaatgtggtggcactgggggaaacccccatga

SEQ ID NO: 716340 - DNA, 75 bp, synthetic construct
  source 1..75: mol_type = other DNA
ccgcagacagtgatgcgatgccagagcctgcgactgacggtgtgtcggcagtgacggcggagaagaacagcggaa

SEQ ID NO: 716341 - DNA, 75 bp, synthetic construct
  source 1..75: mol_type = other DNA
gtgattggtcatctggcggaaaatgaagttcgcggtgaactgacctttattgagaaggcgcagggcatccacaag

SEQ ID NO: 716342 - DNA, 75 bp, synthetic construct
  source 1..75: mol_type = other DNA
cggggcttgccggtgatgcaccgcggacagtcctccccgtgagtctgaaagacctgcttacagggggcagtgcac

SEQ ID NO: 716343 - DNA, 75 bp, synthetic construct
  source 1..75: mol_type = other DNA
gcgcgcctgatttatgaggagtctctgcagcgtcaggtaacgatacgggaactggcgaccttgctgactgatgag

SEQ ID NO: 716344 - DNA, 75 bp, synthetic construct
  source 1..75: mol_type = other DNA
gggctatctgcgctggttgtttaataacctggacagcatgagcccggagctgcgtttaacactgaaacattatct

SEQ ID NO: 716345 - DNA, 75 bp, synthetic construct
  source 1..75: mol_type = other DNA
ttgaccgccgcgtactgcctgagatgcccggtgagtggatttgcactatgaaactggcccgtcgtttgtggccag

SEQ ID NO: 716346 - DNA, 75 bp, synthetic construct
  source 1..75: mol_type = other DNA
aaggacttaggacaggtgctaataattttttttacgctagcggagaattaaaagacggacacgtcgagctatctt

SEQ ID NO: 716347 - DNA, 75 bp, synthetic construct
  source 1..75: mol_type = other DNA
accgggccgtcaggccagcacggcaggtaacgtggtggcgctgggggaaacaccgatgattctgacgctggatca

SEQ ID NO: 716348 - DNA, 75 bp, synthetic construct
  source 1..75: mol_type = other DNA
ccagaagaggctacccgccttcagggagtggtgccatcaccgttcactgacggcattcaggatactgcacccgag

SEQ ID NO: 716349 - DNA, 75 bp, synthetic construct
  source 1..75: mol_type = other DNA
ttgaccgccgcgtattgcctgaaatgcctggcgagtggatctgcacgatgaaactggctcgtcgtttgtggccag

SEQ ID NO: 716350 - DNA, 75 bp, synthetic construct
  source 1..75: mol_type = other DNA
ctggtggggctgaccggcgatgcgccgctgacagtgtctcccgtcagtctgacagacctgctgacaggtggcagt

SEQ ID NO: 716351 - DNA, 75 bp, synthetic construct
  source 1..75: mol_type = other DNA
cgtttaacagctcgaagctggtgacggtgtgggccggctggtcaacgcgctggtatggtgagttattgcgcgatg

SEQ ID NO: 716352 - DNA, 75 bp, synthetic construct
  source 1..75: mol_type = other DNA
gatcatgccggcaatcatttctggttggttgcttgcttttactctgtcgctcgatgacctggtgattgccagttt

SEQ ID NO: 716353 - DNA, 75 bp, synthetic construct
  source 1..75: mol_type = other DNA
ccaaagcacggggctgcaatgatgagcgaaaactgacttttagtattgaaacggtggttgacgacacacctggcg

SEQ ID NO: 716354 - DNA, 75 bp, synthetic construct
  source 1..75: mol_type = other DNA
tgtacggcgtatgtggcggtcgttatttcttcacgtttgcgggaactggatcgctcgatagaagaagcggcgatg

SEQ ID NO: 716355 - DNA, 75 bp, synthetic construct
  source 1..75: mol_type = other DNA
ccgatgctgatgctggtcatctattcatttaacagttcgaaactggtgacggtgtgggccggttggtcaacgcgc

SEQ ID NO: 716356 - DNA, 75 bp, synthetic construct
  source 1..75: mol_type = other DNA
tcgctcgatagaagaagccgcgatggatctcggtgcgacgccgctgaaagtgtttttcgtcattacgctaccgat

SEQ ID NO: 716357 - DNA, 75 bp, synthetic construct
  source 1..75: mol_type = other DNA
caatcagcagcaaaatcaaaatccttcgccatgtgcggaagtcaaacccaatgccggatacgtggttttaaaaga

SEQ ID NO: 716358 - DNA, 75 bp, synthetic construct
  source 1..75: mol_type = other DNA
gtactgaaagccctttgttgaccgatccttcaacgcctaacttcttttggttggcctggcaggcgcgtgatttta

SEQ ID NO: 716359 - DNA, 75 bp, synthetic construct
  source 1..75: mol_type = other DNA
gcgtcttctgagtgtgctgcgccgtctgcgcgccctgcagcgcagtgtgttacccgaagatgatgaggaggatga

SEQ ID NO: 716360 - DNA, 75 bp, synthetic construct
  source 1..75: mol_type = other DNA
tccgcaacgcgacaacgacatgtctgccggttacggggcggcaggtgaggtgtgttctgaagccgccgcattttt

SEQ ID NO: 716361 - DNA, 75 bp, synthetic construct
  source 1..75: mol_type = other DNA
ccactcccgcagaccgtgagagcgtcatggatactgcgcaatcaggggctgagaaagaggaccgcccggtcgcag

SEQ ID NO: 716362 - DNA, 75 bp, synthetic construct
  source 1..75: mol_type = other DNA
aactggtacaacgcagcccatttatgatgctggcagaagaagtacctgaggcgcgggaacatatgggaagctacg

SEQ ID NO: 716363 - DNA, 75 bp, synthetic construct
  source 1..75: mol_type = other DNA
ctgtcgtctacagccgtatcagtgtagtgcgggtgtatggactgacggcattggtaatacgtcgggcgtcattcc

SEQ ID NO: 716364 - DNA, 75 bp, synthetic construct
  source 1..75: mol_type = other DNA
ggagaagtacgaattgatccgtatcgacaggaaaggatttagctggcaggaacagacgccttatcttcgtgcggt

SEQ ID NO: 716365 - DNA, 75 bp, synthetic construct
  source 1..75: mol_type = other DNA
acgcgaacggcaacaaaaaatgggttgctgtagaatctgacgccaacggtgatttctcctacggctggctgacga

SEQ ID NO: 716366 - DNA, 75 bp, synthetic construct
  source 1..75: mol_type = other DNA
ctttgttagggtcgaggcgttattacccgcctctaaagcatttatcgcccgtaaatgggctgtagcagctcagga

SEQ ID NO: 716367 - DNA, 75 bp, synthetic construct
  source 1..75: mol_type = other DNA
agatccgccgtctccagaaagagctgaagcgggttaccgacgaacgggacatattaaaaaagccgtggcgtactt

SEQ ID NO: 716368 - DNA, 75 bp, synthetic construct
  source 1..75: mol_type = other DNA
gaaagagctgaaacgggttaccgacgaacgggacatattaaaaaaagccgttgtagattcaatctgtcgagcctg

SEQ ID NO: 716369 - DNA, 75 bp, synthetic construct
  source 1..75: mol_type = other DNA
gaaagagctgaaacgggttaccgacgaacgggacatattaaaaaaagccgctgtagattcaattggtcaacgcaa

SEQ ID NO: 716370 - DNA, 75 bp, synthetic construct
  source 1..75: mol_type = other DNA
aaaccgggcaacccagcagcgaataccgccttgcactgtgggaaaaactggggcaacccatcctgaccctggcga

SEQ ID NO: 716371 - DNA, 75 bp, synthetic construct
  source 1..75: mol_type = other DNA
gggattttctatttttcgtattgcgatggtggtgctggttgccggcattttgtgggctgtttcattgggggcgat

SEQ ID NO: 716372 - DNA, 75 bp, synthetic construct
  source 1..75: mol_type = other DNA
atgaatgttttcagtcgctatttaatccgtcatctctttctcggttttgccgccgccgcagggctattgctgccg

SEQ ID NO: 716373 - DNA, 75 bp, synthetic construct
  source 1..75: mol_type = other DNA
attatcggcaatatgctttgggccaggcgcggtaatgaatttgtgacggtgaaatcgctgaacgagcagggccag

SEQ ID NO: 716374 - DNA, 75 bp, synthetic construct
  source 1..75: mol_type = other DNA
aaaccggacaaccgagcagtgagtatcgcctggcattgtgggaaaagctggggcatcccatttttgatcttaccc

SEQ ID NO: 716375 - DNA, 75 bp, synthetic construct
  source 1..75: mol_type = other DNA
gggcaacccatcctgaccctggcgatgattttgctggctgtgccgtttacctttactgccccgcgttcgcctggg

SEQ ID NO: 716376 - DNA, 75 bp, synthetic construct
  source 1..75: mol_type = other DNA
cggatgccggtaacctgctggcgcaacaggcaattgctgatgtgttctgtgtcaacggcgacagcgaatggcgcg

SEQ ID NO: 716377 - DNA, 75 bp, synthetic construct
  source 1..75: mol_type = other DNA
agagtttactgacgaaggtagctggttctttaaaccgtggaataaagaaatggttaccgatccggaaaccggcaa

SEQ ID NO: 716378 - DNA, 75 bp, synthetic construct
  source 1..75: mol_type = other DNA
gaggcggtgatggtgggcttaccaccgttgaacgtcagcgtctgaaagagctggaacgtgaaaatcgtgaactgc

SEQ ID NO: 716379 - DNA, 75 bp, synthetic construct
  source 1..75: mol_type = other DNA
gccgcagtaacgatatccttcgccaggcttccgcttattttgcggttacggatctccctctccccccacacaacg

SEQ ID NO: 716380 - DNA, 75 bp, synthetic construct
  source 1..75: mol_type = other DNA
ttggcaacggcggtaaagggatttcgtggaatacccaggatgaaatcgatttcctcggcaaactcaattacacca

SEQ ID NO: 716381 - DNA, 75 bp, synthetic construct
  source 1..75: mol_type = other DNA
gatatgcatccgtttattcatccgttatcggcagcggtcgatccggcgtgggaatcacgcagtgactgggaaatc

SEQ ID NO: 716382 - DNA, 75 bp, synthetic construct
  source 1..75: mol_type = other DNA
cgctgaacgtcagcgcctgaagagctggaacgtgaaaatcgtagaactgcgccgcagtacgatatcttcgcaggc

SEQ ID NO: 716383 - DNA, 75 bp, synthetic construct
  source 1..75: mol_type = other DNA
atgactcacaatgggcatcaatttgttccattgcctcaaagattggctatacactggtgattttgcgtgtctggg

SEQ ID NO: 716384 - DNA, 75 bp, synthetic construct
  source 1..75: mol_type = other DNA
gcacgactcagaggcatggtcgcaagtatacgcggcgggaatggtacagataatggaggtcttttcaatgagtat

SEQ ID NO: 716385 - DNA, 75 bp, synthetic construct
  source 1..75: mol_type = other DNA
ctgacgcaggtaacctgctggcgcaacaggcgatagccgacgtgttctgtgttaacggcgatagcgaatggcgtg

SEQ ID NO: 716386 - DNA, 75 bp, synthetic construct
  source 1..75: mol_type = other DNA
gctgaacgtcagcgtctgaaagagcttgaacgtgaaaatcgtgaactgcgccgtagtaacgatatccttcgtcag

SEQ ID NO: 716387 - DNA, 75 bp, synthetic construct
  source 1..75: mol_type = other DNA
gaatatgactcacagtgggcggcaatttgttccattgccccaaagattggctgtacgccggagactctgcgtgtc

SEQ ID NO: 716388 - DNA, 75 bp, synthetic construct
  source 1..75: mol_type = other DNA
gcggttgtggggcgtgtcatgcgccattgaaactgccggagacgcgccagccagcaagctgttaccgctggcgaa

SEQ ID NO: 716389 - DNA, 75 bp, synthetic construct
  source 1..75: mol_type = other DNA
attctgaacagcgccatgacattttatgcgaagcagaatgaaccgccccgggtttcctggagagtgttttatctg

SEQ ID NO: 716390 - DNA, 75 bp, synthetic construct
  source 1..75: mol_type = other DNA
tggttaaccagaacctgaaagtcgccatctttgttgatggtaccagtatcaaccttatcaacggtagcacgccaa

SEQ ID NO: 716391 - DNA, 75 bp, synthetic construct
  source 1..75: mol_type = other DNA
ttgaaatccagcctatcactcagaccggtaatcccttccagggaacttcgctgactctgctggatatttctacgg

SEQ ID NO: 716392 - DNA, 75 bp, synthetic construct
  source 1..75: mol_type = other DNA
agtgaccgtaatggtaagagtggtcttgcgatcccggcaaacggcgacggcgttcagggctatacgctgtctatc

SEQ ID NO: 716393 - DNA, 75 bp, synthetic construct
  source 1..75: mol_type = other DNA
agcctgagcgactgggcaattattgtcggtatcgcatgcactgttattacctgtgcagtgaactggtatttccgc

SEQ ID NO: 716394 - DNA, 75 bp, synthetic construct
  source 1..75: mol_type = other DNA
aaaaagagttgactgcagcagcgggaaaaaccagctataaaattactgataacgatcgtggtcgttatattggcg

SEQ ID NO: 716395 - DNA, 75 bp, synthetic construct
  source 1..75: mol_type = other DNA
taacaatttggtcatccctgcgaccaacgacgaagccagaaccaaccttaacggccctgcgcgcgatggaaaaga

SEQ ID NO: 716396 - DNA, 75 bp, synthetic construct
  source 1..75: mol_type = other DNA
gtaataaagaacagcagtgggatttacaccaggcactggaagattttactcaggttattcctgtcttaattaatc

SEQ ID NO: 716397 - DNA, 75 bp, synthetic construct
  source 1..75: mol_type = other DNA
attacccgaagagcaggttgcttatctggaagagcatctttgcgatggcgagcaattaattatctcccgcttcga

SEQ ID NO: 716398 - DNA, 75 bp, synthetic construct
  source 1..75: mol_type = other DNA
cttcctggtgggcatattattaccttatccgcactgcttattttatatttggcgttccttttttattactatgtt

SEQ ID NO: 716399 - DNA, 75 bp, synthetic construct
  source 1..75: mol_type = other DNA
tattttgcgcactgacatctacactgatgttatttagttctcgttattatggtgacaacattgaagattatgttg

SEQ ID NO: 716400 - DNA, 75 bp, synthetic construct
  source 1..75: mol_type = other DNA
accattccggtggtgccagcgggaatgagcgatgcggtcgggattttatggattcaggatggcgcaacttacggc

SEQ ID NO: 716401 - DNA, 75 bp, synthetic construct
  source 1..75: mol_type = other DNA
ggtgattctgacgctcaaagaagagtacagccatctggcgagtaacaatttgctgaaccgcgttctttcccgcta

SEQ ID NO: 716402 - DNA, 75 bp, synthetic construct
  source 1..75: mol_type = other DNA
gactgggcaattattgtcggtatcgcctgcaccattaccacctgtggggtgaactggtactacaggcggaaagaa

SEQ ID NO: 716403 - DNA, 75 bp, synthetic construct
  source 1..75: mol_type = other DNA
cgaaccatgaaccagcgcctgaaactcttttctcgcttacgtttgcgtgacttaatgccggtgcctccggctgtg

SEQ ID NO: 716404 - DNA, 75 bp, synthetic construct
  source 1..75: mol_type = other DNA
cgtttgatcgtaaacacgggacggtaacggcagcaaacagtacgccgctgaccgatggcgcagcggcggtgatcc

SEQ ID NO: 716405 - DNA, 75 bp, synthetic construct
  source 1..75: mol_type = other DNA
tcttctctcgcctgcgtttgcgcgacttaatgcccgtaccgcctgcggtagcagaatattctaccggcttgcgga

SEQ ID NO: 716406 - DNA, 75 bp, synthetic construct
  source 1..75: mol_type = other DNA
cctggtactggcggctgtcttcaacaaactgacgctgtctgtcctgaaaggctatgtgtttgccctgatgtggct

SEQ ID NO: 716407 - DNA, 75 bp, synthetic construct
  source 1..75: mol_type = other DNA
tcgatgtctggcaggacatgttgctcggtccagcctggtcaacaccgctggcgctggagcgtgccggtttgacga

SEQ ID NO: 716408 - DNA, 75 bp, synthetic construct
  source 1..75: mol_type = other DNA
gctgattacgcaaagctgcgtccggcgtttgatcgtaaacacgggacggtaacggcggcgaacagtacgccgctg

SEQ ID NO: 716409 - DNA, 75 bp, synthetic construct
  source 1..75: mol_type = other DNA
atggcgttgcgtatcctttcctgcgcgctgttcgttaacccctggattatttcattagtgaagctgttacatgcc

SEQ ID NO: 716410 - DNA, 75 bp, synthetic construct
  source 1..75: mol_type = other DNA
ccttaccgatgccgaccgtggacgctatatcggtattgaaattaccccaaccacccagacgggtacgccatacgt

SEQ ID NO: 716411 - DNA, 75 bp, synthetic construct
  source 1..75: mol_type = other DNA
cagatgccgaccatgtaacgttgacttctgatctaaaaggcgctcgcccgcaaggcagtgaaacggacaagcgtc

SEQ ID NO: 716412 - DNA, 75 bp, synthetic construct
  source 1..75: mol_type = other DNA
cttaatgcctgttccgcctgcggtagcggaatattccaccggtttgcgaatgggcgataccgccgaacaaatggc

SEQ ID NO: 716413 - DNA, 75 bp, synthetic construct
  source 1..75: mol_type = other DNA
gtggacgatagcaaatttaacgtgcttggcggttcgattgcttacgggcatcccttcgcggcgaccggcgcgcgg

SEQ ID NO: 716414 - DNA, 75 bp, synthetic construct
  source 1..75: mol_type = other DNA
atccgtcttcaaatacagcgtggcaaactttgataagcgcctgtcgtcgacgatctttctgattggttttcaaat

SEQ ID NO: 716415 - DNA, 75 bp, synthetic construct
  source 1..75: mol_type = other DNA
ggagtattagcactgactcccagtaatgtctgcaatgcaccattacaggtcttgtttggtcatgatgctgtacac

SEQ ID NO: 716416 - DNA, 75 bp, synthetic construct
  source 1..75: mol_type = other DNA
cggtgcgaggtgattatcgccagttaaccaaaatgattctggttgatgaagccgataactttatgcgccaggatt

SEQ ID NO: 716417 - DNA, 75 bp, synthetic construct
  source 1..75: mol_type = other DNA
aagagtacaagtttcgcctgctgttagttgaacaagggcaattctggcttaatgaaatccagcattgttatcgta

SEQ ID NO: 716418 - DNA, 75 bp, synthetic construct
  source 1..75: mol_type = other DNA
gcgacgattatgaacgtctctggcctctgcaccccttggtgctggcttaccatttacagctaactgaaacaatta

SEQ ID NO: 716419 - DNA, 75 bp, synthetic construct
  source 1..75: mol_type = other DNA
agcctccttcgcttcattaccagaaattactctcgaccgcctgatggtctctggcttaatgccatttgtgtatca

SEQ ID NO: 716420 - DNA, 75 bp, synthetic construct
  source 1..75: mol_type = other DNA
gcgacgattatgaacgtctctcgcctctgcacccattggtaatggcttatcatttacagctagctgaaactatta

SEQ ID NO: 716421 - DNA, 75 bp, synthetic construct
  source 1..75: mol_type = other DNA
ttccattgccccaaagactggctgtacaccggagattctgcgtgtctgggttcgccagcatgagcgggataccgg

SEQ ID NO: 716422 - DNA, 75 bp, synthetic construct
  source 1..75: mol_type = other DNA
tgttccattgctccaaagattggctgtacgccggagactctgcgtgtctgggttcgccagcatgagcgggatacc

SEQ ID NO: 716423 - DNA, 75 bp, synthetic construct
  source 1..75: mol_type = other DNA
aacaggaacgacgttttcgtggattttttattaccctcgcccaaccggttgaggtgaataacgaagtagttaacc

SEQ ID NO: 716424 - DNA, 75 bp, synthetic construct
  source 1..75: mol_type = other DNA
acgatctcgatctgaacagtggcgtatggcgagctgaagccgatatgttgatcgatctgctgcgtagccggttaa

SEQ ID NO: 716425 - DNA, 75 bp, synthetic construct
  source 1..75: mol_type = other DNA
tctatacgttggatgacgggaatgaagacatcgactgccaacattatgctcaggtgaattttgagacgctggcaa

SEQ ID NO: 716426 - DNA, 75 bp, synthetic construct
  source 1..75: mol_type = other DNA
tatggttctggaaagtcagagcgaatatgactcacaatgggcgacaatttgttccattgctccaaacattggctg

SEQ ID NO: 716427 - DNA, 75 bp, synthetic construct
  source 1..75: mol_type = other DNA
tttattggtatagaaaccagtgatcattattttgatgtagcaacacaacgtctcaaaacggcgatcgaaccataa

SEQ ID NO: 716428 - DNA, 75 bp, synthetic construct
  source 1..75: mol_type = other DNA
gaagacgacgaaaaactgcccgtggtgctcgatgccatcctgaaccgggcgctcgtttttcgtcggtggaaatgt

SEQ ID NO: 716429 - DNA, 75 bp, synthetic construct
  source 1..75: mol_type = other DNA
ttcattctgacacggaagtaacaattccgggtgtaccgaaggaccagcgcgttactcaggtactttgctctgctt

SEQ ID NO: 716430 - DNA, 75 bp, synthetic construct
  source 1..75: mol_type = other DNA
aggcgaatcgcgcaataatccaggttgccagtcagtttaacctcctggaaatgccgaacgaacacactacaccgg

SEQ ID NO: 716431 - DNA, 75 bp, synthetic construct
  source 1..75: mol_type = other DNA
tatcaaaaagctgaccgcagccagcggcggagaaggcgagggcgatgcgccaccggtacagccggaagcgcagcc

SEQ ID NO: 716432 - DNA, 75 bp, synthetic construct
  source 1..75: mol_type = other DNA
gtgtattatcaaactggtctttcactacgttatgaaattcaaaagaatgaacgcggtgtcgagtgtatacactac

SEQ ID NO: 716433 - DNA, 75 bp, synthetic construct
  source 1..75: mol_type = other DNA
gcgtgatgtaggacggcttgaatctatctttgataaagctggtctctcaatacgttacgaaattgtaaagaatga

SEQ ID NO: 716434 - DNA, 75 bp, synthetic construct
  source 1..75: mol_type = other DNA
atggggcagattcggcagcttgaaaaacattttagtctgtatattgatgggtataagcgggttagcaagatgcga

SEQ ID NO: 716435 - DNA, 75 bp, synthetic construct
  source 1..75: mol_type = other DNA
gggattatcgtcagctcaccaagatgattctggtggatgaggcagataactttatgcgtcaggactttgccagtc

SEQ ID NO: 716436 - DNA, 75 bp, synthetic construct
  source 1..75: mol_type = other DNA
aggtaccaccagaacaatcgcaaactgagctggagttttgctttcagggcaacgatcttcaggataatcagataa

SEQ ID NO: 716437 - DNA, 75 bp, synthetic construct
  source 1..75: mol_type = other DNA
catccgcttgatgtgcgtttggtgaataatcgtaaggttcctgtagagatagagtcgttgatccgggaattttga

SEQ ID NO: 716438 - DNA, 75 bp, synthetic construct
  source 1..75: mol_type = other DNA
aaattatcacgacacaggtaatcccagagtctatctgactctggttggtggaggcgctttcggtaatgatctcag

SEQ ID NO: 716439 - DNA, 75 bp, synthetic construct
  source 1..75: mol_type = other DNA
atatcaaggctgtattcaacgtggatgataagggcgaacaggagtcgttgatggggcagattcggcagcttgaaa

SEQ ID NO: 716440 - DNA, 75 bp, synthetic construct
  source 1..75: mol_type = other DNA
ggtgataacgctgtaagaacgctgacggggttgatagagaaacagcatcaacaggcgcaggttatttgtgtcgat

SEQ ID NO: 716441 - DNA, 75 bp, synthetic construct
  source 1..75: mol_type = other DNA
ctggaacgtgaaaatcgtgaactgcgccgcagtaacgatatccttcgcaggcttcgcttatttgcgaaggcggag

SEQ ID NO: 716442 - DNA, 75 bp, synthetic construct
  source 1..75: mol_type = other DNA
accgactacccgcgcactcgccctgacctgcccaatcatgaacctcgcggctgcccgcgcggcgcaagttactcc

SEQ ID NO: 716443 - DNA, 75 bp, synthetic construct
  source 1..75: mol_type = other DNA
gctgctttacgacgccgaccgcatcgaggaagcggcgagcaccgaacgcgaggttgatctctacgaacgccagtg

SEQ ID NO: 716444 - DNA, 75 bp, synthetic construct
  source 1..75: mol_type = other DNA
cgccgtgaatcgtacgctcacctgccaatgccgcgtatgaccaacacctacatgctgccgggtaaatcgaccccg

SEQ ID NO: 716445 - DNA, 75 bp, synthetic construct
  source 1..75: mol_type = other DNA
gttgagtacggtatctatgcaccgaactttggtggcggtcaggtggatatcacctccggcaaattcgttttctcc

SEQ ID NO: 716446 - DNA, 75 bp, synthetic construct
  source 1..75: mol_type = other DNA
gtcaggcgatggcgcggctgtataaagagttcaccgctgacggtagcttgattagacttgagataaatgacaggg

SEQ ID NO: 716447 - DNA, 75 bp, synthetic construct
  source 1..75: mol_type = other DNA
ggtaaaagcctggcaggcgctgggtgagatcaccggacgcgaacatactcatctggcgcggcataaagaagatga

SEQ ID NO: 716448 - DNA, 75 bp, synthetic construct
  source 1..75: mol_type = other DNA
tgaaagcaataacccgcagtggaaaaccgtggcatttaataccgcaggtgaactggtcgtgcccaacggttcgat

SEQ ID NO: 716449 - DNA, 75 bp, synthetic construct
  source 1..75: mol_type = other DNA
cgctctctcgcggtggaccgattgtctggatcagcgaaaccgatgcccgtgaactgaccattgtcgataacgact

SEQ ID NO: 716450 - DNA, 75 bp, synthetic construct
  source 1..75: mol_type = other DNA
ggatcatccgtggatgcgtgcttttggtgaaagcctggtggcttatcgcccgcctatcgacacccgtagcgtcag

SEQ ID NO: 716451 - DNA, 75 bp, synthetic construct
  source 1..75: mol_type = other DNA
atgcgtgcctttggcgaaagtctggtggcttatcgcccacctatcgacacccgtagcgttagcgaaatgcgccag

SEQ ID NO: 716452 - DNA, 75 bp, synthetic construct
  source 1..75: mol_type = other DNA
cgactggaaccgaccaccgcgccagatgaacagcacctcgtttttctacaatcattccagccaatggcgctatga

SEQ ID NO: 716453 - DNA, 75 bp, synthetic construct
  source 1..75: mol_type = other DNA
agacgctgggcgcggtagagcatagcccgttatatacctcggtagatccgctgcaaagcatgagccgtgaagaga

SEQ ID NO: 716454 - DNA, 75 bp, synthetic construct
  source 1..75: mol_type = other DNA
gttccattgctccaaagagtggctgtacgcccgagactctgcgtgtctgggttcgccagcatgagcgggataccg

SEQ ID NO: 716455 - DNA, 75 bp, synthetic construct
  source 1..75: mol_type = other DNA
gttccattgctccaaagactggctgtacgccagagactctgcgtgtctgggttcgccagaatgagcgggataccg

SEQ ID NO: 716456 - DNA, 75 bp, synthetic construct
  source 1..75: mol_type = other DNA
tatggttctggaaagtcaggatgaatatgactcacaatgggcggcaatttgttccattgccccaaagattggctg

SEQ ID NO: 716457 - DNA, 75 bp, synthetic construct
  source 1..75: mol_type = other DNA
tgagccgttattgatcattaacaacagccattatttactggatgacgcggtaaataattacatcaccgtaaaaaa

SEQ ID NO: 716458 - DNA, 75 bp, synthetic construct
  source 1..75: mol_type = other DNA
gattacgccgttattgatcgtcaataacagccactatttgctggatgacgcggtaaaaaatagtattaccatcaa

SEQ ID NO: 716459 - DNA, 75 bp, synthetic construct
  source 1..75: mol_type = other DNA
atcccggtaacgagataaaacaaatcgttgaacagagcggcctgtttcttggtgataacgctgtaagaaccctga

SEQ ID NO: 716460 - DNA, 75 bp, synthetic construct
  source 1..75: mol_type = other DNA
aacgtattaccactgtcagcaacagcgacatcatcctgataaacgcagtgcctgtgcacagcgcgatgactggct

SEQ ID NO: 716461 - DNA, 75 bp, synthetic construct
  source 1..75: mol_type = other DNA
actctgcgtgtctgggttcgccagcatgagcgggataccgggggcggtgatggtgggctcaccagcgctgaacgt

SEQ ID NO: 716462 - DNA, 75 bp, synthetic construct
  source 1..75: mol_type = other DNA
tacgccagagactctgcgtgtctgggttcgccagtatgagcgggataccgggggcggagatggagggctcaccag

SEQ ID NO: 716463 - DNA, 75 bp, synthetic construct
  source 1..75: mol_type = other DNA
ttctattgcccctaagattggctgtacaccggagactctgcacgtctgggtactccagcatgagcaggatactgg

SEQ ID NO: 716464 - DNA, 75 bp, synthetic construct
  source 1..75: mol_type = other DNA
gttcgccagcatgagcgggataccgggggcggtgatggcgggctcaccaccgctgaacgtcagcgtctgaaagag

SEQ ID NO: 716465 - DNA, 75 bp, synthetic construct
  source 1..75: mol_type = other DNA
ctaaactccctgagaaagaggtaaacaggatgactaaaaatactcgtttttcccccgaagtccgtcagcgggcga

SEQ ID NO: 716466 - DNA, 75 bp, synthetic construct
  source 1..75: mol_type = other DNA
ttcagctatcttgccagcgtgctgtgccagcatccaccggagactattgctgggttaacgggatatgaaggattt

SEQ ID NO: 716467 - DNA, 75 bp, synthetic construct
  source 1..75: mol_type = other DNA
gcgcacgcctggcgagctggcgcaacagactggcgtttcaggcaggaccatcctgcgtgatattgactatctcaa

SEQ ID NO: 716468 - DNA, 75 bp, synthetic construct
  source 1..75: mol_type = other DNA
cggtgtgcgctgtgtgattgtgccaaacgatcagatggaaaccccgcactaccatgtgctgcgcgtgcgcaaagg

SEQ ID NO: 716469 - DNA, 75 bp, synthetic construct
  source 1..75: mol_type = other DNA
tagccagcatctgcgcgggttaatccgtactcgcgtgcagcaactggtttctgagtgcattgaactacgtctctc

SEQ ID NO: 716470 - DNA, 75 bp, synthetic construct
  source 1..75: mol_type = other DNA
cgtcgctgcttctatttaaaagtgtgcgaaaagctcagccgtgaacgcgcctgcgtaggctggcgtcgcgcagtg

SEQ ID NO: 716471 - DNA, 75 bp, synthetic construct
  source 1..75: mol_type = other DNA
cgcaaagatccgtttttaattcctctggctggcgtaacacgagacaaccttcagcatttatccacagcctgcgac

SEQ ID NO: 716472 - DNA, 75 bp, synthetic construct
  source 1..75: mol_type = other DNA
caacctgcgctggcaacctttgccatgccggatgtgccgccagcgccaacgccagctgaacctgccgcgcctgtt

SEQ ID NO: 716473 - DNA, 75 bp, synthetic construct
  source 1..75: mol_type = other DNA
gcaaccagcaccgaaagcagaagcgaaaccggaacgtcaacaggatcgtcgcaagcctcgtcagaacaaccgccg

SEQ ID NO: 716474 - DNA, 75 bp, synthetic construct
  source 1..75: mol_type = other DNA
accagggctgttgagccgcttcttcggcgcactgaaagcgctgttcagcggtggtgaagaaaccaaaccgaccga

SEQ ID NO: 716475 - DNA, 75 bp, synthetic construct
  source 1..75: mol_type = other DNA
cgtgacaacggtggcatgccgcgtcgttctcgccgctcgcctcgtcacctgcgcgtgagtggtcagcgtcgtcgt

SEQ ID NO: 716476 - DNA, 75 bp, synthetic construct
  source 1..75: mol_type = other DNA
accttaagctacatgctgccgaagctgcatgaagaagcgatggcgctgccgtctgaagaagagttcgctgaacgt

SEQ ID NO: 716477 - DNA, 75 bp, synthetic construct
  source 1..75: mol_type = other DNA
gccgagcctgttatgcaggaaacgcctgcccagcgaactgaactggtaaaagttccgctgcctgtggttgcgcaa

SEQ ID NO: 716478 - DNA, 75 bp, synthetic construct
  source 1..75: mol_type = other DNA
ggtgtatcaccactgcgaaggcagcaaagaggagctggtacgtgacgtcagtcgcttctactcgtcatcgcacga

SEQ ID NO: 716479 - DNA, 75 bp, synthetic construct
  source 1..75: mol_type = other DNA
ccaaatgaatggctggatctcggtggcttaagctcgctttccgctgaagagtactttggtgccagcctttggcaa

SEQ ID NO: 716480 - DNA, 75 bp, synthetic construct
  source 1..75: mol_type = other DNA
gaactggaactgtatcgtggaatgtcagtacaggacccgccaaaaggcgagcttccgattactggcgtatacacc

SEQ ID NO: 716481 - DNA, 75 bp, synthetic construct
  source 1..75: mol_type = other DNA
tgaacaggtgattccgttccgcaccaaatcgattggcaacatgccgcctgccaatcaggatcacgatacgccgct

SEQ ID NO: 716482 - DNA, 75 bp, synthetic construct
  source 1..75: mol_type = other DNA
ctaaccgttccggttggtatctgtataaccgcgcgccaaatattgagtcgatcatcagccatcagccgctggaat

SEQ ID NO: 716483 - DNA, 75 bp, synthetic construct
  source 1..75: mol_type = other DNA
cgaacaggtcattccgttccgtaccaaatctatcggtaacatgccgcctgccaatcaggacaacgatacgccgct

SEQ ID NO: 716484 - DNA, 75 bp, synthetic construct
  source 1..75: mol_type = other DNA
gctggaagcttattcctgggaatatccagacccacgcctgctggcgaaagatatcaaacagcgtttgcacgacgg

SEQ ID NO: 716485 - DNA, 75 bp, synthetic construct
  source 1..75: mol_type = other DNA
tttgaagcattgccaggtaaagtgacgctggtaaacccgcagatttcacccgatctctcggaaccgaatctgacc

SEQ ID NO: 716486 - DNA, 75 bp, synthetic construct
  source 1..75: mol_type = other DNA
gctggaagcctattcctgggaatacccgaacccacgcctgctggcgaaagatatcaaacagcgtttgcacgacgg

SEQ ID NO: 716487 - DNA, 75 bp, synthetic construct
  source 1..75: mol_type = other DNA
agcggtagtctggggggcgaggattgcggctctactcagcatatcctgctgcttgacgagttttaccgtaccgcc

SEQ ID NO: 716488 - DNA, 75 bp, synthetic construct
  source 1..75: mol_type = other DNA
cagccagcatctgcgcggattaatccgtactcgcgtgcagcaactggtttctgagtgcattgaactgcgtctttc

SEQ ID NO: 716489 - DNA, 75 bp, synthetic construct
  source 1..75: mol_type = other DNA
cagcacccgtcaggaaaccgggcgtttcaaggcgctgcgcgtttctggtcaaacctgggggttgttcttcgaacg

SEQ ID NO: 716490 - DNA, 75 bp, synthetic construct
  source 1..75: mol_type = other DNA
cacgaccgttttacctacggctcaagctttatcaacttcaacttgccgcagttttatcagattgtgaaagaggat

SEQ ID NO: 716491 - DNA, 75 bp, synthetic construct
  source 1..75: mol_type = other DNA
ataatcgcgaagaaaaccgtcgtaatcgtcgccaggcacagcagcagactgccgagacgcgtgagagccgtcagc

SEQ ID NO: 716492 - DNA, 75 bp, synthetic construct
  source 1..75: mol_type = other DNA
cttacccaccatcgaataaccgctattaccgacattcacgaggttttcactatatcagcaaggttgggaaagagt

SEQ ID NO: 716493 - DNA, 75 bp, synthetic construct
  source 1..75: mol_type = other DNA
ctatcttgccgactggcaattaccattcatgccgcgccgccggataaccgaaccagagatctggataatatccct

SEQ ID NO: 716494 - DNA, 75 bp, synthetic construct
  source 1..75: mol_type = other DNA
gcaaatcgactcaataaaaattgttcgctgccggaaggtaaaaggcggacgcttgtttattaagatccgcgaacg

SEQ ID NO: 716495 - DNA, 75 bp, synthetic construct
  source 1..75: mol_type = other DNA
tgggcattggtatcacattgatagcggacagctacgcacaaatgaactggccaggtgtcattttccgtccgctca

SEQ ID NO: 716496 - DNA, 75 bp, synthetic construct
  source 1..75: mol_type = other DNA
tcggcgtagtgggaacggctatgtggggacggatgcgcccggttatgcggcgattcctcagggaaaatcctaacg

SEQ ID NO: 716497 - DNA, 75 bp, synthetic construct
  source 1..75: mol_type = other DNA
ctatcttgccgactggcaattaccattcatgttgcgccgccggataaccgaaccagggatctggataatatccct

SEQ ID NO: 716498 - DNA, 75 bp, synthetic construct
  source 1..75: mol_type = other DNA
cgtttgccttcaacgtggggacgggcaatgcctgcagttccacgctggtgaaattgctcaatcagcggcgctggg

SEQ ID NO: 716499 - DNA, 75 bp, synthetic construct
  source 1..75: mol_type = other DNA
aaggtgtgtgaagcaacagccaccgcagaaggtgtatgacgctacggtgtcgtttgccttcaacgtggggacggg

SEQ ID NO: 716500 - DNA, 75 bp, synthetic construct
  source 1..75: mol_type = other DNA
atgaatccatcaatcgttaaacgctgtcttgtcgggaccgtgctggctattgctgccatgctgccgggttttcag

SEQ ID NO: 716501 - DNA, 75 bp, synthetic construct
  source 1..75: mol_type = other DNA
cgctgccggaaggtaaaaggcggacgcttgtttattaagatccgcgaacgcggcgacctactaccggatattgac

SEQ ID NO: 716502 - DNA, 75 bp, synthetic construct
  source 1..75: mol_type = other DNA
ttttcaaaaaaataaaataaattatcactatttcagtaaacctgtaagtgattattttctgaataaacaactgat

SEQ ID NO: 716503 - DNA, 75 bp, synthetic construct
  source 1..75: mol_type = other DNA
attacggagcgacaggcagcagaagggctgatctccaacgtgctgcgtgtggagcggcgctggaaaggtgtgtga

SEQ ID NO: 716504 - DNA, 75 bp, synthetic construct
  source 1..75: mol_type = other DNA
gcggcttctcccctcgtgaattccgcctgacgatgactcgtggcgatatcggtaactatctgggcctgacggtag

SEQ ID NO: 716505 - DNA, 75 bp, synthetic construct
  source 1..75: mol_type = other DNA
ctcagcaggaagagttgcgcgttgcccttgtagatgggcagcgtctgtatgacctggatatcgaaagtccagggc

SEQ ID NO: 716506 - DNA, 75 bp, synthetic construct
  source 1..75: mol_type = other DNA
tgattttattatctctccgcagcatgtatccgcccgtgttaaggggctggaaaatctaactatcagcgaactgtc

SEQ ID NO: 716507 - DNA, 75 bp, synthetic construct
  source 1..75: mol_type = other DNA
tttgatgcaccgcacaggccgatgtatatgcaggaatatctttattcaatcagaaatcatcgttataccgccacg

SEQ ID NO: 716508 - DNA, 75 bp, synthetic construct
  source 1..75: mol_type = other DNA
cgcaagaagtggtaaccgcaccggtggttgaagaaactgttgcggcagaacctgtcgttgaacaggaagcgcctg

SEQ ID NO: 716509 - DNA, 75 bp, synthetic construct
  source 1..75: mol_type = other DNA
gaaagcgctgaatgttgaagagcagtctgtacaggaaaccgaacaggaagagcgtgcacgtccggttcagccacg

SEQ ID NO: 716510 - DNA, 75 bp, synthetic construct
  source 1..75: mol_type = other DNA
gtctgccatccggtggttccattgttatcgacagcaccgaagcgttaactgccatcgacatcaactccgcacgcg

SEQ ID NO: 716511 - DNA, 75 bp, synthetic construct
  source 1..75: mol_type = other DNA
aaaagaaacacacccgaaccctgcaggatgcggagcggtccctggcacaggcccgcctgtcggccagacgactgg

SEQ ID NO: 716512 - DNA, 75 bp, synthetic construct
  source 1..75: mol_type = other DNA
gctatccaccttccggtcgttcgcccctgcgtgaaaaaatgaacgggattgccctgattctgacaccagattcat

SEQ ID NO: 716513 - DNA, 75 bp, synthetic construct
  source 1..75: mol_type = other DNA
tcgtcctgctggaaaaaaacctcacccgggtgatgcgcctgaaaaaacgtccggtaccggaaaacgctgacgaaa

SEQ ID NO: 716514 - DNA, 75 bp, synthetic construct
  source 1..75: mol_type = other DNA
tcgataatctttttgaccgccagttagattttatggcactgttgcaaatagtcggtggtgataaacttatcatcc

SEQ ID NO: 716515 - DNA, 75 bp, synthetic construct
  source 1..75: mol_type = other DNA
gcctcaataaagccggtcaggaactgtatcaaaaactgttcccggtttatcaacggctttctgcgattgataatg

SEQ ID NO: 716516 - DNA, 75 bp, synthetic construct
  source 1..75: mol_type = other DNA
ttgtgcacgaaaaagtgcagatcgttatgacaattgaaaatggccaagtcacaggtgtctgcaaagtccgcgatg

SEQ ID NO: 716517 - DNA, 75 bp, synthetic construct
  source 1..75: mol_type = other DNA
ccagaagcaggcgaagacaccattctcacattattaaatgacaaccagctggcccatgtttcgcgtcgcaaagtg

SEQ ID NO: 716518 - DNA, 75 bp, synthetic construct
  source 1..75: mol_type = other DNA
tatacgaatcaatgaggcgctttattgttgaaagccctaactcgccgcttgtcttattagctaaagataaagtaa

SEQ ID NO: 716519 - DNA, 75 bp, synthetic construct
  source 1..75: mol_type = other DNA
gccgattgatggttatcctgttacttactggcaagccacgattacatttgactatgaccataagctaaaaacaga

SEQ ID NO: 716520 - DNA, 75 bp, synthetic construct
  source 1..75: mol_type = other DNA
tggcatccacaaacatataaattatgttagtgtttatcctgggcataaagaagggcatggtaataacataatgga

SEQ ID NO: 716521 - DNA, 75 bp, synthetic construct
  source 1..75: mol_type = other DNA
acttgtatcttggcttaaaacaatcaatactgatatttctactcttggtgagttgcctaactttgatccttacaa

SEQ ID NO: 716522 - DNA, 75 bp, synthetic construct
  source 1..75: mol_type = other DNA
cgtcattttattaatgagtacagcaaacattagtagtatgaccgcgcgtaatacgatctttcttgagccgtcgcg

SEQ ID NO: 716523 - DNA, 75 bp, synthetic construct
  source 1..75: mol_type = other DNA
atggtggcgcaggtgcaattagccgcgcgcagatgagtctgcaacaggaattacgctacatcgaggcgctgtctg

SEQ ID NO: 716524 - DNA, 75 bp, synthetic construct
  source 1..75: mol_type = other DNA
cctgaaagactggcgtaacgaagctgaattaaccaaagacccacgttttgccggttatcgtatgccgccaaccgg

SEQ ID NO: 716525 - DNA, 75 bp, synthetic construct
  source 1..75: mol_type = other DNA
aaacggttcgatgagttctaacaccagcggtgaaggcgagatccgtgcacagatgatcgaaaatgatctgatcga

SEQ ID NO: 716526 - DNA, 75 bp, synthetic construct
  source 1..75: mol_type = other DNA
atgctatgccaataacgccagtgtggcggtttcctgtaccggtacgggcgaagtcttcatccgcgcgctggcggc

SEQ ID NO: 716527 - DNA, 75 bp, synthetic construct
  source 1..75: mol_type = other DNA
tactggaagagtgtccactgtttaacgccggaattggcgcagtctttacgcgagatgaaacgcatgaactcgacg

SEQ ID NO: 716528 - DNA, 75 bp, synthetic construct
  source 1..75: mol_type = other DNA
tgctggaagagtgtccactgtttaacgccggaattggcgctgtctttacgcgtgatgaaacccatgaactggacg

SEQ ID NO: 716529 - DNA, 75 bp, synthetic construct
  source 1..75: mol_type = other DNA
ttgaattatcaacaatatatgaatcctaatgaaaatgatctgaatgacgtgctgatacctgcatcattaaatgaa

SEQ ID NO: 716530 - DNA, 75 bp, synthetic construct
  source 1..75: mol_type = other DNA
cctttgtcgctatcagcctgttagcaagtgaatattatcaggccattggtaagccttggtattcggtgttgttga

SEQ ID NO: 716531 - DNA, 75 bp, synthetic construct
  source 1..75: mol_type = other DNA
gtttctggcgcaactgagtatggtcgcctatttcatctacacattgatgggattacatatcgggttgagtatacg

SEQ ID NO: 716532 - DNA, 75 bp, synthetic construct
  source 1..75: mol_type = other DNA
caacaacttgaaatgggatatatagaatctgtctgggaggcatggattacactaactcagattgactcaatccga

SEQ ID NO: 716533 - DNA, 75 bp, synthetic construct
  source 1..75: mol_type = other DNA
atgtatatacatgacgtatatcccaaaaaagggggggctatggaaactactgtatttttaagtaatcgcagtcag

SEQ ID NO: 716534 - DNA, 75 bp, synthetic construct
  source 1..75: mol_type = other DNA
tcactgctggaaaaggtgagtgcttttgataaggtcagacaatgggctgaaagtaatggtggggcatattatcct

SEQ ID NO: 716535 - DNA, 75 bp, synthetic construct
  source 1..75: mol_type = other DNA
gtacagcgccgaaacctatgtgctaacggcattggcgctggtgctgcgttactacagcgaagagccttggtgtcg

SEQ ID NO: 716536 - DNA, 75 bp, synthetic construct
  source 1..75: mol_type = other DNA
agccgccggtaccgatgagccggctggagcactatgccagtcaggatgaaatcgggctgctttataacagccacc

SEQ ID NO: 716537 - DNA, 75 bp, synthetic construct
  source 1..75: mol_type = other DNA
attttcttgccaccagcgatctgctcctggtgacgctgaaagcatggcaggtttacgatgccgtcaaaagcctcg

SEQ ID NO: 716538 - DNA, 75 bp, synthetic construct
  source 1..75: mol_type = other DNA
gttatctggcggatattttgcaaaccgtattgcctgacgtcgcgtggcataacaatattcgcgccgagctgtggc

SEQ ID NO: 716539 - DNA, 75 bp, synthetic construct
  source 1..75: mol_type = other DNA
cccaacatactgtatttgccgatataaccgattttgaacacaacgtagtgccattaaaaagtaatatgtgtgaac

SEQ ID NO: 716540 - DNA, 75 bp, synthetic construct
  source 1..75: mol_type = other DNA
taacagtgctgttaacagtgaatcagaaacagaagcggctacaccaaaagcggtcaggattgcgatggataacgc

SEQ ID NO: 716541 - DNA, 75 bp, synthetic construct
  source 1..75: mol_type = other DNA
ctgtcactatggggcgcgtatttcagaccggcgtcgagcgtgtgctctttctgtttctgaatgattttattgaac

SEQ ID NO: 716542 - DNA, 75 bp, synthetic construct
  source 1..75: mol_type = other DNA
taacgccaactacggctggattttgcatatgctctccaagctgtcggctaacggtacagcaggttttgtgctggc

SEQ ID NO: 716543 - DNA, 75 bp, synthetic construct
  source 1..75: mol_type = other DNA
aaaatgaagggcagagatggatgataaataaaggggtagatactaattatagtaataaacctaaattaaaattat

SEQ ID NO: 716544 - DNA, 75 bp, synthetic construct
  source 1..75: mol_type = other DNA
acaactttatcaaatacaaaataaaataaagctcatgggtgaaggtgaaaaaatgaattccgagattatagaaaa

SEQ ID NO: 716545 - DNA, 75 bp, synthetic construct
  source 1..75: mol_type = other DNA
caaatgaaattgatgaaaaagtattgaaaatgaaagataaagttaagcgcacaaagaataaagccacctgtctaa

SEQ ID NO: 716546 - DNA, 75 bp, synthetic construct
  source 1..75: mol_type = other DNA
atggcgcgtccggttgaagggatggcggcgattcaacgtgcaattgacagtgtttctcattatctggtgctgaaa

SEQ ID NO: 716547 - DNA, 75 bp, synthetic construct
  source 1..75: mol_type = other DNA
tgtttatgctgctcgaagtgccacaattgcccggaaaatttcagcaaatgatggcgcgtccggttgaagggatgg

SEQ ID NO: 716548 - DNA, 75 bp, synthetic construct
  source 1..75: mol_type = other DNA
atataaagcagttgaagaagttattgattcccccctttcggagatcgcaaatttaattaaagtattacagtcttg

SEQ ID NO: 716549 - DNA, 75 bp, synthetic construct
  source 1..75: mol_type = other DNA
tcactttattgaagaagtgaagaaaatggttatcgatcgtagcgaacaggaaatcattcctctgatgccaaccga

SEQ ID NO: 716550 - DNA, 75 bp, synthetic construct
  source 1..75: mol_type = other DNA
gatcgtgtgtggcatgtgaagcgcgtgcgctatcgcaagcaaaagccaatggcgctggaagaaacctggatgccg

SEQ ID NO: 716551 - DNA, 75 bp, synthetic construct
  source 1..75: mol_type = other DNA
cgaacaggtgattccgttccgaacaaaatcgattggcaacctgccgcccgccaatcaggatcacgatacgccgct

SEQ ID NO: 716552 - DNA, 75 bp, synthetic construct
  source 1..75: mol_type = other DNA
aaattgataagtgcaaagattatttttccagataatcagggtgaacagattcttgttgtcgacggcaatcctgaa

SEQ ID NO: 716553 - DNA, 75 bp, synthetic construct
  source 1..75: mol_type = other DNA
cagcagtgctaaagtcgtcgataggcatcgtaattcttgagcccagagaagcgcctgaaactgagtctggttgga

SEQ ID NO: 716554 - DNA, 75 bp, synthetic construct
  source 1..75: mol_type = other DNA
cgagcaggaactggttaagctgggatatgcgaccgttaatgatgtggctcgtttcgttcgggatattattcgtcg

SEQ ID NO: 716555 - DNA, 75 bp, synthetic construct
  source 1..75: mol_type = other DNA
attggtggtatttttgtcgttgattttttggggatggttgttaggaccggtgggtatgctgctttccgtgccgtt

SEQ ID NO: 716556 - DNA, 75 bp, synthetic construct
  source 1..75: mol_type = other DNA
gctggaaaaatatgaagaccaggcaggcttctgcaaagttgcgaccctgcaagatattaaagataacgactacgt

SEQ ID NO: 716557 - DNA, 75 bp, synthetic construct
  source 1..75: mol_type = other DNA
agctggaaaaatatgaagaccaggcaggcttctgcaaagttgcaaccctgcaagacattaaagataacgactacg

SEQ ID NO: 716558 - DNA, 75 bp, synthetic construct
  source 1..75: mol_type = other DNA
atgaaaaaatattatccactattaactgtaattcttcttggtttacctttgtgctctcaggcattaactcttaat

SEQ ID NO: 716559 - DNA, 75 bp, synthetic construct
  source 1..75: mol_type = other DNA
ccgccttgcactgtgggaaaaactggggcaacccatcttgactctggcgatgattttgctggctgtgccgtttac

SEQ ID NO: 716560 - DNA, 75 bp, synthetic construct
  source 1..75: mol_type = other DNA
tgccaccattgaagacgacaaaacgtggatcctgcatggtgtgaatcataaaaaatggcttaacggtaaagaaac

SEQ ID NO: 716561 - DNA, 75 bp, synthetic construct
  source 1..75: mol_type = other DNA
aggcttctgcaaagttgcgaccctgcaagatattaaagataacgactacgttctgacaccgggccgctatgtggg

SEQ ID NO: 716562 - DNA, 75 bp, synthetic construct
  source 1..75: mol_type = other DNA
gggcgatgctcgccgcactcgatgttcgcttcgcttttgtctggggattgctggcctttgcgcttaattacatcc

SEQ ID NO: 716563 - DNA, 75 bp, synthetic construct
  source 1..75: mol_type = other DNA
atggcaaagccgatcatcacgctcaatggtctaaaaatagtcattatgttgggaatgctggtcattattctctgc

SEQ ID NO: 716564 - DNA, 75 bp, synthetic construct
  source 1..75: mol_type = other DNA
ttgtctggggattgctggcctttgcgcttaattacatcccgaatattggttcagttctcgcggcaatccccccta

SEQ ID NO: 716565 - DNA, 75 bp, synthetic construct
  source 1..75: mol_type = other DNA
atccccctatcgctcaggtactggtgtttaatggcttctacgaagcgttgctggtgctggcgggatatctgctga

SEQ ID NO: 716566 - DNA, 75 bp, synthetic construct
  source 1..75: mol_type = other DNA
gacgttaccgcaatatcgcaactctattatgacgccgctgcaagctcttgaaccgttgttgcaacgcgtagggat

SEQ ID NO: 716567 - DNA, 75 bp, synthetic construct
  source 1..75: mol_type = other DNA
gcagttatctaatgccatgtcatcaatatttttattgctgctgacggtactgtttatgctgctcgaagtgccaca

SEQ ID NO: 716568 - DNA, 75 bp, synthetic construct
  source 1..75: mol_type = other DNA
tgctcggttatctgaaagagttgctgccgcgtcgtccagatctgaaagtgatcatcacctcggcgaccatcgatc

SEQ ID NO: 716569 - DNA, 75 bp, synthetic construct
  source 1..75: mol_type = other DNA
ccgaaaagcggcggcactggcacggattgaggaagaaagaaacgcccttcgcgtgtcagaactggcagccgaata

SEQ ID NO: 716570 - DNA, 75 bp, synthetic construct
  source 1..75: mol_type = other DNA
tccgcgcatggataaaggcgggagacagatttgatggcaaggcagacggcaacggcctttatatttgctacccca

SEQ ID NO: 716571 - DNA, 75 bp, synthetic construct
  source 1..75: mol_type = other DNA
aactggtggagcgttatctggctgagcaagcgatggatcgtgccaacagttatgtgattggcgatcgcgcgaccg

SEQ ID NO: 716572 - DNA, 75 bp, synthetic construct
  source 1..75: mol_type = other DNA
ccgtatctttgactacgggataaaacgccacgctctggagataaacccttgttcagcgtttgaagtatctgatgc

SEQ ID NO: 716573 - DNA, 75 bp, synthetic construct
  source 1..75: mol_type = other DNA
gttttgcgatggactaaacggatattcgactacgccatcaaacgccacgcactggaaacaaaccccgccgccgct

SEQ ID NO: 716574 - DNA, 75 bp, synthetic construct
  source 1..75: mol_type = other DNA
accgccatcagtatttcaatgaacgccgccacgctctggaattatgggccgacctgctggtggcactggaacagg

SEQ ID NO: 716575 - DNA, 75 bp, synthetic construct
  source 1..75: mol_type = other DNA
cgcggtatttgccgctttggttttgtgctgccgatggacgaatgccttgcccgctgtgcactggatatctctggt

SEQ ID NO: 716576 - DNA, 75 bp, synthetic construct
  source 1..75: mol_type = other DNA
gaaaccctgaactggccgatgattggtgagcaactcactaaacgagaccgttacgcccatgtagtgcgcaacacc

SEQ ID NO: 716577 - DNA, 75 bp, synthetic construct
  source 1..75: mol_type = other DNA
tgctgccaatggacgaatgcctggcgcgctgcgcgctggatatctccgggcgtccgcaccttgaatataaagccg

SEQ ID NO: 716578 - DNA, 75 bp, synthetic construct
  source 1..75: mol_type = other DNA
aatacacctatcagcgcgtcggcgacctgagtactgagatgatcgagcacttcttccgctcgctctcctacacca

SEQ ID NO: 716579 - DNA, 75 bp, synthetic construct
  source 1..75: mol_type = other DNA
acgttgcgcgctggatatctccggccgtccacacctggagtaccgcgcggagtttacctaccagcgcgttggcga

SEQ ID NO: 716580 - DNA, 75 bp, synthetic construct
  source 1..75: mol_type = other DNA
agctggttgaacagtatctggttgaacaggccatggatatggcgaacagctacgtcattggtgatcgggcgaccg

SEQ ID NO: 716581 - DNA, 75 bp, synthetic construct
  source 1..75: mol_type = other DNA
ctacccgttgcgctggcgaaggtgaagcatgagatgcctggtgtaccgaacttcacaatccacgaccttaggcgc

SEQ ID NO: 716582 - DNA, 75 bp, synthetic construct
  source 1..75: mol_type = other DNA
taggcgttgaccctgttgttgcagaacgttgtttaaaccaccgaatcaagggtgtagaaggcatctataaccgtt

SEQ ID NO: 716583 - DNA, 75 bp, synthetic construct
  source 1..75: mol_type = other DNA
tcaaagcatgggtgagggctggggaacgatttaatggtcgatctgatggcaatggcttgtatctatgctttccta

SEQ ID NO: 716584 - DNA, 75 bp, synthetic construct
  source 1..75: mol_type = other DNA
ggcgtggagggtatctataaccgccaccaatactttgatgaacgccgggccgcgttaacacagtgggcgggattg

SEQ ID NO: 716585 - DNA, 75 bp, synthetic construct
  source 1..75: mol_type = other DNA
caggcaaaaagaccgtaaaaacgtccactggcagctttgaacttgccacaccccgcgatcgcgatggcacttttt

SEQ ID NO: 716586 - DNA, 75 bp, synthetic construct
  source 1..75: mol_type = other DNA
tagacaaagacatcaatccaacaatcgggcatcacagaatcgaagatgtcaaaccctggcatatcgacgatatgc

SEQ ID NO: 716587 - DNA, 75 bp, synthetic construct
  source 1..75: mol_type = other DNA
agcattggaactgtgggctggcttgcttgtttctttagaaagaaaggaggcctataacgtgacgccactgcggaa

SEQ ID NO: 716588 - DNA, 75 bp, synthetic construct
  source 1..75: mol_type = other DNA
atacctcgctggcagcgacgattcaggtgccggaactgtttcgtcaggcgcagttgattacctcgcgcacgctgg

SEQ ID NO: 716589 - DNA, 75 bp, synthetic construct
  source 1..75: mol_type = other DNA
accaatatttaaacgaacggcgggaagcgctggccatgctgggcaacctgatggaagcgcttgaacggggcgaag

SEQ ID NO: 716590 - DNA, 75 bp, synthetic construct
  source 1..75: mol_type = other DNA
agcgctggccatgctgggcaacctgatggaagcgcttgaacggggcgaagagtacaacgttacaccactgaggca

SEQ ID NO: 716591 - DNA, 75 bp, synthetic construct
  source 1..75: mol_type = other DNA
gccagtattggtatgacgccgtggcagaccatgcgtcgcgcgattttgccacaggcggcgcgggtggcgttgccg

SEQ ID NO: 716592 - DNA, 75 bp, synthetic construct
  source 1..75: mol_type = other DNA
catcgcacaactgtttatgatctattacggcctgccgcagtttggcatcgaactagatcccattccgtcagcaat

SEQ ID NO: 716593 - DNA, 75 bp, synthetic construct
  source 1..75: mol_type = other DNA
ttcgctcatctactggattatggcgacagtgttatcgacgctacagaaccattttgagaatcaacttaaccgcca

SEQ ID NO: 716594 - DNA, 75 bp, synthetic construct
  source 1..75: mol_type = other DNA
agtggacagcaggcacaggatttactggatgccagaacagaaattctcaggctgaaagcacagcttaaacgcact

SEQ ID NO: 716595 - DNA, 75 bp, synthetic construct
  source 1..75: mol_type = other DNA
tcagaaaaaagagaaggactatacgtggtatatatacaaagataaaaaacttaataaacgtaagttagcgcttga

SEQ ID NO: 716596 - DNA, 75 bp, synthetic construct
  source 1..75: mol_type = other DNA
cgtctgacgccttatagatttaatgatgatgttcttatcaatgcagagcaaattataccggttcctgaattggaa

SEQ ID NO: 716597 - DNA, 75 bp, synthetic construct
  source 1..75: mol_type = other DNA
cgatgccgcagacgtggacggtgagcgctgtatgagtggggatgatctgagcacatggcagaaaccacgggcagg

SEQ ID NO: 716598 - DNA, 75 bp, synthetic construct
  source 1..75: mol_type = other DNA
tccggttgacgaactgtactttgaacagcggcaaattaagcgctggaaagaagggaaaatgcagcgaggaaaact

SEQ ID NO: 716599 - DNA, 75 bp, synthetic construct
  source 1..75: mol_type = other DNA
atggcggaacgagggctgcaattatcaccagaaaaaacggtgataacgcatatttcggaagggtttgattttctg

SEQ ID NO: 716600 - DNA, 75 bp, synthetic construct
  source 1..75: mol_type = other DNA
gctggagaatgaagtcaaacctctcgttgaagcctttatggcggagcgggggctgcaattgtcgccggagaaaac

SEQ ID NO: 716601 - DNA, 75 bp, synthetic construct
  source 1..75: mol_type = other DNA
gtgtttttcaatgaaaaggtatcccctgcttgcggcgaagggctgcaactggcgttaatggcaaatcgtgaattc

SEQ ID NO: 716602 - DNA, 75 bp, synthetic construct
  source 1..75: mol_type = other DNA
atcatcactgtgctggtggctgtgggcgtgctagccattgcgctttatctgctgcatgccagaaacaatcatcgc

SEQ ID NO: 716603 - DNA, 75 bp, synthetic construct
  source 1..75: mol_type = other DNA
catcgcccttccggcgtttgtctttgccagagtgccgagcgatacgcatcaaaatgtagctatttcacggcgaaa

SEQ ID NO: 716604 - DNA, 75 bp, synthetic construct
  source 1..75: mol_type = other DNA
gcgcgaatagaggaagtggtgaaacaggaattcggaaacagcgtcattgtcgacgccgcagacgtggacggtgag

SEQ ID NO: 716605 - DNA, 75 bp, synthetic construct
  source 1..75: mol_type = other DNA
cacagtgatcaggctagaggaatacacgggacagggcctgttgtcatacggcgaggagcgtatctgtcggacgaa

SEQ ID NO: 716606 - DNA, 75 bp, synthetic construct
  source 1..75: mol_type = other DNA
cgtacttgtgtttaaggttttaaagtttttagtttggctatcaaaagatgatggatgcaaagttcatcaagaaaa

SEQ ID NO: 716607 - DNA, 75 bp, synthetic construct
  source 1..75: mol_type = other DNA
tgtccgtttattcgcgtcgaacaaccgggattctcaaaccagcaagtctgtgaaggtgaagctgccgttatttcc

SEQ ID NO: 716608 - DNA, 75 bp, synthetic construct
  source 1..75: mol_type = other DNA
attattgagccattgcccggggctgttatcggattgttgggtattgttattggcgcagttttctctccggtattt

SEQ ID NO: 716609 - DNA, 75 bp, synthetic construct
  source 1..75: mol_type = other DNA
aaaacctggcgttcattgttatgcatcgatcattatgacgaacacgcggttattttcgaatacggagcgacctcg

SEQ ID NO: 716610 - DNA, 75 bp, synthetic construct
  source 1..75: mol_type = other DNA
ccgtgcagactataggcttacccggttattcgtttgatcgcgtccggtatgaaattcagtccagtgatgcgagag

SEQ ID NO: 716611 - DNA, 75 bp, synthetic construct
  source 1..75: mol_type = other DNA
gatggatggtgttaatgtattagcattttcattattattatgcggaactcaggggatcatgggggttatcactcc

SEQ ID NO: 716612 - DNA, 75 bp, synthetic construct
  source 1..75: mol_type = other DNA
gagcaacaaaccgggatattaatagggtggactgactggtttatttctttattgccgacgggcatcatattatgg

SEQ ID NO: 716613 - DNA, 75 bp, synthetic construct
  source 1..75: mol_type = other DNA
attattgagccattgccgggggctgtaattggattattgggtattgttattggcgcagttttctctccggtattt

SEQ ID NO: 716614 - DNA, 75 bp, synthetic construct
  source 1..75: mol_type = other DNA
atgaaaattctgattgttgaagacgatacactgttattgcaggggctgattctggcggcgcaaaccgaaggctac

SEQ ID NO: 716615 - DNA, 75 bp, synthetic construct
  source 1..75: mol_type = other DNA
acgcccgtatccgcgccctgctacgacgccataataatcagggcgaaagtgagctgattgttggcaatctgacgc

SEQ ID NO: 716616 - DNA, 75 bp, synthetic construct
  source 1..75: mol_type = other DNA
cgtctgacgccttatagatttaatgacgatgtgcttatcaatgcagagcaaattgtaccagttcctgaattggaa

SEQ ID NO: 716617 - DNA, 75 bp, synthetic construct
  source 1..75: mol_type = other DNA
tcatttgcttttacgctgtatggccttgcggcggcgctctctgcatgggtatccggcgtggtggcggaaattatt

SEQ ID NO: 716618 - DNA, 75 bp, synthetic construct
  source 1..75: mol_type = other DNA
agaagtttgcagaattaagtcgggcagtaactttactttataccaaccgcaatattttctctccagtattgtgcg

SEQ ID NO: 716619 - DNA, 75 bp, synthetic construct
  source 1..75: mol_type = other DNA
ggctgcattttcttgcccgtatccggcagaaaaaatacactctgccggtgttaattctcaccgcccgcgataccc

SEQ ID NO: 716620 - DNA, 75 bp, synthetic construct
  source 1..75: mol_type = other DNA
gtgttcatgcccgaggcagatagcctcaagcacccgcagcaattctacttaactaccgttacctcgccaatatga

SEQ ID NO: 716621 - DNA, 75 bp, synthetic construct
  source 1..75: mol_type = other DNA
ttactgctgctctggccaactttatgggcgctatgggtggcgacacctggtgttccccaactctggatcctggcg

SEQ ID NO: 716622 - DNA, 75 bp, synthetic construct
  source 1..75: mol_type = other DNA
aaatccaccgcaatcctgttcggccaatacgataaattgattattggtattttgcagattggcgtactggcgctg

SEQ ID NO: 716623 - DNA, 75 bp, synthetic construct
  source 1..75: mol_type = other DNA
gcaggcgacgaaaccttttctgcgcgcagcggggagcgtcgtagcctggtattttgactttggttttgcgggttt

SEQ ID NO: 716624 - DNA, 75 bp, synthetic construct
  source 1..75: mol_type = other DNA
ggctgcatcgggcagtgattgtcctgttctgtctcgctttgttggtcgcgttgatgcaaggtgcttcctggttca

SEQ ID NO: 716625 - DNA, 75 bp, synthetic construct
  source 1..75: mol_type = other DNA
tttacggttttgctggcctgtcgcaggccgcggttaacgacgttacttttcacggcacgctggtctcgccgcccg

SEQ ID NO: 716626 - DNA, 75 bp, synthetic construct
  source 1..75: mol_type = other DNA
tctcatcgctgcataacgacagtaagcgtcacggtacccagggcgaaaagctggatctggctctgctggtggacg

SEQ ID NO: 716627 - DNA, 75 bp, synthetic construct
  source 1..75: mol_type = other DNA
tctcatcgctgcataacgacagcaaacgacacggtacccagggcgagaaactggatttggcgttgctggtggatg

SEQ ID NO: 716628 - DNA, 75 bp, synthetic construct
  source 1..75: mol_type = other DNA
agtctttgctggccccaggcgcaaaattcagcgacaggcttggacactccggagataagtttccgctggcaaagg

SEQ ID NO: 716629 - DNA, 75 bp, synthetic construct
  source 1..75: mol_type = other DNA
accgcgagcgtgaagcctgctttaaagcatttatgaataataactatgttggtctggtactgtttttaggactgg

SEQ ID NO: 716630 - DNA, 75 bp, synthetic construct
  source 1..75: mol_type = other DNA
ccgttattttcacactctaaaaaacgcatttttcttaatgatgcagggaagtattacctggggatagtaaaagaa

SEQ ID NO: 716631 - DNA, 75 bp, synthetic construct
  source 1..75: mol_type = other DNA
aactgttggtgacttttgaggtcgtcgcacgtcatgaaagttataccagagcggcagaggagttagcgttaaccc

SEQ ID NO: 716632 - DNA, 75 bp, synthetic construct
  source 1..75: mol_type = other DNA
tgctgaaacccggcggtcgtctgctggtgcttgagttctcgaagccgattatcgagccgctaagcaaagcttatg

SEQ ID NO: 716633 - DNA, 75 bp, synthetic construct
  source 1..75: mol_type = other DNA
cggtagaaatgccggtggcgaccgggcgttacccgacgacccgctacggcctggtggagctggaaccaaaaaccg

SEQ ID NO: 716634 - DNA, 75 bp, synthetic construct
  source 1..75: mol_type = other DNA
ttggttgatggaagaggcggaactggattacccactggtggaagagctggataaaatcgctgataaattcgcccg

SEQ ID NO: 716635 - DNA, 75 bp, synthetic construct
  source 1..75: mol_type = other DNA
acaaaatcgctgataaattcgcccgcgaagataaaggtccacagccagcggtgacacattatcgcggtctggcga

SEQ ID NO: 716636 - DNA, 75 bp, synthetic construct
  source 1..75: mol_type = other DNA
cccctgatgtagaaaacgacacgcccgatagcggaaaacggaatgagacacaggctctgcgtgatgcctgctacg

SEQ ID NO: 716637 - DNA, 75 bp, synthetic construct
  source 1..75: mol_type = other DNA
ggtcattgcgcctgaccagcagaaccggctgggcgtgcgtaatgctaaaaagaaaaccgccggatacgtaccagg

SEQ ID NO: 716638 - DNA, 75 bp, synthetic construct
  source 1..75: mol_type = other DNA
catatctggcgtaagtaccgctatcacatcagttttcgtaacggcggtgtggatgcgttctcgcagcgcatgtac

SEQ ID NO: 716639 - DNA, 75 bp, synthetic construct
  source 1..75: mol_type = other DNA
aaatcactgatgaaaaccgcgcctggcgagaaagaagtgatcgacctggtcgattacttacttaccagttgcttt

SEQ ID NO: 716640 - DNA, 75 bp, synthetic construct
  source 1..75: mol_type = other DNA
gtttgccgatgaggtactaaaaagcacccacggcctgcgtgctattttgcataacgccagcgcatggatggctga

SEQ ID NO: 716641 - DNA, 75 bp, synthetic construct
  source 1..75: mol_type = other DNA
acgggaatgtgcggctggtaaatcccgagaactggaaagagcttgctgtcgggcacctccagaatgtccggcgcg

SEQ ID NO: 716642 - DNA, 75 bp, synthetic construct
  source 1..75: mol_type = other DNA
atgacctcaaaacattattgaaagccctgctggctaagctggaaggacatgcgacgggcgataacgacaataagc

SEQ ID NO: 716643 - DNA, 75 bp, synthetic construct
  source 1..75: mol_type = other DNA
ccaaacatgggcatgaccagtatcgcttccctgaacaaacaaaacgctgaattctgggcaaaccgtaaagggtaa

SEQ ID NO: 716644 - DNA, 75 bp, synthetic construct
  source 1..75: mol_type = other DNA
accaccggcgatgcacagcgcccaaacatgggcatgaccagtatcgcttccctgaacaaacaaaacgctgaattc

SEQ ID NO: 716645 - DNA, 75 bp, synthetic construct
  source 1..75: mol_type = other DNA
tcaggatactctgaaagcaatgatggaagacgcaggctttgaaagcgttgactattacaacctgacggcaggtgt

SEQ ID NO: 716646 - DNA, 75 bp, synthetic construct
  source 1..75: mol_type = other DNA
accacagtacatacccgtttcccgccggaaccgaatggctatctgcatattggtcatgcgaaatctatctgcctg

SEQ ID NO: 716647 - DNA, 75 bp, synthetic construct
  source 1..75: mol_type = other DNA
ggccaggttggaactcaggactttttacagagagagtacgggttaaccgcgcaagatattgtggcggcagccaga

SEQ ID NO: 716648 - DNA, 75 bp, synthetic construct
  source 1..75: mol_type = other DNA
gccgggatgccttcgtccgggcgacccgtacagatgaactcatacggccccagtttggcgatttcatccgccaga

SEQ ID NO: 716649 - DNA, 75 bp, synthetic construct
  source 1..75: mol_type = other DNA
gtggcaccctgactcagccgggtaaaaacagcccgtaccgcgcccgcagcgttgaagagaacctggcgctgttcg

SEQ ID NO: 716650 - DNA, 75 bp, synthetic construct
  source 1..75: mol_type = other DNA
ctggtctggcaacatccgttactcctccgattattttgacaaactccatgcctatgctgttgaactgatcaacaa

SEQ ID NO: 716651 - DNA, 75 bp, synthetic construct
  source 1..75: mol_type = other DNA
ctgttcagtgtaccgaacccaggtgctgcggatgattttctgtcggtgattaacccggaatcgctggtgatcaaa

SEQ ID NO: 716652 - DNA, 75 bp, synthetic construct
  source 1..75: mol_type = other DNA
tgctgacccgtgttgctgatgttatgcagcatgatgttcctgcggtgcacctggatgcgtcgtttaaaaccgtga

SEQ ID NO: 716653 - DNA, 75 bp, synthetic construct
  source 1..75: mol_type = other DNA
accagagcagtactatcgatccatatttaattacctctgttcgccagaccctggcagaacaaggcgcagcattac

SEQ ID NO: 716654 - DNA, 75 bp, synthetic construct
  source 1..75: mol_type = other DNA
atgacggcattactgacactggaagaggtcaaggcacatctgcgtgtcgaccatgacgcggatgatgacatgctg

SEQ ID NO: 716655 - DNA, 75 bp, synthetic construct
  source 1..75: mol_type = other DNA
gaactcatacggccccagtttggcgatttcatccgccagataagcggcaacctggtaagaggcgttctgtacttt

SEQ ID NO: 716656 - DNA, 75 bp, synthetic construct
  source 1..75: mol_type = other DNA
atctacggccaaaaggtaggtgatgacggtaaggctacctccgaggccattccgatccttcctgatgtgccggtg

SEQ ID NO: 716657 - DNA, 75 bp, synthetic construct
  source 1..75: mol_type = other DNA
acggtaaccgcattaccaaaaattacccattgctggtggatgtgccagtggtattcccgcgcggcggaggctgta

SEQ ID NO: 716658 - DNA, 75 bp, synthetic construct
  source 1..75: mol_type = other DNA
atgtggctgaaatatatcgcgtctatgattattttcgttcttttcccgcttaacgcctctgaaccgccgcgagcc

SEQ ID NO: 716659 - DNA, 75 bp, synthetic construct
  source 1..75: mol_type = other DNA
ctcaccacggatttaacagcactggcagaaggctcgacgccatctattacaggagaaacatcaacctctcttgca

SEQ ID NO: 716660 - DNA, 75 bp, synthetic construct
  source 1..75: mol_type = other DNA
acttagggcgtcagctccaggattcccgtttgattaaaaaaagagggctttctcgtgcatcaagtaagaatgaag

SEQ ID NO: 716661 - DNA, 75 bp, synthetic construct
  source 1..75: mol_type = other DNA
tctattacaggagaaacatcaacctctcttgcagcactattaaaaccgataaaaaaaccgttaaaaggaaattaa

SEQ ID NO: 716662 - DNA, 75 bp, synthetic construct
  source 1..75: mol_type = other DNA
ctggtctggtaacgtccgttactcctccgattattttgatcagctccacgcctatgcgatcgaactgatcaataa

SEQ ID NO: 716663 - DNA, 75 bp, synthetic construct
  source 1..75: mol_type = other DNA
aagaaactccgagttcgaagactgtttagatccagcttcgtacaaagagaaaatcaaggaagaatatggagtaaa

SEQ ID NO: 716664 - DNA, 75 bp, synthetic construct
  source 1..75: mol_type = other DNA
caacgccatgccttagaatatcgctatggaaaacttggtgtaaggagtatatctcgcagagatgagaaaaccttt

SEQ ID NO: 716665 - DNA, 75 bp, synthetic construct
  source 1..75: mol_type = other DNA
aacttgttcgcaccttccctaatcgagcggtcatcgatcacttcgagcattacgcccgcacggtctttactcgct

SEQ ID NO: 716666 - DNA, 75 bp, synthetic construct
  source 1..75: mol_type = other DNA
atttaaacgatcacctggtacaggtaaatgaagcgattgccatattatggggtacaccagttgggggccaattga

SEQ ID NO: 716667 - DNA, 75 bp, synthetic construct
  source 1..75: mol_type = other DNA
atgaaagcatttccagaaacatttctttgggggggcgcaacagccgccaatcaggtggaaggcgcctggcaggaa

SEQ ID NO: 716668 - DNA, 75 bp, synthetic construct
  source 1..75: mol_type = other DNA
cggaaaaactcggatttaccgggcgtggggaagggattgcttgtgaagcggtggcgctactcattaaggcaacga

SEQ ID NO: 716669 - DNA, 75 bp, synthetic construct
  source 1..75: mol_type = other DNA
ccttacgaaaaaggattgctggcgcattctgatggcgacgtggcgctccatgcgttgaccgatgcattgcttggc

SEQ ID NO: 716670 - DNA, 75 bp, synthetic construct
  source 1..75: mol_type = other DNA
acaagaacgcgcaagaaaagcttcggatggtatgcagaagtgatcaaaactcgggggctgtcattaaaaaaataa

SEQ ID NO: 716671 - DNA, 75 bp, synthetic construct
  source 1..75: mol_type = other DNA
cgcagggatatcgctccgtcgttgagcaaagagaaacgcgcatttaccttaagctggctggcagctcttagcgtg

SEQ ID NO: 716672 - DNA, 75 bp, synthetic construct
  source 1..75: mol_type = other DNA
gcgctattgcataagctcggggtgcaatatctgcaagggtatttgattggtcgcccgcagccattagctgattaa

SEQ ID NO: 716673 - DNA, 75 bp, synthetic construct
  source 1..75: mol_type = other DNA
taagcaatatgccattccctcaacccttggctggcgtaacggggataatgcctggtttagtttcatcatggatat

SEQ ID NO: 716674 - DNA, 75 bp, synthetic construct
  source 1..75: mol_type = other DNA
tgggtgtcatttattaatgcgctgagtcaggctgcgaattttgatgtttacgtcaacgataaaaaagttggctcc

SEQ ID NO: 716675 - DNA, 75 bp, synthetic construct
  source 1..75: mol_type = other DNA
ttcgatttgcaggtgctggaatctctgttgaagtggttagcaactcacccttccaacaataaaggtccgcgcttt

SEQ ID NO: 716676 - DNA, 75 bp, synthetic construct
  source 1..75: mol_type = other DNA
ttgtgacaaaaaaggaccgcgatattcggtaaatttaatgccgctcactctgctacaaaaaaatatcgccggacg

SEQ ID NO: 716677 - DNA, 75 bp, synthetic construct
  source 1..75: mol_type = other DNA
atgaaaccgatgcatattgcaatggcgctgctctctgccgcgatgttctttgtgctggcgggcgtctttatgggc

SEQ ID NO: 716678 - DNA, 75 bp, synthetic construct
  source 1..75: mol_type = other DNA
agggttgaaaagcgtttccgggccgaagtttattctgcccgcgattgatggctccacggtgaagcagaaactgtt

SEQ ID NO: 716679 - DNA, 75 bp, synthetic construct
  source 1..75: mol_type = other DNA
cggcggcttttacgccatcggcgcttacacttttgcgctgctcaatcactattacggtctgggcttctggacctg

SEQ ID NO: 716680 - DNA, 75 bp, synthetic construct
  source 1..75: mol_type = other DNA
ggcacggcggtggtctttttcttccagcttgtgcgaccggctttccagaaagggctaaaaagcgtttccgggccg

SEQ ID NO: 716681 - DNA, 75 bp, synthetic construct
  source 1..75: mol_type = other DNA
cgctgctctctgccgcgatgttctttgtcctggcgggcgtctttatgggcgtgcaactggagctggatggcacca

SEQ ID NO: 716682 - DNA, 75 bp, synthetic construct
  source 1..75: mol_type = other DNA
gcggcggcgggcttcctgctcggcttcccggtgctgcgtctgcgcggtgactatctggcgatcgttaccctcggt

SEQ ID NO: 716683 - DNA, 75 bp, synthetic construct
  source 1..75: mol_type = other DNA
gtatccgttaccttcatccctcggttggaggaatggcgataatgcctgggtgtcatttattgacgcgctgggtca

SEQ ID NO: 716684 - DNA, 75 bp, synthetic construct
  source 1..75: mol_type = other DNA
tcagcgccagcgcgcatttctggcgatggtcctggcccagaatacgcccgttgtattacttgatgagccaaccac

SEQ ID NO: 716685 - DNA, 75 bp, synthetic construct
  source 1..75: mol_type = other DNA
aaggaagaaaaggaatatccccaatatatactgatattagtcttgatgaattttatgactatctaggagagattg

SEQ ID NO: 716686 - DNA, 75 bp, synthetic construct
  source 1..75: mol_type = other DNA
ttcctgtcatgtctgacttaacctatttggattttgacagtaatagcgagattttaaaaagcttaacaggaaaag

SEQ ID NO: 716687 - DNA, 75 bp, synthetic construct
  source 1..75: mol_type = other DNA
cgtttacagcactactatcagtttcaggtggtcattaagccatcgccggacaatattcaggagctgtacctcggt

SEQ ID NO: 716688 - DNA, 75 bp, synthetic construct
  source 1..75: mol_type = other DNA
cagaacgaagtggagcagtccacttacaacttcgaatacgcggatgtggacttcctgttcacctgcttcgagcag

SEQ ID NO: 716689 - DNA, 75 bp, synthetic construct
  source 1..75: mol_type = other DNA
cttaatcaggctagccggtactgcgatcaactggtggtaatggcaaacggacatgttatggcgcaaggcacacca

SEQ ID NO: 716690 - DNA, 75 bp, synthetic construct
  source 1..75: mol_type = other DNA
accgtgcgttacctatattggtgccgatggtgcgggtcactatgtgaaaatggttcacaacggtattgaatacgg

SEQ ID NO: 716691 - DNA, 75 bp, synthetic construct
  source 1..75: mol_type = other DNA
tgtactggcaatccggatgcgcagaatattctgcaacacggtgttgatctcaccctgcctgatggaacatcagta

SEQ ID NO: 716692 - DNA, 75 bp, synthetic construct
  source 1..75: mol_type = other DNA
taacggtcgtcatggatagcagccagtatccgttaccttcatccctcggctggaggaatggcgataacgcctggg

SEQ ID NO: 716693 - DNA, 75 bp, synthetic construct
  source 1..75: mol_type = other DNA
gacatccgcaaagtgatctatacgacgaatgccatcgagtcgctaaacagcgtgatccgccatgcgatcaaaaag

SEQ ID NO: 716694 - DNA, 75 bp, synthetic construct
  source 1..75: mol_type = other DNA
aatcaagtctgcgtcccggaaatggacgatgccgttgaaggactggcgaatggcaatgagccgctttattatcga

SEQ ID NO: 716695 - DNA, 75 bp, synthetic construct
  source 1..75: mol_type = other DNA
ccgagaaatattgctcagtagcgttaatgctggaaaaagcggtaaatattactcactcgtatgaagtggtggccg

SEQ ID NO: 716696 - DNA, 75 bp, synthetic construct
  source 1..75: mol_type = other DNA
gtgggacggtggatatcgccaccctgaccatgatctacattattctcggtctcgggctgaacgtggtggtggggc

SEQ ID NO: 716697 - DNA, 75 bp, synthetic construct
  source 1..75: mol_type = other DNA
gaagaaagcattattactgacgatgaactcccttttgtggcacatcgaccgtcagcggtgcagagggaagcaaga

SEQ ID NO: 716698 - DNA, 75 bp, synthetic construct
  source 1..75: mol_type = other DNA
aagatatacatattacgccagcccgattttatcgggccatcgatgaactgattgatacgaatgttattataccta

SEQ ID NO: 716699 - DNA, 75 bp, synthetic construct
  source 1..75: mol_type = other DNA
cacaatgtgttttggcttctcacattaatcgcttcatacacaccagataaaagcactgtttacctgagttttcac

SEQ ID NO: 716700 - DNA, 75 bp, synthetic construct
  source 1..75: mol_type = other DNA
gcctgcgcccgtattggcgcggtgcattcggtaattttcggcggcttctcgccggaagccgttgccgggcgcatt

SEQ ID NO: 716701 - DNA, 75 bp, synthetic construct
  source 1..75: mol_type = other DNA
gctataaagagctgcaccgcgacgtctgccgcttcgccaataccctgctcgagctgggcattaaaaaaggtgatg

SEQ ID NO: 716702 - DNA, 75 bp, synthetic construct
  source 1..75: mol_type = other DNA
tgcgcagttcctgcagaaaatcaccgatgcttataccgaaaatccacagatcgctaacctgctgctggctccgta

SEQ ID NO: 716703 - DNA, 75 bp, synthetic construct
  source 1..75: mol_type = other DNA
aaaagcatctccttatgtcagctatgaagccgtgatgcataaacgtgagcagcgtcgtaagtcgctggagttttt

SEQ ID NO: 716704 - DNA, 75 bp, synthetic construct
  source 1..75: mol_type = other DNA
gcagcagcgttttaattcagacatggtcattctggcggacgtcaacgcccagccttcccatatcagcaagccgct

SEQ ID NO: 716705 - DNA, 75 bp, synthetic construct
  source 1..75: mol_type = other DNA
tggctgagccgcatcatgacggtacggttcactggcacctgttgtgtttcatgcgcaaaaaagagcgccgtgcca

SEQ ID NO: 716706 - DNA, 75 bp, synthetic construct
  source 1..75: mol_type = other DNA
gcttcgtcaccagacgatctgttattagccatttcctacactggcgtgcggcgcgagttaaacctggcggcagat

SEQ ID NO: 716707 - DNA, 75 bp, synthetic construct
  source 1..75: mol_type = other DNA
ctgctacaacctgatacggcgcgccatttaagctctcagcaactggccaacgaagccggagtcagtcagtccagc

SEQ ID NO: 716708 - DNA, 75 bp, synthetic construct
  source 1..75: mol_type = other DNA
caggagtgctgtttctcttcgcggcggtggctgcggtgccgttggcatcgcggctggggattggcgctgtgttgg

SEQ ID NO: 716709 - DNA, 75 bp, synthetic construct
  source 1..75: mol_type = other DNA
ggcggcttctcgccggaagccgttgccgggcgcattattgattccaactcacgactggtgatcacttccgacgaa

SEQ ID NO: 716710 - DNA, 75 bp, synthetic construct
  source 1..75: mol_type = other DNA
ttgcaatgggtactgattccgcggatgcacgatttattagataaccaccagcctttaccggcggcatttgccgtg

SEQ ID NO: 716711 - DNA, 75 bp, synthetic construct
  source 1..75: mol_type = other DNA
gaccgggctgtctccggacgaaatcgttaatcaggtaaaagacgctggtctgaaaggacgcggcggcgcgggctt

SEQ ID NO: 716712 - DNA, 75 bp, synthetic construct
  source 1..75: mol_type = other DNA
tctgcgcgcgctggagcgtggcgaaggtcagccgggtgatatcgaaacacttgagcaactgtgtcgattcttggg

SEQ ID NO: 716713 - DNA, 75 bp, synthetic construct
  source 1..75: mol_type = other DNA
cctcgtggcgctgctggtgcttgcggtggcgtggccgtttatggtgtcacgtgggacggtggatatcgccactct

SEQ ID NO: 716714 - DNA, 75 bp, synthetic construct
  source 1..75: mol_type = other DNA
gccaggttacttaaggctgatccgaatgagatcatatcctccggcgatgtccgcctgatcgctattaaggtcgag

SEQ ID NO: 716715 - DNA, 75 bp, synthetic construct
  source 1..75: mol_type = other DNA
gaaagcgaaacgcgacgcagctcgacaacgcaaaaaagaatattacgctcacccacctacccctattccgctctg

SEQ ID NO: 716716 - DNA, 75 bp, synthetic construct
  source 1..75: mol_type = other DNA
atgaaaaacattatccgtactcccgaaatgcatccgctgacctggcgtttgcgcgatgacaaacagcctgtgtgg

SEQ ID NO: 716717 - DNA, 75 bp, synthetic construct
  source 1..75: mol_type = other DNA
cgggcctgtgggaactgccgttcggtactaccgcgcgtgaaatccttgaagattacgccggtggtatgcgtgacg

SEQ ID NO: 716718 - DNA, 75 bp, synthetic construct
  source 1..75: mol_type = other DNA
aggcgtacccaactggccgacgcctgcccgtatggcgcaggtggtggacaagcatcaggtcaatattctctatac

SEQ ID NO: 716719 - DNA, 75 bp, synthetic construct
  source 1..75: mol_type = other DNA
tctgcgtgcgctggagcgtggcgaaggtcagccgggcgatatcgaaacacttgagcaactgtgtcgattcttagg

SEQ ID NO: 716720 - DNA, 75 bp, synthetic construct
  source 1..75: mol_type = other DNA
gcgatggcggttgaccatgagatcaacatggtgtcgctggtgcgtaacctggaagagtttttcgcccgtgagtcc

SEQ ID NO: 716721 - DNA, 75 bp, synthetic construct
  source 1..75: mol_type = other DNA
tgaaatggagccgggcacttataaagaccgcctgctgatggagcaactgccgcacctgctggtggaaggtatgct

SEQ ID NO: 716722 - DNA, 75 bp, synthetic construct
  source 1..75: mol_type = other DNA
gcgcggtttgtgttctgccccgctgtgtgccgagattctggcagcgcagatgagcgacgaaccgattccgatgga

SEQ ID NO: 716723 - DNA, 75 bp, synthetic construct
  source 1..75: mol_type = other DNA
gcagcgattgcatttcatcagttttgagaaattccccctcacccgcgcggatttagcgctggcacatcagcactg

SEQ ID NO: 716724 - DNA, 75 bp, synthetic construct
  source 1..75: mol_type = other DNA
gttgttgaattttgcaggtgatcagcacgcgacgcatagtgtggtggtactggcgaatgggcatcaaatcagcgg

SEQ ID NO: 716725 - DNA, 75 bp, synthetic construct
  source 1..75: mol_type = other DNA
gtacgggcagcagcaaacgggaagcggcgattatcggcggtggtattgccagcgcgttgttgtcgctggcgttat

SEQ ID NO: 716726 - DNA, 75 bp, synthetic construct
  source 1..75: mol_type = other DNA
agcgcgttgttgtcgctggcgctattacggcgcggctggcaggtaacgctttattgcgcggatgaagcccccgcg

SEQ ID NO: 716727 - DNA, 75 bp, synthetic construct
  source 1..75: mol_type = other DNA
gggggaatctgctttggcattgtttgtcggatgcggcgtaaacgccttatccgacctacgcgttacctgtaggcc

SEQ ID NO: 716728 - DNA, 75 bp, synthetic construct
  source 1..75: mol_type = other DNA
caatgcccttgcccggttgccatcgtttattgctcgatgaaggccgcgtgacgctggatttatggtttggcgata

SEQ ID NO: 716729 - DNA, 75 bp, synthetic construct
  source 1..75: mol_type = other DNA
gctcgatgaaggccgcgtgacgctggatttatggtttggcgatattaacgaactgactagccaactggacgattc

SEQ ID NO: 716730 - DNA, 75 bp, synthetic construct
  source 1..75: mol_type = other DNA
gccatattccgacaacgccggaactggcaaagctgaagcaggtgctgtgctatgacggttacctcacgccgcaaa

SEQ ID NO: 716731 - DNA, 75 bp, synthetic construct
  source 1..75: mol_type = other DNA
catttacgtctgccggttttgtccgccgtggtttacaggaagccggattcacgatgcaaaaacgtaagggctttg

SEQ ID NO: 716732 - DNA, 75 bp, synthetic construct
  source 1..75: mol_type = other DNA
gtaagcgcgccggtttttgacgatctctttatgtttgctgctttaggttcgcgcggtttgtgttctgccccgctg

SEQ ID NO: 716733 - DNA, 75 bp, synthetic construct
  source 1..75: mol_type = other DNA
cggttgaacaaattacgggcgttacgacaaattgcagcggtattacttatccgcaaggtggctggctgtgtccgg

SEQ ID NO: 716734 - DNA, 75 bp, synthetic construct
  source 1..75: mol_type = other DNA
acaaggcactgagcttaaacaggcagaaaatcagagacgctatcagcgaacatacaacatccgtgaaacagcaac

SEQ ID NO: 716735 - DNA, 75 bp, synthetic construct
  source 1..75: mol_type = other DNA
taatcctgagaaaggcgaagtaattgatgtaaaaagttcgttttttgacgtgaagataacaggatcagttcgcga

SEQ ID NO: 716736 - DNA, 75 bp, synthetic construct
  source 1..75: mol_type = other DNA
aaagaaaacaaagcagggataatggcctcgttcctgtccattatcagcgatcaaaaagctaaagcaggaaatacc

SEQ ID NO: 716737 - DNA, 75 bp, synthetic construct
  source 1..75: mol_type = other DNA
tttatcgagttaactggcaagatatccgaccagagcacatcctgatgattctgtgctgctatgcaacggtatacc

SEQ ID NO: 716738 - DNA, 75 bp, synthetic construct
  source 1..75: mol_type = other DNA
catcgcccttccggcgtttgtctttgccagagtgccgaacgatacgcatcaaaatgtggctatttcacggcgaaa

SEQ ID NO: 716739 - DNA, 75 bp, synthetic construct
  source 1..75: mol_type = other DNA
taaaggtacaggtttatcgccgctggcgattgctggcctggtcgcagttggcgtggtagcactggtgctttatct

SEQ ID NO: 716740 - DNA, 75 bp, synthetic construct
  source 1..75: mol_type = other DNA
tattaaccctggcgctggacggcagtaaaggtacaggtttatcgccgctggcgattgctggcctggtcgcagttg

SEQ ID NO: 716741 - DNA, 75 bp, synthetic construct
  source 1..75: mol_type = other DNA
acccaggagggcgacctcgaagaagccgtggtcgggcaatcggtgacgctgtgcctgggcgatgagatcgactgc

SEQ ID NO: 716742 - DNA, 75 bp, synthetic construct
  source 1..75: mol_type = other DNA
taccggcgagatgctgaaagccgcattcagcgagcacgagcagtctgtcagagcggaactgagcgcaagcgcgag

SEQ ID NO: 716743 - DNA, 75 bp, synthetic construct
  source 1..75: mol_type = other DNA
atgaaagccgaaacgaactggacgaaggacaacggcaaactgaacgcagtgagactggtgcaggagtgacagagc

SEQ ID NO: 716744 - DNA, 75 bp, synthetic construct
  source 1..75: mol_type = other DNA
gatccattttgtggaatcttttgtgaaagatgatgacgtagagcaccctctttacggcaacatgttcatggttac

SEQ ID NO: 716745 - DNA, 75 bp, synthetic construct
  source 1..75: mol_type = other DNA
atgatgtctataaatgaagttgttaaacaggactggcatcccgcgcatgttgtcgcggcggtgcatgtgaagggc

SEQ ID NO: 716746 - DNA, 75 bp, synthetic construct
  source 1..75: mol_type = other DNA
gcgccaggcgccgcgcatcgtctggttcaccgggctgtccggagcgggcaagtccaccatcgccaacctggtggc

SEQ ID NO: 716747 - DNA, 75 bp, synthetic construct
  source 1..75: mol_type = other DNA
atgttaaagcgttatttagtactctccgtagtaacggctgcattttcattaccttctttggtctatgctgcacaa

SEQ ID NO: 716748 - DNA, 75 bp, synthetic construct
  source 1..75: mol_type = other DNA
gcggtaaaagatcagatcgacgccatttaccaacagacgggcgtacgcccactggtcttctactctattgttctg

SEQ ID NO: 716749 - DNA, 75 bp, synthetic construct
  source 1..75: mol_type = other DNA
tcgcgaagagcgtcgggaaaacagtcgctatgcctcgcttcgtcagtgccggatggaagtcgcggaagtagaagc

SEQ ID NO: 716750 - DNA, 75 bp, synthetic construct
  source 1..75: mol_type = other DNA
gctggtcttctactccatcgtgttgccggagattcgcgccatcatcttgcaaagtgaaggcttttgccaggatat

SEQ ID NO: 716751 - DNA, 75 bp, synthetic construct
  source 1..75: mol_type = other DNA
aagcagggttcagtgcggctagcatatacccttctgctgacggggcaggaaaagcaatccatgatgagattaacc

SEQ ID NO: 716752 - DNA, 75 bp, synthetic construct
  source 1..75: mol_type = other DNA
atatgggcctttaataaagagtttataaatcttcacccacaaataaaattgcattcaacagcaggttctatcagt

SEQ ID NO: 716753 - DNA, 75 bp, synthetic construct
  source 1..75: mol_type = other DNA
tgttcaggcgctggttgcaccattacaacaagagatgaaactggatccgacgcctgtcgcccaccgtacccatgg

SEQ ID NO: 716754 - DNA, 75 bp, synthetic construct
  source 1..75: mol_type = other DNA
agacagccatgccggccgggaaggctccatctggccatatattgaaacgggcatccttgatgaagtgttgcgcca

SEQ ID NO: 716755 - DNA, 75 bp, synthetic construct
  source 1..75: mol_type = other DNA
gcaccgactggctccgggaaaacgctggcagcatttctctacgccctcgatcggctcttccgcgaaggcggcgaa

SEQ ID NO: 716756 - DNA, 75 bp, synthetic construct
  source 1..75: mol_type = other DNA
acaacttcgaatacgcggatgtggacttcctgttcacctgcttcgagcaatacgagaaagaagcgcagcagctgc

SEQ ID NO: 716757 - DNA, 75 bp, synthetic construct
  source 1..75: mol_type = other DNA
atggataatgctgttgatcgccacgttttttatatttctgatggtacggcaataactgcggaggtattaggacac

SEQ ID NO: 716758 - DNA, 75 bp, synthetic construct
  source 1..75: mol_type = other DNA
gatgcgctgctccacacctcagcacagcgaattggcctttctgccactgtgcgctcagccagcgatgtggcagca

SEQ ID NO: 716759 - DNA, 75 bp, synthetic construct
  source 1..75: mol_type = other DNA
gtatccttgatgaagtgttgcgccatcgctcgaccattatctttactaattcgcgcgggctggcggaaaaactga

SEQ ID NO: 716760 - DNA, 75 bp, synthetic construct
  source 1..75: mol_type = other DNA
atggcaattccatatgaaccagcggagttcaagaaagaagcttttaactgtccgtactgtcaggcgtatgctaag

SEQ ID NO: 716761 - DNA, 75 bp, synthetic construct
  source 1..75: mol_type = other DNA
tcgcacgcctggctggctgagcgaaggtcgcctgcatcgaagcctggtgtgcgaatgtgaagccgtcacggcggg

SEQ ID NO: 716762 - DNA, 75 bp, synthetic construct
  source 1..75: mol_type = other DNA
ccgggatctgggggcaacatattgcggaatatgccgatctgcgcattcgcatgttcccggcgaaagggtcgcttc

SEQ ID NO: 716763 - DNA, 75 bp, synthetic construct
  source 1..75: mol_type = other DNA
gagcctactctggcgtgcgcccgttggttgccagcgatgacgacccaagtgggcgtaacgtcagccgtggcattg

SEQ ID NO: 716764 - DNA, 75 bp, synthetic construct
  source 1..75: mol_type = other DNA
gaagaaatagcaagagcagtcgaatggattacagagcaaaatgaacaagggattccatggtctgaaattgctata

SEQ ID NO: 716765 - DNA, 75 bp, synthetic construct
  source 1..75: mol_type = other DNA
agacacaaaatggtattcaatctttaaagaatccgatagaacaagttaggcgatatgctttcgaagctgtaaacc

SEQ ID NO: 716766 - DNA, 75 bp, synthetic construct
  source 1..75: mol_type = other DNA
ttgaatttcatattaataaactgaatgaacattatcatgtgcctttattgctcagtcaatatggatattcaacct

SEQ ID NO: 716767 - DNA, 75 bp, synthetic construct
  source 1..75: mol_type = other DNA
tatccttactgctcatgaagtcacgggactgattcgtgaaggcgcgacggtgtgcggcgttcatgtacgtaacca

SEQ ID NO: 716768 - DNA, 75 bp, synthetic construct
  source 1..75: mol_type = other DNA
cattgctatgaaaatgcttattggtataaaggcaatatgatgattcctgcggctggtagtgttgagctgcctaat

SEQ ID NO: 716769 - DNA, 75 bp, synthetic construct
  source 1..75: mol_type = other DNA
cctttaatgaggaggcattcaattgtccgttttgcatggcatatgctcaacaggattggtctgggttgatagata

SEQ ID NO: 716770 - DNA, 75 bp, synthetic construct
  source 1..75: mol_type = other DNA
cgcggaagccattgatccgcagcaagcacgcattatcgaaccttccgttaacccggcattgattggcgcggtaaa

SEQ ID NO: 716771 - DNA, 75 bp, synthetic construct
  source 1..75: mol_type = other DNA
tatccttaccgctcatgaagtcacggggctgattcgtgaaggcgcgacggtgtgcggtgttcgtgtacgtaacca

SEQ ID NO: 716772 - DNA, 75 bp, synthetic construct
  source 1..75: mol_type = other DNA
cgcgaaagcgaatttacccgctgggtttatcagggactgtgtggtctggagaaggagcagaaagatgcgctttga

SEQ ID NO: 716773 - DNA, 75 bp, synthetic construct
  source 1..75: mol_type = other DNA
ggtatacgcaatttttgtaccacatctggcgaaaataccgctggtatatcagttttcgtaatggtggaacggata

SEQ ID NO: 716774 - DNA, 75 bp, synthetic construct
  source 1..75: mol_type = other DNA
tttcatcagcctgacagatttgctgacattgccgatcgtcttcgtcatgcgcaagatgaaatcaatcgttttatg

SEQ ID NO: 716775 - DNA, 75 bp, synthetic construct
  source 1..75: mol_type = other DNA
caccggattacacaggggcacacagaaatacacatgtttccactcgtccggtggcattattctccgcgataaata

SEQ ID NO: 716776 - DNA, 75 bp, synthetic construct
  source 1..75: mol_type = other DNA
aggtagtgaagaccacctttagtgaacatccggcgcatgttgaaatacgcgccagcattgaactggaagctgaaa

SEQ ID NO: 716777 - DNA, 75 bp, synthetic construct
  source 1..75: mol_type = other DNA
tgcacagcatgcagtaacgccctatcccaacgatgtacggcaagcaatgttggaagcagtggcgctggcatttaa

SEQ ID NO: 716778 - DNA, 75 bp, synthetic construct
  source 1..75: mol_type = other DNA
gatgctgacattaagcgtctggaaaccctgatgagcgatgcgacgggtaggcccatcaaaattcgctataacccc

SEQ ID NO: 716779 - DNA, 75 bp, synthetic construct
  source 1..75: mol_type = other DNA
gcgcttgcgccagaaacgctcgccgagtcgtttatcgcagtttgtggtgagcaactggacgaaaacggtcagaac

SEQ ID NO: 716780 - DNA, 75 bp, synthetic construct
  source 1..75: mol_type = other DNA
tgcggatgacgcagatgaacgcgccattatgctggcggcaaatccggaagaacgccgtgcaatcatgagtcgtca

SEQ ID NO: 716781 - DNA, 75 bp, synthetic construct
  source 1..75: mol_type = other DNA
gccagaagacgacgatcaagcactggaatacctggcgaaattcgacgatatcgctattgatggatatggttgcct

SEQ ID NO: 716782 - DNA, 75 bp, synthetic construct
  source 1..75: mol_type = other DNA
gtcctttgggataccttcctcaaaggaaaatggtttacaaccgaagggaagcgatttgtttacggcgacatggaa

SEQ ID NO: 716783 - DNA, 75 bp, synthetic construct
  source 1..75: mol_type = other DNA
ataaaagcgggtacgaacaggaatgggcaaaaatacgcgcttgagcagttgagtagctacagaaaacgtgcgcgg

SEQ ID NO: 716784 - DNA, 75 bp, synthetic construct
  source 1..75: mol_type = other DNA
aaggcacattcgacgacttccgtctggatacgctgaaacgtaagaaagactggatcaagatggtgatgacctccg

SEQ ID NO: 716785 - DNA, 75 bp, synthetic construct
  source 1..75: mol_type = other DNA
gctgatgccctgccaaaagtagctggcggtaaagtggcagatgatgcagacgaggccgaagaagacggcgctggt

SEQ ID NO: 716786 - DNA, 75 bp, synthetic construct
  source 1..75: mol_type = other DNA
cgaagatcgtttttggtgaagcggtgaaaattgagggtgaatggcgcgcgttgctggtgactgaagatatggcgg

SEQ ID NO: 716787 - DNA, 75 bp, synthetic construct
  source 1..75: mol_type = other DNA
atggctgatcaaaataatccgtgggataccacgccagcggcggacagtgccgcgcaatccgcagacgcctggggt

SEQ ID NO: 716788 - DNA, 75 bp, synthetic construct
  source 1..75: mol_type = other DNA
ctcttaatgtactctggcaggtttatactgaactgtttccgaaatccctgcatgaaaagtacgacgcgctgcacg

SEQ ID NO: 716789 - DNA, 75 bp, synthetic construct
  source 1..75: mol_type = other DNA
tgcagaggaatatgccgcaatgggcgaatgaacctttacgggcatgggatgcggcagagtttgcggcaatgtcgg

SEQ ID NO: 716790 - DNA, 75 bp, synthetic construct
  source 1..75: mol_type = other DNA
tcgaaagagaagctaccagagctttggaactacttttctgatgttgtgggccccgagcactggggactaaaggga

SEQ ID NO: 716791 - DNA, 75 bp, synthetic construct
  source 1..75: mol_type = other DNA
ataccacaccagcggcggacagtgccgcacaatccgcagatgcctggggtacaccggctgctacaccgactgacg

SEQ ID NO: 716792 - DNA, 75 bp, synthetic construct
  source 1..75: mol_type = other DNA
ctggatatggggcttgccaccgttggcggcgtcgggattgtgatcctcgccattatcctcgatcgcctgacgcag

SEQ ID NO: 716793 - DNA, 75 bp, synthetic construct
  source 1..75: mol_type = other DNA
gtcatgaaaagtctgggagggtatgatcctgcgaatgtggtcaggaaaaaaagaccatcaaagaaggctgcttag

SEQ ID NO: 716794 - DNA, 75 bp, synthetic construct
  source 1..75: mol_type = other DNA
gtgatgaaaaagctggttggttatgaccctgccaatgttgtcaggaagaagagaccacgtaaaaaggcagcgtaa

SEQ ID NO: 716795 - DNA, 75 bp, synthetic construct
  source 1..75: mol_type = other DNA
agcatgttgcttatcttccgtggctactgtcaggaagctgggcacaccatcagtaaaataccgctggcggtgatg

SEQ ID NO: 716796 - DNA, 75 bp, synthetic construct
  source 1..75: mol_type = other DNA
agtatgccggaatgagctggctggagctgctggagcgtggtgaacgcatggacatcaatatcccgttacttgaaa

SEQ ID NO: 716797 - DNA, 75 bp, synthetic construct
  source 1..75: mol_type = other DNA
gacatcaatatcccgttactcgaaaagaatccgggatattacacgcaggcagagcaacagcatgccgggatgggt

SEQ ID NO: 716798 - DNA, 75 bp, synthetic construct
  source 1..75: mol_type = other DNA
ttcttggcctcagtgttctgctttccggatgtggtcagacggaaccaactgaagcagaaatcaacaacacactta

SEQ ID NO: 716799 - DNA, 75 bp, synthetic construct
  source 1..75: mol_type = other DNA
gatgtgaactttgaccgtcctgcatggatggtatctacgcgttactcggtagatgaactgcgtaaaataatcgcc

SEQ ID NO: 716800 - DNA, 75 bp, synthetic construct
  source 1..75: mol_type = other DNA
tattcgcaaatggggagcacgtcgagttcgtcattccaggtcggcggcagtattatcggagtgcctgatgcaggt

SEQ ID NO: 716801 - DNA, 75 bp, synthetic construct
  source 1..75: mol_type = other DNA
aaatctattgtcgtgcctccgggaccatttgtgatcaacgatcttaacggcgtttactctggcgatttgatcatg

SEQ ID NO: 716802 - DNA, 75 bp, synthetic construct
  source 1..75: mol_type = other DNA
ttaccagggcgaaaatttcgatactaataacctgttactgacgcgggcaatcaaatcactgaaatccgatttgca

SEQ ID NO: 716803 - DNA, 75 bp, synthetic construct
  source 1..75: mol_type = other DNA
tgtgtattcaggcgatattattttaaaaatctatgaagaggacggcacggtcaaagaacagcgtttcccggttgc

SEQ ID NO: 716804 - DNA, 75 bp, synthetic construct
  source 1..75: mol_type = other DNA
aaatcaacacttatattgttaaggttatcaacggtaatggtttcgtcattccaatgggaagcattgctaaaaacg

SEQ ID NO: 716805 - DNA, 75 bp, synthetic construct
  source 1..75: mol_type = other DNA
atgaaattgcagttgtacaaatggaagatgttcctggcgtcagatttaatggttccatgcctggcgataaaaaag

SEQ ID NO: 716806 - DNA, 75 bp, synthetic construct
  source 1..75: mol_type = other DNA
ggctatgacggcggcaccggcgcaagtccgctttcatcggtgaaatacgcaggctgtccgtgggagctggggctt

SEQ ID NO: 716807 - DNA, 75 bp, synthetic construct
  source 1..75: mol_type = other DNA
caattgaacgcaatctagttgaatacacaggaatggatgcggattctatttatatcgatgatgacggtgtttgtt

SEQ ID NO: 716808 - DNA, 75 bp, synthetic construct
  source 1..75: mol_type = other DNA
gcgtacgcgtctgctcaccagctataaaacgctctttggaaatggcggttttaactgttatttactgatgctgat

SEQ ID NO: 716809 - DNA, 75 bp, synthetic construct
  source 1..75: mol_type = other DNA
agcgggcgcagttaatcgcagaaaggctggaaaaagcgcaaataccgggcgcgctggaaggggcgcgaagactag

SEQ ID NO: 716810 - DNA, 75 bp, synthetic construct
  source 1..75: mol_type = other DNA
tacttagcgcaatattttttggtatccgtcagggagggatcggtattggtttatgcggtggacttggacttgcta

SEQ ID NO: 716811 - DNA, 75 bp, synthetic construct
  source 1..75: mol_type = other DNA
cgttcaaggttaccaattactttgaatttattgcccgtgaaacccgcgagctgatggcacagctgggcgtaacgc

SEQ ID NO: 716812 - DNA, 75 bp, synthetic construct
  source 1..75: mol_type = other DNA
agatctggaagcttatgacattctgctgctgggcatcccaacttggtattacggcgaagcgcagtgtgactggga

SEQ ID NO: 716813 - DNA, 75 bp, synthetic construct
  source 1..75: mol_type = other DNA
ctttatgaaccgtaccggggatgtgctggtttattatggacggaagtcagagattaagcggttgcagacgctttt

SEQ ID NO: 716814 - DNA, 75 bp, synthetic construct
  source 1..75: mol_type = other DNA
aggggcatggaatggccgggaatcgataacagtccctgttgatggcattgagatggggagtttaagtatgctgtc

SEQ ID NO: 716815 - DNA, 75 bp, synthetic construct
  source 1..75: mol_type = other DNA
gcccgatagagcagcatccattaatcaattatcttgaccatgatgggggcgctttgtcgaatccgacgccagaac

SEQ ID NO: 716816 - DNA, 75 bp, synthetic construct
  source 1..75: mol_type = other DNA
tgcatcaacgcgacgaaaaacatcaaattaaccagtttttagcggactggttgcgatactgtttagcacatggag

SEQ ID NO: 716817 - DNA, 75 bp, synthetic construct
  source 1..75: mol_type = other DNA
ggcattatattcaatgatatcatcaatgatgacagtagttgttgttattctggtgtcatcgaatctcattatagc

SEQ ID NO: 716818 - DNA, 75 bp, synthetic construct
  source 1..75: mol_type = other DNA
ctctgaaacgcctgttcacagccaaccagtgctggacgtccttcctggatgcgggcggtctgcgcgatattgagg

SEQ ID NO: 716819 - DNA, 75 bp, synthetic construct
  source 1..75: mol_type = other DNA
aaggcgcattgttaggcgcaggcgtaggcttactgactggcaatggtgtaaatggcgtactgaaaggcgctgctg

SEQ ID NO: 716820 - DNA, 75 bp, synthetic construct
  source 1..75: mol_type = other DNA
ggcatgaaacggcagggcaggcaaaaccagttgcatggcgatatcgctacgtgaaaaaagacgttacagactttc

SEQ ID NO: 716821 - DNA, 75 bp, synthetic construct
  source 1..75: mol_type = other DNA
ggagcatggaaagacgctgttgactgggtgctcaaagaggcttaccaggctgtaaacattggtaccaaaggagat

SEQ ID NO: 716822 - DNA, 75 bp, synthetic construct
  source 1..75: mol_type = other DNA
tggcagcgctgcgggatgaaggaataatgttggtcgccagcggtaacgtggtgcacaacctgcgtacggtgaagt

SEQ ID NO: 716823 - DNA, 75 bp, synthetic construct
  source 1..75: mol_type = other DNA
ccgatatcccgatggtgcagttgagtatcgacagtagcaaacctgccgcctggcatttcgaaatggggcgcaaac

SEQ ID NO: 716824 - DNA, 75 bp, synthetic construct
  source 1..75: mol_type = other DNA
aatgttagtcgccagcggcaacgtggtgcataaccttcgcacagtaaaatggcatggcgacagctcaccgtatcc

SEQ ID NO: 716825 - DNA, 75 bp, synthetic construct
  source 1..75: mol_type = other DNA
gagtttcttgaaggtcgctggttaagtattcatgtgcgtgatattgacctgcaatggtttacctcggtggtgaat

SEQ ID NO: 716826 - DNA, 75 bp, synthetic construct
  source 1..75: mol_type = other DNA
gtccactgacgcctgcgaacgtgaaggatgttatcagtgccatcagggcaaaactggattcactggttactgccg

SEQ ID NO: 716827 - DNA, 75 bp, synthetic construct
  source 1..75: mol_type = other DNA
attggttaccgcccgcgcattctggcggctcccggcctggataccgaagcagtcacatccgccctgtgcgtcatt

SEQ ID NO: 716828 - DNA, 75 bp, synthetic construct
  source 1..75: mol_type = other DNA
gatgttattcttgatgaagctgcaaacaaaggtaccggcaagtggaccagccagagctcactggatctcggcgaa

SEQ ID NO: 716829 - DNA, 75 bp, synthetic construct
  source 1..75: mol_type = other DNA
gcggcgcgtaaacaagatccggatacgctcttcttccagcgtcggctggtgattgaaggcgatacggagctgggg

SEQ ID NO: 716830 - DNA, 75 bp, synthetic construct
  source 1..75: mol_type = other DNA
atgtgaaaaacctgatggacgccattgaactggagcaaatgccgaaagccttacgcatgatgctgctgcaactgg

SEQ ID NO: 716831 - DNA, 75 bp, synthetic construct
  source 1..75: mol_type = other DNA
gcttacgcctgccaatgctaaggatgccgtgagcgctatcaaggcaaagctggatgcactggtgacagccggaaa

SEQ ID NO: 716832 - DNA, 75 bp, synthetic construct
  source 1..75: mol_type = other DNA
gatgctattgcgttccgtaaaaagatttccggtcgcgaaatcatgcttctgtggcctgatttcattgcgttcaac

SEQ ID NO: 716833 - DNA, 75 bp, synthetic construct
  source 1..75: mol_type = other DNA
tctttgaggtgtatacccgaaccgcacaggtgctggctgattcaattgcggaagcgcagtttgaaaccatcgata

SEQ ID NO: 716834 - DNA, 75 bp, synthetic construct
  source 1..75: mol_type = other DNA
gccgatggaagatctgacgctgtatcagaccttcacggatgagtatttcgactccgcttttgcaacgctgggagg

SEQ ID NO: 716835 - DNA, 75 bp, synthetic construct
  source 1..75: mol_type = other DNA
agctaccgcgccagatttaacgagcgcgaacttatgctggtctggccggacttcatcgcccataacccgaaatcc

SEQ ID NO: 716836 - DNA, 75 bp, synthetic construct
  source 1..75: mol_type = other DNA
agagacgcattcaggacaaacccaggacaaactcgttatcggtggttctgatgatgacggaaactataccggcat

SEQ ID NO: 716837 - DNA, 75 bp, synthetic construct
  source 1..75: mol_type = other DNA
atgcacaataaaaccacaccggacgcagcagccgccgcgctcactacgctgatgcacgcgcttattgatatttct

SEQ ID NO: 716838 - DNA, 75 bp, synthetic construct
  source 1..75: mol_type = other DNA
gcttacgcacagcttaccgctgatatggcgctgaatgaggctaaagccatcctgattgctgattgtgaaaatggc

SEQ ID NO: 716839 - DNA, 75 bp, synthetic construct
  source 1..75: mol_type = other DNA
ttctttgcactgatgagcacagagatacagggctaaatattcttgatattgccgctaactatgctgatttcgtga

SEQ ID NO: 716840 - DNA, 75 bp, synthetic construct
  source 1..75: mol_type = other DNA
acgccaccagcgaaacagaatatgccggggctttcgttcctcactcactggctgttatgcaacttagtgctgata

SEQ ID NO: 716841 - DNA, 75 bp, synthetic construct
  source 1..75: mol_type = other DNA
aaaagctgatgaacaaggttatcaaggagggcgtgaaaaccaaggtgctgatgctttcggccaccccggtgaaca

SEQ ID NO: 716842 - DNA, 75 bp, synthetic construct
  source 1..75: mol_type = other DNA
tggtgatttacgaaatcaactagctcacggattgaaccgccccgggtttcctggagagtgttttatctgtgaact

SEQ ID NO: 716843 - DNA, 75 bp, synthetic construct
  source 1..75: mol_type = other DNA
gacgccttcaggaactggaggggaaaggaatgttgcagaagataagttacgctcaaatcggtcatgatgatgatt

SEQ ID NO: 716844 - DNA, 75 bp, synthetic construct
  source 1..75: mol_type = other DNA
cgttcctgatgatgcggctgatgcgctttcgtcaatgccagaacttattagagcggcttttttcttactttccac

SEQ ID NO: 716845 - DNA, 75 bp, synthetic construct
  source 1..75: mol_type = other DNA
atccctgtgcgtgattgcgggtaaactgcgcgcgtttgtgtatgcctcatgtcacggctgtaacacgatggctga

SEQ ID NO: 716846 - DNA, 75 bp, synthetic construct
  source 1..75: mol_type = other DNA
ggaaactgattggggcgtcgtgctggtatgacgtggtggataacggcaccacgaatttacgtcaggggcgtgtgc

SEQ ID NO: 716847 - DNA, 75 bp, synthetic construct
  source 1..75: mol_type = other DNA
cctgattgctgattgtgaaaatggggggggggttatgcgtgatgatcgttttaatgccctgaaacaggaatttga

SEQ ID NO: 716848 - DNA, 75 bp, synthetic construct
  source 1..75: mol_type = other DNA
cggggctttcgttcctcactcactggctgtaatgcaacttagtgctgatatggcgctgaatgaggctaaagccat

SEQ ID NO: 716849 - DNA, 75 bp, synthetic construct
  source 1..75: mol_type = other DNA
gattgatatttctgttatcgcggacagggcgcataagcacgctaccagtgaaacagaatatgccggggctttcgt

SEQ ID NO: 716850 - DNA, 75 bp, synthetic construct
  source 1..75: mol_type = other DNA
ttaacaaaggatggtaagccaaatggaacatatttatggctggagaacaacaacatacctgtaaaactgacaggg

SEQ ID NO: 716851 - DNA, 75 bp, synthetic construct
  source 1..75: mol_type = other DNA
cattgaaggccttcaacaacgatctactcataaatgctcaaaaattccgttcgttgatatcctcaaattttctgt

SEQ ID NO: 716852 - DNA, 75 bp, synthetic construct
  source 1..75: mol_type = other DNA
cgttgagaaggcggcagaagcgctggttaaaaacgtttttgcaaaaatttcgacagtggctgagggcgttacgaa

SEQ ID NO: 716853 - DNA, 75 bp, synthetic construct
  source 1..75: mol_type = other DNA
cccatcagcaagttggacagaaagtaccgctttaccaacgccaccggcaggccactcattagtgacgccctctgc

SEQ ID NO: 716854 - DNA, 75 bp, synthetic construct
  source 1..75: mol_type = other DNA
gagggtaagaagcaaattaggtcttgaattgtcaaaccaagtgcaacgattttttgaagtaaacttcataaggtg

SEQ ID NO: 716855 - DNA, 75 bp, synthetic construct
  source 1..75: mol_type = other DNA
gagggtaagaagcaaattaggtattaaagatctgcgataccatgatttgcgtagagaaggggcaagtcgcttatt

SEQ ID NO: 716856 - DNA, 75 bp, synthetic construct
  source 1..75: mol_type = other DNA
gtggtcctgtatgcgaatcggagaagtatgccggttacgatgggaagatctcgaccaagaacaaaaatctatact

SEQ ID NO: 716857 - DNA, 75 bp, synthetic construct
  source 1..75: mol_type = other DNA
atgcttagtggtaaagacttaggccgagcgatagagcaggccattaacaaaaaaattgcatcaggatccgtcaaa

SEQ ID NO: 716858 - DNA, 75 bp, synthetic construct
  source 1..75: mol_type = other DNA
cagatacaaaaagtgaacttttagacataaacagcctttatcaagccgcctctgatgaaaaaagagcaattgtgg

SEQ ID NO: 716859 - DNA, 75 bp, synthetic construct
  source 1..75: mol_type = other DNA
cataaacagcctttatcaagccgcttctgatgaaaaaagagcaattgtagccttcctcttatctggaaatgctgc

SEQ ID NO: 716860 - DNA, 75 bp, synthetic construct
  source 1..75: mol_type = other DNA
gaaaatttaactcgacaaagtgagtacttaagtcagagtgcgaaggcagagctggaaaaagctactctcgagctg

SEQ ID NO: 716861 - DNA, 75 bp, synthetic construct
  source 1..75: mol_type = other DNA
attgttggtcaggtctttggttggttaggggttgcagcaactgctattgcagctatttttaacccagcgcttttg

SEQ ID NO: 716862 - DNA, 75 bp, synthetic construct
  source 1..75: mol_type = other DNA
ggagcctagttgggttgatcatgacgttcgcgcctacattgccgcaatggaaatgaaggtagctaactatctgaa

SEQ ID NO: 716863 - DNA, 75 bp, synthetic construct
  source 1..75: mol_type = other DNA
gatgatgatggccactctgttatccctggatgcctcagcgcagagagttgcgagtatgaaaaactccaacgagat

SEQ ID NO: 716864 - DNA, 75 bp, synthetic construct
  source 1..75: mol_type = other DNA
caggggccggttcctccgccatcaatgcttaaaaagtatgatcaactgatgccagggcttgcaaataggcttgtt

SEQ ID NO: 716865 - DNA, 75 bp, synthetic construct
  source 1..75: mol_type = other DNA
cgtgagatgattctggcgcacgagaagtggctaccaaactttgctgactgtattgtagatctcaaaaaagcacat

SEQ ID NO: 716866 - DNA, 75 bp, synthetic construct
  source 1..75: mol_type = other DNA
atttttgatctctgccagcggatgatagataacgctggcgtaccgatgaagctttataaaacactggatcgtcgc

SEQ ID NO: 716867 - DNA, 75 bp, synthetic construct
  source 1..75: mol_type = other DNA
accgatgatataagccgtcaatcgtggattagcgaaaaggtcttcgttaacccgccatacagcggcactaaaaca

SEQ ID NO: 716868 - DNA, 75 bp, synthetic construct
  source 1..75: mol_type = other DNA
aaaccggactgcgccactgctgtgtgaaccggacgcacaaaaacgggcgaccggatggcatcagctgtattccgc

SEQ ID NO: 716869 - DNA, 75 bp, synthetic construct
  source 1..75: mol_type = other DNA
aaacaatcacaagcaaaaatccggaagccgcagctgcgcgacataatctggctgctgttctgaagcggaacgccg

SEQ ID NO: 716870 - DNA, 75 bp, synthetic construct
  source 1..75: mol_type = other DNA
aatgggaaatgaagtgcttcacagttcgacattcgattatcctgggcctttacaagccggggaaaagccggtaag

SEQ ID NO: 716871 - DNA, 75 bp, synthetic construct
  source 1..75: mol_type = other DNA
gatgatgatggccactctgttatccctggatgcctcagcgcagaaagttgcgagtatgaagaactccaacgagat

SEQ ID NO: 716872 - DNA, 75 bp, synthetic construct
  source 1..75: mol_type = other DNA
tgggctgttgttgccgttagcgcaacagcaatggcactgcaaactgcagttgatgtaatgggcgataaggccccg

SEQ ID NO: 716873 - DNA, 75 bp, synthetic construct
  source 1..75: mol_type = other DNA
ccggcgggaatggtcactgaagcggtttatcgtcacactggatttaaacgctttatcggcgtgtgtaatattcct

SEQ ID NO: 716874 - DNA, 75 bp, synthetic construct
  source 1..75: mol_type = other DNA
gagatgattctggcgcacgagaaatggctgccaaactttgccgactgcatcgcagagcttaaaaaagcacattaa

SEQ ID NO: 716875 - DNA, 75 bp, synthetic construct
  source 1..75: mol_type = other DNA
tcacaaggatctgattttcatcagccatgcccgtggatcgaactgggtcgtaaactctggctgcccgcaggcgtt

SEQ ID NO: 716876 - DNA, 75 bp, synthetic construct
  source 1..75: mol_type = other DNA
gcactggatctttttgatcaacattccggtggggattatcggtgcgatcgccacattgctgttaatgccgaacta

SEQ ID NO: 716877 - DNA, 75 bp, synthetic construct
  source 1..75: mol_type = other DNA
ccggcgctcggcggtctgctggtggagtacgcgtcgtggcactggatctttttgatcaacattccggtggggatt

SEQ ID NO: 716878 - DNA, 75 bp, synthetic construct
  source 1..75: mol_type = other DNA
ttagcatggcgtttatcatcgctcttccggcactcgtctttgccagagttccgaatgatacgcatcaaaatgtgg

SEQ ID NO: 716879 - DNA, 75 bp, synthetic construct
  source 1..75: mol_type = other DNA
gctggcaattgtggattgtggctttcggcttctttatgcagtcgctggacaccaccatcgttaacaccgcccttc

SEQ ID NO: 716880 - DNA, 75 bp, synthetic construct
  source 1..75: mol_type = other DNA
gcggcgcttcgatctctccggctttctgttgctggcggttggcatggcagtgttaacgctggcgctggatggcag

SEQ ID NO: 716881 - DNA, 75 bp, synthetic construct
  source 1..75: mol_type = other DNA
atcaaaacgtggctatttcgcgtcgaaaaaggagcgcgcaatgaagttctggcggcccggtattaccggcaaact

SEQ ID NO: 716882 - DNA, 75 bp, synthetic construct
  source 1..75: mol_type = other DNA
tgggcgataacaaaagtgcgctgctgggctggaccagcttcctcggcacaccggaagaacgaccctcagtcacca

SEQ ID NO: 716883 - DNA, 75 bp, synthetic construct
  source 1..75: mol_type = other DNA
atgcctgctcttacaatttttttgtcgatggcggagctgttgcaccgcctggcaaagggtgaaaaggggacgcca

SEQ ID NO: 716884 - DNA, 75 bp, synthetic construct
  source 1..75: mol_type = other DNA
gcaaatccgggacgatccccggaaataatctgtggcctggtgtcccactgctttgatttgtcagaagtgacgctg

SEQ ID NO: 716885 - DNA, 75 bp, synthetic construct
  source 1..75: mol_type = other DNA
cctgctgtcgatgattatgcaattatcgatgagtatcggcgtcaccattgccgggcttttactgggattttttgg

SEQ ID NO: 716886 - DNA, 75 bp, synthetic construct
  source 1..75: mol_type = other DNA
tggtatctgatttgtgccgttcccattggttggtttatgcatgttaagaaaacgaactcattaaaggtcagtgat

SEQ ID NO: 716887 - DNA, 75 bp, synthetic construct
  source 1..75: mol_type = other DNA
gaaatgggtggaatttttctggtcatgacttttctggttgtactttgttgtctgtggctggccttctcacgttat

SEQ ID NO: 716888 - DNA, 75 bp, synthetic construct
  source 1..75: mol_type = other DNA
gccctgttcagcctgaaactgttccgcacccgtaccttttcgctgggcctggcggggagctttgccggacgtatc

SEQ ID NO: 716889 - DNA, 75 bp, synthetic construct
  source 1..75: mol_type = other DNA
agccgcgggcgtgcttgttttcgttctgcattaaaacgttgcgccggggcgtgttgcggtaaagagagccatgag

SEQ ID NO: 716890 - DNA, 75 bp, synthetic construct
  source 1..75: mol_type = other DNA
atatcaccaccatcttctgtacttatgacgccgacaccttaagcaaagatccggcagatggtcgtaaagtcaaag

SEQ ID NO: 716891 - DNA, 75 bp, synthetic construct
  source 1..75: mol_type = other DNA
tccaggacaaccgtcgtctgtatgactgggtactggacaacatcaccattcctgttcacccgcgccagtacgaat

SEQ ID NO: 716892 - DNA, 75 bp, synthetic construct
  source 1..75: mol_type = other DNA
agcaacgctgaagtgagtatcgaacagaacggctatgtcatttatcgcacttttgttcagccgggtgcatttgag

SEQ ID NO: 716893 - DNA, 75 bp, synthetic construct
  source 1..75: mol_type = other DNA
gccgcgtcctttctcatttacgtaccccggatgaagccgccatgctacggcaatcccgacgcatcagctggatat

SEQ ID NO: 716894 - DNA, 75 bp, synthetic construct
  source 1..75: mol_type = other DNA
tggcctgttgggactggaaccgttaagccgcggtcgtgcatgttttcgttctgcattaaaacgttgcgccggggc

SEQ ID NO: 716895 - DNA, 75 bp, synthetic construct
  source 1..75: mol_type = other DNA
acgctacttcgttctgcgggcaaccccgttccctttggcgctaccgcaacgttaatgacggacaatcagcatgag

SEQ ID NO: 716896 - DNA, 75 bp, synthetic construct
  source 1..75: mol_type = other DNA
acgaaatctcactgcgtagcgattcgttgggtgacgatgttgacgttgaaaatgcgttccagaaagtggtgccaa

SEQ ID NO: 716897 - DNA, 75 bp, synthetic construct
  source 1..75: mol_type = other DNA
atgacagaacttcccgacaccacccgctggcaactgtggattgtggctttcggcttctttatgcagtcgctggat

SEQ ID NO: 716898 - DNA, 75 bp, synthetic construct
  source 1..75: mol_type = other DNA
taaaaccgaagctgatcttaaccagttttcccgtatgctgactaagctgaccgtcgaaacggcgctcaatgcaga

SEQ ID NO: 716899 - DNA, 75 bp, synthetic construct
  source 1..75: mol_type = other DNA
actataaccgttatcacaagcgcagcgaaatacagggtaacctgacgcagcaattaggggcgtatggctctgttt

SEQ ID NO: 716900 - DNA, 75 bp, synthetic construct
  source 1..75: mol_type = other DNA
attaaatggggtaatgacgcgtcgcagcaatgcgtggcgccttataaattatccctggaattaaaacagggcgga

SEQ ID NO: 716901 - DNA, 75 bp, synthetic construct
  source 1..75: mol_type = other DNA
catattactctctgcccttctctgtttctgtgctggcgcttacggttgccagtacgttttctgcgatggctggta

SEQ ID NO: 716902 - DNA, 75 bp, synthetic construct
  source 1..75: mol_type = other DNA
ctattccgctggattattcgttactttacagcaatattatcgagttccaggtaaagtactttttccgcgataaaa

SEQ ID NO: 716903 - DNA, 75 bp, synthetic construct
  source 1..75: mol_type = other DNA
ttgttgccgtcagaagcggaactcgctgttcgttataatgtttcgcgtaataccctgcgtaaggcattatccttg

SEQ ID NO: 716904 - DNA, 75 bp, synthetic construct
  source 1..75: mol_type = other DNA
atcgcggtcgaggtggtcatgcgtggccgtcataaagaaatcgacggcggcgaaaataagcagggtgaaaacacc

SEQ ID NO: 716905 - DNA, 75 bp, synthetic construct
  source 1..75: mol_type = other DNA
tacgtactgaaccgacctacacgctttatgcgacgttcgataacattggcggcctgaaagcgcgctctccggtca

SEQ ID NO: 716906 - DNA, 75 bp, synthetic construct
  source 1..75: mol_type = other DNA
tgacagccaggttgtggattatcgcgttgtgaaaatgcctgtagttaagggcgggaagttagaactcaccatcac

SEQ ID NO: 716907 - DNA, 75 bp, synthetic construct
  source 1..75: mol_type = other DNA
ctttgccctggccgccgagcaataaccggtattaccggcacaaccgcgggcgtacacacattagcgctgatggcg

SEQ ID NO: 716908 - DNA, 75 bp, synthetic construct
  source 1..75: mol_type = other DNA
gcgccgatgcttgaagatttacgcagcgtgatgcaggaagaaacacaaagctttcttgataagttaattcaggat

SEQ ID NO: 716909 - DNA, 75 bp, synthetic construct
  source 1..75: mol_type = other DNA
cggcagccagtcgccgctaccgggctattatctggatcagatggcgcaggagtccgcacagaacgaagacggcct

SEQ ID NO: 716910 - DNA, 75 bp, synthetic construct
  source 1..75: mol_type = other DNA
gaacgccacgtaaagccgcgcgctgtgttctggccctgtttctggtgatgttgcttccggtgggatgcacagaca

SEQ ID NO: 716911 - DNA, 75 bp, synthetic construct
  source 1..75: mol_type = other DNA
atatttgtggtttttgcatttcccagagtaatgattggcgctcactggtttacggacatcattgtcggttccatg

SEQ ID NO: 716912 - DNA, 75 bp, synthetic construct
  source 1..75: mol_type = other DNA
gggtgctgttgacgccattaagtgatcgattaatcaccttttttgacaaatcactaccgggaaaaagcaaacatt

SEQ ID NO: 716913 - DNA, 75 bp, synthetic construct
  source 1..75: mol_type = other DNA
tgctctctgtccccacgaaagatgcctcacgagatagctttcccggcgatcacggcatgatgctgcttatttttt

SEQ ID NO: 716914 - DNA, 75 bp, synthetic construct
  source 1..75: mol_type = other DNA
gtattggtggcgttgttgtgggtcgggtggcggatattacgctggacccgaaaacctatctgccgcgcgtaacgc

SEQ ID NO: 716915 - DNA, 75 bp, synthetic construct
  source 1..75: mol_type = other DNA
ctctgggattgggaaaaaactttggctctattggtgcaatatcggttgatattactcaggcaaaaagtacattaa

SEQ ID NO: 716916 - DNA, 75 bp, synthetic construct
  source 1..75: mol_type = other DNA
ttctgctgttggcatactgctttgcggcagtgaagaccgtgctattcataaattcttccgtgaaagcgcctttcc

SEQ ID NO: 716917 - DNA, 75 bp, synthetic construct
  source 1..75: mol_type = other DNA
gtgaatacttactacatcacactaccctggccgccgagcaataaccgctactaccgccataatcgcgggcgcacg

SEQ ID NO: 716918 - DNA, 75 bp, synthetic construct
  source 1..75: mol_type = other DNA
cctgaatgggatgaaaacgaccagttgtggtcatttaatgtttccattccgtttggtcgggcatggagtaactac

SEQ ID NO: 716919 - DNA, 75 bp, synthetic construct
  source 1..75: mol_type = other DNA
cagcaattgggcacctatgggtcggtttatttcaatatgacccagcaggattactggaatgatgacggtaagcgc

SEQ ID NO: 716920 - DNA, 75 bp, synthetic construct
  source 1..75: mol_type = other DNA
tgggattgggaaaaaactttggctctattggtgcaatatcggttgatattactcaggcaaaaagtacattaaata

SEQ ID NO: 716921 - DNA, 75 bp, synthetic construct
  source 1..75: mol_type = other DNA
gtgaatacttactacatcacaattccctggcccccgagcaataaccgctagtaccgccataatcgcgggcgcact

SEQ ID NO: 716922 - DNA, 75 bp, synthetic construct
  source 1..75: mol_type = other DNA
gtgaatacttactacatcacaataccctggcccccgagcaataaccgctagtaccgccataatcgcgggcgcaca

SEQ ID NO: 716923 - DNA, 75 bp, synthetic construct
  source 1..75: mol_type = other DNA
attcgtacttccggcctgcttggagagcaatatctggcgttaaacgtcggttttgaagaccccgaactgggtact

SEQ ID NO: 716924 - DNA, 75 bp, synthetic construct
  source 1..75: mol_type = other DNA
atggaatatctggatgagcgtttcccgcatccgccactgatgcctgtttacccggtagctcgcggtgaaagccgt

SEQ ID NO: 716925 - DNA, 75 bp, synthetic construct
  source 1..75: mol_type = other DNA
gtgaatacttactacatcacaatgccctggcccccgagcaataaccgctagtaccgccataatcgcgggcgcacg

SEQ ID NO: 716926 - DNA, 75 bp, synthetic construct
  source 1..75: mol_type = other DNA
gtgaatacttactacatcacaatcccctggcccccgagcaataaccgctagtaccgccataatcgcgggcgcacc

SEQ ID NO: 716927 - DNA, 75 bp, synthetic construct
  source 1..75: mol_type = other DNA
catttccggtgtgagtgacagaaaaataatcacgcctgacgggaatgtaaaagccgtgattaatgcgtcaacgtg

SEQ ID NO: 716928 - DNA, 75 bp, synthetic construct
  source 1..75: mol_type = other DNA
tttatagccctgcacaaataaaaaatggcgcaacagcggttccttttgatatcacgctacagaactgtattcgtg

SEQ ID NO: 716929 - DNA, 75 bp, synthetic construct
  source 1..75: mol_type = other DNA
attaaaacaagacggtaatattgctatagaaccgggggattttaaagccaccagcacttttcaggttacctaccc

SEQ ID NO: 716930 - DNA, 75 bp, synthetic construct
  source 1..75: mol_type = other DNA
tctatacggatgatggcctactcctttacggccccggatattatgaaggcgctggtagcagcaaaaaagcgtggg

SEQ ID NO: 716931 - DNA, 75 bp, synthetic construct
  source 1..75: mol_type = other DNA
atcattacgccagcagacaacgtaaaagccattattaacgcgtcaacgtgggaatggctgcgcccgggaaatatt

SEQ ID NO: 716932 - DNA, 75 bp, synthetic construct
  source 1..75: mol_type = other DNA
agtgattaccggcacacccggtaagacgctgccagccggtgcggaaattcgtggtgaaggtgtcagcgtgaccac

SEQ ID NO: 716933 - DNA, 75 bp, synthetic construct
  source 1..75: mol_type = other DNA
cgcattggtcgttgcatggggtatctgcaggtagccgctgagattgaagcgctggccagtggtgctgataaggat

SEQ ID NO: 716934 - DNA, 75 bp, synthetic construct
  source 1..75: mol_type = other DNA
taaaaagcaggggctgatgaagcgcgttggccgttgcatgggatatctgcaggtagctgctgagattgaagcgct

SEQ ID NO: 716935 - DNA, 75 bp, synthetic construct
  source 1..75: mol_type = other DNA
cacccgccgcgttgcccgttagcgtcggcgtggtggtgaataacgtccagaccgtgctgaatgttgccagagccg

SEQ ID NO: 716936 - DNA, 75 bp, synthetic construct
  source 1..75: mol_type = other DNA
gctggccagtggtgctgataaggatgcaattgtgcgggaggctcttcttcgtgattttaatactccaccttttaa

SEQ ID NO: 716937 - DNA, 75 bp, synthetic construct
  source 1..75: mol_type = other DNA
tgcaccggataaagaccaggaatgggagtgtaatcggccatcctttgttgtatccggtgatgacgggaaaatcac

SEQ ID NO: 716938 - DNA, 75 bp, synthetic construct
  source 1..75: mol_type = other DNA
aggtagccgctgagattgaagcgctggccagtggtgctgataaggatgcaattgtgcgggaggctcttcttcgtg

SEQ ID NO: 716939 - DNA, 75 bp, synthetic construct
  source 1..75: mol_type = other DNA
tttattttcctcggcggcagcggcgcgaccctggggcttattctggccatttttatcgcttctcgtcgtgctgat

SEQ ID NO: 716940 - DNA, 75 bp, synthetic construct
  source 1..75: mol_type = other DNA
gcgaacagagcacattttatgggctttaatgttttcacagccataagaacattaaaagaacaaaaagaagaaata

SEQ ID NO: 716941 - DNA, 75 bp, synthetic construct
  source 1..75: mol_type = other DNA
actggaacgactttcagaaatcgcagttgaattgcttaaagctgaatgggctgcacaacagttgctgcatactcc

SEQ ID NO: 716942 - DNA, 75 bp, synthetic construct
  source 1..75: mol_type = other DNA
ttcgataaaacctatgacactaacgtggaaggttctgtcgtctacggcgcaccacgtaattttagtattaccggc

SEQ ID NO: 716943 - DNA, 75 bp, synthetic construct
  source 1..75: mol_type = other DNA
attgatgaccttaatgggaatgttaattgtgctgtgctggctgccgctggcgacgcggatgtcgcagcagggaca

SEQ ID NO: 716944 - DNA, 75 bp, synthetic construct
  source 1..75: mol_type = other DNA
tccgcttcccggtcacagacagtgattacctgtttctgtatctcccccagccgttcggccatgcgctccgaagcc

SEQ ID NO: 716945 - DNA, 75 bp, synthetic construct
  source 1..75: mol_type = other DNA
tgctgccagcggtaactttctttttcttcacagggacgttcttttcgctggtgcttaacaccgtaggtgtccgtg

SEQ ID NO: 716946 - DNA, 75 bp, synthetic construct
  source 1..75: mol_type = other DNA
atgaactctttaatcagcattatctgccatgggcaaaatccgctaaacgcagttggggaaaggatgttcagcgct

SEQ ID NO: 716947 - DNA, 75 bp, synthetic construct
  source 1..75: mol_type = other DNA
atgtaccgggtaaaacagctgttcggggggggggcactgacgctgcgtgactacgatggtcaggttgcggaggct

SEQ ID NO: 716948 - DNA, 75 bp, synthetic construct
  source 1..75: mol_type = other DNA
tggctcaccggctttggctcagcgattggttgagctgttagcgccagtgcctgtcacactggataaagaaggctg

SEQ ID NO: 716949 - DNA, 75 bp, synthetic construct
  source 1..75: mol_type = other DNA
gagcctggcacaggacgataccacacatatgaatcgttatatgctgccactcgtgtcacccttgccgatccgctg

SEQ ID NO: 716950 - DNA, 75 bp, synthetic construct
  source 1..75: mol_type = other DNA
cttccgcgccgagcaaggtagctacgcgctggtggatctcttcacccgctaccaggtgacgaaaaacttctcgtt

SEQ ID NO: 716951 - DNA, 75 bp, synthetic construct
  source 1..75: mol_type = other DNA
aaatgtcatagcagagaacctgggatctcttgataaaggaaatccatccttcaatgttccaactgtcgctggttg

SEQ ID NO: 716952 - DNA, 75 bp, synthetic construct
  source 1..75: mol_type = other DNA
ttttacccaattctcattcactcatccaacgtcgaatgcaggatgaccgtagcgtacttgccgtcgcgaaaaccg

SEQ ID NO: 716953 - DNA, 75 bp, synthetic construct
  source 1..75: mol_type = other DNA
tcataccttttttataccaataaagttacgccggattgcccggttgagtatcagccgcgtctcaatgagttacag

SEQ ID NO: 716954 - DNA, 75 bp, synthetic construct
  source 1..75: mol_type = other DNA
aaaggcgcagatcctgtttttaaggctggattagaatttaaacttgatgtagcccatgagactggtcatatgata

SEQ ID NO: 716955 - DNA, 75 bp, synthetic construct
  source 1..75: mol_type = other DNA
ggggcgataagaccacctgcggcggcaaaattattgaaggcgcggacgaccatacgatcatgggtatcccacagg

SEQ ID NO: 716956 - DNA, 75 bp, synthetic construct
  source 1..75: mol_type = other DNA
cctgcaaccgtctgcgcgtctcctccattggtaaactccatctttgcctgtttggtgagggcggcgttaatctgc

SEQ ID NO: 716957 - DNA, 75 bp, synthetic construct
  source 1..75: mol_type = other DNA
gccctatccagctgcgtttcatcgaactgatggaaacgggcgagggcagcgagcttttccgcaagcatcatatct

SEQ ID NO: 716958 - DNA, 75 bp, synthetic construct
  source 1..75: mol_type = other DNA
tggcgaactggcgtgatgctggtcttactggtatcaacgtgagtgtcgatagcctcgacgctcgccagtttcatg

SEQ ID NO: 716959 - DNA, 75 bp, synthetic construct
  source 1..75: mol_type = other DNA
ttatgcccgctcagggagagattgatgtaatgaaatatggaaaatatcgtcctgacatgtatactcgattggttg

SEQ ID NO: 716960 - DNA, 75 bp, synthetic construct
  source 1..75: mol_type = other DNA
acgcaaagccagcggcgagtcgcttatgccttgccttagccgtgttcaactggaagaaatgggcgtgcgcatcga

SEQ ID NO: 716961 - DNA, 75 bp, synthetic construct
  source 1..75: mol_type = other DNA
gactggatgggcaacgcagtggtgccgtatctcacgccatatcgtgaaaccattgtggaattgcgcagcgacacg

SEQ ID NO: 716962 - DNA, 75 bp, synthetic construct
  source 1..75: mol_type = other DNA
tctttttcggtgccgggatgctgtttccgctggcgaccagcggcgcaatggaaccgttccccttcctggcgggca

SEQ ID NO: 716963 - DNA, 75 bp, synthetic construct
  source 1..75: mol_type = other DNA
tatgacggtcagtattttgtttattctgccgattccggcggcatttttttggggcatggtttgccggacgtccta

SEQ ID NO: 716964 - DNA, 75 bp, synthetic construct
  source 1..75: mol_type = other DNA
gcaccggcgtaggcggcgtgatggcgcgtacattgccgcgtgatttatatgaacggacacagttgcgtcatgcta

SEQ ID NO: 716965 - DNA, 75 bp, synthetic construct
  source 1..75: mol_type = other DNA
ttacgccgtgactttaccgatatcatcgccgccgtgcgggaaaacgacgctattcgccagattgcggtcactacc

SEQ ID NO: 716966 - DNA, 75 bp, synthetic construct
  source 1..75: mol_type = other DNA
gctatgacctcgacggtaagcctgccgggctggtttctgaggatgaggcaaaaaatgctcaacgctggctggcca

SEQ ID NO: 716967 - DNA, 75 bp, synthetic construct
  source 1..75: mol_type = other DNA
gaaggtggtggatttattcccctgaaaattggcataaacaatgatatttcggcatttctggcagaaagcccggat

SEQ ID NO: 716968 - DNA, 75 bp, synthetic construct
  source 1..75: mol_type = other DNA
aacggacgaatctccgttatgggcaaatagaaaaagcactgaaattattggtagctgaaaatccatcgcctgtgg

SEQ ID NO: 716969 - DNA, 75 bp, synthetic construct
  source 1..75: mol_type = other DNA
accgtactgaatattgccagagccgttgaacaacagtatccggtgacgcgacgcacgcttactgttaatggtgca

SEQ ID NO: 716970 - DNA, 75 bp, synthetic construct
  source 1..75: mol_type = other DNA
agcaaaaccactggcggcttgctggttttacccaactctcattcactgatccaacgtcgaatgcagaatgaccgc

SEQ ID NO: 716971 - DNA, 75 bp, synthetic construct
  source 1..75: mol_type = other DNA
acgaacagacgatccgcgagcgagtacaggcagcaggcgtcgtgggtgctggtggcgcaggctttccaacacata

SEQ ID NO: 716972 - DNA, 75 bp, synthetic construct
  source 1..75: mol_type = other DNA
cttttcatctccaacaatgcccacgaagtgaagatttcaaaatcggcctgccagtcagtttgctttgataaagcg

SEQ ID NO: 716973 - DNA, 75 bp, synthetic construct
  source 1..75: mol_type = other DNA
taataaaggcttcctgaccgtcgatgaaattcgtcgggttacgcgcgccttcgccagtctgggcaccgaaaaagt

SEQ ID NO: 716974 - DNA, 75 bp, synthetic construct
  source 1..75: mol_type = other DNA
ttgccgcggtacgggaaaacgacgctatccgtcagattgcggtcacgaccaacggctatcgtctggaacgcgacg

SEQ ID NO: 716975 - DNA, 75 bp, synthetic construct
  source 1..75: mol_type = other DNA
gcggaaacagcggctgcttcgcgcccaggagttgctgcaacggctggggctggaagaccgtacagagtattatcc

SEQ ID NO: 716976 - DNA, 75 bp, synthetic construct
  source 1..75: mol_type = other DNA
tgccgatgaaccaaccggcgcactggacagccattctggcgaagaggtgatggcatcctgcatcagctgcgcgat

SEQ ID NO: 716977 - DNA, 75 bp, synthetic construct
  source 1..75: mol_type = other DNA
gggtaagtgctctgctaatggttgggtgtggtgatgataatgccgcaccatctcctgtccctactacatttaagg

SEQ ID NO: 716978 - DNA, 75 bp, synthetic construct
  source 1..75: mol_type = other DNA
tgcctggcggagcttgatcaatacatcaatcagaatttcgcgctcgcttgcgaaaagatgttttggtgtaaaggc

SEQ ID NO: 716979 - DNA, 75 bp, synthetic construct
  source 1..75: mol_type = other DNA
tccattaaagaacggtttggtattgaaaatgtgatcttttcgccggagtttttacgcgaagggaaagcactttat

SEQ ID NO: 716980 - DNA, 75 bp, synthetic construct
  source 1..75: mol_type = other DNA
tcattggtgagcgttcagaacgcgcagaacgttttgctgcgttattacaggaaggcgcgattaagcaaaatatcc

SEQ ID NO: 716981 - DNA, 75 bp, synthetic construct
  source 1..75: mol_type = other DNA
caacaacccttcctttggttatggtggctattgcctgccgaaggatactaagcaactgctggcgaactaccagtc

SEQ ID NO: 716982 - DNA, 75 bp, synthetic construct
  source 1..75: mol_type = other DNA
aagcggacgtgattatctctaaccgcatggcggaagagctggcggatgtggcggataaagtctatacccgcgatc

SEQ ID NO: 716983 - DNA, 75 bp, synthetic construct
  source 1..75: mol_type = other DNA
aaagaagcctgtccgttggggctggcaccgaccagcagcaccaccgccacgctggttatgggcgatgcgctcgcc

SEQ ID NO: 716984 - DNA, 75 bp, synthetic construct
  source 1..75: mol_type = other DNA
cctgcgtgaaggccgtgctctgtacgacaacctgcatccgtcgcgcattgttatcggtgagcgctctgctcgtgc

SEQ ID NO: 716985 - DNA, 75 bp, synthetic construct
  source 1..75: mol_type = other DNA
ggctactgcctgccgaaagataccaagcagctgctggcgaactacgaatcggtcccgaacaatatcatcgcggct

SEQ ID NO: 716986 - DNA, 75 bp, synthetic construct
  source 1..75: mol_type = other DNA
tctaaccgtatggcggaagagttggcggatgtggtggacaaggtttacacccgcgatctgtttggtaatgattag

SEQ ID NO: 716987 - DNA, 75 bp, synthetic construct
  source 1..75: mol_type = other DNA
cgtatttcaatgaacttgatagttatgctgaaagcctggggcttaattcacgccagattattgagggcgtatgcc

SEQ ID NO: 716988 - DNA, 75 bp, synthetic construct
  source 1..75: mol_type = other DNA
ggcgctggaacagaaaattcaggaagcgcatgcgcagtatgaacgtgctaaatccatggctcagcttacgaaaca

SEQ ID NO: 716989 - DNA, 75 bp, synthetic construct
  source 1..75: mol_type = other DNA
gtttatcgcctgattatgaagtcgggttcggataacttccgcgcgtcctccattcaggggatcatgaagcgtatt

SEQ ID NO: 716990 - DNA, 75 bp, synthetic construct
  source 1..75: mol_type = other DNA
tacattcttcaattcccgagtgattcgggaactggctgagtttaaagcgctgagcgatgttattctctgtaatcg

SEQ ID NO: 716991 - DNA, 75 bp, synthetic construct
  source 1..75: mol_type = other DNA
tgcgcctgcggcgcccgttcttttcccccgccttctctgtttatgacttaccagaaatcacatcaccttcccttt

SEQ ID NO: 716992 - DNA, 75 bp, synthetic construct
  source 1..75: mol_type = other DNA
tcgatccgcgtattggcaaccattacaacaatccgtcgtttggttatggtggttattgtctgccgaaagatacca

SEQ ID NO: 716993 - DNA, 75 bp, synthetic construct
  source 1..75: mol_type = other DNA
atgaacgtgcgcctgcggcgcccgttcttttcccccgccttctctgtgacctgtcagaaatcacatcactttccc

SEQ ID NO: 716994 - DNA, 75 bp, synthetic construct
  source 1..75: mol_type = other DNA
ttggctgtgacggcgtgaaatcagtggtgcgccagagattattggacgatgcgccgcgcgtcaccggtcatgtgg

SEQ ID NO: 716995 - DNA, 75 bp, synthetic construct
  source 1..75: mol_type = other DNA
gctttacactcggtaaaggtgtgactctgcgcaaccgtattgttatggcccccatgacgacgtgggcgggtaatg

SEQ ID NO: 716996 - DNA, 75 bp, synthetic construct
  source 1..75: mol_type = other DNA
atgaccaccgttaacaataagaaatgctacccaagcgagcaatatcttaatgagctgatcaccaacatagagttt

SEQ ID NO: 716997 - DNA, 75 bp, synthetic construct
  source 1..75: mol_type = other DNA
ctgttgccaatcgacacaattatccggcatcaagtaagcgatatcagttaaccgatatagatggggaagatgctt

SEQ ID NO: 716998 - DNA, 75 bp, synthetic construct
  source 1..75: mol_type = other DNA
tagtcatcatcgtggtgcatccggtggcagcggctggcgactggctccacgtaataacttcatggtggaaactct

SEQ ID NO: 716999 - DNA, 75 bp, synthetic construct
  source 1..75: mol_type = other DNA
cgccaaattatcgaaggcgtttgtctcgatccgcgtattggtaaccattacaacaacccgtcgtttggttatggt

SEQ ID NO: 717000 - DNA, 75 bp, synthetic construct
  source 1..75: mol_type = other DNA
gctggctggacaccgttgccattcgtcgtgcggtacagttgaactccctgtctggcttctgcctgactaaactgg

SEQ ID NO: 717001 - DNA, 75 bp, synthetic construct
  source 1..75: mol_type = other DNA
tgtttatttccctggaataacgtatttgcggatcggaaagtaccgaagataaccattaatggcaatacggtgacg

SEQ ID NO: 717002 - DNA, 75 bp, synthetic construct
  source 1..75: mol_type = other DNA
cagagctggttcagagagagcggggttttaatgaaactgtcaatgccgcgatagcccggggaatacgacaggaaa

SEQ ID NO: 717003 - DNA, 75 bp, synthetic construct
  source 1..75: mol_type = other DNA
atgaagtggagcgtcaccacgggcaggtggaatatgtggctgacccggcggcgctgcagtacctgcagagtctgg

SEQ ID NO: 717004 - DNA, 75 bp, synthetic construct
  source 1..75: mol_type = other DNA
agtcaagcatcaagaaagcgctgaacaacgtaaaggatggcaaggatacggtctcactctactacgccgcattgg

SEQ ID NO: 717005 - DNA, 75 bp, synthetic construct
  source 1..75: mol_type = other DNA
agatcatggtagtggaaatggaggtggtaacagaggaagttccagtagttgttcaggtaataatgttggcggaac

SEQ ID NO: 717006 - DNA, 75 bp, synthetic construct
  source 1..75: mol_type = other DNA
ctgaacagtgctgtcgattattctgaatatattgccgaggataaatacaggcaattaccagatttgttagcccat

SEQ ID NO: 717007 - DNA, 75 bp, synthetic construct
  source 1..75: mol_type = other DNA
acgcctcgtaacatccggtgggcagatcgtgctatgaacatggctaatcgcaacagcactgcagggagagctcac

SEQ ID NO: 717008 - DNA, 75 bp, synthetic construct
  source 1..75: mol_type = other DNA
atcctgctgcaaatgtttacgacattgagcaacgcgtttacatcaatccagagcagtactcctcatcagggagta

SEQ ID NO: 717009 - DNA, 75 bp, synthetic construct
  source 1..75: mol_type = other DNA
acgaggcttgcaagaagacgttcccagacaaccgagggaaacccgagaaacgtatcgcggcggaggattgtccag

SEQ ID NO: 717010 - DNA, 75 bp, synthetic construct
  source 1..75: mol_type = other DNA
gcgttggggtaattggtattggcgggctggggcatatcgctataaaacttctgcacgcaatgggatgcgaggtga

SEQ ID NO: 717011 - DNA, 75 bp, synthetic construct
  source 1..75: mol_type = other DNA
cggcgcgctggcgggaacggtcgccacattgttgattttcggtgaattacacctgatgacgctggtgatgagcat

SEQ ID NO: 717012 - DNA, 75 bp, synthetic construct
  source 1..75: mol_type = other DNA
gctcatcacgaccctgaatacgctggaaaaggatctgaaaacgcgttacccgcaggcgcagttgctctcgcgcgg

SEQ ID NO: 717013 - DNA, 75 bp, synthetic construct
  source 1..75: mol_type = other DNA
tggagcaaaaattcagtgaagcgccaaaaaatgaaattgatgctcttttgcatatcgcgaatatgctaaaagtag

SEQ ID NO: 717014 - DNA, 75 bp, synthetic construct
  source 1..75: mol_type = other DNA
acaccttcatttttcgtccatcctggtgaagccgcgcatggtgatttaggcatggtcaccccacaggatgtggtg

SEQ ID NO: 717015 - DNA, 75 bp, synthetic construct
  source 1..75: mol_type = other DNA
ccgaactgttcccgatgtcgaaaattaacgacgccattcagcatgtacgcgatggtaaagcgcgctaccgagtgg

SEQ ID NO: 717016 - DNA, 75 bp, synthetic construct
  source 1..75: mol_type = other DNA
ctaactggatgattgcaggcgattttaaccgttcaccggctacactattttcaactcttgaaccagggattcgta

SEQ ID NO: 717017 - DNA, 75 bp, synthetic construct
  source 1..75: mol_type = other DNA
cattcaggggatcatgaagcgtattaaagcgaagggtgtacaggtcattatttatgaacccgcaatgcaggaaga

SEQ ID NO: 717018 - DNA, 75 bp, synthetic construct
  source 1..75: mol_type = other DNA
agaacctgatcttctccccggagttcctgcgtgaaggtaaagctctttacgacaacctccacccttccagaattg

SEQ ID NO: 717019 - DNA, 75 bp, synthetic construct
  source 1..75: mol_type = other DNA
gctatgtcggtttatccaatgctatcctactttcacaaaatcatgatgttactttaattgatattaacaaacaaa

SEQ ID NO: 717020 - DNA, 75 bp, synthetic construct
  source 1..75: mol_type = other DNA
tgtgccgaataacctgatctcggcaattgttgacgccaaccgcacgcgcaaagattttattgccgattctatcct

SEQ ID NO: 717021 - DNA, 75 bp, synthetic construct
  source 1..75: mol_type = other DNA
tgcggaaagcctgggcctgaactcccgccagattattgaaggcgtgtgcctggacccgcgcatcggtaatcacta

SEQ ID NO: 717022 - DNA, 75 bp, synthetic construct
  source 1..75: mol_type = other DNA
tcaagctgttcgctaacacctatctggcgttacgtgtggcctactttaacgagctggatagctatgcagaaagtc

SEQ ID NO: 717023 - DNA, 75 bp, synthetic construct
  source 1..75: mol_type = other DNA
gatctgacactggggcgtgcagagccacaggccggaccttttgtgagtgccccagcagatttgtttgacagggtg

SEQ ID NO: 717024 - DNA, 75 bp, synthetic construct
  source 1..75: mol_type = other DNA
ctaaagctgtatatcagcatagcgcgaacgctaatccccatctcgctcctgggtcgggtgttcagaataccatct

SEQ ID NO: 717025 - DNA, 75 bp, synthetic construct
  source 1..75: mol_type = other DNA
aaactcactcaggctgaagtcattgaatttcttgtcaaaagctattacgacggattgaaatttgacgattctgaa

SEQ ID NO: 717026 - DNA, 75 bp, synthetic construct
  source 1..75: mol_type = other DNA
gtgaaaacttattacacatctctgaattgttacccgtcttcctatccagaattatccgggaagctgttagctcta

SEQ ID NO: 717027 - DNA, 75 bp, synthetic construct
  source 1..75: mol_type = other DNA
ccagtctcgtgtcgttgctgaaattatccgtaacggcagcatttacgcccgtaaattctggctgtccggtggcgg

SEQ ID NO: 717028 - DNA, 75 bp, synthetic construct
  source 1..75: mol_type = other DNA
ggcagcgttgtcatgagctgtttgcacaacagggactgatgctacagaaacaacatcacgggcttgttgtcgttg

SEQ ID NO: 717029 - DNA, 75 bp, synthetic construct
  source 1..75: mol_type = other DNA
acgggtaatcgccgcagtaaaatacacacaccgcctcaggctcaagaagcaattgcccgctggactgccacttgt

SEQ ID NO: 717030 - DNA, 75 bp, synthetic construct
  source 1..75: mol_type = other DNA
acgggtaatcgccgcagaaaaatacacacaccgactcaggctcaagaagcaatttcccgctggactgccacttgt

SEQ ID NO: 717031 - DNA, 75 bp, synthetic construct
  source 1..75: mol_type = other DNA
cgcaggaaaatacacacaccgtctcaggctcaagaagcaattacccgctggactgccacttgttgcgatccgaca

SEQ ID NO: 717032 - DNA, 75 bp, synthetic construct
  source 1..75: mol_type = other DNA
acgggtaatcgccgcaggaaaatacacacaccgtctcaggctcaagaagcaattccccgctggactgccacttgt

SEQ ID NO: 717033 - DNA, 75 bp, synthetic construct
  source 1..75: mol_type = other DNA
acgggtaatcgccgcagcaaaatacacacaccgtctcaggctcaagaagcaattgcccgctggactgccacttgt

SEQ ID NO: 717034 - DNA, 75 bp, synthetic construct
  source 1..75: mol_type = other DNA
acgggtaatcgccgcagtaaaatacacacaccggctcaggctcaagaagcaattccccgctggactgccacttgt

SEQ ID NO: 717035 - DNA, 75 bp, synthetic construct
  source 1..75: mol_type = other DNA
tgataaatccagaatgggtgactttagctgaatcaggtagaagccatgaaattcaaacaacccttaatccacaac

SEQ ID NO: 717036 - DNA, 75 bp, synthetic construct
  source 1..75: mol_type = other DNA
tttgccgcgtatgacgaccgtttcattaacagccttgaaaagttagcagcggcagccaaaagtggcggtgctccg

SEQ ID NO: 717037 - DNA, 75 bp, synthetic construct
  source 1..75: mol_type = other DNA
tggtgcataaactctccaaaggtgtgacgcaggctgctgtggcttccattccctgccggccggatatacggcaac

SEQ ID NO: 717038 - DNA, 75 bp, synthetic construct
  source 1..75: mol_type = other DNA
cgcagcaaaatacacacaccgtctcaggctcaagaagcaattacccgctgggctgccacttgttgcgatccggca

SEQ ID NO: 717039 - DNA, 75 bp, synthetic construct
  source 1..75: mol_type = other DNA
cgcagtaaaatacacacaccgtctcaggctcaagaagcaattacccgctggtctgccacttgttgcgatccgcca

SEQ ID NO: 717040 - DNA, 75 bp, synthetic construct
  source 1..75: mol_type = other DNA
cctgccacttgttgcgatcggtaaagggctggtgataaatccagaatgggtgactttagctgaatcaggtagaag

SEQ ID NO: 717041 - DNA, 75 bp, synthetic construct
  source 1..75: mol_type = other DNA
ggcagtgaatggggcgctgacgggtggggttaaggtggcgcaggatagcggggggaaggtatgggggaaaataac

SEQ ID NO: 717042 - DNA, 75 bp, synthetic construct
  source 1..75: mol_type = other DNA
gtttacagcgctgtacagttcgggaacgcacagccgtttcaatatggcagggtttcagaatacctcggatgacct

SEQ ID NO: 717043 - DNA, 75 bp, synthetic construct
  source 1..75: mol_type = other DNA
ttgccgctgattctggcgtttgcggcgtacgagataaagacggtgattacactgacgtttgtgatttttgcgact

SEQ ID NO: 717044 - DNA, 75 bp, synthetic construct
  source 1..75: mol_type = other DNA
ggtgcatattggagtagcagtttcaaatggtatgcgaactggtacccaagattcgcaatcgacaggagggagtgc

SEQ ID NO: 717045 - DNA, 75 bp, synthetic construct
  source 1..75: mol_type = other DNA
caaaattttttgcagtcagatgaaatccggtttaacgccacgttagataaaaaagaagcctatcggaatgcagat

SEQ ID NO: 717046 - DNA, 75 bp, synthetic construct
  source 1..75: mol_type = other DNA
agcagttactggcgaactaccagtctgtgccgaataacctgatctcggcaattgtcgatgcaaaccgcaagtggt

SEQ ID NO: 717047 - DNA, 75 bp, synthetic construct
  source 1..75: mol_type = other DNA
agcagttactggcgaactaccagtctgtgccgaataacctgatctcggcaattgtcgatgctaaccgcacgcgta

SEQ ID NO: 717048 - DNA, 75 bp, synthetic construct
  source 1..75: mol_type = other DNA
tattgaaaaccgtgcgctggcagatgaattgcaggattttaccaatgactgctattcgctggccctgtatatgtg

SEQ ID NO: 717049 - DNA, 75 bp, synthetic construct
  source 1..75: mol_type = other DNA
tttcccgcatcaccggaactgcaggcgcttcggttgcctcactgggcgcgttcccggctctggacgcgatgcgtc

SEQ ID NO: 717050 - DNA, 75 bp, synthetic construct
  source 1..75: mol_type = other DNA
gaaacggcgtgaccaggggcagacaacggataaagccgttctgtcagacctcagttggataggcagcagtacctt

SEQ ID NO: 717051 - DNA, 75 bp, synthetic construct
  source 1..75: mol_type = other DNA
cggataagaccgggtatgccggtgtgatttccagcatggacggtaaaacggcgcagatcccgctgtggtggctga

SEQ ID NO: 717052 - DNA, 75 bp, synthetic construct
  source 1..75: mol_type = other DNA
tgcgctgtacatgggattctttgtgattatcagttgctgtgtgccgctggtcaatgtcagtctggggactattga

SEQ ID NO: 717053 - DNA, 75 bp, synthetic construct
  source 1..75: mol_type = other DNA
gaaacagcgtgatcaggggcagagtaaagataaaaaagtgcttgatgatatctcctggatagggagcgccacatt

SEQ ID NO: 717054 - DNA, 75 bp, synthetic construct
  source 1..75: mol_type = other DNA
cgtgctgcgtgaactgggggcgaacgttattgccattggttgtgagccgaacggcgtaaacatcaatgccgaagt

SEQ ID NO: 717055 - DNA, 75 bp, synthetic construct
  source 1..75: mol_type = other DNA
atgactaaagtgacacgcgcagtaattgtgggaggcgggatcggcggtgcggcaactgcgctgtcactggcccgc

SEQ ID NO: 717056 - DNA, 75 bp, synthetic construct
  source 1..75: mol_type = other DNA
gaatatcacacctccaccaacgtcgtggatattcgcgagacggaagacgatgtcaccgtgtttgacgatcgcggc

SEQ ID NO: 717057 - DNA, 75 bp, synthetic construct
  source 1..75: mol_type = other DNA
actgacgcatccggacgtggaatatcacacctccaccaacgtcgtggatattcgcgagacggaagacgatgtcac

SEQ ID NO: 717058 - DNA, 75 bp, synthetic construct
  source 1..75: mol_type = other DNA
cgttattacggacaaccaggcgaaactgttcgccgtggtcatcctcgataaagacgttccggtactgtgcggcaa

SEQ ID NO: 717059 - DNA, 75 bp, synthetic construct
  source 1..75: mol_type = other DNA
atgacctacgaagagtttttccgtgagcggcaggacgcgcgctacggtggaaaaggcggcgcgcgctgctgctaa

SEQ ID NO: 717060 - DNA, 75 bp, synthetic construct
  source 1..75: mol_type = other DNA
tgtcaccgttttcgacgatcgaggtaatagctggagcggcgatattttgattggctgtgatggcgtgaagtcagt

SEQ ID NO: 717061 - DNA, 75 bp, synthetic construct
  source 1..75: mol_type = other DNA
cggagacagaagaatatgggatcaccagctttgtctttcgcgcccgccggccttttcatccgacccgtttctggc

SEQ ID NO: 717062 - DNA, 75 bp, synthetic construct
  source 1..75: mol_type = other DNA
tctgaggtgaatattgatgctgcccttgtgagggaaggtggtgcagaactctcccggactgatgaaaaactggta

SEQ ID NO: 717063 - DNA, 75 bp, synthetic construct
  source 1..75: mol_type = other DNA
tggctggccagccgtccggaattcgcaggttcatggtcgcaggcaggtggcattgcgcgccaggggctggggggc

SEQ ID NO: 717064 - DNA, 75 bp, synthetic construct
  source 1..75: mol_type = other DNA
ctgtcaaagagcttacccgtaagggtaaagacaaacttatcgagtgggctggtaatgcctgggaccatttttttg

SEQ ID NO: 717065 - DNA, 75 bp, synthetic construct
  source 1..75: mol_type = other DNA
aaacattcgctaaagatcattgatatacctggtgtcggtgagaatgcccggcgggataaggagtatgaagattta

SEQ ID NO: 717066 - DNA, 75 bp, synthetic construct
  source 1..75: mol_type = other DNA
cgtctggtagagactattattcgggctttgcctgatcgggctaaaagtagcacggcttcgcagtttaaggatgag

SEQ ID NO: 717067 - DNA, 75 bp, synthetic construct
  source 1..75: mol_type = other DNA
aagacgttccggtactgtgcggcaacggcttcggcctgtttgcgggtaaaaggagccgtcaggcagtccctgaaa

SEQ ID NO: 717068 - DNA, 75 bp, synthetic construct
  source 1..75: mol_type = other DNA
tttctaacccaggaaaaattgatttagaaattattgaggtgcaaacaggcccatacctagctgaagatgatatat

SEQ ID NO: 717069 - DNA, 75 bp, synthetic construct
  source 1..75: mol_type = other DNA
aaaagggctatttagttacatttggtatcaatcctacctcgccagaaacgggatatggatatattaaagcaagta

SEQ ID NO: 717070 - DNA, 75 bp, synthetic construct
  source 1..75: mol_type = other DNA
ctggcgaaaaaattacagagcaagttcattttcatagaactgagcattggattgttgtttcaggtacagcaaaag

SEQ ID NO: 717071 - DNA, 75 bp, synthetic construct
  source 1..75: mol_type = other DNA
ccgtaagatcattattggtaaagacacgcgtatttctggctatatgctggagtcggcgctggaagcgggtttggc

SEQ ID NO: 717072 - DNA, 75 bp, synthetic construct
  source 1..75: mol_type = other DNA
gtgcgacttatcacatcgcgccgaacgtgctgcgcgaactgggggcgaatgttatcgctatcggttgtgagccaa

SEQ ID NO: 717073 - DNA, 75 bp, synthetic construct
  source 1..75: mol_type = other DNA
atgaacaatacggatcttatccatcttattaaacgttttatgcgtaacgaacataaagcagtagaagaggttatt

SEQ ID NO: 717074 - DNA, 75 bp, synthetic construct
  source 1..75: mol_type = other DNA
ctcgccgcacgctctctgctgcctcccgtatggccgcgcagcttacttcttttcgctatcgtttcggtcttcgct

SEQ ID NO: 717075 - DNA, 75 bp, synthetic construct
  source 1..75: mol_type = other DNA
aactggaatcaggggaatgggaaaaccggcccctatgtgaccgcgattaatttgattcagtacaacccagccagt

SEQ ID NO: 717076 - DNA, 75 bp, synthetic construct
  source 1..75: mol_type = other DNA
aatgtcgtcatcgaagtcatacgcgggttcagacggctgctgaggctcgggctgcgcggccttacgtccacggcc

SEQ ID NO: 717077 - DNA, 75 bp, synthetic construct
  source 1..75: mol_type = other DNA
gagcccattattatttgtaataatgatcaccgttttatggttgctgagcaaatgagagagttaggtattcataat

SEQ ID NO: 717078 - DNA, 75 bp, synthetic construct
  source 1..75: mol_type = other DNA
ttcatcttgaagataaggcttaccttgtttctgaaaatgaatcaacatatatacctgttggtgttccacatgcta

SEQ ID NO: 717079 - DNA, 75 bp, synthetic construct
  source 1..75: mol_type = other DNA
acacaagatttagattttatccgtctggataactcttcattttcttgctgtcctgaagagtctattgactatgca

SEQ ID NO: 717080 - DNA, 75 bp, synthetic construct
  source 1..75: mol_type = other DNA
atgtcgtccgtgatggtgatgaatttttcgaaacgcagagccgcaatgtaaccgactggatgccgctaccagaac

SEQ ID NO: 717081 - DNA, 75 bp, synthetic construct
  source 1..75: mol_type = other DNA
aaatggcaactctccggtaactccggatggttgggtcatggtgccgaagagactaacagccgagaacggcgctaa

SEQ ID NO: 717082 - DNA, 75 bp, synthetic construct
  source 1..75: mol_type = other DNA
gtcaccgaggcgttagaacttgatactgccaagaatggttacatcctcctggttcaggacgcagagccaaacttc

SEQ ID NO: 717083 - DNA, 75 bp, synthetic construct
  source 1..75: mol_type = other DNA
tttctcgcttatctgggttacctctcaggattcgcccatatcagtgattgcatgcaggatcgcgcatttcgccat

SEQ ID NO: 717084 - DNA, 75 bp, synthetic construct
  source 1..75: mol_type = other DNA
ctacgatcggcaacaattgaaatcccgtatcgttcattttgggtttggagccttccaccgtgcgcatcaggcact

SEQ ID NO: 717085 - DNA, 75 bp, synthetic construct
  source 1..75: mol_type = other DNA
agatgtcgatttaacacaatatgcggataagttaattgcacgttttgctaatccggcgctgaaacataagacctg

SEQ ID NO: 717086 - DNA, 75 bp, synthetic construct
  source 1..75: mol_type = other DNA
ttgtatcctgtatcagtcctgcaaaatttcacgagtgctttattaactggatgcgtgactgccattcttcagatg

SEQ ID NO: 717087 - DNA, 75 bp, synthetic construct
  source 1..75: mol_type = other DNA
gctgagaacggcgctaagggtgtgctatccggtgaattttcagaaactacgtttataagctgcccggaatgcttt

SEQ ID NO: 717088 - DNA, 75 bp, synthetic construct
  source 1..75: mol_type = other DNA
aaacttacaagttgccagaattaatcgagggcatggaagtttccattgatgtaagcacttgtgatgctgatttag

SEQ ID NO: 717089 - DNA, 75 bp, synthetic construct
  source 1..75: mol_type = other DNA
gcacttgtgatgctgatttaggtaatcgctatttcggcaccgtcactgaggcgttagaacttgatacggccaaga

SEQ ID NO: 717090 - DNA, 75 bp, synthetic construct
  source 1..75: mol_type = other DNA
acagcgatccgaaatcactggcacgtggagaataagctgcactggcgtctggacgtggtaatgaatgaagacgac

SEQ ID NO: 717091 - DNA, 75 bp, synthetic construct
  source 1..75: mol_type = other DNA
gatcaggacggatgagaaatccaatgagattacagctatcccagaacttcttaacatgctggatattaaaggaaa

SEQ ID NO: 717092 - DNA, 75 bp, synthetic construct
  source 1..75: mol_type = other DNA
cgtcagctttccgggaaccatggtagaccgcattgtcccggcagcaacagacgaatcactggcggaaattagcca

SEQ ID NO: 717093 - DNA, 75 bp, synthetic construct
  source 1..75: mol_type = other DNA
gaactgtatctggtcgatgagagcgggcaagacgtttgtttccgtattgaattgcctgcgtcaaaaaacacgaaa

SEQ ID NO: 717094 - DNA, 75 bp, synthetic construct
  source 1..75: mol_type = other DNA
acgcttatcgatgcccggcgcagtgaagcgatgaccaacgcggcgctggagatggagcgtagctaccgtcagtat

SEQ ID NO: 717095 - DNA, 75 bp, synthetic construct
  source 1..75: mol_type = other DNA
aaccagaaaccggctatctgacgcaggaagaaataacattgttgcttgccaatcttgacggggacaacaagaaaa

SEQ ID NO: 717096 - DNA, 75 bp, synthetic construct
  source 1..75: mol_type = other DNA
tccgcgcgataccggacttcggcagcgcgatgccgcataaaagtcgcctcaatacgctgcccggtgccatccctc

SEQ ID NO: 717097 - DNA, 75 bp, synthetic construct
  source 1..75: mol_type = other DNA
gtggaccgagtgagttacgctcggttgggcaacgtattctctggttaagcgaacgcctgtcatggctggaatccc

SEQ ID NO: 717098 - DNA, 75 bp, synthetic construct
  source 1..75: mol_type = other DNA
atgagcgtactggataatctttactccaatgctgtgcactacggggctgaatccggtaacatttgccttcgcagc

SEQ ID NO: 717099 - DNA, 75 bp, synthetic construct
  source 1..75: mol_type = other DNA
aggttcttgttgcatttaaatctgatgccgatggcgagccatgtcttgatacgggagttgcaattctatttcctg

SEQ ID NO: 717100 - DNA, 75 bp, synthetic construct
  source 1..75: mol_type = other DNA
atgcctgagaagcatcagaatgtgcttatttcggtgaatttcgatagctctctggttgagccgctaatatgttca

SEQ ID NO: 717101 - DNA, 75 bp, synthetic construct
  source 1..75: mol_type = other DNA
ttctgccgtgggaggagatgaaactgcgtatgcttaatggtagtcactcttttctcgcttatctgggttatctcg

SEQ ID NO: 717102 - DNA, 75 bp, synthetic construct
  source 1..75: mol_type = other DNA
ttaccgcgttgatagatgcggagctatttttcggggagcatcctttccgaggtcttaaaagactcaaagaggata

SEQ ID NO: 717103 - DNA, 75 bp, synthetic construct
  source 1..75: mol_type = other DNA
ccatatcctgcggcatacattcgcaagccatttcatgatgaatgggggcaatataatcgcactgcaacagattct

SEQ ID NO: 717104 - DNA, 75 bp, synthetic construct
  source 1..75: mol_type = other DNA
aaactcactttctggaaattctggtttttaggttcgattccgtgggagcgtaaaaccgtcacgccagccagtttg

SEQ ID NO: 717105 - DNA, 75 bp, synthetic construct
  source 1..75: mol_type = other DNA
agaacttgatactgccaagaatggttacatcctcctggttcaggacgcagagccaaacttcgatgtaaatggcaa

SEQ ID NO: 717106 - DNA, 75 bp, synthetic construct
  source 1..75: mol_type = other DNA
gcccgcagcaaggttgcgccgaccaccgaactgttcccaatgtcgaaaattaacgacgccattcagcatgtacgc

SEQ ID NO: 717107 - DNA, 75 bp, synthetic construct
  source 1..75: mol_type = other DNA
gaacttcctctctcagtcacgttacatctgcagactcagcaatatgggggggttacagcgccgttttgcattacc

SEQ ID NO: 717108 - DNA, 75 bp, synthetic construct
  source 1..75: mol_type = other DNA
ttttcaccacgcagagtcgcgatccacaggctcctctcaatgaagcgcaaaccttacaaacagttcactggtatc

SEQ ID NO: 717109 - DNA, 75 bp, synthetic construct
  source 1..75: mol_type = other DNA
cggatataccaagggaaagcataagtgaaaagattgctgaaatcgaattgcggctcagagaagacagacgaaacg

SEQ ID NO: 717110 - DNA, 75 bp, synthetic construct
  source 1..75: mol_type = other DNA
ccaacatttataaaactccttatggtgtttttgtggtgtgtgtttgggggtgttttgggttttaagtgggtttat

SEQ ID NO: 717111 - DNA, 75 bp, synthetic construct
  source 1..75: mol_type = other DNA
atagacttaaaaatatgcataaaatttccaccatgtgcaactattcagttgatttgaattatagaaagccgggtg

SEQ ID NO: 717112 - DNA, 75 bp, synthetic construct
  source 1..75: mol_type = other DNA
aggtggattactgcgggatttgtcattccgatctgtcgatgatcgacaatgaatggggattttcacaatatccgc

SEQ ID NO: 717113 - DNA, 75 bp, synthetic construct
  source 1..75: mol_type = other DNA
ttctgacattaaagcgcagatgggcgggttggtatatcgcggttttgtcactggtaacggcttcaaacggctggg

SEQ ID NO: 717114 - DNA, 75 bp, synthetic construct
  source 1..75: mol_type = other DNA
caggaaacgctgtctgcggtggcggatgacggtatcgagcagagcgggctgcatatctggagctttgggcaacta

SEQ ID NO: 717115 - DNA, 75 bp, synthetic construct
  source 1..75: mol_type = other DNA
ggcgcgtagctgcgggcattgcgatgcctgtattagcggtaatcagatcaactgcgagcaaggtgcggtgccgac

SEQ ID NO: 717116 - DNA, 75 bp, synthetic construct
  source 1..75: mol_type = other DNA
cgacattgaatctgctgggccgctgttgtgcggcggtatcacggtctttaagccactgttgatgcaccatatcac

SEQ ID NO: 717117 - DNA, 75 bp, synthetic construct
  source 1..75: mol_type = other DNA
ctatggcgcggagctgcagactcccattatacactggatacatggcattctccgatgggggatggtggtcgggaa

SEQ ID NO: 717118 - DNA, 75 bp, synthetic construct
  source 1..75: mol_type = other DNA
aatgggattcggtgatacccatctccgttgctatgtgcttcatgacgattcggctggtcagcacatacacattat

SEQ ID NO: 717119 - DNA, 75 bp, synthetic construct
  source 1..75: mol_type = other DNA
tcccatcaatcccaaaaacacttttgtggagcctttacttgacggcaatttagtgccgccaaggcaacattacca

SEQ ID NO: 717120 - DNA, 75 bp, synthetic construct
  source 1..75: mol_type = other DNA
gaggtaagaattttatcgggatcgtcctctatacgttaaaaccagattctcatcatagggtagctcctgtcgtga

SEQ ID NO: 717121 - DNA, 75 bp, synthetic construct
  source 1..75: mol_type = other DNA
aatgcgactaaagcgcttcgtccagaagtcattaaagcggtatggcacaattcgcttcgtttgccgaagaacgaa

SEQ ID NO: 717122 - DNA, 75 bp, synthetic construct
  source 1..75: mol_type = other DNA
gtgtggtgtgtggtcgctcgaatatggagagggccgatttgatggtgatgatgcactaattcatcgcgaggctgc

SEQ ID NO: 717123 - DNA, 75 bp, synthetic construct
  source 1..75: mol_type = other DNA
gcggcaaccatcctcaaactaatgaatatgacctgattagcaatgtaacccactggagccgctgccagaaccgcc

SEQ ID NO: 717124 - DNA, 75 bp, synthetic construct
  source 1..75: mol_type = other DNA
acgtgtgagatcggcgttatacctgcttattacggctttgtgagagttaatgggaataagcattatggttttatg

SEQ ID NO: 717125 - DNA, 75 bp, synthetic construct
  source 1..75: mol_type = other DNA
aatcacgtaatgaaataatgttagaagagagaacaggcgagaaatgtgcaaagacgatcatacaagaagctatag

SEQ ID NO: 717126 - DNA, 75 bp, synthetic construct
  source 1..75: mol_type = other DNA
ttgggccgttggtggagatataagtggatcacttttcatccgtcattgacattaagtgcagagttcaatgcgacg

SEQ ID NO: 717127 - DNA, 75 bp, synthetic construct
  source 1..75: mol_type = other DNA
agtgaaaaaattgctgaactcgaactacgactcaaagaagacagaagaaacgaaatcgtagaaaagattcttcaa

SEQ ID NO: 717128 - DNA, 75 bp, synthetic construct
  source 1..75: mol_type = other DNA
aacgctacgaagctcctacgctccgatgtcagtaaacctgtttggcacaattctctgcgtctgcctgctggcgaa

SEQ ID NO: 717129 - DNA, 75 bp, synthetic construct
  source 1..75: mol_type = other DNA
gacgagccttttaccgcgattgacgttaacggcgtcgatcgtctgacccagcgtatggcgcagcatacggagcag

SEQ ID NO: 717130 - DNA, 75 bp, synthetic construct
  source 1..75: mol_type = other DNA
ggtacgcgacagctaccatcaaaacctgttatggataggccatcagccggggatcaaaacccggctgacggcgtt

SEQ ID NO: 717131 - DNA, 75 bp, synthetic construct
  source 1..75: mol_type = other DNA
attcgtctgatggggtacagctttacatcgccggaggtcacccgggcgttgattcaggcaaaacagcgtggggta

SEQ ID NO: 717132 - DNA, 75 bp, synthetic construct
  source 1..75: mol_type = other DNA
gtaatgttgaagtggggtcttttaactacactcgagccgctgatcggttcaattcagagaacgtgctagtcgtgt

SEQ ID NO: 717133 - DNA, 75 bp, synthetic construct
  source 1..75: mol_type = other DNA
catagtggggcgttatctacaattcaagcgcaacaagatattgtaccttcaagtggatatgctgtagccgtaatg

SEQ ID NO: 717134 - DNA, 75 bp, synthetic construct
  source 1..75: mol_type = other DNA
tggtgcaacagctaatattgtggatattaaacttcgctgtctggagattgcctcgctctgtttaaaaaccgacga

SEQ ID NO: 717135 - DNA, 75 bp, synthetic construct
  source 1..75: mol_type = other DNA
cctcgctctctttaaaaacggacgagaagttgtcagcagatgaagtaaaaaaatatgctgaaaatttgatggggt

SEQ ID NO: 717136 - DNA, 75 bp, synthetic construct
  source 1..75: mol_type = other DNA
ctacagtctctattctacagacacactccgaacaatgcagactgctgcttttttttcgggagggaaaacagcaac

SEQ ID NO: 717137 - DNA, 75 bp, synthetic construct
  source 1..75: mol_type = other DNA
gtgagcgggatgaacgaaccttatttagtggcttttcatttacgctgaacgcaggagagtgggtacaaatcaccg

SEQ ID NO: 717138 - DNA, 75 bp, synthetic construct
  source 1..75: mol_type = other DNA
tgtattaatgagtctggcagatgaatccggtcagatgatacgttttcatcacgtggtacctgttctagggatata

SEQ ID NO: 717139 - DNA, 75 bp, synthetic construct
  source 1..75: mol_type = other DNA
gttttcgtgatgcctggctggctgatttttttgtccattcaacgccacatcgaaagatccctgctgaaatccata

SEQ ID NO: 717140 - DNA, 75 bp, synthetic construct
  source 1..75: mol_type = other DNA
taaatggagaaagattactatcaaaatcattgctagaagaatcctattcacctctacctggaagtcctaaatatg

SEQ ID NO: 717141 - DNA, 75 bp, synthetic construct
  source 1..75: mol_type = other DNA
ggggggactgtgattctgactacccaccagccgctcaacgttgctgaaagtaaaattcgccagaacatcatgcgg

SEQ ID NO: 717142 - DNA, 75 bp, synthetic construct
  source 1..75: mol_type = other DNA
ggatcaaaacccggctgacggcgttagaaaatctgcacttttatcatcgcgatggcgataccgcacaatgtctgg

SEQ ID NO: 717143 - DNA, 75 bp, synthetic construct
  source 1..75: mol_type = other DNA
aagaaaaacatcagcaaacacgttccccctataaaaatctgttgccaccaaaagcggcggggattgcaatggcat

SEQ ID NO: 717144 - DNA, 75 bp, synthetic construct
  source 1..75: mol_type = other DNA
atgatgtatgccgatccgcaggcgctgcacgctctgctcgataaactggcgaaaagcgtcactttgtatctgaat

SEQ ID NO: 717145 - DNA, 75 bp, synthetic construct
  source 1..75: mol_type = other DNA
gccgatgcgcgtcgtcgtgtgggtgataaagtcgcgttgcagggcaacatggacccatcaatgttgtatgcaccg

SEQ ID NO: 717146 - DNA, 75 bp, synthetic construct
  source 1..75: mol_type = other DNA
ggttgatcgcaaaagctcctttgatgaattgttcgcactttaccgctacgtcttaaccggcttgttgctggtggc

SEQ ID NO: 717147 - DNA, 75 bp, synthetic construct
  source 1..75: mol_type = other DNA
tccgctggatgcggcgattcttttctccgacattctgactgtcccggatgcgatggggctagggctttattttga

SEQ ID NO: 717148 - DNA, 75 bp, synthetic construct
  source 1..75: mol_type = other DNA
caaaaaaatgatgtatgccgatccgcaggcattgcacgctctgctcgataaactggcgaaaagcgtcaccctgta

SEQ ID NO: 717149 - DNA, 75 bp, synthetic construct
  source 1..75: mol_type = other DNA
ggcggtggacagtggctggaagcgatggcagaaaccggttgcgatgcgctgggcctcgactggacaacggacatc

SEQ ID NO: 717150 - DNA, 75 bp, synthetic construct
  source 1..75: mol_type = other DNA
atgcttaacgttattcgcttaataaacacatttgaaatgcatgcgaccatagtgaaaaataaaatcacgcaaaga

SEQ ID NO: 717151 - DNA, 75 bp, synthetic construct
  source 1..75: mol_type = other DNA
aaagtgcagggcaaattgcagagcaggctggtcgtggtctggtaaacataccatttgacgtattgcagggtggcg

SEQ ID NO: 717152 - DNA, 75 bp, synthetic construct
  source 1..75: mol_type = other DNA
tctgctgctggcgaaagaacttgggttgaatgttccggacgcagaaatcattaaagcgggaaatgtgcgtgcgtt

SEQ ID NO: 717153 - DNA, 75 bp, synthetic construct
  source 1..75: mol_type = other DNA
gtgctggcgattagcgggcaggcggtgaatctcttttcgctgctggcgctggtgctggtgcttggcatcggcatc

SEQ ID NO: 717154 - DNA, 75 bp, synthetic construct
  source 1..75: mol_type = other DNA
ccgaaaaagcgacgaagctttcaagtctgtcttccaattaattgaagaagcgggtcaactttgggtaagaaagtt

SEQ ID NO: 717155 - DNA, 75 bp, synthetic construct
  source 1..75: mol_type = other DNA
tagccattttttcggcaattgatcagctgagtatttcagaaatgggtcgcattgcaagagatcttacacatttca

SEQ ID NO: 717156 - DNA, 75 bp, synthetic construct
  source 1..75: mol_type = other DNA
aaagtgtgaagccgctggcaattttacctggccttcgcatcattcgatgttctctggttttatgcctaagccgct

SEQ ID NO: 717157 - DNA, 75 bp, synthetic construct
  source 1..75: mol_type = other DNA
tacagaacacgattaccagcattgagtcagcacgggatgaaataccgttcggactcgatgaagatcaaaacgaca

SEQ ID NO: 717158 - DNA, 75 bp, synthetic construct
  source 1..75: mol_type = other DNA
gaacgtgctcatttcggtgaatttcgatagctctctggttgaaccgctaatatgctccgcacgctataccggaag

SEQ ID NO: 717159 - DNA, 75 bp, synthetic construct
  source 1..75: mol_type = other DNA
aaaagggccagaacgtgcttatttcggtgaatttcgatagctctctggttgaaccgctaatatgctccgcacgct

SEQ ID NO: 717160 - DNA, 75 bp, synthetic construct
  source 1..75: mol_type = other DNA
atccgatttctgttattcaacgctcaccaaccagtggggtgtttggcacaaatcagttcgtaggagacaaagagg

SEQ ID NO: 717161 - DNA, 75 bp, synthetic construct
  source 1..75: mol_type = other DNA
aagagaggttggcctcattaatctcggagcgagtaaaagaagttgcggctgatatccttagaaaagaaaaaaccc

SEQ ID NO: 717162 - DNA, 75 bp, synthetic construct
  source 1..75: mol_type = other DNA
tccaatggccgctctcttaattcagaattagttcagatagtgactgatgctgtatcaaagccatccaaaatttca

SEQ ID NO: 717163 - DNA, 75 bp, synthetic construct
  source 1..75: mol_type = other DNA
gctcttgacggcgacaacaaaaagattgcgattctttgcctgagtactggagcacgttggggagaagcagctcgt

SEQ ID NO: 717164 - DNA, 75 bp, synthetic construct
  source 1..75: mol_type = other DNA
tgaccgaaggtgaatgccagaaagtgatgattgccatcgcgctggcgaatcaaccacgtctgctaatagctgacg

SEQ ID NO: 717165 - DNA, 75 bp, synthetic construct
  source 1..75: mol_type = other DNA
gcggtcaaacggtggaaaccgcgccgagtaaggagttggtgacgatgccacatcatccttatacccaggcgctga

SEQ ID NO: 717166 - DNA, 75 bp, synthetic construct
  source 1..75: mol_type = other DNA
ctctcgcaactcgtttacaaactgcttactgcagaacaggaatacgagacaaccggaagtgaagaaacactcaag

SEQ ID NO: 717167 - DNA, 75 bp, synthetic construct
  source 1..75: mol_type = other DNA
ggcgcaatcactggcttaagaaagccaagaagctggcggaagatttgggattaggctttcttaattttgctgcat

SEQ ID NO: 717168 - DNA, 75 bp, synthetic construct
  source 1..75: mol_type = other DNA
cgtcgatgagttttcccgccgcacaggtaagaccgaatcagccgtaagaaagttggtagagcgtcgactcatccc

SEQ ID NO: 717169 - DNA, 75 bp, synthetic construct
  source 1..75: mol_type = other DNA
ggcaaaaccggctgttacacactcgggtagacgaacggaaggataaactaggaaacctatttaacatcagcgata

SEQ ID NO: 717170 - DNA, 75 bp, synthetic construct
  source 1..75: mol_type = other DNA
atgcctgagctggatgttggcgaacagatcaagactatggcgacgcaaataaaggtgcgccgaccgtctaaaaag

SEQ ID NO: 717171 - DNA, 75 bp, synthetic construct
  source 1..75: mol_type = other DNA
cttggcatccgaggtggtgaattattaaatataagaatacaggacatagattttagcgctaacaggatccgtatc

SEQ ID NO: 717172 - DNA, 75 bp, synthetic construct
  source 1..75: mol_type = other DNA
ctcctgaaagcgtatgtaaatttggagacggctatctttgcactcagtgtttcatctattacaccgagcttcatg

SEQ ID NO: 717173 - DNA, 75 bp, synthetic construct
  source 1..75: mol_type = other DNA
agagcagattgcgctaccggtgcatatcgcggaggaaatatcaccgatgtccggcgcagaacccaggcagatccg

SEQ ID NO: 717174 - DNA, 75 bp, synthetic construct
  source 1..75: mol_type = other DNA
tcgtggcattacgctatcaaacaacgccgccatgcgccttcaggttcgggatgtggaacgttcgctgtctgcatc

SEQ ID NO: 717175 - DNA, 75 bp, synthetic construct
  source 1..75: mol_type = other DNA
aagttttcagaaagaatggatgtcatggatgagcaagtcagcgaggaacgccaagagcaactccgttcgtattta

SEQ ID NO: 717176 - DNA, 75 bp, synthetic construct
  source 1..75: mol_type = other DNA
agatctcaagcttcaaagcattcaagtatattcatttggatttaggtgattcatcactattgactcttgatggcc

SEQ ID NO: 717177 - DNA, 75 bp, synthetic construct
  source 1..75: mol_type = other DNA
atgaactggcaaatatccaagattgaagtctctagcttcaaagctttcaagcatatctatttggatcttgacaag

SEQ ID NO: 717178 - DNA, 75 bp, synthetic construct
  source 1..75: mol_type = other DNA
tgccttaacgctgccggaggactggcgagaaaccataaatagctcttttaaagatctgcaggacttctacatagt

SEQ ID NO: 717179 - DNA, 75 bp, synthetic construct
  source 1..75: mol_type = other DNA
aggagaatgtctttcctacatatgctccagactttcacactcaattattggattcaatacgcaaactaagcgacc

SEQ ID NO: 717180 - DNA, 75 bp, synthetic construct
  source 1..75: mol_type = other DNA
atacaatcaatgatagcgctgcagccgaattatctcgcttaaagcaacaactaattgatgaacacgctaagcttt

SEQ ID NO: 717181 - DNA, 75 bp, synthetic construct
  source 1..75: mol_type = other DNA
gttcaagcgactattcaaccaacaacgcgcgcgacaatcagtacttagaagaggtttttggcgtaaacttcaggg

SEQ ID NO: 717182 - DNA, 75 bp, synthetic construct
  source 1..75: mol_type = other DNA
aggctgatgtcatcatttctaatcgtatgtctgaagagcttaaggatgtagcaaataaggtctatacccgtgatc

SEQ ID NO: 717183 - DNA, 75 bp, synthetic construct
  source 1..75: mol_type = other DNA
gctgcatattggtcagccggtggtccatctggagcacggtgtcgggcgctatgccggaatgaccacgctcgaagc

SEQ ID NO: 717184 - DNA, 75 bp, synthetic construct
  source 1..75: mol_type = other DNA
gtggaatgcgcgatctgtcaattatcgccacaccgcccgcccgtcgtctggcggtcaaaacgtttgtccgcgagt

SEQ ID NO: 717185 - DNA, 75 bp, synthetic construct
  source 1..75: mol_type = other DNA
gtcagcgtaaaagtgcgtctgggctgggacagcggtgagaagaaatttgaaatcgccgatgcggttcaacaggct

SEQ ID NO: 717186 - DNA, 75 bp, synthetic construct
  source 1..75: mol_type = other DNA
atatttaccagcaagtgagtaaaggcacattacctgccgggatcgagtactggcagccactattcttcagcgaac

SEQ ID NO: 717187 - DNA, 75 bp, synthetic construct
  source 1..75: mol_type = other DNA
aacctgctgcccgcacacgaatttccgaccgataaagcggcaattgaactgttccgcagtcagtggcgtgattct

SEQ ID NO: 717188 - DNA, 75 bp, synthetic construct
  source 1..75: mol_type = other DNA
ggtggcggtgttggtgcctaccacccttctcgcgcagcagcattacgacaacttccgcgaccgtttcgccaactg

SEQ ID NO: 717189 - DNA, 75 bp, synthetic construct
  source 1..75: mol_type = other DNA
tattcccaacctgagccgggtggtaaaatataacgaaccgcgaatgccgtggccggaggtggttgctttgctgca

SEQ ID NO: 717190 - DNA, 75 bp, synthetic construct
  source 1..75: mol_type = other DNA
gggctgggacagcggtgagaagaaatttgaaatcgccgatgcggttcaacaggctggtgctacggagctggtggt

SEQ ID NO: 717191 - DNA, 75 bp, synthetic construct
  source 1..75: mol_type = other DNA
ggcatcgctgtttttccggctgatacgtacggcctgccgtcagcgttttgaggagcggcaaccatgtcaaagctg

SEQ ID NO: 717192 - DNA, 75 bp, synthetic construct
  source 1..75: mol_type = other DNA
cgcgtgcagttgttgggtcagttcccacaatggctggcagagaacgccgcccgtgcggtggagttaggttcctgg

SEQ ID NO: 717193 - DNA, 75 bp, synthetic construct
  source 1..75: mol_type = other DNA
ggagaaatctgggactggcagagtgcgcaacaatgtatagctatcagcggttgtgacgcggtgatgattgggcgt

SEQ ID NO: 717194 - DNA, 75 bp, synthetic construct
  source 1..75: mol_type = other DNA
atgcgtgtgttactggctccgatggagggtgtactcgactctctggtgcgtgaattgctgaccgaagttaacgac

SEQ ID NO: 717195 - DNA, 75 bp, synthetic construct
  source 1..75: mol_type = other DNA
cactatcgtctcgatggcccgacgcgcctgaagtttattcaggatttgggcgaacggaaaaaacgtatcgaatgg

SEQ ID NO: 717196 - DNA, 75 bp, synthetic construct
  source 1..75: mol_type = other DNA
ggagatggactacttcatggaagtatttgttcccagcttccatctttcgctcgatgagattagccaggattcacc

SEQ ID NO: 717197 - DNA, 75 bp, synthetic construct
  source 1..75: mol_type = other DNA
tgaagctcgtcggagtcaggagatggactactttatggctgttttcgtccccagcttccatctttcgcttgatga

SEQ ID NO: 717198 - DNA, 75 bp, synthetic construct
  source 1..75: mol_type = other DNA
acagtcgcatggcgcagattttgccttcccaagccagacgttgtatatggataatattacaccgccggatcagat

SEQ ID NO: 717199 - DNA, 75 bp, synthetic construct
  source 1..75: mol_type = other DNA
ctgggcgtcactgcaccgtgtccagcaatttcgtttctttggtattccggggcgccaggcataccgcgagctgcg

SEQ ID NO: 717200 - DNA, 75 bp, synthetic construct
  source 1..75: mol_type = other DNA
cgcgccgtctgcctggtcaacaagaaagcgtccccgtatgtcagctatgaagctgtgatccacaaacgcgagcag

SEQ ID NO: 717201 - DNA, 75 bp, synthetic construct
  source 1..75: mol_type = other DNA
ccgggccgcgcttcaaatccgagctaatcaacccgcgcaagggcacgccgaccagctacatcgccaaatacatca

SEQ ID NO: 717202 - DNA, 75 bp, synthetic construct
  source 1..75: mol_type = other DNA
atgagtaagaagaaaatttctgttgaaaatgaagagttcaatactttccgggtattacttctgagtattgacttt

SEQ ID NO: 717203 - DNA, 75 bp, synthetic construct
  source 1..75: mol_type = other DNA
atttaccgacaaaagcagcgaatgccaatttaggctttcagaaactgccagaccttgccgttcaggcgcagcaaa

SEQ ID NO: 717204 - DNA, 75 bp, synthetic construct
  source 1..75: mol_type = other DNA
gaagcgcggattgccatcggtcacgggcagatgcgtgagcgcgaactggaacgggtgatgaatgatttccatcat

SEQ ID NO: 717205 - DNA, 75 bp, synthetic construct
  source 1..75: mol_type = other DNA
gtcaggccatattcggggtaatcacatacatcattaacgatgccaggagtggggaatttgatgattgcccggtga

SEQ ID NO: 717206 - DNA, 75 bp, synthetic construct
  source 1..75: mol_type = other DNA
ttgggtacgcaaggccagtacgcaggtacgcaaaaatggtacgcaaagtggtacgcaaaagagcaaggtgcgtac

SEQ ID NO: 717207 - DNA, 75 bp, synthetic construct
  source 1..75: mol_type = other DNA
tgttattgcagaagcaataaaaaacggaggttctcttgatgattttcttatatctcagggcacattatcatcttg

SEQ ID NO: 717208 - DNA, 75 bp, synthetic construct
  source 1..75: mol_type = other DNA
cgcggatttccgcaagatcgacaaggtgatggaaaaacagtttggctggcctatgggtccggcatatctgctgga

SEQ ID NO: 717209 - DNA, 75 bp, synthetic construct
  source 1..75: mol_type = other DNA
cctgatcgaaggtctcactgtgtacttcgccttaaaaagcggctctgccacattaacgtcattaacagcggtgac

SEQ ID NO: 717210 - DNA, 75 bp, synthetic construct
  source 1..75: mol_type = other DNA
aaaacccacaggaaatcaaccggcttgacatgattttcggttacagaaaccggggctgtgtgctgtacaggcagg

SEQ ID NO: 717211 - DNA, 75 bp, synthetic construct
  source 1..75: mol_type = other DNA
acagatgctgttgcaaaaaggactacgaccagagcaaatctgggtggactacgaacgcagaatggcttgctctgt

SEQ ID NO: 717212 - DNA, 75 bp, synthetic construct
  source 1..75: mol_type = other DNA
aatcgccggtaccccgcagaacagctccggcagcgtcatcaccgccacagtcgttgataataatggctttccggt

SEQ ID NO: 717213 - DNA, 75 bp, synthetic construct
  source 1..75: mol_type = other DNA
ctcagtgtgccttcaggtgatatcaccgtcaccaacacagctccgctacatatgactgcaaccttgcaggataaa

SEQ ID NO: 717214 - DNA, 75 bp, synthetic construct
  source 1..75: mol_type = other DNA
taaatactaccaaccacgacggctatttatacgcaagctttaccgctacaaaagccggggtttatcaagtgacgg

SEQ ID NO: 717215 - DNA, 75 bp, synthetic construct
  source 1..75: mol_type = other DNA
cacagaagaaagtaaattttaattacaaagataaagagtttcgggctgttgaggcatacaggctggttaatgaca

SEQ ID NO: 717216 - DNA, 75 bp, synthetic construct
  source 1..75: mol_type = other DNA
ccgtgatatcgaacctgtgctggagcgtctttccggcagtttcaacattcgcatattcccggtgtccgtgattgg

SEQ ID NO: 717217 - DNA, 75 bp, synthetic construct
  source 1..75: mol_type = other DNA
actgttcagcccgggcgaggacatgctgtttccggtgaaaacggagagcggagacacgaaagcagcatcagactg

SEQ ID NO: 717218 - DNA, 75 bp, synthetic construct
  source 1..75: mol_type = other DNA
gcctgggttttcgcgctgttctcgacagcaccattgcgctgacagtgtggctgcaaattgaactggcggaaccgt

SEQ ID NO: 717219 - DNA, 75 bp, synthetic construct
  source 1..75: mol_type = other DNA
cagggccgcctgtttgttgacgatgaacagcagcagccgcagcccgttcacgggctgaccagtagcgatgaacat

SEQ ID NO: 717220 - DNA, 75 bp, synthetic construct
  source 1..75: mol_type = other DNA
atgaaagatttcatcaccgaagcatggctaagagcgaaccatacgctcagcgaaggcgcagagatccatctccct

SEQ ID NO: 717221 - DNA, 75 bp, synthetic construct
  source 1..75: mol_type = other DNA
tctcgcgattactgaatgcaaaagcagatattaattctgcaacgattaccagtctggagatacctgaaggtcagg

SEQ ID NO: 717222 - DNA, 75 bp, synthetic construct
  source 1..75: mol_type = other DNA
ggcgtcggtgttcttccggctgatacgtacggcctgtcgtcagcgttttgaggggcgggaaccatgtcaaagctg

SEQ ID NO: 717223 - DNA, 75 bp, synthetic construct
  source 1..75: mol_type = other DNA
tgctgaacgtgtcgctggcgctgtccctgatttacccgcagagcgtggccgtcaattttgtcgccgcctgggcga

SEQ ID NO: 717224 - DNA, 75 bp, synthetic construct
  source 1..75: mol_type = other DNA
ggcgtcgctgttcttccggttggtacgtacggcctgccgtcagcgttttgaggggcgggcaccatgtcaaagctg

SEQ ID NO: 717225 - DNA, 75 bp, synthetic construct
  source 1..75: mol_type = other DNA
cacgcccaggcagtcatggcagcgggcttcccacagcggatgcagaaagattatcgcgatgccatcgacgcgctg

SEQ ID NO: 717226 - DNA, 75 bp, synthetic construct
  source 1..75: mol_type = other DNA
gaaaagctccgacgaaaccatcgcgaaagtcgtcgcctgggcgagcaagatgggcaagacgccgattgtggttaa

SEQ ID NO: 717227 - DNA, 75 bp, synthetic construct
  source 1..75: mol_type = other DNA
tggatggcgtagtcaaagcagaaaaactggttgaaggcgcaaaggcggttttacgccaggccattaacggcgacc

SEQ ID NO: 717228 - DNA, 75 bp, synthetic construct
  source 1..75: mol_type = other DNA
tccctgatttacccgcagagcgtggccgtcagttttgtcgctgcctgggcgattctggcgacggttatctgtgtg

SEQ ID NO: 717229 - DNA, 75 bp, synthetic construct
  source 1..75: mol_type = other DNA
gccgtgtgtgacctatatcggtccggacggtgcaggccactatgttaagatggttcacaacggcatcgaatacgg

SEQ ID NO: 717230 - DNA, 75 bp, synthetic construct
  source 1..75: mol_type = other DNA
gtcgatgttgatgctaccggtaaagtgacatttaaaaatgtcggcagcaattcggaaaggattacggcgacgcca

SEQ ID NO: 717231 - DNA, 75 bp, synthetic construct
  source 1..75: mol_type = other DNA
ttttccgcgcgggctgcatcattcgtgcgcagttcctgcagaagattactgatgcttatgcgcaaaacgctggta

SEQ ID NO: 717232 - DNA, 75 bp, synthetic construct
  source 1..75: mol_type = other DNA
gccggaatcgctggccgtgaagattgtcacgtcgctgtttttgcagccggtgccgtggcgcaggcgggcagcggc

SEQ ID NO: 717233 - DNA, 75 bp, synthetic construct
  source 1..75: mol_type = other DNA
tctggtggtgatggtggcgacatttatctcgctggtcgccgccgggtggatttttactgcgctgatttatctcgt

SEQ ID NO: 717234 - DNA, 75 bp, synthetic construct
  source 1..75: mol_type = other DNA
tgctggctggtcaggcggcaaggcaacagggtgacaaaaagcaggtgcgccgatactggatgacccgcgccttga

SEQ ID NO: 717235 - DNA, 75 bp, synthetic construct
  source 1..75: mol_type = other DNA
ttgccaaaaatcattatcattaccattctgattttggtcgttgtatttaatctttctttattattcattttattc

SEQ ID NO: 717236 - DNA, 75 bp, synthetic construct
  source 1..75: mol_type = other DNA
ggcagttcgctggcaaaagtcagtgctgaccgcgttattggtcacaacaacacagatgctattgcggattttctt

SEQ ID NO: 717237 - DNA, 75 bp, synthetic construct
  source 1..75: mol_type = other DNA
gggttgcgctggtatggcgtgcgggtggctgagccgcaccatgacggtactgtgcactggcatctcatgtgcttc

SEQ ID NO: 717238 - DNA, 75 bp, synthetic construct
  source 1..75: mol_type = other DNA
ctgggcgtctctgcatcgtgtacagcaattccgcttctttggtattccgggacgtcaggcttaccgtgaacttcg

SEQ ID NO: 717239 - DNA, 75 bp, synthetic construct
  source 1..75: mol_type = other DNA
aaatggagcaggataagctcattagccgggcaaagctggcgcatgaacagcagcgttttaacccggacatggtca

SEQ ID NO: 717240 - DNA, 75 bp, synthetic construct
  source 1..75: mol_type = other DNA
gctaacacggcattcatccggaaaaacttcagcgtcattcttgagcatacagtacgcgaactcaacggcgagtcc

SEQ ID NO: 717241 - DNA, 75 bp, synthetic construct
  source 1..75: mol_type = other DNA
ggtacgcgaactcaacggcgagtccagcatatccctggaagaagcaccaccggcaaaacagcagattgtctgtag

SEQ ID NO: 717242 - DNA, 75 bp, synthetic construct
  source 1..75: mol_type = other DNA
gcttcagtcgctggatctgcccccgaaaaaacgccgtcgcctgttatggcgtattgcccggcacggcattatcgc

SEQ ID NO: 717243 - DNA, 75 bp, synthetic construct
  source 1..75: mol_type = other DNA
gcagcaaaatatcgcgctggatgaaattattgcctttggcgacaacgataatgatgcgggaatgttgcagatggt

SEQ ID NO: 717244 - DNA, 75 bp, synthetic construct
  source 1..75: mol_type = other DNA
gctacgacgctggttttcacaacaggcattacagccacatttttatacgtatgatgattttgttttgcagattag

SEQ ID NO: 717245 - DNA, 75 bp, synthetic construct
  source 1..75: mol_type = other DNA
gccttgcttcaggagaacaggaccgcttctgtattcagatagtatgaggaaaattcaatgcgaaacgcaaatgaa

SEQ ID NO: 717246 - DNA, 75 bp, synthetic construct
  source 1..75: mol_type = other DNA
gcgacagtcagctatccgcttctttccgttttatggcaagccatcaagggcttgagggcctgctgatcctgcctg

SEQ ID NO: 717247 - DNA, 75 bp, synthetic construct
  source 1..75: mol_type = other DNA
caagggaaagacaaatcagctgatggggataccagaacggatatcacccgcatggatgacaaggagttgcacgat

SEQ ID NO: 717248 - DNA, 75 bp, synthetic construct
  source 1..75: mol_type = other DNA
ccgatactggatgatccgcgtcttgatgccatcctggctgctgctgacgctggttgttttgccacctacatcatg

SEQ ID NO: 717249 - DNA, 75 bp, synthetic construct
  source 1..75: mol_type = other DNA
ttaagccatgtctggaacggctggagcatgtacgcgacagtcagctatccacttcttttcgctttatggcaagcc

SEQ ID NO: 717250 - DNA, 75 bp, synthetic construct
  source 1..75: mol_type = other DNA
cctgtctacccttgttgccgcgcatatgagcatgtgccttgatgcagtttgtggtgatttgtatgccaccgatga

SEQ ID NO: 717251 - DNA, 75 bp, synthetic construct
  source 1..75: mol_type = other DNA
cgtcaggcttaccgtgaacttcgcttgctggctggtcacgcggcaaggcaacagggtgacaaaaaagcaggtgcg

SEQ ID NO: 717252 - DNA, 75 bp, synthetic construct
  source 1..75: mol_type = other DNA
tgctgtttgcctggtcagcaaaaaagcatctccctatgtcagctatgaagctgtgatgcataaacgtgagcagcg

SEQ ID NO: 717253 - DNA, 75 bp, synthetic construct
  source 1..75: mol_type = other DNA
cagtatcccgtccggggccgggctgcgtttgttctatcgaaaccagcgcctgcaggaagatgataaatggcggca

SEQ ID NO: 717254 - DNA, 75 bp, synthetic construct
  source 1..75: mol_type = other DNA
agcaaaaaagagcgccgggaactggcagcaaggttacgcctggtgaaaccgaaacggcgtaaagactacaaacag

SEQ ID NO: 717255 - DNA, 75 bp, synthetic construct
  source 1..75: mol_type = other DNA
ctgaaaatttgaaccaacaggagaaagataaatcagcagatggggaccccagaacggacattaccagcatggatg

SEQ ID NO: 717256 - DNA, 75 bp, synthetic construct
  source 1..75: mol_type = other DNA
actttcaaacctgatcactctgtacgctgtcgataacgagcaggaacagctgcgccgcgaggcactgagtgatca

SEQ ID NO: 717257 - DNA, 75 bp, synthetic construct
  source 1..75: mol_type = other DNA
agaaaccgccgcaaacccgtgccctatgaactcataccgggttcgctggcacgtatgctttgcgccgactggtgg

SEQ ID NO: 717258 - DNA, 75 bp, synthetic construct
  source 1..75: mol_type = other DNA
tccccttgctgaaaatttgaaccaacaggagaaagataaatcagctgatggggaccccagaacggacattacccg

SEQ ID NO: 717259 - DNA, 75 bp, synthetic construct
  source 1..75: mol_type = other DNA
gtgacgatggtatcccttatgttctggtgttactgggcgtgtgtacggggagtaagagtgttgagcgttatctgc

SEQ ID NO: 717260 - DNA, 75 bp, synthetic construct
  source 1..75: mol_type = other DNA
ctggtaaaaccgaagcggaaaaaagcattcaaacagagtatttcggagcagcagcgcctgcagcttgaggcagaa

SEQ ID NO: 717261 - DNA, 75 bp, synthetic construct
  source 1..75: mol_type = other DNA
ggtaataacactggtccacgctttaaatctgagctgataaacccgcgcaaaggaaaaccgacaagctacatcgcg

SEQ ID NO: 717262 - DNA, 75 bp, synthetic construct
  source 1..75: mol_type = other DNA
ctgaaaatttgaaccaacaggagaaagataaatcagctgatgggggccccagaacggactttacccgcatggatg

SEQ ID NO: 717263 - DNA, 75 bp, synthetic construct
  source 1..75: mol_type = other DNA
ctagcggctttaacgaggccgctgcatcattttcatggaacggcccgaaaaaggccattaacccttatctggacc

SEQ ID NO: 717264 - DNA, 75 bp, synthetic construct
  source 1..75: mol_type = other DNA
atgaactcataccgggttcgctggcacgtatgctttgcgccgactggtggtatcggaaattgtggaagatgcgtt

SEQ ID NO: 717265 - DNA, 75 bp, synthetic construct
  source 1..75: mol_type = other DNA
ctagcggctttaacgaggccgctgcagcattttcatggaacggcccgaaaaaggccataaacccttatctggacc

SEQ ID NO: 717266 - DNA, 75 bp, synthetic construct
  source 1..75: mol_type = other DNA
gaactggcagcaagattgcgcttggttaaaccgaaacggcgtaaagactacaaacagcgaattacagagtatcag

SEQ ID NO: 717267 - DNA, 75 bp, synthetic construct
  source 1..75: mol_type = other DNA
tgcgtttgagcaactttgtcggaaaagaaaccgccgtaaacccgtgccttatgaactcattccgggttcgctggc

SEQ ID NO: 717268 - DNA, 75 bp, synthetic construct
  source 1..75: mol_type = other DNA
cagtatgagcaaaaaagagcgccaggaactggcagcaagattacgcctgatgaaaccgaaacggcgtaaagacta

SEQ ID NO: 717269 - DNA, 75 bp, synthetic construct
  source 1..75: mol_type = other DNA
gttgtgtttcatgcgcaaaaaagaccgccgtgccatcactgcattactgcgtaagtttgccatccgtgaagaccg

SEQ ID NO: 717270 - DNA, 75 bp, synthetic construct
  source 1..75: mol_type = other DNA
cgcggaaatgcgtggtgactgcgccgttttctacaccattacctgtccgtcacgtttccattccacgctcaataa

SEQ ID NO: 717271 - DNA, 75 bp, synthetic construct
  source 1..75: mol_type = other DNA
agaacggacattacccgcatggatgacaaggagttgcacgattacctgcacagtatgagcaaaaaagagcgccgg

SEQ ID NO: 717272 - DNA, 75 bp, synthetic construct
  source 1..75: mol_type = other DNA
cataagctcaaccgcgccagcgccgtatcccagtttgttgggggtgatttgattcaccgtgaactctccggcctg

SEQ ID NO: 717273 - DNA, 75 bp, synthetic construct
  source 1..75: mol_type = other DNA
gtgataagcgtggtggagaaaggcggtcagttccagattgttatcggcaatgaggtgcagcaggtttatcgcctg

SEQ ID NO: 717274 - DNA, 75 bp, synthetic construct
  source 1..75: mol_type = other DNA
aaatcctccactcggtgggtggtgcggagaatatccgaatgctcacccactgcgcgacccgcttgcgcatggagt

SEQ ID NO: 717275 - DNA, 75 bp, synthetic construct
  source 1..75: mol_type = other DNA
tgctgcgcgatttcacccaacagttagaaaacgacatgcgggcgatttgcgatgaaatggacattggtattgata

SEQ ID NO: 717276 - DNA, 75 bp, synthetic construct
  source 1..75: mol_type = other DNA
atggcacccgtttctggtgagagaatggacgacaaaattctccggtatatgcagcgtgttgtgagaaattcccgc

SEQ ID NO: 717277 - DNA, 75 bp, synthetic construct
  source 1..75: mol_type = other DNA
gatagcggcattaaggatatcgccatcgatttttaccaccgttatccggaagatatcagcctctttgccgagatg

SEQ ID NO: 717278 - DNA, 75 bp, synthetic construct
  source 1..75: mol_type = other DNA
gcgatgaccctcgcgggcgtactgctgcatccgggcatcggccagatgctggcagcggggaaagcggttgatttt

SEQ ID NO: 717279 - DNA, 75 bp, synthetic construct
  source 1..75: mol_type = other DNA
ggcgatggcggaagaagaaggcagccgcttcccgtatgttttctggggcagtaaaaatatctttgggctggcgaa

SEQ ID NO: 717280 - DNA, 75 bp, synthetic construct
  source 1..75: mol_type = other DNA
tggggaatttatacggtcgcctgagtggcaccgaatatccacaggaagtggttctgagcggttcgcatatcgata

SEQ ID NO: 717281 - DNA, 75 bp, synthetic construct
  source 1..75: mol_type = other DNA
ggttgccagcgatgacgatccgagcggacgtaacgtcagccgtggcatcgtgctgctcgaccatgctgaacgcga

SEQ ID NO: 717282 - DNA, 75 bp, synthetic construct
  source 1..75: mol_type = other DNA
cgctggtgctgacctttggcaaagtggagccgcgcccaaatacggttaacgtagtgccgggtaaaaccacgttca

SEQ ID NO: 717283 - DNA, 75 bp, synthetic construct
  source 1..75: mol_type = other DNA
ctgagcggttcgcatatcgataccgtggttaacggcggtaacctcgacgggcaattcggcgcgctggcggcgtgg

SEQ ID NO: 717284 - DNA, 75 bp, synthetic construct
  source 1..75: mol_type = other DNA
cgctatacggtgacgctgaacggcgaatcaaaccatgcaggcaccacgccgatgggttatcgtcgtgatacggtt

SEQ ID NO: 717285 - DNA, 75 bp, synthetic construct
  source 1..75: mol_type = other DNA
aaatactttattactcagtatgtgaagcgtcgtgaagggtataactatttcagtctccagcatgattatgattat

SEQ ID NO: 717286 - DNA, 75 bp, synthetic construct
  source 1..75: mol_type = other DNA
tggaatgtttatagtctgttgggaccataagctgaataagtacagaaatgaagaacagactaaaatatggaacat

SEQ ID NO: 717287 - DNA, 75 bp, synthetic construct
  source 1..75: mol_type = other DNA
ggttgtttatataggaaacacgattacaccatccgaactggcaaaaaaactaaggaaggtgcgaataagcaggtc

SEQ ID NO: 717288 - DNA, 75 bp, synthetic construct
  source 1..75: mol_type = other DNA
gcatggaaccgctgccgacatttatcgctaatgacgtgataaaaatgcctgatgttccccgctatactgaagaat

SEQ ID NO: 717289 - DNA, 75 bp, synthetic construct
  source 1..75: mol_type = other DNA
gttccggcggcctggtacagggcaaaaaatatatgctttccctgacctggaacgcaccaatggaagccttcaccg

SEQ ID NO: 717290 - DNA, 75 bp, synthetic construct
  source 1..75: mol_type = other DNA
actttgcgaataaagggatcaaagcgccaggtggaaaagcgctggccagccatctgaaaaatattctgattgaag

SEQ ID NO: 717291 - DNA, 75 bp, synthetic construct
  source 1..75: mol_type = other DNA
tgaaaagcgaggccgcccccgcccaaagggcgggaacaacatcgcttttaattatgaatgttgtaactacattat

SEQ ID NO: 717292 - DNA, 75 bp, synthetic construct
  source 1..75: mol_type = other DNA
tcggcgtgaaagatcgtagcggtctgccgcaggctgcgctgaactacatcaagcgtattgaagagctgaccggtg

SEQ ID NO: 717293 - DNA, 75 bp, synthetic construct
  source 1..75: mol_type = other DNA
acgttctggatggcctgaaagaggtgaaactctgtgtggcttaccgtatgccggatggtcgtgaagtgactacca

SEQ ID NO: 717294 - DNA, 75 bp, synthetic construct
  source 1..75: mol_type = other DNA
ggagaacaatccacatggtacagtaataacacgagaaagtatcaatagtgctatttatctcgttgatttttattt

SEQ ID NO: 717295 - DNA, 75 bp, synthetic construct
  source 1..75: mol_type = other DNA
taaaaaaatcctggagcggagatataaaaaggaaatggaaagatccccggaaaatgctgctgctgcacgagcagc

SEQ ID NO: 717296 - DNA, 75 bp, synthetic construct
  source 1..75: mol_type = other DNA
gcacttgacatactggcagaacaaaggaaaataaggattgatgataacctggttgtttatataggaaacacgatt

SEQ ID NO: 717297 - DNA, 75 bp, synthetic construct
  source 1..75: mol_type = other DNA
gcccttaaccaaaatcctacgcttagaaaagcgctcaaggcattagaagacaaactgcgtgataaaggtatactc

SEQ ID NO: 717298 - DNA, 75 bp, synthetic construct
  source 1..75: mol_type = other DNA
tactggagatcaaaatattggcactgttgatgtaaaaattactaaatctaaaatggcgccagttaaatggaatgg

SEQ ID NO: 717299 - DNA, 75 bp, synthetic construct
  source 1..75: mol_type = other DNA
cgcaaacctatggcgaagctccactcatcattgatgtggacgcgctggcgaattatgaaccaccgaagcaggaga

SEQ ID NO: 717300 - DNA, 75 bp, synthetic construct
  source 1..75: mol_type = other DNA
agagaacatagcgttgccttggtaggtccggcagcggaggaattctttgacccggttcctgaacaggatctattc

SEQ ID NO: 717301 - DNA, 75 bp, synthetic construct
  source 1..75: mol_type = other DNA
gcgcgtgaagggacgttgtcaattatggttggcggtgacgaagcggtatttgaacgtgttaaaccgctgtttgaa

SEQ ID NO: 717302 - DNA, 75 bp, synthetic construct
  source 1..75: mol_type = other DNA
ggtgattatctcgatgcgccagtctccggcggtgaaatcggcgcgcgtgaagggacgttgtcgattatggttggc

SEQ ID NO: 717303 - DNA, 75 bp, synthetic construct
  source 1..75: mol_type = other DNA
ctgcatgtcacaaccattggtccggttgctgatgaattactgtcactgggtgccgtcagtgttgaaactgcgcgc

SEQ ID NO: 717304 - DNA, 75 bp, synthetic construct
  source 1..75: mol_type = other DNA
cggcgtatgtgatgctgaacgccattaccgccttccagcacagatagcacgaaaagagattgccgaaatcgccag

SEQ ID NO: 717305 - DNA, 75 bp, synthetic construct
  source 1..75: mol_type = other DNA
gcgaccgggtaaattctggcatcgccgtagctttcgccagaaatttttgctgcgctctttgattatgccgcgttt

SEQ ID NO: 717306 - DNA, 75 bp, synthetic construct
  source 1..75: mol_type = other DNA
agtatcgaatccggcaggtattattggtttgttttttggtttgcttaccgtatttgcaattttatttcgtttttt

SEQ ID NO: 717307 - DNA, 75 bp, synthetic construct
  source 1..75: mol_type = other DNA
ctgaacgcctttcccgcctcccagcacagatagcacgaaaagagattgccaaaatcgccagtaaaaaacgggctg

SEQ ID NO: 717308 - DNA, 75 bp, synthetic construct
  source 1..75: mol_type = other DNA
gaaatcgccagtaaaaaacgggctgaataccgtcggcgctatgagatgctcgacgctattcagccacaaatggcc

SEQ ID NO: 717309 - DNA, 75 bp, synthetic construct
  source 1..75: mol_type = other DNA
ccatgccgattacaacgctttctgggaatcggttggcggcgtatgtgatgctgaacgccattaccgccttccagc

SEQ ID NO: 717310 - DNA, 75 bp, synthetic construct
  source 1..75: mol_type = other DNA
taaagtagcacgtcgcggtctgcgtgttggcgaccttttcgacaaagaaaccttcgctgaaaaactgaaagaagt

SEQ ID NO: 717311 - DNA, 75 bp, synthetic construct
  source 1..75: mol_type = other DNA
agcggtgggccggaaaatatcagcagcattctggacagaaccgttaccaagattgaagccttgttccagcgtccc

SEQ ID NO: 717312 - DNA, 75 bp, synthetic construct
  source 1..75: mol_type = other DNA
tgtctgccacggatcttgttggaaacacaggaaccaaaacgcttaatgcaccgctgaaaattgactcaacgcttc

SEQ ID NO: 717313 - DNA, 75 bp, synthetic construct
  source 1..75: mol_type = other DNA
accgtcagtgaaagcgattataaaaccaaaaacgccaccttctcatacgctggtctaccggacggggattatacg

SEQ ID NO: 717314 - DNA, 75 bp, synthetic construct
  source 1..75: mol_type = other DNA
ttcggtggaatggcgccccttctcgggcggcttgtccgcacgctcggcagcgtatgcgctgacggtgctctcggc

SEQ ID NO: 717315 - DNA, 75 bp, synthetic construct
  source 1..75: mol_type = other DNA
gcttccaacagacccaatgcgcccggcaattcagggtattattctggacaatatcgatggcgaaggccttgatga

SEQ ID NO: 717316 - DNA, 75 bp, synthetic construct
  source 1..75: mol_type = other DNA
tgatgatgcgctcactggcttctcttgcacgcgttgatcagactcgtattcgaacagggcaacttaacgacgagg

SEQ ID NO: 717317 - DNA, 75 bp, synthetic construct
  source 1..75: mol_type = other DNA
tgcagaaagtttaggtctgaatactcgccagattatcgaaggtgtttgtctcgatccgcgtattggcaaccatta

SEQ ID NO: 717318 - DNA, 75 bp, synthetic construct
  source 1..75: mol_type = other DNA
gtcacgcaaaccgcaagtggtgggtatttatcgtctgattatgaagagcgggtcagataacttccgtgcgtcttc

SEQ ID NO: 717319 - DNA, 75 bp, synthetic construct
  source 1..75: mol_type = other DNA
tctccgtgaaggtaaagccctttacgataatctccatccttcacgtattgtcatcggtgagcgttcagaacgcgc

SEQ ID NO: 717320 - DNA, 75 bp, synthetic construct
  source 1..75: mol_type = other DNA
tcagggcgatgcccagcacttaatggtctggatggggcgttacgtcatctaccacaccggaagcgccacgaaaac

SEQ ID NO: 717321 - DNA, 75 bp, synthetic construct
  source 1..75: mol_type = other DNA
aactggaatcaggggaacgggaaaaccggcccctacgtgaccgcgattaatttgattcagtacaacagccagttt

SEQ ID NO: 717322 - DNA, 75 bp, synthetic construct
  source 1..75: mol_type = other DNA
atgacgccctgtacgggcgtctttgcggcggaggcggcagtacgcagcaaacttttcaccggagcagagctggca

SEQ ID NO: 717323 - DNA, 75 bp, synthetic construct
  source 1..75: mol_type = other DNA
tcagcgcgagggatgctggggcatatccgccgccagctcatcgttttcgccaacagccgccaccggccggatctg

SEQ ID NO: 717324 - DNA, 75 bp, synthetic construct
  source 1..75: mol_type = other DNA
gatcttgataggcgagttgcacatctgccagatactaagaatggtaatgctcgcgatgtccccttatccacaaag

SEQ ID NO: 717325 - DNA, 75 bp, synthetic construct
  source 1..75: mol_type = other DNA
cgcagaactacgatggcgctttatcgaccttgagaagcgagttgcacatttgccagatactaagaatgggaatgc

SEQ ID NO: 717326 - DNA, 75 bp, synthetic construct
  source 1..75: mol_type = other DNA
ctggttcgataagtctgacgaacgggcgatattcagcgatatcagaaaagaaggatacacattacgcaatgggag

SEQ ID NO: 717327 - DNA, 75 bp, synthetic construct
  source 1..75: mol_type = other DNA
caacaccactgctggtggcgtggcgaccggttccggcttgggcccgcgttatgttgattacgttctgggtatcct

SEQ ID NO: 717328 - DNA, 75 bp, synthetic construct
  source 1..75: mol_type = other DNA
attatcacgtggcgctggataacgcacgtgagaaagcgcgtggtgcgaaagcgatcggcaccacgggtcgtggta

SEQ ID NO: 717329 - DNA, 75 bp, synthetic construct
  source 1..75: mol_type = other DNA
ttcacgatctccggcatgaagcgacctctcgcttggctgagattttccccatgcacgagctgacaaaaatcacgg

SEQ ID NO: 717330 - DNA, 75 bp, synthetic construct
  source 1..75: mol_type = other DNA
tagttgggcagatattgtcgtactgtgcgtgctgtttcgtaagcacattccgatgaataaatatttcctcaagca

SEQ ID NO: 717331 - DNA, 75 bp, synthetic construct
  source 1..75: mol_type = other DNA
agacggtaatgccggcatcaccggccctcacctttggtgcgtgttgcgaagattctttacgcaagccgctgaggc

SEQ ID NO: 717332 - DNA, 75 bp, synthetic construct
  source 1..75: mol_type = other DNA
cgcacatccgcagctcaccgagcgcgcccgggccctgatcccgattattcagcccagcggcatcgtgccgtggga

SEQ ID NO: 717333 - DNA, 75 bp, synthetic construct
  source 1..75: mol_type = other DNA
ccgtttcacgcaagaaaaacatcagcaaacccactccacttttcaaaacttgttgccaccaaaggcgcaggcatt

SEQ ID NO: 717334 - DNA, 75 bp, synthetic construct
  source 1..75: mol_type = other DNA
aactcttttgctgagtatcgtattgaccattttggttaccattttttgttccgtcccgatcatcattgccgggat

SEQ ID NO: 717335 - DNA, 75 bp, synthetic construct
  source 1..75: mol_type = other DNA
ttcagcaatggctgaactcattgtggcaggaaaaagaccgacttctgacgtcgttgatgtcatcacagcggcagg

SEQ ID NO: 717336 - DNA, 75 bp, synthetic construct
  source 1..75: mol_type = other DNA
ggcgctacctcatggcggatccagcaaatcacccgcgatcaggtgattgtgactcctgctccgggtcgttctgcc

SEQ ID NO: 717337 - DNA, 75 bp, synthetic construct
  source 1..75: mol_type = other DNA
gcggcgaagatacccgcgaggcgcataagcgtaaaacctcacgcatcctctatatttcaccgataaaagccctgg

SEQ ID NO: 717338 - DNA, 75 bp, synthetic construct
  source 1..75: mol_type = other DNA
cggtagtcaacccgcccgcaatgcgccatccgcagatccgtattgtcgttcctgtcgccaatatggatgatgtct

SEQ ID NO: 717339 - DNA, 75 bp, synthetic construct
  source 1..75: mol_type = other DNA
tactgtcacggaaatacccagagctggtgataccggatgggctggcagcagaaggaagcagtaaacgggactgga

SEQ ID NO: 717340 - DNA, 75 bp, synthetic construct
  source 1..75: mol_type = other DNA
cgattcttcttgatgagctgaaaagtgcccgggagcaacaaaaaaggcgtgatgagcgtgctgatggttccgtcc

SEQ ID NO: 717341 - DNA, 75 bp, synthetic construct
  source 1..75: mol_type = other DNA
ccgaagtcgtggtgtccccccaaaaaaaatgctgaatgaaatgattgagcaggcgcaccgggattttgtggcaaa

SEQ ID NO: 717342 - DNA, 75 bp, synthetic construct
  source 1..75: mol_type = other DNA
caccgatggtagcccggcactctttgcctcaacatcgccaggcgtttatgagggcgtggatggcgtgatgcgggt

SEQ ID NO: 717343 - DNA, 75 bp, synthetic construct
  source 1..75: mol_type = other DNA
gatctcttcttacgctatctccagcaccatacccttgtgacgactgaacagcttgcccgtcaaattggtctcggc

SEQ ID NO: 717344 - DNA, 75 bp, synthetic construct
  source 1..75: mol_type = other DNA
tcaacgggtaggcgagaaaatcggtcaaccggtagatgcttcgcccctgcaagaagcgttatgggagctggtctg

SEQ ID NO: 717345 - DNA, 75 bp, synthetic construct
  source 1..75: mol_type = other DNA
ttcttacaacgcaccgaaactggccgggcgttggtcattattgcaggtggcggcactgaacgacaccgaacggat

SEQ ID NO: 717346 - DNA, 75 bp, synthetic construct
  source 1..75: mol_type = other DNA
cgacaaacgccgatgtttacgctgctgcgtgaggcgggattttcaagttcgccacaagggctggattggggatag

SEQ ID NO: 717347 - DNA, 75 bp, synthetic construct
  source 1..75: mol_type = other DNA
ggcggaaaatatgctcgaccgctacggcatcatcagtcgtcaggcggtgatagccgaaaatatccctggcgggtt

SEQ ID NO: 717348 - DNA, 75 bp, synthetic construct
  source 1..75: mol_type = other DNA
cacgcaatgttcgcgttaagcctttcctggcttatgttgaagaccactggcggaaattgttcgccggactgaatg

SEQ ID NO: 717349 - DNA, 75 bp, synthetic construct
  source 1..75: mol_type = other DNA
cctgacgccaacggaagtgcgctcccgcgcgcggcgtattgcccgtgaacacggcggcatcgggcttataatgat

SEQ ID NO: 717350 - DNA, 75 bp, synthetic construct
  source 1..75: mol_type = other DNA
gacgaagggccgaagaacatcgccgatgtgctcgacgccaccgtggcgcgtattgagcagttgtttcagcagcca

SEQ ID NO: 717351 - DNA, 75 bp, synthetic construct
  source 1..75: mol_type = other DNA
cgcgcgcgccgtattgcccgtgaacacggcggcatcgggcttatcatgatcgactacctgcaactgatgcgcgta

SEQ ID NO: 717352 - DNA, 75 bp, synthetic construct
  source 1..75: mol_type = other DNA
gcatatccgtgaccgtctgccggcgacaccggatgccgtcactcagcgacagtcgcctgcagaaagtacagaaca

SEQ ID NO: 717353 - DNA, 75 bp, synthetic construct
  source 1..75: mol_type = other DNA
ctctgctttcatttgctaagggtattggttatggaaatactcaatgggacatgagtccgtcagaggttgttgcgg

SEQ ID NO: 717354 - DNA, 75 bp, synthetic construct
  source 1..75: mol_type = other DNA
acagtcacacggcgcggactttgccttccccagccagacgctgtatatggataacattacaccggcggaccaggg

SEQ ID NO: 717355 - DNA, 75 bp, synthetic construct
  source 1..75: mol_type = other DNA
cccgcaatgttcgcgttaagccgttccgggattatgttgaagaccactggcggaaattgttcgccggactgaatg

SEQ ID NO: 717356 - DNA, 75 bp, synthetic construct
  source 1..75: mol_type = other DNA
ttccgggcttatgttgaaaaccactggcggaaattgttcgccggactgaatgggatgttcggcgtatggctataa

SEQ ID NO: 717357 - DNA, 75 bp, synthetic construct
  source 1..75: mol_type = other DNA
gtgatctcgttgttttgccagcatatcgtagtgaccctgggctggtcgtgctgaacaagacatataacgatcttg

SEQ ID NO: 717358 - DNA, 75 bp, synthetic construct
  source 1..75: mol_type = other DNA
taacggccctatcgggacggtacgtctgacctttaacggtcaatggtcgcgcttcgacaactacgcggggccgca

SEQ ID NO: 717359 - DNA, 75 bp, synthetic construct
  source 1..75: mol_type = other DNA
atggcaggaaataaacccttcaacaaacagcaggctgaaccccgcgaacgcgatccacaagttgccgggctgaaa

SEQ ID NO: 717360 - DNA, 75 bp, synthetic construct
  source 1..75: mol_type = other DNA
ggcataaccgcgaccacagtatcagtgttatcagggaggggacgttatggtgccttgtgagttccgttgctgggg

SEQ ID NO: 717361 - DNA, 75 bp, synthetic construct
  source 1..75: mol_type = other DNA
ctgcgccaggtcgttctgccagacttcctttctggcgtggcgaaggtaacggtcgttctgcggaattgggggaga

SEQ ID NO: 717362 - DNA, 75 bp, synthetic construct
  source 1..75: mol_type = other DNA
aaggtcttgaccggacctaaagctcagcttgcaggtgacaaagtagagtttattgagaaagtacgtcgtgcatta

SEQ ID NO: 717363 - DNA, 75 bp, synthetic construct
  source 1..75: mol_type = other DNA
tcagggacttacaacaccattctggctgatcagttcaagcaggcttttcgcgcccttgcaaacgaggttgaggct

SEQ ID NO: 717364 - DNA, 75 bp, synthetic construct
  source 1..75: mol_type = other DNA
cctcccaaaaaaactgctgaatgaaatgattgagcaggcgtaccaggactttgtggcaaatgagcaacacaagac

SEQ ID NO: 717365 - DNA, 75 bp, synthetic construct
  source 1..75: mol_type = other DNA
ctctgaaactgtccggaaaaatccacaaacagcttgaaagtattgcccgaagtcgtggcgacccccctcccaaaa

SEQ ID NO: 717366 - DNA, 75 bp, synthetic construct
  source 1..75: mol_type = other DNA
cactgaaactgtccggaaaaatccacaaacagcgtgaaagtattgcccgaagtcgtggcgacccccctcccaaaa

SEQ ID NO: 717367 - DNA, 75 bp, synthetic construct
  source 1..75: mol_type = other DNA
ggtgccatagaggaatatacacagtggttaaaaaaagaaccacgggcatcttatttttttctgttccagctgtat

SEQ ID NO: 717368 - DNA, 75 bp, synthetic construct
  source 1..75: mol_type = other DNA
gggcggcaaactggcgcaagaggcgggttggttgatggccagcgaaatgatcgctatggatattgatatcagctt

SEQ ID NO: 717369 - DNA, 75 bp, synthetic construct
  source 1..75: mol_type = other DNA
atcctggtctgcaataatcgtaaaggggccgtcagcgtgttagataatctgtcaccgatcaaggcagaacgtgtt

SEQ ID NO: 717370 - DNA, 75 bp, synthetic construct
  source 1..75: mol_type = other DNA
cgattggcgagcgttcttatcatgccgatccacaaaaagccctggcaattgccagccgttttattgatggtatgc

SEQ ID NO: 717371 - DNA, 75 bp, synthetic construct
  source 1..75: mol_type = other DNA
ccaaaggaaagccgatgcgcaccgtgcatccggataaaatctaccgtgaaattatatggttctgctccggttacc

SEQ ID NO: 717372 - DNA, 75 bp, synthetic construct
  source 1..75: mol_type = other DNA
tgcgccagtgctggatgtcggacatatcagcgcggcgattggcgagcgttcttatcatgccgacccagaaaaagc

SEQ ID NO: 717373 - DNA, 75 bp, synthetic construct
  source 1..75: mol_type = other DNA
gatggtatgcatgaagccggaatgaaaactaccgggaaacacttcccaggacacggtgcagtaacggcagactca

SEQ ID NO: 717374 - DNA, 75 bp, synthetic construct
  source 1..75: mol_type = other DNA
cgctgaaactgtccggaaaaatccacaaacagcatgaaagtattgcccgaagtcgtggcgacccccctcccaaaa

SEQ ID NO: 717375 - DNA, 75 bp, synthetic construct
  source 1..75: mol_type = other DNA
acgataccgaaaggatgctggcgctggcggaaaatatgctcgaccgctacggcatcatcagtcgtcaggcggtga

SEQ ID NO: 717376 - DNA, 75 bp, synthetic construct
  source 1..75: mol_type = other DNA
gccaattaaggccttaggtaccgatgttcagcgcaatttacagatcccattacaaggcatcgctgatgagcgacg

SEQ ID NO: 717377 - DNA, 75 bp, synthetic construct
  source 1..75: mol_type = other DNA
tgtagagtgtatgttcacaggcaggctggaaaacctgacaccaccgcataatccactcgacgttctggcgcagca

SEQ ID NO: 717378 - DNA, 75 bp, synthetic construct
  source 1..75: mol_type = other DNA
gcaacgccgctttctgttgccagtggtttacagcgtattgggcgcgccgggcatcaggttggtggcgtttctaag

SEQ ID NO: 717379 - DNA, 75 bp, synthetic construct
  source 1..75: mol_type = other DNA
cgcacgattacagcgcaccccggctatcgccgctgatgtggcccatttcgagtcgaccactggcgcaatctctaa

SEQ ID NO: 717380 - DNA, 75 bp, synthetic construct
  source 1..75: mol_type = other DNA
gtcagttacccgcttcgcgacctctttctgcgctatctccgggctcatgctctggtcacggctgaacaactggct

SEQ ID NO: 717381 - DNA, 75 bp, synthetic construct
  source 1..75: mol_type = other DNA
tggcagcttttctctacgccctcgatcaactcttccgcgaaggcggagaacatgcaagcgaagcgcataagcgta

SEQ ID NO: 717382 - DNA, 75 bp, synthetic construct
  source 1..75: mol_type = other DNA
ggttacaacgcattggtcgcgccggacatcaggttggcggtgtatctaaagggctgtttttcccccgtacccggc

SEQ ID NO: 717383 - DNA, 75 bp, synthetic construct
  source 1..75: mol_type = other DNA
gatggtgcaggccattacgtgaaaatggtccacaacggcattgagtacggcgatatgcagttgattgctgaagcc

SEQ ID NO: 717384 - DNA, 75 bp, synthetic construct
  source 1..75: mol_type = other DNA
cggcacgactaaatgagctttacgctgcacgattacagcgttccccgactatcgccgttgatgcggcaaattttg

SEQ ID NO: 717385 - DNA, 75 bp, synthetic construct
  source 1..75: mol_type = other DNA
gcgggtgatcgaacagcttgccggagtcggtttacccgcctcactctgggaaagccagatcctgcctgcccgcgt

SEQ ID NO: 717386 - DNA, 75 bp, synthetic construct
  source 1..75: mol_type = other DNA
attgccattgtcgaagagcagcttcagcaactgcgtgaacagggtctgggtgatgaatctgcaacaagacatctg

SEQ ID NO: 717387 - DNA, 75 bp, synthetic construct
  source 1..75: mol_type = other DNA
aagagatggttctgaattttatgataaatatcctcttgataaaagtaagcgtcgtctcagcaccgtctggcagat

SEQ ID NO: 717388 - DNA, 75 bp, synthetic construct
  source 1..75: mol_type = other DNA
gtggatctatcttatccaattctcgaaacaggtctgataaaaataatttccaatggttactgcatagggctgaac

SEQ ID NO: 717389 - DNA, 75 bp, synthetic construct
  source 1..75: mol_type = other DNA
gaagaaaactcctggctgtggatgtaccgcaaactgggcggagggctgctcgggattttgatggtaccggtgctg

SEQ ID NO: 717390 - DNA, 75 bp, synthetic construct
  source 1..75: mol_type = other DNA
cgggtgattcaggatcaggaaagtgaaatcgccacccttaaaaagcagctcaacgagaaatctgccgggcaaagg

SEQ ID NO: 717391 - DNA, 75 bp, synthetic construct
  source 1..75: mol_type = other DNA
tgagacgcgtaccgtacagcaagatacgcaaccggtgaaaagtgtcaaaacggagctgaagcaggcactgttgag

SEQ ID NO: 717392 - DNA, 75 bp, synthetic construct
  source 1..75: mol_type = other DNA
gtggtattgctggccattcctcccaatgaagcaggtactacgcatatgaaactgcttaccgcgctgaccacgcgc

SEQ ID NO: 717393 - DNA, 75 bp, synthetic construct
  source 1..75: mol_type = other DNA
cgaacggacgcggcgatattgcacaggatggcattgatatgctgaccgacgacagtctgacgaccgatgtgacaa

SEQ ID NO: 717394 - DNA, 75 bp, synthetic construct
  source 1..75: mol_type = other DNA
tgatgaagcgctggcgtggctgcataaaagcggtgctgccacatccgtggtatgtcatgccatgcgtgtggggca

SEQ ID NO: 717395 - DNA, 75 bp, synthetic construct
  source 1..75: mol_type = other DNA
ggggagacagttttcgcccgcgccccattggctcccgtctgtggcttctccgccgggaaaaaacgctggcctcgg

SEQ ID NO: 717396 - DNA, 75 bp, synthetic construct
  source 1..75: mol_type = other DNA
ggaccaagatggccgagtcgagccccggcctgacctacgccaagctgtcctggtctgcaagcctggcacatccgc

SEQ ID NO: 717397 - DNA, 75 bp, synthetic construct
  source 1..75: mol_type = other DNA
gatggacgtggacgactggacgggcttcagccgccacttcacccacttgaaggacgggggccgaaggccaaagac

SEQ ID NO: 717398 - DNA, 75 bp, synthetic construct
  source 1..75: mol_type = other DNA
gatggacgtggacgactggacgggcttcagccgccacttcacccacttgaaggacggggccgaggccaaagacag

SEQ ID NO: 717399 - DNA, 75 bp, synthetic construct
  source 1..75: mol_type = other DNA
atacccaagtgaaggtgaatggttaccgtatcgaactgggggaaatcgagcgctgcattgcgcgacatcccgatg

SEQ ID NO: 717400 - DNA, 75 bp, synthetic construct
  source 1..75: mol_type = other DNA
aacaaacgtattaccgccaggtaaagaacccgaatccggtgttcacaccccgtgaaggagcaggaacgctgccgt

SEQ ID NO: 717401 - DNA, 75 bp, synthetic construct
  source 1..75: mol_type = other DNA
gacaatgattggaaatgctgttccccctataattggtcagataataggggaaacatttatcagacatgttgaggg

SEQ ID NO: 717402 - DNA, 75 bp, synthetic construct
  source 1..75: mol_type = other DNA
aatcagtcagttacagaactgcaatcctgcgatgtgtctgctatgttcaaggaaggaaatattagattgcttgct

SEQ ID NO: 717403 - DNA, 75 bp, synthetic construct
  source 1..75: mol_type = other DNA
gctctgacggcattactcgacggcatgaatattccacccgcttattgccacgctgaaacgtgggcggcacaagcg

SEQ ID NO: 717404 - DNA, 75 bp, synthetic construct
  source 1..75: mol_type = other DNA
ctctggcagcgggcgatcgcatctatgcggtgatccggggtagcgcggtcaacaatgacggtaaacaaaaaatcg

SEQ ID NO: 717405 - DNA, 75 bp, synthetic construct
  source 1..75: mol_type = other DNA
ggatccgaaatcccgcgtattacatgaagttgcctaccatgcgctggaagatgcaggctatgcccaacgtaccag

SEQ ID NO: 717406 - DNA, 75 bp, synthetic construct
  source 1..75: mol_type = other DNA
gtcggagtaaaaggaagaagaaatttcgcagtaccaatggtttcattctgtgacatcaagctttctcagattaaa

SEQ ID NO: 717407 - DNA, 75 bp, synthetic construct
  source 1..75: mol_type = other DNA
caggtaattcaggatcaggaaagagaaatcgccgcccttaaaaagctactccacgttaaatctgccgggcaagga

SEQ ID NO: 717408 - DNA, 75 bp, synthetic construct
  source 1..75: mol_type = other DNA
gtcctattgggttgggcggcgaaaatccttgggattgggcaatatttccacccatatctatgtggaatatgaact

SEQ ID NO: 717409 - DNA, 75 bp, synthetic construct
  source 1..75: mol_type = other DNA
gggacgatactagccctacgataactacccagtgttatggatatggaaatggacgatttggccatcctgagcaaa

SEQ ID NO: 717410 - DNA, 75 bp, synthetic construct
  source 1..75: mol_type = other DNA
gtaagactgttgaccaactatcagttggccagcgtgggactttttatgtaagcttgaaacttgcaacagatcctt

SEQ ID NO: 717411 - DNA, 75 bp, synthetic construct
  source 1..75: mol_type = other DNA
ggctgagaaaaatgatctccatcccgttctatacatgaatcaaggcagtgaattattttcaaagtataataaaag

SEQ ID NO: 717412 - DNA, 75 bp, synthetic construct
  source 1..75: mol_type = other DNA
aacatatattaacaatatgtttctgcgttatttatcattattaggtaatgactccaacttattgatagtgtttta

SEQ ID NO: 717413 - DNA, 75 bp, synthetic construct
  source 1..75: mol_type = other DNA
tggcatttgaggaaggatatttacgcccacaatttataaccgttgaagaaggcggagtgaacgcatattcctcgc

SEQ ID NO: 717414 - DNA, 75 bp, synthetic construct
  source 1..75: mol_type = other DNA
gatttttaacaagataaaaaagaaaaaaaggattgtattatgctatcaaaaaaaacatcacaatgaatggcatta

SEQ ID NO: 717415 - DNA, 75 bp, synthetic construct
  source 1..75: mol_type = other DNA
taaatcatgttttttatggaaacgagaaaataaataagagcataaatatcaatagttttattggttcacacaaat

SEQ ID NO: 717416 - DNA, 75 bp, synthetic construct
  source 1..75: mol_type = other DNA
atgcaaggtaatgcactaaccgttttattatccggtaaaaaatatctgctattgcaggggccaatgggacctttt

SEQ ID NO: 717417 - DNA, 75 bp, synthetic construct
  source 1..75: mol_type = other DNA
ttaatggggtttattatggggaaagatattttgaacagggtattaagattgataaagattatggtagtattacgc

SEQ ID NO: 717418 - DNA, 75 bp, synthetic construct
  source 1..75: mol_type = other DNA
gccaccataaatcgttttccccctggtatgaggctcgttgctgggttcgtgcatactggcgcaagcaactttaca

SEQ ID NO: 717419 - DNA, 75 bp, synthetic construct
  source 1..75: mol_type = other DNA
atgtctgcaacaaatacttcttctgcaaaagctgaatacttcaatctgaccgtaaaaggtctggggtacctcagt

SEQ ID NO: 717420 - DNA, 75 bp, synthetic construct
  source 1..75: mol_type = other DNA
aggcggtaaaacgtgaagtggagcgtcgtgtgaaagagcgcatgattctgtcacgtaaccgtaattacagccggc

SEQ ID NO: 717421 - DNA, 75 bp, synthetic construct
  source 1..75: mol_type = other DNA
agccaggacctggcgcgcgagcaaattcgccaggcgcaggatggtcgacttaccggcgctgatttaacggacttc

SEQ ID NO: 717422 - DNA, 75 bp, synthetic construct
  source 1..75: mol_type = other DNA
gtcagaatattatttaagtagcagaacaactattcgaaaggcaatagaaagtcttaaacaacgcggctacctgca

SEQ ID NO: 717423 - DNA, 75 bp, synthetic construct
  source 1..75: mol_type = other DNA
tgcccgctgccagaaagcggtggatgaagatcgcaaggtgctgcttggcttcacgctgagcaacctgtccactga

SEQ ID NO: 717424 - DNA, 75 bp, synthetic construct
  source 1..75: mol_type = other DNA
cccgtccacggacatatttacgttgaacaaaggtgaccatgccggcgaacagcgcgtcagtctgaaagcccgcct

SEQ ID NO: 717425 - DNA, 75 bp, synthetic construct
  source 1..75: mol_type = other DNA
ttaatggggtttattatggagagtgtaataatattaccttattaaaaaaaatatgtttagaggaaagttcatcaa

SEQ ID NO: 717426 - DNA, 75 bp, synthetic construct
  source 1..75: mol_type = other DNA
cgatacgttgtacagtcatcaaaactgtgaagtgactggctgggcgcaaacgtcggtgatgtcacatcagtgcga

SEQ ID NO: 717427 - DNA, 75 bp, synthetic construct
  source 1..75: mol_type = other DNA
atacgcatcaacgaatgcacgtaagaatcgtacatatttttgccatccgtttataccaaatttaccatataagta

SEQ ID NO: 717428 - DNA, 75 bp, synthetic construct
  source 1..75: mol_type = other DNA
gcaaaatcggtgacggtaaaattttcgtctttgacgtggcacgggtcattcgtatccgtactggcgaagaggacg

SEQ ID NO: 717429 - DNA, 75 bp, synthetic construct
  source 1..75: mol_type = other DNA
ggtgtccgtcttgatatccttacccctatagcagaacagcttgatgcaatgctgtccatttacagccgggtttac

SEQ ID NO: 717430 - DNA, 75 bp, synthetic construct
  source 1..75: mol_type = other DNA
gaagtgctgttaaaaatcaaagctgtgggtattggtaatgactccaacttattgatagtgttttatgttcagata

SEQ ID NO: 717431 - DNA, 75 bp, synthetic construct
  source 1..75: mol_type = other DNA
gttggcgcggatgacaaagtggaaacccgtccgatcgttgcaagccaggctattggcgataagtggctggtgaca

SEQ ID NO: 717432 - DNA, 75 bp, synthetic construct
  source 1..75: mol_type = other DNA
aggcagcttagccctaacaggatgtgacgacaaaccggcccaacaaggtggccagcagatgcccgccgttggtgt

SEQ ID NO: 717433 - DNA, 75 bp, synthetic construct
  source 1..75: mol_type = other DNA
ctttaaaccggatatgaagctgtttaagaagtttcgggagtatttattggtgaagacacagattaatgcggttta

SEQ ID NO: 717434 - DNA, 75 bp, synthetic construct
  source 1..75: mol_type = other DNA
aaattttcgttcgcgatttgggtaatgactccaacttattgatagtgttttatgttcagataatgcccgatgact

SEQ ID NO: 717435 - DNA, 75 bp, synthetic construct
  source 1..75: mol_type = other DNA
tttctgtaattccgcagtacaaacctttaatcgcagaatttaaagacatcgataaactttcctctgcggactttg

SEQ ID NO: 717436 - DNA, 75 bp, synthetic construct
  source 1..75: mol_type = other DNA
atcctgaagcgtaatttcaaagaaggtagcgacatcgaagcgggggtatctctctatcagattgatcctgctacc

SEQ ID NO: 717437 - DNA, 75 bp, synthetic construct
  source 1..75: mol_type = other DNA
agagtacggcccgtttaaaacggtggaggatttaaaacaggtgccgggaatgggcaattcgctggtggaacgtaa

SEQ ID NO: 717438 - DNA, 75 bp, synthetic construct
  source 1..75: mol_type = other DNA
gcagctcctgcggtgaaaccggaagcggtagaaaccaaagcggaagctcctgcagcacaaagcaaagcggcagta

SEQ ID NO: 717439 - DNA, 75 bp, synthetic construct
  source 1..75: mol_type = other DNA
tgcagcacaaagtaaagcagcagtaccggcgaaagccagtgacgaagaaggcacccgggtcagcattaataatgc

SEQ ID NO: 717440 - DNA, 75 bp, synthetic construct
  source 1..75: mol_type = other DNA
tcactgctgagaacggcaacaacgtgccacaggaacgcgctgtaatcgattctgacgcacttaattgcgttgggt

SEQ ID NO: 717441 - DNA, 75 bp, synthetic construct
  source 1..75: mol_type = other DNA
aaaaacatttatataacaaaggctgatttagaataccttcatgacgcaaaggttaatggaagttttgacgcagct

SEQ ID NO: 717442 - DNA, 75 bp, synthetic construct
  source 1..75: mol_type = other DNA
ccattagctatgaggggggagatcaatcaaaatgttgcctgcttatgcctttctaaaaatcctctcaatgtactg

SEQ ID NO: 717443 - DNA, 75 bp, synthetic construct
  source 1..75: mol_type = other DNA
aggggctggtggcgcaaatcgaactgctgaagcaggcggcagatacgccggaaattcaacagctgcaacagcagg

SEQ ID NO: 717444 - DNA, 75 bp, synthetic construct
  source 1..75: mol_type = other DNA
gttgtcgaatcagaacggggagatcggcctgctgttggcagaaacgctgattgcgctgaaccgttctgaagatgc

SEQ ID NO: 717445 - DNA, 75 bp, synthetic construct
  source 1..75: mol_type = other DNA
acagaacaccccgcgtcacagccagtaccaaccacacagataaccagtcggatggccggaaatatcagggcgtta

SEQ ID NO: 717446 - DNA, 75 bp, synthetic construct
  source 1..75: mol_type = other DNA
atgaaacacggaattaaagcactgctcattaccctgtccctggcctgtgccggaatgtctcatagcgcgctggcg

SEQ ID NO: 717447 - DNA, 75 bp, synthetic construct
  source 1..75: mol_type = other DNA
atgacgacatcaaccaggcggataagtttctatctgaagccctccgctgtcaagaacgaaggcgaagcatgcgca

SEQ ID NO: 717448 - DNA, 75 bp, synthetic construct
  source 1..75: mol_type = other DNA
ggcctgctgctggcagaaacgctgattgcgctgaaccgttctgaagatgcagaagccgtgctgaaaaccattccg

SEQ ID NO: 717449 - DNA, 75 bp, synthetic construct
  source 1..75: mol_type = other DNA
atgaaatcatcccattgggtcgcttaatccacatggttaatcagaagaaagatcgtctgcttaacgattatctgt

SEQ ID NO: 717450 - DNA, 75 bp, synthetic construct
  source 1..75: mol_type = other DNA
caaaatgctggttcaggtgcgccaggaacaaaaattccagcaactggtcggccaggcggtgcagcttggcggctc

SEQ ID NO: 717451 - DNA, 75 bp, synthetic construct
  source 1..75: mol_type = other DNA
aaaatccttcaacacccgcgcttcaccaagtacacgatgtggtttatgactgatcaaataacacctgaagctggg

SEQ ID NO: 717452 - DNA, 75 bp, synthetic construct
  source 1..75: mol_type = other DNA
tgctgccgcgcgaagaagagctgaaagcgcagcaggcgatgcaactgatgcaggaaagcaattacaccgatgccc

SEQ ID NO: 717453 - DNA, 75 bp, synthetic construct
  source 1..75: mol_type = other DNA
aagcccgagcctactaatgattgcaaaaatatgcttagctaccggtgcacggtggagtgaagccgaaaaccttca

SEQ ID NO: 717454 - DNA, 75 bp, synthetic construct
  source 1..75: mol_type = other DNA
cgaaacttggaattatctgtaatggtctgggcgatcccatcgcttcagagctgactgccggtgactttacgaaat

SEQ ID NO: 717455 - DNA, 75 bp, synthetic construct
  source 1..75: mol_type = other DNA
agctgaacgaactcaacgccctgacttttgaggagttaatgcacctgggcaacacctcagcgcagttcctgaaaa

SEQ ID NO: 717456 - DNA, 75 bp, synthetic construct
  source 1..75: mol_type = other DNA
gcgaccgcgctacgctctctatcgccggttcggaaatggcaaaagatatcggccttgatccagtgggaatgggtt

SEQ ID NO: 717457 - DNA, 75 bp, synthetic construct
  source 1..75: mol_type = other DNA
cctgggggcactgacccgtatgctggatcgcctggtctgtaaaggctgggtggaacggttgccaaacccgaatga

SEQ ID NO: 717458 - DNA, 75 bp, synthetic construct
  source 1..75: mol_type = other DNA
aatctatatggttaatcagaagaaagaccgtctgcttaacgattatctgtctccgctggatatcactgcggcaca

SEQ ID NO: 717459 - DNA, 75 bp, synthetic construct
  source 1..75: mol_type = other DNA
atgaaggctcgtcagtaccagtgtgaacaggtgaactacgacacgtttatttcgtacccgaagcttgatgcctgg

SEQ ID NO: 717460 - DNA, 75 bp, synthetic construct
  source 1..75: mol_type = other DNA
cgaagttcgttgcttcaaccaatgttatggtgccgggagtgcagaaaaaatatatggcgataatggcgatattat

SEQ ID NO: 717461 - DNA, 75 bp, synthetic construct
  source 1..75: mol_type = other DNA
tctcaggaaacttaactgggaagaggacgaagagctgcagaatgccattctggttgatgagattggttttacgtt

SEQ ID NO: 717462 - DNA, 75 bp, synthetic construct
  source 1..75: mol_type = other DNA
cacgcagaatcgctaaagaagtaccaaagcgacgactcagggactgagcttccgcaatctggcgagacttgctct

SEQ ID NO: 717463 - DNA, 75 bp, synthetic construct
  source 1..75: mol_type = other DNA
catcttttcgtgatggctgacagctttttacatcaggcggggatgactgccggactggcgcgcagtctggccgtt

SEQ ID NO: 717464 - DNA, 75 bp, synthetic construct
  source 1..75: mol_type = other DNA
gggtgatcgcgtttggcggtggctcggtgctggatgcggcaaaagccgtggcgttgctggtaacgaatcccgata

SEQ ID NO: 717465 - DNA, 75 bp, synthetic construct
  source 1..75: mol_type = other DNA
ggccgcgatggaagatatttgtctgcgcagcaacccgcgtaccgccagcctggagcagattattggtctgtatgc

SEQ ID NO: 717466 - DNA, 75 bp, synthetic construct
  source 1..75: mol_type = other DNA
ggcggggatgtggtggtcagcggtgacggcaaaaccgtgcgcggccgtaaaaaacgcggccccggacgcgggcgg

SEQ ID NO: 717467 - DNA, 75 bp, synthetic construct
  source 1..75: mol_type = other DNA
tgattgtcgatttactcggcaatatttccgccaaatcccgccagtggtcacaggagctgggggcattctcccgtt

SEQ ID NO: 717468 - DNA, 75 bp, synthetic construct
  source 1..75: mol_type = other DNA
cttgttgcggaagggaaaagccagacgatgaacagcaggcacctttcaggccatgcggttgatgtgtttgcgtac

SEQ ID NO: 717469 - DNA, 75 bp, synthetic construct
  source 1..75: mol_type = other DNA
caccgacgtgtgtgcagccgtggcgcagttgcgtgaatcaggctgtgatggggtgatcgcgtttggcggcggctc

SEQ ID NO: 717470 - DNA, 75 bp, synthetic construct
  source 1..75: mol_type = other DNA
ctgattgccattccaacgactgccggaaccggctctgaaaccactaacgtgacggtgattatcgacgcagtgagc

SEQ ID NO: 717471 - DNA, 75 bp, synthetic construct
  source 1..75: mol_type = other DNA
ctggatgaacctgctaccgacattaacactgctgtcgggtgctggaacaggccttttgcctgccgctgcagccag

SEQ ID NO: 717472 - DNA, 75 bp, synthetic construct
  source 1..75: mol_type = other DNA
ggtcttgggttgtgccacgcgatggcgcatcagccgggcgctgcatattccacacggtctggcgaacgccatgtt

SEQ ID NO: 717473 - DNA, 75 bp, synthetic construct
  source 1..75: mol_type = other DNA
acgctattaacgcggtaagtgagctgattgcggaagttgggattggtaaacgactgggcgatgttggtgcgacat

SEQ ID NO: 717474 - DNA, 75 bp, synthetic construct
  source 1..75: mol_type = other DNA
caaatcgctgccgaaagcggtgggctacggtcatgaccttgccgcgcgcgagagcatgttactggcttcatgtat

SEQ ID NO: 717475 - DNA, 75 bp, synthetic construct
  source 1..75: mol_type = other DNA
cacgcagtattgatgtggatgataccgcacagcatggcctggatgtgaacgtctggaacggagggaactatggcc

SEQ ID NO: 717476 - DNA, 75 bp, synthetic construct
  source 1..75: mol_type = other DNA
ttctgtcagacagcttcacatgtcagttcttgtcccgcgaacaaatgatttaaaaccagccattatttattatcc

SEQ ID NO: 717477 - DNA, 75 bp, synthetic construct
  source 1..75: mol_type = other DNA
atgtacgaagctcttttggtagttttccttattgtggcaattggccttgttggtctgatcatgctgcagcaaggt

SEQ ID NO: 717478 - DNA, 75 bp, synthetic construct
  source 1..75: mol_type = other DNA
aacaagtatgtttcaatgctttttcctgcggaggtaagggatatgttgtgttcagttggctgagaacttcaacaa

SEQ ID NO: 717479 - DNA, 75 bp, synthetic construct
  source 1..75: mol_type = other DNA
taccatggcgtaattgatgtctgcgaagattatcacttgagtggatttgcgagaatgaaagaaaccatgaagcac

SEQ ID NO: 717480 - DNA, 75 bp, synthetic construct
  source 1..75: mol_type = other DNA
attagcggcgtcattggtgaagtggatttgagcggtgcgttatcacttgaactcgccggtatcattttctccttt

SEQ ID NO: 717481 - DNA, 75 bp, synthetic construct
  source 1..75: mol_type = other DNA
tattataaacagagtcgttgagtggtttactaaaaacctgggagcccccataaaaaccactacccaacaacagaa

SEQ ID NO: 717482 - DNA, 75 bp, synthetic construct
  source 1..75: mol_type = other DNA
actgtcagatgcacagggtgcgtccctgcaactcaaacagatgtttgcccgccagagtatccaggcagcggacgc

SEQ ID NO: 717483 - DNA, 75 bp, synthetic construct
  source 1..75: mol_type = other DNA
tggcatggcgatgacctccgtgctgacgtcgcccttccgcaaaccgcagaccactgtaccgggaacgcagcccgg

SEQ ID NO: 717484 - DNA, 75 bp, synthetic construct
  source 1..75: mol_type = other DNA
tcggattttgaccgtcttcagggcagtattaccggcacgctgggacgtctcagcaacctttacgggatgctggca

SEQ ID NO: 717485 - DNA, 75 bp, synthetic construct
  source 1..75: mol_type = other DNA
ataaccggcaactccaggtggaacagattcaggaagaaactgcactgtatgaagccatgctggcaagagaaaagg

SEQ ID NO: 717486 - DNA, 75 bp, synthetic construct
  source 1..75: mol_type = other DNA
tgcgaacacttgagcagggggggcccgcagaggccggacgtcagcaggaaagcatttccgcagtcacaacaaata

SEQ ID NO: 717487 - DNA, 75 bp, synthetic construct
  source 1..75: mol_type = other DNA
gtgggcgatacagaatgcgaaggaaaccacctggggactggcgggcgtcatgcaggaatatacgtccagcctggg

SEQ ID NO: 717488 - DNA, 75 bp, synthetic construct
  source 1..75: mol_type = other DNA
gatcctaagacatttttggagtttttggtaaaaatatttaccctgggttatgtggattttagcaaacgctccaac

SEQ ID NO: 717489 - DNA, 75 bp, synthetic construct
  source 1..75: mol_type = other DNA
tgtcgttaagatttttgaagaaaagatggttaatgaattaaaaattagaacaagaatgatgaaaatcctccggaa

SEQ ID NO: 717490 - DNA, 75 bp, synthetic construct
  source 1..75: mol_type = other DNA
aaaccataaccgccatcgctggactgtcgaagaatgcagggcgatcaaggcgaagtatcagcagaaacttaaaga

SEQ ID NO: 717491 - DNA, 75 bp, synthetic construct
  source 1..75: mol_type = other DNA
aacagactcgccaccccaagaaatattaatggtgttccttttgacggaacgctggatatcaacatcacgtcagga

SEQ ID NO: 717492 - DNA, 75 bp, synthetic construct
  source 1..75: mol_type = other DNA
agcacagagctatcattcacccggaggcaatgaaatgtcatggaattacagcgcaccttccggttgtatgctttc

SEQ ID NO: 717493 - DNA, 75 bp, synthetic construct
  source 1..75: mol_type = other DNA
ttggtgcccagagttaccattcacccggaggtaatgaaatgtcctggagttatggcgcgccttccggttgtatgc

SEQ ID NO: 717494 - DNA, 75 bp, synthetic construct
  source 1..75: mol_type = other DNA
tgaaggttgacccgctgaaatgcgtgctgtgcggaagtcagatgcgttttacagggctgaagcggggataccgtc

SEQ ID NO: 717495 - DNA, 75 bp, synthetic construct
  source 1..75: mol_type = other DNA
gctgaagtgcgtgctgtgcgggagtcagatgcgttttacggggctgaagcggggctaccgtctggcagagctggt

SEQ ID NO: 717496 - DNA, 75 bp, synthetic construct
  source 1..75: mol_type = other DNA
ataaggcggcgaatgccctgccatcgaacggaacggctgttgcagcgaataaactcgccactccaaaaaatatta

SEQ ID NO: 717497 - DNA, 75 bp, synthetic construct
  source 1..75: mol_type = other DNA
aagtctcggtggttattcccgtttataacgagcaggaaagcttaccggaattaatcaggcgcaccaccacagcct

SEQ ID NO: 717498 - DNA, 75 bp, synthetic construct
  source 1..75: mol_type = other DNA
tattatatgctggcaaggtgcctgcattgtgcatgatgagtttaagactcaggcgttaatccgtttacaaaaaca

SEQ ID NO: 717499 - DNA, 75 bp, synthetic construct
  source 1..75: mol_type = other DNA
cacgaggttcatgttgatgaaaggctgcgagagagggcgctggtgccgctcaatcgtatgctggattttgcggct

SEQ ID NO: 717500 - DNA, 75 bp, synthetic construct
  source 1..75: mol_type = other DNA
cgcagatggccgcgttgtttatgccggtaacgcgctgcgcggctacggtaatctgattatcatcaaacataatga

SEQ ID NO: 717501 - DNA, 75 bp, synthetic construct
  source 1..75: mol_type = other DNA
agccggctggtcagccatcaggatggaaaatggcaagtcagccacggaccattcgaaagctacgatcatctcggt

SEQ ID NO: 717502 - DNA, 75 bp, synthetic construct
  source 1..75: mol_type = other DNA
agtgtgcgcagggattatatgtcggtatatggctatcctgtgccaaccacaccgtggctgaatacggctcccggt

SEQ ID NO: 717503 - DNA, 75 bp, synthetic construct
  source 1..75: mol_type = other DNA
cattttatgctggcagggtgcctgcattgtgcatgatgaatttaagactcaggcgttaacccgcttgcaagaaga

SEQ ID NO: 717504 - DNA, 75 bp, synthetic construct
  source 1..75: mol_type = other DNA
ttaatcaggcgcaccaccgcagcctgtgaattgctgggcaaagagtatgaaatactgctggttgatgacggcagt

SEQ ID NO: 717505 - DNA, 75 bp, synthetic construct
  source 1..75: mol_type = other DNA
tgaatatatcggcaggatctacacagatgtccgcgcccgcccccgttattttgttcagcaagttatccgtccctc

SEQ ID NO: 717506 - DNA, 75 bp, synthetic construct
  source 1..75: mol_type = other DNA
tattgcgatcggaggttttagcatcgcggtactactggtaattttgcgcctgacgttcggcccgcaatgggcggc

SEQ ID NO: 717507 - DNA, 75 bp, synthetic construct
  source 1..75: mol_type = other DNA
ctgcatggctctggccgacgagtggcaaagtgatcgaaacctttggtgcttccgaagggggcaataaagggatcg

SEQ ID NO: 717508 - DNA, 75 bp, synthetic construct
  source 1..75: mol_type = other DNA
tgtaacggtaccaacagcaagcacaaccgagccgactgtcagcagtacatcaaccagcacgccaatttccacctg

SEQ ID NO: 717509 - DNA, 75 bp, synthetic construct
  source 1..75: mol_type = other DNA
tggcgacttaattattaccctcgatgccgatctccagaatccgccagaggagatcccccgcctggtggcaaaagc

SEQ ID NO: 717510 - DNA, 75 bp, synthetic construct
  source 1..75: mol_type = other DNA
ggatattaacatcacgtcagggatgacgcagtcaaccgcagatggccggtatgtacagaatgtccagcttggggc

SEQ ID NO: 717511 - DNA, 75 bp, synthetic construct
  source 1..75: mol_type = other DNA
ctgaggtccgtcagcgggccgctcgtatggttatcgaaagccagaatggctatgactcgcagtgggcggccatca

SEQ ID NO: 717512 - DNA, 75 bp, synthetic construct
  source 1..75: mol_type = other DNA
gtgtgtcagaacagacgctcccacagtgtgatcagcaggtggataatgcggtcccgggttttgcgcagaagctgt

SEQ ID NO: 717513 - DNA, 75 bp, synthetic construct
  source 1..75: mol_type = other DNA
gttccattgctccaaagattggctgtacgccggagactctgcgtgtctggggtcttcgccagcatgagcgggata

SEQ ID NO: 717514 - DNA, 75 bp, synthetic construct
  source 1..75: mol_type = other DNA
gccacgccaacaataggtcatcttgcacgtgtgctgttacgcgaaagactgggcattgcaacaggtgaggcataa

SEQ ID NO: 717515 - DNA, 75 bp, synthetic construct
  source 1..75: mol_type = other DNA
ccagcgacacatcctgtcggcgtgagtgtgtcagaacagacgatcccacagtgtgaccagcaggtggataatgcg

SEQ ID NO: 717516 - DNA, 75 bp, synthetic construct
  source 1..75: mol_type = other DNA
gaatatgacccgcttatcgggtgctacattccgaccgatatcacgttcacaccggcactgtttgctgctctcgat

SEQ ID NO: 717517 - DNA, 75 bp, synthetic construct
  source 1..75: mol_type = other DNA
ccggcctgcaatgaagctgtttgaattaatgcagggttttgacgctgaagtgctgttacgtaatgacgaaggtac

SEQ ID NO: 717518 - DNA, 75 bp, synthetic construct
  source 1..75: mol_type = other DNA
actgtatgagcaggcaagatatctgacaatggttaactacctgacaaatacctcagtatggataggaggtgaagc

SEQ ID NO: 717519 - DNA, 75 bp, synthetic construct
  source 1..75: mol_type = other DNA
ttactgttagcaccctttttctgccgacaataattcaggcaaaaccgatttcgataaaagttgcctatgaaaata

SEQ ID NO: 717520 - DNA, 75 bp, synthetic construct
  source 1..75: mol_type = other DNA
aatttcagtgctgcaagggcaaaaactgtatgagcaggcaagatatctgacaatggttaactacctgacaaatac

SEQ ID NO: 717521 - DNA, 75 bp, synthetic construct
  source 1..75: mol_type = other DNA
cttgccgattatgaacccgatttggggattttgtttggaccgtatctgactgacgatccgcaaaaactgttcaaa

SEQ ID NO: 717522 - DNA, 75 bp, synthetic construct
  source 1..75: mol_type = other DNA
atgcgttactgggcagacctattaaataaaaaaagtaatggcgaaataacacttgcgctctatcccagctcccaa

SEQ ID NO: 717523 - DNA, 75 bp, synthetic construct
  source 1..75: mol_type = other DNA
tgacgttctttcctacacccaggcacagaaagaagcgatctaccgtcagttagatcaaacgacccaacgttttaa

SEQ ID NO: 717524 - DNA, 75 bp, synthetic construct
  source 1..75: mol_type = other DNA
cgttccggttggtgcgaccatcgacgacacgctgccgattgcagtcgaagcgccggaagcctgcccgcgttatct

SEQ ID NO: 717525 - DNA, 75 bp, synthetic construct
  source 1..75: mol_type = other DNA
acgctgctcaacgacaaaggctatcaggaagtgatcacttacagcttcgttgatccgaaagttcaacagatgatc

SEQ ID NO: 717526 - DNA, 75 bp, synthetic construct
  source 1..75: mol_type = other DNA
gattggcaccgacatccgtgaatacctgaaacttgatgacaacaccatcgaaatcagcgtgacaccaaaccgtgc

SEQ ID NO: 717527 - DNA, 75 bp, synthetic construct
  source 1..75: mol_type = other DNA
agaaatgtctgtattaatgccattcgggggaaaagtcggtataggaggatgtgtaataacggcgttatctatagc

SEQ ID NO: 717528 - DNA, 75 bp, synthetic construct
  source 1..75: mol_type = other DNA
gcgaaatcgaccgtcgtgtgaaggaacgcatgataatgtcgcgtaacaacaactacacacggctggccactgcct

SEQ ID NO: 717529 - DNA, 75 bp, synthetic construct
  source 1..75: mol_type = other DNA
cgtgtaccgtggtaagggtgttgcggaggggtataagagcctcgccataagcctgatcctgcaagataccagccg

SEQ ID NO: 717530 - DNA, 75 bp, synthetic construct
  source 1..75: mol_type = other DNA
tggctattaccgattacgcactgcaagctgccggaactgtagacgaattggttgcggcgttggaatccgcagaga

SEQ ID NO: 717531 - DNA, 75 bp, synthetic construct
  source 1..75: mol_type = other DNA
cattactgccacagctaggtttaggtgcagattacacctatagcaacggctaccgcgacgcgaacggcatcaact

SEQ ID NO: 717532 - DNA, 75 bp, synthetic construct
  source 1..75: mol_type = other DNA
ggtgatttcaaaattaaagcggcgaaactgcgtggcgaaccatctgaagggatgctgtgctccttctctgagctg

SEQ ID NO: 717533 - DNA, 75 bp, synthetic construct
  source 1..75: mol_type = other DNA
agcgaccattggtgctgttctgccgggtgatttcaaaattaaagcggcgaaactgcgtggcgaaccgtctgaagg

SEQ ID NO: 717534 - DNA, 75 bp, synthetic construct
  source 1..75: mol_type = other DNA
ttatgggtactcaccgtgaagctgacctgtcgctcaagcgcgtaaaaacgctgctcaacgacaaaggctatcagg

SEQ ID NO: 717535 - DNA, 75 bp, synthetic construct
  source 1..75: mol_type = other DNA
agcgtgaaaaaacgccagtggggaacccgggaggatttgacatgtgcgcagtggatctgggggcgggttgtaaac

SEQ ID NO: 717536 - DNA, 75 bp, synthetic construct
  source 1..75: mol_type = other DNA
ctgaaaacgctggggcttttgcgttgcgaaaagctcaataaatcaaagcgcgacatgaccaatttctacacgatc

SEQ ID NO: 717537 - DNA, 75 bp, synthetic construct
  source 1..75: mol_type = other DNA
aaatgacacaccccattggttcaaaacgacccaatgtcatcgggtcaaaatggcccgatgatcctacagagatta

SEQ ID NO: 717538 - DNA, 75 bp, synthetic construct
  source 1..75: mol_type = other DNA
ctggcaaacgtcagtaccaacggttttaagcgccagcgggccgtttttgaagatctgctttatcaaaccatccgc

SEQ ID NO: 717539 - DNA, 75 bp, synthetic construct
  source 1..75: mol_type = other DNA
gtaaaaaatatcatgagtccgtcaaagcttcgcgaaaaatgggatgaactggttatccgcctgggcgttcgtctg

SEQ ID NO: 717540 - DNA, 75 bp, synthetic construct
  source 1..75: mol_type = other DNA
gcgaaaagctcaataaatcgaagcgtgatatgactaatttttacacaatcaattacgatagcgagcttttagatg

SEQ ID NO: 717541 - DNA, 75 bp, synthetic construct
  source 1..75: mol_type = other DNA
caccgggattcttcctctctacaagtataaaagataaaggaaaaattgtcggtgttgtagtagtaaaaataagtc

SEQ ID NO: 717542 - DNA, 75 bp, synthetic construct
  source 1..75: mol_type = other DNA
tcctttgcatcaggcggcgcgggcctgggcaaaagcgaagggcattcgcttcctggctttcgaagagggctatct

SEQ ID NO: 717543 - DNA, 75 bp, synthetic construct
  source 1..75: mol_type = other DNA
attacgaccccaacagactgtattcatggatggtggtaccacggtaaaacaattgtccggcctgattgatatgcc

SEQ ID NO: 717544 - DNA, 75 bp, synthetic construct
  source 1..75: mol_type = other DNA
cagttaaaccgccagcagtcggcgattgagcagtatcagagcaatatcgactccgcgtcggcgggcttaagccag

SEQ ID NO: 717545 - DNA, 75 bp, synthetic construct
  source 1..75: mol_type = other DNA
caggagtcgattctcgatggcgtcaacaacagcctgctggcggtgcgcgacgacctgctggaagcggcgaacggc

SEQ ID NO: 717546 - DNA, 75 bp, synthetic construct
  source 1..75: mol_type = other DNA
cgtaattcgaacggtactctccacgccagtaatcatcctgaaggcggcgcggtgatgacattaacctggccagaa

SEQ ID NO: 717547 - DNA, 75 bp, synthetic construct
  source 1..75: mol_type = other DNA
gcgtggtcagcgtaacccaacaaggccaggcagctccggttcaggttgggcagctcaatctcaccacctttatga

SEQ ID NO: 717548 - DNA, 75 bp, synthetic construct
  source 1..75: mol_type = other DNA
ggttattcgtctggggcgttcgcctgtacagcgttgtgtaaaacatatttctgaaccggacaccgaaattccgcc

SEQ ID NO: 717549 - DNA, 75 bp, synthetic construct
  source 1..75: mol_type = other DNA
caacagagattactacagagaataaaaacactgaaccgccccgggaatcctggagactaaacttcctgagaaaga

SEQ ID NO: 717550 - DNA, 75 bp, synthetic construct
  source 1..75: mol_type = other DNA
atgctgcaactggtgattgtcgttgcactggtggtttacgtgatttatggattcgttgtggtgtggggtgtgtga

SEQ ID NO: 717551 - DNA, 75 bp, synthetic construct
  source 1..75: mol_type = other DNA
tgctgaaagaagccgaaaaacgcaacctgtcgctgttacaggcacgtttgagccaggacctggcgcgcgagcaaa

SEQ ID NO: 717552 - DNA, 75 bp, synthetic construct
  source 1..75: mol_type = other DNA
cataattcatcagaaataaaaaacggaattgaagtcagaaaaatacgaacagttaccaatgaaacgttaaacact

SEQ ID NO: 717553 - DNA, 75 bp, synthetic construct
  source 1..75: mol_type = other DNA
acgatcaactatgggagcgagcttttagatggtggcaaattgagcgaatccatcggttcaaaatgcgccgctcca

SEQ ID NO: 717554 - DNA, 75 bp, synthetic construct
  source 1..75: mol_type = other DNA
tccttcagagctttccggcggcgaacgtcaacgtgtggcgattgctcgtgcgctggtgaataacccgcgtctggt

SEQ ID NO: 717555 - DNA, 75 bp, synthetic construct
  source 1..75: mol_type = other DNA
cgctggtcaataacccgcgtctggtactggcggatgaacctaccggtaaccttgacgcacgtaacgccgacagca

SEQ ID NO: 717556 - DNA, 75 bp, synthetic construct
  source 1..75: mol_type = other DNA
caacagagattactacagagaataaaaacactttcgtccggaagcttcgcaaccggacccgcagacggctgaaca

SEQ ID NO: 717557 - DNA, 75 bp, synthetic construct
  source 1..75: mol_type = other DNA
tgatatctggagagaaaataagcttgaggtggttgctaaggtttttgacgatttcaaaaacgaatcgacgattgt

SEQ ID NO: 717558 - DNA, 75 bp, synthetic construct
  source 1..75: mol_type = other DNA
ccagaaattcaagtagttatatcaaaaaaactcttgatgcgattgtatcgcagacatttcagtcatatgaagtat

SEQ ID NO: 717559 - DNA, 75 bp, synthetic construct
  source 1..75: mol_type = other DNA
atacgccaacttccggcgatgtgatttttaacggtcagccgatgagcaaactgtcgtcggcggcaaaagcagaac

SEQ ID NO: 717560 - DNA, 75 bp, synthetic construct
  source 1..75: mol_type = other DNA
tgatcttgctggccgccgcgccctgcacggcaatggtgttcgtgtggagccgccttaccaacggcgacccgcttt

SEQ ID NO: 717561 - DNA, 75 bp, synthetic construct
  source 1..75: mol_type = other DNA
cctgctgctccgcttccgagcggcccagaaatgttctcagcggaatggttccgggaaaacttacccaagtacaaa

SEQ ID NO: 717562 - DNA, 75 bp, synthetic construct
  source 1..75: mol_type = other DNA
ggaacgagttttattaatattgatggtcaaacaggattggtagtgcccccttctaattcttacgcgctcagagaa

SEQ ID NO: 717563 - DNA, 75 bp, synthetic construct
  source 1..75: mol_type = other DNA
gcagcactggtttttgtgggatgttcagcgctgatggcgatggtctgctacctcttcgtagtcggcgacattaaa

SEQ ID NO: 717564 - DNA, 75 bp, synthetic construct
  source 1..75: mol_type = other DNA
tcattccagtttctatggacggcaaacctctcccgaacgggcttttcccccactacaagaccgatgaaggccatg

SEQ ID NO: 717565 - DNA, 75 bp, synthetic construct
  source 1..75: mol_type = other DNA
ctttggatttactgctccttgcagcgctcacgctaggggcatcacaccaggcttgggctcaatatgacacaagat

SEQ ID NO: 717566 - DNA, 75 bp, synthetic construct
  source 1..75: mol_type = other DNA
gctgccacgtttgcctcacaacaagttgatcgtgacgctggtaacgccaaaaacatgctactcaaaagcgtagcc

SEQ ID NO: 717567 - DNA, 75 bp, synthetic construct
  source 1..75: mol_type = other DNA
atgctttcaacacaatttaacagggataatcaatatcaagccatcaccaaaccatcactccttgccggttgcata

SEQ ID NO: 717568 - DNA, 75 bp, synthetic construct
  source 1..75: mol_type = other DNA
aagcagtgaaccactggcatgagccgaccgccgcgctgatgcgaccgttccgtgaactaccggactggcgtattg

SEQ ID NO: 717569 - DNA, 75 bp, synthetic construct
  source 1..75: mol_type = other DNA
gaccgcggagaattttggtgatgcactggaagatccgtcattcctcgcgatgctcgcagcgctggtcaatagcgg

SEQ ID NO: 717570 - DNA, 75 bp, synthetic construct
  source 1..75: mol_type = other DNA
gaagagtgcaggccatcaaggcggagtatcaacagaaacttaaaaaactgcgaaacagcagaagtgaggttgcat

SEQ ID NO: 717571 - DNA, 75 bp, synthetic construct
  source 1..75: mol_type = other DNA
atttacaaagcccactcaccgaagacggtaaaatccgcgcgcgaattgtcggcggctaccagaataacgactcat

SEQ ID NO: 717572 - DNA, 75 bp, synthetic construct
  source 1..75: mol_type = other DNA
cctgactgggcgtacaacgataaagagatcaacaaggtctttatgaccctgaagcagcggtttgctgatacctag

SEQ ID NO: 717573 - DNA, 75 bp, synthetic construct
  source 1..75: mol_type = other DNA
tattgagcaggtcatttatcagctaagtcagggctgcgcccgccggggaatcgcagccgatgttttcacttttag

SEQ ID NO: 717574 - DNA, 75 bp, synthetic construct
  source 1..75: mol_type = other DNA
taacctgtttgataccaaatatgcctacagtgaagggtttattgaagaaggtcgcaatttctgggctggtatcga

SEQ ID NO: 717575 - DNA, 75 bp, synthetic construct
  source 1..75: mol_type = other DNA
ccatgctgccgccggtcagttatgacctgaacgggaaatatatttccgcggagctgacagccgaggctaacgtca

SEQ ID NO: 717576 - DNA, 75 bp, synthetic construct
  source 1..75: mol_type = other DNA
gtggttggtgaaaacgcaaaagacttagtcaatatgatctttgctcagcaacccgtgcagcaggaggctttttat

SEQ ID NO: 717577 - DNA, 75 bp, synthetic construct
  source 1..75: mol_type = other DNA
caaccaccgacgtctattccgcctgcattaatcatctcacgccagataccgttttgcacggcgtaccagaaccat

SEQ ID NO: 717578 - DNA, 75 bp, synthetic construct
  source 1..75: mol_type = other DNA
gcagaatccaaactcgactgcgccattatttatgccggaaaccgggatattcaggacgaggtgcaggagatcctc

SEQ ID NO: 717579 - DNA, 75 bp, synthetic construct
  source 1..75: mol_type = other DNA
atatctcacaggccgtagaagacggtgcaaccgtgcgtatctactatgaaagccgtcttgccaaaattgccatca

SEQ ID NO: 717580 - DNA, 75 bp, synthetic construct
  source 1..75: mol_type = other DNA
tctgccgaagtagcactgcgccagcagggacgtaacagtaaagttcttgttaatgcgcaaaaaaccggagatcgt

SEQ ID NO: 717581 - DNA, 75 bp, synthetic construct
  source 1..75: mol_type = other DNA
gagcaatgtgatgtttaccggcatgctcaacgacgaagataagtacattctcttccagctctgccggggcgtggt

SEQ ID NO: 717582 - DNA, 75 bp, synthetic construct
  source 1..75: mol_type = other DNA
aagaagccctctccttttactctgatgcaggtggacgtggagatcctgctgaggttcaggaagaagccgtaacgc

SEQ ID NO: 717583 - DNA, 75 bp, synthetic construct
  source 1..75: mol_type = other DNA
caccacaccacaaaaaaagaacgtcaggttctggctaaccgtatgaaggatgacgacgacaagctgaaactggtg

SEQ ID NO: 717584 - DNA, 75 bp, synthetic construct
  source 1..75: mol_type = other DNA
cgtaagcaatttgctacgaaaggcgaagccattgcgtttgaaagcttcacaatggaagaagtgaataaaaaaccg

SEQ ID NO: 717585 - DNA, 75 bp, synthetic construct
  source 1..75: mol_type = other DNA
tcctataaatcattccttgccggatcgtgggcgtgtcacgtttccacgggccgccagtggggaggccgcagggtg

SEQ ID NO: 717586 - DNA, 75 bp, synthetic construct
  source 1..75: mol_type = other DNA
cgcgccctcccgttgaactggagcgcatcgaggaggcagggaacaagacggaaaaccataccgcgctatgggggt

SEQ ID NO: 717587 - DNA, 75 bp, synthetic construct
  source 1..75: mol_type = other DNA
gtttatccgtgggtgtgacgaactgaaacggcgcacaggggccacggtgctggtggttcaccattccggcaagga

SEQ ID NO: 717588 - DNA, 75 bp, synthetic construct
  source 1..75: mol_type = other DNA
cggcatcgtcgctatgcagcatatacggggcgagcggttcatataagtcgttccttgctggttcgtgggcgtgtc

SEQ ID NO: 717589 - DNA, 75 bp, synthetic construct
  source 1..75: mol_type = other DNA
atatgcgggagaactggcgcgaatacctggaacgggtgcgtgggaaagagccggcggaagaaaaaaaccaccagc

SEQ ID NO: 717590 - DNA, 75 bp, synthetic construct
  source 1..75: mol_type = other DNA
ttggtgaaggcggtataggcgttccgcgtcgtgtaaaagcctgggaggttgtgcacgatgagcaggtgaaaaatc

SEQ ID NO: 717591 - DNA, 75 bp, synthetic construct
  source 1..75: mol_type = other DNA
gaagcacttccggcgctggttgtccaagctggaaaaagacggcgtgatttgtatcgatggggatgatgtttaccc

SEQ ID NO: 717592 - DNA, 75 bp, synthetic construct
  source 1..75: mol_type = other DNA
acaggggcaacggtgctggtggttcaccattccggcaaggatgaaacaaagggggcgcgtggttccagtgcattt

SEQ ID NO: 717593 - DNA, 75 bp, synthetic construct
  source 1..75: mol_type = other DNA
tattctggatacgctggcgcgttgctttggtgggaatgatgaaaatgattcccgtgatatggggcgtttatccgt

SEQ ID NO: 717594 - DNA, 75 bp, synthetic construct
  source 1..75: mol_type = other DNA
gatgaagcacttccggcgctggctgtacaagctggaaaatgatggcgtaatcgttattgatggtgatgacgtgcg

SEQ ID NO: 717595 - DNA, 75 bp, synthetic construct
  source 1..75: mol_type = other DNA
acggcttagggaggcatgggaacgcggggaaagcctggtcatgaaaaaaattccccagcgaaaaaccacgctacc

SEQ ID NO: 717596 - DNA, 75 bp, synthetic construct
  source 1..75: mol_type = other DNA
ttatattccgaccgacatcacgttcacaccggcactgtttgccgccctcgatatttccgaagaggcggtggcctc

SEQ ID NO: 717597 - DNA, 75 bp, synthetic construct
  source 1..75: mol_type = other DNA
gatgtggtgctacattttactgcgaaaaactggctgctactggttgagtctgtcaccagtcatggaccggttgat

SEQ ID NO: 717598 - DNA, 75 bp, synthetic construct
  source 1..75: mol_type = other DNA
ttaatgccattgcgcacaagctggcggcggcgggtgtaactgatgcgaattattaccccgaagggatgcacagcc

SEQ ID NO: 717599 - DNA, 75 bp, synthetic construct
  source 1..75: mol_type = other DNA
tccaaaacggaagaagctcgtacacacctcatcgatgtctttgctgaaaagggcgacattcttcgtaaccagctg

SEQ ID NO: 717600 - DNA, 75 bp, synthetic construct
  source 1..75: mol_type = other DNA
aggttgaaaacaatttcccgctagatatccgaaacttctgtaagtgggttaatgaatacttagatcgcactgggg

SEQ ID NO: 717601 - DNA, 75 bp, synthetic construct
  source 1..75: mol_type = other DNA
ggcagccaagggacttttaaaggaagagtttccccggggacaacactgaatacaaatcaagatatgaacaaaact

SEQ ID NO: 717602 - DNA, 75 bp, synthetic construct
  source 1..75: mol_type = other DNA
gcgctattgcgtccggctgtacaaagcaagccatatcagaccatcaaatattaatgccatcgcgcaaaaactggc

SEQ ID NO: 717603 - DNA, 75 bp, synthetic construct
  source 1..75: mol_type = other DNA
ttccggcggtatcgctgtgcagcatatacggggcgagcggttcatataaatcgttccttgcgggttcgtgggcgt

SEQ ID NO: 717604 - DNA, 75 bp, synthetic construct
  source 1..75: mol_type = other DNA
aaatcaaccgtaacaagcaacaggcagtcgtgacagccagcaaaccaaaactggacctgacaaacacagactgga

SEQ ID NO: 717605 - DNA, 75 bp, synthetic construct
  source 1..75: mol_type = other DNA
cgaaatcaaccgtaacaagcaacaggctggcgtgacagccggaaaatcaaaactcgacctgacaaacactgactg

SEQ ID NO: 717606 - DNA, 75 bp, synthetic construct
  source 1..75: mol_type = other DNA
agaagttgacgcgtgatattaacggcgttgttaaagctgaacagaaagacaatgacagtgtgtatgtggaacttg

SEQ ID NO: 717607 - DNA, 75 bp, synthetic construct
  source 1..75: mol_type = other DNA
gccgcgcccacctgttgaactggagcgcatcgaggaagccgggaacaagacggagaatcatgccgcgctatgggg

SEQ ID NO: 717608 - DNA, 75 bp, synthetic construct
  source 1..75: mol_type = other DNA
cgatatcaagcgtatcgagttgaaacctgttgcggggcaataagatggcgacacaatccagtcctgttattactg

SEQ ID NO: 717609 - DNA, 75 bp, synthetic construct
  source 1..75: mol_type = other DNA
ggtttcctaatgcttgataaggttacttttttacctggcaaacctttaccgcagaatcctatctgtgtgattgat

SEQ ID NO: 717610 - DNA, 75 bp, synthetic construct
  source 1..75: mol_type = other DNA
tatgctgctcggcctcatttggggcatgaggttaataatcctgaagagttgtttggtgctgtgcagtatgtatta

SEQ ID NO: 717611 - DNA, 75 bp, synthetic construct
  source 1..75: mol_type = other DNA
ctccaccactcaaccacactgaacatcaaaggagaaagctaccggttaaaggaaaaacgcaaagcgggagtgctg

SEQ ID NO: 717612 - DNA, 75 bp, synthetic construct
  source 1..75: mol_type = other DNA
ggttttatcggcggtgtgttggggggggattatttccgactggctgatgcgtcgcacaggttcactgaacattgc

SEQ ID NO: 717613 - DNA, 75 bp, synthetic construct
  source 1..75: mol_type = other DNA
gaaagagttcactatgctgcgggagtttaaccacccttccagggttaactcatccattatgttcattcctgcgtc

SEQ ID NO: 717614 - DNA, 75 bp, synthetic construct
  source 1..75: mol_type = other DNA
ggatcctgctgccttaacaccggatgccgcgcagtcagtaagcaggtgtcttctgcgcttatcagaggacggctg

SEQ ID NO: 717615 - DNA, 75 bp, synthetic construct
  source 1..75: mol_type = other DNA
gtgatccccatcccttcgctccagacccattacagatctttcatcactactacgaatgggtccgcccctgtttcc

SEQ ID NO: 717616 - DNA, 75 bp, synthetic construct
  source 1..75: mol_type = other DNA
agttatccaagcgtatggattcaacacaaaactagccctagctgagcatcttgatatagcaagcagcagtctggc

SEQ ID NO: 717617 - DNA, 75 bp, synthetic construct
  source 1..75: mol_type = other DNA
agttagcggtgttggtatggcatttgattgcggaattgacgacataaaaatcataggccgcgttgttctgacgat

SEQ ID NO: 717618 - DNA, 75 bp, synthetic construct
  source 1..75: mol_type = other DNA
gattgttgatggccaactctatgatgctggcatgttaatgcttgataaagtcacattcctgccaggcaagccatt

SEQ ID NO: 717619 - DNA, 75 bp, synthetic construct
  source 1..75: mol_type = other DNA
gatgtgcaagttccagaaaataataatgtaactttaaaaagaatattgtatgtgcctacatggggcgatttatcc

SEQ ID NO: 717620 - DNA, 75 bp, synthetic construct
  source 1..75: mol_type = other DNA
gcaacggatccgcgaacaggcagagcgcggggaaatacttactgacgagcaatacagccagcgaaaaaccacgct

SEQ ID NO: 717621 - DNA, 75 bp, synthetic construct
  source 1..75: mol_type = other DNA
accggcagaactggagcgcatcgaggaggcagggaacaagacggaaaaccataccgcgctatgggggtgcatccg

SEQ ID NO: 717622 - DNA, 75 bp, synthetic construct
  source 1..75: mol_type = other DNA
ggggaaagcctggtcatgaatggcggaaagcgaaaaatcacacttcccatctcatggggttctgagggattcgac

SEQ ID NO: 717623 - DNA, 75 bp, synthetic construct
  source 1..75: mol_type = other DNA
ttccggcgctggctgtacaagctggaaggtgacggcgtaatcactattgacggtgatgacgtgcgcccactgtaa

SEQ ID NO: 717624 - DNA, 75 bp, synthetic construct
  source 1..75: mol_type = other DNA
cgatttgcgcgaggttgagcttttcaaggatgaaggcggggagttaatcacgtcgttggtgctggaggataagcc

SEQ ID NO: 717625 - DNA, 75 bp, synthetic construct
  source 1..75: mol_type = other DNA
ccgtccgccggttgaactggagcgcatcgaggaagctgggaacaagacggagaatcacgccgcactatggggttg

SEQ ID NO: 717626 - DNA, 75 bp, synthetic construct
  source 1..75: mol_type = other DNA
tcctgaaaaagctgcaagaaataacagggaattacagcctcgttttccctggccggaatgacgtcagtaaaccaa

SEQ ID NO: 717627 - DNA, 75 bp, synthetic construct
  source 1..75: mol_type = other DNA
ccagaaaagcagataagattgctttgcagttcgcgcatgagaacagctttgagtctgtggccagagaatggcact

SEQ ID NO: 717628 - DNA, 75 bp, synthetic construct
  source 1..75: mol_type = other DNA
acaaggctttaattccgcctggattgaaatgcagttagctcatgtggataaaaattccatcaggggtacctataa

SEQ ID NO: 717629 - DNA, 75 bp, synthetic construct
  source 1..75: mol_type = other DNA
atactatgtcaaccattttgcacgaaaagggatttgacagtgtatggattgaaatgcaattagctcacttagata

SEQ ID NO: 717630 - DNA, 75 bp, synthetic construct
  source 1..75: mol_type = other DNA
ctattcgaggcacatataatcatgctatatacttgaaaaataggcgaataatgctacagtggtattctgataaat

SEQ ID NO: 717631 - DNA, 75 bp, synthetic construct
  source 1..75: mol_type = other DNA
acatttgaacaagatgtattcccgttcattggtaaacgccctatcagtgaaatcaaaccgttagaactacttgaa

SEQ ID NO: 717632 - DNA, 75 bp, synthetic construct
  source 1..75: mol_type = other DNA
agtgaactggcggtcgatttagtcgagcttctgcgcgaggaaccgctggaaaaactggcaattcgcggcgataaa

SEQ ID NO: 717633 - DNA, 75 bp, synthetic construct
  source 1..75: mol_type = other DNA
gcactgacgtttctaaccccgccatgcatttataccatttataaggggctttctttcactaaggataaaagatga

SEQ ID NO: 717634 - DNA, 75 bp, synthetic construct
  source 1..75: mol_type = other DNA
ctttctggcatcggcgtcgatctgatttatggtgatgtgattgccgatgcccaaccgctggatttgctggtgaat

SEQ ID NO: 717635 - DNA, 75 bp, synthetic construct
  source 1..75: mol_type = other DNA
cagtcgcgccattgcttctcaggcacgtaccctgcaggcgcatgagcgtcgtatgaacagtcagcagcgtcagat

SEQ ID NO: 717636 - DNA, 75 bp, synthetic construct
  source 1..75: mol_type = other DNA
ggatatcatcatctctaacgatccgcgcggcgaattgatgagcctgcttcaggccgcgccggacggcgtgatccg

SEQ ID NO: 717637 - DNA, 75 bp, synthetic construct
  source 1..75: mol_type = other DNA
cggctgggatttaccttaaccgacgttcccgacagccatctgtgctgcggttcggcgggaacttatgcgttaacg

SEQ ID NO: 717638 - DNA, 75 bp, synthetic construct
  source 1..75: mol_type = other DNA
atgttgcacaggagcatatccgcacggccggagagcgcacgttcttccggcgtttaaaagaggggctgaccggcg

SEQ ID NO: 717639 - DNA, 75 bp, synthetic construct
  source 1..75: mol_type = other DNA
ccaccgtgttgacctggttcagcgggcacagttacatcttgagcagatattctcatggtggagtgccgggcgata

SEQ ID NO: 717640 - DNA, 75 bp, synthetic construct
  source 1..75: mol_type = other DNA
atactgccaggctggcgaattattcggctgacacgcgggagcagttactcaccctggccgatcaggttcaccaga

SEQ ID NO: 717641 - DNA, 75 bp, synthetic construct
  source 1..75: mol_type = other DNA
ccggcacttagccatgctcttgaccgacgggtattccacgaatttttccagcaggccgcaaaagcggttgccagt

SEQ ID NO: 717642 - DNA, 75 bp, synthetic construct
  source 1..75: mol_type = other DNA
accctggccgatcaggttcaccagaaactgaatcatcttgaagaaaaactccaccgtgttgaccaggttcagcgg

SEQ ID NO: 717643 - DNA, 75 bp, synthetic construct
  source 1..75: mol_type = other DNA
tcggcaacattcattccacaattgatgctgttcaccaccatttgcagcacggtagtgatgatccagctaaccggg

SEQ ID NO: 717644 - DNA, 75 bp, synthetic construct
  source 1..75: mol_type = other DNA
gtggggcaggagaaacccaggcctgcggcagcggcgcgtgtgcggcggtggcggtagggattcagcaaggtttgc

SEQ ID NO: 717645 - DNA, 75 bp, synthetic construct
  source 1..75: mol_type = other DNA
gcgtcttttggcaatgaataccgcaatttgcaggtggttggatactggcgcaagacggcacttttaaaaacgaac

SEQ ID NO: 717646 - DNA, 75 bp, synthetic construct
  source 1..75: mol_type = other DNA
atgcctgagataactccaaatgttgtaattgggatgccttctcaactcttcactatggcgcgttcttttaaagcc

SEQ ID NO: 717647 - DNA, 75 bp, synthetic construct
  source 1..75: mol_type = other DNA
ttttgttgactcattatctcagtcaatagactgggccgcgtggcaagctgcccttaacacaggaaaggttattta

SEQ ID NO: 717648 - DNA, 75 bp, synthetic construct
  source 1..75: mol_type = other DNA
ctcgttcggcgcggaacatgatgttcaatggtcgggtgatacgaaattaaatgatgaattcataaaacgctgggg

SEQ ID NO: 717649 - DNA, 75 bp, synthetic construct
  source 1..75: mol_type = other DNA
gtaaaattgacactgacccggtaaatcctgaaaaccagattcaagtttatgtagagaacgaagatggctctcacg

SEQ ID NO: 717650 - DNA, 75 bp, synthetic construct
  source 1..75: mol_type = other DNA
ccgtcaccaataacagcaatggcgtttctgtcgattatgaaacagagacgccgatgactttgctggtgccagaag

SEQ ID NO: 717651 - DNA, 75 bp, synthetic construct
  source 1..75: mol_type = other DNA
tttttcacccttcaatcccgccaatgcatgcagtggttaacaatcacaatagaaatattgattattggacggtaa

SEQ ID NO: 717652 - DNA, 75 bp, synthetic construct
  source 1..75: mol_type = other DNA
actaccgcatttttaatgccgatggcagtgaagtggcacagtgcggtaacggtgcgcgttgctttgcccgctttg

SEQ ID NO: 717653 - DNA, 75 bp, synthetic construct
  source 1..75: mol_type = other DNA
cctgtcgcactgggcgtggtatgcgcgtatggtgcgaagcctggtaatttcactgcgtcagcgcgagtttgtgct

SEQ ID NO: 717654 - DNA, 75 bp, synthetic construct
  source 1..75: mol_type = other DNA
cccgacgtcgattctgtcgttctttatggtcggcgtgcttggcaccgggttgaccaacgtaattatcgctatcgc

SEQ ID NO: 717655 - DNA, 75 bp, synthetic construct
  source 1..75: mol_type = other DNA
gtgatgattaacgacgcgcgtcagtatatctggacccagccgctgcaaatgttctggccgggctggcgctgttta

SEQ ID NO: 717656 - DNA, 75 bp, synthetic construct
  source 1..75: mol_type = other DNA
aaattacgcgattacccgggtaaacgacagggtcagctcactggtcagtgatactgccaggctggcgcattattc

SEQ ID NO: 717657 - DNA, 75 bp, synthetic construct
  source 1..75: mol_type = other DNA
gttacgggctgtacagcgttccgccggtgatggagagtgtggcctctctgtacgaccgcctgctggaccagctgc

SEQ ID NO: 717658 - DNA, 75 bp, synthetic construct
  source 1..75: mol_type = other DNA
agcggtacttatcgataccgctgggcgctatgcccgccacgatgatggcggcgaaacgaacgcgacacagcgtaa

SEQ ID NO: 717659 - DNA, 75 bp, synthetic construct
  source 1..75: mol_type = other DNA
tggaggtagagcaacagtacgactgaacacactggactggcttggtggtcagagccgggagcaggcagataacga

SEQ ID NO: 717660 - DNA, 75 bp, synthetic construct
  source 1..75: mol_type = other DNA
gaaggcaacatgaccttacaggggccggacctgacgccgtttcaggaggcgaaacagatccgcagcgtgtttttt

SEQ ID NO: 717661 - DNA, 75 bp, synthetic construct
  source 1..75: mol_type = other DNA
gacgctgaacgtggcggatctgactgcgcagtcccccgcggaacggctggccgcctgtgcggccctgcgtgcgcg

SEQ ID NO: 717662 - DNA, 75 bp, synthetic construct
  source 1..75: mol_type = other DNA
ggtgatggagagtgtggcctctctgtacgaccgcctgctggaccagctgctgttgccgccgctggtgaaacgcat

SEQ ID NO: 717663 - DNA, 75 bp, synthetic construct
  source 1..75: mol_type = other DNA
aaaacgaaatccgcaatattgatgttgaattcaccaccatcaataagcagctttcaaccatcattttcgacgaga

SEQ ID NO: 717664 - DNA, 75 bp, synthetic construct
  source 1..75: mol_type = other DNA
gaacagtttctctaaactgaaattactgcgcctgagtactggggacgtgaaccgtgaaactcacgctctattgac

SEQ ID NO: 717665 - DNA, 75 bp, synthetic construct
  source 1..75: mol_type = other DNA
aacgccgaacaggtcgacaaagcgctggaacagctgcgtaaaacgctcatggatgccattaacgcaggcgaacgc

SEQ ID NO: 717666 - DNA, 75 bp, synthetic construct
  source 1..75: mol_type = other DNA
accgcgagcgctactaccgggtctcatttcgcgaagtccccactcgtaaccagacaagacgtagcccaaccggcg

SEQ ID NO: 717667 - DNA, 75 bp, synthetic construct
  source 1..75: mol_type = other DNA
acttgccatcagactggccggacattatctcatgcaggtgcataccctccggcttccacgtcacctctccctgct

SEQ ID NO: 717668 - DNA, 75 bp, synthetic construct
  source 1..75: mol_type = other DNA
gcgtttcgtttatggcagggcgatgctgctattgcgcttgcctgtgctctgttctggtttctcctgttatctctc

SEQ ID NO: 717669 - DNA, 75 bp, synthetic construct
  source 1..75: mol_type = other DNA
ccggctttggcgggcgttgcgtctggatgaacaactgctgcgccgtttcttgcatccgcgcggggaagacgtacc

SEQ ID NO: 717670 - DNA, 75 bp, synthetic construct
  source 1..75: mol_type = other DNA
taacgaacgggaagagccggcgctggttgaacatattcgtcaggtatttgaagagtggaagcaagagctgaacgt

SEQ ID NO: 717671 - DNA, 75 bp, synthetic construct
  source 1..75: mol_type = other DNA
acgccatgcgcgaggtagaaacctggatcagcatgaatatcgaatacaataaaccggtgtatttacgcgatattc

SEQ ID NO: 717672 - DNA, 75 bp, synthetic construct
  source 1..75: mol_type = other DNA
ctccgtgttcagttggaatcactacttgcagaagcagacgtctgggcgattggcgagcgcttaccgaaaaaatcc

SEQ ID NO: 717673 - DNA, 75 bp, synthetic construct
  source 1..75: mol_type = other DNA
ccctggtggtcgtcttgatatcgcctggaaaggtccgggtcatccgttatatatgacgggtccggcagtacatgt

SEQ ID NO: 717674 - DNA, 75 bp, synthetic construct
  source 1..75: mol_type = other DNA
ggccggagagcgcacgttcttccggcgtttaaaagagggactgaccggcgaaggcgctgcacggcagaatgccat

SEQ ID NO: 717675 - DNA, 75 bp, synthetic construct
  source 1..75: mol_type = other DNA
accgacatcacgttcacgccggcactgtttgcctcactcgatatctcagaagaggcagtggcttccgcacgccgc

SEQ ID NO: 717676 - DNA, 75 bp, synthetic construct
  source 1..75: mol_type = other DNA
aggaagtcagtgcggacgattttaaccgtatctttgccagcggcggcgtgctggatgccttctggacgaagcaac

SEQ ID NO: 717677 - DNA, 75 bp, synthetic construct
  source 1..75: mol_type = other DNA
ttgccccgctggcggacactgccagtaacccgtggcgctacaagccgaccgaaggcaacatgacattgctcgggc

SEQ ID NO: 717678 - DNA, 75 bp, synthetic construct
  source 1..75: mol_type = other DNA
agtctccgtcccatactctgccggatggcaaccgaagctattttctccatgacctgctgactaaatttatcttcc

SEQ ID NO: 717679 - DNA, 75 bp, synthetic construct
  source 1..75: mol_type = other DNA
cctggagcgatattgatttagtcgtccagactgaaaagttcctcaaagataacgccgggcaacgtccggaacagg

SEQ ID NO: 717680 - DNA, 75 bp, synthetic construct
  source 1..75: mol_type = other DNA
attttggcggaacagcaagagacaaaagcgctgcaaatggatgcagataaaaagattaacctgtggatcgacgag

SEQ ID NO: 717681 - DNA, 75 bp, synthetic construct
  source 1..75: mol_type = other DNA
aatctctaaaacgaaatataaacggggtagtcaaagcagagcaaaccgatgatgccagcgcgtacatcgagttag

SEQ ID NO: 717682 - DNA, 75 bp, synthetic construct
  source 1..75: mol_type = other DNA
ccaaatatatgggctattaccagcttaaaatcggctatcacctcggtgatgcggtactgagcgcgaaagggcagt

SEQ ID NO: 717683 - DNA, 75 bp, synthetic construct
  source 1..75: mol_type = other DNA
accgctgggccgatggcctgctcgtaaagctctccccggcaagccgaacccaactggcgcgggaaatcgcccgca

SEQ ID NO: 717684 - DNA, 75 bp, synthetic construct
  source 1..75: mol_type = other DNA
cgcgtgctggtgctggcacacgttaaagaactggtggcgcaaaaccatgcaaaatatcaggcgctggggctggaa

SEQ ID NO: 717685 - DNA, 75 bp, synthetic construct
  source 1..75: mol_type = other DNA
agcatcggtaacctgacttctcacagcgtgctgctggggatcctcggcttcttcatcattgctattctggcctcg

SEQ ID NO: 717686 - DNA, 75 bp, synthetic construct
  source 1..75: mol_type = other DNA
cgtgtttaaactgcgcgaacatggaacgacggctcggaccgaagtgatcgccggttttaccaccttcctgacgat

SEQ ID NO: 717687 - DNA, 75 bp, synthetic construct
  source 1..75: mol_type = other DNA
ttgaaacgattgataaaattaacaaagaaaacatcaaagaaataaaactaaaaaatgagacaacatatgtttctc

SEQ ID NO: 717688 - DNA, 75 bp, synthetic construct
  source 1..75: mol_type = other DNA
actacttcctgtcgcggtgtgacgaggatagcggtgacacaatctctaatttaaaattacaaaagcttgtttact

SEQ ID NO: 717689 - DNA, 75 bp, synthetic construct
  source 1..75: mol_type = other DNA
gaaatggtatctggtcgcacaccctggcgtgagtattccgacgccggtgatttttaaagatcctgaactcccgcg

SEQ ID NO: 717690 - DNA, 75 bp, synthetic construct
  source 1..75: mol_type = other DNA
tagcaggaacaacaacatcatcagtaacagacaaatgacaggtctgaaaagacagaagcccccatcagaacgtcc

SEQ ID NO: 717691 - DNA, 75 bp, synthetic construct
  source 1..75: mol_type = other DNA
gtgcaggtaaaagcctggtgatagcggaactggcgcggctggcgcgtggtcgcgtgctggtgctggcacacgtta

SEQ ID NO: 717692 - DNA, 75 bp, synthetic construct
  source 1..75: mol_type = other DNA
agtcggtacaccaaaaggcaaaagtgacaacgttccggttcaggttttctgcccagcctgtggtttcgccaacac

SEQ ID NO: 717693 - DNA, 75 bp, synthetic construct
  source 1..75: mol_type = other DNA
ggtgtttggcagtgtgcagtcggtcgcacgcaatctcgatgcctttcagggtgaattttcgctgttgattgtcga

SEQ ID NO: 717694 - DNA, 75 bp, synthetic construct
  source 1..75: mol_type = other DNA
tgtggatttagctggttcattcaacctcggactggctggcgtgattttctctttcatgctggttaacttgtttga

SEQ ID NO: 717695 - DNA, 75 bp, synthetic construct
  source 1..75: mol_type = other DNA
tggcaaaactgctgcggtaaaagaagcggcgtttgcggtcgccacactcagcgagccgcttcagtgggaaggcgt

SEQ ID NO: 717696 - DNA, 75 bp, synthetic construct
  source 1..75: mol_type = other DNA
atgctgaaatgtgcaaagacagcatgtgcaaagatgccatgaacaaggatcatatgaggaaaggcaatatggaca

SEQ ID NO: 717697 - DNA, 75 bp, synthetic construct
  source 1..75: mol_type = other DNA
gaactggaaaactgtctgaaagcgcttcgggcaggtgacacactggttgtatgggcgctagaccgattaggcggc

SEQ ID NO: 717698 - DNA, 75 bp, synthetic construct
  source 1..75: mol_type = other DNA
acgtttgattttcagctgacgctcttgccggacaatcgccaccgcctccatgtcaatattgacctgctgattatg

SEQ ID NO: 717699 - DNA, 75 bp, synthetic construct
  source 1..75: mol_type = other DNA
cgcggagctaggattaagttacccgatcaccaaacatgtacggctttatacccagctttacagcggttacggcga

SEQ ID NO: 717700 - DNA, 75 bp, synthetic construct
  source 1..75: mol_type = other DNA
tgcctgtatatatgctgccgctggcggtacatgcacaagaggcaacggtgaaagaggtgcatgatgcgcctgttg

SEQ ID NO: 717701 - DNA, 75 bp, synthetic construct
  source 1..75: mol_type = other DNA
agttctgcgaaaaactgatggaaaaggcggtgggcttcacctcccgttttgatttcgccattcatgtggcacatg

SEQ ID NO: 717702 - DNA, 75 bp, synthetic construct
  source 1..75: mol_type = other DNA
cacagagggtggcggcttatgcttctgaaatcaaccggctgaaggcgctggttgcgaaactgcaacgtatgcatt

SEQ ID NO: 717703 - DNA, 75 bp, synthetic construct
  source 1..75: mol_type = other DNA
cgagcgtaatgactgtcgtgggtcatgtagatttagccgggtcgtttaacctcggcctggcaggggtgattttct

SEQ ID NO: 717704 - DNA, 75 bp, synthetic construct
  source 1..75: mol_type = other DNA
cagagcaggtatcgaggggcggtaataagcgcctgaaaacaggtacaccagagttggaaaactgtctgaaagcgc

SEQ ID NO: 717705 - DNA, 75 bp, synthetic construct
  source 1..75: mol_type = other DNA
aaagctggctgcgaaaaatggtatgcagagcaggtatcgaggggcggtaataagcgcctgaaaacaggtacacca

SEQ ID NO: 717706 - DNA, 75 bp, synthetic construct
  source 1..75: mol_type = other DNA
atgaaaataggctacgccagaaagtcaaccaaagagcaggacacatcccttgagtatcaaatcgaggctttacaa

SEQ ID NO: 717707 - DNA, 75 bp, synthetic construct
  source 1..75: mol_type = other DNA
gcactgttttatcaatcgcctgttgccatgcactggctgcaggtaattctcgaatagcgctatccaaccttcata

SEQ ID NO: 717708 - DNA, 75 bp, synthetic construct
  source 1..75: mol_type = other DNA
tctgtccctgtttactgccagccaatgaccgaaacagatacccaacccaaaggtaatcacggtccatatgaacga

SEQ ID NO: 717709 - DNA, 75 bp, synthetic construct
  source 1..75: mol_type = other DNA
ctgcgattgcgttgaattccttgcgtctgtccctgtttactgccagccaatgaccgaaacagatacccaacccaa

SEQ ID NO: 717710 - DNA, 75 bp, synthetic construct
  source 1..75: mol_type = other DNA
accagaaggttttcagcccctttaataaaaatctcgggggagtgaaattcgtaaagaccatcaacagaataacta

SEQ ID NO: 717711 - DNA, 75 bp, synthetic construct
  source 1..75: mol_type = other DNA
ggcgaagtgttggtgctcaactttgaagacggttgctcgaccactaacattatcaagaagatccaacaggataaa

SEQ ID NO: 717712 - DNA, 75 bp, synthetic construct
  source 1..75: mol_type = other DNA
gtggaactgatgtttggccccttgaaaaaggggtcaagcaggatgaaaagagctaagcatccgagaatactcgat

SEQ ID NO: 717713 - DNA, 75 bp, synthetic construct
  source 1..75: mol_type = other DNA
agaccagtgctcacgataaaactgcctcgttcctttacgccctcggctggacgcaacactccatcggtgcgcaga

SEQ ID NO: 717714 - DNA, 75 bp, synthetic construct
  source 1..75: mol_type = other DNA
ctggtcgccagtaagtcgcggttagctaaacttcaaatcgtgtgtaatggacttggtgaccctattgcatcccgc

SEQ ID NO: 717715 - DNA, 75 bp, synthetic construct
  source 1..75: mol_type = other DNA
ctgatatcaagatgaccatggtatattcacacttttcaccagatcatcttgaagacgcagtttataaaaacccac

SEQ ID NO: 717716 - DNA, 75 bp, synthetic construct
  source 1..75: mol_type = other DNA
aattgctgagagtgaattggcgttcctgaccccggaagaaattaaacgtctgctggatgcctgtgctgattctca

SEQ ID NO: 717717 - DNA, 75 bp, synthetic construct
  source 1..75: mol_type = other DNA
acttccgggctgtgttcaatgagctaaaccgcctcggagaatggaagggtgaaaacccactgaaaaacatgcgcc

SEQ ID NO: 717718 - DNA, 75 bp, synthetic construct
  source 1..75: mol_type = other DNA
tcaggctctctatgacgaactccccaaaaacagagggaagttattcacgccatgcagaaaggcttttgaacgagc

SEQ ID NO: 717719 - DNA, 75 bp, synthetic construct
  source 1..75: mol_type = other DNA
atgaccatcagaaaacagccgaacggaaaatggttgtgtgagtgctatcccaatggacgcaatggcaagcgcgtg

SEQ ID NO: 717720 - DNA, 75 bp, synthetic construct
  source 1..75: mol_type = other DNA
ggtcaataccattgaagaacgtcctggcggcgcagccaacgtggcgatgaacatcgcttctctcggtgctaacgc

SEQ ID NO: 717721 - DNA, 75 bp, synthetic construct
  source 1..75: mol_type = other DNA
aaatactagcaaattcaaatgaaataaaaacccccgactggctattgaacgttgcacgttttttccacggggata

SEQ ID NO: 717722 - DNA, 75 bp, synthetic construct
  source 1..75: mol_type = other DNA
cccacagttaatggagtcttcagtatcgggaggcgctttgaatcttaacattacagaaaaaaaagctattgagga

SEQ ID NO: 717723 - DNA, 75 bp, synthetic construct
  source 1..75: mol_type = other DNA
tatctaagccggtatttaagcctgtgagaaatattggtgatggctcatacgttgttgagtttcattataatggcc

SEQ ID NO: 717724 - DNA, 75 bp, synthetic construct
  source 1..75: mol_type = other DNA
ggttcgatttcaaaatttaccggaagcgtaaaccgacgcgcgacgagcgacacgctatccgggactttttaatca

SEQ ID NO: 717725 - DNA, 75 bp, synthetic construct
  source 1..75: mol_type = other DNA
cggaagcggaaaccaacgcgcgacgagcgccacgctatccgcgattttctaatcagcattgaccgctgggaggca

SEQ ID NO: 717726 - DNA, 75 bp, synthetic construct
  source 1..75: mol_type = other DNA
ggttcgattttaaaatttaccggaagcgcaaaccaacacgcgacgagcgccacgctatccgggactttttaatca

SEQ ID NO: 717727 - DNA, 75 bp, synthetic construct
  source 1..75: mol_type = other DNA
gaatcagctaaaagttaaccatgagattctctatcatcttcaactaagccctgccgaacgtgcatctatccagca

SEQ ID NO: 717728 - DNA, 75 bp, synthetic construct
  source 1..75: mol_type = other DNA
tacctgctgccgatattcgccagagaatgtcagctttacaggcaaaattaaaattaattctccctctatcagaag

SEQ ID NO: 717729 - DNA, 75 bp, synthetic construct
  source 1..75: mol_type = other DNA
ggaaccacagtaccaccagcttgagttcgacactcgcctgtggttgacgcaactgtcgcttggccggggcaaaat

SEQ ID NO: 717730 - DNA, 75 bp, synthetic construct
  source 1..75: mol_type = other DNA
agaattatgcgtggtccggcagtgcaaacagccccatgtcagcaatgcagttagcatggctgacatatttcggtt

SEQ ID NO: 717731 - DNA, 75 bp, synthetic construct
  source 1..75: mol_type = other DNA
cgaaaataccaggctggaagcattgcagcagcttgatgacgaaatgcctggattcgccagaggagatgccggggt

SEQ ID NO: 717732 - DNA, 75 bp, synthetic construct
  source 1..75: mol_type = other DNA
attaccctaaatatatgcaagctatttacgatattataaatagccctgctacattaaataatctaaacactcgtt

SEQ ID NO: 717733 - DNA, 75 bp, synthetic construct
  source 1..75: mol_type = other DNA
acgcatgaccatatcgttcatttctatcagctctcggcgctggactgggtggacatcacttctgcactgcaagct

SEQ ID NO: 717734 - DNA, 75 bp, synthetic construct
  source 1..75: mol_type = other DNA
ctggcaacacgctggaagtggcgcaactgcactccacgctgggccgtattattggtcgtaccgttcactgctgcg

SEQ ID NO: 717735 - DNA, 75 bp, synthetic construct
  source 1..75: mol_type = other DNA
ttacgagcagtcgctggtgggtacgccggttgccgatccgaataaaccgctggaagtggtgcgtaccattcactc

SEQ ID NO: 717736 - DNA, 75 bp, synthetic construct
  source 1..75: mol_type = other DNA
atgattaacctgttaatcatcgttctgagggcggcagcggcgcttgtaaacgcgctgattgctatcctggaactg

SEQ ID NO: 717737 - DNA, 75 bp, synthetic construct
  source 1..75: mol_type = other DNA
aaggatttcctccatatattctctttgcaacagacgctactcaggctactactgattatggagccataaccggaa

SEQ ID NO: 717738 - DNA, 75 bp, synthetic construct
  source 1..75: mol_type = other DNA
tcgcttttctggattatttggtttccggttattttctggatgctaagcctggcaacgacattggtatcatttaca

SEQ ID NO: 717739 - DNA, 75 bp, synthetic construct
  source 1..75: mol_type = other DNA
gcgcgacgtatagcgtagaactgaatggcgatttgaagaatgtgagtagtcacttaccttcaccgttagccaaat

SEQ ID NO: 717740 - DNA, 75 bp, synthetic construct
  source 1..75: mol_type = other DNA
atatcagcgatctgtttcttcgtcagttcgatcacttcgatctccgcgatagcgaaatcagcttcctgacaccat

SEQ ID NO: 717741 - DNA, 75 bp, synthetic construct
  source 1..75: mol_type = other DNA
ttatggcggtaacccgcatcttttcccttacaagcataatgaaggtcagtttgaagtgttggttcctctgcgtaa

SEQ ID NO: 717742 - DNA, 75 bp, synthetic construct
  source 1..75: mol_type = other DNA
gaacagcccggaagagttcaccaaagttcagaacaagatcaaagatctggttgccagcggtcagttgggtatttt

SEQ ID NO: 717743 - DNA, 75 bp, synthetic construct
  source 1..75: mol_type = other DNA
tttgccctgctgattctggtgctgctggtgatgccgaccggtattctgggtcgcccggaggtagagaaagtatga

SEQ ID NO: 717744 - DNA, 75 bp, synthetic construct
  source 1..75: mol_type = other DNA
ctgcgcgcaagcgatctgtatgtaaagagatcaaggttttcgtcagaccagaactgaaaaactaccttaccagtc

SEQ ID NO: 717745 - DNA, 75 bp, synthetic construct
  source 1..75: mol_type = other DNA
gtattgccatcagtgctattgatagcccgggcagcagtgaattgcgcacccgaccggtggatggtgaactacttt

SEQ ID NO: 717746 - DNA, 75 bp, synthetic construct
  source 1..75: mol_type = other DNA
gacagatatcacgggggcaaaagcgacgtatccggtactgcttgatacggtcacagtcaaagttaacgaaagccg

SEQ ID NO: 717747 - DNA, 75 bp, synthetic construct
  source 1..75: mol_type = other DNA
atgaccatctataccttatctcacgggccgctaaagctggacgtttctgaccggggtggtgtcatcgaaggtttc

SEQ ID NO: 717748 - DNA, 75 bp, synthetic construct
  source 1..75: mol_type = other DNA
gctggcatccttattttccgttgtcgccgcaaacgcggattcaggcacaggcgagcggttactggctggagcggg

SEQ ID NO: 717749 - DNA, 75 bp, synthetic construct
  source 1..75: mol_type = other DNA
agttcatgggctcgccgtgggattatttccgaccgtctggcaacggcgattctgagctgcgcgggtaagtcttct

SEQ ID NO: 717750 - DNA, 75 bp, synthetic construct
  source 1..75: mol_type = other DNA
acgcagcacagtttggtgcgctggttgataaattccgtgcagacctgacggatatggcaggtcagtgcgttggtg

SEQ ID NO: 717751 - DNA, 75 bp, synthetic construct
  source 1..75: mol_type = other DNA
tcttgtcccgtgtggacgtggcgattcgggatttactgcgggagcagagggcgcgtttaatgaggcgtcgggtgc

SEQ ID NO: 717752 - DNA, 75 bp, synthetic construct
  source 1..75: mol_type = other DNA
aaagcccaccgtggccgatgccatgcgttatgccctgaaacagtccggttacacgctgtgtgccaccgggccggc

SEQ ID NO: 717753 - DNA, 75 bp, synthetic construct
  source 1..75: mol_type = other DNA
gtcttgccctgacctcactgttgttggggggctgtgcagacaagccagcccagcctacggaagcggcggcagaca

SEQ ID NO: 717754 - DNA, 75 bp, synthetic construct
  source 1..75: mol_type = other DNA
gccgttcagtatcagatgggaccgatccgcctgaatgtggcgttacagctccttgccgggccggcctggcagttg

SEQ ID NO: 717755 - DNA, 75 bp, synthetic construct
  source 1..75: mol_type = other DNA
gccgttgccgcgccagtgggtaaacaatggttttgccggatggaatggtaaggcccgcatcgagcagccgcagga

SEQ ID NO: 717756 - DNA, 75 bp, synthetic construct
  source 1..75: mol_type = other DNA
cggaaaactcaggaaactgcggctcagacgcagggtggaaatgagtcttgaagatattgcgaaaaggctgaatcc

SEQ ID NO: 717757 - DNA, 75 bp, synthetic construct
  source 1..75: mol_type = other DNA
ctgataaaacaaacatcaatgtgatgtatcatgcaaacaccacatcacagcggcttggtagttatggtccgttcg

SEQ ID NO: 717758 - DNA, 75 bp, synthetic construct
  source 1..75: mol_type = other DNA
gagttgaaagatggcggtgaattttcggttaaacgcgtcaccctggcgctggatgtctggcagagcctgctgcat

SEQ ID NO: 717759 - DNA, 75 bp, synthetic construct
  source 1..75: mol_type = other DNA
ccagcgaaacactgtttgtgcccggtaaaacgccacgactttcacgctttgcctttagtgatgatcccaaatggg

SEQ ID NO: 717760 - DNA, 75 bp, synthetic construct
  source 1..75: mol_type = other DNA
atctcctggcgtgtgggttatgaaaatgtcgatcactttgccaaactgtttttgcgccatgtcggctgttcgccc

SEQ ID NO: 717761 - DNA, 75 bp, synthetic construct
  source 1..75: mol_type = other DNA
gagcgcgcagcctgagttcacgcttaatcttacgcttttcgacaggcgaccactgcacccgcaaatcaaccagat

SEQ ID NO: 717762 - DNA, 75 bp, synthetic construct
  source 1..75: mol_type = other DNA
aaaggggtggcaagatttaccattgattcttcgttatatgtggcacatgccgatgacattgtagtgatagaacgt

SEQ ID NO: 717763 - DNA, 75 bp, synthetic construct
  source 1..75: mol_type = other DNA
actcctcgttgtatgtagcccatgccgatgacattgtggtgatagaacgcggcagacttcatgcggtggcttctg

SEQ ID NO: 717764 - DNA, 75 bp, synthetic construct
  source 1..75: mol_type = other DNA
agtgattaccgcagacaatttaaaaactgttttgctgaacaagcgattttgtctgaatttcctcaacctgtcagt

SEQ ID NO: 717765 - DNA, 75 bp, synthetic construct
  source 1..75: mol_type = other DNA
ttgaaaaacaggttgccgccctctggcagcaactcttatcaactggcaatgtcaccagagaaaccgacttcttcc

SEQ ID NO: 717766 - DNA, 75 bp, synthetic construct
  source 1..75: mol_type = other DNA
cggtttacgacatttttggcgtactgcgcgcgggcggcgcgctggtgatggtgatggaaaatcaacggcgcgatc

SEQ ID NO: 717767 - DNA, 75 bp, synthetic construct
  source 1..75: mol_type = other DNA
tggcgcgatgcttgccgacttcaccaatattcttctgctggataccgcctgcgatggcgataccgtcagcaacct

SEQ ID NO: 717768 - DNA, 75 bp, synthetic construct
  source 1..75: mol_type = other DNA
gtacgcctgcttgaggtgggaacccgcactggccgcgccgcagaatcgctgttagcacagctcaacgccggacag

SEQ ID NO: 717769 - DNA, 75 bp, synthetic construct
  source 1..75: mol_type = other DNA
ttcacccacccttctcctgctgccctggccgattatctggccggcgtcgccacggtggagaaaacaaaacgacct

SEQ ID NO: 717770 - DNA, 75 bp, synthetic construct
  source 1..75: mol_type = other DNA
tccagattctctggcatggtggcaggcgcagcttgatgatattcctccggcgcctgcgttgccgctgcgctgctt

SEQ ID NO: 717771 - DNA, 75 bp, synthetic construct
  source 1..75: mol_type = other DNA
gcaacaaagtgcgttagacaaaattctgagcgcgctgtgtcagcaaggactggcgattgtgatgagcagtcacga

SEQ ID NO: 717772 - DNA, 75 bp, synthetic construct
  source 1..75: mol_type = other DNA
ccgcgccgacaccgtgtagaaggacaagtaagcctctccagcctcaccggacaacacggcgtgatgcaggtgcgg

SEQ ID NO: 717773 - DNA, 75 bp, synthetic construct
  source 1..75: mol_type = other DNA
taaaatcgaagatgcgaccggtatgccggtagaagccagccagctatctgccagttggcagaatttcggtccgac

SEQ ID NO: 717774 - DNA, 75 bp, synthetic construct
  source 1..75: mol_type = other DNA
gatgaaccctggctgggtattctggctggcatcagtaccgatgatggttcacaagcctggcgctatttcccggaa

SEQ ID NO: 717775 - DNA, 75 bp, synthetic construct
  source 1..75: mol_type = other DNA
tggtcgcaatattgatgttaaagctaaagcggtgcatgcacgcggcggtttccgttacttacagccggttaatga

SEQ ID NO: 717776 - DNA, 75 bp, synthetic construct
  source 1..75: mol_type = other DNA
ttactgacggcgtctatgaagcaggcgaagatgccttacgaaacggtattccgcgcgccgctggaaattgccgac

SEQ ID NO: 717777 - DNA, 75 bp, synthetic construct
  source 1..75: mol_type = other DNA
gtgatgtctggttgaaacagggcggtgctagctggttgggcgagaagcaaacgcattcgctgtctgtggataatc

SEQ ID NO: 717778 - DNA, 75 bp, synthetic construct
  source 1..75: mol_type = other DNA
ccggtggctgccagtcaactctctgccagttggcagaattttggcccgacgattgaagcacgcgacattcgtgca

SEQ ID NO: 717779 - DNA, 75 bp, synthetic construct
  source 1..75: mol_type = other DNA
catttctggcaatacattaacgctgaccaatggactgattgatactggtttctcgcggcttactgccgatggtga

SEQ ID NO: 717780 - DNA, 75 bp, synthetic construct
  source 1..75: mol_type = other DNA
gcctatctttcgcaacaacaaacaccgccatttgctatgccggtctggcattacctgaccctgcatcagcatgat

SEQ ID NO: 717781 - DNA, 75 bp, synthetic construct
  source 1..75: mol_type = other DNA
cgcttcaggctgcagaaaagacccgctttcaggcatcgtggagcgatctggcctggaagcaatggaaattactac

SEQ ID NO: 717782 - DNA, 75 bp, synthetic construct
  source 1..75: mol_type = other DNA
taatctggagttggctggactggaaggcatacgcccgctggccgcgaaactttcacctgcgttgggtgaggtttg

SEQ ID NO: 717783 - DNA, 75 bp, synthetic construct
  source 1..75: mol_type = other DNA
gatggcggcgaattttcggttaaacgcgttactctggcgctggatgtctggcagagcctgttacatatgcgctgg

SEQ ID NO: 717784 - DNA, 75 bp, synthetic construct
  source 1..75: mol_type = other DNA
acaccggcgctatttgccgcccttgatgtgtctgaggatgcagtggttgctgcgcgccgcagccgtgttgaatgg

SEQ ID NO: 717785 - DNA, 75 bp, synthetic construct
  source 1..75: mol_type = other DNA
gtatcgtaaatgctcgtttgcaaattaccaggtgcagaacgacggccagcgatacgcgttaagccaggcgaaatc

SEQ ID NO: 717786 - DNA, 75 bp, synthetic construct
  source 1..75: mol_type = other DNA
ggccagtccggggaaaaatttttacaggagctttgcggggttgatttgctggtcctggatgaaataggcgttcag

SEQ ID NO: 717787 - DNA, 75 bp, synthetic construct
  source 1..75: mol_type = other DNA
gttgtggcttaacaagccgcatatcctgcaacactaccgcgaacgttttaccaatatcctggtggacgaattcca

SEQ ID NO: 717788 - DNA, 75 bp, synthetic construct
  source 1..75: mol_type = other DNA
cgagtgctgcaaacccgaaacgacgcccgtaaaaacaaaactaaaaaatataacgtcgatattcaaattaagtaa

SEQ ID NO: 717789 - DNA, 75 bp, synthetic construct
  source 1..75: mol_type = other DNA
ggtgggcttcacctcccgttttgatttcgccattcatgtggcgcatgcccgttcgcgtggtctgcgtcgacgcat

SEQ ID NO: 717790 - DNA, 75 bp, synthetic construct
  source 1..75: mol_type = other DNA
cgggagaacatgaagtaaacttaaacaggaaaaaagttgtcatccccgcttttctgacaatgctgttccataatg

SEQ ID NO: 717791 - DNA, 75 bp, synthetic construct
  source 1..75: mol_type = other DNA
atgagtatctccactacgaaacaccataacattggtctgtctgagcgccagcaacaagaaatcattactaataaa

SEQ ID NO: 717792 - DNA, 75 bp, synthetic construct
  source 1..75: mol_type = other DNA
aactgactgacacacttatccagcagaacggttaccaggggttcagctatgctgacctggcgaagacgctgggta

SEQ ID NO: 717793 - DNA, 75 bp, synthetic construct
  source 1..75: mol_type = other DNA
tagagttaatggttcatttagtgtcttcaaagatgctctcattgttaatgcaaccactggtgaatacgaagtcaa

SEQ ID NO: 717794 - DNA, 75 bp, synthetic construct
  source 1..75: mol_type = other DNA
tttctgacaatgctatttcataatgcttcgacgacatctttcttcagagcaatgcctgttccgaagtggttttat

SEQ ID NO: 717795 - DNA, 75 bp, synthetic construct
  source 1..75: mol_type = other DNA
actaccctggggatttaaagacggctacatgtggagcgaccacaaatacatgtggtttacatatcttttctcaag

SEQ ID NO: 717796 - DNA, 75 bp, synthetic construct
  source 1..75: mol_type = other DNA
ggaccagctacgcctgcttaagcgtctgatcaaggcgatgaacctcgacgagaagcagtggccgccgcgtcaggc

SEQ ID NO: 717797 - DNA, 75 bp, synthetic construct
  source 1..75: mol_type = other DNA
acgccattaacgctgacgcggtacgaatttctgttgttgaaaacgttactcaagtcgccaggccgcgtctggtca

SEQ ID NO: 717798 - DNA, 75 bp, synthetic construct
  source 1..75: mol_type = other DNA
ttggacattttgaattgaatgaacccgcggcgcagatcagctggtttgacacgccattaacgctgacgcggtatg

SEQ ID NO: 717799 - DNA, 75 bp, synthetic construct
  source 1..75: mol_type = other DNA
ctgcgcgccatcaaccccgatctttcaccgattaatactcatcgcggcatgggatatagcctgaggggcctgtaa

SEQ ID NO: 717800 - DNA, 75 bp, synthetic construct
  source 1..75: mol_type = other DNA
ttcttgaacgcatccgtaagctggccccgcagcatgtaaccgcgccgtaccggacagtggacgagtggcgagagt

SEQ ID NO: 717801 - DNA, 75 bp, synthetic construct
  source 1..75: mol_type = other DNA
ttcttgagcgtatccgcagacttgcaccacaggggacggttccactgtaccggacggtggaagaatggcgggaat

SEQ ID NO: 717802 - DNA, 75 bp, synthetic construct
  source 1..75: mol_type = other DNA
ggtgtttacaccccgtgaaggtgcaggaacgctgaagttctgcgaaaaactgatggaaaaggcggtgggcttcac

SEQ ID NO: 717803 - DNA, 75 bp, synthetic construct
  source 1..75: mol_type = other DNA
cttaacaagccgcatatcctgcaacactaccgcgaacgttttactaacatcctggtggacgaattccaggatacc

SEQ ID NO: 717804 - DNA, 75 bp, synthetic construct
  source 1..75: mol_type = other DNA
cggcgagcatagccgtttgcaggtggcattccagggccagggtattaaatggctggtggcggcttatgcccgact

SEQ ID NO: 717805 - DNA, 75 bp, synthetic construct
  source 1..75: mol_type = other DNA
atttacggcgggatgcgcttcttcgaacgccaggaaatcaaagacgcgctctcatatctgcgcctgattgccaac

SEQ ID NO: 717806 - DNA, 75 bp, synthetic construct
  source 1..75: mol_type = other DNA
gtagtgaagaggtcgatcgtctgcttgggctggaaattggtgctgacgactacgtggctaaaccgttttcacctc

SEQ ID NO: 717807 - DNA, 75 bp, synthetic construct
  source 1..75: mol_type = other DNA
atatcagcggctttgaattgtgccgccagttactggcgctccatccggcgttacctgtactgttcctgacggccc

SEQ ID NO: 717808 - DNA, 75 bp, synthetic construct
  source 1..75: mol_type = other DNA
ctgacgttcctgtcagagctgggactgattacctaccagacggaatatgacccgcttatcgggtgctacattccg

SEQ ID NO: 717809 - DNA, 75 bp, synthetic construct
  source 1..75: mol_type = other DNA
acgctgaagttctgcgaaaaactgatggaaaaggcggtgggcttcacctcccgttttgatttcgccattcatgtg

SEQ ID NO: 717810 - DNA, 75 bp, synthetic construct
  source 1..75: mol_type = other DNA
cgcacgccgcagccgcgtggaatgggaaaacagacagcgtaaaaagcagggactggataccctgggtatggatga

SEQ ID NO: 717811 - DNA, 75 bp, synthetic construct
  source 1..75: mol_type = other DNA
atgttcaggcgtataattctctcggtaacatttctctggagtgcaacaactcaggctgcgccatcgccctccttt

SEQ ID NO: 717812 - DNA, 75 bp, synthetic construct
  source 1..75: mol_type = other DNA
acccgctggccaaccgtgtccagtgctccatcaccacgctggccattgagtgcgggctggcgacagagtccggtg

SEQ ID NO: 717813 - DNA, 75 bp, synthetic construct
  source 1..75: mol_type = other DNA
cgatgacgtggaagaaggcgtgtggggaacggatttcctctacaccgatgtttgggtctcaatgggtgaaccgaa

SEQ ID NO: 717814 - DNA, 75 bp, synthetic construct
  source 1..75: mol_type = other DNA
ctaactctatcgtctttgatgaagcagaaaaccgcatgcataccattaaagcggtcatggtggcgacactcggcg

SEQ ID NO: 717815 - DNA, 75 bp, synthetic construct
  source 1..75: mol_type = other DNA
acactgatttattttgcatccgttttttcattatttttgatgattattgcttttttatcaaattctacctttata

SEQ ID NO: 717816 - DNA, 75 bp, synthetic construct
  source 1..75: mol_type = other DNA
gtgctgaatggcgacaatacagacgaaaacaaacagccgaatctgggcaaagacgtagcgagcgctacggataag

SEQ ID NO: 717817 - DNA, 75 bp, synthetic construct
  source 1..75: mol_type = other DNA
cagcaatagctggtgctacaggtaatgccagtaaggataccgggaatgataatagctgggatattggtggtggtt

SEQ ID NO: 717818 - DNA, 75 bp, synthetic construct
  source 1..75: mol_type = other DNA
aggataccgggaatgataatagctgggatattggtggtggttgtgaaggctcacgggaacagtgtgctgtacgtg

SEQ ID NO: 717819 - DNA, 75 bp, synthetic construct
  source 1..75: mol_type = other DNA
acaaacaggcgccagatggactattgatattagagggaatcagcaattggctgaaattgcacataaatacggacg

SEQ ID NO: 717820 - DNA, 75 bp, synthetic construct
  source 1..75: mol_type = other DNA
ataccgggaatgataatggctgggatattggtggtggttgtgaaggctcacgggaacagtgtgctgtacgtgacc

SEQ ID NO: 717821 - DNA, 75 bp, synthetic construct
  source 1..75: mol_type = other DNA
tggtttaggttctccagccggcacagttggcccagggagaaatataacgccgaatatggttgaaagtgttatcaa

SEQ ID NO: 717822 - DNA, 75 bp, synthetic construct
  source 1..75: mol_type = other DNA
atgaaaaataaaatttttttcgctttattaattatagtggtggctgctttgtcattctatttctgtcgaagctgg

SEQ ID NO: 717823 - DNA, 75 bp, synthetic construct
  source 1..75: mol_type = other DNA
ctttcgcgaagatgaaactacgacgctgccaatcgacgaaatttttgttctgaacaaagcgccggataccccgat

SEQ ID NO: 717824 - DNA, 75 bp, synthetic construct
  source 1..75: mol_type = other DNA
aaaatatccataactatgaattccgacttacctgtaacagatgtgggtttgttcatcgttactcggcccgggcct

SEQ ID NO: 717825 - DNA, 75 bp, synthetic construct
  source 1..75: mol_type = other DNA
tgagtatcacgttgaattatctcgtccgggaaagggtttaaataatttatcacctcgtgtctggtttatgcgtaa

SEQ ID NO: 717826 - DNA, 75 bp, synthetic construct
  source 1..75: mol_type = other DNA
ggcggtggctgctcgatatcaggccatgcggacgtaaagggaagcgcatcagaagaatatttgacaaaaaatcga

SEQ ID NO: 717827 - DNA, 75 bp, synthetic construct
  source 1..75: mol_type = other DNA
tacgcaacgtgtgggcccgcattctgaaagactatattggcgtatttaataacacaatcgccagcctccagttcg

SEQ ID NO: 717828 - DNA, 75 bp, synthetic construct
  source 1..75: mol_type = other DNA
cttcaggataaaaaccccaagtatattctggccgatgaggttgggctggggaaaaccatcgaagcaggaatggtc

SEQ ID NO: 717829 - DNA, 75 bp, synthetic construct
  source 1..75: mol_type = other DNA
tgacctgtcttccgtggcacaggatgtgacgtttatggatacgacgacgcgtctttatcatgtctggcccggcaa

SEQ ID NO: 717830 - DNA, 75 bp, synthetic construct
  source 1..75: mol_type = other DNA
ggtgttcctgcctgtatccgtttgtgcctcggaactgggatttaagggtaatttgctggacaggccctgccagat

SEQ ID NO: 717831 - DNA, 75 bp, synthetic construct
  source 1..75: mol_type = other DNA
tgttataaaatgtattattgataataaaaaaagtaatgccacggcattgaggtgtggcttcatcttagaaggtgt

SEQ ID NO: 717832 - DNA, 75 bp, synthetic construct
  source 1..75: mol_type = other DNA
agtttcctattttgaacccccaacagatgctcggccagcagaaggaagaatagccagagttcatgagcagccatg

SEQ ID NO: 717833 - DNA, 75 bp, synthetic construct
  source 1..75: mol_type = other DNA
atgcaatttacggtataccgcagtcgcagcaggaacgccgcgtttccctttgttatcgatgttaccagcgacatt

SEQ ID NO: 717834 - DNA, 75 bp, synthetic construct
  source 1..75: mol_type = other DNA
cgcctgactccgcttatcaggctggttgatgataatgagtatgtagtcatgactcatgaaatggcgagtattcct

SEQ ID NO: 717835 - DNA, 75 bp, synthetic construct
  source 1..75: mol_type = other DNA
gaatacggcagcgatggcgacccgatcccgatgttcgcagctggttacggtgttaactggcgtttagctcagggc

SEQ ID NO: 717836 - DNA, 75 bp, synthetic construct
  source 1..75: mol_type = other DNA
acggtgctgttgttggtagcgtgctcaaaactgttatgccgttcgcacctgttggtgaaattcgtcagagctttg

SEQ ID NO: 717837 - DNA, 75 bp, synthetic construct
  source 1..75: mol_type = other DNA
tcgcaaaagtcgacctgactactgcggttttcgacaagatcattgacttcttcaccgttggtgagttcggcaagc

SEQ ID NO: 717838 - DNA, 75 bp, synthetic construct
  source 1..75: mol_type = other DNA
ctttgcgtatgcctgtcatcaggcaagccccagagcgagcaaaccttacctggcgctgaactgtgcgtctatacc

SEQ ID NO: 717839 - DNA, 75 bp, synthetic construct
  source 1..75: mol_type = other DNA
gctaacatggcagcgccgcacattgctaacggtactgttgttggtactgtgctgaatatcgttaaaccgttcatt

SEQ ID NO: 717840 - DNA, 75 bp, synthetic construct
  source 1..75: mol_type = other DNA
gacttctacctgaacggtaacgagcgtatcgttgtcgatggtcataaagcaatgggcatgaaaaaccacaaaaac

SEQ ID NO: 717841 - DNA, 75 bp, synthetic construct
  source 1..75: mol_type = other DNA
ttaagcgcgccactgttgatcacgggtgacactggtacaggtaaagatctctttgcttatgcctgtcatcaggcc

SEQ ID NO: 717842 - DNA, 75 bp, synthetic construct
  source 1..75: mol_type = other DNA
accgactcggtctgacccgcgaattactcgatctactggtgctacgcggcatcgacttgcgcggtattgagattg

SEQ ID NO: 717843 - DNA, 75 bp, synthetic construct
  source 1..75: mol_type = other DNA
ttaagcgcgccgctactgatcacgggtgacacgggtacaggtaaagatctctttgcttatgcctgtcatcaagcc

SEQ ID NO: 717844 - DNA, 75 bp, synthetic construct
  source 1..75: mol_type = other DNA
ctgggtctgaaatcggactggatgaatagccgtctgaccaccacgttagccatcttccgtattgagcaggataat

SEQ ID NO: 717845 - DNA, 75 bp, synthetic construct
  source 1..75: mol_type = other DNA
ggaacagtggcaaacgtaaagttgatgcgctggatttgttcgctgacggtagttatgaattgtttggtcgtcagc

SEQ ID NO: 717846 - DNA, 75 bp, synthetic construct
  source 1..75: mol_type = other DNA
agctgcgtccacaagacatcttgctgccagattatgacgccacaacggtggctgtgggtgaagatgcgatggaag

SEQ ID NO: 717847 - DNA, 75 bp, synthetic construct
  source 1..75: mol_type = other DNA
ctcggcgtttcgcataccgcgattgccaataagttgcgggaatacggtctgagtcagaagaagaacgaagagtaa

SEQ ID NO: 717848 - DNA, 75 bp, synthetic construct
  source 1..75: mol_type = other DNA
caaaatgatcctcgggtcagacagccatacccgttacggtgcgttagggacaatggcggttggcgagggcggcgg

SEQ ID NO: 717849 - DNA, 75 bp, synthetic construct
  source 1..75: mol_type = other DNA
ggcgatacgccaatcaacaacggtttgagtattcgccacaccacgcgtaacttcccgaaccgcgaaggctctaag

SEQ ID NO: 717850 - DNA, 75 bp, synthetic construct
  source 1..75: mol_type = other DNA
tacatttacatccctggcattaaagcggcgctggataatccgggtacgacgtttaaaggttatgtgatccatgaa

SEQ ID NO: 717851 - DNA, 75 bp, synthetic construct
  source 1..75: mol_type = other DNA
gaaaatcgaaatttattctgaacgactggcgacgattgcggatacctgggaattgaaaaaagatgaaattattca

SEQ ID NO: 717852 - DNA, 75 bp, synthetic construct
  source 1..75: mol_type = other DNA
gtgtttacgcgggcgctctatccgccgacggatgaatcatccttgaagcgcgtcggcaagcgcggtgaaggtaaa

SEQ ID NO: 717853 - DNA, 75 bp, synthetic construct
  source 1..75: mol_type = other DNA
tccgctgcaaactgaaattggcagcatggtctatgcggtgaaaccaggcgatggttctgcgcgtgagcaggcggc

SEQ ID NO: 717854 - DNA, 75 bp, synthetic construct
  source 1..75: mol_type = other DNA
gatgtattggaaaaatggtatagatggatttatgtgctcattgatcgctatgttgggtttgtttcttactagctc

SEQ ID NO: 717855 - DNA, 75 bp, synthetic construct
  source 1..75: mol_type = other DNA
tatggggtgctcagatggagtgatctgtttaaaattagagaggaactccttttattgaaagaaagagacaagagt

SEQ ID NO: 717856 - DNA, 75 bp, synthetic construct
  source 1..75: mol_type = other DNA
gcaaactggcaaaacgtctcggtgtttcgcataccgcgattgccaataagttgcgggaatatggcttaaaccaga

SEQ ID NO: 717857 - DNA, 75 bp, synthetic construct
  source 1..75: mol_type = other DNA
cgctgccgtatgtgctgaccaactgccataactcactttgcgccgtcggcggcaccattaacggtgatgaccatg

SEQ ID NO: 717858 - DNA, 75 bp, synthetic construct
  source 1..75: mol_type = other DNA
cagtctggatctaatccttctgtcagaagaaaaacaagcgcaacctgcttatgttgtacaattccgctatccatc

SEQ ID NO: 717859 - DNA, 75 bp, synthetic construct
  source 1..75: mol_type = other DNA
atgaaaattatcgctttgaatgctgaaacaggtgaatataactggaagatggtttctgaccatcttaaggccatt

SEQ ID NO: 717860 - DNA, 75 bp, synthetic construct
  source 1..75: mol_type = other DNA
cattgcttgaggcattgcctgaacccgtgctttctgtcgatatgaaaagtaaagtggacatggcgaatccggcga

SEQ ID NO: 717861 - DNA, 75 bp, synthetic construct
  source 1..75: mol_type = other DNA
attggcatgcagcgggatacgcgcaacgagcaggtcacgctgaaccagatagtcgaccgcagaacggcttcgatg

SEQ ID NO: 717862 - DNA, 75 bp, synthetic construct
  source 1..75: mol_type = other DNA
agaatcgccagttgcgggtggaaaaaatcctgaatcgttcgggcatccagcctctgcacagcaaatgctcgtttg

SEQ ID NO: 717863 - DNA, 75 bp, synthetic construct
  source 1..75: mol_type = other DNA
gtgaagtggagcgtcgtgtgaaggagcgcatgattctgtcacgtaaccgtaattacagccggctggccacagctt

SEQ ID NO: 717864 - DNA, 75 bp, synthetic construct
  source 1..75: mol_type = other DNA
tcatcaaccagcgtgttaaccaggtggcggaagtgctgcaactggcgcacttgctggatcgcaaaccgaaggcgc

SEQ ID NO: 717865 - DNA, 75 bp, synthetic construct
  source 1..75: mol_type = other DNA
ggcggaagtgctgcaactggcgcatttgctggatcgcaaaccgaaagcgctctccggtggtcagcgtcagcgtgt

SEQ ID NO: 717866 - DNA, 75 bp, synthetic construct
  source 1..75: mol_type = other DNA
ccgccagagcgttgccatctgttccgtgaggatggcgctgcatgtcgtcgactgcataaggagccgggcgtttaa

SEQ ID NO: 717867 - DNA, 75 bp, synthetic construct
  source 1..75: mol_type = other DNA
tactgcaccagattgttgaccgccggacggcatcactgcgcagtgtcgggatgctgaacaaacctgaatcatgcc

SEQ ID NO: 717868 - DNA, 75 bp, synthetic construct
  source 1..75: mol_type = other DNA
taccaggtgcagaacgacggccagcgatacgcgttaagtcaggcgaaatccatcaccgatgaactgatgaccggg

SEQ ID NO: 717869 - DNA, 75 bp, synthetic construct
  source 1..75: mol_type = other DNA
atggctgatctccttcaaaaatactattcacaggttaaaaatccaaatccggtgttcacaccccgtgaaggtgcc

SEQ ID NO: 717870 - DNA, 75 bp, synthetic construct
  source 1..75: mol_type = other DNA
cgggatacgcgcaacgagcaggtcatactgaaccagatcgttgaccgcagaacggcatcactgcgcactgtcggg

SEQ ID NO: 717871 - DNA, 75 bp, synthetic construct
  source 1..75: mol_type = other DNA
cgcacgccgcagccgcgtggaatgggaaaacagacaacgcaaaaagcaggggctggataccctgggcatggatga

SEQ ID NO: 717872 - DNA, 75 bp, synthetic construct
  source 1..75: mol_type = other DNA
tccgcagcatgtaaccgcgccgtgccggacagtggacgagtggcgagagtggcagcttgcagaagggcgaaaacg

SEQ ID NO: 717873 - DNA, 75 bp, synthetic construct
  source 1..75: mol_type = other DNA
cgccagttgcgggtggaaaaattcctgaatcgttccggtattcagccgttgcaccagaaatgttcgtttgcgaat

SEQ ID NO: 717874 - DNA, 75 bp, synthetic construct
  source 1..75: mol_type = other DNA
gcaccgcaaatgctcgtttgcgaattaccgggtgcagaacgacggtcagcgatacgcgttgaaccaggcgaaatc

SEQ ID NO: 717875 - DNA, 75 bp, synthetic construct
  source 1..75: mol_type = other DNA
ggtgatggaccgcatgtccatgaacggtggtcgctgggtgacttttaactgggagagctggcgtccgaacgtcag

SEQ ID NO: 717876 - DNA, 75 bp, synthetic construct
  source 1..75: mol_type = other DNA
gattatggatcgcatgaccatgaacggcgggcgatgggggaattttaactgggagagctggcgtccgaatgtcgt

SEQ ID NO: 717877 - DNA, 75 bp, synthetic construct
  source 1..75: mol_type = other DNA
atgaaaaatattgcggcaggtggtgttcttgagcgtatccgtaagctggccccgcagcatgtaaccgcgccgtac

SEQ ID NO: 717878 - DNA, 75 bp, synthetic construct
  source 1..75: mol_type = other DNA
aatcacctggcagcagcgattggcaatcggctgatggcgaaggggagaagcgtgattatcgtcaccgtgtccgat

SEQ ID NO: 717879 - DNA, 75 bp, synthetic construct
  source 1..75: mol_type = other DNA
gcgctgatacttacctcttcgggccaggaatcgatgattctgttgatttatccagatattccccagaactcgata

SEQ ID NO: 717880 - DNA, 75 bp, synthetic construct
  source 1..75: mol_type = other DNA
gatggctcgctgaccaccgaggtgcatcgcctggcggacgcacgcttccaacctgataccgcttcagaaggctac

SEQ ID NO: 717881 - DNA, 75 bp, synthetic construct
  source 1..75: mol_type = other DNA
gcgaactggataccgtgctggcgaagtttccgcacgtcaaatacttgctgtgcggtcatattcatcaggagctgg

SEQ ID NO: 717882 - DNA, 75 bp, synthetic construct
  source 1..75: mol_type = other DNA
ctgcaggggctgtgtttccactatgacccgctggccaaccgcgtccagtgttccatcaccacactggccattgag

SEQ ID NO: 717883 - DNA, 75 bp, synthetic construct
  source 1..75: mol_type = other DNA
atgaaaaatattgcggcaggcggcgttcttgaacgtatccgcagactggccccgccacatgtaaccgccccattc

SEQ ID NO: 717884 - DNA, 75 bp, synthetic construct
  source 1..75: mol_type = other DNA
gatggcacgctgactaccgaagtgcaccgccttgcggacacgcgtttccaacctgataccgcttcagaaggttac

SEQ ID NO: 717885 - DNA, 75 bp, synthetic construct
  source 1..75: mol_type = other DNA
tatcggtgagcaatggcaaatcttgctgctggatagccaggtgtttggcgtaccgcacggcgaattgagcgagtt

SEQ ID NO: 717886 - DNA, 75 bp, synthetic construct
  source 1..75: mol_type = other DNA
ggtatcttcagacccatactgatatgccaggcagcgatgatctgaacgggattaacgtgaaataccgttatgagt

SEQ ID NO: 717887 - DNA, 75 bp, synthetic construct
  source 1..75: mol_type = other DNA
attcggggaaaagattgtcgccagctggattgccttgacggtgatagtcaccagcatcgggttactgcttctcta

SEQ ID NO: 717888 - DNA, 75 bp, synthetic construct
  source 1..75: mol_type = other DNA
ccatcatcagttatacgctgacggtggcgatgcttattccggtaagcggatggctagccgatcgcttcggtacgc

SEQ ID NO: 717889 - DNA, 75 bp, synthetic construct
  source 1..75: mol_type = other DNA
cgaatccgtggccgttgatgtcgcttatgaaggctccggcagtggcaactggcgcactgacgggttcatcgtggg

SEQ ID NO: 717890 - DNA, 75 bp, synthetic construct
  source 1..75: mol_type = other DNA
tgtccgcagccatctgtctggtcgtatccggtgcgcctgcatgggcgtctgaacatcagtccacgctaagcgcgg

SEQ ID NO: 717891 - DNA, 75 bp, synthetic construct
  source 1..75: mol_type = other DNA
attatctccgcgtaactgacaacaaggggaaaacgcatgatgtgctgaccggaagtgatgacggtcgccacagca

SEQ ID NO: 717892 - DNA, 75 bp, synthetic construct
  source 1..75: mol_type = other DNA
tctggcatcgactggtcattccttccagtggcgcagttgccgcgctggtagtggcgttgctgattagtggcggaa

SEQ ID NO: 717893 - DNA, 75 bp, synthetic construct
  source 1..75: mol_type = other DNA
tttgagcggtgcggatatgtggggagccaccatgtttgaccaactggtgtgccgcgtgatgttccaccagatgcg

SEQ ID NO: 717894 - DNA, 75 bp, synthetic construct
  source 1..75: mol_type = other DNA
gggaaactggcgtggagctaccagaccgttcaccacgacctgtgggatatggatcttccggcacagccgacgctg

SEQ ID NO: 717895 - DNA, 75 bp, synthetic construct
  source 1..75: mol_type = other DNA
acgacgcagattcgatatcactggctttttgctgtttggcctcagccttgttctcttctcaagcggaatagagct

SEQ ID NO: 717896 - DNA, 75 bp, synthetic construct
  source 1..75: mol_type = other DNA
atggaacagccgaaagatgccaaaggcacgggtacggaatccggtattcagccgcagtacggcgtgccgtatggc

SEQ ID NO: 717897 - DNA, 75 bp, synthetic construct
  source 1..75: mol_type = other DNA
cgggtaacctggggatgttcgaatggggcgggatttccgttgatccgaatcgtgaagtggcaattgccaacccaa

SEQ ID NO: 717898 - DNA, 75 bp, synthetic construct
  source 1..75: mol_type = other DNA
gcgtgcagtttaacccgaccgaatccgtgaccattgaccttgcttatgacggttccggtagtggcgactggcgat

SEQ ID NO: 717899 - DNA, 75 bp, synthetic construct
  source 1..75: mol_type = other DNA
cgaatccgtggccattgatattgcttatgaaggctccggcagtggagactggcgcactgacggtttcatcgtggg

SEQ ID NO: 717900 - DNA, 75 bp, synthetic construct
  source 1..75: mol_type = other DNA
atgcgtaaattatgtgctgttattctgtccgcagtagtctggcaggtcgccgctggtacgtcagcgagtgcagca

SEQ ID NO: 717901 - DNA, 75 bp, synthetic construct
  source 1..75: mol_type = other DNA
cccgaccgaatccgtggccattgatgtcgcttatgaaggctccggcagcggtgactggcgtaccaacagtttcat

SEQ ID NO: 717902 - DNA, 75 bp, synthetic construct
  source 1..75: mol_type = other DNA
tggccattgaccttgcttatgaaggttccggcagtggtgactggcgcactgacggtttcatcgtgggtgtcggtt

SEQ ID NO: 717903 - DNA, 75 bp, synthetic construct
  source 1..75: mol_type = other DNA
gccgtgtgtcgaccttctccggggattatctccgcgtaactgacaacaaggggaaaacgcacgatgtgctgaccg

SEQ ID NO: 717904 - DNA, 75 bp, synthetic construct
  source 1..75: mol_type = other DNA
gatgaacaaaaaacgcattacagcgatacccgctggcatgaagattccgtgcgtaaccgctggttcagcgtgatg

SEQ ID NO: 717905 - DNA, 75 bp, synthetic construct
  source 1..75: mol_type = other DNA
accgaatccgtggccattgatattgcttatgaaggttccggcagtggcgactggcgtactgacggtttcatcgtg

SEQ ID NO: 717906 - DNA, 75 bp, synthetic construct
  source 1..75: mol_type = other DNA
gatacccgctggcatgaagattccgtgcgtaaccgctggttcagcgtgatggcggggccgtctgtacgcgtgaat

SEQ ID NO: 717907 - DNA, 75 bp, synthetic construct
  source 1..75: mol_type = other DNA
accgaatccgtggccattgatattgcttatgaaggctccggcagtggcgactggcgcactgacggtttcatcatg

SEQ ID NO: 717908 - DNA, 75 bp, synthetic construct
  source 1..75: mol_type = other DNA
gcgtaaccgctggttcagcatgatggcggggccgtctgtacgcgtgaatgaatggttcagtgcttatgcgatggc

SEQ ID NO: 717909 - DNA, 75 bp, synthetic construct
  source 1..75: mol_type = other DNA
tccgtggccattgatgtcgcttatgaaggctccggcagtggtgactggcgcactgacggattcatcgtgggtgtt

SEQ ID NO: 717910 - DNA, 75 bp, synthetic construct
  source 1..75: mol_type = other DNA
tcgtaaccgctggttcagcgtaatggcggggccgtctgtgcgcgtgaatgaatggttcagcgtgtatgcgatggc

SEQ ID NO: 717911 - DNA, 75 bp, synthetic construct
  source 1..75: mol_type = other DNA
cggattgcccgcgtcgtatcattcttccggtcaatgatggtcgactgattgcgattaacgctgaaaacggcaaac

SEQ ID NO: 717912 - DNA, 75 bp, synthetic construct
  source 1..75: mol_type = other DNA
gcgggtgtggcttacagccgtgtgtcgactttctccggggattatctccgcgtaactgacaacaaggggaaaacg

SEQ ID NO: 717913 - DNA, 75 bp, synthetic construct
  source 1..75: mol_type = other DNA
gcatcgcaatgaaccggtgcagcccatcccgcaaaaactgcctaccgatgcgcaaaaagtggcgttgggctttgc

SEQ ID NO: 717914 - DNA, 75 bp, synthetic construct
  source 1..75: mol_type = other DNA
ttacggacacactggggatggtgacgtcattcagctatgcaggagacaagaatcgccagattacccgttacagcg

SEQ ID NO: 717915 - DNA, 75 bp, synthetic construct
  source 1..75: mol_type = other DNA
tgccgcggatttttccgttttctaccatctgatttctatcgatcgtaaccgcgacatcatgctgaaggtggcgct

SEQ ID NO: 717916 - DNA, 75 bp, synthetic construct
  source 1..75: mol_type = other DNA
acacactggggatggtgacgtcattcagctatgcaggagacaagaatcgccagctgacccgttacagcgataccc

SEQ ID NO: 717917 - DNA, 75 bp, synthetic construct
  source 1..75: mol_type = other DNA
gatgagaaaaaaacgcactacagcgatacccgctggcatgaggattctgtgcgtaaccgctggttcagcgtgatg

SEQ ID NO: 717918 - DNA, 75 bp, synthetic construct
  source 1..75: mol_type = other DNA
catgtctggaaattaagcggcaaaccggacgatcggatgatcgaagattacgccggtgtcatggctgacactatt

SEQ ID NO: 717919 - DNA, 75 bp, synthetic construct
  source 1..75: mol_type = other DNA
tatgcagaagatcaaccttacagcgatacccgctggcatgagattccgtcgtaaccgctggttcagcgtatggcg

SEQ ID NO: 717920 - DNA, 75 bp, synthetic construct
  source 1..75: mol_type = other DNA
ggttcagcgcgtatgcgatggcgggtatggcttacagccgtgtgtcgactttctccggggattatctccgcgtaa

SEQ ID NO: 717921 - DNA, 75 bp, synthetic construct
  source 1..75: mol_type = other DNA
attaacgtgaaataccgttatgagtttacgcacacactggggatggtgacgtctttcagctatgcaggagacaag

SEQ ID NO: 717922 - DNA, 75 bp, synthetic construct
  source 1..75: mol_type = other DNA
tttccgcagccatctgtctggccgtatccggtgcgcctgcatgggcatctgaacatcagtccacgctgagcgcgg

SEQ ID NO: 717923 - DNA, 75 bp, synthetic construct
  source 1..75: mol_type = other DNA
ggagctggcgtgcagtttaacccgaccgaatccgtggccattgatattgcttatgaaggctccggcagtggcgac

SEQ ID NO: 717924 - DNA, 75 bp, synthetic construct
  source 1..75: mol_type = other DNA
tgtccgcagccatctgtctggccgtatccggtgcgtctgcatgggcgtctgaacatcagtccacactgagcgcag

SEQ ID NO: 717925 - DNA, 75 bp, synthetic construct
  source 1..75: mol_type = other DNA
atgcgtaaagtttgtgtagccattttgtccgcagccatctgtctggccgtatccggtacgcctgcatgggcgtct

SEQ ID NO: 717926 - DNA, 75 bp, synthetic construct
  source 1..75: mol_type = other DNA
cccgaccgaatccgtggccctttgtatttcttatgcatgctccggcagtggcgactggcgcactgacggtttcat

SEQ ID NO: 717927 - DNA, 75 bp, synthetic construct
  source 1..75: mol_type = other DNA
catcgaacgtactgctgaactgttgctggaagttaacctcggcgcaacggcaatcggtactggcctgaacacgcc

SEQ ID NO: 717928 - DNA, 75 bp, synthetic construct
  source 1..75: mol_type = other DNA
atacccgctggcatgaagattcagtgcgtaaccgctggttcagcgtgatggcggggccgtctgtgcgcgtgaatg

SEQ ID NO: 717929 - DNA, 75 bp, synthetic construct
  source 1..75: mol_type = other DNA
atgcgtaaactttatgccgccattttgtccgcagccatctgtctggccgtatccggcgcgcctgcatgggcgtct

SEQ ID NO: 717930 - DNA, 75 bp, synthetic construct
  source 1..75: mol_type = other DNA
gccacagcaacacgtctctggcgtggggagctggcgtgcagtttaacccgatcgaatccgtggccattgatattg

SEQ ID NO: 717931 - DNA, 75 bp, synthetic construct
  source 1..75: mol_type = other DNA
ttaacccgaccgaatccgtggccattgatgtcgcttatgaaggctccggcagtggtgactggcgcactgacgggt

SEQ ID NO: 717932 - DNA, 75 bp, synthetic construct
  source 1..75: mol_type = other DNA
gtctggccgtatccggtgcgcctgcatgggcgtctgaacatcagtccacgctgagcgcggggtatcttcatgccc

SEQ ID NO: 717933 - DNA, 75 bp, synthetic construct
  source 1..75: mol_type = other DNA
attgatattgcttatgaaggttccggtagtggcgactggcgaacggatgcatttattgttggtatcggataccgt

SEQ ID NO: 717934 - DNA, 75 bp, synthetic construct
  source 1..75: mol_type = other DNA
agcacgatgtgctgaccggaagtgatgacggtcgccacagcaacacgtctctggcgtggggggctggcgtgcagt

SEQ ID NO: 717935 - DNA, 75 bp, synthetic construct
  source 1..75: mol_type = other DNA
tcgccattcatcgtgaagagtcggtaaaacgtggtatgcctgttatcagagactgccagcgttgtggtggtcgtg

SEQ ID NO: 717936 - DNA, 75 bp, synthetic construct
  source 1..75: mol_type = other DNA
cgccgatacgctggatggcaaagtgcatctcaccgttgccaacctgaacaataaatttcaccgctcgctggaagc

SEQ ID NO: 717937 - DNA, 75 bp, synthetic construct
  source 1..75: mol_type = other DNA
gcaggtttccgtgtcggatgcggtgtctacatatctgttcaacagccaactgctgagccgcgatgatggttccat

SEQ ID NO: 717938 - DNA, 75 bp, synthetic construct
  source 1..75: mol_type = other DNA
ttgaagaagcatgggctgagcggcagttaaaaaaggtaacaaggttgatttttccggaatctgtggtaaattcgt

SEQ ID NO: 717939 - DNA, 75 bp, synthetic construct
  source 1..75: mol_type = other DNA
agattcagtatccggatggaaaaccaccggtatgggcgaggtgtacaaaaggtgtatatccgtcttactgggagg

SEQ ID NO: 717940 - DNA, 75 bp, synthetic construct
  source 1..75: mol_type = other DNA
acctgtagtgatgcgcattatggcatcgtatgcatttgaagattatgcccggagcgcggcgagcaaaaaacagtg

SEQ ID NO: 717941 - DNA, 75 bp, synthetic construct
  source 1..75: mol_type = other DNA
gcaccggggcggtgaccttcatccagcgcttcggctcggccctgaacctgaatgtccactttcatatgctgttcc

SEQ ID NO: 717942 - DNA, 75 bp, synthetic construct
  source 1..75: mol_type = other DNA
ttaaccgatttgcttttccacatcgctctcgccccagagatatcaattatctgcacaaagatggccaaatatgga

SEQ ID NO: 717943 - DNA, 75 bp, synthetic construct
  source 1..75: mol_type = other DNA
aaaaatcgcataaattctgggcggtggggcagcaaggtaacgagttgcatatcagttggggaaaagttggcaccc

SEQ ID NO: 717944 - DNA, 75 bp, synthetic construct
  source 1..75: mol_type = other DNA
ggtgttggtgctgccgcaggagtgtcgggaacacgccggagtatggcgttatctcaatgaattgcttgctgccga

SEQ ID NO: 717945 - DNA, 75 bp, synthetic construct
  source 1..75: mol_type = other DNA
ggtggatcgttactaccgcgatcgccttactgctgccgatctggccgacccgcaattgctgcgcgaagggcggaa

SEQ ID NO: 717946 - DNA, 75 bp, synthetic construct
  source 1..75: mol_type = other DNA
gttacttaccgggacaacaggcgatttcatttctcaaccaaataatcattgaggagcgatattcaggtgagaaag

SEQ ID NO: 717947 - DNA, 75 bp, synthetic construct
  source 1..75: mol_type = other DNA
aggaaggacatcaaattggctggcaagaaggtaaattagtaggtttgcagcaaggtaaattagaaggtttgcagg

SEQ ID NO: 717948 - DNA, 75 bp, synthetic construct
  source 1..75: mol_type = other DNA
ttcagagcttgagactaatctcgctgcgctggtggcagagaacgccgggctgaaacacgcaatggccgtaactct

SEQ ID NO: 717949 - DNA, 75 bp, synthetic construct
  source 1..75: mol_type = other DNA
ccggcttcacctgcgatgcaaaacagtggagatactcaactggcaagaaaatataatcgtgaaggcgaagctgtt

SEQ ID NO: 717950 - DNA, 75 bp, synthetic construct
  source 1..75: mol_type = other DNA
ggcgacaggtcaggaagtggagctgccggaaatcacacaggaaaaacagcgcgaaaccgttcagttgtgggattg

SEQ ID NO: 717951 - DNA, 75 bp, synthetic construct
  source 1..75: mol_type = other DNA
cccggcagcactgaatcaggcccgcgcagagcttgaggcagcaggaaagccgtttacggaacaggatgtggcaca

SEQ ID NO: 717952 - DNA, 75 bp, synthetic construct
  source 1..75: mol_type = other DNA
ggccggatatcgaaatgcgccgttacagccatgcggagtgtatggctctcctcgacagtgatttaaaaccggttt

SEQ ID NO: 717953 - DNA, 75 bp, synthetic construct
  source 1..75: mol_type = other DNA
gaagtgcgggcgcagggtgttgaattgttgcgcgagcatcctgctatccagatttgctctttaacgcacgtatgc

SEQ ID NO: 717954 - DNA, 75 bp, synthetic construct
  source 1..75: mol_type = other DNA
ctgtcgaacgccaactggcagaactgccgagagctgaaaccgcccgccaggcactgagcgccagccgcctgattg

SEQ ID NO: 717955 - DNA, 75 bp, synthetic construct
  source 1..75: mol_type = other DNA
aattgctttgcgcatgctggagcagggcattgatcgtgaccaggtgctcgcggccactcagctaagcgaagccga

SEQ ID NO: 717956 - DNA, 75 bp, synthetic construct
  source 1..75: mol_type = other DNA
cagggcattgatcgtgaccaggtgctcgcggccacccagctaagcgaagccgatctggcagcgaataaccactaa

SEQ ID NO: 717957 - DNA, 75 bp, synthetic construct
  source 1..75: mol_type = other DNA
gcactgttaacgatattctcgataacgtgaaagcacgcggcgatgaggccctgcgggaatatagtgcgaagtttg

SEQ ID NO: 717958 - DNA, 75 bp, synthetic construct
  source 1..75: mol_type = other DNA
gccgcgagctgaaaccgcacgtcaggcactgagcgccagccgcctgatcgtaaccaacgatttagcgcagtgcgt

SEQ ID NO: 717959 - DNA, 75 bp, synthetic construct
  source 1..75: mol_type = other DNA
tgctgacagcggcgctacgccggatttcgtggcttctgatttgctttctcaggctgaacacggcccagactcaca

SEQ ID NO: 717960 - DNA, 75 bp, synthetic construct
  source 1..75: mol_type = other DNA
gaaggtaaattagaaggtttgcaggaaggcatgcatgaacaagccattaaaattgctttgcgcatgctggagcag

SEQ ID NO: 717961 - DNA, 75 bp, synthetic construct
  source 1..75: mol_type = other DNA
gtcgttcagctatgcaggagacaggaatcgccagctgacccattacagcgatacccgctggcatgaagattccgt

SEQ ID NO: 717962 - DNA, 75 bp, synthetic construct
  source 1..75: mol_type = other DNA
aatccgtgaccattgaccttgcttatgaaggttccggtagtggcgactggcgaacggatgcatttattgttggta

SEQ ID NO: 717963 - DNA, 75 bp, synthetic construct
  source 1..75: mol_type = other DNA
gaccgaatccgtggccattgatgtcgcttatgaaggctccggcagtggtgactggcgcactgacggtttcatcgt

SEQ ID NO: 717964 - DNA, 75 bp, synthetic construct
  source 1..75: mol_type = other DNA
ttaattactcgcagaaaaaagattcgtaatgcattagagtcattgcctgcatgggagccgtacgtggcagccact

SEQ ID NO: 717965 - DNA, 75 bp, synthetic construct
  source 1..75: mol_type = other DNA
cttcttatgaccaaacctcagctaaacatctcgacgttgttcgctcggcgaaggatttgatgaatcagtgggcta

SEQ ID NO: 717966 - DNA, 75 bp, synthetic construct
  source 1..75: mol_type = other DNA
ttaagctcattagccactgcaattacggctttcgatatagatccgctcgccgtaatgttagcaaaagtgggctgg

SEQ ID NO: 717967 - DNA, 75 bp, synthetic construct
  source 1..75: mol_type = other DNA
ccgaattcgtggccattgatattgcttatgaagggtccggcagtggtgactggcgcactgacggtttcatcgtgg

SEQ ID NO: 717968 - DNA, 75 bp, synthetic construct
  source 1..75: mol_type = other DNA
ccgaatacgtggccattgatattgcttatgaagggtccggcagtggggactggcgcactgacggtttcatcgtgg

SEQ ID NO: 717969 - DNA, 75 bp, synthetic construct
  source 1..75: mol_type = other DNA
cccgaccgaatccgtggccattgaccttgcttatgaaggttccggtagtggcgactggcgaacggatgcatttat

SEQ ID NO: 717970 - DNA, 75 bp, synthetic construct
  source 1..75: mol_type = other DNA
ttgatgtcgcttatgaaggctccggcagcggtgactggcgtaccaacagtttcatcgttggtgtcggttataaat

SEQ ID NO: 717971 - DNA, 75 bp, synthetic construct
  source 1..75: mol_type = other DNA
ccgaatgcgtggccattgatattgcttatgaagggtccggcagtggagactggcgcactgacggtttcatcgtgg

SEQ ID NO: 717972 - DNA, 75 bp, synthetic construct
  source 1..75: mol_type = other DNA
ccgaatccgtggccattgatattgcttatgaagggtccggaagtggcgactggcgcactgacggtttcatcgtgg

SEQ ID NO: 717973 - DNA, 75 bp, synthetic construct
  source 1..75: mol_type = other DNA
ccgcgcaagaacccgcctggcagacccgcgatcatcttgatgatccggtgattggcgaactgcgcaaccgttttg

SEQ ID NO: 717974 - DNA, 75 bp, synthetic construct
  source 1..75: mol_type = other DNA
tgagaaaacttccggcagaaataaaaccggtagtgatgcgcattatggcttcgtatgcttttgaggattatgccc

SEQ ID NO: 717975 - DNA, 75 bp, synthetic construct
  source 1..75: mol_type = other DNA
gcactcatcgaccagaaaaagattcgtgagcagcttgctgcgtatgagagcagtctggcggacagtaatgccagt

SEQ ID NO: 717976 - DNA, 75 bp, synthetic construct
  source 1..75: mol_type = other DNA
agcgcagcgagtaaaaagcagtgcccttgttgctatggggaaaaatttattgaaagcgtagtttttacaaacaag

SEQ ID NO: 717977 - DNA, 75 bp, synthetic construct
  source 1..75: mol_type = other DNA
aggaagggcatcaaattggctggcaggagggtaagattgaaggcttgcaagaaggtaaattagaaggtttgcagg

SEQ ID NO: 717978 - DNA, 75 bp, synthetic construct
  source 1..75: mol_type = other DNA
aatcgccttgcgaatgctggaacaaggctttgaacgtaagattgtgctggcaacaacccagctaaccgatgccga

SEQ ID NO: 717979 - DNA, 75 bp, synthetic construct
  source 1..75: mol_type = other DNA
gcatttaatgctatatgcgaggtgacaaaccagataacacgcgcgtcatgggaaaaacagttaagaaattctatg

SEQ ID NO: 717980 - DNA, 75 bp, synthetic construct
  source 1..75: mol_type = other DNA
ttgagaaaacttccggcagaaataaaaccggtagtgatgcgcattatggcttcgtacgcttttgaggattatgcc

SEQ ID NO: 717981 - DNA, 75 bp, synthetic construct
  source 1..75: mol_type = other DNA
tgagaaaacttccggcagaaataaaaccggcagtgatgcgcattatggcttcgtacgcttttgaggattatgccc

SEQ ID NO: 717982 - DNA, 75 bp, synthetic construct
  source 1..75: mol_type = other DNA
ggcgtgtatccgtcttactgggaagaatggaaaaaaatccgggaggtggtgaaggtttcctgtcctgaatgtaaa

SEQ ID NO: 717983 - DNA, 75 bp, synthetic construct
  source 1..75: mol_type = other DNA
ctgtgaaagactaccatcaacggaggcatttaatgccatacgcaaagtgacgagtgctatcacgcttgatacgtg

SEQ ID NO: 717984 - DNA, 75 bp, synthetic construct
  source 1..75: mol_type = other DNA
gggaagggggagatttccactgcctgtaaagactgccgtgggcgtggtgtcgccattcatcgtgaagagtcggta

SEQ ID NO: 717985 - DNA, 75 bp, synthetic construct
  source 1..75: mol_type = other DNA
aggttcagtatccggatggcaagccgccagtatgggcaaagtgtacgaaaggtgtgtatccgtcttactgggaag

SEQ ID NO: 717986 - DNA, 75 bp, synthetic construct
  source 1..75: mol_type = other DNA
tcgcgaatacgaagctggtagttatgttcgggaataacccagcggaaacgcgtatgagcggcggcggcgtcactt

SEQ ID NO: 717987 - DNA, 75 bp, synthetic construct
  source 1..75: mol_type = other DNA
gtaaggggatggatcttgaactgacatggctccagtcgttgaaggttgtgctggttcgtggagctgttgcattgg

SEQ ID NO: 717988 - DNA, 75 bp, synthetic construct
  source 1..75: mol_type = other DNA
aatgggtcggtgatttttttgatgatgcgagaaaaggggtaattaatagatccggtggtatgaaaggtttaagag

SEQ ID NO: 717989 - DNA, 75 bp, synthetic construct
  source 1..75: mol_type = other DNA
cacaggctattagaatcctaagaacaatgcaggaaataaaaagagggcgttatatatttttttcctccagaacaa

SEQ ID NO: 717990 - DNA, 75 bp, synthetic construct
  source 1..75: mol_type = other DNA
gctttctgtcggcattgaagaaagccttcagcggtggtgatgttacgcctgccgatccggtcgtatttgcgagcg

SEQ ID NO: 717991 - DNA, 75 bp, synthetic construct
  source 1..75: mol_type = other DNA
gtttgactgcgccgacattatagcccgtatgcgcgatatcaaacccatctgggcgctggccaatgacatgaactg

SEQ ID NO: 717992 - DNA, 75 bp, synthetic construct
  source 1..75: mol_type = other DNA
atgttggattttgtttttttggtgtttttggtgtttttggggttgggcatatctacggtgctggtgcgtcggtct

SEQ ID NO: 717993 - DNA, 75 bp, synthetic construct
  source 1..75: mol_type = other DNA
tggatgttcgtctattccaccgccatcaccaacgatagtgcttcctacctgcataccttcggcgtgacggaaggg

SEQ ID NO: 717994 - DNA, 75 bp, synthetic construct
  source 1..75: mol_type = other DNA
ttgttattcaaaatttcgaccggcatggtgctgaccaagctgctggtgggtcgcggcgctgggcgtgtcgatggt

SEQ ID NO: 717995 - DNA, 75 bp, synthetic construct
  source 1..75: mol_type = other DNA
atcaccagaatgtaaagattacccgagtgtcattagcggttatttaggtaaaaactggggcatcctgttaggtgc

SEQ ID NO: 717996 - DNA, 75 bp, synthetic construct
  source 1..75: mol_type = other DNA
actaaatcagtaagttggcagcatcacccgcaagcgcaagaggaaaataacatttccgccaaaattagcgtggca

SEQ ID NO: 717997 - DNA, 75 bp, synthetic construct
  source 1..75: mol_type = other DNA
aaaaatcatcgtctggctaaagaggccgcagaggaaaaacttgccaggttcgctgccattgatgacccgaaaaag

SEQ ID NO: 717998 - DNA, 75 bp, synthetic construct
  source 1..75: mol_type = other DNA
atggcatttcgttattttgaacttaccgaaaatattccttttgaggatgcaagagagcttcacgtacagttcaaa

SEQ ID NO: 717999 - DNA, 75 bp, synthetic construct
  source 1..75: mol_type = other DNA
caatgcttggctgggctgatcagatgagtggtggacttggggaaggcggttggcagcaaacagctatccaggccg

SEQ ID NO: 718000 - DNA, 75 bp, synthetic construct
  source 1..75: mol_type = other DNA
ggctcagtgcagctgcggggccagcggcatgtgccgtcatcgcgtgatgctggtgttaagttatcagcgactttg

SEQ ID NO: 718001 - DNA, 75 bp, synthetic construct
  source 1..75: mol_type = other DNA
cgatgccacccgcaaacgcgcacagacactggtcgctaaaggcatcaccattgagttgttctgtacgccgggcga

SEQ ID NO: 718002 - DNA, 75 bp, synthetic construct
  source 1..75: mol_type = other DNA
tgggcggcatcagccagccgcttattcattacgaggctgctttcagccgcgcgcagcaagcggcggaacgctgca

SEQ ID NO: 718003 - DNA, 75 bp, synthetic construct
  source 1..75: mol_type = other DNA
atgaagccattgagttctcaattgaatatgaaaattaatgatttttacttgccattgttacccgtcataggcact

SEQ ID NO: 718004 - DNA, 75 bp, synthetic construct
  source 1..75: mol_type = other DNA
gcatgtataatgctgttaggtgttattattatgattgcatatggatgtttgacaaatagaacatcatctatagta

SEQ ID NO: 718005 - DNA, 75 bp, synthetic construct
  source 1..75: mol_type = other DNA
gcctgtggcaccgctaccttctgccagcgttctgcctgtaccgtctaccactcatcagttactgatgcgctgtca

SEQ ID NO: 718006 - DNA, 75 bp, synthetic construct
  source 1..75: mol_type = other DNA
gcgctggtcgctaaaggcatcaccattgagttgttctgtacgccgggcgaaattccctctgcccgcttaccgatg

SEQ ID NO: 718007 - DNA, 75 bp, synthetic construct
  source 1..75: mol_type = other DNA
cagcgtctggcattctgcgcatcgcattctgatacctgacctgctggtagtccatccagtccataacgagggata

SEQ ID NO: 718008 - DNA, 75 bp, synthetic construct
  source 1..75: mol_type = other DNA
atgaatatcattgtgttggtaacctgctgttatcgtgatgaaattaccgctcaattttttcggttgacgcggtct

SEQ ID NO: 718009 - DNA, 75 bp, synthetic construct
  source 1..75: mol_type = other DNA
aagcgcagccttaaggaactggaaaatggcaacgtcccggaaatcagccatgagaacggcgctttaatcgccacc

SEQ ID NO: 718010 - DNA, 75 bp, synthetic construct
  source 1..75: mol_type = other DNA
gaagaagagtgggatccggcaatctggctggaagaactggctaccctgcccgatgccacccgcaaacgcgcgcag

SEQ ID NO: 718011 - DNA, 75 bp, synthetic construct
  source 1..75: mol_type = other DNA
ggtcgagttgcatccgcagaaagactacatcctcaaagcgtccggcaacagcggcggtggttctcaccagtcgca

SEQ ID NO: 718012 - DNA, 75 bp, synthetic construct
  source 1..75: mol_type = other DNA
gctggcaacctatacgctgttttacatcatgacggtctactctatgacctttagtaccgccgccgcgccagttgg

SEQ ID NO: 718013 - DNA, 75 bp, synthetic construct
  source 1..75: mol_type = other DNA
aaggaaaaactgcgcacgcaggacggcgatccgcagaatcggttcaccgcaacgggcgcagcctccgaccagctg

SEQ ID NO: 718014 - DNA, 75 bp, synthetic construct
  source 1..75: mol_type = other DNA
gcattgagcttgaacccaacattgatgccgttggcggcccttacgtaattggcctggcaatgaccgataccccgg

SEQ ID NO: 718015 - DNA, 75 bp, synthetic construct
  source 1..75: mol_type = other DNA
catatcttcttcccgcagggcgatcctacggcagcaacgctacagtcgctcgccaccttcgccatcgccttcgtc

SEQ ID NO: 718016 - DNA, 75 bp, synthetic construct
  source 1..75: mol_type = other DNA
ccgtttatcttctcggcggtgctggtgattatcggcctgtatgtccgcgtttcactgcatgaatcgccggtgttt

SEQ ID NO: 718017 - DNA, 75 bp, synthetic construct
  source 1..75: mol_type = other DNA
gcctccctcattggtacagccattgagttcttcgacttttacatttacgccactgcagccgtcattgtgttcccg

SEQ ID NO: 718018 - DNA, 75 bp, synthetic construct
  source 1..75: mol_type = other DNA
gttccattgctccaaagattggctgtacgccagagactctgcgcgtctgggttcgccagcatgagcgggataccg

SEQ ID NO: 718019 - DNA, 75 bp, synthetic construct
  source 1..75: mol_type = other DNA
ccgctgaacgtcagcgtctgaaagagctggaacgtgaaaatcgtgaactgagccgcatcgtctatggaaacgaca

SEQ ID NO: 718020 - DNA, 75 bp, synthetic construct
  source 1..75: mol_type = other DNA
gttcgccagcatgagcgggataccgggagcggtgatggtggactcactaccgctgaacgtcagcgtctgaaagag

SEQ ID NO: 718021 - DNA, 75 bp, synthetic construct
  source 1..75: mol_type = other DNA
gcagggcagcgaagcgatgaaggtagcaagtggtttagccgcatgaaggaacttctgaccaaaaaccataaaaca

SEQ ID NO: 718022 - DNA, 75 bp, synthetic construct
  source 1..75: mol_type = other DNA
gaatgtctcatcaacggctgaaggactttacacatcacaacctgggatcagtaagcaagtcagaatgctggaaga

SEQ ID NO: 718023 - DNA, 75 bp, synthetic construct
  source 1..75: mol_type = other DNA
gcgctgcatctgtatgaagatttagtgatgttaccgtgctaccactggaatcgggctattgtagtcactccggat

SEQ ID NO: 718024 - DNA, 75 bp, synthetic construct
  source 1..75: mol_type = other DNA
ggcgctgctggcgactgaaaacgccccaccgcgcaaacgtgcactgtatggctccttcccacagctgggcgcacc

SEQ ID NO: 718025 - DNA, 75 bp, synthetic construct
  source 1..75: mol_type = other DNA
gcggcgatgaccggactggtgccggaagatttggccgaaatggatcttgctgactatcaggcgttgcagaaacga

SEQ ID NO: 718026 - DNA, 75 bp, synthetic construct
  source 1..75: mol_type = other DNA
gaacatgcctggcgttacccgcatgagttttccggcggtcagcgccagcgcatctgcattgctcgcgcgttggca

SEQ ID NO: 718027 - DNA, 75 bp, synthetic construct
  source 1..75: mol_type = other DNA
attacgtcgcacaaccacaatcagaatacgcattcaggcggagaataaaatggcaagagctgtacaccgtagtgg

SEQ ID NO: 718028 - DNA, 75 bp, synthetic construct
  source 1..75: mol_type = other DNA
gtactgcgtcgcccgctggatgacgccacgctgaccgcgcaacagcagcaggccacacgcagcgacggcaatgcc

SEQ ID NO: 718029 - DNA, 75 bp, synthetic construct
  source 1..75: mol_type = other DNA
tcgtttaccgccgctacttccaaatcccggtccgtatatcctacagttgtccagaaaaatacggttgtaagatgc

SEQ ID NO: 718030 - DNA, 75 bp, synthetic construct
  source 1..75: mol_type = other DNA
ttccatttacgtcggcagcaggaaataatatcgacacgctgcaattacgtcgcctgaaagtaaaagatatgcgca

SEQ ID NO: 718031 - DNA, 75 bp, synthetic construct
  source 1..75: mol_type = other DNA
actgaccacagagctggcagcactgaaggaaaaactgcgcacgcaggacggcgatccgcagaaccggttcaccgc

SEQ ID NO: 718032 - DNA, 75 bp, synthetic construct
  source 1..75: mol_type = other DNA
accgaacaacgccaggaagaaggcacccagtggtttaaccgcgtaatggggattattggccgtggccgcaaagcg

SEQ ID NO: 718033 - DNA, 75 bp, synthetic construct
  source 1..75: mol_type = other DNA
tctcggggcttccgttgcgccatatatcgcagcctggttgcagactaactacgggttaggtgcggtggggttata

SEQ ID NO: 718034 - DNA, 75 bp, synthetic construct
  source 1..75: mol_type = other DNA
caaattatcaacctgttgcttgatcttcagcgtgatttcggtatcgcgtatctatttatctcccacgatatggca

SEQ ID NO: 718035 - DNA, 75 bp, synthetic construct
  source 1..75: mol_type = other DNA
atacgcgtaaattactggcggcagttccggtcgctgaaccgtcccgacaacgaccgcagcgtgtactgctgtcgg

SEQ ID NO: 718036 - DNA, 75 bp, synthetic construct
  source 1..75: mol_type = other DNA
ctcttattaatatctacttgttatacatccaaccgatattggggatgttccttataggtataggcttatgggggt

SEQ ID NO: 718037 - DNA, 75 bp, synthetic construct
  source 1..75: mol_type = other DNA
atgtgccgtcatcgcgtgatgctggtgttaagttatcaacgactttgtgctaccgcccagcctacgggaaaagaa

SEQ ID NO: 718038 - DNA, 75 bp, synthetic construct
  source 1..75: mol_type = other DNA
tgggcggcatcagccagccgcttattcactacgaggccgctttcagccgcgcgcagcaagcggcggaacgctgca

SEQ ID NO: 718039 - DNA, 75 bp, synthetic construct
  source 1..75: mol_type = other DNA
cctgcatacgacctcttaaccaggtggataatttatttattctgccagtggcggaatgtctttcccttggctggg

SEQ ID NO: 718040 - DNA, 75 bp, synthetic construct
  source 1..75: mol_type = other DNA
gaacacgtagtgttggcggtacaagcgttcgccgaggccaaagcgcaacaggcagagtttactcacctgatttgg

SEQ ID NO: 718041 - DNA, 75 bp, synthetic construct
  source 1..75: mol_type = other DNA
tttatggattatgttcatggcgtaaaaaatgtaaaagagactctttaagacgacgtcataaacaaaaaatcctgc

SEQ ID NO: 718042 - DNA, 75 bp, synthetic construct
  source 1..75: mol_type = other DNA
atacggaagcagccactatcaggcaactgaacccgctgacggatgaggtgtacagtggcatcagtggacggatta

SEQ ID NO: 718043 - DNA, 75 bp, synthetic construct
  source 1..75: mol_type = other DNA
cagaagttaaataatctacagaagttaaataatccgcaggagttaaataatccgcaggagttaaataatccgcag

SEQ ID NO: 718044 - DNA, 75 bp, synthetic construct
  source 1..75: mol_type = other DNA
ttcagtgacggtacacgcagccaactggcaaacggtcaggctctgaaagaggcccagtgtagctgcggggccagc

SEQ ID NO: 718045 - DNA, 75 bp, synthetic construct
  source 1..75: mol_type = other DNA
gggacatggctggttattaaaaaacagagataagcttccagttactatggctttgattaatatgagtaaatctaa

SEQ ID NO: 718046 - DNA, 75 bp, synthetic construct
  source 1..75: mol_type = other DNA
cctgggcgctggacgcggaaactacgcctgtggcaccgctaccttcagatagtgttcttccggtgccgtccagtg

SEQ ID NO: 718047 - DNA, 75 bp, synthetic construct
  source 1..75: mol_type = other DNA
ttgaaacgaccggagaaacgccctcgtttgtttaccgctatcagatggtgatgtttgtcatggattacgccggag

SEQ ID NO: 718048 - DNA, 75 bp, synthetic construct
  source 1..75: mol_type = other DNA
cttagtaatttttcactagggcagcgcacactattgaagttttgcccggtttgcgctcgtgaagatacttttcat

SEQ ID NO: 718049 - DNA, 75 bp, synthetic construct
  source 1..75: mol_type = other DNA
ccctaactgattatcattactgggagcctatactcaaagacaaatgttgtcagcatcccacaaagcatcttttgc

SEQ ID NO: 718050 - DNA, 75 bp, synthetic construct
  source 1..75: mol_type = other DNA
gggtgatgtgtattttgttgaaaatgaatctcggggaagcgttatatataacctttttcttcaacttgagaaaga

SEQ ID NO: 718051 - DNA, 75 bp, synthetic construct
  source 1..75: mol_type = other DNA
atgaaggcatcgataaatcaaccttccataaactcttaaagaaatatgaaatcaaggtgaagattgaagctaccg

SEQ ID NO: 718052 - DNA, 75 bp, synthetic construct
  source 1..75: mol_type = other DNA
ctctttgtgatgaattttgccggtgatctggatgatttcacgttaccgctgatggcctggttgtggcaggaacag

SEQ ID NO: 718053 - DNA, 75 bp, synthetic construct
  source 1..75: mol_type = other DNA
gaaaacttcgagcgggtagagaagatgtcgccagaagcgtttgaagagagcgtagatgccattcgactggcggcg

SEQ ID NO: 718054 - DNA, 75 bp, synthetic construct
  source 1..75: mol_type = other DNA
ccccgtctgccatcttccgaaggcgactggtcgcatgtattccaggatgtgacgtggggtgaaagcgatggataa

SEQ ID NO: 718055 - DNA, 75 bp, synthetic construct
  source 1..75: mol_type = other DNA
tgtgctctattcatacagcacagtaacaccaaatactactgagcagaacggtcagcaatctcaccaactgtactc

SEQ ID NO: 718056 - DNA, 75 bp, synthetic construct
  source 1..75: mol_type = other DNA
atgaaaacgggaccgttgaacgaaagtgagttggaatggctggatgatatcctgaccaaatacaacacagaccac

SEQ ID NO: 718057 - DNA, 75 bp, synthetic construct
  source 1..75: mol_type = other DNA
gtcagagaaagagatgacgcgctttatgaacctggcttttcagcatatggctgataccgcagagcgtctgaacga

SEQ ID NO: 718058 - DNA, 75 bp, synthetic construct
  source 1..75: mol_type = other DNA
ccgattcgttaaaaccagcgctggaggcgattgcgctgcacggtactgaggaaaacttcgagcgggtagagaaga

SEQ ID NO: 718059 - DNA, 75 bp, synthetic construct
  source 1..75: mol_type = other DNA
tgaatgatttttttatgaaaaacactgagatgattaactggtactttcctcggttacttaagagttatgagggcg

SEQ ID NO: 718060 - DNA, 75 bp, synthetic construct
  source 1..75: mol_type = other DNA
gctcatattgagtcctcatcttattctaaagatactgatggcaatgaaaaaatgaagttttacatgaataatcct

SEQ ID NO: 718061 - DNA, 75 bp, synthetic construct
  source 1..75: mol_type = other DNA
ggacgcgctgaaaataccccaggatgttcgcgaagaaattgaacgcgatctcgaacagcaaaaacgcattatgtc

SEQ ID NO: 718062 - DNA, 75 bp, synthetic construct
  source 1..75: mol_type = other DNA
gggtgacgcgctgaaaatcccccaggatgttcgtgacggcattgaacgcgatctcgaacagcaaaaacgtacttt

SEQ ID NO: 718063 - DNA, 75 bp, synthetic construct
  source 1..75: mol_type = other DNA
agttagaaaaattaaatcctccggaagatttacgaacagtaatagaaaaactggggtggaagaatagaactcaca

SEQ ID NO: 718064 - DNA, 75 bp, synthetic construct
  source 1..75: mol_type = other DNA
ggatttattagaaaaaccattgaataatgccttattagcaataaggaacgaacatctgctattaatgcctcatgt

SEQ ID NO: 718065 - DNA, 75 bp, synthetic construct
  source 1..75: mol_type = other DNA
aagaaccctataaaaatagccctgaattacaggagttgatttggaataagttggttgtatatgtcaatgatttta

SEQ ID NO: 718066 - DNA, 75 bp, synthetic construct
  source 1..75: mol_type = other DNA
tcgagcatgcctggaaatactttgaaatccatactcaacagagaatgactgtgtttaatttttatattgccatca

SEQ ID NO: 718067 - DNA, 75 bp, synthetic construct
  source 1..75: mol_type = other DNA
caaccgtaaagttgagcgataataacttatctattacggatgttcaggccgcagatccgttatgtactatcagca

SEQ ID NO: 718068 - DNA, 75 bp, synthetic construct
  source 1..75: mol_type = other DNA
aatgaaaattggcaatttgttcctcattctaataccttttttttgatggttatatcgttccggggtggactgact

SEQ ID NO: 718069 - DNA, 75 bp, synthetic construct
  source 1..75: mol_type = other DNA
tattgatgccaaagaacgtgcggcaatcgaccagcaattgcgtgaagccggcgtggaagagcaggggcgtgtact

SEQ ID NO: 718070 - DNA, 75 bp, synthetic construct
  source 1..75: mol_type = other DNA
tcatcgattcgatgttgaagacttttttaaaattgccatatattaatgatgtaaaaattctggagtggtgtttta

SEQ ID NO: 718071 - DNA, 75 bp, synthetic construct
  source 1..75: mol_type = other DNA
gctctacgaattaaatgatcacggaattgataatgacaaagaaggtaacaatgaaattaatgacatcatgattaa

SEQ ID NO: 718072 - DNA, 75 bp, synthetic construct
  source 1..75: mol_type = other DNA
gggaacgagcggattcacccaaggtgattatagaaatttcactttccactatcactactatggggactcgtcaag

SEQ ID NO: 718073 - DNA, 75 bp, synthetic construct
  source 1..75: mol_type = other DNA
caaaaccttccggatgaacgctgctcaggtactgcatgataaatatatgatctggtgcggtgagcagctatggtc

SEQ ID NO: 718074 - DNA, 75 bp, synthetic construct
  source 1..75: mol_type = other DNA
aaattatcgtcagaagttaaataattcgcaggggttaaataattcacaggggttaaataattcgcaggggttaaa

SEQ ID NO: 718075 - DNA, 75 bp, synthetic construct
  source 1..75: mol_type = other DNA
atattaataaagaacagctagaaaaattaaatcctccggaaaatttacgtataacaatagaaaaatttggctgga

SEQ ID NO: 718076 - DNA, 75 bp, synthetic construct
  source 1..75: mol_type = other DNA
atgtcgttaagatttttgaagaaaagatggggaatgaattaaaaattagaacaagaatgatgaaaatcctccggg

SEQ ID NO: 718077 - DNA, 75 bp, synthetic construct
  source 1..75: mol_type = other DNA
tgatgaggaaaaaacaaaagaaattgtaaataaacttccgggttatgacgttaagatttttgaagaaaagatcga

SEQ ID NO: 718078 - DNA, 75 bp, synthetic construct
  source 1..75: mol_type = other DNA
attcgcaggatttaaatgattctcaggatttaaatgattctcaggatttaaatgattctcaggagttaaataact

SEQ ID NO: 718079 - DNA, 75 bp, synthetic construct
  source 1..75: mol_type = other DNA
atgaacagcatttaaatacactaaatcctccggaaaatttacgtatagcaatagaaaaatttggctggaagaata

SEQ ID NO: 718080 - DNA, 75 bp, synthetic construct
  source 1..75: mol_type = other DNA
gatgaagggctgcgtccgcatcatattcaaagctacggtaatccggtggagcagacctggcagaaggtgtatcag

SEQ ID NO: 718081 - DNA, 75 bp, synthetic construct
  source 1..75: mol_type = other DNA
aacaacattcagtacgcgtggatccgtctgctggcgggcgataccggcaaagtgatgattgttggtgatgacgac

SEQ ID NO: 718082 - DNA, 75 bp, synthetic construct
  source 1..75: mol_type = other DNA
aaaacctggcaggacaacggcggggcgctcgctgagtgcgccattctctaccgcagcaacgcccagtcgcgtgtg

SEQ ID NO: 718083 - DNA, 75 bp, synthetic construct
  source 1..75: mol_type = other DNA
agcccagcacgaagaggcattagaaaaagcggcggctactctggacaatgaagaacaagcgctatggcttgctaa

SEQ ID NO: 718084 - DNA, 75 bp, synthetic construct
  source 1..75: mol_type = other DNA
atggctatttttcatcttgattttaaaattgtgaaacgttcagaaggcaggtcttccgttgcgaaagctgcctat

SEQ ID NO: 718085 - DNA, 75 bp, synthetic construct
  source 1..75: mol_type = other DNA
caaacggggcatccagaagcacccctaaacgtgttaaaaggaaacatgccactccacgtcaggataatattttta

SEQ ID NO: 718086 - DNA, 75 bp, synthetic construct
  source 1..75: mol_type = other DNA
agctgtaatttgttgtccctgtgtgtgctggccccggtattctgtacacccaaaaagctggctgaagtttccagg

SEQ ID NO: 718087 - DNA, 75 bp, synthetic construct
  source 1..75: mol_type = other DNA
tgggtattgacgaaaataccctcatggcgatgcgccggggtgtgggtgatttctccgggcagtacagcgcaatgg

SEQ ID NO: 718088 - DNA, 75 bp, synthetic construct
  source 1..75: mol_type = other DNA
caaatgtcatcaaaatggggctggccgtcgaaggaactgcactgtccgtggtggccttcacggctaagattgcct

SEQ ID NO: 718089 - DNA, 75 bp, synthetic construct
  source 1..75: mol_type = other DNA
gctgctgcgcgctcacgagttgtggcttaacaagccgcatatcctgcaacactaccgcgaacgttttaccaacat

SEQ ID NO: 718090 - DNA, 75 bp, synthetic construct
  source 1..75: mol_type = other DNA
caactgatgggcaccagccagggcggcatgtgggtcggcaccttccacgggctggcgcaccgcctgctgcgtgcg

SEQ ID NO: 718091 - DNA, 75 bp, synthetic construct
  source 1..75: mol_type = other DNA
atgacatcagacaatatcgctgaatatgttggtgagaataatcaatttactgagaagcctgtaactgaatactcc

SEQ ID NO: 718092 - DNA, 75 bp, synthetic construct
  source 1..75: mol_type = other DNA
tgatgaagtgctgggtgtcaatgttccacgctcggagtttgaaagacgcgctaagtttaacaatgaccagacatc

SEQ ID NO: 718093 - DNA, 75 bp, synthetic construct
  source 1..75: mol_type = other DNA
actgccagaagaactttattgatcaagggatgattgctgatatcgcatttcatgatttagacggtaaaaatcctc

SEQ ID NO: 718094 - DNA, 75 bp, synthetic construct
  source 1..75: mol_type = other DNA
aatccgttagtgattacgataatggggcatcaccttcattacctcccgaactaatgaagggggtaaaatttctaa

SEQ ID NO: 718095 - DNA, 75 bp, synthetic construct
  source 1..75: mol_type = other DNA
cacgatttagacagtaagaatccacatgctcacgtcatgttaactctgaaaaccattggtcccgaaggcttcggt

SEQ ID NO: 718096 - DNA, 75 bp, synthetic construct
  source 1..75: mol_type = other DNA
atgctcacgtcatgttaaccctgaaaactatcaccgctgctggcttcggtaaaaaagacagaagctggaatgata

SEQ ID NO: 718097 - DNA, 75 bp, synthetic construct
  source 1..75: mol_type = other DNA
ccaataaggtcagtaaagtaaatgtatcagggaagaaatcccctgttctggttgttcctgaaccaaatgcatcca

SEQ ID NO: 718098 - DNA, 75 bp, synthetic construct
  source 1..75: mol_type = other DNA
actgtcagaagaactttgttgataaaggaatgatcgctgatatcgttttccacgatttggatggtaagaatcccc

SEQ ID NO: 718099 - DNA, 75 bp, synthetic construct
  source 1..75: mol_type = other DNA
gatcatcaaattgaggaagcaaagaagatctacaccacattcagtgagctaccactggagatcgtggttgatgtc

SEQ ID NO: 718100 - DNA, 75 bp, synthetic construct
  source 1..75: mol_type = other DNA
acagaccaagccccgccagaatggtttgtttaaacgtttcacgctactgatagtaggatatataagagagaaatt

SEQ ID NO: 718101 - DNA, 75 bp, synthetic construct
  source 1..75: mol_type = other DNA
ctcagcactctggaatgaagttgaaagagtggaacgccagaacaatggtcaaacagcccgttattttgatgtcgc

SEQ ID NO: 718102 - DNA, 75 bp, synthetic construct
  source 1..75: mol_type = other DNA
agaaccgagctccgatgaggagtaggaaacagactaagccacgacaaaatggtttgtttaaacatttcacgctac

SEQ ID NO: 718103 - DNA, 75 bp, synthetic construct
  source 1..75: mol_type = other DNA
agacttcccggcaacaactaaacagcaacctgttatgacgacatcagctataagcagaaggccagcagcaaaatc

SEQ ID NO: 718104 - DNA, 75 bp, synthetic construct
  source 1..75: mol_type = other DNA
ccttttactccccccacaaatgggaacgacaataatgattcaccacgactgagaccttcgagttatcaatctaat

SEQ ID NO: 718105 - DNA, 75 bp, synthetic construct
  source 1..75: mol_type = other DNA
tcaggctgccttatcgtcaaaccggtttatgacctcgctgaaatcgctcggtgaaatggccgggatggcgcggga

SEQ ID NO: 718106 - DNA, 75 bp, synthetic construct
  source 1..75: mol_type = other DNA
gcgactatgcctccggcactaaccatgttctaccgacttacggttacaccgccacctgttccagcctcgggctgg

SEQ ID NO: 718107 - DNA, 75 bp, synthetic construct
  source 1..75: mol_type = other DNA
gcgcaaaaactgccgacggtagatatcgaaacccagccaggcgtacgttgccagcaagtcacccgcccggtagcc

SEQ ID NO: 718108 - DNA, 75 bp, synthetic construct
  source 1..75: mol_type = other DNA
gccacctgttccagcctcgggctggcagatttccagaagcgcatgaccgtgcaggaactgtcgaaagaaggtttc

SEQ ID NO: 718109 - DNA, 75 bp, synthetic construct
  source 1..75: mol_type = other DNA
ccgggaagcagatcctgtcagagctgtatctggataacatcgatgaaggcacctttaatcagatggtcagcggta

SEQ ID NO: 718110 - DNA, 75 bp, synthetic construct
  source 1..75: mol_type = other DNA
cgcttttgtcgctggttgtcagttattcctgcgctttacaggccaaaaacgtgtcactgggggacacggccgtgg

SEQ ID NO: 718111 - DNA, 75 bp, synthetic construct
  source 1..75: mol_type = other DNA
tcagttggtttgtatattcctggcggctccgccccgctcttctcaacggtattaatgctggcaactccggcgcgt

SEQ ID NO: 718112 - DNA, 75 bp, synthetic construct
  source 1..75: mol_type = other DNA
ttttattatatggtgtttttttacaatagagtgaatgcaagagagcatgtatcgagattaatcatctttattctt

SEQ ID NO: 718113 - DNA, 75 bp, synthetic construct
  source 1..75: mol_type = other DNA
tttacatggacggacgcaatcgaccatggtacggaaatgacggcaacccgcgatggcgtgcgcggtaaagaaaaa

SEQ ID NO: 718114 - DNA, 75 bp, synthetic construct
  source 1..75: mol_type = other DNA
gatccacgttataacgacactgctgccgggcgtgaagatgaatggctgccaattcgcccaggcaccgatggcgca

SEQ ID NO: 718115 - DNA, 75 bp, synthetic construct
  source 1..75: mol_type = other DNA
cggtcgaacgccagctggcagaactgccgcgtgctgaaaccgcccgccaggcactgagcgccagccgcctgattg

SEQ ID NO: 718116 - DNA, 75 bp, synthetic construct
  source 1..75: mol_type = other DNA
gccagcgaacgtctgagcgacgacctgaaacaggcaatggcggttgcggtaaaaaatattgaagccttccacact

SEQ ID NO: 718117 - DNA, 75 bp, synthetic construct
  source 1..75: mol_type = other DNA
gacggtgcggcgatcgatatgcccgcaggcccgtcggaagtgctggtgattgctgacagcggcgctacgccggat

SEQ ID NO: 718118 - DNA, 75 bp, synthetic construct
  source 1..75: mol_type = other DNA
ccacggagaacgctttgccagccgagaaataatgcggacgacagtgttaattatatcgagtgtgattacaatcgc

SEQ ID NO: 718119 - DNA, 75 bp, synthetic construct
  source 1..75: mol_type = other DNA
ctggtcgcatggcgtctgcttaattctgcgttcctgaaatccccgattggaattatcaccacactgattctggcg

SEQ ID NO: 718120 - DNA, 75 bp, synthetic construct
  source 1..75: mol_type = other DNA
gactggattcaagataagtttggtgtcgatcctcgtaatgttggtcggtggataaaagggagatttggcgatgat

SEQ ID NO: 718121 - DNA, 75 bp, synthetic construct
  source 1..75: mol_type = other DNA
ttctcgtctcgctcggtttcgatatcgacgaagcaggcgcggaaaagttcgattcagttctcgcaggtacgaccg

SEQ ID NO: 718122 - DNA, 75 bp, synthetic construct
  source 1..75: mol_type = other DNA
tcctcgtctcgcttggcttcagtgtggatgatgcaggagcgaaaaaattcggttctgtcctcgccggtacaactg

SEQ ID NO: 718123 - DNA, 75 bp, synthetic construct
  source 1..75: mol_type = other DNA
agactcatgccgataaatacgatctcatcaataaaacatcccgtgtttctcctgacagtggccacttttatgaac

SEQ ID NO: 718124 - DNA, 75 bp, synthetic construct
  source 1..75: mol_type = other DNA
aagtttccagggagatcatcgtggcgagtgcgcaggaaattgcatggacgccggggagcagtcgtattgatggcc

SEQ ID NO: 718125 - DNA, 75 bp, synthetic construct
  source 1..75: mol_type = other DNA
cccgtcggcggcaccggttttacctctcatcagacgccgcttgatggttggatggcaatggccaggcagatccgt

SEQ ID NO: 718126 - DNA, 75 bp, synthetic construct
  source 1..75: mol_type = other DNA
agcgccccggtgattcagcaggaaacgaatattaacatccacggcgtttccgatccgcgcgaggctgcccgtttg

SEQ ID NO: 718127 - DNA, 75 bp, synthetic construct
  source 1..75: mol_type = other DNA
cgtgcggcggtctcagcccggaacaatttgaaaaccagaatctcacttagcactgtgtccacattccgtgggtaa

SEQ ID NO: 718128 - DNA, 75 bp, synthetic construct
  source 1..75: mol_type = other DNA
cgctactggggatcttgcgcgataaggttggctcgaatctggccggcggcctgagcggcacgctgaacaatctca

SEQ ID NO: 718129 - DNA, 75 bp, synthetic construct
  source 1..75: mol_type = other DNA
gtcagatgcttacgcaattggtaaaaacctgctttctcaggggaaggggcaggatgcacttcctgctgtatcgga

SEQ ID NO: 718130 - DNA, 75 bp, synthetic construct
  source 1..75: mol_type = other DNA
atttacggcgcgagcgacccggcatccactggccgggaggttgccgatcgtcaatccggcgttaattcccgtctt

SEQ ID NO: 718131 - DNA, 75 bp, synthetic construct
  source 1..75: mol_type = other DNA
aaaactccggcgcgcctgcggttggaaggttatcgggcggcgatgaaacgtgcgggtctcaacattcctgatggc

SEQ ID NO: 718132 - DNA, 75 bp, synthetic construct
  source 1..75: mol_type = other DNA
ggtcatacccgtattgcttgtattactggcccgctggataaaacaccggcgcgcctgcggttagaaggttatcgg

SEQ ID NO: 718133 - DNA, 75 bp, synthetic construct
  source 1..75: mol_type = other DNA
gcactgaccgaacaaaccgtcgtcgttcccggcacgaatgccgctgccgtagtactgccacgtctggcactccag

SEQ ID NO: 718134 - DNA, 75 bp, synthetic construct
  source 1..75: mol_type = other DNA
tcatcacgctgcgtaagcaaagagacgaggtggcgcttgcggtagaacagcgagttcttgctcaccctctttacc

SEQ ID NO: 718135 - DNA, 75 bp, synthetic construct
  source 1..75: mol_type = other DNA
tgcgcccccaggcagtctttactggaaatgacgctatggcagttggcgtataccaggctctatatcaggctgggt

SEQ ID NO: 718136 - DNA, 75 bp, synthetic construct
  source 1..75: mol_type = other DNA
atgcgccaactgttatcacatccgctgcgtcctcaggccgtctttaccggaaatgacgctatggctgttggcgtt

SEQ ID NO: 718137 - DNA, 75 bp, synthetic construct
  source 1..75: mol_type = other DNA
atccgcgaaaaagtagagcgacagaatttttgtttctcattctgtttatcgtattgatgataccgatatccccgc

SEQ ID NO: 718138 - DNA, 75 bp, synthetic construct
  source 1..75: mol_type = other DNA
ttatggctggcgaagagttcggcgatgtcgaagcgattttccacgaaggcgcgtgctcttccaccaccgagtggg

SEQ ID NO: 718139 - DNA, 75 bp, synthetic construct
  source 1..75: mol_type = other DNA
atggtcacattatttagaaaaaaatatccgcgaaagagtagaacaacagaatttctgtttctcattctgtttatc

SEQ ID NO: 718140 - DNA, 75 bp, synthetic construct
  source 1..75: mol_type = other DNA
gaaggagaccatacaatttctctggggtatgcgcactttcagtttccgggactgaaggattttgtaaaggatgcg

SEQ ID NO: 718141 - DNA, 75 bp, synthetic construct
  source 1..75: mol_type = other DNA
ggtatgcgcactttcagtttccgggactgaaggattttgtaaaggatgcgactgctcataacagggagactttca

SEQ ID NO: 718142 - DNA, 75 bp, synthetic construct
  source 1..75: mol_type = other DNA
aataattgagccagtttctgaattgtataacgacgtggtgtgggcgtcattcaacacactgcacaataaaattaa

SEQ ID NO: 718143 - DNA, 75 bp, synthetic construct
  source 1..75: mol_type = other DNA
ccggtcctgaccagtatgcccggagtcggtgtcaggaccgcagccagactcctcaccgaggtcgcctgccgcgcc

SEQ ID NO: 718144 - DNA, 75 bp, synthetic construct
  source 1..75: mol_type = other DNA
tcatgtatatcatcgtagcgattgtgatgctgctgcgtggttttgcagatgccattatgatgcgtagtcaacagg

SEQ ID NO: 718145 - DNA, 75 bp, synthetic construct
  source 1..75: mol_type = other DNA
atatctggtggctggcgattgttggcttcgcaggcatgatcatcacctggatcgtgaaaagcttcgacgaggacg

SEQ ID NO: 718146 - DNA, 75 bp, synthetic construct
  source 1..75: mol_type = other DNA
ccggtatttacctgggcatcactgtgcgcaaacattctgattatcgcctccttcccaattctgacggttaccgtc

SEQ ID NO: 718147 - DNA, 75 bp, synthetic construct
  source 1..75: mol_type = other DNA
ctgagaaagaggtaaacaggatgactaaaaaaacacgtttttcccccgaagtccgtcaacgggcagttcgtatgg

SEQ ID NO: 718148 - DNA, 75 bp, synthetic construct
  source 1..75: mol_type = other DNA
cgggataccggaggcggtgatggtgggcttaccaccgctgaacgtcagcgtctgaaagagctggaacgtgaaaat

SEQ ID NO: 718149 - DNA, 75 bp, synthetic construct
  source 1..75: mol_type = other DNA
ggcggcgaagggatcaaccagtggtacaacgttactctgaccgaaggccgtaaccgtgaagttcgtcgtctgtgg

SEQ ID NO: 718150 - DNA, 75 bp, synthetic construct
  source 1..75: mol_type = other DNA
atgaactggaaaatatttgcgctttttgccctggctgcagggatgcatatcactgttcatgcctcagacaatgta

SEQ ID NO: 718151 - DNA, 75 bp, synthetic construct
  source 1..75: mol_type = other DNA
ccaattatcaaaagtctctgggcggtaaccgtggttgccaccatcgtaatcctgtttgttgccctgtactggtaa

SEQ ID NO: 718152 - DNA, 75 bp, synthetic construct
  source 1..75: mol_type = other DNA
cgtcgtcgttcccggcacaaatgctgctatcgtcgttctcccgcgtctggcactccagctcatcacactgcgtaa

SEQ ID NO: 718153 - DNA, 75 bp, synthetic construct
  source 1..75: mol_type = other DNA
aacgcagccgcgcgcaacgcgcggcctttctggccgggctggcactcataaaacgcgatcctgcatttgcctatt

SEQ ID NO: 718154 - DNA, 75 bp, synthetic construct
  source 1..75: mol_type = other DNA
atgacgacaccaaccagacggataagttactatctgaagcccgccgccgtcaagaacgaaggcgaagcatgcgca

SEQ ID NO: 718155 - DNA, 75 bp, synthetic construct
  source 1..75: mol_type = other DNA
actgaacgccccgtgtcacagccagtaccaaccgcacagataaccaatcagatggccggaaatatcagggcgtta

SEQ ID NO: 718156 - DNA, 75 bp, synthetic construct
  source 1..75: mol_type = other DNA
atggtcacattattcagaaaaaaatatccacgaaagagtagaacaacagaattcctgtttctcattctgtttatc

SEQ ID NO: 718157 - DNA, 75 bp, synthetic construct
  source 1..75: mol_type = other DNA
ttggtgagattgtcattcttaattatggtaaagcattaaaggcacaggataggaatgctggctctatacctgtat

SEQ ID NO: 718158 - DNA, 75 bp, synthetic construct
  source 1..75: mol_type = other DNA
ttcgcaacaccctacttcccaaactgatgagcggtgaagtacgggttcagtatgctgaagatgcaatcgcatcag

SEQ ID NO: 718159 - DNA, 75 bp, synthetic construct
  source 1..75: mol_type = other DNA
agccatcgcctctattttgtcctctcttaaagacaaaatagacctgcttcatcgccagaataaaactctggaatc

SEQ ID NO: 718160 - DNA, 75 bp, synthetic construct
  source 1..75: mol_type = other DNA
attggaggagctaacagacgggtaaacgaaaacgcatcgcttgaaaaaatggttatggggatgcgtgtaaagtca

SEQ ID NO: 718161 - DNA, 75 bp, synthetic construct
  source 1..75: mol_type = other DNA
cgctacttatttggacatggctggactgagcactgttatttttcgtgcaaatggatattacagacgtccattttc

SEQ ID NO: 718162 - DNA, 75 bp, synthetic construct
  source 1..75: mol_type = other DNA
gacgacaatgaaactggatggggttctaccgaattcatagttatgcgtcctaaaaaagaaatccatccttttatc

SEQ ID NO: 718163 - DNA, 75 bp, synthetic construct
  source 1..75: mol_type = other DNA
gaaggtgagttgtgtactcgtaacgatccggaaggacgtccaacggtgtttgaccgtctgccaaaactgcgtggc

SEQ ID NO: 718164 - DNA, 75 bp, synthetic construct
  source 1..75: mol_type = other DNA
ctttttatcattgcctccagttaatggaagggttgatagaaataataaagtcattgagcatttgaatgctttctt

SEQ ID NO: 718165 - DNA, 75 bp, synthetic construct
  source 1..75: mol_type = other DNA
acccgctggccaatcgcgtccagtgctccatcaccacactggctattgagtgcggactggcgacggagtctgctg

SEQ ID NO: 718166 - DNA, 75 bp, synthetic construct
  source 1..75: mol_type = other DNA
aattaccattcagcaaaaaaaaatagacaaaaaatactttatcaaaacatacataatagaatcaatgagaaacga

SEQ ID NO: 718167 - DNA, 75 bp, synthetic construct
  source 1..75: mol_type = other DNA
aagaaaacatgccagtatataaagaagaaaaatgctgcatcaaaaatttatttattgtcggttcctcctgttttt

SEQ ID NO: 718168 - DNA, 75 bp, synthetic construct
  source 1..75: mol_type = other DNA
acagactcttgtgaatataaggatattgctttacgccatggtgctgaagttattatgagggacaaaagtctagct

SEQ ID NO: 718169 - DNA, 75 bp, synthetic construct
  source 1..75: mol_type = other DNA
ggctgttactgctttctgcctgcgcatcagttttcgctgcaaataacgaaaccagcaagtcggtaactttcccaa

SEQ ID NO: 718170 - DNA, 75 bp, synthetic construct
  source 1..75: mol_type = other DNA
gcgcctttctggttggtgttgcggcgtttgtcctgtgtgattttgttgtgttggtactcttcagtgtggttctgt

SEQ ID NO: 718171 - DNA, 75 bp, synthetic construct
  source 1..75: mol_type = other DNA
gttgcgaattaatatcacctggcaactggtgattgtctgcatacgcggggtgtttctgatgagtgataagctccc

SEQ ID NO: 718172 - DNA, 75 bp, synthetic construct
  source 1..75: mol_type = other DNA
gttgttgtggatgggcaaattattggtgccgtgggcgtttctggtttaaccggagcacaggatgcgcaggtcgcg

SEQ ID NO: 718173 - DNA, 75 bp, synthetic construct
  source 1..75: mol_type = other DNA
cacactgcacaataaaattaatccgtataaggagaatgagatgaacgcatcccccaacattaaatccggagcaca

SEQ ID NO: 718174 - DNA, 75 bp, synthetic construct
  source 1..75: mol_type = other DNA
atgactacattattcagaaaagaatatccgcaaaaaagtagggcgacagaatttttgtttctcattctgtttatc

SEQ ID NO: 718175 - DNA, 75 bp, synthetic construct
  source 1..75: mol_type = other DNA
agcgccttatcagtcagcgccatgtgattagtaaggaatgcatgattgcgcgcctctcctttgttgaggaaagtg

SEQ ID NO: 718176 - DNA, 75 bp, synthetic construct
  source 1..75: mol_type = other DNA
gcacaattgattaacggctttaattttttacgttggctggaaagcgaaccgcaagattcgcataacgagcatgtc

SEQ ID NO: 718177 - DNA, 75 bp, synthetic construct
  source 1..75: mol_type = other DNA
gctgtcagctttttgcgcaaaaattggatcgcctgcgcaaccataccgccgcacaattgattaacggctttaatt

SEQ ID NO: 718178 - DNA, 75 bp, synthetic construct
  source 1..75: mol_type = other DNA
cgtgcgtggtaaaagtgccgatattcattaccaggtcagcgtggactgcaaagcgggaatggcggaatatcagcg

SEQ ID NO: 718179 - DNA, 75 bp, synthetic construct
  source 1..75: mol_type = other DNA
ctgaatgaggttaagagtattcttgaaaaaggatatgaggatgcgcaaaaagtattcgcagataacgcgaataaa

SEQ ID NO: 718180 - DNA, 75 bp, synthetic construct
  source 1..75: mol_type = other DNA
accactgaggttgacagcaagagggcatgattttattgctgacttacgtcaaaaggatgtctggcaagctataaa

SEQ ID NO: 718181 - DNA, 75 bp, synthetic construct
  source 1..75: mol_type = other DNA
cgttgaacacagcatgtgtcgacggtgggttgttgtacaaagtgacgtttacgcaaatcgacaacgaagataacg

SEQ ID NO: 718182 - DNA, 75 bp, synthetic construct
  source 1..75: mol_type = other DNA
atgaaaaaactgacctttgaaattcgatctccagaacttcagcaaaatgctattcacgcagtacagcaaatcctt

SEQ ID NO: 718183 - DNA, 75 bp, synthetic construct
  source 1..75: mol_type = other DNA
caggaaaacagtgaaaaactggccgccgatatgatgatcagtcagaaacgcatgggcggcctgcaggccgtgcgt

SEQ ID NO: 718184 - DNA, 75 bp, synthetic construct
  source 1..75: mol_type = other DNA
caggaaaacagtgaaaaactggccgccgatatgatcatcagtcagaaacgcatggggggcctgcaggccgtgcgt

SEQ ID NO: 718185 - DNA, 75 bp, synthetic construct
  source 1..75: mol_type = other DNA
ttaacgcttacctgcagcaactggcgcgtctgaacggtgtggcagttgaagaactgtccagcaagttcaccgtgg

SEQ ID NO: 718186 - DNA, 75 bp, synthetic construct
  source 1..75: mol_type = other DNA
tgggtgttatgttcgttaattcaattatttatatcactgttatggttatttaaaaggaaagagagtatattgtta

SEQ ID NO: 718187 - DNA, 75 bp, synthetic construct
  source 1..75: mol_type = other DNA
gctttattaagaatgggatatcaaattatatttgtgtggcatggatggggggggttagtattattgttctgccat

SEQ ID NO: 718188 - DNA, 75 bp, synthetic construct
  source 1..75: mol_type = other DNA
caggaaaacagtgaaaaactggcggccgatatgatcatcagtcagaaacgcatgggcggcctgcaggccgtgcgt

SEQ ID NO: 718189 - DNA, 75 bp, synthetic construct
  source 1..75: mol_type = other DNA
atcgatgtggtgtaccaggacgatgatgaactggtggtgatctgtggtcgtgagctgctgtccgataagtatttc

SEQ ID NO: 718190 - DNA, 75 bp, synthetic construct
  source 1..75: mol_type = other DNA
ccacttctcaaggaattagtgcggcggaaagagcatgtaattcaggttatggctcgcattgaaatggcaaaggcc

SEQ ID NO: 718191 - DNA, 75 bp, synthetic construct
  source 1..75: mol_type = other DNA
ccgatatgattatcagtcagaagcgcatgggtggcctgcaggccgtacgtgcgccgttcttcccgccgaatgcat

SEQ ID NO: 718192 - DNA, 75 bp, synthetic construct
  source 1..75: mol_type = other DNA
tttatgggtgtggatggctggcttgtcgggaatatctattccacgttgcaacatggcttattgctacagcatgaa

SEQ ID NO: 718193 - DNA, 75 bp, synthetic construct
  source 1..75: mol_type = other DNA
gttgaggactatcgctgcgctgcactggtggaaaacatccagattggcgattttagcgccgccgcagcagaaacc

SEQ ID NO: 718194 - DNA, 75 bp, synthetic construct
  source 1..75: mol_type = other DNA
atggacattttagagaaggggaaattgtttttatttgtactgttcattatgcccggatttatcagcatgagagtt

SEQ ID NO: 718195 - DNA, 75 bp, synthetic construct
  source 1..75: mol_type = other DNA
tgtcttgtaactaagtggccacaggcaatcttataccaaagtggttttcttttgattgcttttctggaatctaca

SEQ ID NO: 718196 - DNA, 75 bp, synthetic construct
  source 1..75: mol_type = other DNA
gccgctgtgccgcaaaccgtttggtccggtagatgaaaaatatctgccagaactgaaggcgctggcccagcagtt

SEQ ID NO: 718197 - DNA, 75 bp, synthetic construct
  source 1..75: mol_type = other DNA
gtggcagcagctacaacgcggagccgcatcattctccatcacgctggcacgtggtcgtgcagaactctaccccga

SEQ ID NO: 718198 - DNA, 75 bp, synthetic construct
  source 1..75: mol_type = other DNA
gtcgcctcgattaatgcagcgatcgcaacaggcgtcagtttcgccagacagcgaaatggtcttgtcgcgcacaaa

SEQ ID NO: 718199 - DNA, 75 bp, synthetic construct
  source 1..75: mol_type = other DNA
ttcctgacgctgattaatgtcaccccggtgactgaacagtccggtcaactgctggggttgggtgttggcagcacc

SEQ ID NO: 718200 - DNA, 75 bp, synthetic construct
  source 1..75: mol_type = other DNA
aaagccgagcacaccattgataacagcggctttaccacgcagcttgagcttgaggcaaaaatcccggaatggata

SEQ ID NO: 718201 - DNA, 75 bp, synthetic construct
  source 1..75: mol_type = other DNA
tggtgctctataacggttacgacgaaatcttcgcttccggcttgctggcaggcgctgatggtggtatcggcagta

SEQ ID NO: 718202 - DNA, 75 bp, synthetic construct
  source 1..75: mol_type = other DNA
gaccagatcgccatcacgctggatgatgcggatggtcagttgcagctaccgccacggggcgcgcgcctgacggtt

SEQ ID NO: 718203 - DNA, 75 bp, synthetic construct
  source 1..75: mol_type = other DNA
agcacaccattgataacagcggctttaccacgcagcttgagcttgaggcaaaaatcccggaatggatagcggaaa

SEQ ID NO: 718204 - DNA, 75 bp, synthetic construct
  source 1..75: mol_type = other DNA
aaaaacttgatgcacatcaaaaaatgacgcatatttgcgcgcgttttattcatctggctggacgcccgtacatgt

SEQ ID NO: 718205 - DNA, 75 bp, synthetic construct
  source 1..75: mol_type = other DNA
ggccagccgttgccctcgttcgccatcacacgcagcagcggcgatcgccatcagttccgcattgctgaccgcgaa

SEQ ID NO: 718206 - DNA, 75 bp, synthetic construct
  source 1..75: mol_type = other DNA
aaagcggtaatctgttattcatcatgcccggcggtggcgtgaatgcacagggccagccgttgccctcgttcgcca

SEQ ID NO: 718207 - DNA, 75 bp, synthetic construct
  source 1..75: mol_type = other DNA
agtcagcgtgaaacgccgtaaaccgccaaaacccaaaaaggagaaaaacagcagccgtgaaggtgattatatgga

SEQ ID NO: 718208 - DNA, 75 bp, synthetic construct
  source 1..75: mol_type = other DNA
atgagtattaaaaacttatataaaaatttaaactctgacatggaaagtatagccaaaagaaataaaggcgatact

SEQ ID NO: 718209 - DNA, 75 bp, synthetic construct
  source 1..75: mol_type = other DNA
ccggtggtgacccccggtcattaccggattatgctgccctgtccgatattgtcagggatctttcacgcctgggct

SEQ ID NO: 718210 - DNA, 75 bp, synthetic construct
  source 1..75: mol_type = other DNA
cttatcatcaactccgctatgagctgcttgaagaaaaaagatccgtatctgtgcacgctccttgagtggcattac

SEQ ID NO: 718211 - DNA, 75 bp, synthetic construct
  source 1..75: mol_type = other DNA
agcgctggggtggctgggcagcgagtgaaggtggtagcgtctactttcctcctgttgcagccgggtttaagaatc

SEQ ID NO: 718212 - DNA, 75 bp, synthetic construct
  source 1..75: mol_type = other DNA
ttctatcaggacagaaaaaacagtatttagaactccaacgcatcagagataatataagttataataatctatttt

SEQ ID NO: 718213 - DNA, 75 bp, synthetic construct
  source 1..75: mol_type = other DNA
ctcattttcatatctatatgataattttcagattgttgatggtgatgttcatattaagcttcttcatctcaacag

SEQ ID NO: 718214 - DNA, 75 bp, synthetic construct
  source 1..75: mol_type = other DNA
ctgagactgaaacagattagcgggctgacggaattgtttcaggaagaggacttcagcccggcatggacggttcgc

SEQ ID NO: 718215 - DNA, 75 bp, synthetic construct
  source 1..75: mol_type = other DNA
gcgtaataacaatggcggagacttacgcgagtttatttgcgcgcgcgaagttgaggggtatggcgaaaagactta

SEQ ID NO: 718216 - DNA, 75 bp, synthetic construct
  source 1..75: mol_type = other DNA
agtgcctggtctggtcgagcaggttgctaatgacctggatgcgattctcgaaaaagggatgcgcgaagctgtacg

SEQ ID NO: 718217 - DNA, 75 bp, synthetic construct
  source 1..75: mol_type = other DNA
ggtgccggtggcgttccaggcagggctggataccgtaggtgaagcgatgaacgatgctgaaatttgcacattcgt

SEQ ID NO: 718218 - DNA, 75 bp, synthetic construct
  source 1..75: mol_type = other DNA
atttgtgcccgttattgcggggaggcggtattccgcgccattacgtttggcaatgccttcaatgtggatttatgg

SEQ ID NO: 718219 - DNA, 75 bp, synthetic construct
  source 1..75: mol_type = other DNA
attacattggggccagacctgtacagatcggtaaactttccggaggcgattttatcgttgataccgagaataagt

SEQ ID NO: 718220 - DNA, 75 bp, synthetic construct
  source 1..75: mol_type = other DNA
ttcaggcattaattcgaattaaaatgcgtaataacaatccaggagaattacgcgagtttattttcacccgcaaag

SEQ ID NO: 718221 - DNA, 75 bp, synthetic construct
  source 1..75: mol_type = other DNA
gtactctaccatcagttagatagtgatattaaagagcgaatagcatttctcgatatatcccactatgcatatccg

SEQ ID NO: 718222 - DNA, 75 bp, synthetic construct
  source 1..75: mol_type = other DNA
ggcgcgcagtctcgcccgcagcagtccgctccggcagcaccgtctaacgagccgccgatggattttgatgacgat

SEQ ID NO: 718223 - DNA, 75 bp, synthetic construct
  source 1..75: mol_type = other DNA
gcaatttaagtaaaacgttccgctaccggaccggctggtttcgtcgtcagaccgtagaagcggtaaaacccttga

SEQ ID NO: 718224 - DNA, 75 bp, synthetic construct
  source 1..75: mol_type = other DNA
atgaaaatatgcaaaataaaaatagccgaaaaggtatagaaatattagttaagcagggagaattgttatcatcat

SEQ ID NO: 718225 - DNA, 75 bp, synthetic construct
  source 1..75: mol_type = other DNA
aggatttggtaaaacgtgctttatcctgattctgttttatctggtgtttcttgtgttaagtaacaaggatactaa

SEQ ID NO: 718226 - DNA, 75 bp, synthetic construct
  source 1..75: mol_type = other DNA
tgacactttttaacttccatccggctatttctatgcatctactgcttactgtatgctgggtatattgcttaatcg

SEQ ID NO: 718227 - DNA, 75 bp, synthetic construct
  source 1..75: mol_type = other DNA
gagcagactgaatggcaccgcgttgtgctgttcggcaaactggcagaagtggccagcgaatatctgcgtaaaggt

SEQ ID NO: 718228 - DNA, 75 bp, synthetic construct
  source 1..75: mol_type = other DNA
agattttataaataactggtggaaatataatcttactttaataacagttcctattgataataaattgtcagacaa

SEQ ID NO: 718229 - DNA, 75 bp, synthetic construct
  source 1..75: mol_type = other DNA
tagcaacatcaaaaatgatattgtattgtccggagtaatgacaggaacatcaaagatttttcatctaaataattc

SEQ ID NO: 718230 - DNA, 75 bp, synthetic construct
  source 1..75: mol_type = other DNA
acctataagtgaaatccaacagccccttcattccattctttcacggcagaaagaacacgtaaagaatttactatc

SEQ ID NO: 718231 - DNA, 75 bp, synthetic construct
  source 1..75: mol_type = other DNA
gggaagttttcatctttgaatttggattttttaattaatgacgagagagtttttaatcttgaaggcttaatgaaa

SEQ ID NO: 718232 - DNA, 75 bp, synthetic construct
  source 1..75: mol_type = other DNA
atgtcgtttctggtcaaaagaaagtgtggctgtaggagatacaataaaattgtctaattatgagcatattgagtt

SEQ ID NO: 718233 - DNA, 75 bp, synthetic construct
  source 1..75: mol_type = other DNA
tatagaaatccaacgtattcgtatttacagaacaatattatcaatagatatatacatactgtttctgagtatgct

SEQ ID NO: 718234 - DNA, 75 bp, synthetic construct
  source 1..75: mol_type = other DNA
cgccagttgtggctgtaccacgacagcggtgatgcaggactgacccagctttaccggatgcgcgatgcgcagttg

SEQ ID NO: 718235 - DNA, 75 bp, synthetic construct
  source 1..75: mol_type = other DNA
atgcggggctgactcagctttaccggatgcgtgatgcgcagttgtggcgtcacatcgaatttcaccctgaatgca

SEQ ID NO: 718236 - DNA, 75 bp, synthetic construct
  source 1..75: mol_type = other DNA
tggctgtaccacgacagcggggatgcgggactgacacacctgtaccggatgcgtgatgcgcagttgtggagccac

SEQ ID NO: 718237 - DNA, 75 bp, synthetic construct
  source 1..75: mol_type = other DNA
ttgtggctgtaccacgacagcggtgatgcgggactgacacacctgtaccggatgcgcgatgcgcagttgtggagc

SEQ ID NO: 718238 - DNA, 75 bp, synthetic construct
  source 1..75: mol_type = other DNA
ttaccggatgcgcgatgcgcagttgtggcgtcacatcgaatttcaccccgaatgcaacgcgatttacgcggcact

SEQ ID NO: 718239 - DNA, 75 bp, synthetic construct
  source 1..75: mol_type = other DNA
ggatggcgaccgtttccacatggtgaacggtgcaaactggtttgaccgtaccgtgagtgctgatgccgcaggcat

SEQ ID NO: 718240 - DNA, 75 bp, synthetic construct
  source 1..75: mol_type = other DNA
tatgctgcgtgatgcccagctctggaatcacatcacctttcaccccgaatgcagtgctatttacgccgcgctgga

SEQ ID NO: 718241 - DNA, 75 bp, synthetic construct
  source 1..75: mol_type = other DNA
tgaatgttgaagagtgcgaccgtctctcctttctgccttacctgtttggcctggattttctgtatgccgaggcat

SEQ ID NO: 718242 - DNA, 75 bp, synthetic construct
  source 1..75: mol_type = other DNA
ccgtcgcttgcgcactgtatggttttcgcgggctacgttgcaacaccgctgtttttaagcggcctggtggcgctt

SEQ ID NO: 718243 - DNA, 75 bp, synthetic construct
  source 1..75: mol_type = other DNA
gacttcccttgtgattaaccgccagttgtggctgtaccacgacagcggggatgcgggactgacacacctttaccg

SEQ ID NO: 718244 - DNA, 75 bp, synthetic construct
  source 1..75: mol_type = other DNA
gtggcggttacatgatgccggatggcgaccgttttcatctggtcaacggtgaaaactggtttgaccgcacggtga

SEQ ID NO: 718245 - DNA, 75 bp, synthetic construct
  source 1..75: mol_type = other DNA
atgaaacaccgggaaatacgggcggcagttctgtcagccctgaaagcaaatatttctgagccggtgagctggttt

SEQ ID NO: 718246 - DNA, 75 bp, synthetic construct
  source 1..75: mol_type = other DNA
gcaaactggtttgaccgtaccgtgagtgctgatgcctgcggcatcattctgacttcccttgtgattaaccgccag

SEQ ID NO: 718247 - DNA, 75 bp, synthetic construct
  source 1..75: mol_type = other DNA
atgtcacaggttactgaaaataaagtgattactgcaccggtgccgatgaccccgttacaggagttctggcactat

SEQ ID NO: 718248 - DNA, 75 bp, synthetic construct
  source 1..75: mol_type = other DNA
tatttctgagcgggtgagctggtttgacggccgcccggtttttattgatgaacaggaactacctgctgttgctgt

SEQ ID NO: 718249 - DNA, 75 bp, synthetic construct
  source 1..75: mol_type = other DNA
catgaaaagattgataatgtttggtagttggatgacgtttagcaatattataagcccaatgatggtgtattttga

SEQ ID NO: 718250 - DNA, 75 bp, synthetic construct
  source 1..75: mol_type = other DNA
acaatattaaaaagcgaaaactttatattcgtagcctgactacaaaaacatgcatttctgactgcatgattaaag

SEQ ID NO: 718251 - DNA, 75 bp, synthetic construct
  source 1..75: mol_type = other DNA
catttcatgcgtggagttatcccaacgacggaaatgaaaaaatattgtagtgaaaattgtgccgaaaaagaccag

SEQ ID NO: 718252 - DNA, 75 bp, synthetic construct
  source 1..75: mol_type = other DNA
tgcagttcgcgcaaagcgcctggtgggtcgtgaccttccctggtctggcgatcctgttgacggtgctggcattta

SEQ ID NO: 718253 - DNA, 75 bp, synthetic construct
  source 1..75: mol_type = other DNA
atgcagggttgacacacctgtacaggatgcgcgatgcgcagttgtggagccacatcgaatttcaccccgaatgca

SEQ ID NO: 718254 - DNA, 75 bp, synthetic construct
  source 1..75: mol_type = other DNA
gatgcgtgatgcgcagttgtggagccatatcgaatttcatcctgaatgtaacgcgatttacgcggcactggattg

SEQ ID NO: 718255 - DNA, 75 bp, synthetic construct
  source 1..75: mol_type = other DNA
tggcacttcatccgcctgccggacggtggcggttacatgatgcctgatggcgaccgttttcatctggttaacggt

SEQ ID NO: 718256 - DNA, 75 bp, synthetic construct
  source 1..75: mol_type = other DNA
ggcaacggaggctggcgcgggaccaaaagatcacctcttcgatgtcagttttttcattgccgggaaaaaggcaaa

SEQ ID NO: 718257 - DNA, 75 bp, synthetic construct
  source 1..75: mol_type = other DNA
tgcgcgagccaacggtgcgatggatgatgattacctttttgatgtctgtctgtacagcgagcactatggtcccgg

SEQ ID NO: 718258 - DNA, 75 bp, synthetic construct
  source 1..75: mol_type = other DNA
gggaggaattacttgaggagtatttccttattaaaaatcttaagccggacactgagcatagttaccgcaaggttg

SEQ ID NO: 718259 - DNA, 75 bp, synthetic construct
  source 1..75: mol_type = other DNA
tacccgctggtctggttgtgtgcgctggtcggcacggtgcgctgttttacaccggctacctgctgtatctcggta

SEQ ID NO: 718260 - DNA, 75 bp, synthetic construct
  source 1..75: mol_type = other DNA
gtggcggctacatgatgccggatggcgaccgtttccacatagtgaacggtgcaaactggtttgaccgtaccgtga

SEQ ID NO: 718261 - DNA, 75 bp, synthetic construct
  source 1..75: mol_type = other DNA
actggacgattacccgatgtgtgcatgatatcggcagcggcggctttaccacctcgctggagctggaagttaaga

SEQ ID NO: 718262 - DNA, 75 bp, synthetic construct
  source 1..75: mol_type = other DNA
agaactggcgaagattgagatagatcacgccgatcagacgagtgaatcagatatcagcttcttaacgcgcatggc

SEQ ID NO: 718263 - DNA, 75 bp, synthetic construct
  source 1..75: mol_type = other DNA
ttaacgaagccatcggcgtttttattgtcaccaacgcgttaatagtcctctgcggcataacgggactctttgctc

SEQ ID NO: 718264 - DNA, 75 bp, synthetic construct
  source 1..75: mol_type = other DNA
acgcctggcgcggctttgttggtcaccggattgcagggactaacacttaacgaagccatcggcgtttttattgtc

SEQ ID NO: 718265 - DNA, 75 bp, synthetic construct
  source 1..75: mol_type = other DNA
cgctattctgaattaaagaaatttttcgataaagggcttattgataaagaagaatatgaattcttgtccgtaaac

SEQ ID NO: 718266 - DNA, 75 bp, synthetic construct
  source 1..75: mol_type = other DNA
ccgatatgatcatcagtcagaaacgcatgggtggcctgcaggccgtgcgtgcgccgttcttctcgccgaatgcat

SEQ ID NO: 718267 - DNA, 75 bp, synthetic construct
  source 1..75: mol_type = other DNA
ttaacgcttacctgcagcaactggcgcgcctgaacggtgtggaggttgaagaactgtccagcaagtttaccgtgg

SEQ ID NO: 718268 - DNA, 75 bp, synthetic construct
  source 1..75: mol_type = other DNA
tcctgcttatatcgatccagaattttcgttttctcacagtttaagtgttgcgctaccactttttctggtgacgat

SEQ ID NO: 718269 - DNA, 75 bp, synthetic construct
  source 1..75: mol_type = other DNA
ggcgcaactgcacggcgctatcgcctgcgtgaaaaatgatgctctgctgctaatgccgacaggttccggtaaaag

SEQ ID NO: 718270 - DNA, 75 bp, synthetic construct
  source 1..75: mol_type = other DNA
tagccgcgcggcacaagctgaagatggcactgggtaaagagctgtcggataagcccgtggagcatatagaccaga

SEQ ID NO: 718271 - DNA, 75 bp, synthetic construct
  source 1..75: mol_type = other DNA
ttaacgcttacctgcagcaactggcgcgtctgaacggtgtggcagttgaagaactgtccagcaaattcaccgtag

SEQ ID NO: 718272 - DNA, 75 bp, synthetic construct
  source 1..75: mol_type = other DNA
agctaaacgagctgcagaagctatccacaataaaggggtaaaaaacacggttatcacgctcggtactgagagatc

SEQ ID NO: 718273 - DNA, 75 bp, synthetic construct
  source 1..75: mol_type = other DNA
tgaacgttgaagagtgcgaccgtctgtcttttctgccttacctgtttggtcaggattttctgtatgccgaagcgt

SEQ ID NO: 718274 - DNA, 75 bp, synthetic construct
  source 1..75: mol_type = other DNA
aatcgaccacgccgaccagaccgaagaaagcgacatgtccttccttacgcgcatggcggaaatgctgggcgcaat

SEQ ID NO: 718275 - DNA, 75 bp, synthetic construct
  source 1..75: mol_type = other DNA
tcagcgaaatgctgatggatatcgaaatcgaccacgccgaccagaccgaagaaagcgacatgtccttccttacgc

SEQ ID NO: 718276 - DNA, 75 bp, synthetic construct
  source 1..75: mol_type = other DNA
ctatcctgaagttatcctggtttaccggactggcgctggctgtcttgttttatggcgttatgctggctggggtcg

SEQ ID NO: 718277 - DNA, 75 bp, synthetic construct
  source 1..75: mol_type = other DNA
ttcgacgctggcgattggcgtgctggtactggaagtgctgctcgccctaaccgttatactatggggctacggtta

SEQ ID NO: 718278 - DNA, 75 bp, synthetic construct
  source 1..75: mol_type = other DNA
attggctggaattttggcgatggcactatcctgaagttatcctggtttaccggactggcgctggctgtcttgttt

SEQ ID NO: 718279 - DNA, 75 bp, synthetic construct
  source 1..75: mol_type = other DNA
gccacggggcgcgcgcctgacggttctcattggctggaaaggcgaaccgctgacagaaaaaggcacttacattgt

SEQ ID NO: 718280 - DNA, 75 bp, synthetic construct
  source 1..75: mol_type = other DNA
tattgctgagcgggtgacctggtttgacgggcgacctgtttttattgacgagcaggaacttccggcagtggcggt

SEQ ID NO: 718281 - DNA, 75 bp, synthetic construct
  source 1..75: mol_type = other DNA
atgaaacaccgtgaaatacgggcggcagttctgtctgccctgaaagacaatatttctgagcgggtgagctggttt

SEQ ID NO: 718282 - DNA, 75 bp, synthetic construct
  source 1..75: mol_type = other DNA
ggcggcaaagtggcagcagctacaacgcggagccgcatcattttccatcacgctggcgcgtggacgcgcagaact

SEQ ID NO: 718283 - DNA, 75 bp, synthetic construct
  source 1..75: mol_type = other DNA
aatgcatggcacggtaacaggatttaaaagcgagattgataatcaggactggattattgcaaaagccgagcacac

SEQ ID NO: 718284 - DNA, 75 bp, synthetic construct
  source 1..75: mol_type = other DNA
tgcggaaggcaacgtgtttgtgttacgcaagacttatcagaacgaacaggcagcaagacgcgcagcggcggcaaa

SEQ ID NO: 718285 - DNA, 75 bp, synthetic construct
  source 1..75: mol_type = other DNA
aagggcagcagtgcctgcccgtcgctgacggtgtcgaatctgttaggtctggtcaccggaatggcggaggacctg

SEQ ID NO: 718286 - DNA, 75 bp, synthetic construct
  source 1..75: mol_type = other DNA
aagggcagcagtgcctgtccgtcgctgacggtgtcgaatctgttgggtctggtcaccggtatggcggaggacctg

SEQ ID NO: 718287 - DNA, 75 bp, synthetic construct
  source 1..75: mol_type = other DNA
aagggcagcagtgcctgaccgtcgctgacggtgtcgaatctgtttggtctggtcaccggtatggcggaggacctg

SEQ ID NO: 718288 - DNA, 75 bp, synthetic construct
  source 1..75: mol_type = other DNA
gtcaccgcgggtggtactctgggaaatcgacctgacggtacagggcggtgagcggtattttttctgcaatgagct

SEQ ID NO: 718289 - DNA, 75 bp, synthetic construct
  source 1..75: mol_type = other DNA
aagggcagcagtgcctggccgtcgctgacggtgtcgaatctgttcggtctggtcaccggcatggcggaggacctg

SEQ ID NO: 718290 - DNA, 75 bp, synthetic construct
  source 1..75: mol_type = other DNA
cgtaaggacagatgcagcaagtgcatgcgcgggtgtgagatgcgcggcatggcggttaattttggcggtttcctt

SEQ ID NO: 718291 - DNA, 75 bp, synthetic construct
  source 1..75: mol_type = other DNA
acggggcgctgtttcccggtcgcatcatgctggcgaatacctgtatgtggacctaccgctctgatgagtgtggtt

SEQ ID NO: 718292 - DNA, 75 bp, synthetic construct
  source 1..75: mol_type = other DNA
gctggcgaacacctgtatgtgggattaccggggagatgaatgcgggtataacggtcctgcggtggcggatgagtt

SEQ ID NO: 718293 - DNA, 75 bp, synthetic construct
  source 1..75: mol_type = other DNA
tggcaggggcggcagtatcaggcctatcccattcagggaagtggatttgagatgagcggcaaaggagccagtgca

SEQ ID NO: 718294 - DNA, 75 bp, synthetic construct
  source 1..75: mol_type = other DNA
ggcaacgtctggcaaatgagatgacaccggatgttccccgtatcccctcgcctgaaatcctggctgccggatatt

SEQ ID NO: 718295 - DNA, 75 bp, synthetic construct
  source 1..75: mol_type = other DNA
aaatgggggtcgctcaaatccagtgtaaccggaatgggtgacagcatcagtagctggtttaaacagtgctgggct

SEQ ID NO: 718296 - DNA, 75 bp, synthetic construct
  source 1..75: mol_type = other DNA
taacgatggtacgtaaaagtgagcttactaacgcaacttggaacgagatcaattttagtgaggcattatggacga

SEQ ID NO: 718297 - DNA, 75 bp, synthetic construct
  source 1..75: mol_type = other DNA
aagcatagcgaaatttgagcctcgtgacagggcattgacgccaattgaaattggtctgatgtatcggtacatgga

SEQ ID NO: 718298 - DNA, 75 bp, synthetic construct
  source 1..75: mol_type = other DNA
acggtatcaaaaacaaatgggagtcgctcaaatccagtgtaaccggaatgggtgacagcatcagtggctggttca

SEQ ID NO: 718299 - DNA, 75 bp, synthetic construct
  source 1..75: mol_type = other DNA
ctgctggttggcccggcacacccggactacggcgcgttctgtatgggcgcaggccacggtattggctttaacgat

SEQ ID NO: 718300 - DNA, 75 bp, synthetic construct
  source 1..75: mol_type = other DNA
ctgtttggtctggtcaccgggatggcggaagacctgcagagtctggtgggggccacggtggtccgccgccgggtg

SEQ ID NO: 718301 - DNA, 75 bp, synthetic construct
  source 1..75: mol_type = other DNA
ccggagacggtcacagcttgtctgtgagcggatgccgggagctggacaagcccgtcagggcgcgtcagggggttt

SEQ ID NO: 718302 - DNA, 75 bp, synthetic construct
  source 1..75: mol_type = other DNA
ttaacatggcccgcttcatcagaggccagacattaacgctgctggagaaactcaacgaactggacgcggatgaac

SEQ ID NO: 718303 - DNA, 75 bp, synthetic construct
  source 1..75: mol_type = other DNA
tctattcaactgagagcggtatcaccgggggtggtttttttaaaacccatccccttcactttacaaaagaacagc

SEQ ID NO: 718304 - DNA, 75 bp, synthetic construct
  source 1..75: mol_type = other DNA
ttatatttcagcaacggaaactgaaggtcagaatacataaaaccatgagccagaatgcccgtgaattttttcgca

SEQ ID NO: 718305 - DNA, 75 bp, synthetic construct
  source 1..75: mol_type = other DNA
agaatgagtgtacaaaatcggagcaatccgcgctggtcgatctctgggaaatcgatctgacagaggtcggtggag

SEQ ID NO: 718306 - DNA, 75 bp, synthetic construct
  source 1..75: mol_type = other DNA
atcccattcaggggagcggttttgaactgaacggcaagggcagtgctgcccgtccgacactgacggtctctaacc

SEQ ID NO: 718307 - DNA, 75 bp, synthetic construct
  source 1..75: mol_type = other DNA
atgaatgtcttatccggcctacgagtggcgcaagaatctgtaggcctgataagcgtagcgcatcaggcatttgtc

SEQ ID NO: 718308 - DNA, 75 bp, synthetic construct
  source 1..75: mol_type = other DNA
ttcccgtccaaccctgacggtttctaacctggacggtatggtcaccgggatggcggaagagctgcagagtctggt

SEQ ID NO: 718309 - DNA, 75 bp, synthetic construct
  source 1..75: mol_type = other DNA
ttcccgaccaaccctgacggtttctaacctgtacggtatggtcaccgggatggcggaagagctgcagagtctggt

SEQ ID NO: 718310 - DNA, 75 bp, synthetic construct
  source 1..75: mol_type = other DNA
tggcaggggcggcaatatcaggcatacccgattgacggcagtggttttgagatgaacgggaagggcagcagtgcc

SEQ ID NO: 718311 - DNA, 75 bp, synthetic construct
  source 1..75: mol_type = other DNA
atgaacgggaagggcagcagtgcccgcccgtcgctgacggtgtccaatctgtttggtctggtcaccgggatggcg

SEQ ID NO: 718312 - DNA, 75 bp, synthetic construct
  source 1..75: mol_type = other DNA
ccgtcgctgacggtgtcaatctgttcggtcttgtcaccgggatggcggaggatttgcagagcctggtgggtgcca

SEQ ID NO: 718313 - DNA, 75 bp, synthetic construct
  source 1..75: mol_type = other DNA
tgggggccacggtggtccgccgccgggtgtatgcccgttttctggatgcggtgaatttggttgcgggcaatccgg

SEQ ID NO: 718314 - DNA, 75 bp, synthetic construct
  source 1..75: mol_type = other DNA
cgctgactgccatgacggcctcgtttgtgctggccacaccgaccgagacggacggggcgctgtttcccggtcgta

SEQ ID NO: 718315 - DNA, 75 bp, synthetic construct
  source 1..75: mol_type = other DNA
tggcaggggcggcaatatcaggcatacccgattgacggcagcggttttgagatgaacgggaagggtagcagtgcc

SEQ ID NO: 718316 - DNA, 75 bp, synthetic construct
  source 1..75: mol_type = other DNA
aggccaacgctgaaagtctctaatctgcacggcatggtcaccgggatggcggaagacctgcagagtctggtcggc

SEQ ID NO: 718317 - DNA, 75 bp, synthetic construct
  source 1..75: mol_type = other DNA
catgctggcgaacacctgtatgtgggattaccgctctgatgaatgcgggtataacggtccggcagtggcggatga

SEQ ID NO: 718318 - DNA, 75 bp, synthetic construct
  source 1..75: mol_type = other DNA
tgaatgaatgcatctgtgtggagcagacggccagcgtggtgctctgggaaattgatctgacagaggtcggtgggg

SEQ ID NO: 718319 - DNA, 75 bp, synthetic construct
  source 1..75: mol_type = other DNA
cctacaacatcatgggctggcgttatcaggggattgtgaaggcgctgaaagaaggcgatatccagaccgcgcaga

SEQ ID NO: 718320 - DNA, 75 bp, synthetic construct
  source 1..75: mol_type = other DNA
tggtgctctataacggttacgacgaaatcttcgcctctggtcttctggcgggcgctgatggtggtatcggtagta

SEQ ID NO: 718321 - DNA, 75 bp, synthetic construct
  source 1..75: mol_type = other DNA
aactgcaaaccgaatgtaataaagtcattgatttactgattaaaacgggcgtattccgcggtttgaaaaccgttc

SEQ ID NO: 718322 - DNA, 75 bp, synthetic construct
  source 1..75: mol_type = other DNA
ctggcaggtcaacatgccagccaccaccaacaccacctggatgacatgtggcgatccctgtgattccgcactgcg

SEQ ID NO: 718323 - DNA, 75 bp, synthetic construct
  source 1..75: mol_type = other DNA
cctgccggatgaatgtattcccgcagggacacagacccttcgccagcgtcagcaacggctggatgcgaaggttaa

SEQ ID NO: 718324 - DNA, 75 bp, synthetic construct
  source 1..75: mol_type = other DNA
gcccggtccggcgtggtcagccagcgatccggcgattgccggtgcggcaccgtcattaacccgcgttcatcagcg

SEQ ID NO: 718325 - DNA, 75 bp, synthetic construct
  source 1..75: mol_type = other DNA
tttaaaacaaattcatttgctggagttatagagattgatgatgcaagtgtagcaactgttcaacaggcgcttaaa

SEQ ID NO: 718326 - DNA, 75 bp, synthetic construct
  source 1..75: mol_type = other DNA
agagctccagagctctgctgaacagctcgtctgcgcggatattttcaggctctgccgtggcgattcccacctagt

SEQ ID NO: 718327 - DNA, 75 bp, synthetic construct
  source 1..75: mol_type = other DNA
agtggggaaatggttgttggggcagagggggagaaactgactaacgattacacgttttatgccgtgttcaataca

SEQ ID NO: 718328 - DNA, 75 bp, synthetic construct
  source 1..75: mol_type = other DNA
tgaagaagcaaaaggcaagattaaactcatcgctcacgtaggttgcgtcagcactgcggaaagccagcaacttgc

SEQ ID NO: 718329 - DNA, 75 bp, synthetic construct
  source 1..75: mol_type = other DNA
tatctggggcgacaccgttgtcgagtgtgtgcttaacaaactctgcccgtcgcatacctacgtaatttttaaata

SEQ ID NO: 718330 - DNA, 75 bp, synthetic construct
  source 1..75: mol_type = other DNA
tggagcgagtgatccaaaatgaggaagaacttcagagttcagctgaacatgacgtttgcgctgacatttttagac

SEQ ID NO: 718331 - DNA, 75 bp, synthetic construct
  source 1..75: mol_type = other DNA
cacggcaacgtatgctggaagtcgtgcgcggcttaagcggtgtgtctgatatttcatacgatacggtggtagcgc

SEQ ID NO: 718332 - DNA, 75 bp, synthetic construct
  source 1..75: mol_type = other DNA
atgggctgggtttccataactggtgtaaatatgcgttcacaacctgactgttatgaaaaaatcatccgttttatg

SEQ ID NO: 718333 - DNA, 75 bp, synthetic construct
  source 1..75: mol_type = other DNA
gccgatgcggatgggggcgttccatggaatgccgaatcaggcgcttacaatgtcacccgctctggcgacagctat

SEQ ID NO: 718334 - DNA, 75 bp, synthetic construct
  source 1..75: mol_type = other DNA
ggcagacttttaacaaatctgcctacccgaaacttgcagccgcttatccgtcaggcgtgatccctgatatgcgtg

SEQ ID NO: 718335 - DNA, 75 bp, synthetic construct
  source 1..75: mol_type = other DNA
atcccctcggctcaccatcgataccagaaggttctatcgttatcgtagagccagatattattgatacagagtgta

SEQ ID NO: 718336 - DNA, 75 bp, synthetic construct
  source 1..75: mol_type = other DNA
atgagtcaggaaattcgatacatctacagcggatattttgctgatgatacttccctttgccagatgaaattaacc

SEQ ID NO: 718337 - DNA, 75 bp, synthetic construct
  source 1..75: mol_type = other DNA
tctttctctattaccgcgtttttccagaagcaagagattgggtatcaagaggctggctgctatgatatggcgtct

SEQ ID NO: 718338 - DNA, 75 bp, synthetic construct
  source 1..75: mol_type = other DNA
tcattcttgtcggttatctcggacaagatcccgaagttcgttatctgccttccggtggcgcagtggctaatttca

SEQ ID NO: 718339 - DNA, 75 bp, synthetic construct
  source 1..75: mol_type = other DNA
caggcggtgaatgatgcggttgcgaatattccggtaccggcggacggcaaaagtatcacccccgatgatgtgcgt

SEQ ID NO: 718340 - DNA, 75 bp, synthetic construct
  source 1..75: mol_type = other DNA
aagcatgtgacggtggatgaggtgcgtccggttctgcaggcgatggtggatgaggctgtgggggccattccggta

SEQ ID NO: 718341 - DNA, 75 bp, synthetic construct
  source 1..75: mol_type = other DNA
aagttgccggaccctgcagatgaaggcgcattacagaaatcgtggtctgttctaccgttcttcaagagacggtta

SEQ ID NO: 718342 - DNA, 75 bp, synthetic construct
  source 1..75: mol_type = other DNA
gttatccttgattttaagagtgggcgtggtttttatgagtctcattcgttaatcgttaacgataacttgtcgtgc

SEQ ID NO: 718343 - DNA, 75 bp, synthetic construct
  source 1..75: mol_type = other DNA
ccgtctggttatgccctgatgcaggggcagacttttaacaaatctgcctacccgaaacttgcagcggcttatccg

SEQ ID NO: 718344 - DNA, 75 bp, synthetic construct
  source 1..75: mol_type = other DNA
agcggtgaaatagttgtcggggctgcgggggagaagttgactaatcactatacgttttatgccgtattcaataca

SEQ ID NO: 718345 - DNA, 75 bp, synthetic construct
  source 1..75: mol_type = other DNA
cggtctcgtttcgctatgactaccgtatcaacggtcgccgcgaaacactggtaatcgggcagtatgggcgtgacg

SEQ ID NO: 718346 - DNA, 75 bp, synthetic construct
  source 1..75: mol_type = other DNA
gcctgcagatgtgcgctggtggaagcgaataccttttgcctgggcgctactcggtcagcaaaccattatccaacg

SEQ ID NO: 718347 - DNA, 75 bp, synthetic construct
  source 1..75: mol_type = other DNA
gtcatcggtcagtatggtcgtgacggtatcagtctggcggaagcgcgtgaagaactaattgctgcaaaaaagctg

SEQ ID NO: 718348 - DNA, 75 bp, synthetic construct
  source 1..75: mol_type = other DNA
ataaagcaattaacaatacaagagatcaaaatcctaatactgatgttaaacatagtcaaattcaagagataaaaa

SEQ ID NO: 718349 - DNA, 75 bp, synthetic construct
  source 1..75: mol_type = other DNA
cccattatgcagaaaaccattctctggtgttaatgcagagtatatgcctgaacttaaatctctggcagaaacttt

SEQ ID NO: 718350 - DNA, 75 bp, synthetic construct
  source 1..75: mol_type = other DNA
tcgtcgcataagaccatgtcggcggcgaccttaaaccgggtcattaatcttacggttaagcaggcgcaggaacgg

SEQ ID NO: 718351 - DNA, 75 bp, synthetic construct
  source 1..75: mol_type = other DNA
ccatctacaacaaggccgagtaccgcgatcagcgccgggcgatgctccaagattgggccgacatgatcgacgagt

SEQ ID NO: 718352 - DNA, 75 bp, synthetic construct
  source 1..75: mol_type = other DNA
gagaaggcgcgggacaaagcacgcgtcaaggatgccgagacattcggcgcgtgggccgagaagtggctgcgcggc

SEQ ID NO: 718353 - DNA, 75 bp, synthetic construct
  source 1..75: mol_type = other DNA
ctttgaagacgttctccggtggttcggattatgttctgccatcgcgttacgattctgacgtacccatgagtagtg

SEQ ID NO: 718354 - DNA, 75 bp, synthetic construct
  source 1..75: mol_type = other DNA
cgatggtgcgtaaaagcgaactgctgaacgcgccgtggggcgaggttaattttaatgcctgcctttggacgattg

SEQ ID NO: 718355 - DNA, 75 bp, synthetic construct
  source 1..75: mol_type = other DNA
ggatatgcgtcgctcagtctatgcccgagagttagagggaaaatttggcaaccaaaagctaacagaaattaccca

SEQ ID NO: 718356 - DNA, 75 bp, synthetic construct
  source 1..75: mol_type = other DNA
atcagaagctgaccgaaatcactcacgaggacttgcgagcactgaccgacgccatcgtagagcgtggagcgcctg

SEQ ID NO: 718357 - DNA, 75 bp, synthetic construct
  source 1..75: mol_type = other DNA
atttggatttatcagatgagaggaaacaaatttttaactttcatcatccctctggtttttattcaggaaaagtta

SEQ ID NO: 718358 - DNA, 75 bp, synthetic construct
  source 1..75: mol_type = other DNA
tactgacagccagactcacgctacgctaaaagtgcaggtgaaaggttatctggaaccgctgaccacctcgagcca

SEQ ID NO: 718359 - DNA, 75 bp, synthetic construct
  source 1..75: mol_type = other DNA
atcgatcacctgctgggaagaatcgacaatccagttcctcgggtcgcactcagcgcaacgctgggagaactggag

SEQ ID NO: 718360 - DNA, 75 bp, synthetic construct
  source 1..75: mol_type = other DNA
tctgtcgtggtgattcccatctggtgttcgctaatagtcgcaaacggaccgaaagcattgccgccacgcttagcg

SEQ ID NO: 718361 - DNA, 75 bp, synthetic construct
  source 1..75: mol_type = other DNA
acgatcaacaccgtcgtcttgagagtcttggtgaagccctggaaatgcaagtgacgccctggcacggggatgtac

SEQ ID NO: 718362 - DNA, 75 bp, synthetic construct
  source 1..75: mol_type = other DNA
cagaacacgctttcggctatcacaggccagggggcagaacttgcggcaatcctgactgacggtaaaaccggggga

SEQ ID NO: 718363 - DNA, 75 bp, synthetic construct
  source 1..75: mol_type = other DNA
atgaaaacaggtctttcccacttcaatctcagcaaacatgcctttattgcatttttgggtgccttgctgtttttc

SEQ ID NO: 718364 - DNA, 75 bp, synthetic construct
  source 1..75: mol_type = other DNA
cctgcaaaaaaatatttagaacacggtttgttttctgaatatcgacaggacggtacaattccttatgtagtcagc

SEQ ID NO: 718365 - DNA, 75 bp, synthetic construct
  source 1..75: mol_type = other DNA
acatgatggcactcatgttgactgggaatttggttcacagcagcgaatgggaaggccgcaatgttgcagggtcaa

SEQ ID NO: 718366 - DNA, 75 bp, synthetic construct
  source 1..75: mol_type = other DNA
tatgataagattcgtggtaataatctagataatatattttcccttggaaatggggggggcgttatatattctgga

SEQ ID NO: 718367 - DNA, 75 bp, synthetic construct
  source 1..75: mol_type = other DNA
taggatagttctcgggaataaaatattgtatccatcagaagaacttgtaaagtttataagaacctcaaaggaata

SEQ ID NO: 718368 - DNA, 75 bp, synthetic construct
  source 1..75: mol_type = other DNA
tattcaatagatatgattacctggagggataaaaataaaactgaaaaagagcctttaccacttgatgtgattcag

SEQ ID NO: 718369 - DNA, 75 bp, synthetic construct
  source 1..75: mol_type = other DNA
tatatatatatcagaaaaatcaaatggtaaccatattattttaggtgagacacacactcgcttatctattgaatg

SEQ ID NO: 718370 - DNA, 75 bp, synthetic construct
  source 1..75: mol_type = other DNA
gggggcacagccgccaacaccagagtggggcaccatgctctccgacgtgttgcagttcgcgcaaagcgcctggtg

SEQ ID NO: 718371 - DNA, 75 bp, synthetic construct
  source 1..75: mol_type = other DNA
attatcttactctacaataaaaagtttatttattatttatacgagaaggctatgtgtatcataaatacgcgttaa

SEQ ID NO: 718372 - DNA, 75 bp, synthetic construct
  source 1..75: mol_type = other DNA
tcgcccagactattggtctggaagatgcgctgactgccagcctgatgcttaatgcgttgttaattgtgggcgcgc

SEQ ID NO: 718373 - DNA, 75 bp, synthetic construct
  source 1..75: mol_type = other DNA
gacgacagcattcgccagttctggattgatcactgcaaggccagccgccgcgtttcggcctattttggcgagcaa

SEQ ID NO: 718374 - DNA, 75 bp, synthetic construct
  source 1..75: mol_type = other DNA
gggaactggcgctcgccgcgctactgatgattgaaattctgggattcggcgccctgaacccacgcctgttggatc

SEQ ID NO: 718375 - DNA, 75 bp, synthetic construct
  source 1..75: mol_type = other DNA
gatatgcgactacttctctgtttctaataaagatgagttaatcatcttactctacaataaaaagtttattcatta

SEQ ID NO: 718376 - DNA, 75 bp, synthetic construct
  source 1..75: mol_type = other DNA
caccggaatcagtcataatgctatagcaagaatattaaacatatccatctccacatcaaagaaacacgcgtctct

SEQ ID NO: 718377 - DNA, 75 bp, synthetic construct
  source 1..75: mol_type = other DNA
ttgtcatatggtaaagaaaattttattgccatgagccatacgaaagcgagttctgtagttaaaagcgggaaatgg

SEQ ID NO: 718378 - DNA, 75 bp, synthetic construct
  source 1..75: mol_type = other DNA
atgaaatatgatgatgtgtcagaattgatgattaaatgtgaacacaacattcttattgttggtaatacttactcc

SEQ ID NO: 718379 - DNA, 75 bp, synthetic construct
  source 1..75: mol_type = other DNA
tgggtggcctgatttaggtggtgaatcagcagtatcacagtttgcaatgatggccagaaaatttggtaaacaact

SEQ ID NO: 718380 - DNA, 75 bp, synthetic construct
  source 1..75: mol_type = other DNA
agctgcgcaagctggaagcggcgggcgattacactgcgcgtctggcgctactggaagagcagaaatcgttgccgt

SEQ ID NO: 718381 - DNA, 75 bp, synthetic construct
  source 1..75: mol_type = other DNA
gcattgccgcgtgggtcattggtacacgcaatatgaaaaaagccctgctacgtgcgttactggaacctaccgctg

SEQ ID NO: 718382 - DNA, 75 bp, synthetic construct
  source 1..75: mol_type = other DNA
ggcctgataagacgcgtcagcgtcgcatcaggcgttacacacctgatgcggctacttagcgacgaaatccgtaat

SEQ ID NO: 718383 - DNA, 75 bp, synthetic construct
  source 1..75: mol_type = other DNA
cgatctcggtgcgtcgtttctgatgcccgccatcaccgccgtggtgcttggcggtgccaatatttatggtggttc

SEQ ID NO: 718384 - DNA, 75 bp, synthetic construct
  source 1..75: mol_type = other DNA
cacgccatacggcggctttgtaccgacggtgaaaatcgctaccaacagtgaactggcggcgaagaaaaacactgg

SEQ ID NO: 718385 - DNA, 75 bp, synthetic construct
  source 1..75: mol_type = other DNA
gcgcaagcggcagatcgtgaagtgcagatctatcgtcgcgctaacggcgatgtcggggtgcgtaatgagctgtgg

SEQ ID NO: 718386 - DNA, 75 bp, synthetic construct
  source 1..75: mol_type = other DNA
atgcaatacatcaagatccatgcgctggataacgtcgcggtcgctttagcagatttggctgaaggcacagaagtc

SEQ ID NO: 718387 - DNA, 75 bp, synthetic construct
  source 1..75: mol_type = other DNA
agaatactatcaggagattggtgagaaaaaagcgcgtaagtcgaaaatgaaaagagcacaaagattgcttgagaa

SEQ ID NO: 718388 - DNA, 75 bp, synthetic construct
  source 1..75: mol_type = other DNA
ataagttggagtcattaccgtcaaatagatctgctggaaaatctgacggcagttattcaggattatccaaatcca

SEQ ID NO: 718389 - DNA, 75 bp, synthetic construct
  source 1..75: mol_type = other DNA
aataaggatgagttgattattttactctacaataagaaatttattcattatttgtatgagaaggcgatgcgcata

SEQ ID NO: 718390 - DNA, 75 bp, synthetic construct
  source 1..75: mol_type = other DNA
agtggaattcatccagtttattccggtggtcgagcgcctggctgatgaaacggctgcccgcgaaggactgaaact

SEQ ID NO: 718391 - DNA, 75 bp, synthetic construct
  source 1..75: mol_type = other DNA
aatggtcgattcctcacaacagcaggcatttggtgaagataaatttaagcagttaccgatgcagtgccgcagttg

SEQ ID NO: 718392 - DNA, 75 bp, synthetic construct
  source 1..75: mol_type = other DNA
cttttcacgtaatggtgaaaccgagcggttcagattgtaatctgaactgtgactactgtttttatctcgaaaaac

SEQ ID NO: 718393 - DNA, 75 bp, synthetic construct
  source 1..75: mol_type = other DNA
atctcgatgtgctggatctgcccgtccccctgatcttctttctcgtcagcgtgatctttttctggttgctgatgc

SEQ ID NO: 718394 - DNA, 75 bp, synthetic construct
  source 1..75: mol_type = other DNA
gtttatccgcaatatcgactggggaatatgcttcagcagacaattgcagaaatgatcgattccccgcaacagcag

SEQ ID NO: 718395 - DNA, 75 bp, synthetic construct
  source 1..75: mol_type = other DNA
caacgtgttaaaagcgtgctggggaggctgtccgaaacaccgctttatgctcgatgccagcggtaaaccggggct

SEQ ID NO: 718396 - DNA, 75 bp, synthetic construct
  source 1..75: mol_type = other DNA
cgctccgctttctggggtgccccacgcgcgccgatgacggtagcgatttctgccgatggtgggaaaagctggccg

SEQ ID NO: 718397 - DNA, 75 bp, synthetic construct
  source 1..75: mol_type = other DNA
atgatattgacgataatgttgatggcgtttttattaatggtgataattatcaagcgttaaatcttttgaagaaaa

SEQ ID NO: 718398 - DNA, 75 bp, synthetic construct
  source 1..75: mol_type = other DNA
cgcgctgctgaaaggtaactacatcgggattctggtgtgggcaattggcctcggtttcgcactgcgtcacggtaa

SEQ ID NO: 718399 - DNA, 75 bp, synthetic construct
  source 1..75: mol_type = other DNA
actgacgtgctgttcactgcggcagcttgccaggcggaagacgatcgtctggcaaatagcgccctgcgtaactaa

SEQ ID NO: 718400 - DNA, 75 bp, synthetic construct
  source 1..75: mol_type = other DNA
tggattcaacgacaggctcatctcatatacttaaagttatgaaaatagaaagttacgaagatgtattaaatagcc

SEQ ID NO: 718401 - DNA, 75 bp, synthetic construct
  source 1..75: mol_type = other DNA
gaatcgtaaggatgcgggttcaaggaaatatatacttgttgaacagggggagtatgcacaaaatgtaactttaag

SEQ ID NO: 718402 - DNA, 75 bp, synthetic construct
  source 1..75: mol_type = other DNA
gatactagtggttttttatataaaaatagctttaagcattcaagttggctgagtatgatggatagccgtttgctt

SEQ ID NO: 718403 - DNA, 75 bp, synthetic construct
  source 1..75: mol_type = other DNA
ctttcagatttcgggccgaaacaggtaattgagttcggcggcggtactggcaaaggtaaatattgggacccaaac

SEQ ID NO: 718404 - DNA, 75 bp, synthetic construct
  source 1..75: mol_type = other DNA
tgagtttgtctgtaggctaatcgatctggcgatgagaaatgctgagaaacatcttctgaaaaaagcatggaaaaa

SEQ ID NO: 718405 - DNA, 75 bp, synthetic construct
  source 1..75: mol_type = other DNA
gaacgctgctgaaaaactgtctgaggtagattttaaagaggttaagcaggcattagccaaaatgcactacaccgt

SEQ ID NO: 718406 - DNA, 75 bp, synthetic construct
  source 1..75: mol_type = other DNA
gggcagaaaaccaatatccgccctattttgttcctctatctgctgggtaccttctctgctgctctggccgcagtc

SEQ ID NO: 718407 - DNA, 75 bp, synthetic construct
  source 1..75: mol_type = other DNA
tcagagaacgattaaagcaggagctaaaggaaattacagataagaaaactcatgaagtgttatggcgtgtaggga

SEQ ID NO: 718408 - DNA, 75 bp, synthetic construct
  source 1..75: mol_type = other DNA
tcagggagcgattaaagcaggagctaaaggaaatcacagataagaaaactcatgaggtgttatggcgagtaggga

SEQ ID NO: 718409 - DNA, 75 bp, synthetic construct
  source 1..75: mol_type = other DNA
gtgttattcgcgaagctaaagaaggtactgtttgggcgaaaagaataaaaggtgagatacaaatacattacagac

SEQ ID NO: 718410 - DNA, 75 bp, synthetic construct
  source 1..75: mol_type = other DNA
tggggcaccatgctctccgatgtattgcagttcgcgcaaagtgcctggtgggtcgtgaccttcccgggtctggcg

SEQ ID NO: 718411 - DNA, 75 bp, synthetic construct
  source 1..75: mol_type = other DNA
ctgacaatccacagaacgttcgtcgagttaaatggtgataaggcacatgttgagaatccgaaactgatgatgaaa

SEQ ID NO: 718412 - DNA, 75 bp, synthetic construct
  source 1..75: mol_type = other DNA
caatccaggtacccgtacctggacgttaggtgtggctgaaggcatagaaaacgcgctgtcagttactgaagcgac

SEQ ID NO: 718413 - DNA, 75 bp, synthetic construct
  source 1..75: mol_type = other DNA
gcttacacctggtggcgtcaggccatcaagtacgtgcgcatctcccccgagtgggttaaggggcaggcatcatga

SEQ ID NO: 718414 - DNA, 75 bp, synthetic construct
  source 1..75: mol_type = other DNA
atactggtgcgccaaccaaagtattagcgcccgatacggcgggaaaattttacccaataaagaatgcagtagttt

SEQ ID NO: 718415 - DNA, 75 bp, synthetic construct
  source 1..75: mol_type = other DNA
ataccggtgcgccaaccaaagtattagcacccgatacggcagggaaattttacccaaaccaggattgcagtagtt

SEQ ID NO: 718416 - DNA, 75 bp, synthetic construct
  source 1..75: mol_type = other DNA
tttttttaacagagttaactaatgttgacgataatttagatggtctcttaattaattcagataattaccaggcca

SEQ ID NO: 718417 - DNA, 75 bp, synthetic construct
  source 1..75: mol_type = other DNA
gccgagtggttcaacgggctggatagaactgccgaacggtcagcgctggaaccctggccacatgtacaaattcaa

SEQ ID NO: 718418 - DNA, 75 bp, synthetic construct
  source 1..75: mol_type = other DNA
aatccatcgaatccaatatcgaacgtggctatgtgcgtgttgaaggaacgctaccaactggcgagcgtaccctta

SEQ ID NO: 718419 - DNA, 75 bp, synthetic construct
  source 1..75: mol_type = other DNA
gccaacgagcacatgaacagcagacaatggccaggtaaagcggctattggtcgtctgaaaggtgaggaactggcg

SEQ ID NO: 718420 - DNA, 75 bp, synthetic construct
  source 1..75: mol_type = other DNA
tgtccgtacaaaaaaaatctacttcaactggaaaagcggcaagtcagaaaaatgcatcttctgttacccacgaat

SEQ ID NO: 718421 - DNA, 75 bp, synthetic construct
  source 1..75: mol_type = other DNA
gttaatcaggtaaaagacgctggtctgaaagggcgcggtggcgcgggcttctcgactggcctgaagtggagcctg

SEQ ID NO: 718422 - DNA, 75 bp, synthetic construct
  source 1..75: mol_type = other DNA
tcagcgtatcgccattgcccgtggtctgatgctcgacccggatgtggtgattgccgatgaaccggtttctgcgct

SEQ ID NO: 718423 - DNA, 75 bp, synthetic construct
  source 1..75: mol_type = other DNA
cagagcagcaggatatgtataaccagttaatggggttaacgaatgttgggttaactgctgctggtatgggtagtg

SEQ ID NO: 718424 - DNA, 75 bp, synthetic construct
  source 1..75: mol_type = other DNA
aaaccttatcgtgaagttggcgaatcagctttaccgcgtttgcaaaagcttgctggcattcctattgatcgaaat

SEQ ID NO: 718425 - DNA, 75 bp, synthetic construct
  source 1..75: mol_type = other DNA
tgatgtacctgggccgctgcgtggagaaaggtacgaaagaccaaatcttcaataatccgcgtcatccgtacaccc

SEQ ID NO: 718426 - DNA, 75 bp, synthetic construct
  source 1..75: mol_type = other DNA
ccctgtcgatgatggcgaaagtcggcctgaaaaccgagcactatgaccgctatccgcatatgttctccggcggac

SEQ ID NO: 718427 - DNA, 75 bp, synthetic construct
  source 1..75: mol_type = other DNA
ctgcttattaataccagcttaagcaaagaacagcgtcgggaaaaagccctgtcgatgatggcgaaagtcggcctg

SEQ ID NO: 718428 - DNA, 75 bp, synthetic construct
  source 1..75: mol_type = other DNA
tcagtgccagtcgccaaagttactggaacacgtcacgcagcgaccagcaaatatcatttagattaaatgtgccgt

SEQ ID NO: 718429 - DNA, 75 bp, synthetic construct
  source 1..75: mol_type = other DNA
ctggtgcgaatggagccaccacctcatttcgcggcgcgggtggcgcgggggctaaagatggctttctctttgcgc

SEQ ID NO: 718430 - DNA, 75 bp, synthetic construct
  source 1..75: mol_type = other DNA
cgcagcagttaatgacacctgtgctaaaaccgttgttgggcattccagggatctgctcgctggcgctgatcgcta

SEQ ID NO: 718431 - DNA, 75 bp, synthetic construct
  source 1..75: mol_type = other DNA
tgacacgcgcgcaacttgccagtatggggctgaatacggcttctgtctccggtatgaatctgctggcggatgatg

SEQ ID NO: 718432 - DNA, 75 bp, synthetic construct
  source 1..75: mol_type = other DNA
tggtcggtgtatacggtacgttgctggaagacaacaacctcagctatagcgtgcaaaccggttacgccgggggag

SEQ ID NO: 718433 - DNA, 75 bp, synthetic construct
  source 1..75: mol_type = other DNA
gatctcaacggtcggatgaccaatctggtcggtgtatacggtacgttgctggaagacaacaacctcagctatagc

SEQ ID NO: 718434 - DNA, 75 bp, synthetic construct
  source 1..75: mol_type = other DNA
agaacaagatgtcgcggaagtcgctaaaaaggtagcaaaagagaaatatggcctcgatgttgaactggtaggatt

SEQ ID NO: 718435 - DNA, 75 bp, synthetic construct
  source 1..75: mol_type = other DNA
tggaatcttgaacagcgcgacggcaaaactggcgaagaaaccgagctgcaactgagcctgctgggtagccaggat

SEQ ID NO: 718436 - DNA, 75 bp, synthetic construct
  source 1..75: mol_type = other DNA
gcagaagagttgttgtcgccgatggcggataaatcccgttataccggacatctgatcgactttaacgtccgtgca

SEQ ID NO: 718437 - DNA, 75 bp, synthetic construct
  source 1..75: mol_type = other DNA
tttcggggataaaccacagttactggagagactgggggatgtgttgtttttcacgtcgctttataaccaaggatg

SEQ ID NO: 718438 - DNA, 75 bp, synthetic construct
  source 1..75: mol_type = other DNA
ggccagaaatccaatggcaacccggaaaaagcgcttaacttcctgacgccacaccagaagtggggtatccactcc

SEQ ID NO: 718439 - DNA, 75 bp, synthetic construct
  source 1..75: mol_type = other DNA
cgctgtctgcggcggtcgatccggcctgggaagcgaaaagcgactgggaaatctacaaagccatcgcgaagaaat

SEQ ID NO: 718440 - DNA, 75 bp, synthetic construct
  source 1..75: mol_type = other DNA
cgtccggcgcgtcatatgaacagcacttcttatttctataatcactccagccagtggcgttatgaaaccgtgact

SEQ ID NO: 718441 - DNA, 75 bp, synthetic construct
  source 1..75: mol_type = other DNA
gcgcaaataaaagaaggcgcgacagtggcgatccccaacgacccgaccaaccttggtcgcgcacttttactgttg

SEQ ID NO: 718442 - DNA, 75 bp, synthetic construct
  source 1..75: mol_type = other DNA
cactgggaaatgtgatgtttttcatgctgctttatgacatggaaaatctggataagtttataaaagaactgatgg

SEQ ID NO: 718443 - DNA, 75 bp, synthetic construct
  source 1..75: mol_type = other DNA
aatggtatcgcatgacgggtaaacgtttatcacttaatgtcccgccttttatgctgatcccgcgtaatatccgga

SEQ ID NO: 718444 - DNA, 75 bp, synthetic construct
  source 1..75: mol_type = other DNA
atcaggagtatcagtccctggtattaaaatctgtttttaaactggaaccgggatttgaacaacttttaacaagac

SEQ ID NO: 718445 - DNA, 75 bp, synthetic construct
  source 1..75: mol_type = other DNA
atacagggttaaatcgcaattactggagagactggggaatgtgttgtttttcacgtcgctttataaccagggatg

SEQ ID NO: 718446 - DNA, 75 bp, synthetic construct
  source 1..75: mol_type = other DNA
aaccccaaaatcggctcaaccgttcacgggcagtttgtatgaggttttgagcaaggagagcgattcagctaagct

SEQ ID NO: 718447 - DNA, 75 bp, synthetic construct
  source 1..75: mol_type = other DNA
aaaaccgttgcttggcattccaggcatctgttcgctggcgctaatcgctaacctacaaaacaccgatgctgccgc

SEQ ID NO: 718448 - DNA, 75 bp, synthetic construct
  source 1..75: mol_type = other DNA
ttaggctctactgcggggaagttgttaggtgcgttagtgggctttttatttatggccctggttggggcgttatta

SEQ ID NO: 718449 - DNA, 75 bp, synthetic construct
  source 1..75: mol_type = other DNA
agatggaagagagactctctcgcagccctggcggcaaactggctttgtgggctttctatacatggtgtggctatt

SEQ ID NO: 718450 - DNA, 75 bp, synthetic construct
  source 1..75: mol_type = other DNA
aatgtgacttttatcacataatagtactaagtctgaattttccgggttatctcaaaatggaatacggttcgacaa

SEQ ID NO: 718451 - DNA, 75 bp, synthetic construct
  source 1..75: mol_type = other DNA
cctggaacaagaaaattatccaccgttgcgtttacagggtggttttactggcggcaatgtcgaagttgatggctc

SEQ ID NO: 718452 - DNA, 75 bp, synthetic construct
  source 1..75: mol_type = other DNA
cggtaacgccggaacggcaatgcgtccgctggcggcagctctttgtctgggtagcaatgatattgtgctgaccgg

SEQ ID NO: 718453 - DNA, 75 bp, synthetic construct
  source 1..75: mol_type = other DNA
gctctggttggggcattgttaggcagcattgcctggtacactcggcctcgtcctgcacgtagcagacgctatgaa

SEQ ID NO: 718454 - DNA, 75 bp, synthetic construct
  source 1..75: mol_type = other DNA
gagtcgctctattacagcgggctgatttgttcactcgaagcaatcaagagcggatgcacgtcggttatcgatcac

SEQ ID NO: 718455 - DNA, 75 bp, synthetic construct
  source 1..75: mol_type = other DNA
aacatcgccccctgcccggatttcatctcaacgctgaaaaatctctggtggcggctcgatcgcgcccttgatgaa

SEQ ID NO: 718456 - DNA, 75 bp, synthetic construct
  source 1..75: mol_type = other DNA
aaaaaagcgcgtaagtcgaaaatgaaaagagcacaaagattgcttgagaaaatggcgtgtgacggggtttcgcca

SEQ ID NO: 718457 - DNA, 75 bp, synthetic construct
  source 1..75: mol_type = other DNA
atatgtacaaaaaaatccaagttgaagcggctactaccgacatcaaaacactggaacagtttttgaagaagttcc

SEQ ID NO: 718458 - DNA, 75 bp, synthetic construct
  source 1..75: mol_type = other DNA
attcacgcagcggaagacctttacgatgtttctcacagtcatcactggtacggcaaagacctgctggcacgactg

SEQ ID NO: 718459 - DNA, 75 bp, synthetic construct
  source 1..75: mol_type = other DNA
caaagccgatttaaccatttgcgattacaactcgccgacaccgctgctggcagacaatatcgccgggcatatcgc

SEQ ID NO: 718460 - DNA, 75 bp, synthetic construct
  source 1..75: mol_type = other DNA
caaaaagtgccctggagttgttcctcggtaacgccggaacggcaatgcgtccgctggcggcagcactttgcctgg

SEQ ID NO: 718461 - DNA, 75 bp, synthetic construct
  source 1..75: mol_type = other DNA
atgaccactcaactggaacaggcctgggagctggcgaaacagcgtttcgcggcggtggggattgatgtcgaggag

SEQ ID NO: 718462 - DNA, 75 bp, synthetic construct
  source 1..75: mol_type = other DNA
tttatcgagtacatgaatgtggatactacttatggggtaataatactcctgtttttggctcacttcaggagctcc

SEQ ID NO: 718463 - DNA, 75 bp, synthetic construct
  source 1..75: mol_type = other DNA
ccgggtgatgcaggcatttaccaccacgaggggcatcgtatcaggctgacaaaggacgggcgctgcatcattacc

SEQ ID NO: 718464 - DNA, 75 bp, synthetic construct
  source 1..75: mol_type = other DNA
taaatggcaatgatagatatactttaatgacgacgtacggtggagttacacagcaacaacgaggaagtggttacg

SEQ ID NO: 718465 - DNA, 75 bp, synthetic construct
  source 1..75: mol_type = other DNA
caactaggaggtggttacggatattatcatgtatctcaaaaaactcccccacaaactatttctggtgtagtatct

SEQ ID NO: 718466 - DNA, 75 bp, synthetic construct
  source 1..75: mol_type = other DNA
agctgcgcaagctggaagcggcgggcgattacactgcgcgtctggcactgctggaagagcagaaatcgttgccgt

SEQ ID NO: 718467 - DNA, 75 bp, synthetic construct
  source 1..75: mol_type = other DNA
cgatcgcctgtttgcgatggcaacagaactgcgtaaagtcggtgcggaagtcgaagaggggcacgattacattcg

SEQ ID NO: 718468 - DNA, 75 bp, synthetic construct
  source 1..75: mol_type = other DNA
gtgacgattcttgatccaaaatgtaccgctaaaacttttccagactatttcgagcaattggcgcggataagtcaa

SEQ ID NO: 718469 - DNA, 75 bp, synthetic construct
  source 1..75: mol_type = other DNA
tgcatcttcggcttcttacttcctggcagcagcagcaatcagaggcggcactgtaaaagtgaccggcattggacg

SEQ ID NO: 718470 - DNA, 75 bp, synthetic construct
  source 1..75: mol_type = other DNA
tgtgtgggcgcacaacgtgatcaggggattgccgttgtggtggaagaccgccgctaccgcccgacaaatcttgaa

SEQ ID NO: 718471 - DNA, 75 bp, synthetic construct
  source 1..75: mol_type = other DNA
gccgttattgccgggatacggtattccggccatgtgcatcatgataacggcgaaggcagtaagacaggagtaccg

SEQ ID NO: 718472 - DNA, 75 bp, synthetic construct
  source 1..75: mol_type = other DNA
accgcttatctgcttcgttctccgaagaatgcgcgcagacttatggactcaatagaaagcctgaaaagtggtaat

SEQ ID NO: 718473 - DNA, 75 bp, synthetic construct
  source 1..75: mol_type = other DNA
ggtcagatagagaatctatatcaagatgaacacaatggaacgtatcacctgacattattcaataatggattgaca

SEQ ID NO: 718474 - DNA, 75 bp, synthetic construct
  source 1..75: mol_type = other DNA
atggctgtgattaataacagaagtaaattcagttttttcaataaagttcgtgtgttattgaaaaaaattctaaag

SEQ ID NO: 718475 - DNA, 75 bp, synthetic construct
  source 1..75: mol_type = other DNA
aattcagttttttcaataaagttcgtgtattgttgaaaaaatttagaaagccaaatgaaagcattgatgatgttg

SEQ ID NO: 718476 - DNA, 75 bp, synthetic construct
  source 1..75: mol_type = other DNA
cttcctggcgagctgttttcgttctacgcccgccgacgaaagatcgcaagtgcaataacgagatttttcacgtct

SEQ ID NO: 718477 - DNA, 75 bp, synthetic construct
  source 1..75: mol_type = other DNA
gccggactgggaaaatctggaaggtgtgaaaatctcaatttatccgctcagcaacagcggtaagcgcacctccta

SEQ ID NO: 718478 - DNA, 75 bp, synthetic construct
  source 1..75: mol_type = other DNA
aaaattacgttataatgacaatgctccaaaagcatttatggatatgtttgatcatcgaatgtattgcctgtctta

SEQ ID NO: 718479 - DNA, 75 bp, synthetic construct
  source 1..75: mol_type = other DNA
atactgcattttattcaccatcagtcagatccctggccgggcttgagcagttactctcgtcagtctatcaaatca

SEQ ID NO: 718480 - DNA, 75 bp, synthetic construct
  source 1..75: mol_type = other DNA
caaccggcagcggaaccgcaacaacagactgatcctgttgtagatgaagtccctaagatagtgactgacttcctg

SEQ ID NO: 718481 - DNA, 75 bp, synthetic construct
  source 1..75: mol_type = other DNA
tgcaagtaatgggctgacttctggtacagagaagcgtaagcgcttaatcatgcgggttcaattcgctttgctgga

SEQ ID NO: 718482 - DNA, 75 bp, synthetic construct
  source 1..75: mol_type = other DNA
ctgtgtcgattaatccttttcgtggcactttagaaaatacagataccaatgaacagggcgttctgggtcattgcc

SEQ ID NO: 718483 - DNA, 75 bp, synthetic construct
  source 1..75: mol_type = other DNA
atactgcattctattcacaatcagtcagatccctagctgggcttgaacagttactctcatcaatatatcaaatca

SEQ ID NO: 718484 - DNA, 75 bp, synthetic construct
  source 1..75: mol_type = other DNA
ggaatttatgccgggaaaggattttcatcgtgttatcagacaacaaataaaatcatatatcggtgatgctcttaa

SEQ ID NO: 718485 - DNA, 75 bp, synthetic construct
  source 1..75: mol_type = other DNA
aaggaagataccagctatggcgattttattataaataactggttacatttctctagtttattaataactacctgg

SEQ ID NO: 718486 - DNA, 75 bp, synthetic construct
  source 1..75: mol_type = other DNA
ttcgaacgttttagccatttcaacggagcgcaggataaaggttggatcatcatcccatgtgaactgatcgactat

SEQ ID NO: 718487 - DNA, 75 bp, synthetic construct
  source 1..75: mol_type = other DNA
agccagcatcgtgagcgtgttatcggcactcaggaactggttgccattgtactggcagaaaaaggccactgggag

SEQ ID NO: 718488 - DNA, 75 bp, synthetic construct
  source 1..75: mol_type = other DNA
tggtcgagcaggttgctaatgacctggatgcgattctcgaaaaaggaatgcgcgaagctgtacgtccgttgtgct

SEQ ID NO: 718489 - DNA, 75 bp, synthetic construct
  source 1..75: mol_type = other DNA
atgtctgccgtactgaccgctgaacaagccctcaaattagtgggtgagatgtttgtttatcacatgccatttaac

SEQ ID NO: 718490 - DNA, 75 bp, synthetic construct
  source 1..75: mol_type = other DNA
tggtagagcaggtggccaatgacctggatgcgattctggaaaaagggatgcgcgaagctgtacgtccgttgtgct

SEQ ID NO: 718491 - DNA, 75 bp, synthetic construct
  source 1..75: mol_type = other DNA
cgcggagagcgtaacggagaaacgtatccggtacaggacgatgcgcactggctggaacgttaccagcaactctgg

SEQ ID NO: 718492 - DNA, 75 bp, synthetic construct
  source 1..75: mol_type = other DNA
ctgataacgtcggctgccaatacatataatttgccagcacctttactggcaggtgtgtgttggatagaagtcggg

SEQ ID NO: 718493 - DNA, 75 bp, synthetic construct
  source 1..75: mol_type = other DNA
gttctgtggtcaattgcagcagcgctaactaaatacgacgaccgtatgtttcgcatcctttcattatggctacag

SEQ ID NO: 718494 - DNA, 75 bp, synthetic construct
  source 1..75: mol_type = other DNA
ttttcaaaggtgccactcgcctaccgcgagcaataggcttgccgcgcgacgtcgccatgatgatttttatggctt

SEQ ID NO: 718495 - DNA, 75 bp, synthetic construct
  source 1..75: mol_type = other DNA
tcgcgcgctgggtgtaccacgtaatgtagctatgatgatattcatgatttctgcctcgctttttatgattattca

SEQ ID NO: 718496 - DNA, 75 bp, synthetic construct
  source 1..75: mol_type = other DNA
tcaggtacaaattcgccatcgtcttcttcatctgttcgttcgcttcgctcaaatgacaccgatgcctctacgacc

SEQ ID NO: 718497 - DNA, 75 bp, synthetic construct
  source 1..75: mol_type = other DNA
gctcaacgcgatccaggcggctacgcaggaaacaaacgagaagtttgcacagttaccgcgcacgtccggtatggc

SEQ ID NO: 718498 - DNA, 75 bp, synthetic construct
  source 1..75: mol_type = other DNA
acctgccattgcgctggcggcgctggcggcaaaacgtcatagcccggagaacgacccattaatgctggtgctggc

SEQ ID NO: 718499 - DNA, 75 bp, synthetic construct
  source 1..75: mol_type = other DNA
ggatgcagtatcaggataaagaccagtcaggacagacatcgagcacgacccgcgcagagcagggtattaaagcca

SEQ ID NO: 718500 - DNA, 75 bp, synthetic construct
  source 1..75: mol_type = other DNA
gaacgtgtagcaatgaaaatgataacaagggaatcacaacgaccaggcggaatattgcaacctcgccgcaaataa

SEQ ID NO: 718501 - DNA, 75 bp, synthetic construct
  source 1..75: mol_type = other DNA
tttttgctaacttaggcagcaatatcctcgggaatatcggtaacaggctttcagacatagctgcaaactggatag

SEQ ID NO: 718502 - DNA, 75 bp, synthetic construct
  source 1..75: mol_type = other DNA
taaacgcaagaatgagctaaacagcaacaacgaaaagaaattcggccctacagtcggtaaggtcatgacgtttgc

SEQ ID NO: 718503 - DNA, 75 bp, synthetic construct
  source 1..75: mol_type = other DNA
atgaaataccacgccagtgcgtcactcccggcgattacgttatttacgaaggccggacatatgttgcatcggcaa

SEQ ID NO: 718504 - DNA, 75 bp, synthetic construct
  source 1..75: mol_type = other DNA
tattcgtgatttttccactcaacactgtattaaggaaaccatgattaaggtctttctcgggcgtgatggtttacc

SEQ ID NO: 718505 - DNA, 75 bp, synthetic construct
  source 1..75: mol_type = other DNA
aagcgaaaactatatattcgtaacctgaccacaaaaacatgcattactgaccgcatgattaaagtcttcctcggt

SEQ ID NO: 718506 - DNA, 75 bp, synthetic construct
  source 1..75: mol_type = other DNA
aaacatgcgggtgactgtttcacagcaatttcaggataaagatcagtccggccagaccagcgccacaacaaaatc

SEQ ID NO: 718507 - DNA, 75 bp, synthetic construct
  source 1..75: mol_type = other DNA
tgggtctggcacgcgcgctgatattgcgcccaaaagtcattattgccgatgaagccctcgcctcactggatatgt

SEQ ID NO: 718508 - DNA, 75 bp, synthetic construct
  source 1..75: mol_type = other DNA
cgttgaatccccgtcaacgtatctcgcaaattctggattttccactgcgcctgaacaccgacctggaaccggaac

SEQ ID NO: 718509 - DNA, 75 bp, synthetic construct
  source 1..75: mol_type = other DNA
gacacaaagcaaggccacgcaggccagcacaacggcaagcgcggtagccgctcaggggagcattgcggcggctgc

SEQ ID NO: 718510 - DNA, 75 bp, synthetic construct
  source 1..75: mol_type = other DNA
gtactggggtaagggtgccacggtacctgatgaataccgtatccgtacgggagatacggatacggtgacagtcag

SEQ ID NO: 718511 - DNA, 75 bp, synthetic construct
  source 1..75: mol_type = other DNA
agttgctcgccgaccactgaaaatgttgctggccgtggcgctggaaccgctgttaagtcgggctgccaataaact

SEQ ID NO: 718512 - DNA, 75 bp, synthetic construct
  source 1..75: mol_type = other DNA
ccatgtacttggccgcaacgcagcggaaatggtggctattggctcccagtcttccggcgcgctggagttactccc

SEQ ID NO: 718513 - DNA, 75 bp, synthetic construct
  source 1..75: mol_type = other DNA
gctgcggagtccacaggcgcaggtgaccacgacagcactttcagcatgaagacggttcatgattcggtccggcag

SEQ ID NO: 718514 - DNA, 75 bp, synthetic construct
  source 1..75: mol_type = other DNA
ggggcaagtgtaagcagctatcccctgccatccggtaacaatggttattttgtcccgtccacggacccggacagt

SEQ ID NO: 718515 - DNA, 75 bp, synthetic construct
  source 1..75: mol_type = other DNA
gtgcaggacgactggataatgaggcatcgtttattctcgccggtggcagtatgaccctgagtggcgacacactga

SEQ ID NO: 718516 - DNA, 75 bp, synthetic construct
  source 1..75: mol_type = other DNA
ggaagagatcattagaatggtaacgccaataaaagcgctaatggatggctacaaatggatgaaggaaattgtcga

SEQ ID NO: 718517 - DNA, 75 bp, synthetic construct
  source 1..75: mol_type = other DNA
gtctctggcaacatccatcttcggtggcaggcgctttaatggtggtagcgtcattggtggcaacttgtaccgtgt

SEQ ID NO: 718518 - DNA, 75 bp, synthetic construct
  source 1..75: mol_type = other DNA
ggaacataacaggccggagctattccagacgtctaacggcaaccaatacatgatccccggcgagaatggcagggt

SEQ ID NO: 718519 - DNA, 75 bp, synthetic construct
  source 1..75: mol_type = other DNA
acctaccagcaactactcgatgtacctttgggtttggagtatggtcctgactcacttgatgaagagtatcttgaa

SEQ ID NO: 718520 - DNA, 75 bp, synthetic construct
  source 1..75: mol_type = other DNA
agaagaatacatggtatcaaatgctgatgctgctctagctttcgcggaggcatttaagcgctatcaggattcact

SEQ ID NO: 718521 - DNA, 75 bp, synthetic construct
  source 1..75: mol_type = other DNA
agggtgaggctaacgacggcaagatcaccggattcgatcagccagttgataagccgaaaaaaccgaaaaaagaga

SEQ ID NO: 718522 - DNA, 75 bp, synthetic construct
  source 1..75: mol_type = other DNA
gtaccgccggatttctagttacggcagcaaaaggcgagatcaaacgccgccagcgccgcaaggccaaagaatcag

SEQ ID NO: 718523 - DNA, 75 bp, synthetic construct
  source 1..75: mol_type = other DNA
aacagttccgcgatgcactgctcgccccgccagcctggcaggaaggcggcagcatggcgcacttgctgggcactg

SEQ ID NO: 718524 - DNA, 75 bp, synthetic construct
  source 1..75: mol_type = other DNA
gccttcgggcgacacattgcccggagttttcaccggggacgtggtgtacacatccccgccatgaaaaacacggcc

SEQ ID NO: 718525 - DNA, 75 bp, synthetic construct
  source 1..75: mol_type = other DNA
cgttgcagacggtacaatttcctctaccagcagcgatgctgtaaatggctcgcaactctatgacacgagcaagta

SEQ ID NO: 718526 - DNA, 75 bp, synthetic construct
  source 1..75: mol_type = other DNA
tgaacatgccgttcatgatgaaaaactgattaatcatactatctgtattctgaatgaattacgaagcatagcgat

SEQ ID NO: 718527 - DNA, 75 bp, synthetic construct
  source 1..75: mol_type = other DNA
aatttggtaaaagaagaaaacgaaacagacgcacaatttatcgttactgccatgcgcggcgaaatcaaacgccgc

SEQ ID NO: 718528 - DNA, 75 bp, synthetic construct
  source 1..75: mol_type = other DNA
gtactgcgcagtttatcgttacagccatgcgtggcgagatcaaacgccgccagcgccgcaaggccaaagagcaga

SEQ ID NO: 718529 - DNA, 75 bp, synthetic construct
  source 1..75: mol_type = other DNA
caaatatgattaatttctggaagaatgtcagtattgctggcgcattcctgctgctggcaattaccgggccggggg

SEQ ID NO: 718530 - DNA, 75 bp, synthetic construct
  source 1..75: mol_type = other DNA
atgaacacactacgttattttgattttggcgcaacccgccccgttttgttgttaattgcccgtattgccatcatc

SEQ ID NO: 718531 - DNA, 75 bp, synthetic construct
  source 1..75: mol_type = other DNA
ccgcagcggctgtaaagccccgccgtcatccccgtttcagacgcgaagacatccccgccatgaaaaacacggctt

SEQ ID NO: 718532 - DNA, 75 bp, synthetic construct
  source 1..75: mol_type = other DNA
atcaaaggttttgtgatggacgatgagcggctgaagaacccgcccgtgggttcatcggctgtgcccgactatttc

SEQ ID NO: 718533 - DNA, 75 bp, synthetic construct
  source 1..75: mol_type = other DNA
ctacagcctgcctgttattcttgctgtcggctaccgcgttcgctcccctcgcggcacgcagttccgccagtgggc

SEQ ID NO: 718534 - DNA, 75 bp, synthetic construct
  source 1..75: mol_type = other DNA
gccattaacacatcatttagcacatcactcggcgacgccctactttgggatgcaaccgcaggcaaattcagcgcc

SEQ ID NO: 718535 - DNA, 75 bp, synthetic construct
  source 1..75: mol_type = other DNA
gtgtcgaccaacaccaccaacatcactaacctgacggattccgttggcgaccttaaggacgattctctgctgtgg

SEQ ID NO: 718536 - DNA, 75 bp, synthetic construct
  source 1..75: mol_type = other DNA
gcggttaacgtaggtcagttgaaagtaacggacgcgcaggtttcccagaatacccagagcattactaacctgaac

SEQ ID NO: 718537 - DNA, 75 bp, synthetic construct
  source 1..75: mol_type = other DNA
aacggtgcgggcattaactatgtacgtaccaacgacaacggcttagcgttcaacgatgccagcgcttcaggtatt

SEQ ID NO: 718538 - DNA, 75 bp, synthetic construct
  source 1..75: mol_type = other DNA
tgattataacgcatgtaatggatcatgagtttgtttgtaagctaatcgatctggcgatgaggaatgctgagaaac

SEQ ID NO: 718539 - DNA, 75 bp, synthetic construct
  source 1..75: mol_type = other DNA
ccgcaggcttacacgccgggagccagcatggcctctattggtggtggtacttacaacggtgaatcggcagttgct

SEQ ID NO: 718540 - DNA, 75 bp, synthetic construct
  source 1..75: mol_type = other DNA
atcaccaacctgactgacgctgttgacagtctcggtgatgactctctgctgtggaacgctactgcgggggcattc

SEQ ID NO: 718541 - DNA, 75 bp, synthetic construct
  source 1..75: mol_type = other DNA
ggttctggctgatgcgatcaacggtattgctatcggttctaacgcacgcgcaaatcatgccgacagcattgcaat

SEQ ID NO: 718542 - DNA, 75 bp, synthetic construct
  source 1..75: mol_type = other DNA
cgcgctgctgtgggatgaagacgcaggtgcctacaacgccagccatgatggcaatgccagcaaaatcaccaacgt

SEQ ID NO: 718543 - DNA, 75 bp, synthetic construct
  source 1..75: mol_type = other DNA
tcaaagccggtgacctgacagctggcagcactgacgccgttaacggctctcagctcaaaaccaccaacgataacg

SEQ ID NO: 718544 - DNA, 75 bp, synthetic construct
  source 1..75: mol_type = other DNA
cagccatgacggcaaggccagcatcatcacaaatgttgctgatggtaacattggcgaaggcagcactgacgccat

SEQ ID NO: 718545 - DNA, 75 bp, synthetic construct
  source 1..75: mol_type = other DNA
tcagactacccgtggtgcgcagaccaactacactgcctacaacatggatgcaccgcagaactctgtgggtgagtt

SEQ ID NO: 718546 - DNA, 75 bp, synthetic construct
  source 1..75: mol_type = other DNA
ctgcaatggcaatgaccggtctgccgcaggcttacacgccgggtgccagcatggcctctattggtggcggtactt

SEQ ID NO: 718547 - DNA, 75 bp, synthetic construct
  source 1..75: mol_type = other DNA
gcacatcacaattcatcattgcgtcaatgcaaggcgagatcaaacgccgccagcgccggaaggccaaagagcagg

SEQ ID NO: 718548 - DNA, 75 bp, synthetic construct
  source 1..75: mol_type = other DNA
attatatttttaacggttatagattttacttattaccagtagaatcaataagtagcctgtcatcgatttatgaat

SEQ ID NO: 718549 - DNA, 75 bp, synthetic construct
  source 1..75: mol_type = other DNA
gtatcgcttgtgcagatgagataccggatatcgccttacttcggcaaacatcgagagagaaggtattacatctgc

SEQ ID NO: 718550 - DNA, 75 bp, synthetic construct
  source 1..75: mol_type = other DNA
agaaagaccgcagatgctttgctgtctttaaaaacatttttaccgtctggtatgttagtcacttttaatgttggt

SEQ ID NO: 718551 - DNA, 75 bp, synthetic construct
  source 1..75: mol_type = other DNA
taggaatcaagtttacaaaggaagcgaaaagatttctctgtaaacttattggtgaagaaaaacgttatacaacac

SEQ ID NO: 718552 - DNA, 75 bp, synthetic construct
  source 1..75: mol_type = other DNA
acgcaggcagtatgtaccgggcctgtagatatggttattgtaggaagctttaaagtttttatatgcggcaaacct

SEQ ID NO: 718553 - DNA, 75 bp, synthetic construct
  source 1..75: mol_type = other DNA
tgggtactctccacataaattaaccatgaatgagatgattatactattctattatgttttccatgggtgtaatgt

SEQ ID NO: 718554 - DNA, 75 bp, synthetic construct
  source 1..75: mol_type = other DNA
tatgcttttgtgtatgacatcaaaactgatgatagatatcctctgaatggcatggcggtagatgctgttaaatca

SEQ ID NO: 718555 - DNA, 75 bp, synthetic construct
  source 1..75: mol_type = other DNA
atgaaatgtaaactctttttagctctgcttcttaccctttcttttggagcctcagccgctgaaaaaacacaggat

SEQ ID NO: 718556 - DNA, 75 bp, synthetic construct
  source 1..75: mol_type = other DNA
aagtgtattccgatgccgttgatttctcatcagaagatgtaacggcggttgtcagaccgaccctgcgtattgtgt

SEQ ID NO: 718557 - DNA, 75 bp, synthetic construct
  source 1..75: mol_type = other DNA
tagtgctcgcattcaagaaatgcacatgctgacggtaaattgcctgtgcgatctgatcgataacacgcttttccc

SEQ ID NO: 718558 - DNA, 75 bp, synthetic construct
  source 1..75: mol_type = other DNA
atggtgtttaaagggcaggaaaccgtgcgcaccgactggacgccgctggcccagcagtttcagcaggagctgtac

SEQ ID NO: 718559 - DNA, 75 bp, synthetic construct
  source 1..75: mol_type = other DNA
agtggccgcttacctttgagcatgcaaaagtatcttgtgtaaacagtcactacgtttttgtttatgacactgaca

SEQ ID NO: 718560 - DNA, 75 bp, synthetic construct
  source 1..75: mol_type = other DNA
ttgaagggcagacaacttgggcgaacgcgcagccagcaggagtaccagcaggcgctgtggtacagcgccagtgcg

SEQ ID NO: 718561 - DNA, 75 bp, synthetic construct
  source 1..75: mol_type = other DNA
gcgtccgctcgcggtacaacaactgattgccctgatcacgcgcctggatgtgcctgcttatcgggccgaactgat

SEQ ID NO: 718562 - DNA, 75 bp, synthetic construct
  source 1..75: mol_type = other DNA
gtgggcttccggccctcgtttttcccactgccgcaggggcaaatcgccgtcactctgcgtgacgcacaggccagc

SEQ ID NO: 718563 - DNA, 75 bp, synthetic construct
  source 1..75: mol_type = other DNA
gtctgggccgtgaagacagcgagtatctcgcccgttcggtgcctttctacgccgcgaatcaaccgctggctgata

SEQ ID NO: 718564 - DNA, 75 bp, synthetic construct
  source 1..75: mol_type = other DNA
ccgcaggcgctgtaaagccccgtcgtcattcgcgcattctgcgcgcagatatcaccgcacctgagattgatcccg

SEQ ID NO: 718565 - DNA, 75 bp, synthetic construct
  source 1..75: mol_type = other DNA
ctttagctgtattcaggcactggcttcgtgcggtttatttaccaaccaaattccctaaataccttctgagtaaag

SEQ ID NO: 718566 - DNA, 75 bp, synthetic construct
  source 1..75: mol_type = other DNA
tggtacagcgccagtgcggaaagcctggcgttgagcgcactcagtctgagcctgaaaaatgaaaagcgcgtgcat

SEQ ID NO: 718567 - DNA, 75 bp, synthetic construct
  source 1..75: mol_type = other DNA
gtaagtattgtttcaccttccgcagcggctgtaaagccccgccgtcatccccgtttcagacgcgaagacatcccc

SEQ ID NO: 718568 - DNA, 75 bp, synthetic construct
  source 1..75: mol_type = other DNA
agcccggagttttcaccgggggcgtggtgtacacatccccgccatgaaaaacacggccttcgggcaggtgctccg

SEQ ID NO: 718569 - DNA, 75 bp, synthetic construct
  source 1..75: mol_type = other DNA
tggtacagcgccagtgcagaaagcctggcgttgagcgcgctcagtctgagcctgaaaaatgaaaagcgcgtgcat

SEQ ID NO: 718570 - DNA, 75 bp, synthetic construct
  source 1..75: mol_type = other DNA
ggatgatgatctccagcagaaagcggtaaagaaaataaataaagcgttttaccaaaaaaacttcagacgtaaact

SEQ ID NO: 718571 - DNA, 75 bp, synthetic construct
  source 1..75: mol_type = other DNA
agcattggaagttgcaagacgcctaagtcaaaatgtcaaacttattggtaatacaattaaagccaaaaaggtttc

SEQ ID NO: 718572 - DNA, 75 bp, synthetic construct
  source 1..75: mol_type = other DNA
ccaatgcaaatctggatccaatgctacgctactatgaggttgccagagctattggcagtcgtagggatcatatca

SEQ ID NO: 718573 - DNA, 75 bp, synthetic construct
  source 1..75: mol_type = other DNA
aatgggcgcggagaaattagattaggtaatgaaactgtcagtattgtgtttgatcaggcagatggtcgctttctg

SEQ ID NO: 718574 - DNA, 75 bp, synthetic construct
  source 1..75: mol_type = other DNA
atttctcgcgtggttaatgactgttcagttcaccctctgacacgagctccaataaccccatcaatgattgttaaa

SEQ ID NO: 718575 - DNA, 75 bp, synthetic construct
  source 1..75: mol_type = other DNA
accctctgacacgagctccaataaccccatcaatgattgttaaaccagaagagtgtaaatatgaccctgcaaggg

SEQ ID NO: 718576 - DNA, 75 bp, synthetic construct
  source 1..75: mol_type = other DNA
ggctcatatcatccactgacccgagaaccaataacggcatcaatgattataagtcctgataaatgtgtttatgat

SEQ ID NO: 718577 - DNA, 75 bp, synthetic construct
  source 1..75: mol_type = other DNA
tagtccaacagatgggcgctttctggccagcgatggcactgggggattatttactgaattattgcttttagggtt

SEQ ID NO: 718578 - DNA, 75 bp, synthetic construct
  source 1..75: mol_type = other DNA
aacgtcatcaatgattgtaagtccagaacaatgtatttatgaccaagccaaaggaaactttgtcataaaggataa

SEQ ID NO: 718579 - DNA, 75 bp, synthetic construct
  source 1..75: mol_type = other DNA
tcagtgtccaattacactagagagacccgaagaaggagtgtttgtcaaaaattcagatagttcggcagtatgctg

SEQ ID NO: 718580 - DNA, 75 bp, synthetic construct
  source 1..75: mol_type = other DNA
ataccggatatgcgcttattgatgccctgcctggtatagcggttaatcctgatatgacagcattatggtctgaaa

SEQ ID NO: 718581 - DNA, 75 bp, synthetic construct
  source 1..75: mol_type = other DNA
atgagactgtttattgcagaaaaacccgcagtagcgaatgatattgttaaggcgcttggtggcaattttatccgt

SEQ ID NO: 718582 - DNA, 75 bp, synthetic construct
  source 1..75: mol_type = other DNA
catcttcgttcagccttggaatggaggttcttcgtgctcaagttgcagccaatgggcgcggagaaattagattag

SEQ ID NO: 718583 - DNA, 75 bp, synthetic construct
  source 1..75: mol_type = other DNA
cccgggaaccaataacggcatcaataattgtaaaacatgaagaatgcatttatgacgataccagaggaaacttcg

SEQ ID NO: 718584 - DNA, 75 bp, synthetic construct
  source 1..75: mol_type = other DNA
ttgggatttaatagtggtcctcgagcccttggtgagagaatgctaagtatgctttcggactcaggtgaagcacaa

SEQ ID NO: 718585 - DNA, 75 bp, synthetic construct
  source 1..75: mol_type = other DNA
agctggctggatcaaccgccagccgtgaatttacaggccgcgaaacgcctgttgcggatgctgggggcgatggac

SEQ ID NO: 718586 - DNA, 75 bp, synthetic construct
  source 1..75: mol_type = other DNA
cggcggcaaatgcaggcccgacgggtgttacagcagatgagtgatgaacggttgagggatattgggttaagctgg

SEQ ID NO: 718587 - DNA, 75 bp, synthetic construct
  source 1..75: mol_type = other DNA
cggcggcaaatgcaggcccgacgggtgttacagcagatgagtgatgaacggttgagggataatgggttatgctgg

SEQ ID NO: 718588 - DNA, 75 bp, synthetic construct
  source 1..75: mol_type = other DNA
cggcggcaaatgcaggcccgacgggtgttacagcagatgagtgatgaacggttgagggaaagtgggttacgctgg

SEQ ID NO: 718589 - DNA, 75 bp, synthetic construct
  source 1..75: mol_type = other DNA
aaacgccgtttatcagacttgtgcaactctggcaggcggtgaggcgttggcggcggcaaatgcagacccgacggg

SEQ ID NO: 718590 - DNA, 75 bp, synthetic construct
  source 1..75: mol_type = other DNA
atggaatttcacgaaaacaaagccaaaacgccgtttatcggcctagtgcaactctggcaggaggtgaggcgttgg

SEQ ID NO: 718591 - DNA, 75 bp, synthetic construct
  source 1..75: mol_type = other DNA
cggcggcaaatgcaggcccggcgggtgttacagcagatgagtgatgagcggttgagggatatcgggttacgcagg

SEQ ID NO: 718592 - DNA, 75 bp, synthetic construct
  source 1..75: mol_type = other DNA
gtgctggagttgctttcccctgcccaaaggccgctgcaaatcacgcgtgatttgggggccttctggaaaggggcg

SEQ ID NO: 718593 - DNA, 75 bp, synthetic construct
  source 1..75: mol_type = other DNA
agtgcaaccgctggcgaaaccctcggaagacgagttgcatcaggcgatgcttaacggcattctgcgttctgtgct

SEQ ID NO: 718594 - DNA, 75 bp, synthetic construct
  source 1..75: mol_type = other DNA
agcgcgcaagggcaaaaaatggcagcgctgggtaacgatccgcgtttagcggcaatgctggttagcgcgaagaac

SEQ ID NO: 718595 - DNA, 75 bp, synthetic construct
  source 1..75: mol_type = other DNA
cggcggcaaatgcaggcccgacgggtgttacagcagatgagtgatgaacggttgagggaaactgggttaggctgg

SEQ ID NO: 718596 - DNA, 75 bp, synthetic construct
  source 1..75: mol_type = other DNA
gatgatttatttcaccatacccgcgatgttattgcgtttgtcaaccggacatggaacatcattttcagcattccg

SEQ ID NO: 718597 - DNA, 75 bp, synthetic construct
  source 1..75: mol_type = other DNA
aagaaatacacgtcaggtgttctgtcgttcgcggagaaggagctgccgcctggaggcgttttccggtctgtagct

SEQ ID NO: 718598 - DNA, 75 bp, synthetic construct
  source 1..75: mol_type = other DNA
gaagttgttgttaatgagaagaaaacgacaccgccgccattatttactgaagcctccttgcttgctgcgcttgtt

SEQ ID NO: 718599 - DNA, 75 bp, synthetic construct
  source 1..75: mol_type = other DNA
ttatagatgttgacctgggcgagatgaagattgaagcagcagcgccagcaggccaatctcaacgcctgaatgctc

SEQ ID NO: 718600 - DNA, 75 bp, synthetic construct
  source 1..75: mol_type = other DNA
ggcggcattggtacgccagctacccgcgccgctattctggaaacgttgaagaagagaaattatatcacgctggaa

SEQ ID NO: 718601 - DNA, 75 bp, synthetic construct
  source 1..75: mol_type = other DNA
tacgtacgaccgttatgctaaagaggtcgaggttgataggctggtcaatgtgatggctgatgtttataaggagac

SEQ ID NO: 718602 - DNA, 75 bp, synthetic construct
  source 1..75: mol_type = other DNA
gataaaaaaactgccgcaccgttgccatttaacctggtcaggctccagcaatacatgaacaaaaagttcaaaatg

SEQ ID NO: 718603 - DNA, 75 bp, synthetic construct
  source 1..75: mol_type = other DNA
actggcaaatcttaaagataatcgtgatttcaaggggctttatcttaaggcgctggcgcgttcagttgctgatgc

SEQ ID NO: 718604 - DNA, 75 bp, synthetic construct
  source 1..75: mol_type = other DNA
ggaatatgcaggaaacacaaaacccgtaaagcgcgttctgattaacgacaacacgcttccggcagtgaaaaaggc

SEQ ID NO: 718605 - DNA, 75 bp, synthetic construct
  source 1..75: mol_type = other DNA
atcaggaaagcctgtggctggcgtctggctgggtcgttgaaaccgcaggggacatctcgcatctggacgcccctg

SEQ ID NO: 718606 - DNA, 75 bp, synthetic construct
  source 1..75: mol_type = other DNA
ggtattgcactgggatgcctggtgagtacgattctcggattaccagcatgggcagagcgccgcttacgtctgcgt

SEQ ID NO: 718607 - DNA, 75 bp, synthetic construct
  source 1..75: mol_type = other DNA
cccggcgcacggcggaaatcatcgcccaggcctgcggctgtgacatcatctttgattctcgcctgcgtgaattaa

SEQ ID NO: 718608 - DNA, 75 bp, synthetic construct
  source 1..75: mol_type = other DNA
gcagagccggaaaagggcatgggagactggcgtttttatctctgcgagccgggggtgattaccgtggacgattta

SEQ ID NO: 718609 - DNA, 75 bp, synthetic construct
  source 1..75: mol_type = other DNA
ctgatagaggcgaagtgttctcgtgctgacttgttggcagatagaaaaaagcgttttcgtaaaaatccatctctt

SEQ ID NO: 718610 - DNA, 75 bp, synthetic construct
  source 1..75: mol_type = other DNA
atgttacaggtataccttgtccgccacggtgaaacacagtggaacgccgagcgacgtattcagggccagtctgac

SEQ ID NO: 718611 - DNA, 75 bp, synthetic construct
  source 1..75: mol_type = other DNA
gcgcagccattctggaaacgctgaagaaaagaaactatatcacgctggaaaaagggaaacttattcctactgata

SEQ ID NO: 718612 - DNA, 75 bp, synthetic construct
  source 1..75: mol_type = other DNA
cttcatgcggcaaacaaattgttatcaggccgaaaggctatttctgtaccggatgtgaatttaaaatatggaaga

SEQ ID NO: 718613 - DNA, 75 bp, synthetic construct
  source 1..75: mol_type = other DNA
tggcagtaactattccagagaatgttgaaatagtctcttatatcgaccttggtggaagttttggtgaggtacaat

SEQ ID NO: 718614 - DNA, 75 bp, synthetic construct
  source 1..75: mol_type = other DNA
acgcactgagcaccgacgaacgcaatgtttacctggcaattgcacaacactatcttgtccagttcatgcctgaaa

SEQ ID NO: 718615 - DNA, 75 bp, synthetic construct
  source 1..75: mol_type = other DNA
aagaaactatatcacgctggaaaaaggaaaacttataccgactgatacaggctatgctcttattgatgcccttcc

SEQ ID NO: 718616 - DNA, 75 bp, synthetic construct
  source 1..75: mol_type = other DNA
ccgcagtagcaaatgatattgttaaggcacttggtggcaattttacccgtcatgatggctggtttgaaagtgata

SEQ ID NO: 718617 - DNA, 75 bp, synthetic construct
  source 1..75: mol_type = other DNA
tcgctggatattgattctgcacgtaaaagcaaagcgtttaacagtgcaaaggtgactgcacatactgcgataatc

SEQ ID NO: 718618 - DNA, 75 bp, synthetic construct
  source 1..75: mol_type = other DNA
cgctggcgcgttcagttgccgatgccgtctatggcttctctatgacgcgtgcttacaccattccggcaaaagcca

SEQ ID NO: 718619 - DNA, 75 bp, synthetic construct
  source 1..75: mol_type = other DNA
gatgttgagctgggcgagatgaagattgaacccgctgcgccagcagggcagtttcaacgcctggactctccctgc

SEQ ID NO: 718620 - DNA, 75 bp, synthetic construct
  source 1..75: mol_type = other DNA
gaataaagaattttcggctaaagttaaattgattgataaagtaaccggaaaattagggtttgaatttccccctaa

SEQ ID NO: 718621 - DNA, 75 bp, synthetic construct
  source 1..75: mol_type = other DNA
gatttcaaagggctttaccttaaggcgctggcgcgttcagttgctgatgccgtctatggcttctccatgacgcgt

SEQ ID NO: 718622 - DNA, 75 bp, synthetic construct
  source 1..75: mol_type = other DNA
catttaacctggtcaggctccagcaatacatgaacacaaagttcaaaatgacagcgcaaaaaacgctggatgtta

SEQ ID NO: 718623 - DNA, 75 bp, synthetic construct
  source 1..75: mol_type = other DNA
tgaaacactgacgacaaaagaagtggttgttaatgagaagaaaacgacaccgccgccattatttactgaagcctc

SEQ ID NO: 718624 - DNA, 75 bp, synthetic construct
  source 1..75: mol_type = other DNA
aacagctcccggtgttaatggttgtgggcattcaggaaggctgtattaaccatgcgcttttgaccgcgcaggcca

SEQ ID NO: 718625 - DNA, 75 bp, synthetic construct
  source 1..75: mol_type = other DNA
cagcgtgaactggggcaatacatccgcttagctatgctgcgcagtgtgctggcggtagatagagtcacggtgtaa

SEQ ID NO: 718626 - DNA, 75 bp, synthetic construct
  source 1..75: mol_type = other DNA
gttccctgaatcactaccccgtgtacagcctgatcgggacgtgcaaactgaacggagtggagccagaaagctacc

SEQ ID NO: 718627 - DNA, 75 bp, synthetic construct
  source 1..75: mol_type = other DNA
aagcctttgccgcgcagatcctgccgtgcattaaagatctcgggctaatggagcagattgacgagaagatcaacc

SEQ ID NO: 718628 - DNA, 75 bp, synthetic construct
  source 1..75: mol_type = other DNA
agcaaacactggagcagggttttaacatcgcccgtaacgcggcactgttggctgaagtgccgcactctgtcccgg

SEQ ID NO: 718629 - DNA, 75 bp, synthetic construct
  source 1..75: mol_type = other DNA
ccttatctgccacgagccgaacagcgcgagttgggacaatacatccgcttatccatgctgtgcagtgtgctggcg

SEQ ID NO: 718630 - DNA, 75 bp, synthetic construct
  source 1..75: mol_type = other DNA
ctgggctcatgcccgccgcaagatccacgatgtgcacgttcgcaccccgtcagcgctgacggaggaagccctgaa

SEQ ID NO: 718631 - DNA, 75 bp, synthetic construct
  source 1..75: mol_type = other DNA
gtacgtgaaaagcatgcctgtactcagtgcgatgccatcgtgcaggcccccgcgccttcacggcccatcgagcgg

SEQ ID NO: 718632 - DNA, 75 bp, synthetic construct
  source 1..75: mol_type = other DNA
gtacccgcaaaccgttccctgaatcacttccccgtgacgaaaaacggctgctgccggcagcgtcatgctgcccgg

SEQ ID NO: 718633 - DNA, 75 bp, synthetic construct
  source 1..75: mol_type = other DNA
tcccgccgtatcgcacaaatggaagccgatctgaaccggcttcagaaagagagcgatacgctgactggtagggtg

SEQ ID NO: 718634 - DNA, 75 bp, synthetic construct
  source 1..75: mol_type = other DNA
attcgcccggaaaccaccgtggaagccctcgccacgctgcgtccggcgtttgatccagtaagcggtacggtaacg

SEQ ID NO: 718635 - DNA, 75 bp, synthetic construct
  source 1..75: mol_type = other DNA
gagcagattgacgagaagatcaacctcaacggtggcgcgatcgcgctgggtcatccgctgggttgttccggtgcg

SEQ ID NO: 718636 - DNA, 75 bp, synthetic construct
  source 1..75: mol_type = other DNA
atcgctgaaaatgccctgcgggcggtcagtctgggtcgtaaaaacttcctgttcttcggctctgaccatggtggt

SEQ ID NO: 718637 - DNA, 75 bp, synthetic construct
  source 1..75: mol_type = other DNA
caacctcgttatcccccgcgacaagctcattgtcgtgaccgggctttcgggttctggcaaatcctcgctcgcttt

SEQ ID NO: 718638 - DNA, 75 bp, synthetic construct
  source 1..75: mol_type = other DNA
gccggaaggcaaacgtctgatgctgctcgcgccaatcattaaagagcgcaaaggcgaacacaccaaaacgctgga

SEQ ID NO: 718639 - DNA, 75 bp, synthetic construct
  source 1..75: mol_type = other DNA
catccgctggcggaaaatggccggtggcgggatgcgtcagtccgggattctggctgccgccgggatgtatgccct

SEQ ID NO: 718640 - DNA, 75 bp, synthetic construct
  source 1..75: mol_type = other DNA
gtgacgttaacgctgccggtcggcctgttcacctgcatcaccggggtttctggttccggtaaatccacgctgatt

SEQ ID NO: 718641 - DNA, 75 bp, synthetic construct
  source 1..75: mol_type = other DNA
ccgctggaagcaataatggcggtgccagagtcgttgaccgggcagtacatgagcggtaaacgcaagattgaggtg

SEQ ID NO: 718642 - DNA, 75 bp, synthetic construct
  source 1..75: mol_type = other DNA
agctgcaaacgttgatggacgttggcctgacgtacattcgcctggggcaatccgccaccacgctttctggcggtg

SEQ ID NO: 718643 - DNA, 75 bp, synthetic construct
  source 1..75: mol_type = other DNA
ctgtcgcgacactcagaactggcgaaagcgttcgcatacgccctgaagcagtggccggcgctgacgtactatgca

SEQ ID NO: 718644 - DNA, 75 bp, synthetic construct
  source 1..75: mol_type = other DNA
ccgttccccgaatcactccccgcgatgaaaaacggctgctgccggcagcatcatgctgcccggaatgtggaggct

SEQ ID NO: 718645 - DNA, 75 bp, synthetic construct
  source 1..75: mol_type = other DNA
ccgttccccgaatcctcccccgcgatgaaaaacggctgctgccggcagcgtcatgctgcccggaatgtggaggct

SEQ ID NO: 718646 - DNA, 75 bp, synthetic construct
  source 1..75: mol_type = other DNA
tggctgccgccgggatgtatgcgctgaaaaataacgtcgcacgcttgcaggaagaccacgacaacgccgcctgga

SEQ ID NO: 718647 - DNA, 75 bp, synthetic construct
  source 1..75: mol_type = other DNA
tggcagagcaactgcgtgaagcgggtgctgatgtgatgcgccaggacaccaatatgctgtttgttcgcgtcgggg

SEQ ID NO: 718648 - DNA, 75 bp, synthetic construct
  source 1..75: mol_type = other DNA
gtacggtgcgcgaaaagcatgcctgccgtcggtgcgactgcatcgttcaggcaccggttccttcgcgccccatcg

SEQ ID NO: 718649 - DNA, 75 bp, synthetic construct
  source 1..75: mol_type = other DNA
gcgtgaacgcgaaatagaccatctgcaggcgcagctggataaactccgccggatgaacttcggcagtcgttccga

SEQ ID NO: 718650 - DNA, 75 bp, synthetic construct
  source 1..75: mol_type = other DNA
tggatacagttgcagaggaaaatgctgtcgaaacatgcagagatggcgaaggcgttcgactatatcctgaagcaa

SEQ ID NO: 718651 - DNA, 75 bp, synthetic construct
  source 1..75: mol_type = other DNA
atggtcagtctgggccgcaaaaactacctgttcttcggttcggatcatggaggagagcggggagcgctgctgtac

SEQ ID NO: 718652 - DNA, 75 bp, synthetic construct
  source 1..75: mol_type = other DNA
aagctacctacgcaatgtacttgacgtcatagcggactggccgatgaaccgggtcagcgaactgctcccttggcg

SEQ ID NO: 718653 - DNA, 75 bp, synthetic construct
  source 1..75: mol_type = other DNA
gtcagccctgacggaggaggcgctgaaacggatcggcgagctgtatgccatcgagtcggagctcagaggtaaaag

SEQ ID NO: 718654 - DNA, 75 bp, synthetic construct
  source 1..75: mol_type = other DNA
caaatcattacagccgaagttttccaaaatcaacccgttaccaggtattaaacgcatgttctcagcgcaaaccgg

SEQ ID NO: 718655 - DNA, 75 bp, synthetic construct
  source 1..75: mol_type = other DNA
aatggtgaggcggtaaaacgcgaagtggagcgtcgtgtgaaggagcgcatgattctgtcacgtaaccgcaattac

SEQ ID NO: 718656 - DNA, 75 bp, synthetic construct
  source 1..75: mol_type = other DNA
accgccagttaaagaacccgaatccggtgtttacaccccgtaaaggtgccggaacgctgaagttctgcgaaaaac

SEQ ID NO: 718657 - DNA, 75 bp, synthetic construct
  source 1..75: mol_type = other DNA
taacaccaagactaagatgatagaacaagcctcacaagaaatatttgaacggaacttcaatggcttaaaagtcag

SEQ ID NO: 718658 - DNA, 75 bp, synthetic construct
  source 1..75: mol_type = other DNA
tgcattcaaaattgctacaaaatccaaccataaaagtcgtttacaacatatttttctgatttacatacagataat

SEQ ID NO: 718659 - DNA, 75 bp, synthetic construct
  source 1..75: mol_type = other DNA
aagctacctacgcaatgtacttgacgtcatagccgactggccgttgaaccgggtcagcgaactgctcccctggcg

SEQ ID NO: 718660 - DNA, 75 bp, synthetic construct
  source 1..75: mol_type = other DNA
aagctacctacgcaatgtacttgacgtcatagctgactggccgatgaaccgggtcagcgaactgctcccgtggcg

SEQ ID NO: 718661 - DNA, 75 bp, synthetic construct
  source 1..75: mol_type = other DNA
gatccagaaagctaccttcgccatgtgcctggcgtcatagcagactggccggtcaaccgggtcagcgaactgctt

SEQ ID NO: 718662 - DNA, 75 bp, synthetic construct
  source 1..75: mol_type = other DNA
gtggaggtggataataacattgccgaaaacgccctacgactggtcagtctggggagaaaaaactggctgttcttc

SEQ ID NO: 718663 - DNA, 75 bp, synthetic construct
  source 1..75: mol_type = other DNA
ggagctgtcggttgaacggtatcgatccagaagcgtatctgcgccatatcctgagcgtactgccggaatggccct

SEQ ID NO: 718664 - DNA, 75 bp, synthetic construct
  source 1..75: mol_type = other DNA
aaagtacgacggcagaagaagctctgaagcgcatcagtgaactgtacgccattgaggatgaaatacggggcttac

SEQ ID NO: 718665 - DNA, 75 bp, synthetic construct
  source 1..75: mol_type = other DNA
tcgctgaaaatgcgttgcggatggtcagtctgggccgcaaaaaactcctgttcttcggttcggatcatggaggag

SEQ ID NO: 718666 - DNA, 75 bp, synthetic construct
  source 1..75: mol_type = other DNA
ctgcaggcgcagctggataaactccgccggatgaacttcggcagtcgctccgaaaaagtctcccgccgtatcgca

SEQ ID NO: 718667 - DNA, 75 bp, synthetic construct
  source 1..75: mol_type = other DNA
ctgaagcagtttaattacgacgaagtgattcgaccggaaaccaccgtggaagccctcgccacgctgcgtccggcg

SEQ ID NO: 718668 - DNA, 75 bp, synthetic construct
  source 1..75: mol_type = other DNA
ctgagcgtactgccggaatggccctccaaccgtgttgacgaactgctgccatggaacgtagttttcaccgataaa

SEQ ID NO: 718669 - DNA, 75 bp, synthetic construct
  source 1..75: mol_type = other DNA
ctgatcctcgggcagattattctgctgatcagagaagccatgctggcgctgctgccgctgattagcggcgtggtg

SEQ ID NO: 718670 - DNA, 75 bp, synthetic construct
  source 1..75: mol_type = other DNA
tcccgacgcttgaagcgccgccgctggcacgagcgctgtatcgacatgcggagattggtcaacaaatcccgggtc

SEQ ID NO: 718671 - DNA, 75 bp, synthetic construct
  source 1..75: mol_type = other DNA
cttcatggcgatgtcatgactgacggcaaactccatgccgatgataccccggtccaggtactgctgccgggtaat

SEQ ID NO: 718672 - DNA, 75 bp, synthetic construct
  source 1..75: mol_type = other DNA
ggatggtcagtctgggccgcaaaaactacctgttcttcggttcggatcatggaggagagcggggagcgctgctgt

SEQ ID NO: 718673 - DNA, 75 bp, synthetic construct
  source 1..75: mol_type = other DNA
tgccaggcaataagaaaacgaagaccgggcggttatggacctgcgttcgtgacgaccgtaacgccgggtcaacgc

SEQ ID NO: 718674 - DNA, 75 bp, synthetic construct
  source 1..75: mol_type = other DNA
ccggtggtcttgatgccatgaagcgggagctggagcggcgagtgaaagagcgcatgctaatgtcgcgcggtaaca

SEQ ID NO: 718675 - DNA, 75 bp, synthetic construct
  source 1..75: mol_type = other DNA
ccggtaaagtcaccgccgccgtggcgggtatggtttccgggatgacggtcgccaatctgctgggtattccgctgg

SEQ ID NO: 718676 - DNA, 75 bp, synthetic construct
  source 1..75: mol_type = other DNA
ctcgtttgctgcaatgtcgtcgttgctgctgtatggtcgctataagcgccagcaagtggcggacaatccggtgct

SEQ ID NO: 718677 - DNA, 75 bp, synthetic construct
  source 1..75: mol_type = other DNA
acgcgaacaatttcactttttacgcagccctgccccgtggttaattttcgccgctacgatgtttggcaacgcagg

SEQ ID NO: 718678 - DNA, 75 bp, synthetic construct
  source 1..75: mol_type = other DNA
gttggtgaggcaattcttggtgttgatggtgccatcgagatgaccgaagagcgcgatgggtggctcaagatttat

SEQ ID NO: 718679 - DNA, 75 bp, synthetic construct
  source 1..75: mol_type = other DNA
ctttcgtttgctgcgatgtcgtcgttgctgctgtatggtcgctataagcgccagcaagcgctggataatccggtg

SEQ ID NO: 718680 - DNA, 75 bp, synthetic construct
  source 1..75: mol_type = other DNA
aaaacaacgtcgctggtttttgcttttatttgttgtgcgggattatttgccctctctgcaccgctgcaaattctg

SEQ ID NO: 718681 - DNA, 75 bp, synthetic construct
  source 1..75: mol_type = other DNA
tgtcagaaccgttgaaggacacaacatgatcaagattcttggctatgacagagatggagaataccaatttacaag

SEQ ID NO: 718682 - DNA, 75 bp, synthetic construct
  source 1..75: mol_type = other DNA
tgcagcgtcgcaatgaactcatcgccagtatcctggcacagtcagacgcccggccacttcacgacagtgagcgtc

SEQ ID NO: 718683 - DNA, 75 bp, synthetic construct
  source 1..75: mol_type = other DNA
cggccacttcacgacagtgagcgtcaggctctgaacattctgcgggataacgatacacatgataaagctgcccgt

SEQ ID NO: 718684 - DNA, 75 bp, synthetic construct
  source 1..75: mol_type = other DNA
aacaacgtcgcttatttttgcttttatttgttgcgcagggttatttgccctttcggcaccgctgcaaatattgtt

SEQ ID NO: 718685 - DNA, 75 bp, synthetic construct
  source 1..75: mol_type = other DNA
ggcgaaaggaaagctgcgcgaacaatttcactttttgcgcagcccggccccgtggttaattttcgccgccaccat

SEQ ID NO: 718686 - DNA, 75 bp, synthetic construct
  source 1..75: mol_type = other DNA
caggtgggcaaatagcgtttaacctcggtagcgccgtcggcgcatattgcggtggtatgatgctgacgctggggc

SEQ ID NO: 718687 - DNA, 75 bp, synthetic construct
  source 1..75: mol_type = other DNA
ccgacaggcagaaaaacgactgtcggatctggaaaaccggctgaacacagccagaaatcttctggaagatgcatc

SEQ ID NO: 718688 - DNA, 75 bp, synthetic construct
  source 1..75: mol_type = other DNA
catagaagcggagatacgtggcagtccggcagaggaacggcttgcagtcagaaaagccagaagcgtccagttgat

SEQ ID NO: 718689 - DNA, 75 bp, synthetic construct
  source 1..75: mol_type = other DNA
tggtcagcaaatatgtggaacatatccctttatatcgccagtcagaaatatacgcgcgacagggcgtggagctga

SEQ ID NO: 718690 - DNA, 75 bp, synthetic construct
  source 1..75: mol_type = other DNA
gcttctggctcatatcgtcaccgggaagtatgcagaccatctgccgttataccgccagtcagagatataccgccg

SEQ ID NO: 718691 - DNA, 75 bp, synthetic construct
  source 1..75: mol_type = other DNA
tctttctcatccaatccggactggagcgggaggcatttaacgctcaattaacagagctcatcaaacaccttgagt

SEQ ID NO: 718692 - DNA, 75 bp, synthetic construct
  source 1..75: mol_type = other DNA
cgaccatgccggcagcggtgtggttctcatactctcccgaccgcaaaggtatccacccgcagcaacatctggcgg

SEQ ID NO: 718693 - DNA, 75 bp, synthetic construct
  source 1..75: mol_type = other DNA
gcatgcgcatcagcccggaaaccgcagaaccgatcccacgcctggcaaccttgctaaacgatattcctccggcgc

SEQ ID NO: 718694 - DNA, 75 bp, synthetic construct
  source 1..75: mol_type = other DNA
aaacgggtcgtctgtgggtatacgtcagggatgatcgtaatgcgggttcatccctgccggcagccgtctggttcg

SEQ ID NO: 718695 - DNA, 75 bp, synthetic construct
  source 1..75: mol_type = other DNA
gaactggaaaaccggctgaacacagccagaaatcttctggaagatgcatcgtcagtcacagattcacctgacacc

SEQ ID NO: 718696 - DNA, 75 bp, synthetic construct
  source 1..75: mol_type = other DNA
gggggcctggcccacgcccgccgaaaaatccatgacgaggatgtccgccgtccgacagaaataactcatgaagcg

SEQ ID NO: 718697 - DNA, 75 bp, synthetic construct
  source 1..75: mol_type = other DNA
cacgcgtattcataacgatatgcgcgtcaacccggcgttcctgtttgccgccatgttctggtatcccctgctgga

SEQ ID NO: 718698 - DNA, 75 bp, synthetic construct
  source 1..75: mol_type = other DNA
gtgctaagccgcgaggagagcgaggctgaacaggcagtcgcccgtccacaggtgacggtgatcccgcgtgagcag

SEQ ID NO: 718699 - DNA, 75 bp, synthetic construct
  source 1..75: mol_type = other DNA
caggctcaataaagcgggatacgaagcctggctggttggcggcggcgtgcgcgacctgttacttggcaaaaagcc

SEQ ID NO: 718700 - DNA, 75 bp, synthetic construct
  source 1..75: mol_type = other DNA
atcagtcacagccaccacaataggcgtgatgaccatcagtgaaaaaatcgcccttgccgggttgttactcggttc

SEQ ID NO: 718701 - DNA, 75 bp, synthetic construct
  source 1..75: mol_type = other DNA
ctccttgccgaaactaccggtggcgaatgcgctgtggaaagcgcagccagatctgccaaccgcttccgaagcgtg

SEQ ID NO: 718702 - DNA, 75 bp, synthetic construct
  source 1..75: mol_type = other DNA
accgcgcacggcggccgcgagttcggcttcatcggcgcgcgtatgcgtcagcaacatgccgtcgttaccggtcac

SEQ ID NO: 718703 - DNA, 75 bp, synthetic construct
  source 1..75: mol_type = other DNA
tcaatacccaaactggtccggcgattgtcgccagcctgattgatctcggcgatcgttaccgtctgctggttaact

SEQ ID NO: 718704 - DNA, 75 bp, synthetic construct
  source 1..75: mol_type = other DNA
gcagatgctgggatatgcctcgctggcagaggttccggcggagcagctggacggcaaaagtgagcgtattcagca

SEQ ID NO: 718705 - DNA, 75 bp, synthetic construct
  source 1..75: mol_type = other DNA
ctatttcaacgcggtttactgttgggcacgcgccatgctcaacgaacgttaccaggactatgacgccacggcatc

SEQ ID NO: 718706 - DNA, 75 bp, synthetic construct
  source 1..75: mol_type = other DNA
gatttgtggcgtgacgcccgctgggccatcagtcgggtgcaggatgcgccgcattgcacagtggagcttatctga

SEQ ID NO: 718707 - DNA, 75 bp, synthetic construct
  source 1..75: mol_type = other DNA
gtgccagaagtggcggctgaagtgataaaagatctggtgaataccgtgcgttcttatccggtgcgccgtaaaacc

SEQ ID NO: 718708 - DNA, 75 bp, synthetic construct
  source 1..75: mol_type = other DNA
ggtatctaaacaggatacccgtcatctgaaagtctgccgttttggcgataacatgcgtgaagtggcggtcactga

SEQ ID NO: 718709 - DNA, 75 bp, synthetic construct
  source 1..75: mol_type = other DNA
caattatgacgatcgttgcgcgggtctggtggtgtggctgcacactttctccccggccaaaatgtggatcaacgg

SEQ ID NO: 718710 - DNA, 75 bp, synthetic construct
  source 1..75: mol_type = other DNA
gcagatgctgggatatgcctcgctggcagaggttccggcggaacagctggagggcaaaagtgagcgcattcatca

SEQ ID NO: 718711 - DNA, 75 bp, synthetic construct
  source 1..75: mol_type = other DNA
atgagcttttttcacgccagccagcgggatgccctgaatcagagtctggcagaagtccaggggcagattaacgtt

SEQ ID NO: 718712 - DNA, 75 bp, synthetic construct
  source 1..75: mol_type = other DNA
cactatatcggtgatctggtacaacgtaccgaggttgagctccttaaaacgcctaaccttggtaaaaaatctctt

SEQ ID NO: 718713 - DNA, 75 bp, synthetic construct
  source 1..75: mol_type = other DNA
cgaaaagtgcccaggcagatttgcttaacctgagacgtaaagtcgatgccggcgccaaccgtgcgattactcaat

SEQ ID NO: 718714 - DNA, 75 bp, synthetic construct
  source 1..75: mol_type = other DNA
aggagtgaaagatttccacttctatacgcttaaccgcgctgaaatgagttacgcgatttgccatacactgggtgt

SEQ ID NO: 718715 - DNA, 75 bp, synthetic construct
  source 1..75: mol_type = other DNA
taaacaggcgaagaaatttgccgacatgaccaacgtgcgtattccggcgtggatggcacaaatgttcgacgggct

SEQ ID NO: 718716 - DNA, 75 bp, synthetic construct
  source 1..75: mol_type = other DNA
ggcattaaagatcgcaccggtctggaagctgcgccgcatctcacctgcattgatgcgactcccgatgagctgcgc

SEQ ID NO: 718717 - DNA, 75 bp, synthetic construct
  source 1..75: mol_type = other DNA
ctgcgcgcccagggttgggtaaggtgtcaggtttcttctggcggaaaccgggactggggctgtttttgctgctgc

SEQ ID NO: 718718 - DNA, 75 bp, synthetic construct
  source 1..75: mol_type = other DNA
accaggactatgacgctacggcatccggtgtgaagcggggcgaagaactgtcagaagccagcggtgatttgtggc

SEQ ID NO: 718719 - DNA, 75 bp, synthetic construct
  source 1..75: mol_type = other DNA
ctatttcaacgcggtttactgctgggcacacgccatgctcaacgagcgttatcaggactatgacgccacggcgtc

SEQ ID NO: 718720 - DNA, 75 bp, synthetic construct
  source 1..75: mol_type = other DNA
cgatggcggcggcattcaccctagtgccgattgtactcatcgcactttacctggcgttcgtgaaacgtctgggag

SEQ ID NO: 718721 - DNA, 75 bp, synthetic construct
  source 1..75: mol_type = other DNA
gcgttcgatgcactctgaacgcgcaccgtttttcctcaaactggcggcctggggcggcgttgttttcctacattt

SEQ ID NO: 718722 - DNA, 75 bp, synthetic construct
  source 1..75: mol_type = other DNA
cgagttacattgtaaaagcctatgcctggaccttattgctggcaaaagatggcgtggcgcagtggtttttgcaac

SEQ ID NO: 718723 - DNA, 75 bp, synthetic construct
  source 1..75: mol_type = other DNA
aacgcgtgactaccaggctgaattatcacaaaaacctggagaaagccttaattacggtccttttcaaaaagacct

SEQ ID NO: 718724 - DNA, 75 bp, synthetic construct
  source 1..75: mol_type = other DNA
caattctggggcttttttttaacgcttcggcttatgccgtagattgctatcagaacaatcatggcggtaatacca

SEQ ID NO: 718725 - DNA, 75 bp, synthetic construct
  source 1..75: mol_type = other DNA
gctttctgcaaactcattcttgccacaaccacacccaggtaactgtggcaaaacctttgtgattgataaagcggg

SEQ ID NO: 718726 - DNA, 75 bp, synthetic construct
  source 1..75: mol_type = other DNA
aaaaaaatctacttcaactggaaaagcggtaagtcagaaaaatgtattttctgttatccgcgaattgagtccggt

SEQ ID NO: 718727 - DNA, 75 bp, synthetic construct
  source 1..75: mol_type = other DNA
ctattctgtgtttgttttttaacgtttcttcttatgctgtagattgctatcaggataaaaacaaaggtcctacgc

SEQ ID NO: 718728 - DNA, 75 bp, synthetic construct
  source 1..75: mol_type = other DNA
ttcccggtcagagtgcagcaatggcaacccgcgattaccaggccgaattaaccctgaagcctggtgaaccgctcg

SEQ ID NO: 718729 - DNA, 75 bp, synthetic construct
  source 1..75: mol_type = other DNA
caagaaattaaagagagcgaagccggaaaattccttgcggataattacggtaaaacagtgagccgccgtgacttt

SEQ ID NO: 718730 - DNA, 75 bp, synthetic construct
  source 1..75: mol_type = other DNA
cagaacgacatgatgaactgttaacgttagcgaatgaagtgatggttaagcgtctggccaaagggattagtgagc

SEQ ID NO: 718731 - DNA, 75 bp, synthetic construct
  source 1..75: mol_type = other DNA
attcgtgaacaggcatctggggcatacagcgtttcttctcgcctctcggttgatcctcaggccaaagatatcagt

SEQ ID NO: 718732 - DNA, 75 bp, synthetic construct
  source 1..75: mol_type = other DNA
gctttctgcaaactcattcttgccacaaccacacccaggcaactgtggcaaaacctttgtgattgataaagtggg

SEQ ID NO: 718733 - DNA, 75 bp, synthetic construct
  source 1..75: mol_type = other DNA
aactgagcgaagttatgccgggggctggcggacgctcttgtctggaacgttatgaatacgcgaaacatggtgcct

SEQ ID NO: 718734 - DNA, 75 bp, synthetic construct
  source 1..75: mol_type = other DNA
gctttggttttgatccggacgcttacttcggcacgatggtacgtctgaatcaagaaattaaagagagcgaaaccg

SEQ ID NO: 718735 - DNA, 75 bp, synthetic construct
  source 1..75: mol_type = other DNA
tggacaaagtgatctggggcccaaactgggaagaactgctgggcggcgagtttgaaaaacgtgcccgcgaccgca

SEQ ID NO: 718736 - DNA, 75 bp, synthetic construct
  source 1..75: mol_type = other DNA
gatttttccttcaccgttgacgaccgttaccgcgtggatgtcagagaccagaaccacagcctggagctgggcctg

SEQ ID NO: 718737 - DNA, 75 bp, synthetic construct
  source 1..75: mol_type = other DNA
gggggttttgcgtcagggatggaagcccgccagggcggagacagctccgctggctccgttcacgacagcccgccc

SEQ ID NO: 718738 - DNA, 75 bp, synthetic construct
  source 1..75: mol_type = other DNA
atcgatcgggctgcgaaagccagaggaaaaaaccgcactgactttgtgctggaggccgcccgcgccgcggcggaa

SEQ ID NO: 718739 - DNA, 75 bp, synthetic construct
  source 1..75: mol_type = other DNA
tgaaggcgagtcaatgcaggagctcagcgatcgcgtcaatgcggcactggaatcttgccgggacttaccgcaggg

SEQ ID NO: 718740 - DNA, 75 bp, synthetic construct
  source 1..75: mol_type = other DNA
accaggaaagtccgtggctggcatcggggtgggtggtggaaaccgcaggggacatctcgcatctggatgcccctg

SEQ ID NO: 718741 - DNA, 75 bp, synthetic construct
  source 1..75: mol_type = other DNA
gggggtgattaccgtggccgatttaccggcgggctgggggttgctgtatgcgattaacgggcgggtcaggaaagt

SEQ ID NO: 718742 - DNA, 75 bp, synthetic construct
  source 1..75: mol_type = other DNA
tctgtattgcctgaccattttcaggcgtgtgttaacgttattatggttactcgtatcagtgtttttgttttcgat

SEQ ID NO: 718743 - DNA, 75 bp, synthetic construct
  source 1..75: mol_type = other DNA
cgattctttgcctgttttttaatgtttcagcttttgctgttgattgctatcaggatgggtacagaggaacaaccc

SEQ ID NO: 718744 - DNA, 75 bp, synthetic construct
  source 1..75: mol_type = other DNA
gataagtttgaacaatattacgatgggttttatcataatccagtttgtaatggcagaaccctacaaaaaaatgtc

SEQ ID NO: 718745 - DNA, 75 bp, synthetic construct
  source 1..75: mol_type = other DNA
gcatcgctcattcattcaggcatgtgttgctatgacatgttctatcagaaaggaaaaacaccttttctggcatgg

SEQ ID NO: 718746 - DNA, 75 bp, synthetic construct
  source 1..75: mol_type = other DNA
actgaacgggcagcgttggctggtgctgttaataccctcaagcggttagaagatggacgcctgctgggtgacaat

SEQ ID NO: 718747 - DNA, 75 bp, synthetic construct
  source 1..75: mol_type = other DNA
attcattcatcagcaatttgctcagcaactgaatattgaacatccctatgggcgcgtgttggcacccatcaatga

SEQ ID NO: 718748 - DNA, 75 bp, synthetic construct
  source 1..75: mol_type = other DNA
ttgaaaacgctcgaccagcgtccagcggagaaattcgcccagcagatgtatgagacgcgctatgctgatgaccgc

SEQ ID NO: 718749 - DNA, 75 bp, synthetic construct
  source 1..75: mol_type = other DNA
ggcgcagttatcttggcaatctacattactgcacgccgtggtcgcaaaaccagcctgcatcgcgacaaattgtcg

SEQ ID NO: 718750 - DNA, 75 bp, synthetic construct
  source 1..75: mol_type = other DNA
actgtcccgctgacacccgagcaaagaatcagggaacttgaagaacagcttgagcaggcgagccagaaaactgag

SEQ ID NO: 718751 - DNA, 75 bp, synthetic construct
  source 1..75: mol_type = other DNA
ccgaaacgcagacggagtctgcttatggcgtttgatggagtccagcgtcttcagcagcggatatcggaaaaagca

SEQ ID NO: 718752 - DNA, 75 bp, synthetic construct
  source 1..75: mol_type = other DNA
acaccgccgccatagtgcggaaaatgcccatcgagcgctggagctactgcacaggggtaatttcccgataatcaa

SEQ ID NO: 718753 - DNA, 75 bp, synthetic construct
  source 1..75: mol_type = other DNA
ctataaagggctttcgttaagtgattatcagcaccagttctcctcacatgcattaagcgattttcctctgctggg

SEQ ID NO: 718754 - DNA, 75 bp, synthetic construct
  source 1..75: mol_type = other DNA
ctttcacaagcagagatgaagcggcgttttattatcaagaatctctttttctataaagggctttcgttaagtgat

SEQ ID NO: 718755 - DNA, 75 bp, synthetic construct
  source 1..75: mol_type = other DNA
tggcgcgttatcagagcggcaaaaacacgccagaccaggtaactatctacatgctcgaacagagcggtcgctatg

SEQ ID NO: 718756 - DNA, 75 bp, synthetic construct
  source 1..75: mol_type = other DNA
aaagaatgggacgcgcttgatatgagtttacttccgcacaaaataacgaaagaaaaattactcacagctgcgaag

SEQ ID NO: 718757 - DNA, 75 bp, synthetic construct
  source 1..75: mol_type = other DNA
tcatccgttttactcttctccgtgatctcttttaaacagaagcgcctttggggatggctggcgctggtgtttatt

SEQ ID NO: 718758 - DNA, 75 bp, synthetic construct
  source 1..75: mol_type = other DNA
tggcgcgttatcagagcggcaaaaaacacgccagaccaggtaactatctacatgctcgaacagagcggtcgctat

SEQ ID NO: 718759 - DNA, 75 bp, synthetic construct
  source 1..75: mol_type = other DNA
ctcagtacggctggactgtcgaccgcttgcagggcgcgctggcggtgctggtgttactggtatggtcgctggggt

SEQ ID NO: 718760 - DNA, 75 bp, synthetic construct
  source 1..75: mol_type = other DNA
atggataacgttgaactttcacccgcaacacgctgggggatgattgctaccggattacttcagggtctggtttgc

SEQ ID NO: 718761 - DNA, 75 bp, synthetic construct
  source 1..75: mol_type = other DNA
acaccgccgccatagcgcgacaaatgcccatcgggcgctggagctgctgcgcaggggcaatttcccgatactcaa

SEQ ID NO: 718762 - DNA, 75 bp, synthetic construct
  source 1..75: mol_type = other DNA
ctttcgaaaaattagttactacggcagaaaaatttaatgctgaattggtcattggagactttaatacttttgatc

SEQ ID NO: 718763 - DNA, 75 bp, synthetic construct
  source 1..75: mol_type = other DNA
gcgcgcgctggttgtttctcacgctgacggtgcgcaactgttccattgatgcgcttggtgagactttgaccgcga

SEQ ID NO: 718764 - DNA, 75 bp, synthetic construct
  source 1..75: mol_type = other DNA
tcgctatggtatccgaaggcgtattgagatcgttgattacaggcattgattatttaagccttgggtcaaagcgga

SEQ ID NO: 718765 - DNA, 75 bp, synthetic construct
  source 1..75: mol_type = other DNA
ggaaccagtaccggaacctgcaccagtaccggaatcagtaccggcaccaccatcaccacttgatgaatggaaact

SEQ ID NO: 718766 - DNA, 75 bp, synthetic construct
  source 1..75: mol_type = other DNA
caaacctggcaggtcttacgcccgccatctgtaaagagtttggtctgccggatgcggcagtactgttggggggcg

SEQ ID NO: 718767 - DNA, 75 bp, synthetic construct
  source 1..75: mol_type = other DNA
tgcttccctacctgcgcaaccaacagttgcttaccagtgatgaaaaaaagcaagcagcggctcgcgttgtcaacg

SEQ ID NO: 718768 - DNA, 75 bp, synthetic construct
  source 1..75: mol_type = other DNA
cgccctggtatgtgacactctataatttatctattgatggtaaaagcataaatggtggcatggttgcaccattta

SEQ ID NO: 718769 - DNA, 75 bp, synthetic construct
  source 1..75: mol_type = other DNA
tttatttatactgaatattgcagcgttacctgctcaggaacaaaactcacagcttaagaatgaaaatcaactcca

SEQ ID NO: 718770 - DNA, 75 bp, synthetic construct
  source 1..75: mol_type = other DNA
atcaggtaaaactcgagaagaggttctcaaatataacatgctggctttagaaacaatttttggctcagaaaaagc

SEQ ID NO: 718771 - DNA, 75 bp, synthetic construct
  source 1..75: mol_type = other DNA
tggtattcgccagttcatggtgaaccgcggctttatggaagttgaaacgccgatgatgcaggtgatccctggcgg

SEQ ID NO: 718772 - DNA, 75 bp, synthetic construct
  source 1..75: mol_type = other DNA
tggcaaacactagatctttacaataatgccttacccgtatggagcgtaaaattaaatgttttacaaaataatgtg

SEQ ID NO: 718773 - DNA, 75 bp, synthetic construct
  source 1..75: mol_type = other DNA
atgccttacctgtatgtaacgtgaaattaaatgttttgcaaaataatgttatgggtgcagtagcgatacatggat

SEQ ID NO: 718774 - DNA, 75 bp, synthetic construct
  source 1..75: mol_type = other DNA
ctgagtcgttgaccgggcagtacatgagcggtaaacgcaagattgaagtgccgaagaaacgcgttccggcgaatc

SEQ ID NO: 718775 - DNA, 75 bp, synthetic construct
  source 1..75: mol_type = other DNA
ttcacgaccaactctgacggtttctaacctggacggtatggtcaccggaatggcggaagatttgcagagtctggt

SEQ ID NO: 718776 - DNA, 75 bp, synthetic construct
  source 1..75: mol_type = other DNA
ttcacgaccaacactgacggtttctaacctggacggtatggtcaccggaatggcggaagatatgcagagtctggt

SEQ ID NO: 718777 - DNA, 75 bp, synthetic construct
  source 1..75: mol_type = other DNA
tggcaggggcgggcgtatcaggcgtaccccattcagggaaacggctttgaactgaacggaaagggagccagtaca

SEQ ID NO: 718778 - DNA, 75 bp, synthetic construct
  source 1..75: mol_type = other DNA
ttcacgacctactctgacggtttctaacctggacggtatggtcaccggaatggcggaagatatgcagagtctggt

SEQ ID NO: 718779 - DNA, 75 bp, synthetic construct
  source 1..75: mol_type = other DNA
ttcacgaccaacgctgacggtttctaacctggacggtatggtcaccggaatggcggaagatgtgcagagtctggt

SEQ ID NO: 718780 - DNA, 75 bp, synthetic construct
  source 1..75: mol_type = other DNA
ttcacgaccaaccctgacggtttctaacctggacggtatggtcaccggaatggcggaagatctgcagagtctggt

SEQ ID NO: 718781 - DNA, 75 bp, synthetic construct
  source 1..75: mol_type = other DNA
gcatcgagcagtgcagcgaactgagtgcggtcagtgcctcctttgtactgtccacaccgacggaaacggatggtg

SEQ ID NO: 718782 - DNA, 75 bp, synthetic construct
  source 1..75: mol_type = other DNA
cggataacgtcagcctcgataaagcgcgtcgtctgttgtggccaatcaaacagaaatatggtcagaaaatctcct

SEQ ID NO: 718783 - DNA, 75 bp, synthetic construct
  source 1..75: mol_type = other DNA
ttcacgacctacgctgacggtttctaacctggacggtatggtcaccggaatggcggaagatttgcagagtctggt

SEQ ID NO: 718784 - DNA, 75 bp, synthetic construct
  source 1..75: mol_type = other DNA
atgcgcgggtgtgagatgcgcggcatggcggccaattttggcggtttcctttccatcaataaactttcgcagtaa

SEQ ID NO: 718785 - DNA, 75 bp, synthetic construct
  source 1..75: mol_type = other DNA
tatgtttttgcactaatgattacattcatattatttttcttggtgtataccatagatataaatcgttataatctc

SEQ ID NO: 718786 - DNA, 75 bp, synthetic construct
  source 1..75: mol_type = other DNA
tgccagaccgtcgctgacggtgtccaatctgttcggtctggtcaccgggatggcggaagacctgcagagtctggt

SEQ ID NO: 718787 - DNA, 75 bp, synthetic construct
  source 1..75: mol_type = other DNA
tggcaggggcggcagtatcaggcgtaccccattcaggggagcggatttgagatgaacggtaaaggagccagcgcc

SEQ ID NO: 718788 - DNA, 75 bp, synthetic construct
  source 1..75: mol_type = other DNA
ggagacgctgcagagtctgaccggcggaacggtggtccggcgaagggtttacgcccgttttctggatgcggtgaa

SEQ ID NO: 718789 - DNA, 75 bp, synthetic construct
  source 1..75: mol_type = other DNA
ttcacgaccgacgctgacggtttctaacctggacggtatggtcaccggaatggcggaagatatgcagagtctggt

SEQ ID NO: 718790 - DNA, 75 bp, synthetic construct
  source 1..75: mol_type = other DNA
ttcacgacccaccctgacggtttctaacctggacggtatggtcaccggaatggcggaagatatgcagagtctggt

SEQ ID NO: 718791 - DNA, 75 bp, synthetic construct
  source 1..75: mol_type = other DNA
gatgtgaacgccgcagccgttcgtgctctgccagttctggagaaaattcagaaagagtctggtaaagcctcgctg

SEQ ID NO: 718792 - DNA, 75 bp, synthetic construct
  source 1..75: mol_type = other DNA
acgaaggataaatgcagcaaatgcctgcgcgggtgtgaactgcgcggcaatgccggaaggtttggcggcttcctt

SEQ ID NO: 718793 - DNA, 75 bp, synthetic construct
  source 1..75: mol_type = other DNA
acataccggggcgatgaatgtggttataccggtggtgccgtggcggatgagcatgaccagcccacatccgatatc

SEQ ID NO: 718794 - DNA, 75 bp, synthetic construct
  source 1..75: mol_type = other DNA
gtctgccagcgtggtgctctgggaaatcgatctgacagaggtcggcggagatcgttatttcttctgtaatgagca

SEQ ID NO: 718795 - DNA, 75 bp, synthetic construct
  source 1..75: mol_type = other DNA
taacccattcaggggacgggatttgaactgaacggcaagggcagtgctgcccgtccgacactgacggtttctaac

SEQ ID NO: 718796 - DNA, 75 bp, synthetic construct
  source 1..75: mol_type = other DNA
agaacagtagcgccgcgccatttgctgaaatcatcgtgacgaaaaaccgttttggctcacttggtacggtttacc

SEQ ID NO: 718797 - DNA, 75 bp, synthetic construct
  source 1..75: mol_type = other DNA
ttggtatccgttattaccggatgtgtgactacagcaaccttgaccacgaggaaattctggcccgcgttaaggagg

SEQ ID NO: 718798 - DNA, 75 bp, synthetic construct
  source 1..75: mol_type = other DNA
gctgggtatggatgaactgatagcgagggcctggcgttttgtgcgcgagcgtttccgcagttatcaggcagagct

SEQ ID NO: 718799 - DNA, 75 bp, synthetic construct
  source 1..75: mol_type = other DNA
tgcatgcgcgggtgtgagatgcgcggcatggcggcaattttggcggtttcctttccattaataaactttcgcagt

SEQ ID NO: 718800 - DNA, 75 bp, synthetic construct
  source 1..75: mol_type = other DNA
agcaccagtgcggtactgaaggtttcagcaagccttgtggtggtctgctggcaccggacgcgcagcgttctttta

SEQ ID NO: 718801 - DNA, 75 bp, synthetic construct
  source 1..75: mol_type = other DNA
tgatagacctcggagagtgggccgcagaggagaaacgaatccccagcagcggcgatctttccgaaagcgatgact

SEQ ID NO: 718802 - DNA, 75 bp, synthetic construct
  source 1..75: mol_type = other DNA
gctgatagcgaaagcctggcgttttgtgcgtgagcgtttccgcagttaccagacagagcttaagtcccgtggaat

SEQ ID NO: 718803 - DNA, 75 bp, synthetic construct
  source 1..75: mol_type = other DNA
ttcagcgtcaaaaccgtcgacgtcgccgcatcgctcacgcgtaactaccagcgaagctatatcaatattaatcgt

SEQ ID NO: 718804 - DNA, 75 bp, synthetic construct
  source 1..75: mol_type = other DNA
agccatcaacgccctgattgacgaacacaacctgccggaagagatgcagttaagccggacgggcttaaaccgcta

SEQ ID NO: 718805 - DNA, 75 bp, synthetic construct
  source 1..75: mol_type = other DNA
gccacggtggtccgccgccgggtgtatgcccgttttctggatgcggtgaattttgtggcaggcaatcctgaggca

SEQ ID NO: 718806 - DNA, 75 bp, synthetic construct
  source 1..75: mol_type = other DNA
ccggtgtttgatccgttgcgttatccggatatcggtcgccagctttctcgggacgcgtgggatgatgtttcgcag

SEQ ID NO: 718807 - DNA, 75 bp, synthetic construct
  source 1..75: mol_type = other DNA
atgatttacctgctcttcggcgcaggttgttggttcacttttcgcaccggatttgtgcagtttcgctacatccgc

SEQ ID NO: 718808 - DNA, 75 bp, synthetic construct
  source 1..75: mol_type = other DNA
atccctaaaaaattcagagatgagtcgaaagttatatcttttatgtatgataagaacaaaacttatatcttgtag

SEQ ID NO: 718809 - DNA, 75 bp, synthetic construct
  source 1..75: mol_type = other DNA
caggggtgtatgtgtttttatgggttttattatggccgacatttcttcgtttgctggcagataaagttgatatcc

SEQ ID NO: 718810 - DNA, 75 bp, synthetic construct
  source 1..75: mol_type = other DNA
atcgacctgacggtacagggtggtgagcggtattttttctgcaatgagctgaatgaaaaaggggaggcggtcacc

SEQ ID NO: 718811 - DNA, 75 bp, synthetic construct
  source 1..75: mol_type = other DNA
gaccataacccgttctgctggtctgtctgctgagacggcggctgatatcaaacgtcagattctggggattgcaga

SEQ ID NO: 718812 - DNA, 75 bp, synthetic construct
  source 1..75: mol_type = other DNA
tggccgaggtctgggcggcaaagctgggttccgcgccaacatcagacgtcggcaagctgctgatggagtttgtaa

SEQ ID NO: 718813 - DNA, 75 bp, synthetic construct
  source 1..75: mol_type = other DNA
gcgtcctggcctccgcatccggcagcgcaagggattgtccagatgattggcatttttatcgacaccctggtcatc

SEQ ID NO: 718814 - DNA, 75 bp, synthetic construct
  source 1..75: mol_type = other DNA
cgcccggtgtttgatccgttgcgttatccggatatcggtcgccagctttctccggacgcgtgggatgatgtttcg

SEQ ID NO: 718815 - DNA, 75 bp, synthetic construct
  source 1..75: mol_type = other DNA
atcggcattttcatcgacaccctggtcatctgcacggcgagcgccatgctgatattactggccggaaacggtaca

SEQ ID NO: 718816 - DNA, 75 bp, synthetic construct
  source 1..75: mol_type = other DNA
atcgagcagtgcagcgaactgagcgcggtcagtgcctcttttgtgctggccacaccaacggagacggatggcgcg

SEQ ID NO: 718817 - DNA, 75 bp, synthetic construct
  source 1..75: mol_type = other DNA
cgtgggcgcgtagcgttcggcgcgttgccctggttgatgcacgaccagcctttcgttcagggacttacggcatgt

SEQ ID NO: 718818 - DNA, 75 bp, synthetic construct
  source 1..75: mol_type = other DNA
ctgtttcccggtcgcatcatgctggcgaacacctgtatgtgggattaccggggagatgaatgcgggtataacggt

SEQ ID NO: 718819 - DNA, 75 bp, synthetic construct
  source 1..75: mol_type = other DNA
cgaccgtcgctgattgtctcgaatctgttcggactggtcaccggcatggcagaggatttgcagagtctggtgggg

SEQ ID NO: 718820 - DNA, 75 bp, synthetic construct
  source 1..75: mol_type = other DNA
aagggcgttatcccaaacatgtctggccggacgaccccgccaacaccgcgccgacgcgccggacgaaaaagtatt

SEQ ID NO: 718821 - DNA, 75 bp, synthetic construct
  source 1..75: mol_type = other DNA
gcgtacattcactacgcggcctgaaatcactcgacatttatcaggcactacgcggattacttgattggggaatgc

SEQ ID NO: 718822 - DNA, 75 bp, synthetic construct
  source 1..75: mol_type = other DNA
gcgaaaccctcggaagacgagttgcatcaggcgatgcttaacggcatccgtgataaaggtttaagcgtgctcaac

SEQ ID NO: 718823 - DNA, 75 bp, synthetic construct
  source 1..75: mol_type = other DNA
cgtccgacactgacggttgctaacctgcacggcatggtcaccgggatggcgaaagacctgcagagtctggtcgga

SEQ ID NO: 718824 - DNA, 75 bp, synthetic construct
  source 1..75: mol_type = other DNA
tgtttggtgaggccaccaatccgacgatcgcccaggggcgcgtgccgctggtgctggagttgctttcacctgccc

SEQ ID NO: 718825 - DNA, 75 bp, synthetic construct
  source 1..75: mol_type = other DNA
aaaacatactgttccctggcgttatgtcattctgcgcctgcatgaagccgtacaggaaattgttccacatctgaa

SEQ ID NO: 718826 - DNA, 75 bp, synthetic construct
  source 1..75: mol_type = other DNA
atgcccgttttctggatgcggtgaattttgtggcgggcaatccggaagcggacccggagcaggagctgagagacc

SEQ ID NO: 718827 - DNA, 75 bp, synthetic construct
  source 1..75: mol_type = other DNA
tggcaggggcggcaatatcaggcatacccgattgacggcagcggctttgagatgaacgggaagggcagcagtgcc

SEQ ID NO: 718828 - DNA, 75 bp, synthetic construct
  source 1..75: mol_type = other DNA
ccttatccggtctacgaatggcacaagaatctgtaggcctgataagcgtagcgcatcaggcaatttggcgttggt

SEQ ID NO: 718829 - DNA, 75 bp, synthetic construct
  source 1..75: mol_type = other DNA
gaatgaaaaaggggagccggtcacctggcaggggcgtaagtatgaggcgtacccgattgatggcagcggctttga

SEQ ID NO: 718830 - DNA, 75 bp, synthetic construct
  source 1..75: mol_type = other DNA
gttaccctggctgatgcacgaccagcctttcgttcaggggcttacggcttgtgcagaaattggcaaggctatggc

SEQ ID NO: 718831 - DNA, 75 bp, synthetic construct
  source 1..75: mol_type = other DNA
cttacggcatgtgcagaaattggtgaggcgatggctcgggcggtcgtaaagcctgcatttccggctgttacgtcg

SEQ ID NO: 718832 - DNA, 75 bp, synthetic construct
  source 1..75: mol_type = other DNA
gtcctgaaaacggaagacaacagctactcgtttgacgtttttattgatgcccgcgggcagcgtccgcttaaagtg

SEQ ID NO: 718833 - DNA, 75 bp, synthetic construct
  source 1..75: mol_type = other DNA
aagatattcgtgggcgcgttgccctggttaatgcacgaccagcctttcgttcagggacttacggcatgtgcagaa

SEQ ID NO: 718834 - DNA, 75 bp, synthetic construct
  source 1..75: mol_type = other DNA
tattcaaattgatacagcaagaaattaattctgccgatccagactggagccaacgcatagcgttagagcgcctca

SEQ ID NO: 718835 - DNA, 75 bp, synthetic construct
  source 1..75: mol_type = other DNA
gtggatcactattgcaccgttcgtgacactattccctacgagcccttacacatcgtcactgatcaagcattaaat

SEQ ID NO: 718836 - DNA, 75 bp, synthetic construct
  source 1..75: mol_type = other DNA
ccgctgtatggcgcgttgtcgctgaacgatcagcgaaaagcgatccttccggcaccgcaaggaatgcgcaaagtg

SEQ ID NO: 718837 - DNA, 75 bp, synthetic construct
  source 1..75: mol_type = other DNA
gaagtgccgaaagaagatctgatttggcaggatccgctgccgctgccgacctacaatccgaccgagcaggacatt

SEQ ID NO: 718838 - DNA, 75 bp, synthetic construct
  source 1..75: mol_type = other DNA
taacgtggcgctggaaaactctggcttccgtaccttcggttttggtgccggtcgtgaagacgtctgggaaccgga

SEQ ID NO: 718839 - DNA, 75 bp, synthetic construct
  source 1..75: mol_type = other DNA
cgtcccacgcttaaggtatcaaacctgcacggcatggtcaccgggatggcggaagacctgcagagtctggtcggc

SEQ ID NO: 718840 - DNA, 75 bp, synthetic construct
  source 1..75: mol_type = other DNA
gctgacagccatgacggcctcgtttgtgctggctacaccgaccgagacggacggggcgctgtttcccggtcgaat

SEQ ID NO: 718841 - DNA, 75 bp, synthetic construct
  source 1..75: mol_type = other DNA
gctgacagccatgacggcctcgtttgtgctggctacaccgaccgagacggaaggggcgctgtttcccggtcgcat

SEQ ID NO: 718842 - DNA, 75 bp, synthetic construct
  source 1..75: mol_type = other DNA
gtggtccgccgtcgggtgtatgggcgttttctggatgcggtgaatttcgttgcgggcaatccggaggcagacccg

SEQ ID NO: 718843 - DNA, 75 bp, synthetic construct
  source 1..75: mol_type = other DNA
ggacccggagcaggagctgagcgaccgctgggtggtggagcagatgtcgcagctgacagccatgacggcctcgtt

SEQ ID NO: 718844 - DNA, 75 bp, synthetic construct
  source 1..75: mol_type = other DNA
tggcaggggcgtaagtatcaggcatacccgattgacggcagtgactttgagatgaacggaaagggcagcagtgcc

SEQ ID NO: 718845 - DNA, 75 bp, synthetic construct
  source 1..75: mol_type = other DNA
tcaatgagtgcactaaaacggagcaatccgcgctggtcgtgctctgggaagtcgatctgacggaggtcggtggcg

SEQ ID NO: 718846 - DNA, 75 bp, synthetic construct
  source 1..75: mol_type = other DNA
ggaggacctgcagagcctggtggggccacggtgtccgccgccgggtgtatgcccgtttctggatgcggtgaattt

SEQ ID NO: 718847 - DNA, 75 bp, synthetic construct
  source 1..75: mol_type = other DNA
gctgacagccatgacggcctcgtttgtgctggccacaccgaccgagacggatggggcgctgtttcccggtcggat

SEQ ID NO: 718848 - DNA, 75 bp, synthetic construct
  source 1..75: mol_type = other DNA
aagggcgttatcccaaacacgtctggccggacgacccggcaaacactgcaccgacgcgacggacgaaaaagtatt

SEQ ID NO: 718849 - DNA, 75 bp, synthetic construct
  source 1..75: mol_type = other DNA
gtgctggagttgctttcacctgcccaaaggccattacaaatcacacgagatttgagcgccttctggaaaggagcg

SEQ ID NO: 718850 - DNA, 75 bp, synthetic construct
  source 1..75: mol_type = other DNA
tgggctggtgattcttgatgaatttcatgaacgcagcttgcaggcggatctggcgctggcgttgttactggacgt

SEQ ID NO: 718851 - DNA, 75 bp, synthetic construct
  source 1..75: mol_type = other DNA
gcaacaaggtctgcgcgatgacttaaagctgctgattatgtcggctacgctggataacgaccgcttgcaacagat

SEQ ID NO: 718852 - DNA, 75 bp, synthetic construct
  source 1..75: mol_type = other DNA
tggcggcgcgtaacgttgcgcaacgcctggcggagctgcttaacgaaaagcccggcgacacagttggctaccgga

SEQ ID NO: 718853 - DNA, 75 bp, synthetic construct
  source 1..75: mol_type = other DNA
cgcgcatcggcagtgatgtgttgctctgcccgctgtatggcgcgttgtcgctgaacgatcagcgaaaagcgatcc

SEQ ID NO: 718854 - DNA, 75 bp, synthetic construct
  source 1..75: mol_type = other DNA
gtgctggcgacaccgacggagacggacggtgcgttgtttcccggccgcatcatgctggcgaacacctgtatgtgg

SEQ ID NO: 718855 - DNA, 75 bp, synthetic construct
  source 1..75: mol_type = other DNA
cgttggcgcagatgccattacctctggtctggaagtggtctggacccagacgccgacccagtggagcaactattt

SEQ ID NO: 718856 - DNA, 75 bp, synthetic construct
  source 1..75: mol_type = other DNA
gctgacagccatgacggcctcgtttgtgctggcgacaccgaccgagacggacggggcgctgtttcccggtcgtat

SEQ ID NO: 718857 - DNA, 75 bp, synthetic construct
  source 1..75: mol_type = other DNA
gggtggtgctctgggaaatcgacctgacggtgcagggcggtgagcggtattttttctgcaatgagctgaatgaaa

SEQ ID NO: 718858 - DNA, 75 bp, synthetic construct
  source 1..75: mol_type = other DNA
ctgagtctgttcatgggcgctattcggcaggaggtaaggaagttattgcccttatcgaagaaatcaatcatctga

SEQ ID NO: 718859 - DNA, 75 bp, synthetic construct
  source 1..75: mol_type = other DNA
caggtttctgtaaaggtaccgaatactgtcgaagagctgattgaaataatgacgccttataaaaatagcgataaa

SEQ ID NO: 718860 - DNA, 75 bp, synthetic construct
  source 1..75: mol_type = other DNA
gaactgggaagatgacctgggcggtgagtttgacaaactggcgaaagacaagaacttcgacaacatccagaaggc

SEQ ID NO: 718861 - DNA, 75 bp, synthetic construct
  source 1..75: mol_type = other DNA
cgcgggtgagctgggtagcaacggcattctgccagacgtcgaaagcctgcgtattccggtacagtatctggcgaa

SEQ ID NO: 718862 - DNA, 75 bp, synthetic construct
  source 1..75: mol_type = other DNA
cagcaaatcgcagccgattgcccgtccacgttcgctgattaccggcgaacggatggcgaaaatcgaaaaagggcc

SEQ ID NO: 718863 - DNA, 75 bp, synthetic construct
  source 1..75: mol_type = other DNA
ggacgtgcaaactgaaaggagtggagccagaaagctacctccgctatgtccttgacgtcattgctgactggccgg

SEQ ID NO: 718864 - DNA, 75 bp, synthetic construct
  source 1..75: mol_type = other DNA
gcaccggacgcgcagcgatcttttattcgcgatggactgacgcttcctgtcgatgtgatcgccaatccgcagatt

SEQ ID NO: 718865 - DNA, 75 bp, synthetic construct
  source 1..75: mol_type = other DNA
cgcaatggctgggtggagatcgacaataacctgtgtgaaaacgccctccgggtagttgcactgggtcggcgtaac

SEQ ID NO: 718866 - DNA, 75 bp, synthetic construct
  source 1..75: mol_type = other DNA
cccgtcagccctgacggaggaagcgctgaaacggatcggcgaactgtacgccatcgaggcagagataaggggaat

SEQ ID NO: 718867 - DNA, 75 bp, synthetic construct
  source 1..75: mol_type = other DNA
gaccaatgaagggatatgctaatcaaagccgcgtagaacgcttccgcatactggatgtgccagcactctctccgc

SEQ ID NO: 718868 - DNA, 75 bp, synthetic construct
  source 1..75: mol_type = other DNA
atgtcatggttaaatgcccccagccgttgcctgaccttccagggcggcgtacctaagcagttcatccccgataac

SEQ ID NO: 718869 - DNA, 75 bp, synthetic construct
  source 1..75: mol_type = other DNA
gatacccgtgcgctggaagaggtcggtctgaccgaagctcaggcacaggagatgtaccgttatctggcaattgcc

SEQ ID NO: 718870 - DNA, 75 bp, synthetic construct
  source 1..75: mol_type = other DNA
gcaacgccgggtcagcagtcgcaccggcggtgtggttcgcttacagcccggacagaaaagccatccacccgcaga

SEQ ID NO: 718871 - DNA, 75 bp, synthetic construct
  source 1..75: mol_type = other DNA
ggaccgtgcgggaaaaacacgcctgtacaaaatgcgacgctatcgtgcaggcccccgcgccttcacgtcccatcg

SEQ ID NO: 718872 - DNA, 75 bp, synthetic construct
  source 1..75: mol_type = other DNA
caggcacctgcaccttcgcggcccatcgagcggggtatcgccggaccggggctgctggcccgcgtgctgacctcg

SEQ ID NO: 718873 - DNA, 75 bp, synthetic construct
  source 1..75: mol_type = other DNA
tgtgctgcaagcggatgcgttcgccgggttcaacgagctgtatcgcaatggtgggataacggaagctgcctgctg

SEQ ID NO: 718874 - DNA, 75 bp, synthetic construct
  source 1..75: mol_type = other DNA
aacgcgaaatagaccatctgcaggcacagctggataagctgcgccggatgaacgtcggcagccgctcagaaaaag

SEQ ID NO: 718875 - DNA, 75 bp, synthetic construct
  source 1..75: mol_type = other DNA
aacgcgaaatagaccatctgcaggcacagctggataagctgcgccggatgaacctcggcagcggctcagaaaaag

SEQ ID NO: 718876 - DNA, 75 bp, synthetic construct
  source 1..75: mol_type = other DNA
gcagcggcttgctgaacgtcagcgaaaaatgaaaccgctgttgaaatccctggaaagctggttgcgtgaaaagat

SEQ ID NO: 718877 - DNA, 75 bp, synthetic construct
  source 1..75: mol_type = other DNA
gcctggccgaacaggaagcgctgatccacgccctgcaggaaaagctgagcaaccgggagcgcgaaatagaccatc

SEQ ID NO: 718878 - DNA, 75 bp, synthetic construct
  source 1..75: mol_type = other DNA
acccaggttgcggaagagccactttccgtcgttgacactgacgacatcttcctgctgaaacagcgcctggccgaa

SEQ ID NO: 718879 - DNA, 75 bp, synthetic construct
  source 1..75: mol_type = other DNA
acgatgtgcacgttcgcaccccgtcagccctgacggaggaagcgctgaaacggatcggcgaactgtacgccatcg

SEQ ID NO: 718880 - DNA, 75 bp, synthetic construct
  source 1..75: mol_type = other DNA
gcagacccatcttgcggggttcagtggtgtactgcaggcggatgcatacgccgggttcaacgagctgtaccggga

SEQ ID NO: 718881 - DNA, 75 bp, synthetic construct
  source 1..75: mol_type = other DNA
ggttgggctgaggcggacaataacatcgctgaaaatgcgttgcggatggtcagtctgggccgcaaaaactacctg

SEQ ID NO: 718882 - DNA, 75 bp, synthetic construct
  source 1..75: mol_type = other DNA
aacgcgaaatagaccatctgcaggcacagctggataagctgcgccggatgaacttcggcagctgctcggaaaaag

SEQ ID NO: 718883 - DNA, 75 bp, synthetic construct
  source 1..75: mol_type = other DNA
aacgcgaaatagaccatctgcaggcacagctggataagctgcgccggatgaacttcggcagcagctctgaaaaag

SEQ ID NO: 718884 - DNA, 75 bp, synthetic construct
  source 1..75: mol_type = other DNA
aggattttgtctgcggtaaggacaacgcctttctgattggcgaagcggcgggatttatcagcgccagctcgctgg

SEQ ID NO: 718885 - DNA, 75 bp, synthetic construct
  source 1..75: mol_type = other DNA
gctgtctccgctggaagaggcgcttcatggctatgtcatgactgacggcaaactccatgccgatgataccccggt

SEQ ID NO: 718886 - DNA, 75 bp, synthetic construct
  source 1..75: mol_type = other DNA
cagtggccggcactgacgtactatgcgaacgatggctgggtggaaatcgacaacaacatcgctgaaaatgccctg

SEQ ID NO: 718887 - DNA, 75 bp, synthetic construct
  source 1..75: mol_type = other DNA
agttgtacgccatagaggcggatataaggggtcgtctcagaaaacggaaaataaagcacgctaagccggttgcag

SEQ ID NO: 718888 - DNA, 75 bp, synthetic construct
  source 1..75: mol_type = other DNA
gttcactgagctatctgggcgaggataccgccgaacagctggagttgatgcgtagcgccttccgggttatccgga

SEQ ID NO: 718889 - DNA, 75 bp, synthetic construct
  source 1..75: mol_type = other DNA
ttccggttcgcctgtcgggtgaagactccggtcgcggtaccttcttccaccgccacgcggtgatccacaaccagt

SEQ ID NO: 718890 - DNA, 75 bp, synthetic construct
  source 1..75: mol_type = other DNA
cctgcagctcattaacgcataccgcttccgtggtcaccagcatgcgaatctcgatccgctgggattgtggcagca

SEQ ID NO: 718891 - DNA, 75 bp, synthetic construct
  source 1..75: mol_type = other DNA
atggaacattttgacgtagcgattatcggcctcggcccggcgggttccgcactggcgcggcagttagcaggaaaa

SEQ ID NO: 718892 - DNA, 75 bp, synthetic construct
  source 1..75: mol_type = other DNA
atcaccgaaatccacgactatttgcgtctgctgtacgctcgcgtcggtgagccgcgctgcccggatcacgatgtc

SEQ ID NO: 718893 - DNA, 75 bp, synthetic construct
  source 1..75: mol_type = other DNA
gcagtggcggcggcgagatcctcgtctccggtacgccagaaaccgtcgcggagtgcgaagcatcacacacggcac

SEQ ID NO: 718894 - DNA, 75 bp, synthetic construct
  source 1..75: mol_type = other DNA
tgtggtggagcacgacgaagacgcgattcgcgccgctgatcatgtgatcgatatcggtccgggtgcgggtgttca

SEQ ID NO: 718895 - DNA, 75 bp, synthetic construct
  source 1..75: mol_type = other DNA
atgaacgacatctcttctgacgacatcttcctgctgaaacagcgcctggccgaacaggaagcgctgatccacgct

SEQ ID NO: 718896 - DNA, 75 bp, synthetic construct
  source 1..75: mol_type = other DNA
aatacatgaacgatcgcggcgatacctccatccgccgccatccgttcgaaggcgtgctgcacaatatggagcgcc

SEQ ID NO: 718897 - DNA, 75 bp, synthetic construct
  source 1..75: mol_type = other DNA
ggcggagtcatttgaaacggcgctggagctttccggcggtacggcggtggttgccgatatggacaatccgaaagc

SEQ ID NO: 718898 - DNA, 75 bp, synthetic construct
  source 1..75: mol_type = other DNA
gcaacacatccataacggccagggcgcgttccgtgtctgggactctgtactgtctgaagaagcagtgctggcgtt

SEQ ID NO: 718899 - DNA, 75 bp, synthetic construct
  source 1..75: mol_type = other DNA
gacgtacgttcgtgacgaccgtaacgccgggtcagagctggcgccggcagtgtggttcgcttacagcccggacag

SEQ ID NO: 718900 - DNA, 75 bp, synthetic construct
  source 1..75: mol_type = other DNA
ttcaggactatgtgctgactgacggcaagctccatgctgatgacacgcctgtcccggtgctgttgccaggtaata

SEQ ID NO: 718901 - DNA, 75 bp, synthetic construct
  source 1..75: mol_type = other DNA
aacggagtggagccagaaagctacctccgctatcatagccgactggccgataaaccgggtcggcgaactgctccc

SEQ ID NO: 718902 - DNA, 75 bp, synthetic construct
  source 1..75: mol_type = other DNA
gctaaaccgctactgaaatccctggaaagctggctgcgtgaaaagatgaaaaccctgtcgcgacctcagagctga

SEQ ID NO: 718903 - DNA, 75 bp, synthetic construct
  source 1..75: mol_type = other DNA
ttggtcaattggccttgctggaagcgaacacgcgccgcccgaattcgaactattccgttgattactggcatcaac

SEQ ID NO: 718904 - DNA, 75 bp, synthetic construct
  source 1..75: mol_type = other DNA
ctggctgcgtgaaaaggtgaaaacgctgtcgcgacactcagaactggcgaaagcgttcacgtacgtactgaacca

SEQ ID NO: 718905 - DNA, 75 bp, synthetic construct
  source 1..75: mol_type = other DNA
tcaaacccgcgcagaacgcttccgtatgctggatgcgccagcactctctccactgcctctggcgccttatgaata

SEQ ID NO: 718906 - DNA, 75 bp, synthetic construct
  source 1..75: mol_type = other DNA
aatgaagggatacggtaatcaaacccgcgcagaacgcttccgcatgctggatgcaccagcactctctccgctgcc

SEQ ID NO: 718907 - DNA, 75 bp, synthetic construct
  source 1..75: mol_type = other DNA
cagtgaccgggcagggcgtagttcaggaaactctgaacatgtcgaaagcgcgtggttatgaagttggcggtacgg

SEQ ID NO: 718908 - DNA, 75 bp, synthetic construct
  source 1..75: mol_type = other DNA
tcttcctgctgaaacagcgcctggccgaacagaaagcgctgatccacgccctgcaggaaaagcttagcaaccggg

SEQ ID NO: 718909 - DNA, 75 bp, synthetic construct
  source 1..75: mol_type = other DNA
tgctacagttgcaggagaagggctctagtgttaactttgagcgccttttggccgagatcaaagaacgcgacgacc

SEQ ID NO: 718910 - DNA, 75 bp, synthetic construct
  source 1..75: mol_type = other DNA
tggactcgggtgcaatttatcgcgtactggcactggcggcattacatcaccatgttgatgttgcatcggaagatg

SEQ ID NO: 718911 - DNA, 75 bp, synthetic construct
  source 1..75: mol_type = other DNA
aacgatgtggatccagaaagctacctccgccatgtccttgacatcatagcagactggccggtgacccgggtgagt

SEQ ID NO: 718912 - DNA, 75 bp, synthetic construct
  source 1..75: mol_type = other DNA
accgtgctgcccggagtgtggtggttcgctgagctacctgggtgaagatgccgcggaacaactggagctgatgcg

SEQ ID NO: 718913 - DNA, 75 bp, synthetic construct
  source 1..75: mol_type = other DNA
gtgcctcctgaccaaacggctggagcgtgggcgcttcgcctggccgaacaggaagcgctgatccacgccctgcag

SEQ ID NO: 718914 - DNA, 75 bp, synthetic construct
  source 1..75: mol_type = other DNA
atgttcgtgacgaccgtaacgccgggtcaacgctggcgccggcggtgtggttcgcttacagcccggacagaaaag

SEQ ID NO: 718915 - DNA, 75 bp, synthetic construct
  source 1..75: mol_type = other DNA
gtctccgctggaagaggcgcttcatggctatgtgctgactgacggtaagctccatgttgatgacacgcctgtccc

SEQ ID NO: 718916 - DNA, 75 bp, synthetic construct
  source 1..75: mol_type = other DNA
agagcacaccccgctgtatcgccagtcagaaatatacggccggcaaggtgtggagctgagccgtgccacactggg

SEQ ID NO: 718917 - DNA, 75 bp, synthetic construct
  source 1..75: mol_type = other DNA
caggcaccggtgccttcaaaacccattgcacgcagttatgccggagcggggcttctggcccatgttgtcaccggg

SEQ ID NO: 718918 - DNA, 75 bp, synthetic construct
  source 1..75: mol_type = other DNA
cggatcatggtggtgagcgcggtgcgtcactgtacagtcttatcgggacgtgcaaattaaacggcgtggatccgg

SEQ ID NO: 718919 - DNA, 75 bp, synthetic construct
  source 1..75: mol_type = other DNA
gttgcggatggtcagtctgggccgcaaaaactacctgttcttcggttcggatcatggaggagagcggggagcgct

SEQ ID NO: 718920 - DNA, 75 bp, synthetic construct
  source 1..75: mol_type = other DNA
aatgcgttgcggatggtcagtctgggccgcaaaaactacctgttcttcggttcggatcatggaggagagcgggga

SEQ ID NO: 718921 - DNA, 75 bp, synthetic construct
  source 1..75: mol_type = other DNA
ttaccactgtcagcaacagcgacatcatcctgataaacgcagtgcccgtgcgcagcgcgatgactggctgaagaa

SEQ ID NO: 718922 - DNA, 75 bp, synthetic construct
  source 1..75: mol_type = other DNA
tacgtgttcttcggtagcgatcacggcggtgagcgtggagcactgctgtacgggctgatcggcacctgccgactg

SEQ ID NO: 718923 - DNA, 75 bp, synthetic construct
  source 1..75: mol_type = other DNA
atgaacggaaagggcagcagtgcccgcccgtcgctgacagtgtccaatcttttcggccttgtcaccgggatggcg

SEQ ID NO: 718924 - DNA, 75 bp, synthetic construct
  source 1..75: mol_type = other DNA
ccagcactgcgcacacaactggcagaaagcggtattcagttaggacagagcaatatcagcggcgagagttttaac

SEQ ID NO: 718925 - DNA, 75 bp, synthetic construct
  source 1..75: mol_type = other DNA
aaaggcgagccgctggtcagcgagattcttgccgatgcgcaacaagcggatttactgatccctgtggatgaaaca

SEQ ID NO: 718926 - DNA, 75 bp, synthetic construct
  source 1..75: mol_type = other DNA
gcccaacctgcgggaaaacggtggtgtggggtgaaatcagcccgtttcggccattttgctccaaacgttgtcagc

SEQ ID NO: 718927 - DNA, 75 bp, synthetic construct
  source 1..75: mol_type = other DNA
actgcgtttaaaactcttcggtaagatagtaaaaagccgatgcctgaccgcaccggctttaagaaagtggattat

SEQ ID NO: 718928 - DNA, 75 bp, synthetic construct
  source 1..75: mol_type = other DNA
gtgcatgcgcgggtgtgaactgcgcaggaatgtcggcaattttggcggtttcctttccattaataaactttcgca

SEQ ID NO: 718929 - DNA, 75 bp, synthetic construct
  source 1..75: mol_type = other DNA
gccgggcaatataagcgcacgctgacattgctgggtgaaaatactgaagaagggcgcgaaaaattccgcgaagaa

SEQ ID NO: 718930 - DNA, 75 bp, synthetic construct
  source 1..75: mol_type = other DNA
gtggaattgttgtctgaatatggtttgtttttggcgaaaattgtcactgttgttgtggcgattgcggctgttgcc

SEQ ID NO: 718931 - DNA, 75 bp, synthetic construct
  source 1..75: mol_type = other DNA
gtggcttccatttccatcagcagtccttcctgttcagctactgaaggcgtggtgcgtaacggcaaaagcactgcc

SEQ ID NO: 718932 - DNA, 75 bp, synthetic construct
  source 1..75: mol_type = other DNA
cctgatgacgcccccggcacgccagctcagccattaacaccgctggtagcagaagcccagagtaaagcggaagtc

SEQ ID NO: 718933 - DNA, 75 bp, synthetic construct
  source 1..75: mol_type = other DNA
gcggaagtcatcagcacaccttcaccggtgaccgctgccgccagcccgctaatcactccacaccagacacagcca

SEQ ID NO: 718934 - DNA, 75 bp, synthetic construct
  source 1..75: mol_type = other DNA
cagagttgcgtctgcacccgcaggatttaggtgaagtgcaaatctccctcaaagtggatgataaccaggcgcaaa

SEQ ID NO: 718935 - DNA, 75 bp, synthetic construct
  source 1..75: mol_type = other DNA
agtggagccagaaagctacctccgctatgtccttgatgtcatagccgactggccgataaaccgggtcggcgaact

SEQ ID NO: 718936 - DNA, 75 bp, synthetic construct
  source 1..75: mol_type = other DNA
ctcggatacggcgaaagcgttcacctatctgctgaagcaatgggatgccctgaacgaatactgccgcaatggctg

SEQ ID NO: 718937 - DNA, 75 bp, synthetic construct
  source 1..75: mol_type = other DNA
gatcggtcagttgtacgccatagaggcggatataaggggaatgccggcagaacagcggcttgctgaacgtcagcg

SEQ ID NO: 718938 - DNA, 75 bp, synthetic construct
  source 1..75: mol_type = other DNA
gtaagctccatgctgatgacacgcctatcccggtgctgttgccaggcaataagaaaacgaagaccgggcggttat

SEQ ID NO: 718939 - DNA, 75 bp, synthetic construct
  source 1..75: mol_type = other DNA
aatgccggcagagcagcggcttgctgaacgtcagcgaaaaacgaaaccgctgttgaaatccctggaaagctggtt

SEQ ID NO: 718940 - DNA, 75 bp, synthetic construct
  source 1..75: mol_type = other DNA
aacttcggcagccgttccgaaaaagtctcccgccgtatagcacaaatggaagccgatctgaaccggcttcagaaa

SEQ ID NO: 718941 - DNA, 75 bp, synthetic construct
  source 1..75: mol_type = other DNA
cgctggatgaagcccttcagcactatgtcctgaccgacggcaaactccatgctgacgatacgcctgtcccggtgc

SEQ ID NO: 718942 - DNA, 75 bp, synthetic construct
  source 1..75: mol_type = other DNA
atagtaaaaagccgatgcctgaccgcaccggctttaagaaagtggattatgcgcagtggtgtggcgcatattcca

SEQ ID NO: 718943 - DNA, 75 bp, synthetic construct
  source 1..75: mol_type = other DNA
gtggtgagcgggaagcgctactgtacagcctgatcgggacgtgcaaactgaatgacgtggatccagaaagctacc

SEQ ID NO: 718944 - DNA, 75 bp, synthetic construct
  source 1..75: mol_type = other DNA
gtatgtccgggatgaccggaatgcgggctcatcagagccaccggcggtctggttcgcctactcaccagacaggca

SEQ ID NO: 718945 - DNA, 75 bp, synthetic construct
  source 1..75: mol_type = other DNA
tcgagcggggtatcgccagaccggggctgctggcccgtgtgctgacctcgaagtatgcagagcacaccccgctgt

SEQ ID NO: 718946 - DNA, 75 bp, synthetic construct
  source 1..75: mol_type = other DNA
cgcgccttcacggcccatcgagcggggtatcgcaggaccggggctgctggcccgcgtgctgatctcaaagtatgc

SEQ ID NO: 718947 - DNA, 75 bp, synthetic construct
  source 1..75: mol_type = other DNA
aaaagcctgtacaaaatgtgactgcatcgttgaagcaccggcgccgtcccgcccgatagagcgtggtatcgcggg

SEQ ID NO: 718948 - DNA, 75 bp, synthetic construct
  source 1..75: mol_type = other DNA
gggtgccggtaactcaggtgccaaactgctggttgctggtggatggcgtgaacaagccgaaactgtggttttatc

SEQ ID NO: 718949 - DNA, 75 bp, synthetic construct
  source 1..75: mol_type = other DNA
acccgcaaggttcacactgatgacacaccggtaaaggtactggcaccgggtcagaaaaaggcgaaaacagggcgt

SEQ ID NO: 718950 - DNA, 75 bp, synthetic construct
  source 1..75: mol_type = other DNA
atgcaagagcgccaaccgatatcaccacggaagccctgcagcgtatcggtgaactgtatgccatcgaagcagaag

SEQ ID NO: 718951 - DNA, 75 bp, synthetic construct
  source 1..75: mol_type = other DNA
gctgagccgttcactgctgtcgggctgggtggatgcatgctgccggcagctgtctccgctggaagaggcgcttca

SEQ ID NO: 718952 - DNA, 75 bp, synthetic construct
  source 1..75: mol_type = other DNA
cgcgtacgcacttaaccagtggccggcactgacgtactatgcgaacgatggctgggtggaaatcgacaacaacat

SEQ ID NO: 718953 - DNA, 75 bp, synthetic construct
  source 1..75: mol_type = other DNA
acggaagctgcctgctgggctcatgcccgccgaaagatccacgatgtgcacgtccgcatcctgtcacgaacggtg

SEQ ID NO: 718954 - DNA, 75 bp, synthetic construct
  source 1..75: mol_type = other DNA
agccgatctgaaccgacttcagaaagagagcgatacgctgactggtagggtgtatgacccggcagtacagcgtcc

SEQ ID NO: 718955 - DNA, 75 bp, synthetic construct
  source 1..75: mol_type = other DNA
gattcagcggtgtcctgcaggcggatgcgtacgccgggttcaacgagctgtatcgcaatggtgggataacggaag

SEQ ID NO: 718956 - DNA, 75 bp, synthetic construct
  source 1..75: mol_type = other DNA
gacgatatgcctgtcccggtgctgttgccgggcaataagaagacgaagaccgggcgcttatggacgtacgttcga

SEQ ID NO: 718957 - DNA, 75 bp, synthetic construct
  source 1..75: mol_type = other DNA
cctgcaggtgcatgacgtagccggttttatgcaggatgatagcggtacgcacctcgcggcaccggcaaaatatcc

SEQ ID NO: 718958 - DNA, 75 bp, synthetic construct
  source 1..75: mol_type = other DNA
gtttcagtggtgtcctgcaagcggatgcgtacgccgggttcaacgagctgtatcgcaatggtgggataacggaag

SEQ ID NO: 718959 - DNA, 75 bp, synthetic construct
  source 1..75: mol_type = other DNA
gtttcagaggtgtcctgcatgcggatgcgtacgccgggttcaacgagctgtatcgcaatggtgggataacggaag

SEQ ID NO: 718960 - DNA, 75 bp, synthetic construct
  source 1..75: mol_type = other DNA
gattcaggggtgtcctgcacgcggatgcgtacgccgggttcaacgagctgtatcgcaatggtgggataacggaag

SEQ ID NO: 718961 - DNA, 75 bp, synthetic construct
  source 1..75: mol_type = other DNA
atcaggcggtgcatctggatggtttacgcttgctgttaattgaagataacccgctaacgcagcgtattaccatcg

SEQ ID NO: 718962 - DNA, 75 bp, synthetic construct
  source 1..75: mol_type = other DNA
cttgctactcctgggcgttgtttccctttgctctttgattctgatcctctggcgcgtggtttatcgttcagtcac

SEQ ID NO: 718963 - DNA, 75 bp, synthetic construct
  source 1..75: mol_type = other DNA
aaaattctacaacgtcggcaaatacgcattgaagatccgggtgtgcgcacacgggtggcacaatccttagaaatc

SEQ ID NO: 718964 - DNA, 75 bp, synthetic construct
  source 1..75: mol_type = other DNA
ccaggcgatgggcggcgaactgagcgccaccagcacgccggaggttggaagctgtttttgtttacgcttgccgtt

SEQ ID NO: 718965 - DNA, 75 bp, synthetic construct
  source 1..75: mol_type = other DNA
tcaggcgaataatgcggcaacctccgccggagctacccaggccgggatttacgatttgatcgaacaacatcagcg

SEQ ID NO: 718966 - DNA, 75 bp, synthetic construct
  source 1..75: mol_type = other DNA
gtcgcaacaacgttaactaccgttagccaatatagcgatttgctggcgctgtatcagcaggacagtgaaatcagc

SEQ ID NO: 718967 - DNA, 75 bp, synthetic construct
  source 1..75: mol_type = other DNA
gtggtgctgactcgtggggatgtgcgtcacatagcccaggactggagtctgacagacgatgagctggaaaccgtc

SEQ ID NO: 718968 - DNA, 75 bp, synthetic construct
  source 1..75: mol_type = other DNA
ttgtggaaattcaggcgtgattttgttgagtgtgaaggaccacccgcacattgattctgccattccgggacgtta

SEQ ID NO: 718969 - DNA, 75 bp, synthetic construct
  source 1..75: mol_type = other DNA
gacgcattcgtcagggaagaacgcgaagcaatggacgttgtgttacaggcgctggacggggagcacatgtcatga

SEQ ID NO: 718970 - DNA, 75 bp, synthetic construct
  source 1..75: mol_type = other DNA
gctggaaaagcagctcaataatgcggtgaaaattctgcaacgtcggcaaatacgcattgaagatccgggagttcg

SEQ ID NO: 718971 - DNA, 75 bp, synthetic construct
  source 1..75: mol_type = other DNA
gttggatatatcgcaactcaatgaagatgctcagttaatgggaacaaagaagatccacgaatggctggcattatt

SEQ ID NO: 718972 - DNA, 75 bp, synthetic construct
  source 1..75: mol_type = other DNA
gcaacgtcggcaaatacgcattgaagatccgggagttcgtgctcaggtcgcaacaacgttaactaccgttagcca

SEQ ID NO: 718973 - DNA, 75 bp, synthetic construct
  source 1..75: mol_type = other DNA
tagagacactgcaaaatagcgaaccgtttgctgccgcactggtggattttgatctgccggatatcgacggcatta

SEQ ID NO: 718974 - DNA, 75 bp, synthetic construct
  source 1..75: mol_type = other DNA
cagcgaacgatgtactgaaaggcgctgtgcaaggtatcgccgaactgattactcgtccgggtttgatgaacgtgg

SEQ ID NO: 718975 - DNA, 75 bp, synthetic construct
  source 1..75: mol_type = other DNA
acgacaatacgccgcaaaccgcgaaagagccggattatctggatatccctgctttcctgcgtaagcaagctgact

SEQ ID NO: 718976 - DNA, 75 bp, synthetic construct
  source 1..75: mol_type = other DNA
gaaaccgtaggtaacaccatccgtgcatttgcttcggataacgcaactgtggttatcggtacttctcttgacccg

SEQ ID NO: 718977 - DNA, 75 bp, synthetic construct
  source 1..75: mol_type = other DNA
atgcgtttttgccgtggtgctgacccgtggggggggcgccacatagcccaggactggagtctgacagacgatgag

SEQ ID NO: 718978 - DNA, 75 bp, synthetic construct
  source 1..75: mol_type = other DNA
ggacaaaatctcagcggctgcaacgcgttgcggccgttctccagaagaaattacgctgcttgcagtcagtaaaac

SEQ ID NO: 718979 - DNA, 75 bp, synthetic construct
  source 1..75: mol_type = other DNA
atgtttgaaccaatggaacttaccaatgacgcggtgattaaagtcatcggcgtcggcggcggcggtaatgctgtt

SEQ ID NO: 718980 - DNA, 75 bp, synthetic construct
  source 1..75: mol_type = other DNA
gaagatgaagagaatttcgaccgtttacgcgcctgtcgtaccgagcaggaagtactggatttaattgaccgcacc

SEQ ID NO: 718981 - DNA, 75 bp, synthetic construct
  source 1..75: mol_type = other DNA
ttatcgctccggggctggcgatgccgcacgggcggccggaagagggcgttaagaaaaccggtttctctctggtaa

SEQ ID NO: 718982 - DNA, 75 bp, synthetic construct
  source 1..75: mol_type = other DNA
ctgcgcaattacaaagccgtgattaatgcgcggcgtcgtgaaatggggcagaaaccgctcaccaccgcgcagatt

SEQ ID NO: 718983 - DNA, 75 bp, synthetic construct
  source 1..75: mol_type = other DNA
gtctgaaatgggctacgcaatgatgggttctggcgtggcgagcggtgaagatcgtgcggaagaagcggctgaaat

SEQ ID NO: 718984 - DNA, 75 bp, synthetic construct
  source 1..75: mol_type = other DNA
gacgatgagctggaaaccgtcatgcagcggctggacgatgcctttgagcatggtgcggatgtcagcgttgttcac

SEQ ID NO: 718985 - DNA, 75 bp, synthetic construct
  source 1..75: mol_type = other DNA
acagtcccggcggtgatgctggaaaaagtgatggcgctggcaggcagtgaaatgaagcgcctgtatgccgtcggg

SEQ ID NO: 718986 - DNA, 75 bp, synthetic construct
  source 1..75: mol_type = other DNA
ccggtcttcatgcggcgggtaaaggtatcaacgttgccaaagttctgaaagatctgggtattgatgtcaccgttg

SEQ ID NO: 718987 - DNA, 75 bp, synthetic construct
  source 1..75: mol_type = other DNA
gaagatgaagagaattttgaccgtttgcgcgcctgccgcaccgagcaggaagtgcttgatttaattgaccgcacc

SEQ ID NO: 718988 - DNA, 75 bp, synthetic construct
  source 1..75: mol_type = other DNA
tacgcccaaattatggtggggcgtacagggccgacttcggtcgggccgggttcggtagtctccggtaacgccaac

SEQ ID NO: 718989 - DNA, 75 bp, synthetic construct
  source 1..75: mol_type = other DNA
aggcgtgctttatcggctacggcgggatgttgatggaatccttcgtggcgattatggcactggtttccgcctgta

SEQ ID NO: 718990 - DNA, 75 bp, synthetic construct
  source 1..75: mol_type = other DNA
cgcaaatgggctacctgccagggatgatctggctgcttgccggggtggtgcttgccggagcggtacaggatttca

SEQ ID NO: 718991 - DNA, 75 bp, synthetic construct
  source 1..75: mol_type = other DNA
tgctgaccgggcatgaaaatgaggtggtatcagcgcagccggataccgtgattcaggatacggctgaactggtca

SEQ ID NO: 718992 - DNA, 75 bp, synthetic construct
  source 1..75: mol_type = other DNA
gatgaacctgtggcatttgtgatgccgggaacggcgttccgtgtctctgccagtgtggcaaccgaaatgacagag

SEQ ID NO: 718993 - DNA, 75 bp, synthetic construct
  source 1..75: mol_type = other DNA
gcacgtcgtctggtggcagaaaagaacccggatatgccagctgacgagctggaaaaactggctaacgcggttggt

SEQ ID NO: 718994 - DNA, 75 bp, synthetic construct
  source 1..75: mol_type = other DNA
tctgctggatgaagccctggagcgtgcacgccgtctggtggcagaaaagaacccggatatgccagctgacgagct

SEQ ID NO: 718995 - DNA, 75 bp, synthetic construct
  source 1..75: mol_type = other DNA
ccgaaagctgggaagtactcgacaacggcgcgacctatcgcttccacctgcgtcgcgatgttccgtttcaaaaaa

SEQ ID NO: 718996 - DNA, 75 bp, synthetic construct
  source 1..75: mol_type = other DNA
taaaaaactgactaccggggctgtcactatgactactctcccaaccctctctcaacctgaaattgccatcgttga

SEQ ID NO: 718997 - DNA, 75 bp, synthetic construct
  source 1..75: mol_type = other DNA
gatacgttaaaccagattgccagtgaagtcggtgaacagtcgatcatttctcgtgcgggcggtgcgccaacactg

SEQ ID NO: 718998 - DNA, 75 bp, synthetic construct
  source 1..75: mol_type = other DNA
tggaaggctggggctatgattattatgtctttgataaagtcagttccccggtttcaacgatgatggcctgcccgg

SEQ ID NO: 718999 - DNA, 75 bp, synthetic construct
  source 1..75: mol_type = other DNA
atgctgcgttacaacagcaaactgccaatcgtggtgtatacgccagacaatgtggatgtgaagtaccgcatctgg

SEQ ID NO: 719000 - DNA, 75 bp, synthetic construct
  source 1..75: mol_type = other DNA
gacacccctctcagcccggaaaatgcgctgaccggacatgaaaatgaggtggtatcagcacagacggataccgtg

SEQ ID NO: 719001 - DNA, 75 bp, synthetic construct
  source 1..75: mol_type = other DNA
cagggatggcgctgatgctctgtgccgtagtgttgttcaaaatgaaacgtcaacgttacgcctgggtggcgctgg

SEQ ID NO: 719002 - DNA, 75 bp, synthetic construct
  source 1..75: mol_type = other DNA
gacgggctggactatgtgccgacggacaagaaagtgctgttcggtcaccattttgcggccattgccggcgcaggc

SEQ ID NO: 719003 - DNA, 75 bp, synthetic construct
  source 1..75: mol_type = other DNA
cggtctggcggtaggcattctgattatgcgcccgacgctgaccatgcctgcgctaactaaatttgtcgatggcac

SEQ ID NO: 719004 - DNA, 75 bp, synthetic construct
  source 1..75: mol_type = other DNA
actttgatcaactggcggaagaaaaagttcgcgatgcgctaaaaccgccatctatgtataaagtgatattagtca

SEQ ID NO: 719005 - DNA, 75 bp, synthetic construct
  source 1..75: mol_type = other DNA
tgacacggatgacgcagccggtcaggacacgtctgtcagcccggaaaatgcgctgaccggacatgaaaatgaggt

SEQ ID NO: 719006 - DNA, 75 bp, synthetic construct
  source 1..75: mol_type = other DNA
tggtgctgtttgtttccacgcgccgtgacggtcgctcgctgggtgagctggtcaaagaagagatggggccaaccg

SEQ ID NO: 719007 - DNA, 75 bp, synthetic construct
  source 1..75: mol_type = other DNA
cagcgtaactgcgccttacgctccgactacagccgccgtcaggcgctggtggaaatcgacgtgctggtggcgcag

SEQ ID NO: 719008 - DNA, 75 bp, synthetic construct
  source 1..75: mol_type = other DNA
aaaaaactatcttcaataaaaaataattattattctacagtgatgtttgatgaaacatttgctcaaagagatggt

SEQ ID NO: 719009 - DNA, 75 bp, synthetic construct
  source 1..75: mol_type = other DNA
atgaaccgaagaaggtaacagattattatcgcttagctatcagagccatgttggctcaatcgggggaacgtacac

SEQ ID NO: 719010 - DNA, 75 bp, synthetic construct
  source 1..75: mol_type = other DNA
ccaaagatgtcgctcatatagatgggggattctcattaactttcaaagaccctaaacaactggtgatttttaata

SEQ ID NO: 719011 - DNA, 75 bp, synthetic construct
  source 1..75: mol_type = other DNA
ggtttggttaccagttgcactgcggtaactcgctggtgggcgcgcgccgtcaggtgttcaacaagagcgaactga

SEQ ID NO: 719012 - DNA, 75 bp, synthetic construct
  source 1..75: mol_type = other DNA
aagagattgggtgatttacaggggcaatatttatccctggaaatgtggcatgaaacaaaccagcagaaagacggc

SEQ ID NO: 719013 - DNA, 75 bp, synthetic construct
  source 1..75: mol_type = other DNA
cgcactaactatattccggcatgtgatgcacaggagtatgccaaacgtactccgtgcgttacatggactgaaccg

SEQ ID NO: 719014 - DNA, 75 bp, synthetic construct
  source 1..75: mol_type = other DNA
ctatacccgcagcgacgaaggcgagcgccgtaccgtcacctggcaggctccgtttatcaagccagatcgcgaaga

SEQ ID NO: 719015 - DNA, 75 bp, synthetic construct
  source 1..75: mol_type = other DNA
aatgaaagagcactgttcccgatcggtaaccgtaacaagtttagtattaatctgtatgcaactacatccgcgaca

SEQ ID NO: 719016 - DNA, 75 bp, synthetic construct
  source 1..75: mol_type = other DNA
ttcaagtattttgcatgataatcaaggggaaattcctggtatcaaggaagaatcttacaatggggataaactgaa

SEQ ID NO: 719017 - DNA, 75 bp, synthetic construct
  source 1..75: mol_type = other DNA
aaagttgtatgggaagaacgcggaatattgggagattataaacctgagcttgtactgcacaatcttagcgctgcc

SEQ ID NO: 719018 - DNA, 75 bp, synthetic construct
  source 1..75: mol_type = other DNA
gttatttgggggggagttgattctcaatcgcggactaaagttgtagattattatagggtaattttaagagctatg

SEQ ID NO: 719019 - DNA, 75 bp, synthetic construct
  source 1..75: mol_type = other DNA
accttttctcagccaaaacgatcgagctttgccttgcgcatgatggttccggtgaagttggcggcattaaagatg

SEQ ID NO: 719020 - DNA, 75 bp, synthetic construct
  source 1..75: mol_type = other DNA
cgcaaactaccttgctatcaaataacccgcgacggctttgcgtttcttgctatggggttcacgggtaaacgtgct

SEQ ID NO: 719021 - DNA, 75 bp, synthetic construct
  source 1..75: mol_type = other DNA
attgatttttcgtcttccgcactcaggaagaaagaggatactttgccaccctttgaaaaagggaaactcaaacgg

SEQ ID NO: 719022 - DNA, 75 bp, synthetic construct
  source 1..75: mol_type = other DNA
ttgcaatggttttgccgtctggtgggcgttaccgaaacagagttactcgaagagatagcccagctttcaccagca

SEQ ID NO: 719023 - DNA, 75 bp, synthetic construct
  source 1..75: mol_type = other DNA
actgttcaggcaccttataaagcgggtgccgggcgtggaaacccggaattcaccaaagcgcacaaccgcgctctt

SEQ ID NO: 719024 - DNA, 75 bp, synthetic construct
  source 1..75: mol_type = other DNA
tccgggtagcgaaaagccaggtagtgattgaaaaaggcgaacttggccgtcacaaacaaattagaatcattaatc

SEQ ID NO: 719025 - DNA, 75 bp, synthetic construct
  source 1..75: mol_type = other DNA
ggtctgggccatgaacctcgcccgccatccgcagattcagcagcgcgccctgaaccgtctctggatatgggcggg

SEQ ID NO: 719026 - DNA, 75 bp, synthetic construct
  source 1..75: mol_type = other DNA
aacgagaaaggtcttttcccaattgggaaccgcaacaagtttagtatcaatttatatgcaaataatgcaaataat

SEQ ID NO: 719027 - DNA, 75 bp, synthetic construct
  source 1..75: mol_type = other DNA
acttgaaaagtttgcgaaacaacctcagcgattaggtgatttgcaggggcaatattattctctagaaatgtggca

SEQ ID NO: 719028 - DNA, 75 bp, synthetic construct
  source 1..75: mol_type = other DNA
gcgccagtacgaagcggacacctggtacgatcaaaacggtcgcattatctttaccccaagcaaagggctggtggg

SEQ ID NO: 719029 - DNA, 75 bp, synthetic construct
  source 1..75: mol_type = other DNA
gaaggtactaacgagggcggcgaaatcaatcctaccaccgaagaaacaactaccagcggaatgggtagagaataa

SEQ ID NO: 719030 - DNA, 75 bp, synthetic construct
  source 1..75: mol_type = other DNA
gcgacggaatatctgatgtcaacgctacgggaaaaatgtggtcatcactggcaggcgattaaagcgattggcctt

SEQ ID NO: 719031 - DNA, 75 bp, synthetic construct
  source 1..75: mol_type = other DNA
aatgagctgggattattcaaagagatacatcacacaacaatgtttagtatgaatatctatggttgtgttcaaaaa

SEQ ID NO: 719032 - DNA, 75 bp, synthetic construct
  source 1..75: mol_type = other DNA
cgacatctaaaaacagaaaggaattgcccgttattatggaaataaacggcaaagataaacgtcttcatgccgttc

SEQ ID NO: 719033 - DNA, 75 bp, synthetic construct
  source 1..75: mol_type = other DNA
ataggtttttttgaacaggacttgcgtggtcgcgtgaaaggtaatgtccacgtagacccaaaaacagggaaacga

SEQ ID NO: 719034 - DNA, 75 bp, synthetic construct
  source 1..75: mol_type = other DNA
cagtgaaaatattgccaatgacgcattctgccagaagtttacacagggaaatcggactatttcacaacaccgcct

SEQ ID NO: 719035 - DNA, 75 bp, synthetic construct
  source 1..75: mol_type = other DNA
tgaagcgttactcaccgcctttacgccggaagaagacgttcgcccactgctggcgctggagaatatctttgttga

SEQ ID NO: 719036 - DNA, 75 bp, synthetic construct
  source 1..75: mol_type = other DNA
gcctcgcaatccagagaccggtcaatttttgaaaacaaaaaaaggcgctcgaggggcggcttttacacccaaaag

SEQ ID NO: 719037 - DNA, 75 bp, synthetic construct
  source 1..75: mol_type = other DNA
atgggcttttttgagaaagatttgcgcggtcgcgtgaaaggtaatgtccacgtagacccaaaaacaggtaaacga

SEQ ID NO: 719038 - DNA, 75 bp, synthetic construct
  source 1..75: mol_type = other DNA
atcaggcactgcgtgaggcggcacagaacgcgaaagatttaggtgggattaagaattacaagcgaggcgagcaag

SEQ ID NO: 719039 - DNA, 75 bp, synthetic construct
  source 1..75: mol_type = other DNA
cagtgaactgcccgggatgctggaaaaaggcgaatggcgcgccggtgcaccattcagggggcatgccggttttca

SEQ ID NO: 719040 - DNA, 75 bp, synthetic construct
  source 1..75: mol_type = other DNA
aagattatggcgtaagaaaattgcaatacgattattgttgtatattcaagagaatgtgatcgtaattgtcttttt

SEQ ID NO: 719041 - DNA, 75 bp, synthetic construct
  source 1..75: mol_type = other DNA
ataccgccttttggtcaacaatcaaggtaatgatcttctttcctggaaaggatattttatgcttcgaaatctttt

SEQ ID NO: 719042 - DNA, 75 bp, synthetic construct
  source 1..75: mol_type = other DNA
agcaacgtgccgaatggatacggaaagcattgcgttactctgaagaacgcgcagcattggctaaacgaatcgaag

SEQ ID NO: 719043 - DNA, 75 bp, synthetic construct
  source 1..75: mol_type = other DNA
tgatgatagcgttaagttcattattgctggcagggtgtgattcttctaaagatgccaataaatcaaactttgaaa

SEQ ID NO: 719044 - DNA, 75 bp, synthetic construct
  source 1..75: mol_type = other DNA
cgggtaacaggcgaggaaaaaacggagacgcacgacgaggaattaattgcattgtacaatacaaaaaatattcct

SEQ ID NO: 719045 - DNA, 75 bp, synthetic construct
  source 1..75: mol_type = other DNA
aacggtgccagattattgtccctcctgcctgtgagcgcgatacggtgtccatcaccatacgtaagccatcgaagg

SEQ ID NO: 719046 - DNA, 75 bp, synthetic construct
  source 1..75: mol_type = other DNA
tatgaggattgctacaactttgcccggtgtctggcaaagcaccacggtgataatatcgaagacattaagccgggg

SEQ ID NO: 719047 - DNA, 75 bp, synthetic construct
  source 1..75: mol_type = other DNA
ttatggagcttgccgtagcagcagggaaaaccattgtatttgccggagcaacgggttccggtaaaacaacctata

SEQ ID NO: 719048 - DNA, 75 bp, synthetic construct
  source 1..75: mol_type = other DNA
acattccataataatgacggtgtgacctttgatttttgtaaacgtttttctcagacgctggcatcatttcgggga

SEQ ID NO: 719049 - DNA, 75 bp, synthetic construct
  source 1..75: mol_type = other DNA
ttgcccggtgcctggcaaagcaccacggcgacaatatcgaagatattaagccggggctgtcagccacgctggaat

SEQ ID NO: 719050 - DNA, 75 bp, synthetic construct
  source 1..75: mol_type = other DNA
gcctttaaccagatggagaaacgctgcattacggcgttatccctttttgactatctccgcttgttgcgccttgct

SEQ ID NO: 719051 - DNA, 75 bp, synthetic construct
  source 1..75: mol_type = other DNA
ttcaattatctgtcgcccaaactaatcgatatacatctcaggaacaggcagacgaaataaataccaaagagtttt

SEQ ID NO: 719052 - DNA, 75 bp, synthetic construct
  source 1..75: mol_type = other DNA
atggttaatacaaaaaaatttgtgatgattgcgttaagttcattattgttggcagggtgtgactcagcgaaggat

SEQ ID NO: 719053 - DNA, 75 bp, synthetic construct
  source 1..75: mol_type = other DNA
atgtgtggttgccgtaaattttttgagcggtgcggactctggcgggaagaacgaacaggcgacggaagcctgatc

SEQ ID NO: 719054 - DNA, 75 bp, synthetic construct
  source 1..75: mol_type = other DNA
gccaggtcgtgaatatgctctgacagatgaggggaaaaaatatctgaagtctccggaacgacctgatttttgcgt

SEQ ID NO: 719055 - DNA, 75 bp, synthetic construct
  source 1..75: mol_type = other DNA
atccggttcagatagctgtggctcaggctaatcgatacacatctcaggaacgggcagatgaaataaattctcgac

SEQ ID NO: 719056 - DNA, 75 bp, synthetic construct
  source 1..75: mol_type = other DNA
gttgcagccattacccgacctgctgaagcggtggagtatattgcacgcaccattacgcaacttgaacgaggggag

SEQ ID NO: 719057 - DNA, 75 bp, synthetic construct
  source 1..75: mol_type = other DNA
caactcctgctacaaatttatgatcgcgcaagggttagcgcctcgcgtattgtccaccaggcacaaatttatggc

SEQ ID NO: 719058 - DNA, 75 bp, synthetic construct
  source 1..75: mol_type = other DNA
atgcgtaaatatcgtctaagtgaagaacagcgagcctttagttatcaggaagatggcactaaaaaaagtgtgtta

SEQ ID NO: 719059 - DNA, 75 bp, synthetic construct
  source 1..75: mol_type = other DNA
gtaataaaaaagaccggagctccctttcccggtcgacgtctcattgtccgtatcacttcctcccgaaaaacgaca

SEQ ID NO: 719060 - DNA, 75 bp, synthetic construct
  source 1..75: mol_type = other DNA
tggtaggtgcggtactggcaacgttaactgcatgtactggtcatattgaaaaccgtgacaaaaactgctcttatg

SEQ ID NO: 719061 - DNA, 75 bp, synthetic construct
  source 1..75: mol_type = other DNA
gggcgcaggcgtactgggcagtaaagttgctcagagtctgcaaacctggcgctttccgctgcgttgctggagtcg

SEQ ID NO: 719062 - DNA, 75 bp, synthetic construct
  source 1..75: mol_type = other DNA
tgtcactgagtgcactgctgaaacagtatggtatacgcctgacggctaatcaggcatatcaccagatggtgaaac

SEQ ID NO: 719063 - DNA, 75 bp, synthetic construct
  source 1..75: mol_type = other DNA
aactggcaggcggaacaccggaagaaaaccgtgacattttaacacgcttgttacaaggtaaaggcgacgcagccc

SEQ ID NO: 719064 - DNA, 75 bp, synthetic construct
  source 1..75: mol_type = other DNA
ctggggccattgattaacccggcacatccgccgctggcattaattggtgtctacagcccggaactggtactaccg

SEQ ID NO: 719065 - DNA, 75 bp, synthetic construct
  source 1..75: mol_type = other DNA
tatccgacgattgttgacggtattgattttcgccaactggtaacagcggcagatggcgaaccaataacagactct

SEQ ID NO: 719066 - DNA, 75 bp, synthetic construct
  source 1..75: mol_type = other DNA
acagcgacaaaaccacacgatatgcaggcggcgatagcctgtagctcatgccacgatctaatcgacgggcgggta

SEQ ID NO: 719067 - DNA, 75 bp, synthetic construct
  source 1..75: mol_type = other DNA
ggctgactggattgtgcggtaccggtattaaaccgccagaccttattgccaccattgcctgttctgcctgtcacg

SEQ ID NO: 719068 - DNA, 75 bp, synthetic construct
  source 1..75: mol_type = other DNA
accattgcatgttctgcctgtcacgacgaaatcgaccgtcgcacgcattttgttgacgctggatatgcaaaagaa

SEQ ID NO: 719069 - DNA, 75 bp, synthetic construct
  source 1..75: mol_type = other DNA
aaaaccgcccgaaatactggctctccaataagcaaacctgtgaattgattgaacaacttttcaccacccagaatt

SEQ ID NO: 719070 - DNA, 75 bp, synthetic construct
  source 1..75: mol_type = other DNA
cgggtattgattaatttgttaccgaatacccctgaaaccgtcggcattattaatcaacaattactcgaaaaatta

SEQ ID NO: 719071 - DNA, 75 bp, synthetic construct
  source 1..75: mol_type = other DNA
atatcgactcttttacgtacaacctggcagatcagttgcgcagcaatgggcataacgtggtgatttaccgcaacc

SEQ ID NO: 719072 - DNA, 75 bp, synthetic construct
  source 1..75: mol_type = other DNA
tcaagtcgccccacgctgtcgctgagtgcactgctgaggcagtatggtatccgcctgacggctaatcaggcatat

SEQ ID NO: 719073 - DNA, 75 bp, synthetic construct
  source 1..75: mol_type = other DNA
gacggctaatcaggcatatcaccagatggtgaaactggggatcgtcgagcagcgcgaacgatacagccgtacagc

SEQ ID NO: 719074 - DNA, 75 bp, synthetic construct
  source 1..75: mol_type = other DNA
gtcgtccggcatgcgtttattgagcatcgtgccgaggtttttgattttgcctgtatcgaaggcaatgaagagaac

SEQ ID NO: 719075 - DNA, 75 bp, synthetic construct
  source 1..75: mol_type = other DNA
tgtccctgtatgccaaaggcatgactacgcgggaaatcgttgccacgttcaaagaaatgtacgacgccgatgtct

SEQ ID NO: 719076 - DNA, 75 bp, synthetic construct
  source 1..75: mol_type = other DNA
gcaacagcctgcgcttcgtgtcatggaaggactacaaagccgtcactcgaaacctgaaagcgatttatcaggctc

SEQ ID NO: 719077 - DNA, 75 bp, synthetic construct
  source 1..75: mol_type = other DNA
tcccggaagcgataaatagcgtgtacccgcagacgcatattcagctctgcatcatccatatggtgcgcaacagcc

SEQ ID NO: 719078 - DNA, 75 bp, synthetic construct
  source 1..75: mol_type = other DNA
ggccataacagtatctatcaatctgcattctcaccgaacttactcgaacgcccacgtctggaaagccatctacaa

SEQ ID NO: 719079 - DNA, 75 bp, synthetic construct
  source 1..75: mol_type = other DNA
gtcagaatggcagcgtaatcaacaaagctgtcttcctggcgttgggtatcaacaccgaaggccagaaagaattac

SEQ ID NO: 719080 - DNA, 75 bp, synthetic construct
  source 1..75: mol_type = other DNA
tacgcgggaaatcgttgccacgttcaaagaaatgtacgacgccgatgtctcgcccacgctgatatccaaagtgac

SEQ ID NO: 719081 - DNA, 75 bp, synthetic construct
  source 1..75: mol_type = other DNA
gacgatgccactgcgggactggcgtatggcaatgagccgctttattatcgagttcggtgaccgcctggacggtca

SEQ ID NO: 719082 - DNA, 75 bp, synthetic construct
  source 1..75: mol_type = other DNA
ccgtgagatagccgctgcgttcaaagaactgtatgacgcagatgtttcaccggcactgatatcaaaggttaccga

SEQ ID NO: 719083 - DNA, 75 bp, synthetic construct
  source 1..75: mol_type = other DNA
caacgaacgcaatcgagtcgctgaacagcgtgatccggcatgcgacaaagaaacgtaaggtgttcccgacggatg

SEQ ID NO: 719084 - DNA, 75 bp, synthetic construct
  source 1..75: mol_type = other DNA
tgagcttaaaaaccgagggttgcaggatattctgatcgcctgtgtggatggactaaaaggctttcctgatgccat

SEQ ID NO: 719085 - DNA, 75 bp, synthetic construct
  source 1..75: mol_type = other DNA
tggctaacgaactggccaaaaacctcaaaacccctgaagatctcagtcagtttgatcggctgctgaaaaagctca

SEQ ID NO: 719086 - DNA, 75 bp, synthetic construct
  source 1..75: mol_type = other DNA
tttgatcggctgctgaaaaagctcagcgttgaagccgctctcaatgcagaaatgacacaccatcctgggtatgag

SEQ ID NO: 719087 - DNA, 75 bp, synthetic construct
  source 1..75: mol_type = other DNA
cacctacggttctgcgaatcgtgtgaatttccatgacgatatgttcctgtacggtatcggctacaatttcaccgg

SEQ ID NO: 719088 - DNA, 75 bp, synthetic construct
  source 1..75: mol_type = other DNA
tcgggtactttggtacaacttgctgagccgacggcaatggcgctggctatctataccaccagcgtggcccacttt

SEQ ID NO: 719089 - DNA, 75 bp, synthetic construct
  source 1..75: mol_type = other DNA
acactgtcactgagtgcactgctgaaacagtatggtatccgcctgacggctaatcaggcatatcaccagatggtg

SEQ ID NO: 719090 - DNA, 75 bp, synthetic construct
  source 1..75: mol_type = other DNA
ggctggtggttggatcgatagcgaaactgtgctggcgcaggaaggtaattgctggatttacgaccagaatgctct

SEQ ID NO: 719091 - DNA, 75 bp, synthetic construct
  source 1..75: mol_type = other DNA
ttgaagcctttgatggcgacacggttcatgtccgtggtccaaaagtcattaacggcgaggagcgcattacgcgaa

SEQ ID NO: 719092 - DNA, 75 bp, synthetic construct
  source 1..75: mol_type = other DNA
tcttgaacagggatttcaactcaaaggcagtagtcaggcagaaatcgacgcctgccacgcgcggttggcttccga

SEQ ID NO: 719093 - DNA, 75 bp, synthetic construct
  source 1..75: mol_type = other DNA
atgaaaaaacatcttttaactctgacactttcctctatattagcgatacctgttatatctcatgcagaatttaaa

SEQ ID NO: 719094 - DNA, 75 bp, synthetic construct
  source 1..75: mol_type = other DNA
ttaatctctacttgcatgcgtatggcacctacggttctgcgaatcgcgtgaatttccacgacgatatgttcctgt

SEQ ID NO: 719095 - DNA, 75 bp, synthetic construct
  source 1..75: mol_type = other DNA
aatttccatgacgatatgttcctgtacggtatcggctacaatttcaccggcagcggttggtggttcaaaccgttc

SEQ ID NO: 719096 - DNA, 75 bp, synthetic construct
  source 1..75: mol_type = other DNA
ccgcctgacggctaatcaggcatatcaccagatggtgaaactggggatcgtcgagcagcgcgaacgatacagccg

SEQ ID NO: 719097 - DNA, 75 bp, synthetic construct
  source 1..75: mol_type = other DNA
gaagtctcatccataaccaagcctggtgcagaaattcatgagtatcagcctacccctggcgatattaaacgtgcc

SEQ ID NO: 719098 - DNA, 75 bp, synthetic construct
  source 1..75: mol_type = other DNA
tcaacattaggaatattaattttaggtaacgatatagaaaatttagagtttttccgttttgaactaccaacatgc

SEQ ID NO: 719099 - DNA, 75 bp, synthetic construct
  source 1..75: mol_type = other DNA
ctggcaggatgatattgagcgtgaaggtcatgactttaaccgtcttggcttattttacggctatgatttccagaa

SEQ ID NO: 719100 - DNA, 75 bp, synthetic construct
  source 1..75: mol_type = other DNA
tgctgatacccgtgtcgaaacggaaacaggtctgcaatataccttcaacgaaacggttgccttgcgagtgaacta

SEQ ID NO: 719101 - DNA, 75 bp, synthetic construct
  source 1..75: mol_type = other DNA
ccactacgttgatgagccgggtaaagacacggcaaatatgcagcgttggaaagtcgcgccagactgggatgtaaa

SEQ ID NO: 719102 - DNA, 75 bp, synthetic construct
  source 1..75: mol_type = other DNA
ggaaatcgcccgggagctccggaacgcgggaatgccgacagcacaaatctgtcagctgaccggactttctgaagc

SEQ ID NO: 719103 - DNA, 75 bp, synthetic construct
  source 1..75: mol_type = other DNA
tctgaaaatcagaaactggagagtgaaataaaaaaaagtggatcatttatctcatatgatacaaatgaaaacacg

SEQ ID NO: 719104 - DNA, 75 bp, synthetic construct
  source 1..75: mol_type = other DNA
ggaacgcgggaatgccggcagcacaaatctgtcagctgaccggactttctgaagctgaactgaagaacatcactc

SEQ ID NO: 719105 - DNA, 75 bp, synthetic construct
  source 1..75: mol_type = other DNA
ggtagattatagcgcgggtaaacgtggaacgtggtttgatcgcccggagctggaggtgcattatcagttcctcga

SEQ ID NO: 719106 - DNA, 75 bp, synthetic construct
  source 1..75: mol_type = other DNA
actgactgacgatttacgtttcaacggttggttgtcgatgtataaatttgccaacgatctgaacacgaccggtta

SEQ ID NO: 719107 - DNA, 75 bp, synthetic construct
  source 1..75: mol_type = other DNA
actgactgacgatttacgtttcaacggttggctgtcgatgtataaatttgccaacgatctgaatacgaccggtta

SEQ ID NO: 719108 - DNA, 75 bp, synthetic construct
  source 1..75: mol_type = other DNA
atatccggtgctgatctgtttatcttcggacacaccccagcgcgccagcccctgaagtatgccaaccagatgtac

SEQ ID NO: 719109 - DNA, 75 bp, synthetic construct
  source 1..75: mol_type = other DNA
aaaagcagcagcaggaaaacgccggtgaaatggagctggctgaccttgaaggtttctaccgcgatgcgaaaaagc

SEQ ID NO: 719110 - DNA, 75 bp, synthetic construct
  source 1..75: mol_type = other DNA
acccggatatgccagccgacgagctggaaaaactggccaatgcggtcggtatcggcgcggtgaaatacgcggatc

SEQ ID NO: 719111 - DNA, 75 bp, synthetic construct
  source 1..75: mol_type = other DNA
ctgcatgccgatcgcgtgctgtattacatcgactcccgtcagcatcaacacctgatgcaggcatgggcgatcgtc

SEQ ID NO: 719112 - DNA, 75 bp, synthetic construct
  source 1..75: mol_type = other DNA
gcattcgagggtaacactgcgccgtacatgcagtatgcctatacgcgtgtgttgtccgtgttccgtaaagcagaa

SEQ ID NO: 719113 - DNA, 75 bp, synthetic construct
  source 1..75: mol_type = other DNA
gcaaagcggtgacgaatacttccgcgagatgtggcgcaaactggtcgacatcaccatgacgcagaaccagatcac

SEQ ID NO: 719114 - DNA, 75 bp, synthetic construct
  source 1..75: mol_type = other DNA
tatgctgattgcgtggctggaaaaacagcagcaggaaaacgctggtgaaatggaactggctgaccttgaaggttt

SEQ ID NO: 719115 - DNA, 75 bp, synthetic construct
  source 1..75: mol_type = other DNA
actcaagtttgccaaccagatgtacatcgacaccggcgccgtgttctgcggaaacctcacgctggtaaaggtgca

SEQ ID NO: 719116 - DNA, 75 bp, synthetic construct
  source 1..75: mol_type = other DNA
actgaaatactccaaccagatgtacatcgacaccggcgctgtgttctgtggaaacctgacattattacagttaca

SEQ ID NO: 719117 - DNA, 75 bp, synthetic construct
  source 1..75: mol_type = other DNA
atcgaccgaggaactgaaaacgttgaatgcctggagcttattactatgccatggttccgatctgtacgtggcaac

SEQ ID NO: 719118 - DNA, 75 bp, synthetic construct
  source 1..75: mol_type = other DNA
gcaccgcgacaattagcagagcaggtgctgactcatctggatcttaacggtatcgccagcaaagttgagatcgcc

SEQ ID NO: 719119 - DNA, 75 bp, synthetic construct
  source 1..75: mol_type = other DNA
tatgctgattgcgtggctggaaaaacagcagcaggaaaatgccggtgacatggaactggcggatcttgaaggttt

SEQ ID NO: 719120 - DNA, 75 bp, synthetic construct
  source 1..75: mol_type = other DNA
atgagcgacccctcccctgccataccggaaagtatcgatccggcaaatcagcataaaacgctgactgccggacaa

SEQ ID NO: 719121 - DNA, 75 bp, synthetic construct
  source 1..75: mol_type = other DNA
tttaaattgctgcgtacttatcgcgatcgcggtgaaaaatttgacgttatcgtgatggacccgccgaagtttgtt

SEQ ID NO: 719122 - DNA, 75 bp, synthetic construct
  source 1..75: mol_type = other DNA
aaggtgcttttgcaacttcgggccatcaacgaactctccagaaaggaatccgcgcaggcgctctacaccttcatt

SEQ ID NO: 719123 - DNA, 75 bp, synthetic construct
  source 1..75: mol_type = other DNA
cgtgccgcggctataaagacatcaacatgctggcaattcagttattgaatgagggcggtgttcttctgactttct

SEQ ID NO: 719124 - DNA, 75 bp, synthetic construct
  source 1..75: mol_type = other DNA
attcagttgctgaatgaaggcggtattctcctgactttctcctgttccggtctgatgaccagcgatttatttcag

SEQ ID NO: 719125 - DNA, 75 bp, synthetic construct
  source 1..75: mol_type = other DNA
acaggtcatattagccaggcacttcattatctcaatatcggaagattgccagctctcgtcgttctttgcttactg

SEQ ID NO: 719126 - DNA, 75 bp, synthetic construct
  source 1..75: mol_type = other DNA
tggtagagacgttgctacggtggttggggcgctcggcggcgggtatgccggtaaccagattcagggatctctgca

SEQ ID NO: 719127 - DNA, 75 bp, synthetic construct
  source 1..75: mol_type = other DNA
caacagcgttgtaaaacggtgtatgacaagtcagaaaaaatgctcggttatgatgtgacctataagattggcgat

SEQ ID NO: 719128 - DNA, 75 bp, synthetic construct
  source 1..75: mol_type = other DNA
ccgtcggcagaatcgaccattcctgccatcacccgggcagtttgtcgcctggtgccgggaagaagcatccgttac

SEQ ID NO: 719129 - DNA, 75 bp, synthetic construct
  source 1..75: mol_type = other DNA
gtaagtctgtatgaccgaattaacgatgcggcatttcttgcccgtcttattcattcgtcgctgaactcttcagag

SEQ ID NO: 719130 - DNA, 75 bp, synthetic construct
  source 1..75: mol_type = other DNA
aacgcgcactactggctggttactagcctgtaccagaatatgcgggccaatgcgcttactgatacggaattacgg

SEQ ID NO: 719131 - DNA, 75 bp, synthetic construct
  source 1..75: mol_type = other DNA
tttatcgtgacagcgtttgagaagggattaatgaacggtttgagggagtttatagctgcaaatgaggaatatttt

SEQ ID NO: 719132 - DNA, 75 bp, synthetic construct
  source 1..75: mol_type = other DNA
aaccgacttaaaaaacataagcgaaaagcacaaagaaatgattgagtcttggggagggcgagatccgctaagcga

SEQ ID NO: 719133 - DNA, 75 bp, synthetic construct
  source 1..75: mol_type = other DNA
atggcaacggttaataaacaagccattgcagcggcatttggtcgggcagccgcgcactatgagcaacacgcagat

SEQ ID NO: 719134 - DNA, 75 bp, synthetic construct
  source 1..75: mol_type = other DNA
ttgcggcggcatttggtcgggcagcctcacagtatgagcaacacgcagagttacagcgccgtagcgctgatgcct

SEQ ID NO: 719135 - DNA, 75 bp, synthetic construct
  source 1..75: mol_type = other DNA
ctgcaactggcctggccgcaacaacaggggcgatatcccctgacttattatctttttttgggagtaattactcgt

SEQ ID NO: 719136 - DNA, 75 bp, synthetic construct
  source 1..75: mol_type = other DNA
ccatcacccgggcagtttgttgcctggtgtcgtgaagaagcatctgttattgccggactgccaaacgccagcgag

SEQ ID NO: 719137 - DNA, 75 bp, synthetic construct
  source 1..75: mol_type = other DNA
gcacaaataaaagaatgcaggataatatatctgaatttctgggggcgtatggaataaatcactcagtgtacatgg

SEQ ID NO: 719138 - DNA, 75 bp, synthetic construct
  source 1..75: mol_type = other DNA
gcacaatttttcgcctggctattgtgctggcacgatactggaaaatttgcccgctcttttcagcaactttacctg

SEQ ID NO: 719139 - DNA, 75 bp, synthetic construct
  source 1..75: mol_type = other DNA
tgaaattggcgtcggcacgctggatcaggcgatgatggcggtgatgccgttcaaacataataatctgcggcttct

SEQ ID NO: 719140 - DNA, 75 bp, synthetic construct
  source 1..75: mol_type = other DNA
tattctggaggatgtaaccggcgcaggtaaaacagaagcggcgcttatcctggcgcacaggttgatagctgcggg

SEQ ID NO: 719141 - DNA, 75 bp, synthetic construct
  source 1..75: mol_type = other DNA
atcaaattgtatgaagcgaaaaaccgtttgttcagctcaatcaaccgcacgctgggggaagggattgcgcaattg

SEQ ID NO: 719142 - DNA, 75 bp, synthetic construct
  source 1..75: mol_type = other DNA
ctcgacggaaggcattttgcgccaggggtttaacgaagtgaacagcatgaaagtggcacaggtgctgtatcagga

SEQ ID NO: 719143 - DNA, 75 bp, synthetic construct
  source 1..75: mol_type = other DNA
ggtttggcgatgactatgggataagcgtcgcctgtgagcctgatagttacacccgaataacgttacgactaccat

SEQ ID NO: 719144 - DNA, 75 bp, synthetic construct
  source 1..75: mol_type = other DNA
ggtactggatctggatatcagccagccagggccacagttatttattctggaagacgtgactggcgcaggtaaaac

SEQ ID NO: 719145 - DNA, 75 bp, synthetic construct
  source 1..75: mol_type = other DNA
ctctcattcaacgctgggttactggctgtggaattattatttaagtgaatgtgaggagttgcttccttcatcttc

SEQ ID NO: 719146 - DNA, 75 bp, synthetic construct
  source 1..75: mol_type = other DNA
accggcataacgccctgaaaacggtgtttaaccagctaatggacgacgccacgctgacgccgctgtttaactatc

SEQ ID NO: 719147 - DNA, 75 bp, synthetic construct
  source 1..75: mol_type = other DNA
aagacgagcgttcccctcctgaattgctgattctggcccccgtctgggacgactctccgggtgacgaatggtttg

SEQ ID NO: 719148 - DNA, 75 bp, synthetic construct
  source 1..75: mol_type = other DNA
cccgcattctgggatgatgacgagggcgttgaacttataaaacaactttcctggtatatctctgcaaccgtcgta

SEQ ID NO: 719149 - DNA, 75 bp, synthetic construct
  source 1..75: mol_type = other DNA
actatcaccttctttgctggcattcgctggatgtggccgcgatgggctatttaatggttaaaagaaattgcttcg

SEQ ID NO: 719150 - DNA, 75 bp, synthetic construct
  source 1..75: mol_type = other DNA
accgatcgtgagaaactgctggcgtttaccggaattggcgatgatcaccatctgcccggtaagccaatctcttct

SEQ ID NO: 719151 - DNA, 75 bp, synthetic construct
  source 1..75: mol_type = other DNA
cgttcaggcgagaagaccggccttaacccgtttgcgctcgctccaacgaaacgtaaccgcaacttcctcaagaag

SEQ ID NO: 719152 - DNA, 75 bp, synthetic construct
  source 1..75: mol_type = other DNA
agcagcctcaactacgccgaaatggtgtcgtttcacaactttcacccgcacaagcgggacgggaatgcctggggg

SEQ ID NO: 719153 - DNA, 75 bp, synthetic construct
  source 1..75: mol_type = other DNA
acaccctggcggataccctgaaggatctcggtttcatcatgaccctgtcccgcgagtcgctgtcggcggcgtatc

SEQ ID NO: 719154 - DNA, 75 bp, synthetic construct
  source 1..75: mol_type = other DNA
tcctgcaggaggcatcccaatggattcagagtacatcgcaatggcggagcattcattattcagacgcagaataat

SEQ ID NO: 719155 - DNA, 75 bp, synthetic construct
  source 1..75: mol_type = other DNA
tggaggttaaagagttctccgaagaaaccgccacggggatgatggactcccttctttacgccccctgcgattacg

SEQ ID NO: 719156 - DNA, 75 bp, synthetic construct
  source 1..75: mol_type = other DNA
atagcccttattatcttggtttacacaattcgcgtattggttctgacgatttcaacaaaaagccaccgggtaatt

SEQ ID NO: 719157 - DNA, 75 bp, synthetic construct
  source 1..75: mol_type = other DNA
cgttggcgaaccgtcttgggattgggcaactgaaatgggagctggaagattactgcttccgttatctccacccga

SEQ ID NO: 719158 - DNA, 75 bp, synthetic construct
  source 1..75: mol_type = other DNA
tgctgtatcaggagctggatattggtgcagtcgcgattaccgatcgagagaaattgctggcctttaccggaattg

SEQ ID NO: 719159 - DNA, 75 bp, synthetic construct
  source 1..75: mol_type = other DNA
agtatgagcggcaaaaagcgatgcttacgcagtcggaaatcaagctgttacacgcccaggtgaatccccatttcc

SEQ ID NO: 719160 - DNA, 75 bp, synthetic construct
  source 1..75: mol_type = other DNA
tcatataattcaacgccttctggctcgtccagtactcactccagtagtccgtcagagcaagagatatctcagcag

SEQ ID NO: 719161 - DNA, 75 bp, synthetic construct
  source 1..75: mol_type = other DNA
acccaggggcgcggtatttcagtacaccgcgccgattgcgaacaactggcggaactgcgctcccatgcgccagaa

SEQ ID NO: 719162 - DNA, 75 bp, synthetic construct
  source 1..75: mol_type = other DNA
tcgcgcgctgctgccagccgattcctggagatgagattgtcggcttcattacccaggggcgcggtatttcagtac

SEQ ID NO: 719163 - DNA, 75 bp, synthetic construct
  source 1..75: mol_type = other DNA
taaattatttatcagtgtgcgacatatagaagttacccatccacagtgcctgactttctttttacatcgccccga

SEQ ID NO: 719164 - DNA, 75 bp, synthetic construct
  source 1..75: mol_type = other DNA
tttcttgccatgggcttcactggtaaacgtgctgcccggttcaaagaggcatacatcaacgcctttaacctgatg

SEQ ID NO: 719165 - DNA, 75 bp, synthetic construct
  source 1..75: mol_type = other DNA
tttttcaggtcacaaactgtatggcccgacgggtatcggcgtgctgtatggcaaatcagaactgctggaagcgat

SEQ ID NO: 719166 - DNA, 75 bp, synthetic construct
  source 1..75: mol_type = other DNA
gcaaatcagaactgctggaagcgatgtcgccctggctgggcggcggcaaaatggttcacgaagtgagttttgacg

SEQ ID NO: 719167 - DNA, 75 bp, synthetic construct
  source 1..75: mol_type = other DNA
aatggtcagttaaagcgtgacggaaaagacgagcgttcccctcctgaattgctgattctggcccccgtctgggac

SEQ ID NO: 719168 - DNA, 75 bp, synthetic construct
  source 1..75: mol_type = other DNA
attaatacactgtttccttttattgagcacccgacaccgttacagcaaaaggtgctggatctggatatcagccag

SEQ ID NO: 719169 - DNA, 75 bp, synthetic construct
  source 1..75: mol_type = other DNA
tcccgccccagcctggtgctggcacacagtgcccatacattaatggaccgcttcaatgaatcactctggtccggt

SEQ ID NO: 719170 - DNA, 75 bp, synthetic construct
  source 1..75: mol_type = other DNA
cgctgccaggattccagcctgctggcctttgattttgctggcgttcatcacagcgatatggtgacgctgctggcg

SEQ ID NO: 719171 - DNA, 75 bp, synthetic construct
  source 1..75: mol_type = other DNA
gcagtgcatttccccgcggatgttcagcaactggatattgatttctatgctttttcaggtcacaaactgtatggc

SEQ ID NO: 719172 - DNA, 75 bp, synthetic construct
  source 1..75: mol_type = other DNA
ctcagcagaaggaaggactagatcgctctgctgagcaaggggctgttttaggtgctgcaatgcgcgatgccgtta

SEQ ID NO: 719173 - DNA, 75 bp, synthetic construct
  source 1..75: mol_type = other DNA
catcgcagccagtacgccgaagcccaacggttaaccgcacgttatgaggccgcgcgggagaaagtcgcccaactg

SEQ ID NO: 719174 - DNA, 75 bp, synthetic construct
  source 1..75: mol_type = other DNA
cggcgctggaatggctggcagattacgatatcaaccaggccgaaagctggagccgtagcttagcaacgcttgcag

SEQ ID NO: 719175 - DNA, 75 bp, synthetic construct
  source 1..75: mol_type = other DNA
agagcaccacgccaacctcgtcccctggctgatggtcgcccaacaaaccggagccaaagtggtgaagttgccgct

SEQ ID NO: 719176 - DNA, 75 bp, synthetic construct
  source 1..75: mol_type = other DNA
cgccaatatcaacgattacctcccggaaaaactgtcgacacgtctggctgaggagtctgtttccctgtggctgtc

SEQ ID NO: 719177 - DNA, 75 bp, synthetic construct
  source 1..75: mol_type = other DNA
accgatttaatgccctgaaagcggtttttagccagttaatggcagacgcgacgctgacgccgctgttcaactatc

SEQ ID NO: 719178 - DNA, 75 bp, synthetic construct
  source 1..75: mol_type = other DNA
tcagtagtggcatcagtttaggtttttgctatttaacgttgcgcaaaagtccccgactctccctctggcaggcgc

SEQ ID NO: 719179 - DNA, 75 bp, synthetic construct
  source 1..75: mol_type = other DNA
atattttccggcctgacccgcttcgataataatactcagcgcccgattggcgatttagcgcatcactgggaaacc

SEQ ID NO: 719180 - DNA, 75 bp, synthetic construct
  source 1..75: mol_type = other DNA
tgggcgacagattaattggcgaagcaccggaatatacccttgaacagtggctgcgctgcgatccgctgtggccgc

SEQ ID NO: 719181 - DNA, 75 bp, synthetic construct
  source 1..75: mol_type = other DNA
ctgcgttgcgatccactctggtcatatgttttcgacactccagcatatgcacatctgcaatcgacactggatacc

SEQ ID NO: 719182 - DNA, 75 bp, synthetic construct
  source 1..75: mol_type = other DNA
ggacgacacgaccctactggcacacgcagacctcatgatgggcgacagattaattggcgaagcaccggaatatac

SEQ ID NO: 719183 - DNA, 75 bp, synthetic construct
  source 1..75: mol_type = other DNA
tgagcgtatggatgaactggataattttctgcctgaagacaaaggtgccgcacgagattttctccttgcaatcaa

SEQ ID NO: 719184 - DNA, 75 bp, synthetic construct
  source 1..75: mol_type = other DNA
cgcggcgtcattcctgcttccagcctttcactttttcatagccgctttgcttttagcgatcgccagcgaattgaa

SEQ ID NO: 719185 - DNA, 75 bp, synthetic construct
  source 1..75: mol_type = other DNA
gtgactttcttttatttctggggaaaaacccgacgcggcgagaaagacgggggcgaagactatcaccttctttgc

SEQ ID NO: 719186 - DNA, 75 bp, synthetic construct
  source 1..75: mol_type = other DNA
tggataattttctgcctgaagacaaagccgccgcgcgagattttctccttgtaatcaaggcactgtttcctctca

SEQ ID NO: 719187 - DNA, 75 bp, synthetic construct
  source 1..75: mol_type = other DNA
tcatcttcactctctccgcgcaaacttaaacgggtgatagagatgtggatgcccatgactaccgggcatcatggt

SEQ ID NO: 719188 - DNA, 75 bp, synthetic construct
  source 1..75: mol_type = other DNA
tcacgcatgggaaatgagcgttgtcagagtgcgccaaagctggtggaaaaagcatcgggatgagttttctttact

SEQ ID NO: 719189 - DNA, 75 bp, synthetic construct
  source 1..75: mol_type = other DNA
gcagttcttcctcggggaccggaaagcggctgtttccctgatgaataacctcaacctctcctgcagactcaaaag

SEQ ID NO: 719190 - DNA, 75 bp, synthetic construct
  source 1..75: mol_type = other DNA
cctggaacccgttcgcattcagcaccgaagccttcaccgccgaaaccatgcagtccatgctgccccagaacgttc

SEQ ID NO: 719191 - DNA, 75 bp, synthetic construct
  source 1..75: mol_type = other DNA
tgctgaaaacctgagtacactcccggctgtgcgcctgaaaaatctcgcacgttatgctggtatgacttcggtgtt

SEQ ID NO: 719192 - DNA, 75 bp, synthetic construct
  source 1..75: mol_type = other DNA
tgtacgccgcagattctcgtttgattgccgccaaaggttcgccgattcagccaacgctggattcactgaaaggta

SEQ ID NO: 719193 - DNA, 75 bp, synthetic construct
  source 1..75: mol_type = other DNA
aagcccttggcgagctgcgtcaggatggcacttacgacaagatggcgaaaaagtacttcgactttaatgtctacg

SEQ ID NO: 719194 - DNA, 75 bp, synthetic construct
  source 1..75: mol_type = other DNA
caaaggcgtggatgtggtggcctatgccaaccaggatttggtctattccgatctggctgcaggacgtctggatgc

SEQ ID NO: 719195 - DNA, 75 bp, synthetic construct
  source 1..75: mol_type = other DNA
gggcctctctgaagatgaggacatcatacttcatgtccatcgatataattacgaaattccctcggtgctaaacat

SEQ ID NO: 719196 - DNA, 75 bp, synthetic construct
  source 1..75: mol_type = other DNA
gttaagtaaaatccctggtgtcatcgattgcagcgtctcattgaatgttaacaataacgagaatcaaccatcctc

SEQ ID NO: 719197 - DNA, 75 bp, synthetic construct
  source 1..75: mol_type = other DNA
tttcacaccaaaaaagaaaactcacaccgattcaaagaaagagaagattaaaccgaagatgtattttgccggtgg

SEQ ID NO: 719198 - DNA, 75 bp, synthetic construct
  source 1..75: mol_type = other DNA
tagcaccaatcattaagacgacgcgagaaacaattaaaatatttcttgatgctggtgaactggtaaaggttggcg

SEQ ID NO: 719199 - DNA, 75 bp, synthetic construct
  source 1..75: mol_type = other DNA
cgcgctgatgcccgtcgatacgctgggcgagttttaccagcgcgtcgaagccgtggtgaaaaccatgccggaagg

SEQ ID NO: 719200 - DNA, 75 bp, synthetic construct
  source 1..75: mol_type = other DNA
tttgaacacactgacgacgggctgacggagcacggtcatgagtgcccttatgtcagaccggagcgcagggagata

SEQ ID NO: 719201 - DNA, 75 bp, synthetic construct
  source 1..75: mol_type = other DNA
atgaagaagtcgattctcgctctgtctttgttagtcggtctctccgcagcagcttccagctacgcggcgctgccg

SEQ ID NO: 719202 - DNA, 75 bp, synthetic construct
  source 1..75: mol_type = other DNA
tctttgccggaagaaatgatgttaacaggcctatcagcgatgcaagcgtcaatatggttttgaagaagattggct

SEQ ID NO: 719203 - DNA, 75 bp, synthetic construct
  source 1..75: mol_type = other DNA
tggtcggccagctacgctgattatgtcgacagagcattcaaaaataatgtgtttccctacattggaaacagaccc

SEQ ID NO: 719204 - DNA, 75 bp, synthetic construct
  source 1..75: mol_type = other DNA
tttatcaccaccgactatttgcaacagtgcccgaatgagggccgacaggaagcaaagctgaaaggaatcaaattt

SEQ ID NO: 719205 - DNA, 75 bp, synthetic construct
  source 1..75: mol_type = other DNA
ggcgcgggtatttggcaaaaccgggaaagcggaaaccgccaccgattctgctccgctggagatggtagaaacgac

SEQ ID NO: 719206 - DNA, 75 bp, synthetic construct
  source 1..75: mol_type = other DNA
cctgtatcggctgtaaagcctgtcaggtggcgtgttcagagtggaacgacattcgcgataccgtcggcaataaca

SEQ ID NO: 719207 - DNA, 75 bp, synthetic construct
  source 1..75: mol_type = other DNA
catgatgatggcggaaggtattgctattatgaaatatgaactgtggcatatccctcctgccctgctgggtctttt

SEQ ID NO: 719208 - DNA, 75 bp, synthetic construct
  source 1..75: mol_type = other DNA
gccatgataacgacgaagacactgacactggtgaaaccaccgaaaccaccgaaaccaccgaaaccaccgaaacca

SEQ ID NO: 719209 - DNA, 75 bp, synthetic construct
  source 1..75: mol_type = other DNA
aaaacgttctgatagatgacgccaaaaacaccattagaaaggcgttagaggataattttggtcgtgattcatctt

SEQ ID NO: 719210 - DNA, 75 bp, synthetic construct
  source 1..75: mol_type = other DNA
cattcagtttattactacagagtgatgatgattctcagcaatgttatgcacaggtaaaagttaaagatatttggc

SEQ ID NO: 719211 - DNA, 75 bp, synthetic construct
  source 1..75: mol_type = other DNA
aagccgaagatgacactggggtgagttttgttcttttgtcaacaaaacctcttaccaatgcgaagatcaaaggtt

SEQ ID NO: 719212 - DNA, 75 bp, synthetic construct
  source 1..75: mol_type = other DNA
tattcggatcacagcttatttatattgcccgtacatttgcaagccgcggcctcactgagggacttatttcaacgg

SEQ ID NO: 719213 - DNA, 75 bp, synthetic construct
  source 1..75: mol_type = other DNA
atgggatgaacctcagccagaccgcgatcgcagacgccaaatcaggacccgctggtcactcacggatgacgtgat

SEQ ID NO: 719214 - DNA, 75 bp, synthetic construct
  source 1..75: mol_type = other DNA
ctctgtgattcacatgaatgtgattctcttggtattgaagaggctattaaacaatctgacttagatgaccttgat

SEQ ID NO: 719215 - DNA, 75 bp, synthetic construct
  source 1..75: mol_type = other DNA
ctgctggaaacggcgcacagccgggtggcgtggctgtctgacaccgctggcttgccggaaaaaaacgctgaaatt

SEQ ID NO: 719216 - DNA, 75 bp, synthetic construct
  source 1..75: mol_type = other DNA
gcccgccggatgaacagggctgcgacgatctgtttaaacatccgggcctgcttgatttcagccacacagtggaac

SEQ ID NO: 719217 - DNA, 75 bp, synthetic construct
  source 1..75: mol_type = other DNA
cagcttgatgcgtggctgatggagaacgcgctgccgtcagggtttgaggcggggtttgatgggatggtgattggg

SEQ ID NO: 719218 - DNA, 75 bp, synthetic construct
  source 1..75: mol_type = other DNA
ttgctcaaaagggtaatttgttgcagggttttgacggtgatgcaaccgacaacatcacccttgctgactcaaata

SEQ ID NO: 719219 - DNA, 75 bp, synthetic construct
  source 1..75: mol_type = other DNA
gacaactctggatcaagatgttgttattagcaatacagcagaccaacagattacagccgtaacaattaatgcggc

SEQ ID NO: 719220 - DNA, 75 bp, synthetic construct
  source 1..75: mol_type = other DNA
tggcgtggctgtctgacaccgcaggcctgccggaaaaaacgctgaaatttttacgcaataatcagccgcaggtaa

SEQ ID NO: 719221 - DNA, 75 bp, synthetic construct
  source 1..75: mol_type = other DNA
tgtggcggtgaagcggctgcgcggcaaaatcgacaacgactttgagccgaagctaattcagaccgtgcgcggcgt

SEQ ID NO: 719222 - DNA, 75 bp, synthetic construct
  source 1..75: mol_type = other DNA
ttgaccagtaaagaatttactctgctggagtttttccttcgccatcagggcgaagtgctgccccgctcgcttatc

SEQ ID NO: 719223 - DNA, 75 bp, synthetic construct
  source 1..75: mol_type = other DNA
aacatttcatattatgctatccgtcttataacacgatcacattacagtctcacatcctgcgccacggaatccgaa

SEQ ID NO: 719224 - DNA, 75 bp, synthetic construct
  source 1..75: mol_type = other DNA
ggtgattctgacccatatcagccaccagtttgatgcgtggctgatggaaaacgcactaccgtcagggtttgaggt

SEQ ID NO: 719225 - DNA, 75 bp, synthetic construct
  source 1..75: mol_type = other DNA
ggctaaagctggttggacccccgttcttggcgacaacctcacccatgaataccagggttttcttctgatacagca

SEQ ID NO: 719226 - DNA, 75 bp, synthetic construct
  source 1..75: mol_type = other DNA
atctggtcttcgtagaagcttccagcgccagaaaagcagaagaaatgctggcgctcttacgtaaatcacttggca

SEQ ID NO: 719227 - DNA, 75 bp, synthetic construct
  source 1..75: mol_type = other DNA
taataataaacaaacaatttatgcctctgcttcggcacaaggcgcaggttcagcaacgcaaaatttaaattttgt

SEQ ID NO: 719228 - DNA, 75 bp, synthetic construct
  source 1..75: mol_type = other DNA
tggttcggtggtggcaaactacgatgttgatcgccatgaagatgctgataaagccaatcaggcactgaaagatgc

SEQ ID NO: 719229 - DNA, 75 bp, synthetic construct
  source 1..75: mol_type = other DNA
gaacactggagatttggtaactatcgggccgttgaccggcacagtggaacggatgtcgattcgctccgtgggcgt

SEQ ID NO: 719230 - DNA, 75 bp, synthetic construct
  source 1..75: mol_type = other DNA
cagaagggagatcgtgaaggtgttcgcgtctttttaaatgaggcaaagaccgaagtattaaatcagcgttatttc

SEQ ID NO: 719231 - DNA, 75 bp, synthetic construct
  source 1..75: mol_type = other DNA
cttttctttcacaccaagaaagaaacaaactcaggatgacaagaagcaaaaaattaaaccgaagatgtattttgc

SEQ ID NO: 719232 - DNA, 75 bp, synthetic construct
  source 1..75: mol_type = other DNA
ttatggtagataaacgagttgcacaattccctaaaacattaaagccaattgaccgcttggtatatttcactatgc

SEQ ID NO: 719233 - DNA, 75 bp, synthetic construct
  source 1..75: mol_type = other DNA
cttgacgggatgggcggcatgctgcgcgaacagatcagccgtattaaggcgtgcgacattgtggtgtcgatcagt

SEQ ID NO: 719234 - DNA, 75 bp, synthetic construct
  source 1..75: mol_type = other DNA
tactgggaaggtaatgcttatactttcaatagcggcgataaagcgggtagtaatctggatataaatctttccgat

SEQ ID NO: 719235 - DNA, 75 bp, synthetic construct
  source 1..75: mol_type = other DNA
ttgccggaatcccaacagaagaatctggcagaattgaaacgatcttttcttgatcctgcattaaagcagataaac

SEQ ID NO: 719236 - DNA, 75 bp, synthetic construct
  source 1..75: mol_type = other DNA
gaagaacttggcagagttgaaacgatctttccttgatcctgcactcaagcagataaatgagaaaacacctttact

SEQ ID NO: 719237 - DNA, 75 bp, synthetic construct
  source 1..75: mol_type = other DNA
agcgccctgcctccattgagccagtgaaggagcaatttgttgccaaaagcgcgtcggcgcgcaatctggctgact

SEQ ID NO: 719238 - DNA, 75 bp, synthetic construct
  source 1..75: mol_type = other DNA
agttactgccgggaataagacgggaattcatacagtcaacctgaatattaaggatggctcagtaattggggcggc

SEQ ID NO: 719239 - DNA, 75 bp, synthetic construct
  source 1..75: mol_type = other DNA
caggggcaggaaatgccagtgtatctctgcaaaacgagtctgtctggaatgttacgggatcctcaactgttgatg

SEQ ID NO: 719240 - DNA, 75 bp, synthetic construct
  source 1..75: mol_type = other DNA
aaaggctataagaaagcacaaagtgaagtagataagattgctcaacagaaagcgaaaaacgaaaaacaaaatcaa

SEQ ID NO: 719241 - DNA, 75 bp, synthetic construct
  source 1..75: mol_type = other DNA
tatgcacctgttaagggtagcgggagtattggcggtggtgctgcggctgttatgctgggtggcttaggcgctggc

SEQ ID NO: 719242 - DNA, 75 bp, synthetic construct
  source 1..75: mol_type = other DNA
gatccgctaaagaagttgaacaatcagcccgtgaacaaaaagaatcaggacgatgggtaacacaggcacaacagg

SEQ ID NO: 719243 - DNA, 75 bp, synthetic construct
  source 1..75: mol_type = other DNA
ttacagaatgggcgtataaaaacggcgttgactctatgatgggtgatcaaggggctagaaaatacctggatcaga

SEQ ID NO: 719244 - DNA, 75 bp, synthetic construct
  source 1..75: mol_type = other DNA
aaaatgtcagtcagtgaagcaccgataaccaatctcaaacagggtgctttaaataatcttgcaatgacaactccg

SEQ ID NO: 719245 - DNA, 75 bp, synthetic construct
  source 1..75: mol_type = other DNA
tgaaagatgtgcgtgaacgtgcaaccaaatcttatgatgaagctgaatatgtagttgataagaaaacaggccgag

SEQ ID NO: 719246 - DNA, 75 bp, synthetic construct
  source 1..75: mol_type = other DNA
gtgaaacatctgacagaaatggtgaggcagcacaaagcgggcaaaacaaatggaatttatgccgtttgttttgcc

SEQ ID NO: 719247 - DNA, 75 bp, synthetic construct
  source 1..75: mol_type = other DNA
tggtgaactatccggcaatgcttctacagctgcaaaattaaaaactgccaggaaaataagcaatgtggcttttga

SEQ ID NO: 719248 - DNA, 75 bp, synthetic construct
  source 1..75: mol_type = other DNA
attcaatttcaatgagtcccgttggcgggcctatctggaatttatcggtggcaattgtcgctggatgctggagga

SEQ ID NO: 719249 - DNA, 75 bp, synthetic construct
  source 1..75: mol_type = other DNA
gcattagcgcattgcaccgtctttctgtagcggaacaatataaagctattgcacaggctagagaaattgccctcc

SEQ ID NO: 719250 - DNA, 75 bp, synthetic construct
  source 1..75: mol_type = other DNA
tacaccaagcgcagacaatatgatcgccacctggttacgccagtattcagattatgatggcggcttctggaatta

SEQ ID NO: 719251 - DNA, 75 bp, synthetic construct
  source 1..75: mol_type = other DNA
tataacatgtgtattccaggtaattattttgagtcagaggtcagtgccgatgctgccggaattattgcaacgttg

SEQ ID NO: 719252 - DNA, 75 bp, synthetic construct
  source 1..75: mol_type = other DNA
tgtagctgaacaatataaagctattgcacaggctagagaaattgccctccaatatgaaagaggcgctattagtct

SEQ ID NO: 719253 - DNA, 75 bp, synthetic construct
  source 1..75: mol_type = other DNA
attatgcttgagggagaggtggacggcgtgaaggttgttgcatggtcctgtaataatccggtttctttcaggggg

SEQ ID NO: 719254 - DNA, 75 bp, synthetic construct
  source 1..75: mol_type = other DNA
gcagccggtgctggactatgtcagtcaggtatttccttatcttatcctgacgttaccggaagggataggtttacc

SEQ ID NO: 719255 - DNA, 75 bp, synthetic construct
  source 1..75: mol_type = other DNA
gatagcttttcgcagcgtgaccgccaggcattcgcagcagaactggaaaagtggtggctggaagtgcaacgtagt

SEQ ID NO: 719256 - DNA, 75 bp, synthetic construct
  source 1..75: mol_type = other DNA
cgagtcactgcgttctgcgatgcgtgattcaaagggactcgggaattttaaaaacctgtttttctacgcaccgaa

SEQ ID NO: 719257 - DNA, 75 bp, synthetic construct
  source 1..75: mol_type = other DNA
gtctttcaaaggatgcaaaaatctttgcagcggaacaccgtcattatgctgaccctgatacagggcgtacctgtg

SEQ ID NO: 719258 - DNA, 75 bp, synthetic construct
  source 1..75: mol_type = other DNA
ttaccaatatttacgggattaatcatgatgaaatcattaaatatgcggaaaagaaaaaactgcttaaagacggaa

SEQ ID NO: 719259 - DNA, 75 bp, synthetic construct
  source 1..75: mol_type = other DNA
tgacgttctggcctggcctgctgccagccaactgtctattttgcgcgacgacccgcgtttgcgtttaacgctgcg

SEQ ID NO: 719260 - DNA, 75 bp, synthetic construct
  source 1..75: mol_type = other DNA
tccagggatgaatgtcgcctatctggcatttaacaccgctaaaccgccgctaaataatcccgctgtccgccatgc

SEQ ID NO: 719261 - DNA, 75 bp, synthetic construct
  source 1..75: mol_type = other DNA
tgtcatcgccgttgactggagtggatacccctctcaggagtatcacgtactccgcgccagcctgatttgcgatgg

SEQ ID NO: 719262 - DNA, 75 bp, synthetic construct
  source 1..75: mol_type = other DNA
caagcgcgcgttaattttgagtctgaccaatccgaaagccattttgttctatgtgtcgtttttcgtacagtttat

SEQ ID NO: 719263 - DNA, 75 bp, synthetic construct
  source 1..75: mol_type = other DNA
caaaattctctacgcgaccctgaaggggaaaaatagcgaggctaaatccgatgagccacaatacggggccatctt

SEQ ID NO: 719264 - DNA, 75 bp, synthetic construct
  source 1..75: mol_type = other DNA
cgcctgatgcaatctatctattacggtacggctgaaacggcggcctctattttaccgcgcgcctcgtgggcttat

SEQ ID NO: 719265 - DNA, 75 bp, synthetic construct
  source 1..75: mol_type = other DNA
atcggctgacgccgacacccaacaacctgccgaccagagaataaattatcaggtgatactcgatacctatcacga

SEQ ID NO: 719266 - DNA, 75 bp, synthetic construct
  source 1..75: mol_type = other DNA
gggcaactggatgcattaacaaagcagcttcagcgcgatgagaacgaagcgcaaagcatccggcaagatgagcaa

SEQ ID NO: 719267 - DNA, 75 bp, synthetic construct
  source 1..75: mol_type = other DNA
gccgcacttaacgaaatgcgccagcgttataaagaaaagacgcagcaacttgccgatgtgaaaaccatttgcgag

SEQ ID NO: 719268 - DNA, 75 bp, synthetic construct
  source 1..75: mol_type = other DNA
agcgatgaaagagcgtattccggtgcagatcaaagtgaagaagatcaacggactaggctacagcaagctggaaaa

SEQ ID NO: 719269 - DNA, 75 bp, synthetic construct
  source 1..75: mol_type = other DNA
gcacaaataaaagaatgcaggataatatatctgaatttctgggggtgtatggaataaatcactcagtatatatgg

SEQ ID NO: 719270 - DNA, 75 bp, synthetic construct
  source 1..75: mol_type = other DNA
cactgatcggctctaaagaaggcgataaattccgtaagttcgcccagggactaacgctggacaatctggtccacc

SEQ ID NO: 719271 - DNA, 75 bp, synthetic construct
  source 1..75: mol_type = other DNA
agggcagcatctttgccaaccagcaagagttcgttgcggcactaatggatgaacagaagctgacccaactggagc

SEQ ID NO: 719272 - DNA, 75 bp, synthetic construct
  source 1..75: mol_type = other DNA
caggcgggtcagccttgtccactttgtggttccaccagccacccggcggtcgaggcgtatcaggcgctggagcct

SEQ ID NO: 719273 - DNA, 75 bp, synthetic construct
  source 1..75: mol_type = other DNA
gagaagctgcaagcgcaggccagcggcgtcgcgttgctcacgccggaacaagtgcaatcgctgacagcgagtttg

SEQ ID NO: 719274 - DNA, 75 bp, synthetic construct
  source 1..75: mol_type = other DNA
gttccttgatgaaggttttggcacgctggatagcgaaacgctggataccgcccttgatgcgctggatgccctgaa

SEQ ID NO: 719275 - DNA, 75 bp, synthetic construct
  source 1..75: mol_type = other DNA
caggcgggtcagccttgcccactttgtggttccaccagccacccggcggtcgaggcgtatcaggcgctggaaccg

SEQ ID NO: 719276 - DNA, 75 bp, synthetic construct
  source 1..75: mol_type = other DNA
ccatcagcaactctctacggcattagcggattacgcgctggcattgccgaaggaagatgaagaagagagctggtt

SEQ ID NO: 719277 - DNA, 75 bp, synthetic construct
  source 1..75: mol_type = other DNA
ccgtgcattctggagccagaatcgggcgcgtaaccagccggacggtaatttgcaggtgccacgcgtagagctggc

SEQ ID NO: 719278 - DNA, 75 bp, synthetic construct
  source 1..75: mol_type = other DNA
attttattattaaaagactcgaaaaaaagtatggttctgaattgataaaatctgaatacatgaaaattttaaatt

SEQ ID NO: 719279 - DNA, 75 bp, synthetic construct
  source 1..75: mol_type = other DNA
caggtggtcaggtaacattatttgatgaggaagatgacgaggttggtaaatggcatcttgagcaatacgtcgagg

SEQ ID NO: 719280 - DNA, 75 bp, synthetic construct
  source 1..75: mol_type = other DNA
ctggtggccaggtaacattatttgacgaggaagatgatgaggtgggtcaatggcatcttgaacaatatgtcgagg

SEQ ID NO: 719281 - DNA, 75 bp, synthetic construct
  source 1..75: mol_type = other DNA
aagatttaaaaggcggcgaaaagatccgaacgtggtatgggtataaatttatcatagctgccttttcttttgggc

SEQ ID NO: 719282 - DNA, 75 bp, synthetic construct
  source 1..75: mol_type = other DNA
gagtagctccgacaagaatgcgaaggctcaacttcctaaagaagtgcttgactatataaatgatcctcgcaatga

SEQ ID NO: 719283 - DNA, 75 bp, synthetic construct
  source 1..75: mol_type = other DNA
ttgttaatgtgagtgcgagttcttcgacatcgacgatctatgacttaggtaatatgtcgaaggatgaggtggtta

SEQ ID NO: 719284 - DNA, 75 bp, synthetic construct
  source 1..75: mol_type = other DNA
tccagcctgctggcctttgattttgcgggtgttcatcacagcgatatggtgacactgctggcggagtacggtatt

SEQ ID NO: 719285 - DNA, 75 bp, synthetic construct
  source 1..75: mol_type = other DNA
cacctgcccggacgcatcaccaccctgtatccgtcagagcccctgaccgtcacgccactggcggcatggggcgct

SEQ ID NO: 719286 - DNA, 75 bp, synthetic construct
  source 1..75: mol_type = other DNA
ggtggtgctggaccccagggcactgcagggaaactttgtgaccgccacgttccagcaccgctggctgggacctgc

SEQ ID NO: 719287 - DNA, 75 bp, synthetic construct
  source 1..75: mol_type = other DNA
ctgtatgtggtgacggcaggccgcccggagaaggcctttgtggcagagcctgtggcaccgcgcaggacgggcggg

SEQ ID NO: 719288 - DNA, 75 bp, synthetic construct
  source 1..75: mol_type = other DNA
taagcgcgcgttaattttgagcctgactaatccgaaagccattttgttctatgtgtcggtaatggtgccaactta

SEQ ID NO: 719289 - DNA, 75 bp, synthetic construct
  source 1..75: mol_type = other DNA
atcaagtattcttaatctttctgtttctgacagtttattccccggggtacgccttgatgcacctggtctctgatc

SEQ ID NO: 719290 - DNA, 75 bp, synthetic construct
  source 1..75: mol_type = other DNA
ccgggctgatggcgctgtccttcgccctgctgcccctggcgacgctggtatcacgtcctgccagcgcagatgagc

SEQ ID NO: 719291 - DNA, 75 bp, synthetic construct
  source 1..75: mol_type = other DNA
tggttccgcgactttccagctttaattcagcttatccgggaattgacgttcgaatccaggcggttgatcgtcagg

SEQ ID NO: 719292 - DNA, 75 bp, synthetic construct
  source 1..75: mol_type = other DNA
atttcgcttgccggaacgcttcagaaggaagttgaaggtggtactgtctgcctgccagaagttgcgcttttcgca

SEQ ID NO: 719293 - DNA, 75 bp, synthetic construct
  source 1..75: mol_type = other DNA
tagcttcatggctcggctggttgaaatggaaaaggaactcagtgaggcaaagcaggcggtcattctcaacgcacc

SEQ ID NO: 719294 - DNA, 75 bp, synthetic construct
  source 1..75: mol_type = other DNA
tggaattcttcattcgccatcagggagaagttcttccccgctccctgattgcctctcaggtctgggacatgaatt

SEQ ID NO: 719295 - DNA, 75 bp, synthetic construct
  source 1..75: mol_type = other DNA
atgtcaaaacgattaccaccgctaaatgccttacgagtttttgatgccgccgcacgccatttaagcttcacgcgc

SEQ ID NO: 719296 - DNA, 75 bp, synthetic construct
  source 1..75: mol_type = other DNA
agggagtcgcgctggcgaataacgtgatggcgcagtccgaaatcgaggccggacgccttgtctgcccgtttaatg

SEQ ID NO: 719297 - DNA, 75 bp, synthetic construct
  source 1..75: mol_type = other DNA
ggacaggattcgggaaataaacggctggctcggtcaggaaatcatccgctttaaaaactactcactggacactga

SEQ ID NO: 719298 - DNA, 75 bp, synthetic construct
  source 1..75: mol_type = other DNA
ggacagaattcgggaaataaacggctggctcggccaggaggtcatccgctttaaaaactattcactggagactga

SEQ ID NO: 719299 - DNA, 75 bp, synthetic construct
  source 1..75: mol_type = other DNA
atttacgtcaaacgtaatattctggcctcaacgtttatcccgcacccgtggctttcccagcaggatttcagccgc

SEQ ID NO: 719300 - DNA, 75 bp, synthetic construct
  source 1..75: mol_type = other DNA
agtgaaggtattgtgtcgatgtttcgtgtggacccagagctggctggtccattgatggcgatggttactaccatg

SEQ ID NO: 719301 - DNA, 75 bp, synthetic construct
  source 1..75: mol_type = other DNA
agtgaaggcattgtgtcgatgtttcgtgtggacccggatctggctggtccattgatggcgatggtcaccaccatg

SEQ ID NO: 719302 - DNA, 75 bp, synthetic construct
  source 1..75: mol_type = other DNA
ttcgttgctttactcactggacaaacaccattgcacagcagaactgattccgccggatccagaaaacaccgcaca

SEQ ID NO: 719303 - DNA, 75 bp, synthetic construct
  source 1..75: mol_type = other DNA
caaacacgccaaaaggaagtactgcttatgatagagcgatcagacgggtatctgaaactcttacacctctaattc

SEQ ID NO: 719304 - DNA, 75 bp, synthetic construct
  source 1..75: mol_type = other DNA
cagcagctacagatttagcactacagggagccaccagccttgctggtggagaagatattgatccgttacaaacgg

SEQ ID NO: 719305 - DNA, 75 bp, synthetic construct
  source 1..75: mol_type = other DNA
acccagggacgtggtatttcagtacaccgcgccgattgcgaacaactggcggaactgcgctctcatgcgccggaa

SEQ ID NO: 719306 - DNA, 75 bp, synthetic construct
  source 1..75: mol_type = other DNA
aaaaattggcgggcgcattgtgccattcacctaccagttgcagatgggtgaccagattgaaattatcacccagaa

SEQ ID NO: 719307 - DNA, 75 bp, synthetic construct
  source 1..75: mol_type = other DNA
gctatgggggatacccctgtcgatctctcaaacacggtaaaagctatcgacaatcagattgccgtgttaagccgc

SEQ ID NO: 719308 - DNA, 75 bp, synthetic construct
  source 1..75: mol_type = other DNA
ttgatcgctcatggtctaaattcaatgacatgatgggaagaacgcgcgttcaaaaggcaatagccagcggcaagg

SEQ ID NO: 719309 - DNA, 75 bp, synthetic construct
  source 1..75: mol_type = other DNA
gctgcctatccactaccatcaacgaatgaaatagaccgatcccaatcagcaactcaaaatattcaacatacatca

SEQ ID NO: 719310 - DNA, 75 bp, synthetic construct
  source 1..75: mol_type = other DNA
ccatcagaacgttctcagctttacaggcttctggatgacaatggtaggcaaaacgcacgagcagctatagttcag

SEQ ID NO: 719311 - DNA, 75 bp, synthetic construct
  source 1..75: mol_type = other DNA
acagatttagcactacagggagccaccagccttgctggtggagaagatattgatccgttacaaacggtaatttct

SEQ ID NO: 719312 - DNA, 75 bp, synthetic construct
  source 1..75: mol_type = other DNA
gagcaatacacgtgtccaaaaagctattcagagtggtaaaacaacgccagaagatgtcactaaactagtattcag

SEQ ID NO: 719313 - DNA, 75 bp, synthetic construct
  source 1..75: mol_type = other DNA
ccggtgaaatggggtgctttatcgttgaaaaacaccttaaccgtttcatagagggcaaatgtgtcagtgatatca

SEQ ID NO: 719314 - DNA, 75 bp, synthetic construct
  source 1..75: mol_type = other DNA
ttgatccgattctgcttaatgagccggttccggtgaatggtcgtattcataaatcagtgcttgataaacccggtt

SEQ ID NO: 719315 - DNA, 75 bp, synthetic construct
  source 1..75: mol_type = other DNA
ggttcgtctgtttactcccaccatgcggtgatcaccttcaccaatacgccattcagcgaattcctgatgaccagt

SEQ ID NO: 719316 - DNA, 75 bp, synthetic construct
  source 1..75: mol_type = other DNA
gacaatctaatgagacttgtgaacagaacaccccagcataaggctgccatcaggcgtattgtgaattcgatgcct

SEQ ID NO: 719317 - DNA, 75 bp, synthetic construct
  source 1..75: mol_type = other DNA
ccaattgctgtttacgttgctggcaaccgcattgatcgtcccctatttcaagcgttcgtcccgggtcaaaacgac

SEQ ID NO: 719318 - DNA, 75 bp, synthetic construct
  source 1..75: mol_type = other DNA
ttggaggctggttgcttggcccgttggcctggcttttagtcgctctgttaagtacgacgctggcgttgttgctgt

SEQ ID NO: 719319 - DNA, 75 bp, synthetic construct
  source 1..75: mol_type = other DNA
ctgacgtaaccatcgaaaatggacgcgctgtcactacgtctattgcgatcgctgagttctttggtaaacgccacg

SEQ ID NO: 719320 - DNA, 75 bp, synthetic construct
  source 1..75: mol_type = other DNA
gtgctgccgtgcatcacagctcaccgatttacgtcaaacgtaatattctggcttcaacgtttatcccgcacccgt

SEQ ID NO: 719321 - DNA, 75 bp, synthetic construct
  source 1..75: mol_type = other DNA
ttgacgggctggcgcgcacctttcgcgccgccgtgcatcacagctcaccgattgcggtgaaatgcaatattctga

SEQ ID NO: 719322 - DNA, 75 bp, synthetic construct
  source 1..75: mol_type = other DNA
actccgcagcgttatcttctcctcaaacatttaaaacgctcagcgaacaatccctgacaacgcaaatctcatggg

SEQ ID NO: 719323 - DNA, 75 bp, synthetic construct
  source 1..75: mol_type = other DNA
ggcctgcccggctatctttctgccattccatccgccctgctcaacgaatccgccacgctgttccgccgtaagtat

SEQ ID NO: 719324 - DNA, 75 bp, synthetic construct
  source 1..75: mol_type = other DNA
tgtacatgaccgacgccgcgcagaaccaggaggatgtaaacaacctccgtaacgcgatgaaaagcgccaaaggtc

SEQ ID NO: 719325 - DNA, 75 bp, synthetic construct
  source 1..75: mol_type = other DNA
agacatcaattttggtacaccagcccaacggcggtactcgcaaacttccttgctaccacatcacccgcgacggct

SEQ ID NO: 719326 - DNA, 75 bp, synthetic construct
  source 1..75: mol_type = other DNA
gcaaaaaaaatgaccgccagcgccccgaaaatggaggcattcacctttggtgagccggtgccggtactcgaccgc

SEQ ID NO: 719327 - DNA, 75 bp, synthetic construct
  source 1..75: mol_type = other DNA
aaggacggacttcagattatcccgttgtcagaagtcgcagcgaaggatgagtttctgaatatcaagaacgtgagc

SEQ ID NO: 719328 - DNA, 75 bp, synthetic construct
  source 1..75: mol_type = other DNA
gtaacgcctacctggagaaacgcacaaaccgattcggtgaagttatcgctcttgagcctgcgctggcaaaataca

SEQ ID NO: 719329 - DNA, 75 bp, synthetic construct
  source 1..75: mol_type = other DNA
cgaaatacacgcggcgtggtattgaggatgatgtctactggtgggtgccgtcattcgaccagccgcacccgttcg

SEQ ID NO: 719330 - DNA, 75 bp, synthetic construct
  source 1..75: mol_type = other DNA
ctacccgcatgagtgctttagtcctttgtggaaattcaggcgtgattttgttgagtgtgaaggaccaccagcata

SEQ ID NO: 719331 - DNA, 75 bp, synthetic construct
  source 1..75: mol_type = other DNA
taaaaaccaaacttcagccgaagcattcagcttcggtgatcccgttcctgttctggaccgccgcgaactgctgga

SEQ ID NO: 719332 - DNA, 75 bp, synthetic construct
  source 1..75: mol_type = other DNA
aaggccctggcaacttccgcaacctgtttatgtactcacctaatggtaaaaaagacggacttcagattatcccat

SEQ ID NO: 719333 - DNA, 75 bp, synthetic construct
  source 1..75: mol_type = other DNA
atgacatatagcaaatatctaaataatcccctcgatgaacgctatttgatagaaccgggggaatacgtagaagaa

SEQ ID NO: 719334 - DNA, 75 bp, synthetic construct
  source 1..75: mol_type = other DNA
gaaaacatggtgaaatcgaaaggccgcaacaactttaaaaacctgtttctctatgccccgcagggaaaagccgac

SEQ ID NO: 719335 - DNA, 75 bp, synthetic construct
  source 1..75: mol_type = other DNA
gtaacgcttacctggagaaacgcacgaaccgcttcggtgaagttatcgcccttgaacctgcgctggcaaaataca

SEQ ID NO: 719336 - DNA, 75 bp, synthetic construct
  source 1..75: mol_type = other DNA
ggtgagcgccgctgacctgctcgatgcgcaccgcgtgccgttccagttgatggggggcaagcctgaaaacatcgc

SEQ ID NO: 719337 - DNA, 75 bp, synthetic construct
  source 1..75: mol_type = other DNA
gattcaaagggactcgggaattttaaaaacctgtttttctacgcaccgaacgggaaaccggatggtatcaagatt

SEQ ID NO: 719338 - DNA, 75 bp, synthetic construct
  source 1..75: mol_type = other DNA
tattaccagaacggagctcatgcgggttacatcatgtatgtgacggatgccgcgcaaagcggtaccgatgttgag

SEQ ID NO: 719339 - DNA, 75 bp, synthetic construct
  source 1..75: mol_type = other DNA
ggagaatgtcgggtcactaggagatattgaaaaagtggcaaaggtctttgtccgcaatgaactcattccattaca

SEQ ID NO: 719340 - DNA, 75 bp, synthetic construct
  source 1..75: mol_type = other DNA
tattaatcaggagctgtacggtctgccggaatatctcagcgcccttaactctgcctggctgaatgagtcggccac

SEQ ID NO: 719341 - DNA, 75 bp, synthetic construct
  source 1..75: mol_type = other DNA
gcaaagcagcaccgacgtcgaggcactgcgaaaggcgatgcgcgactcaaaaggactcggcaattttaagaatct

SEQ ID NO: 719342 - DNA, 75 bp, synthetic construct
  source 1..75: mol_type = other DNA
gaatgaaggtgccgatccctcgcgttttctgtttgttctcagccatgccgatcgcgtgtttcctgccggagagtg

SEQ ID NO: 719343 - DNA, 75 bp, synthetic construct
  source 1..75: mol_type = other DNA
atgtcattcagccattcttccctctcctcgcaagtgaaatcagatctgacgtttcttcctgaagaaattcgccag

SEQ ID NO: 719344 - DNA, 75 bp, synthetic construct
  source 1..75: mol_type = other DNA
atgtcattcagccattcttccctctcctcgcaagtcaaatcacatctgacgtttcttcctgaagaaattcgccag

SEQ ID NO: 719345 - DNA, 75 bp, synthetic construct
  source 1..75: mol_type = other DNA
gatccacgcgctgccaccacaggcaaccagcgcagtttattcacatatcaggggggaaaaccgctctgaacaggc

SEQ ID NO: 719346 - DNA, 75 bp, synthetic construct
  source 1..75: mol_type = other DNA
gttcccttcatcatttccggtactccctgtagccgcacctgcaggctggaaccttccagcgctggtgtcactgat

SEQ ID NO: 719347 - DNA, 75 bp, synthetic construct
  source 1..75: mol_type = other DNA
gacgacgccgttgcccggttcagttttccggcctggatgttacagcttctgcgtaaagcccgggaccgcattatc

SEQ ID NO: 719348 - DNA, 75 bp, synthetic construct
  source 1..75: mol_type = other DNA
atgtcattcagccattcttccctctcctcacaagtaaaatcagatctgacgtttcttcctgaagaaattcgccag

SEQ ID NO: 719349 - DNA, 75 bp, synthetic construct
  source 1..75: mol_type = other DNA
ctgacgtttcttcctgaagaaattcgccagaaaatccttgaacatctccgcagcgttattcattacgaacccgtg

SEQ ID NO: 719350 - DNA, 75 bp, synthetic construct
  source 1..75: mol_type = other DNA
cgtatgccggcttctgcttgaaaaaaaaaactttacccttcagacactattatctagactactcatagctcaaac

SEQ ID NO: 719351 - DNA, 75 bp, synthetic construct
  source 1..75: mol_type = other DNA
atgtcattcagccattcttccctctcctcgcaagttaaatcatatctgacgtttcttcctgaagaaattcgccag

SEQ ID NO: 719352 - DNA, 75 bp, synthetic construct
  source 1..75: mol_type = other DNA
atgtcattcagccattcttccctctcctcgcaagtaaaatcaaatctgacgtttcttcctgaagaaattcgccag

SEQ ID NO: 719353 - DNA, 75 bp, synthetic construct
  source 1..75: mol_type = other DNA
atgtcattcagccattcttccctctcctcccaagtcaaatcagatctgacgtttcttcctgaagaaattcgccag

SEQ ID NO: 719354 - DNA, 75 bp, synthetic construct
  source 1..75: mol_type = other DNA
atgtcattcagccattcttccctctctgcacaagtgaaatcatatctgacgtttcttcctgaagaaatacgccag

SEQ ID NO: 719355 - DNA, 75 bp, synthetic construct
  source 1..75: mol_type = other DNA
accgtaaaaatcagttttccggcagtcagccagttacagacccggctcgcagtaaaaacaaatctgagcgcgctt

SEQ ID NO: 719356 - DNA, 75 bp, synthetic construct
  source 1..75: mol_type = other DNA
tgcccgcctggaggatgaaggtttcactgtaaaaatcagttttccggcagtcagccagttacagaccaggatcgc

SEQ ID NO: 719357 - DNA, 75 bp, synthetic construct
  source 1..75: mol_type = other DNA
ggtcgcatgaaaaaagattacgtctgtaaagacagcgaactggcaactgaaggggcgacagacctgtgggaaggc

SEQ ID NO: 719358 - DNA, 75 bp, synthetic construct
  source 1..75: mol_type = other DNA
gctacagcaaagcattcagtcactgcagtcgcatatcaccagcctgcttgcggatatccgggaaatcgcggactg

SEQ ID NO: 719359 - DNA, 75 bp, synthetic construct
  source 1..75: mol_type = other DNA
caggaaggctttcagccgttctttgcctgccagacccgcgtgcgcgaccagagccgccgggaatacacaaaacac

SEQ ID NO: 719360 - DNA, 75 bp, synthetic construct
  source 1..75: mol_type = other DNA
ctgaaaaggattgaggagctggagggcgaacaaatcaaaactgcccgcagggagatggtgctggctgttgtcggc

SEQ ID NO: 719361 - DNA, 75 bp, synthetic construct
  source 1..75: mol_type = other DNA
gacccggctcgcggtaaaaacaaatctgagtgcgcttatggaggaaagaacggagaccgtcacccgtcgccgtcg

SEQ ID NO: 719362 - DNA, 75 bp, synthetic construct
  source 1..75: mol_type = other DNA
cgcgttttctgtttgttctcagccatgccgatcgcgtgtttcctgctgaagaatggaacgacacagaaaaatgcc

SEQ ID NO: 719363 - DNA, 75 bp, synthetic construct
  source 1..75: mol_type = other DNA
cggtgacagcccgggtggcaaccctgttcccttcatcatttccggtactctccgttgccgcacctgtcggctgga

SEQ ID NO: 719364 - DNA, 75 bp, synthetic construct
  source 1..75: mol_type = other DNA
tatgccttagcgatgggtttcagctttacggtaatgtatctgagcgcagcggtagcgtttattgtttgcggtgtg

SEQ ID NO: 719365 - DNA, 75 bp, synthetic construct
  source 1..75: mol_type = other DNA
cccgggccatcattcatggaaacgagactttgatccggacagccccgagataaaattcagtgatcgcagggaagc

SEQ ID NO: 719366 - DNA, 75 bp, synthetic construct
  source 1..75: mol_type = other DNA
ctcattcagagctctgaagatcataaacgcgatcagcaggcacaggagcagcttacggagcgtcttcaggcatta

SEQ ID NO: 719367 - DNA, 75 bp, synthetic construct
  source 1..75: mol_type = other DNA
aggtcgtggagcagacgaatgccatcgttaaatccatagcaggtaaagatgtcccgaaagacgcactgcgggaat

SEQ ID NO: 719368 - DNA, 75 bp, synthetic construct
  source 1..75: mol_type = other DNA
cccgtgaagtgatcgccgccgtgaaggacaaactggaaacgctgaaaagtagtctgccggaaggcgtggagatag

SEQ ID NO: 719369 - DNA, 75 bp, synthetic construct
  source 1..75: mol_type = other DNA
ggtcactttactacgccaatgatgcaacttcaggatccgcaacgcaccaaagtgctgctggttacgctgcctgaa

SEQ ID NO: 719370 - DNA, 75 bp, synthetic construct
  source 1..75: mol_type = other DNA
ggtcaggttttcgatcaggctatcggtaacaccattcgccctgtgacggcagttcctggactttccgctctggag

SEQ ID NO: 719371 - DNA, 75 bp, synthetic construct
  source 1..75: mol_type = other DNA
atgattgaatggattatccggcgctctgtcgccaaccgtttcctggtcatgatgggcgcactgtttctcagcatc

SEQ ID NO: 719372 - DNA, 75 bp, synthetic construct
  source 1..75: mol_type = other DNA
tgtgtatgtcattttcgaagatggtaccgatccgtactgggcgcgttcgcgggtgctggaatacctcaaccaggt

SEQ ID NO: 719373 - DNA, 75 bp, synthetic construct
  source 1..75: mol_type = other DNA
gctggaaggtgggcgctatatcaacgttgagattaaccgtgaaaaagccgcacgttacggtatgacggtggcgga

SEQ ID NO: 719374 - DNA, 75 bp, synthetic construct
  source 1..75: mol_type = other DNA
atgaaattcttacagaatatcccgccttacctgttttttactggcaagggaggcgtaggaaaaacttccatttcc

SEQ ID NO: 719375 - DNA, 75 bp, synthetic construct
  source 1..75: mol_type = other DNA
agcagtatgctcacgcggtagaggcattatccgatcctgaaagtacccgcctggttctggttgcacgactgcaga

SEQ ID NO: 719376 - DNA, 75 bp, synthetic construct
  source 1..75: mol_type = other DNA
agatggtgcttcctgtcttggcccaatggccgggctggaaaagcagcgtgagcagtatgctcacgcggtagaggc

SEQ ID NO: 719377 - DNA, 75 bp, synthetic construct
  source 1..75: mol_type = other DNA
atgcgaccggggcttaccaccgagagattgcaaaaaaaatggggagtaaaggtcattttactaccccaatgatgc

SEQ ID NO: 719378 - DNA, 75 bp, synthetic construct
  source 1..75: mol_type = other DNA
cccgcttcgatcacatcatttttgatactgccccaacgggccacactattcgccttcttcagcttcccggagcct

SEQ ID NO: 719379 - DNA, 75 bp, synthetic construct
  source 1..75: mol_type = other DNA
atggcggggctggaaaagcaacgcgaacaatacgctcatgccgttgaagcattatccgatcctgaacgaactcgc

SEQ ID NO: 719380 - DNA, 75 bp, synthetic construct
  source 1..75: mol_type = other DNA
aagccatgaccgtggcggtgataattgcgggtctgctgcccatactctggggaaccggcgccggttcagaagtca

SEQ ID NO: 719381 - DNA, 75 bp, synthetic construct
  source 1..75: mol_type = other DNA
cgggcgggaaggtttagatgctttactggcaacttccgcgttaactgacgagctggccgtcttctttattgctga

SEQ ID NO: 719382 - DNA, 75 bp, synthetic construct
  source 1..75: mol_type = other DNA
accctttgttgtcgaagccacgccgctcgaagcagatgccttacgccgcgaactcgccaactacgatgttatttt

SEQ ID NO: 719383 - DNA, 75 bp, synthetic construct
  source 1..75: mol_type = other DNA
cattgaatttccgcgaaacagggctggaagagtttgttgagatggttactttttatgtcattaaccgtttacgtc

SEQ ID NO: 719384 - DNA, 75 bp, synthetic construct
  source 1..75: mol_type = other DNA
gcaacaacaagatcaaataggaacgctgacccaatcactcaccttagcgatcaataacattaaaaaaataactaa

SEQ ID NO: 719385 - DNA, 75 bp, synthetic construct
  source 1..75: mol_type = other DNA
agaatcgttcatccttataaattaactaatcagagaagtatatggtatttgctggctactgaagagaacaagtta

SEQ ID NO: 719386 - DNA, 75 bp, synthetic construct
  source 1..75: mol_type = other DNA
ctactgcgcctcatggcaccgcggctggtcgcgagggattagatgctttactcgcaacttccgctttaactgacg

SEQ ID NO: 719387 - DNA, 75 bp, synthetic construct
  source 1..75: mol_type = other DNA
gaagttgcatccgtaggcggcgtggttaagcagtatcagatccagcttgacccggtaaaactgacgcagtacggc

SEQ ID NO: 719388 - DNA, 75 bp, synthetic construct
  source 1..75: mol_type = other DNA
gcgtagtgtctgctctcgcagagcgactggaaggcgggcgctacattgatgtggatatcaaccgggaaaaagcct

SEQ ID NO: 719389 - DNA, 75 bp, synthetic construct
  source 1..75: mol_type = other DNA
ttcacgaaaacgtactccatggcgggagcggccgcgctggccatcattgtcattccgatcttgatgggattctgg

SEQ ID NO: 719390 - DNA, 75 bp, synthetic construct
  source 1..75: mol_type = other DNA
attaccgcgaagaacaggtgattgatgatataccgcagtggctgaaaagtacggtagaaaagatgcatgataaag

SEQ ID NO: 719391 - DNA, 75 bp, synthetic construct
  source 1..75: mol_type = other DNA
cccggggaacagattgataatgccacccgctggaaggttatcactgacgcctccgttgaagtgggtccagcgctg

SEQ ID NO: 719392 - DNA, 75 bp, synthetic construct
  source 1..75: mol_type = other DNA
tcttgaagagtttatcgttgttgctgtcgtttgcgcactgttcctctggcatgtccgttctgccctggtggcgat

SEQ ID NO: 719393 - DNA, 75 bp, synthetic construct
  source 1..75: mol_type = other DNA
cttcatgttaatgcaacttattatctattttgcttttttaactctggggactaaattaaatgtgtataggttatt

SEQ ID NO: 719394 - DNA, 75 bp, synthetic construct
  source 1..75: mol_type = other DNA
tttgagtaatctaaacatcacgctaactccatgggttgagtatttctggaaagggatggcttttatgttgctttt

SEQ ID NO: 719395 - DNA, 75 bp, synthetic construct
  source 1..75: mol_type = other DNA
ggtattcttctttatgcattagtggaagaaaatcgcattacagaatatatggggtattttgttaagttcagtaat

SEQ ID NO: 719396 - DNA, 75 bp, synthetic construct
  source 1..75: mol_type = other DNA
cgtcgccggattttctacggcgggctgcgttgtgggggatggctttgccggaaccagaatttacacctgctgaac

SEQ ID NO: 719397 - DNA, 75 bp, synthetic construct
  source 1..75: mol_type = other DNA
tcgggcagcacgtgagcagtgggaacgtgaaaacggatttatcagcgacggaaacggcctggaagctgtgggaac

SEQ ID NO: 719398 - DNA, 75 bp, synthetic construct
  source 1..75: mol_type = other DNA
cttgctgatatgtgcggtgccgatttgtgtgcatacccgtctgtatctgcactggcagaagtaacggaactgaac

SEQ ID NO: 719399 - DNA, 75 bp, synthetic construct
  source 1..75: mol_type = other DNA
aactaataaagatacagatctaaaagaattaaaccccacacataacgtgcgtgaacgcgagagtattccgaccag

SEQ ID NO: 719400 - DNA, 75 bp, synthetic construct
  source 1..75: mol_type = other DNA
atgagtgaacagaaattaatagctgaatcccgcacttttgagcagcaaatgattgagcgggataaacgcgccaca

SEQ ID NO: 719401 - DNA, 75 bp, synthetic construct
  source 1..75: mol_type = other DNA
tcagatgttgagcgggaaataaacccgttcggattcaccgtaacaaactggcagactgaccgcgaaatcagggga

SEQ ID NO: 719402 - DNA, 75 bp, synthetic construct
  source 1..75: mol_type = other DNA
aaaggttctgacaggagagatgcatattccattgagaatgtctcagaatataaagtgcctggatggctgaaataa

SEQ ID NO: 719403 - DNA, 75 bp, synthetic construct
  source 1..75: mol_type = other DNA
tgctgccggaactgtctgctgaagcaaacccgttccgtaatcgtctggcagaatctgaagccagcaacgatcagg

SEQ ID NO: 719404 - DNA, 75 bp, synthetic construct
  source 1..75: mol_type = other DNA
aggtgtattcgaaccgctggactcagaagaacggggccgcaccttcgaagctctggattgcccagattggtgcga

SEQ ID NO: 719405 - DNA, 75 bp, synthetic construct
  source 1..75: mol_type = other DNA
cttattgctttgtcgcttcgcaggtataccggaccaataacgcttttctcacctatgtggaaacagtgatttctt

SEQ ID NO: 719406 - DNA, 75 bp, synthetic construct
  source 1..75: mol_type = other DNA
ggaatatcgtttagcagaaaccctgcgcgcacagcttagcgccacgcgtgaacgtttcggtaatgcagtaacaca

SEQ ID NO: 719407 - DNA, 75 bp, synthetic construct
  source 1..75: mol_type = other DNA
cgatggactattatctcgccaatcgcacgcggcgctttacgcagatccatcaccgattacagcaacagcatccgc

SEQ ID NO: 719408 - DNA, 75 bp, synthetic construct
  source 1..75: mol_type = other DNA
aacgcttcggcaatgcagtaacacatcttgaagccgtcagccctctgtccacactggcgcgtggttatagcgtga

SEQ ID NO: 719409 - DNA, 75 bp, synthetic construct
  source 1..75: mol_type = other DNA
acatcacatggctgggtattcgtgcagacgaaccccgtaggctgaaaccgaaatcgggcgtccggtatcttgccg

SEQ ID NO: 719410 - DNA, 75 bp, synthetic construct
  source 1..75: mol_type = other DNA
atgcttcagtggttgataacgtgccggtacacgtagcgctgcgtccggaaaaaatcatgctttgcgaagagccgc

SEQ ID NO: 719411 - DNA, 75 bp, synthetic construct
  source 1..75: mol_type = other DNA
gagatggtgtggtgattagtgaagtcagcgccgtaacaaaaacccgcaaatcacgtaaaaaaacgtctaatccgt

SEQ ID NO: 719412 - DNA, 75 bp, synthetic construct
  source 1..75: mol_type = other DNA
tttgccaaaaaacaactggaaatgaccaactattcagtgacggatattgcgtttgaggccggttatagtagcccg

SEQ ID NO: 719413 - DNA, 75 bp, synthetic construct
  source 1..75: mol_type = other DNA
tgtggggatcagtaaacgcttttttgagcagcactatttgccattattgccctattgcttcgttgcgtcacaggt

SEQ ID NO: 719414 - DNA, 75 bp, synthetic construct
  source 1..75: mol_type = other DNA
tattgcgtttgaggccggttatagtagcccgagtttgtttattaaaacgtttaagaaattaacgtccttacgcct

SEQ ID NO: 719415 - DNA, 75 bp, synthetic construct
  source 1..75: mol_type = other DNA
ggcgatacgctgaccacgcgtttgaatgatggcgtggtggtaagcgtagtgagcgacgtggcgaaaacccgcaaa

SEQ ID NO: 719416 - DNA, 75 bp, synthetic construct
  source 1..75: mol_type = other DNA
taggtgcgttgttattaatgaagttctcttttgatgtcgttcgcctgcgaatgcagtaccgcgttgcctatggcg

SEQ ID NO: 719417 - DNA, 75 bp, synthetic construct
  source 1..75: mol_type = other DNA
cgttctggcatgagcgccacctggtgtgcgctgttgctgatggtgctggcgaatctctggtatatgccctgggag

SEQ ID NO: 719418 - DNA, 75 bp, synthetic construct
  source 1..75: mol_type = other DNA
gtgattgattcaattttgcatgcaatgcaggggcgagttctggatggtgatcttatttccggatgggaaaaacgc

SEQ ID NO: 719419 - DNA, 75 bp, synthetic construct
  source 1..75: mol_type = other DNA
gaaggtgagggatggtttatcggttcgatacatgacaccgaagatggtcctgtttgtgtatggctgagaaataag

SEQ ID NO: 719420 - DNA, 75 bp, synthetic construct
  source 1..75: mol_type = other DNA
tgaaatttaaaggaacaccaggtccatggcatgtaagtttccacggttcagctaattgctgggtagtggatagtg

SEQ ID NO: 719421 - DNA, 75 bp, synthetic construct
  source 1..75: mol_type = other DNA
atagcgcgaaaggccatcgccgccgtttgtctaaagctgatgcgttattaagaaaagcgtttgttgaatgcgaaa

SEQ ID NO: 719422 - DNA, 75 bp, synthetic construct
  source 1..75: mol_type = other DNA
ggttgattctgccgccgcaaaactgatgcagaatgcagaaaatatcagtgaatacctgtcgttacgccatcaggg

SEQ ID NO: 719423 - DNA, 75 bp, synthetic construct
  source 1..75: mol_type = other DNA
ctgcccgcctcccgcgtttatcccggatcctcacgccaggcatacctggctaaccgtgcgcttcatgagttacgg

SEQ ID NO: 719424 - DNA, 75 bp, synthetic construct
  source 1..75: mol_type = other DNA
ggaaaataatcttcaatggaccatcagaactatggatgaagatgattttaatctggacgcagatggtcctgatat

SEQ ID NO: 719425 - DNA, 75 bp, synthetic construct
  source 1..75: mol_type = other DNA
agtcagccagttacagacccggctcgcggtacaaacaaatctgagcgcgcttatggaggaaagaacggagacagt

SEQ ID NO: 719426 - DNA, 75 bp, synthetic construct
  source 1..75: mol_type = other DNA
atgcacgaaaagaacatcaccctgctttgtgatgaagccgaccggcttttgcaactgagcatcaatctgctccgg

SEQ ID NO: 719427 - DNA, 75 bp, synthetic construct
  source 1..75: mol_type = other DNA
gaggaagtgatgtcactgacccgggcatatttcggggagctgcaggcatccattgagcaggatattaaccagccc

SEQ ID NO: 719428 - DNA, 75 bp, synthetic construct
  source 1..75: mol_type = other DNA
gcatcgtcgccgagatctggaattatcacgctgtgttctggtttgcgatggtgatgattatcgccactctgtttt

SEQ ID NO: 719429 - DNA, 75 bp, synthetic construct
  source 1..75: mol_type = other DNA
aggacagcaagtcgcacagcccctgcagcaaacaggggatacccgcgaactactggatattctggcgaatgatgc

SEQ ID NO: 719430 - DNA, 75 bp, synthetic construct
  source 1..75: mol_type = other DNA
caggcgcatatctccagcctgctggcggatatccgggaaatcgcggactgtcaggagcaggtgaccgcagatgtc

SEQ ID NO: 719431 - DNA, 75 bp, synthetic construct
  source 1..75: mol_type = other DNA
ctgaatgactatttcagaagcggtaaacgcaaagaacagcaaatgctggaggaagaaaattcagcgcagccccgg

SEQ ID NO: 719432 - DNA, 75 bp, synthetic construct
  source 1..75: mol_type = other DNA
catccgcaacttgttgaaggccgcgcggataacatcaaggtaacgcgcccggaggatttggcgctggccgaattt

SEQ ID NO: 719433 - DNA, 75 bp, synthetic construct
  source 1..75: mol_type = other DNA
ctattgtgatgattgagcagtgggaaagcatcgcgcaccttgaagcgcatctacaaaccccgcacatgaaagcat

SEQ ID NO: 719434 - DNA, 75 bp, synthetic construct
  source 1..75: mol_type = other DNA
tctggcaaggctgtttatctgacttcgtaccccgtggacacgtcaaagcagaaatcagcacagtgttacaagacg

SEQ ID NO: 719435 - DNA, 75 bp, synthetic construct
  source 1..75: mol_type = other DNA
cgtcgccggattttcgacgacgggcggctctgtggggagtggctctgccggagccggaatttacaccagctgaac

SEQ ID NO: 719436 - DNA, 75 bp, synthetic construct
  source 1..75: mol_type = other DNA
gactgcctgacgcgtgctttaaatgaaggcgctaccattaccgatgaagcctcggcgctggaatactgcggtttt

SEQ ID NO: 719437 - DNA, 75 bp, synthetic construct
  source 1..75: mol_type = other DNA
cggataacattaaagtcacgcgcccggaggatttggcactggccgagttttacctcacccgaaccatccatcagg

SEQ ID NO: 719438 - DNA, 75 bp, synthetic construct
  source 1..75: mol_type = other DNA
gagagaaacgcattcgctttctttctcgatattttcggaaccggaaatcagcatgacaggatgcgggactttgat

SEQ ID NO: 719439 - DNA, 75 bp, synthetic construct
  source 1..75: mol_type = other DNA
cacccagatgaactcgaaagccgatgacgaagtccgtaaagagcttaatgccattgctgacgtatcagccggccg

SEQ ID NO: 719440 - DNA, 75 bp, synthetic construct
  source 1..75: mol_type = other DNA
cacccagatgaactccaaagccgatgaggaagtccgtaaagagcttaatgccattgctgacgtatcagccggccg

SEQ ID NO: 719441 - DNA, 75 bp, synthetic construct
  source 1..75: mol_type = other DNA
cacccagatgaactcgaaagccgatgaggaggttcgtaaagagcttaatgccattgctgacgtctcagccggtcg

SEQ ID NO: 719442 - DNA, 75 bp, synthetic construct
  source 1..75: mol_type = other DNA
cggtcgcatcaatgcccgcctggaggatgagggctttaccgtaaaaatcagttttccggcagtcagttacagacc

SEQ ID NO: 719443 - DNA, 75 bp, synthetic construct
  source 1..75: mol_type = other DNA
gctgcagcaaagcattcgtcactgcaggcgaatatcaccagcctgcttgcggatatccggaaaatcgcggactgt

SEQ ID NO: 719444 - DNA, 75 bp, synthetic construct
  source 1..75: mol_type = other DNA
catcagacgcgtcagttcgccagaatggtaggactggagcctaaacatacggcagtacgtagcccggaaagcaac

SEQ ID NO: 719445 - DNA, 75 bp, synthetic construct
  source 1..75: mol_type = other DNA
ctgcccacgtatggttatcgtcgggtatgggcgctgcttcgcagacaggcagaacttgatggtatgcctgcgatc

SEQ ID NO: 719446 - DNA, 75 bp, synthetic construct
  source 1..75: mol_type = other DNA
aagccgctacggcggcctgcctggcatgtcagatccgggcagggcagaggccattatcgggagagttcaggccag

SEQ ID NO: 719447 - DNA, 75 bp, synthetic construct
  source 1..75: mol_type = other DNA
gctggcggggatcggtgacacgctggcgaaatggtatgaagcggtggtgctggctccgcaaccagaaacgttgcc

SEQ ID NO: 719448 - DNA, 75 bp, synthetic construct
  source 1..75: mol_type = other DNA
actgtaggcgctgcgactggcgagatatctgtatcttctgtcgccgacacgttgcgtagattgtatggttctgcg

SEQ ID NO: 719449 - DNA, 75 bp, synthetic construct
  source 1..75: mol_type = other DNA
accaggccgggcagagtccttttgtgactttcttctctaaacttggcgtgccgtatatcggcagcattatgaata

SEQ ID NO: 719450 - DNA, 75 bp, synthetic construct
  source 1..75: mol_type = other DNA
acgcagcttaacagctcaaccaatagcacgctggaaacgcaggcagcaacgccgaaggcggtgaaggcggcgatg

SEQ ID NO: 719451 - DNA, 75 bp, synthetic construct
  source 1..75: mol_type = other DNA
acacatgaactttcaattggcacccattcgcattcaattgcccttggttcccataatcactccctaaccattaat

SEQ ID NO: 719452 - DNA, 75 bp, synthetic construct
  source 1..75: mol_type = other DNA
ttattacaggaacagcttgcacaccaaaatcaacggttgccagagttgggcgcgttattgaagcaggtaaaccat

SEQ ID NO: 719453 - DNA, 75 bp, synthetic construct
  source 1..75: mol_type = other DNA
cctggagtcagattactgatattccggatagtacgctgacgcaaaaagggattgtgaagcttagtaacgcgattg

SEQ ID NO: 719454 - DNA, 75 bp, synthetic construct
  source 1..75: mol_type = other DNA
aagcctgtgaggcatatagcaggattaacaattcctcattccgattctatacatcaaatggaacatttaccgtgc

SEQ ID NO: 719455 - DNA, 75 bp, synthetic construct
  source 1..75: mol_type = other DNA
actaaccgtgcggctgggaatcaataatgcgcaggccattcgcgacgtcttgttaaacagtagcgaacaggcgct

SEQ ID NO: 719456 - DNA, 75 bp, synthetic construct
  source 1..75: mol_type = other DNA
gcgcgatggccgtggtgtatgtcggagaatttctgctgggtaaagtgctgaacctgcccgcagagccatttatga

SEQ ID NO: 719457 - DNA, 75 bp, synthetic construct
  source 1..75: mol_type = other DNA
ctgaaggggcagccgtgcggggaagtgactccacaggaacagaaagaggcagagacccggctaatggtgctgaat

SEQ ID NO: 719458 - DNA, 75 bp, synthetic construct
  source 1..75: mol_type = other DNA
gaaagaggcagaaacccggctgatgatactgaatgagaagcgtaaacagcggcatggtgagtccggacagaagtt

SEQ ID NO: 719459 - DNA, 75 bp, synthetic construct
  source 1..75: mol_type = other DNA
actgctggtgcgcgctttttgcgaacccggtaaagatgccattctctactgcccgccgacttacggcatgtacag

SEQ ID NO: 719460 - DNA, 75 bp, synthetic construct
  source 1..75: mol_type = other DNA
ggcgtcatggcggcagacctcagaaactgacagagaaagaacgggagcaaatcgcccgtttgctggctaatggcg

SEQ ID NO: 719461 - DNA, 75 bp, synthetic construct
  source 1..75: mol_type = other DNA
aaactaaaacccggcgacacactgatggtctggaaactggacaggctggggcgcagtatgcgccaccttgttgcg

SEQ ID NO: 719462 - DNA, 75 bp, synthetic construct
  source 1..75: mol_type = other DNA
atgcctcacaatcctattcgcgtggtcgtcggcccggctaactacttttctcatcccggaagtctcaatcacctg

SEQ ID NO: 719463 - DNA, 75 bp, synthetic construct
  source 1..75: mol_type = other DNA
tacaaagcgccttgctgggacaggatgacgtgctggcgcaattaaccggggcatataagcgttttcatctaccga

SEQ ID NO: 719464 - DNA, 75 bp, synthetic construct
  source 1..75: mol_type = other DNA
cggtggagtccattcattacctgccggtcacgctgacaccagatacgttgcgtgcagcgttcgaaaaagtggaat

SEQ ID NO: 719465 - DNA, 75 bp, synthetic construct
  source 1..75: mol_type = other DNA
ggcattgtgccgcgcgatgcaggcaacatcattattgatgatgacgatatcagcctgctgccattacacgcgcgc

SEQ ID NO: 719466 - DNA, 75 bp, synthetic construct
  source 1..75: mol_type = other DNA
ggtatcgtgccgcgcgacgcgggcaacatcatcattgatgatgacgatatcagcctacttccactacacgcccgc

SEQ ID NO: 719467 - DNA, 75 bp, synthetic construct
  source 1..75: mol_type = other DNA
aacagctcattcggcgatcgggagaaaagccgctatgagaacgttatctccggaaacatgcagctgggggaagct

SEQ ID NO: 719468 - DNA, 75 bp, synthetic construct
  source 1..75: mol_type = other DNA
ctattgctgcggcgccgtccagccatacccatgcctgggggcaaataacaggtatccccgacggtacgctgacac

SEQ ID NO: 719469 - DNA, 75 bp, synthetic construct
  source 1..75: mol_type = other DNA
ctgggttatcgctcgccacgggaatatctgcggcagtgggccagtgatggggtaagtgataacaggtgtctggaa

SEQ ID NO: 719470 - DNA, 75 bp, synthetic construct
  source 1..75: mol_type = other DNA
actgggttatcgctcgccacgggaatatctacggcagcaagccagtaatgggttaagtgataacaggtgtctgga

SEQ ID NO: 719471 - DNA, 75 bp, synthetic construct
  source 1..75: mol_type = other DNA
aaccttgcagaggcattcgagcattataacgaaaggcatccgcatagtgcactgggttatcgctcgccacgggaa

SEQ ID NO: 719472 - DNA, 75 bp, synthetic construct
  source 1..75: mol_type = other DNA
caggcacgtaatgtcgataacaccgacagctatgcagtgctggggctgggcgatgtggcgatggcgcgcaaagat

SEQ ID NO: 719473 - DNA, 75 bp, synthetic construct
  source 1..75: mol_type = other DNA
tgggccaggcgtattcccagaaaggcgatcgcgccaatgcagtggtgaatctggaaaaagccctcgcgctggatc

SEQ ID NO: 719474 - DNA, 75 bp, synthetic construct
  source 1..75: mol_type = other DNA
tatcgcctcgctctctgccagtcagcggcgcagcattgatgatatcgaacgcagcctgcaaaacgaccgtctggc

SEQ ID NO: 719475 - DNA, 75 bp, synthetic construct
  source 1..75: mol_type = other DNA
gtggccgtgaaagaaagcaatcaacgatggtgctctgacgggttcgagttccgctgtgataacggagaaaaactg

SEQ ID NO: 719476 - DNA, 75 bp, synthetic construct
  source 1..75: mol_type = other DNA
tgggagcagtggaacgccgctttggcagcgagcttccggcgtctccagtagagtggctgacggataatggttcat

SEQ ID NO: 719477 - DNA, 75 bp, synthetic construct
  source 1..75: mol_type = other DNA
gcactgggttatcgctcgccacgggaatatctacggcagcaagccagtaatgggttaagtgataacaggtgtctg

SEQ ID NO: 719478 - DNA, 75 bp, synthetic construct
  source 1..75: mol_type = other DNA
aaccgaagaacacggcggtgcggagtccggagagtaacggcatagcagagagcttcgtgaaaacgataaagcgtg

SEQ ID NO: 719479 - DNA, 75 bp, synthetic construct
  source 1..75: mol_type = other DNA
gacctggcaaatagtaaagccgccactagtcatgctcatgcctggaatcagattactggtatccctgacggtacg

SEQ ID NO: 719480 - DNA, 75 bp, synthetic construct
  source 1..75: mol_type = other DNA
gactcattattacgttatattttaaaacagcgtatttcaatagcttacttaccaaaagtattagtgaaaatgcgt

SEQ ID NO: 719481 - DNA, 75 bp, synthetic construct
  source 1..75: mol_type = other DNA
tgatatctgccaccgaaaatatggcagatattgccaaagcgttacgtctgggcgttgaagatgttttgctgaaac

SEQ ID NO: 719482 - DNA, 75 bp, synthetic construct
  source 1..75: mol_type = other DNA
taagtaatggtggaaaaaaagcagtaatggcaaagccaacagcagcaacaggttatggttctggaggagctgggg

SEQ ID NO: 719483 - DNA, 75 bp, synthetic construct
  source 1..75: mol_type = other DNA
ctgcggtaacactcaccgttgaccccagtattgtactggcaacacgggattatgttgattcacaactggatgaac

SEQ ID NO: 719484 - DNA, 75 bp, synthetic construct
  source 1..75: mol_type = other DNA
cgagcgcagtgaaggcggcgtatgacctggcgaatagtaaggctgcgggtagtcatacgcacccctgggggcaga

SEQ ID NO: 719485 - DNA, 75 bp, synthetic construct
  source 1..75: mol_type = other DNA
aggcgttcgagcattataacgaatggcatccgcatagtgcactgggttatcgctcgccacgggaatatctacggc

SEQ ID NO: 719486 - DNA, 75 bp, synthetic construct
  source 1..75: mol_type = other DNA
ttgggttatcgctcgccacgggaatatctgcggcagcggtccagtaatgggttaagtgataacaggtgtctggaa

SEQ ID NO: 719487 - DNA, 75 bp, synthetic construct
  source 1..75: mol_type = other DNA
gaggcgttcgagcattataacgaatggcatccgcatagtgcactgggttatcgctcgccacgggaatatctgcgg

SEQ ID NO: 719488 - DNA, 75 bp, synthetic construct
  source 1..75: mol_type = other DNA
tattgccttgatgtaacccgtgctggacataatggcgtccttgcagccttgttattacgtgcgttgtttaatggc

SEQ ID NO: 719489 - DNA, 75 bp, synthetic construct
  source 1..75: mol_type = other DNA
aaaatcaacgtttgccagagttaggcgcgttattgaagcaggtaaaccatttactacgccaggccaatttgcctg

SEQ ID NO: 719490 - DNA, 75 bp, synthetic construct
  source 1..75: mol_type = other DNA
tgagatggtttttgcttgtctgtatcccagcatgtttaactccagggttgaggaagaagaaaggctttttcgcga

SEQ ID NO: 719491 - DNA, 75 bp, synthetic construct
  source 1..75: mol_type = other DNA
cacgccttggcgcaggttcaccttctgcggggaatatcgctgagctggacgcaattgccgcctgcgtgattggcg

SEQ ID NO: 719492 - DNA, 75 bp, synthetic construct
  source 1..75: mol_type = other DNA
gcaattgcagcatgtgtgattggcggtactagtctggcaggcggtgtggggagtgttgccggtgcagtaatgggg

SEQ ID NO: 719493 - DNA, 75 bp, synthetic construct
  source 1..75: mol_type = other DNA
ctgttactcggtggaatgtttatggcaacacggacagcttttgggcgacgcatttacgctattggcggtaatctg

SEQ ID NO: 719494 - DNA, 75 bp, synthetic construct
  source 1..75: mol_type = other DNA
atctgcgttatggcgtgattgcgctcggcgacagcagttatgtgaatttctgcaatggcggcaaacagttcgatg

SEQ ID NO: 719495 - DNA, 75 bp, synthetic construct
  source 1..75: mol_type = other DNA
acgtgccgaaccgggcaaaaatgccattgctcataccgttgatcgcaacggcttatggcacgcgctgacgccgca

SEQ ID NO: 719496 - DNA, 75 bp, synthetic construct
  source 1..75: mol_type = other DNA
ttcgttttacctccagaggacgcgaatacgaggtcgacgaacgtctgattaccactatcgataaacaccgctcag

SEQ ID NO: 719497 - DNA, 75 bp, synthetic construct
  source 1..75: mol_type = other DNA
ggggcattcatcatggcttcactggataacggtatgagtatgatggatgtaccgaccttctggcagtatatcgtt

SEQ ID NO: 719498 - DNA, 75 bp, synthetic construct
  source 1..75: mol_type = other DNA
cactgacggcacttacttctgcgccacgaatgtggtgcgggtgaaccttatccgacaggtacaagagtcacgcag

SEQ ID NO: 719499 - DNA, 75 bp, synthetic construct
  source 1..75: mol_type = other DNA
aaaaggatgcacaccacatctacctcactgacggcacttacttctgcgccactaatgtggtgcgggtgaacctta

SEQ ID NO: 719500 - DNA, 75 bp, synthetic construct
  source 1..75: mol_type = other DNA
ggttctggggctgcttctcggagcgtggaatgggtggtgggtcgcgtaccgcaaagtcccgtcatttattgtcac

SEQ ID NO: 719501 - DNA, 75 bp, synthetic construct
  source 1..75: mol_type = other DNA
aagcgttgccggagcagtaatgggggcatttatcatggcttcactggataacggcatgagtatgatggatgtacc

SEQ ID NO: 719502 - DNA, 75 bp, synthetic construct
  source 1..75: mol_type = other DNA
tgttgaatgattaccgtggcgttcccactcctgttctgctgctgacgttgctgttactcggcggaatgtttatgg

SEQ ID NO: 719503 - DNA, 75 bp, synthetic construct
  source 1..75: mol_type = other DNA
cggtgtttgaagatccagaattaagcgactggctgccctatcaggacaagttcgtgctggtggttacgtccacga

SEQ ID NO: 719504 - DNA, 75 bp, synthetic construct
  source 1..75: mol_type = other DNA
ggcgacccccggctcggatgatgctgactcgacaccttccctaaacgacagttcaaatggaaattcttctgatgg

SEQ ID NO: 719505 - DNA, 75 bp, synthetic construct
  source 1..75: mol_type = other DNA
aagccagtttgacaggaaaattgttttccttattactgatggttatccgactgagtcggcttacaccattaatga

SEQ ID NO: 719506 - DNA, 75 bp, synthetic construct
  source 1..75: mol_type = other DNA
ccggtaaagcagagaccgcaacggattccgcgccgctcgaaatggtggaaaccacgatccagctcaaacctgagg

SEQ ID NO: 719507 - DNA, 75 bp, synthetic construct
  source 1..75: mol_type = other DNA
atttgcaggccgaccttgaacgcgcagggattcatccctggggctggattatcaataacagcctttccattgcgg

SEQ ID NO: 719508 - DNA, 75 bp, synthetic construct
  source 1..75: mol_type = other DNA
aactcatttagaactcgccgcaattggccttaaaaatcagtacttggtcattaatggcgttctgcccaaaactga

SEQ ID NO: 719509 - DNA, 75 bp, synthetic construct
  source 1..75: mol_type = other DNA
atggcggggctggaaaaacagcgtgaacagtatgcccatgccgttgaagcactgtccgacccagcgcgtacccgc

SEQ ID NO: 719510 - DNA, 75 bp, synthetic construct
  source 1..75: mol_type = other DNA
ctactccccgttgccagcttttgtttgccgtctacagacatcaaacacaaaccacaactccatcccaactcgtat

SEQ ID NO: 719511 - DNA, 75 bp, synthetic construct
  source 1..75: mol_type = other DNA
ccgggtgagcagattgacaacgccacccgctggaaggtgattaccgatgcctccgttgaagtgggacccgcactg

SEQ ID NO: 719512 - DNA, 75 bp, synthetic construct
  source 1..75: mol_type = other DNA
accagctatcccggccaggccccgcagattgtagaaaaccaggtcacctatccgcttaccaccaccatgctgtcc

SEQ ID NO: 719513 - DNA, 75 bp, synthetic construct
  source 1..75: mol_type = other DNA
gatgccgccattgtgatgattgaaaatgcgcacaaacggcttgaggagtgggatcatcagcatccgggtgagcag

SEQ ID NO: 719514 - DNA, 75 bp, synthetic construct
  source 1..75: mol_type = other DNA
gtttttcacagttcggtgattcgtatgtgtatgtcatttttgaagacggcaccgatctgtactgggcccgttccc

SEQ ID NO: 719515 - DNA, 75 bp, synthetic construct
  source 1..75: mol_type = other DNA
atcagtggcgtccaggcatgacgattgacaagattattgaagaactcgacaggaccgtccgtttaccgggtctgg

SEQ ID NO: 719516 - DNA, 75 bp, synthetic construct
  source 1..75: mol_type = other DNA
accactatcgacaaacatcgttcggaaaaggatgcacatcacatctatctcactgacggcacttacttctgcgcc

SEQ ID NO: 719517 - DNA, 75 bp, synthetic construct
  source 1..75: mol_type = other DNA
tcattctggttggaaatttaggccaggatcctgaagtgcgctatatgcccaacagtaacgcagtgaccacgctgt

SEQ ID NO: 719518 - DNA, 75 bp, synthetic construct
  source 1..75: mol_type = other DNA
agatcaggttacggaatttaagtcattcccaatgaccttcgcattgcacagcacgtttaaccaatcctcaagttc

SEQ ID NO: 719519 - DNA, 75 bp, synthetic construct
  source 1..75: mol_type = other DNA
acaacctggcgcaacggaaagctgctgctgtggaggcggaaactatcgtcgcccaggaggccagtgaatttatgg

SEQ ID NO: 719520 - DNA, 75 bp, synthetic construct
  source 1..75: mol_type = other DNA
gcagaatggtgttgatcgctacgcaacggaagtggtggtgagtgtcaatggcaccctgcagatgctgggctctcc

SEQ ID NO: 719521 - DNA, 75 bp, synthetic construct
  source 1..75: mol_type = other DNA
ggctctaaggtttatatcgaaggtcagctgaaaacccgtaagtggtttgaccagcagaacggtgtggaccgttat

SEQ ID NO: 719522 - DNA, 75 bp, synthetic construct
  source 1..75: mol_type = other DNA
gagcagaccgaatggcaccgtgttgtgctgttcggcaaactggcggaagtggccagtgaatatctgcgtaaaggc

SEQ ID NO: 719523 - DNA, 75 bp, synthetic construct
  source 1..75: mol_type = other DNA
actaaaacccggtgacacgctgatggtctggaaactggacaggctggggcgcagtatgcgccaccttgttgcgct

SEQ ID NO: 719524 - DNA, 75 bp, synthetic construct
  source 1..75: mol_type = other DNA
acaattgcaaattagcgggcggtgaaacgattgatgaatgggcattatggcgacgggatcatccggcgggtgaaa

SEQ ID NO: 719525 - DNA, 75 bp, synthetic construct
  source 1..75: mol_type = other DNA
ttgtctggaagctggacaggctgggcagaagcatgaaacacctcatcactcttattgaggaactgcgggaaaaag

SEQ ID NO: 719526 - DNA, 75 bp, synthetic construct
  source 1..75: mol_type = other DNA
caccgttgtcggaaaaagaagtttctgttcgtttcaatgtgtcacgccagccggttcgtgaagccttcataaaac

SEQ ID NO: 719527 - DNA, 75 bp, synthetic construct
  source 1..75: mol_type = other DNA
atgaccgtcgaaacgcaacttaatcccacacaacctgtcaatcagcagatttatcgtattcttcgccgcgacatt

SEQ ID NO: 719528 - DNA, 75 bp, synthetic construct
  source 1..75: mol_type = other DNA
tgattgatgcagttcccagtgtaaatatcgggaaagcattcgagaaaccgcagaagaaaaacatgccaagtatcc

SEQ ID NO: 719529 - DNA, 75 bp, synthetic construct
  source 1..75: mol_type = other DNA
aacttgatgacaacttccatcaactcctgacccagattgccgactgtcaactggcgtgggataccattgagaacc

SEQ ID NO: 719530 - DNA, 75 bp, synthetic construct
  source 1..75: mol_type = other DNA
atggcaattaagcattttcccgtcattcgctttacctccagagggcgcgaatacgaggtcgacgaacgcctgatt

SEQ ID NO: 719531 - DNA, 75 bp, synthetic construct
  source 1..75: mol_type = other DNA
gaattctggacggttttgatatctctgatgaagttacgccaaagaaccttaaatttaaaaataaatattgcgtat

SEQ ID NO: 719532 - DNA, 75 bp, synthetic construct
  source 1..75: mol_type = other DNA
gccatgcaatcatcttcatgtgatttgtaatgatcctgtttattaccccgttaacgattgttattgtgttttagt

SEQ ID NO: 719533 - DNA, 75 bp, synthetic construct
  source 1..75: mol_type = other DNA
cactgacgacacttacttctgcgccacgaatgtggtgcgggtgaaccttatccgacaggtacaggagtcacgcag

SEQ ID NO: 719534 - DNA, 75 bp, synthetic construct
  source 1..75: mol_type = other DNA
ttcgttttacctccagagggcgggaatacgaagtcgacgaacgcctgattaccacaatcgacaaacaccgttcag

SEQ ID NO: 719535 - DNA, 75 bp, synthetic construct
  source 1..75: mol_type = other DNA
caataagcaaacctgtgaattgattgaacaacttttcaccgagggtggaattccgcctctggaaaagaatcaacc

SEQ ID NO: 719536 - DNA, 75 bp, synthetic construct
  source 1..75: mol_type = other DNA
tcagcgcctgcgtgagcgcgaacagaataccgacagccgcatcaatgaggccattaaccgccagcagaccagctc

SEQ ID NO: 719537 - DNA, 75 bp, synthetic construct
  source 1..75: mol_type = other DNA
tgcgggttctgacgccgttcattctgctggcaggcagcatcctgctgtttcatgcctgccaggaccgtaaaaccc

SEQ ID NO: 719538 - DNA, 75 bp, synthetic construct
  source 1..75: mol_type = other DNA
cggatcggtggcgatgaccgcattgctggggcgcattccacttaacggcagcgtcaccgacccttacccgttcaa

SEQ ID NO: 719539 - DNA, 75 bp, synthetic construct
  source 1..75: mol_type = other DNA
tattgataaaaatggagccgcagtgggctactggatagccgaggacacctatccactcggtggagtcggcaagtg

SEQ ID NO: 719540 - DNA, 75 bp, synthetic construct
  source 1..75: mol_type = other DNA
tcgacacactgcagcaaacacaactgcagagcgccattgtgaaggcgatgtatgccgcgacaatcgaatcagagc

SEQ ID NO: 719541 - DNA, 75 bp, synthetic construct
  source 1..75: mol_type = other DNA
ctcaatttcgccgcgccggtgttgatatcgataaaaacggggccgcggtcgggtactggatagccgaggatactt

SEQ ID NO: 719542 - DNA, 75 bp, synthetic construct
  source 1..75: mol_type = other DNA
tgctgccggtgggctgcaataaaggcgctgcattgacggtgctgacccaacatttaggtttatcgttgcgcgatt

SEQ ID NO: 719543 - DNA, 75 bp, synthetic construct
  source 1..75: mol_type = other DNA
ttctggaaaacgctgcgccgttcccgcgcccggattatctgtttgccgatatcgtcggcaccggcggtgacggca

SEQ ID NO: 719544 - DNA, 75 bp, synthetic construct
  source 1..75: mol_type = other DNA
gcaacagtatcaacatttctaccgccagtgcttttgttgcagcagcctgtgggctgaaagtggcgaaacacggca

SEQ ID NO: 719545 - DNA, 75 bp, synthetic construct
  source 1..75: mol_type = other DNA
ctgccgattgccgaaaccttgcgcgtgctggggtatcaacgcgcggcggtggtgcacagcggcgggatggatgaa

SEQ ID NO: 719546 - DNA, 75 bp, synthetic construct
  source 1..75: mol_type = other DNA
aaaaggttatttttggtggaagactcgctgagtttcgatactacgatatgcatcaggtaattcggtctgcattca

SEQ ID NO: 719547 - DNA, 75 bp, synthetic construct
  source 1..75: mol_type = other DNA
tgctgaatatagatactatgatatgcatcaagtgattaggtcggcatttacaaagttcggaattgaattttcaaa

SEQ ID NO: 719548 - DNA, 75 bp, synthetic construct
  source 1..75: mol_type = other DNA
aaatgtcttattattgaaaaacgcaagcatatagcagggaattgctatacggaaaaaaaacatggcattcaccaa

SEQ ID NO: 719549 - DNA, 75 bp, synthetic construct
  source 1..75: mol_type = other DNA
ttgttgggctggtacaacttaatgatgtcgagtcattgaaaatgattgagcgcagcagtgagctaacacaacgcc

SEQ ID NO: 719550 - DNA, 75 bp, synthetic construct
  source 1..75: mol_type = other DNA
gctatgccattgatgctcctgctgacgcgcctgatggctcaagtcgcccgacactgtcgctgagtgcagtatggt

SEQ ID NO: 719551 - DNA, 75 bp, synthetic construct
  source 1..75: mol_type = other DNA
aaatggacaggacgcgctcgcttgatccgcaggcaattattcgtcatccccaatatggcaatgtggcttgtatcc

SEQ ID NO: 719552 - DNA, 75 bp, synthetic construct
  source 1..75: mol_type = other DNA
tagcggcggaatggatgaagtttctttgcacgcgccaacgattgttgcggaattgcacgatggagaaatcaaaag

SEQ ID NO: 719553 - DNA, 75 bp, synthetic construct
  source 1..75: mol_type = other DNA
gagatcgccggagcagcaaccgcgctactggaaaacgccgcgccgttcccgcgcccggattatctgtttgccgat

SEQ ID NO: 719554 - DNA, 75 bp, synthetic construct
  source 1..75: mol_type = other DNA
tttaccctttaatatgaatacgttttatcagctttggggagttaagacgcctgctgaagcattagctataattaa

SEQ ID NO: 719555 - DNA, 75 bp, synthetic construct
  source 1..75: mol_type = other DNA
tacccaatagagtggagtgagggtcaagagccttattatcccattaatgataaaaaaaatatggatatatatcat

SEQ ID NO: 719556 - DNA, 75 bp, synthetic construct
  source 1..75: mol_type = other DNA
gtgccagtggctacattggtcaacatctggtgcacacactcagccagcaagggcatcagatcctggcggcggcac

SEQ ID NO: 719557 - DNA, 75 bp, synthetic construct
  source 1..75: mol_type = other DNA
cgataccgtctattttctggtgcacagcatgggcgaaggcggcgattttatcgctcaggaacgccaggtagctct

SEQ ID NO: 719558 - DNA, 75 bp, synthetic construct
  source 1..75: mol_type = other DNA
gtgcgttgattcagggactgaaacacgatctgctggcggatgacaccgccttacgcgcgctcattccacaaccgc

SEQ ID NO: 719559 - DNA, 75 bp, synthetic construct
  source 1..75: mol_type = other DNA
actttcgacaataattatttttctgataaatatcaaggaatacctattggaggttatacgaagctcataaatgtt

SEQ ID NO: 719560 - DNA, 75 bp, synthetic construct
  source 1..75: mol_type = other DNA
gaccagaggtgctcagttatcagcaacagtttgaacattttatggcggtgagcggtaagcgccgctggttaatcc

SEQ ID NO: 719561 - DNA, 75 bp, synthetic construct
  source 1..75: mol_type = other DNA
gtgccgcaacgcattttagttctcggtgccagtggctatattggtcagcatctggtgcacacactcagccagcag

SEQ ID NO: 719562 - DNA, 75 bp, synthetic construct
  source 1..75: mol_type = other DNA
cataagtatggagcgcatatattccatactaatgataaagaagtgtgggagtatgtaaatttatatgctgaattt

SEQ ID NO: 719563 - DNA, 75 bp, synthetic construct
  source 1..75: mol_type = other DNA
tggggcttttgtcgggtcacaagaggcaaataaatacggtaaagatactcaggatgtgaagtatagaacggataa

SEQ ID NO: 719564 - DNA, 75 bp, synthetic construct
  source 1..75: mol_type = other DNA
tcaactttcagggtaatgcagtaattaattttactgaagctcaaattccctatacaagaattattgaacacaaac

SEQ ID NO: 719565 - DNA, 75 bp, synthetic construct
  source 1..75: mol_type = other DNA
agtcttaacgcctccgcgctgggttcgttcacgcaccacgcccattgcgctggaaaacttgctgcactatctggt

SEQ ID NO: 719566 - DNA, 75 bp, synthetic construct
  source 1..75: mol_type = other DNA
cgataccgtctattttctggtgcacagcatgggcgaaggcggcgattttatcgctcaggagcgccaggtggctct

SEQ ID NO: 719567 - DNA, 75 bp, synthetic construct
  source 1..75: mol_type = other DNA
tttacctttcaacatgaatactttttaccaactctggggagctcagacccctcaggaagctatgagtattataga

SEQ ID NO: 719568 - DNA, 75 bp, synthetic construct
  source 1..75: mol_type = other DNA
agacagcattgcaacctatcgtataccgctacagatcgcattgactaaagcacgcgaagcacaacaacaattaga

SEQ ID NO: 719569 - DNA, 75 bp, synthetic construct
  source 1..75: mol_type = other DNA
agaagtacgtgataagcagcaaaatattctggcgtcctggcattacacccgtaggatccaggcgatactttcagc

SEQ ID NO: 719570 - DNA, 75 bp, synthetic construct
  source 1..75: mol_type = other DNA
gggcgttcaggaacattccctgaaatgtcaacccggcctccaaagcgagggcttctggacccatggagggagtgg

SEQ ID NO: 719571 - DNA, 75 bp, synthetic construct
  source 1..75: mol_type = other DNA
aacagcaaacccgcaaaaaacggcatcagcattggacagaggttatggccctgcataacaagggatgtagtttca

SEQ ID NO: 719572 - DNA, 75 bp, synthetic construct
  source 1..75: mol_type = other DNA
tgcttctgaagtcaccgatgttaaccgctatcgtagcggcgaaattgatatgacctataacaacatgccgatcga

SEQ ID NO: 719573 - DNA, 75 bp, synthetic construct
  source 1..75: mol_type = other DNA
cgagaaatggacccagccaggaaatattgtcaccaacggtgcctataccttaaaagattgggtcgttaacgaacg

SEQ ID NO: 719574 - DNA, 75 bp, synthetic construct
  source 1..75: mol_type = other DNA
agaagtacgtgataagcagcaaaatattctggcattctggcatcctggcattacacccgtaaggatccaggcgat

SEQ ID NO: 719575 - DNA, 75 bp, synthetic construct
  source 1..75: mol_type = other DNA
tgaatgggcagagcaacctgcagtaaaactggaatttattcagccgggtaagccgacgcagaacacttttattga

SEQ ID NO: 719576 - DNA, 75 bp, synthetic construct
  source 1..75: mol_type = other DNA
ttgctacacctgaagcgttaaaccagcgttggtctgttgacttcatgcatgacgccctgatttgtggtcgtcgtt

SEQ ID NO: 719577 - DNA, 75 bp, synthetic construct
  source 1..75: mol_type = other DNA
tctctgacactggctgaatgggcagagatgcatgccgtaaagctggaatttatcaagccggggaaaccaactcag

SEQ ID NO: 719578 - DNA, 75 bp, synthetic construct
  source 1..75: mol_type = other DNA
ttaatcgactggactccctgccccgttcccacagatgccctgtatcaacaactgaccaccgatcaagcgcagctg

SEQ ID NO: 719579 - DNA, 75 bp, synthetic construct
  source 1..75: mol_type = other DNA
tgcgcctcgtttccaccatcagtggttgccggacgagctgcgtgtcgaaaaagggtttagcccggatacgctcaa

SEQ ID NO: 719580 - DNA, 75 bp, synthetic construct
  source 1..75: mol_type = other DNA
gaatgaatgttgccgaagcgaccaatgcgcctcgtttccaccatcagtggttgccggacgagctgcgtgttgaaa

SEQ ID NO: 719581 - DNA, 75 bp, synthetic construct
  source 1..75: mol_type = other DNA
caaaacatcctgctgattttcgtggcgataggcatggtttcctggctggatatggctcgtattgtgcgtgggcaa

SEQ ID NO: 719582 - DNA, 75 bp, synthetic construct
  source 1..75: mol_type = other DNA
gataaacaaaacgaaagtgtcgaggtgataggcattcagtcggagaaactcagtcgttatcttgagcgtttacat

SEQ ID NO: 719583 - DNA, 75 bp, synthetic construct
  source 1..75: mol_type = other DNA
aatgttcaccttttgatcccaccagagggtcttttatatcgttccctcacgctgcccaacgccaaatacaaactc

SEQ ID NO: 719584 - DNA, 75 bp, synthetic construct
  source 1..75: mol_type = other DNA
tattctcgatttaggtttaaccaccgaatatttagaaaccttcggtgtgccgttaattggttatcagaccaaagc

SEQ ID NO: 719585 - DNA, 75 bp, synthetic construct
  source 1..75: mol_type = other DNA
aaaaaaaaaagaaaaaaagattattttttttcttggcacttgcgtgtcttttttagttttaagattattccgtga

SEQ ID NO: 719586 - DNA, 75 bp, synthetic construct
  source 1..75: mol_type = other DNA
atccgattgcggaaaagcacgtcaatgggacgatgtcactggctgagcttagcgcggccgcgctacagtacagcg

SEQ ID NO: 719587 - DNA, 75 bp, synthetic construct
  source 1..75: mol_type = other DNA
gtgagcatatcacctctgttcaggtggccaaattcagtaaaccacttcacacaaacattacaatggctggcagag

SEQ ID NO: 719588 - DNA, 75 bp, synthetic construct
  source 1..75: mol_type = other DNA
atgaatatgatgatctcatatcaggaacttgttcgcaccttccctaatgtcaccgttgtttgtgccggggcgaaa

SEQ ID NO: 719589 - DNA, 75 bp, synthetic construct
  source 1..75: mol_type = other DNA
agcgcggccgcgctacagtacagcgataacgtggcgatgaataagctgattgctcacgttggcggcccggctagc

SEQ ID NO: 719590 - DNA, 75 bp, synthetic construct
  source 1..75: mol_type = other DNA
cgcactgaaactgggtatggaccgcgatatcattgttaataaagtgaaagcgcagggcgacatgcccgcctatgg

SEQ ID NO: 719591 - DNA, 75 bp, synthetic construct
  source 1..75: mol_type = other DNA
tattctcgatttaggtttaactaccgaatatttagaaactttcggtgtaccgctaattggctatcagaccaaagc

SEQ ID NO: 719592 - DNA, 75 bp, synthetic construct
  source 1..75: mol_type = other DNA
ccccggaagtgcaggacgctttaaaaaacaaaaaaccggttgtggcgctggaatcgaccattatttctcacggga

SEQ ID NO: 719593 - DNA, 75 bp, synthetic construct
  source 1..75: mol_type = other DNA
acagcctgaaatccaacatccagttggtgtttaacaacgccattctggcgagcgaaattgccaaagaataccagc

SEQ ID NO: 719594 - DNA, 75 bp, synthetic construct
  source 1..75: mol_type = other DNA
aaatgcattactgacctcaaacaaccatttaaagtagtcccacagagccatttgtggatgttgaatccattaaat

SEQ ID NO: 719595 - DNA, 75 bp, synthetic construct
  source 1..75: mol_type = other DNA
aacctgctaaaaatgacgtgtaattcaacagataagaaaactttgttttctctcataccgtcaacaacaggggca

SEQ ID NO: 719596 - DNA, 75 bp, synthetic construct
  source 1..75: mol_type = other DNA
atgtttagggactcctgatggaaaaaatctgctaaaaatgacgtgtaatcagacagataagaaaactctgttttc

SEQ ID NO: 719597 - DNA, 75 bp, synthetic construct
  source 1..75: mol_type = other DNA
gtctggcgaaggtgaaccgccccgggtttcctggagagtgttttatctgtgaactcaggctgccagatcatcgtt

SEQ ID NO: 719598 - DNA, 75 bp, synthetic construct
  source 1..75: mol_type = other DNA
gatgccaaagcacgctctgctgacgttttaggtcacgtattcgaatacttcctaggtgaatttgcactggcagaa

SEQ ID NO: 719599 - DNA, 75 bp, synthetic construct
  source 1..75: mol_type = other DNA
tgaaaaatttgttggcgctcatcagggtaatatcgacgatatttctatttacggtcaggaatccaaccagacaac

SEQ ID NO: 719600 - DNA, 75 bp, synthetic construct
  source 1..75: mol_type = other DNA
tcgatacgaccagcaatcgactgggtaacacagttaaagacaaaaacagccgtcttgccgcggttctgaaaggcg

SEQ ID NO: 719601 - DNA, 75 bp, synthetic construct
  source 1..75: mol_type = other DNA
gcaaaatctgtcacgtttgagactgttgtcgcgaataactataacctgtcagtgagcagctatgtggaagcgaaa

SEQ ID NO: 719602 - DNA, 75 bp, synthetic construct
  source 1..75: mol_type = other DNA
gtgctgtctaaacataaaacggataccaacgttcagtttattgacgccagcgaactgttcaaaaaagagactaac

SEQ ID NO: 719603 - DNA, 75 bp, synthetic construct
  source 1..75: mol_type = other DNA
ctgagctgaaaaccacggtcagcaaaatcgaccagttgcgtaaagatattgatgcgattgtggctgaaattgaag

SEQ ID NO: 719604 - DNA, 75 bp, synthetic construct
  source 1..75: mol_type = other DNA
ctaactatgcggcgaatgccggtaagtccggcggcgagttctttacaccgcagcacgtctctaagctgattgcac

SEQ ID NO: 719605 - DNA, 75 bp, synthetic construct
  source 1..75: mol_type = other DNA
ttgtcgcgaatgactataacctgtcggtgagcagctatgtggaagcgaaagatactcgcgaaattatcgatatcg

SEQ ID NO: 719606 - DNA, 75 bp, synthetic construct
  source 1..75: mol_type = other DNA
ttggtcatttaattaatcgtcgtaccaaagtgctttccgacgacgatatcaataccattgccgatacctaccata

SEQ ID NO: 719607 - DNA, 75 bp, synthetic construct
  source 1..75: mol_type = other DNA
tatccaaagtgaccgatgcggttaaagagcaggtctctgaatggcaaaatcgaccgttggatgcactgtatccca

SEQ ID NO: 719608 - DNA, 75 bp, synthetic construct
  source 1..75: mol_type = other DNA
ccaaaggcatgactacgcgggaaatcgttgccacgttcaaagaaatgtacgacgccgatgtctcgcccacgctga

SEQ ID NO: 719609 - DNA, 75 bp, synthetic construct
  source 1..75: mol_type = other DNA
accgggatggataaccagatcctctcgttgtatgccaaagggatgaccacccgtgagatagccgctgcgttcaaa

SEQ ID NO: 719610 - DNA, 75 bp, synthetic construct
  source 1..75: mol_type = other DNA
agtcgcgtcatcaataaatctgtgttcctggcgctgggtatcaatatcgaaggccagaaagaactactgggtatg

SEQ ID NO: 719611 - DNA, 75 bp, synthetic construct
  source 1..75: mol_type = other DNA
caagatgcaggctggtgtgattctgctggactttatgcgccgggagttaaacctgtctaactcatctgtgcttgg

SEQ ID NO: 719612 - DNA, 75 bp, synthetic construct
  source 1..75: mol_type = other DNA
tgaaattcgtgtcgtggaaggattacaaagccgtcaccagcgggctgaaagcggtatatcaggccccgacagagg

SEQ ID NO: 719613 - DNA, 75 bp, synthetic construct
  source 1..75: mol_type = other DNA
ccgaaattagcgctggatgtccgcgttaaacgtaatgcctatatggcagaaatgctggaatcccaggaagtggat

SEQ ID NO: 719614 - DNA, 75 bp, synthetic construct
  source 1..75: mol_type = other DNA
taaacgtaatgcctatatggcagaaatgctggaatcccaggaagtggatttgatggtaaccacccatcgtccttc

SEQ ID NO: 719615 - DNA, 75 bp, synthetic construct
  source 1..75: mol_type = other DNA
gatgagtccggacctgcgtgtgctgagtggagtagatggcttaccgccgctacccgataccgaatatttgctgtg

SEQ ID NO: 719616 - DNA, 75 bp, synthetic construct
  source 1..75: mol_type = other DNA
gcgagccgatcccacttgtgctcctggatgatcctagtccgttccgtgacatggttctggcaacgctcaataaag

SEQ ID NO: 719617 - DNA, 75 bp, synthetic construct
  source 1..75: mol_type = other DNA
cctgcgtacctcgccaacacactggtactgcgcagcggaatacgtattgcaaaaaggcgagccgatccctcttgt

SEQ ID NO: 719618 - DNA, 75 bp, synthetic construct
  source 1..75: mol_type = other DNA
tgacggcaaggccggtcgagatgatgagtccggacctgcgtgtgctgagtggagtagatggcttaccgccgctac

SEQ ID NO: 719619 - DNA, 75 bp, synthetic construct
  source 1..75: mol_type = other DNA
gataaccgcgaaataatcaatattgctgagctgaatgcagaactgaaaactacggtcagcaaaatcgaccagttg

SEQ ID NO: 719620 - DNA, 75 bp, synthetic construct
  source 1..75: mol_type = other DNA
aacgagtacgaccagatgacctcagacgccgctgtggatgaggccattctcatcaatgcatacatcttcaccgaa

SEQ ID NO: 719621 - DNA, 75 bp, synthetic construct
  source 1..75: mol_type = other DNA
atgaaggttaatttatggacgaaaaacagttacaggctctggctaacgaactggccaaaaaacctcaaaacccct

SEQ ID NO: 719622 - DNA, 75 bp, synthetic construct
  source 1..75: mol_type = other DNA
tggctaacgaactggccaaaaacctcaaaacctctgaagacctcagtcagtttgatcggctgctgaaaaagctca

SEQ ID NO: 719623 - DNA, 75 bp, synthetic construct
  source 1..75: mol_type = other DNA
ttgatcttaaggcaaagtgtatatatatgggtcttccccgatcatggtgggaagactcagtacgccatattcagt

SEQ ID NO: 719624 - DNA, 75 bp, synthetic construct
  source 1..75: mol_type = other DNA
ttggtggaatgcgacaccgcattttacggcagggattcaatatcgctacgcagataataaactgggtgaagcctt

SEQ ID NO: 719625 - DNA, 75 bp, synthetic construct
  source 1..75: mol_type = other DNA
gtgatggttccttcgaaccacaactagtgaagaaaaatcagacccgcataccggcatggacaaccagatcctggc

SEQ ID NO: 719626 - DNA, 75 bp, synthetic construct
  source 1..75: mol_type = other DNA
tggtggccccggtaacagtaggcaaaggcgcgaccattgctgcgggtacaactgtgacgcgtaatgtcggcgaaa

SEQ ID NO: 719627 - DNA, 75 bp, synthetic construct
  source 1..75: mol_type = other DNA
gaaaatgccctggcgatcagccgtgtgccgcagactcagaaagaaggctggcgtcgtccggtaaagaaaaagtaa

SEQ ID NO: 719628 - DNA, 75 bp, synthetic construct
  source 1..75: mol_type = other DNA
tacccgtgagaatggcaaagttaccggcattgttgagcataaagatgctaccgatgagcagcgtcaaatccagga

SEQ ID NO: 719629 - DNA, 75 bp, synthetic construct
  source 1..75: mol_type = other DNA
cgtgggtaaccatgtggttgagctgcatcgtgaacgtattggcggtattacgctggatgctgatttagcccccgg

SEQ ID NO: 719630 - DNA, 75 bp, synthetic construct
  source 1..75: mol_type = other DNA
gttcataaatatggcgcacatatattccatactaacgataaagaaatatgggattatgtaaatcaatttgtagag

SEQ ID NO: 719631 - DNA, 75 bp, synthetic construct
  source 1..75: mol_type = other DNA
gacgtgaaattgttgccgttcatccgcaacgtttaagcgaagtagaaggcgtgaataaccgcctgcaactctcgc

SEQ ID NO: 719632 - DNA, 75 bp, synthetic construct
  source 1..75: mol_type = other DNA
gtttaaagcgttcccggtttcggtatcccctggcctttatcctcagcagtctgatcttgctgttcagcgcctccg

SEQ ID NO: 719633 - DNA, 75 bp, synthetic construct
  source 1..75: mol_type = other DNA
tcacgggcgcgatgttgaaattgatactaacgttatcatcgagggcaacgtgactctcggtcatcgcgtgaaaat

SEQ ID NO: 719634 - DNA, 75 bp, synthetic construct
  source 1..75: mol_type = other DNA
tggcgaagctgaccaacaataacgcgcagggcgaatactacatcaccgacattattgcgctggcgtatcaggaag

SEQ ID NO: 719635 - DNA, 75 bp, synthetic construct
  source 1..75: mol_type = other DNA
acagtcacgcgcaatgtcggtgaaaatgccctggcaatcagccgtgtgccgcaggcacaaaaagaaggctggcgt

SEQ ID NO: 719636 - DNA, 75 bp, synthetic construct
  source 1..75: mol_type = other DNA
gcagcgatgacccgacactgattaacgatgaacgttttgccccggctggcgttctggcccccaaatcaaaagctg

SEQ ID NO: 719637 - DNA, 75 bp, synthetic construct
  source 1..75: mol_type = other DNA
atcgaagccggtgatgacagtgttcagtatgccggaatggctgacagtgatattggtgatgagattaaggacgat

SEQ ID NO: 719638 - DNA, 75 bp, synthetic construct
  source 1..75: mol_type = other DNA
atgctctatggcgatgtgccgctgatctctgtcgaaacactccagcgcctgcgtgacgctaaaccacagggtggt

SEQ ID NO: 719639 - DNA, 75 bp, synthetic construct
  source 1..75: mol_type = other DNA
atgaccagtcttcagcagcgcgcggagcttcatcgccaaatctggcaaattgctaacgatgtcagaggttcggtc

SEQ ID NO: 719640 - DNA, 75 bp, synthetic construct
  source 1..75: mol_type = other DNA
aacaatatcctgactgatggtcatattgaacagattatgcaggtctttgccagcaaaacagacgttgaccatttg

SEQ ID NO: 719641 - DNA, 75 bp, synthetic construct
  source 1..75: mol_type = other DNA
gcgggttccggctcactgttgttgcaggcgaaaaaacagtttgataaccatatcatcgaagaaggctttttcggt

SEQ ID NO: 719642 - DNA, 75 bp, synthetic construct
  source 1..75: mol_type = other DNA
taacgaacatcagattgacctgttcggcgatgcctatgagttcctgatttctaactatgccgcgaatgccggtaa

SEQ ID NO: 719643 - DNA, 75 bp, synthetic construct
  source 1..75: mol_type = other DNA
tcgaaaaaattatgcaggtattttccagcaaggaagatgttgctcatctggcgaaatctgtcacgtttgagaccg

SEQ ID NO: 719644 - DNA, 75 bp, synthetic construct
  source 1..75: mol_type = other DNA
ttttttaccgtggcggcgcggagcagaaaatccgtcagtatctggtcgacaataactatgtcgaaaccgtgattt

SEQ ID NO: 719645 - DNA, 75 bp, synthetic construct
  source 1..75: mol_type = other DNA
tcttcccgccagcggctggaaatggcgatggattattatctcgccaaccgtaccaggcgctttacgcagatccac

SEQ ID NO: 719646 - DNA, 75 bp, synthetic construct
  source 1..75: mol_type = other DNA
ttgttcgatcagcaactaaaaaaacctctcccctcccccgcgcactgtgtcggtgtgattacatccaaaaccggc

SEQ ID NO: 719647 - DNA, 75 bp, synthetic construct
  source 1..75: mol_type = other DNA
atacctcatcaggataaaaagggggtgatggtctttcttggaaaagagggggtaggtgaacaggcattgaatatt

SEQ ID NO: 719648 - DNA, 75 bp, synthetic construct
  source 1..75: mol_type = other DNA
aaatcgttcgcgccattgaactggcaaatattcgcggcgagtgtgatgtgctaatcgtcggacgcggcggtggtt

SEQ ID NO: 719649 - DNA, 75 bp, synthetic construct
  source 1..75: mol_type = other DNA
gctgcgcgatgttccgcaacagcaaccgccgggtgaccttccgtccacagcatgggcaacaagttttagttcgcg

SEQ ID NO: 719650 - DNA, 75 bp, synthetic construct
  source 1..75: mol_type = other DNA
gtgatggcgtggtgattagcgaagtcagtgctgtaacaaaaacgcgtaaaccgcgtaagaaagcggctaatccgt

SEQ ID NO: 719651 - DNA, 75 bp, synthetic construct
  source 1..75: mol_type = other DNA
atgattgatttgcaacagcgttatgaaactattaagtcggcttgtgaaaacttaaagttacaaactaagccagcc

SEQ ID NO: 719652 - DNA, 75 bp, synthetic construct
  source 1..75: mol_type = other DNA
gcgatgacgtataccagaagcaaaacgtttaaaaccgaatctggcgcgcgtcgctggcttgccagaaatacttac

SEQ ID NO: 719653 - DNA, 75 bp, synthetic construct
  source 1..75: mol_type = other DNA
gcaacaacgaatctctggtatgcggcgtgtttcccaaccaggacggcacgtttaccgcgatgacatataccagaa

SEQ ID NO: 719654 - DNA, 75 bp, synthetic construct
  source 1..75: mol_type = other DNA
ggttagaaggattccttcatggtgtattgaccgtgttcctgctgatgctcaattaattggtgagtctggttctta

SEQ ID NO: 719655 - DNA, 75 bp, synthetic construct
  source 1..75: mol_type = other DNA
agctaaatggtgtcttgataaattaccaagtgattgtcagattgtcggtgaagatggtaattattatctggttag

SEQ ID NO: 719656 - DNA, 75 bp, synthetic construct
  source 1..75: mol_type = other DNA
cactcacggctgacgccgccctgtcaaatatcatcatgaccggcacaccgggaagcgcccctgtcacggcgctgc

SEQ ID NO: 719657 - DNA, 75 bp, synthetic construct
  source 1..75: mol_type = other DNA
cctggaagccgtcagcccactttccacgctggcacgcggctatagcgtgaccagcgccgccgatggctcagtcct

SEQ ID NO: 719658 - DNA, 75 bp, synthetic construct
  source 1..75: mol_type = other DNA
tcccaaccaggacggcacattcaccgcgatgacgtataccaaaagcaaaacgtttaaaaccgaaaatggtgcccg

SEQ ID NO: 719659 - DNA, 75 bp, synthetic construct
  source 1..75: mol_type = other DNA
atggatactatcgagcttggcaacaacgaatctctggtatgtggcgtgtttcccaacctggacggcacgttcacc

SEQ ID NO: 719660 - DNA, 75 bp, synthetic construct
  source 1..75: mol_type = other DNA
gcgatgacgtataccagaagcaaaacgtttaaaaccgaagctggcgcgcgtcgctggctggaaagaaattcaggt

SEQ ID NO: 719661 - DNA, 75 bp, synthetic construct
  source 1..75: mol_type = other DNA
caattgattacttcaatgttcaggacaagatggctggtcgtgagattgatcgcggaaaacttgcagagacaatcc

SEQ ID NO: 719662 - DNA, 75 bp, synthetic construct
  source 1..75: mol_type = other DNA
agcactaacagctcgaggtcaggacatccagatacgtggacagaacatcagcgcacagaatgctgctctttcccg

SEQ ID NO: 719663 - DNA, 75 bp, synthetic construct
  source 1..75: mol_type = other DNA
gcgatgacgtataccaaaagcaaaacgtttaaaaccgaaactggcgcacgtcgctggttagccagaaatactgac

SEQ ID NO: 719664 - DNA, 75 bp, synthetic construct
  source 1..75: mol_type = other DNA
cgacgaacgcgtagcgcgggcgatttttgccagccgcattccggtagtgagtgccgtcggacatgaaaccgatgt

SEQ ID NO: 719665 - DNA, 75 bp, synthetic construct
  source 1..75: mol_type = other DNA
aaattgttcgcgccattgaaatggcgaatcagcgcaacgagtgtgacgtattgatcgttgggcgcggtggcggtt

SEQ ID NO: 719666 - DNA, 75 bp, synthetic construct
  source 1..75: mol_type = other DNA
caccgtttacagcagcaacatccgcagttacgtctggcgcggcagcaaaccatgctggagcgactgcaaaagcgg

SEQ ID NO: 719667 - DNA, 75 bp, synthetic construct
  source 1..75: mol_type = other DNA
gcaacaacgaatctctggtatgcggtgtgttccctaaccaggacggcaccttcaccgcgatgacgtataccaaaa

SEQ ID NO: 719668 - DNA, 75 bp, synthetic construct
  source 1..75: mol_type = other DNA
gcgatgacgtataccagaagcaaaacgtttaaaactgaagctggcgcgcgtcgctggttagcaagaaactccgac

SEQ ID NO: 719669 - DNA, 75 bp, synthetic construct
  source 1..75: mol_type = other DNA
acgaatccctagtgtgtggcgtgttccccaaccaggatggaacgttcaccgccatgacgtataccaaaagcaaat

SEQ ID NO: 719670 - DNA, 75 bp, synthetic construct
  source 1..75: mol_type = other DNA
ttcaccgcaatgacgtatacaaaaagcaaaacgtttaaaaccgaaaatggtgcgcgccgatggttggagaagcac

SEQ ID NO: 719671 - DNA, 75 bp, synthetic construct
  source 1..75: mol_type = other DNA
aaagtatttgccaccgggggaattggtggtgtgcatcgcggggcggaacataccttcgatatttctgccgattta

SEQ ID NO: 719672 - DNA, 75 bp, synthetic construct
  source 1..75: mol_type = other DNA
tccgctgaagtacaggatgctttaaaaaataaaaaaccggttgttgcgctggaatcgaccataatttctcacgga

SEQ ID NO: 719673 - DNA, 75 bp, synthetic construct
  source 1..75: mol_type = other DNA
tccgtcgcatcggcactcattctttacgaagcccaacgtcagcggcaaaacgcaggcatgtaccttcgtgaaaac

SEQ ID NO: 719674 - DNA, 75 bp, synthetic construct
  source 1..75: mol_type = other DNA
gtggtgtgcatcgcggtgcggaacatacattcgatatttctgccgatttacaggaactggcaaatactaatgtca

SEQ ID NO: 719675 - DNA, 75 bp, synthetic construct
  source 1..75: mol_type = other DNA
gattatcgcggcactggcaggaattaaagtatttgcaacgggggggattggtggtgtgcatcgcggtgcggaaca

SEQ ID NO: 719676 - DNA, 75 bp, synthetic construct
  source 1..75: mol_type = other DNA
tatttgccaccgggggaattggtggtgtgcatcgcggggcggaacataccttcgatatttctgccgatttacagg

SEQ ID NO: 719677 - DNA, 75 bp, synthetic construct
  source 1..75: mol_type = other DNA
gaaggtgaacttttacatcgtgatgatttacctgcggatgtcgcggagctggtgctgtatcagcaatgggatacc

SEQ ID NO: 719678 - DNA, 75 bp, synthetic construct
  source 1..75: mol_type = other DNA
atgtcaaaaaaatgccactcggcagcgtcaccaagatctgtttctgtggcgatcacgacgatcttatgcgcttgc

SEQ ID NO: 719679 - DNA, 75 bp, synthetic construct
  source 1..75: mol_type = other DNA
gcgcgcggagctcccgcatttaccggtgattggacattgccgaaatcaggctgtctctcactatttgacgcactg

SEQ ID NO: 719680 - DNA, 75 bp, synthetic construct
  source 1..75: mol_type = other DNA
attacacccgcccgacctgtattttgatgggtcaggagaaaacgggcatcacgcaggaagcgttagtactggcgg

SEQ ID NO: 719681 - DNA, 75 bp, synthetic construct
  source 1..75: mol_type = other DNA
cgcaaaggcctgccttacccccacgtcaatcagcaaggcgagatcgaagctgatgctgactggtggtccaccatg

SEQ ID NO: 719682 - DNA, 75 bp, synthetic construct
  source 1..75: mol_type = other DNA
caccgcaccattggcgatgccgtcgctcatctgaaaggccagggcatgcagattctggcaacccatctttctgat

SEQ ID NO: 719683 - DNA, 75 bp, synthetic construct
  source 1..75: mol_type = other DNA
tggacagtgcaaaagagattgcccgcgcgatggcagtgaaatggcaaaccggcctgaacggtggtctggttgttg

SEQ ID NO: 719684 - DNA, 75 bp, synthetic construct
  source 1..75: mol_type = other DNA
gcaacagcgaatctctggtatgtggcgtgttccccaaccaggacggtacgttcaccgcgatgacgtataacaaaa

SEQ ID NO: 719685 - DNA, 75 bp, synthetic construct
  source 1..75: mol_type = other DNA
cggctggaaaaccgactggcgtaccgacagacaggcacgtcagcaccgcactgaccgccttgctgtgaacgacca

SEQ ID NO: 719686 - DNA, 75 bp, synthetic construct
  source 1..75: mol_type = other DNA
tttaccgcgatgacgtataccagaagcaaaacgtttaaaactgaagctggcgcgcgtcgctggttagcaagaaac

SEQ ID NO: 719687 - DNA, 75 bp, synthetic construct
  source 1..75: mol_type = other DNA
tttgtggtgctggcgggcttactcatggcttaaagcaagccggattagatgtagtcgctggtattgatatagaga

SEQ ID NO: 719688 - DNA, 75 bp, synthetic construct
  source 1..75: mol_type = other DNA
ttcaccgcaatgacgtataccaaaagcaaaacgtttaaaaccgaaaatggtgcccgtcgctggcttgccaaaaat

SEQ ID NO: 719689 - DNA, 75 bp, synthetic construct
  source 1..75: mol_type = other DNA
tccaaaccaggacggcacgttcaccgcaatgacgtataccaaaagccaaacgtttaaaaccgaaaatggtgcccg

SEQ ID NO: 719690 - DNA, 75 bp, synthetic construct
  source 1..75: mol_type = other DNA
attaaccagcccgtccgccaggaaatcgatgcctttttctgcgcattcagggagaaagttgaacaactgcgtaac

SEQ ID NO: 719691 - DNA, 75 bp, synthetic construct
  source 1..75: mol_type = other DNA
ctctcaggaatttcaggatctgccagacggtgctgagacgacgcttacggatattctgacggatgatggctggct

SEQ ID NO: 719692 - DNA, 75 bp, synthetic construct
  source 1..75: mol_type = other DNA
acgatgaaagcaggcaaatcaaccaccatcaacgccattgtggggcaggaaattctgcctaaccgtaaccgcccc

SEQ ID NO: 719693 - DNA, 75 bp, synthetic construct
  source 1..75: mol_type = other DNA
aggacggtacgttcaccgcgatgacgtataccaaaagcaaaacgtttaaaaccgaaaatggtgcccgtcgctggc

SEQ ID NO: 719694 - DNA, 75 bp, synthetic construct
  source 1..75: mol_type = other DNA
attcagtgatcgcagggaagcccttgaactgatgacgcaaatcgaatcgaccgtgaccagcctgcaccgtgaggc

SEQ ID NO: 719695 - DNA, 75 bp, synthetic construct
  source 1..75: mol_type = other DNA
gcattaaatgaaagggttcctgagctcattactgacagtaaggcgttaagggaagagctggagacaatgctgtga

SEQ ID NO: 719696 - DNA, 75 bp, synthetic construct
  source 1..75: mol_type = other DNA
ggcggcacgctgtatatgcgccagctgggcgagtcctatctccctcgctggcccaaggaagacaaagaggattac

SEQ ID NO: 719697 - DNA, 75 bp, synthetic construct
  source 1..75: mol_type = other DNA
agatccggaaaatggcatcgtggttactcttaataccgcctatttggatgccagtaatgagaaagatttcactgc

SEQ ID NO: 719698 - DNA, 75 bp, synthetic construct
  source 1..75: mol_type = other DNA
agggattaacgcgctgtggaaacgttttgagctgggttatatctacgcacataataagattgatgaatttagtgg

SEQ ID NO: 719699 - DNA, 75 bp, synthetic construct
  source 1..75: mol_type = other DNA
tattgggaaacataatgagccaacacttgtaataaatggaaaaacaatagagtttagtggattagatgatgcgtt

SEQ ID NO: 719700 - DNA, 75 bp, synthetic construct
  source 1..75: mol_type = other DNA
tgacggattaagccagcagcagtacatgagcatttgtattccgatgctcatgtgtgccgatgccatttacttact

SEQ ID NO: 719701 - DNA, 75 bp, synthetic construct
  source 1..75: mol_type = other DNA
gcgctggctttggcgatatgggttttagagcgatgggatttttcccggcgctgttatgtgaaatagatccaaaaa

SEQ ID NO: 719702 - DNA, 75 bp, synthetic construct
  source 1..75: mol_type = other DNA
taccacgcctggaatggcgacgttgtggcggtaaagccacgctgcggctgacgctattcagcgaaagctcccttc

SEQ ID NO: 719703 - DNA, 75 bp, synthetic construct
  source 1..75: mol_type = other DNA
atttatcgccacactggtgagtatcaagcccttgcctgggttacatttaaccaccacgcgagaacaacactggcc

SEQ ID NO: 719704 - DNA, 75 bp, synthetic construct
  source 1..75: mol_type = other DNA
gtcacgaaccgttcacccgagaatggtacgccggttctgcgggctatctctcattacagcaaagcgaattctgcg

SEQ ID NO: 719705 - DNA, 75 bp, synthetic construct
  source 1..75: mol_type = other DNA
taaaaaatgcttatggctataccgataataaggggaattttgtcgatcagtccaatcgttccggttatggtatta

SEQ ID NO: 719706 - DNA, 75 bp, synthetic construct
  source 1..75: mol_type = other DNA
ctgccagcgattacagtctgatacccagacactggatattttgccgccgcaggtacttcgcctgcgaaaagtaca

SEQ ID NO: 719707 - DNA, 75 bp, synthetic construct
  source 1..75: mol_type = other DNA
gtatgccggttctgcgggttatctctcattacaacaaagcgaattctgcgtttccctgcgctcggcgaaaatcag

SEQ ID NO: 719708 - DNA, 75 bp, synthetic construct
  source 1..75: mol_type = other DNA
ctcttagcatgtatgcggttgatgcggttgcagctattgcagaggtgagaggctggaacgcctgtcgtgccgcca

SEQ ID NO: 719709 - DNA, 75 bp, synthetic construct
  source 1..75: mol_type = other DNA
ataatatcaagccattcagaatctgtagctatgaaaatttcgcttctgctgaattaccctctcagaagacacgtt

SEQ ID NO: 719710 - DNA, 75 bp, synthetic construct
  source 1..75: mol_type = other DNA
tcaccgggatggcggaagacctgcagagtctggtgggggccacggtggtccgccgccgggtgtatgcccgttttc

SEQ ID NO: 719711 - DNA, 75 bp, synthetic construct
  source 1..75: mol_type = other DNA
atctgccggtgcgcagtgagcaaggaacgatggcgatgacacatatggcgagtgcactgatgcgcagtcgcgtgg

SEQ ID NO: 719712 - DNA, 75 bp, synthetic construct
  source 1..75: mol_type = other DNA
tttccaaagttatttcagattctgcggcgtcagggataccagtggaatcataaaaggatccaccgtatttactgt

SEQ ID NO: 719713 - DNA, 75 bp, synthetic construct
  source 1..75: mol_type = other DNA
ttcgtcaggcctgccggagtctgaatctgagcagaacggtttaccattaccgcccggataccactcgtgatgaac

SEQ ID NO: 719714 - DNA, 75 bp, synthetic construct
  source 1..75: mol_type = other DNA
cattatcgctgagcaggacggtctatttttaccagcccgatacccggcgcgatgaaccggtgatccaggtgctga

SEQ ID NO: 719715 - DNA, 75 bp, synthetic construct
  source 1..75: mol_type = other DNA
aggaaaactcgccgctttatacaatgggtaagcgtcgtctcagcaccgtctggcagatcctgaaattcctgagag

SEQ ID NO: 719716 - DNA, 75 bp, synthetic construct
  source 1..75: mol_type = other DNA
tcagacagaccggggaagagaattttttgccgttaaagtgcaggaaagattacaagaatacggcatcaagtttcg

SEQ ID NO: 719717 - DNA, 75 bp, synthetic construct
  source 1..75: mol_type = other DNA
tatacatctgttgatgattgcactcgctacagagtcctgaggctctactctcgtcgcacggcggcaaacacactg

SEQ ID NO: 719718 - DNA, 75 bp, synthetic construct
  source 1..75: mol_type = other DNA
taaaagaatacagcatcaagtttcgtccaaataagccagcgtcgcctcatcttaacggaaaggttgaacgttccc

SEQ ID NO: 719719 - DNA, 75 bp, synthetic construct
  source 1..75: mol_type = other DNA
tacagtgggtaaaactctatgaaacgtctggtgacgcggggttcgtatgccgtcgctgcggtatttcccgcccca

SEQ ID NO: 719720 - DNA, 75 bp, synthetic construct
  source 1..75: mol_type = other DNA
tcgactataacgatatgctggaggcgtgggatattaacgatgcactgatgggtggcacgcttgaaatgcgcaggc

SEQ ID NO: 719721 - DNA, 75 bp, synthetic construct
  source 1..75: mol_type = other DNA
ggagcaggcattgtccgaggctcagatcctgagcaagagtggcaggaaatcgacaacaaagcggcagggctgcgc

SEQ ID NO: 719722 - DNA, 75 bp, synthetic construct
  source 1..75: mol_type = other DNA
acatatagacagaagtgaaggagctaaatatgtgggtgttattgccgggtattatccgtttcccgggaaaaaaca

SEQ ID NO: 719723 - DNA, 75 bp, synthetic construct
  source 1..75: mol_type = other DNA
agatatccctgttaatgttattgaggatgggtggtggaacaaatcattacatgcgtcactatctcctctttttaa

SEQ ID NO: 719724 - DNA, 75 bp, synthetic construct
  source 1..75: mol_type = other DNA
gtcaccgaccctacccgggccatccaatattttctgccggagatctttgacgatacgcatacccttcccgccaaa

SEQ ID NO: 719725 - DNA, 75 bp, synthetic construct
  source 1..75: mol_type = other DNA
attgcactgcaatcgctggcagcagcgccagttggtaaattttatgaatacaaaccagtggggtatcagcgtctg

SEQ ID NO: 719726 - DNA, 75 bp, synthetic construct
  source 1..75: mol_type = other DNA
ttccttacgaaagacgaacgagaacagttaaccaatctccttgctcgcaaaggtgtagagacggttctgacactg

SEQ ID NO: 719727 - DNA, 75 bp, synthetic construct
  source 1..75: mol_type = other DNA
tagctatttttataactgcttgttctgataaatattctgagcaggataaaattcaggccattaataatgttgatg

SEQ ID NO: 719728 - DNA, 75 bp, synthetic construct
  source 1..75: mol_type = other DNA
gcgctggtgctaacgcgttctacgaaggaatagacaacgagggcaatatgattcgcgtccccgccagttctattg

SEQ ID NO: 719729 - DNA, 75 bp, synthetic construct
  source 1..75: mol_type = other DNA
gatcttgatgcaatttctggcgcatcaattgacgatcttggcttcatgacaggtattacaggttcttcaggttct

SEQ ID NO: 719730 - DNA, 75 bp, synthetic construct
  source 1..75: mol_type = other DNA
aagatgaaatgcgtcgtttgggaatttctcctgagtctgttgccgaaatgcatgttaatgatccacagggattcc

SEQ ID NO: 719731 - DNA, 75 bp, synthetic construct
  source 1..75: mol_type = other DNA
cgccttatcacttcacttacctggcggtaaaattcgccgggttagccaaatcacgctaagagaggatgcagaatg

SEQ ID NO: 719732 - DNA, 75 bp, synthetic construct
  source 1..75: mol_type = other DNA
gttaaaggtaagccctggtacgataactgctatttctataattttgatgaaattccatttcgcggcaaagaggga

SEQ ID NO: 719733 - DNA, 75 bp, synthetic construct
  source 1..75: mol_type = other DNA
atgaaattgatcattaccgaagattaccaggaaatgagccgtgtcgccgcacatcatctgcttggttatatgtca

SEQ ID NO: 719734 - DNA, 75 bp, synthetic construct
  source 1..75: mol_type = other DNA
ggtttaccaaagagcagttaatagcccacgcagaggaggctattgaatcacagagactgtgcataccaggcacaa

SEQ ID NO: 719735 - DNA, 75 bp, synthetic construct
  source 1..75: mol_type = other DNA
gaagcagaacatgcagacttttggtgaaacaactgctgaggttgtggactatatggggtcagtttggagatcgga

SEQ ID NO: 719736 - DNA, 75 bp, synthetic construct
  source 1..75: mol_type = other DNA
atcacgacgtttatcaaacaagcgaaaagaaatcattcaactccgtaagttgactatagtgaatccaggcttcat

SEQ ID NO: 719737 - DNA, 75 bp, synthetic construct
  source 1..75: mol_type = other DNA
ataaacaggcggataatcttcttatttatatagagaaatataaagcaaaatttgaagagcgtcttgttgcctaca

SEQ ID NO: 719738 - DNA, 75 bp, synthetic construct
  source 1..75: mol_type = other DNA
ttttctgccgatgcaattttaactattggcagaaataaaactactacgaaaaagctgatgggagttgattcatga

SEQ ID NO: 719739 - DNA, 75 bp, synthetic construct
  source 1..75: mol_type = other DNA
aagagtttccagctatcactctttactacgcagcagaagccccgcattccgctcaacccaccctcccccagaact

SEQ ID NO: 719740 - DNA, 75 bp, synthetic construct
  source 1..75: mol_type = other DNA
atatagctggcacaatgtctgataatttcctgcctgaactcaaacgtgcgcatgataagttagtacaacaaaatt

SEQ ID NO: 719741 - DNA, 75 bp, synthetic construct
  source 1..75: mol_type = other DNA
actccattctggatagcgacggcgataagatacacggcgacgatagtgatgaccgttacggcgcacgcgttcgct

SEQ ID NO: 719742 - DNA, 75 bp, synthetic construct
  source 1..75: mol_type = other DNA
actccattctggatagcgacggtgataaaaaacacggtgatgatactgatgaccgttacggcgcacgcgttcgct

SEQ ID NO: 719743 - DNA, 75 bp, synthetic construct
  source 1..75: mol_type = other DNA
attaatggtatctaccctaaagatgaacagtatcttgaaattatcagggatgtcgggcttgtaaaagagattagt

SEQ ID NO: 719744 - DNA, 75 bp, synthetic construct
  source 1..75: mol_type = other DNA
atggaaacagctgtagcgtactataaggatggtttgccttatgatgataaggggcaggttatcattactcttttg

SEQ ID NO: 719745 - DNA, 75 bp, synthetic construct
  source 1..75: mol_type = other DNA
atggctctttccgacatcgccttaaaacgctctgtaacgcgttctgagcgttttttcccgtttcgttatagtcag

SEQ ID NO: 719746 - DNA, 75 bp, synthetic construct
  source 1..75: mol_type = other DNA
ttggttctgattttaaaaatgcaatagaaactggtaactggcgacctttgtttgtcacgctggagaaaagtgcgg

SEQ ID NO: 719747 - DNA, 75 bp, synthetic construct
  source 1..75: mol_type = other DNA
ggggcgatggtcgatgccgctatcgtcatgatcgagaatgcccataaacggttggaagagtggcagcatcagcat

SEQ ID NO: 719748 - DNA, 75 bp, synthetic construct
  source 1..75: mol_type = other DNA
ctggatcgaacgttttggtattgatgcgctgcgcgtcgatgcggtggcgtcaatgatttatcgcgactacagccg

SEQ ID NO: 719749 - DNA, 75 bp, synthetic construct
  source 1..75: mol_type = other DNA
gaccgatgactttgcgcttgccgaatttgatggcacgaacttgtatgaacacagcgatccgcgcgaaggctatca

SEQ ID NO: 719750 - DNA, 75 bp, synthetic construct
  source 1..75: mol_type = other DNA
ctcgaaatgacggtctggtgtattgttggcatggcgcttgagcgtaaagaacctcttcaccagattgtgaatcac

SEQ ID NO: 719751 - DNA, 75 bp, synthetic construct
  source 1..75: mol_type = other DNA
actacctggtgggtaatgctctgtactggattgaacgctttggtattgatgcgctgcgcgtggatgccgtggcgt

SEQ ID NO: 719752 - DNA, 75 bp, synthetic construct
  source 1..75: mol_type = other DNA
gagctgtttatccccggcgcgcagcatggtcagctgtataaatacgagatgattgatgccaacggtaagctgcga

SEQ ID NO: 719753 - DNA, 75 bp, synthetic construct
  source 1..75: mol_type = other DNA
gggacggtcgccgtcatccgatgcgcctgcgtaaagagagcggcatctgggaactgtttatccctggggcgcata

SEQ ID NO: 719754 - DNA, 75 bp, synthetic construct
  source 1..75: mol_type = other DNA
cgcaaaggaaaagtctgccatctgctgacgtcgatgacggacgccatacgcttccccgggacgtataccggagct

SEQ ID NO: 719755 - DNA, 75 bp, synthetic construct
  source 1..75: mol_type = other DNA
cttatgtgctgtaccagttgccgggcgggttcaacactttcctgcgtgaaggtacgcaggagcagatcgacaaga

SEQ ID NO: 719756 - DNA, 75 bp, synthetic construct
  source 1..75: mol_type = other DNA
ggtctgcgtatggatagctgctgtgaaatcacctttgacgatgtgaaactggacgagaaagacatgttcggtcgg

SEQ ID NO: 719757 - DNA, 75 bp, synthetic construct
  source 1..75: mol_type = other DNA
ccggaggagaaatggcggatctgtacagtcatcgctgggaaatcgaactgggatacagggagataaaacagacga

SEQ ID NO: 719758 - DNA, 75 bp, synthetic construct
  source 1..75: mol_type = other DNA
ggcagcattgtccttcatcatatttgcgacgatgtataacgcctacacacagcgatattgtactttacaggttac

SEQ ID NO: 719759 - DNA, 75 bp, synthetic construct
  source 1..75: mol_type = other DNA
aaaggagaggccctggaaataccccacagccccgaaaaagagccagtcagttgcttaactgactggcattacccc

SEQ ID NO: 719760 - DNA, 75 bp, synthetic construct
  source 1..75: mol_type = other DNA
tcgactggcacctgctggaaggtggcgataactggcaccacggcgtacagcgtctggtgcgcgatctgaaccaca

SEQ ID NO: 719761 - DNA, 75 bp, synthetic construct
  source 1..75: mol_type = other DNA
caccgccagtccctttagcaccagcggtacatcgagagacattaaatgaaatgataggccttcctaccaatacag

SEQ ID NO: 719762 - DNA, 75 bp, synthetic construct
  source 1..75: mol_type = other DNA
gcaattccgcatgacccaacaggacgcaccgctggtcaccgccgagtgcatcacactggaaagcgactggcgcag

SEQ ID NO: 719763 - DNA, 75 bp, synthetic construct
  source 1..75: mol_type = other DNA
gaaaataaattcttgctttcaatataccccgtatttcatactcgtttattccctgactcaaaattaattacagag

SEQ ID NO: 719764 - DNA, 75 bp, synthetic construct
  source 1..75: mol_type = other DNA
tttcttccggcacagttcttaatcttcatttcagtgaaccggttacaggacagtcagcctggcgggcagggataa

SEQ ID NO: 719765 - DNA, 75 bp, synthetic construct
  source 1..75: mol_type = other DNA
ggccgggatactggatgactcacagcgccgcttgcacattcgttatccggagcggctaactgcaatattgaaaat

SEQ ID NO: 719766 - DNA, 75 bp, synthetic construct
  source 1..75: mol_type = other DNA
ggggactggtttggctatctggggttgtttggttctgagtcctaccactgccacgcctgcgttttgcagacagca

SEQ ID NO: 719767 - DNA, 75 bp, synthetic construct
  source 1..75: mol_type = other DNA
ggcgcgcacgctgatactatggatggcgttaccggcacgcgtttttctgtctgggcaccaaatgcccgacgagtc

SEQ ID NO: 719768 - DNA, 75 bp, synthetic construct
  source 1..75: mol_type = other DNA
ggcgcacacgcagataccatggatggcgttaccggcacgcgtttttctgtctgggcacccaatgcccgccgagtc

SEQ ID NO: 719769 - DNA, 75 bp, synthetic construct
  source 1..75: mol_type = other DNA
acttccttgtcggtaacgcgctttactggattgaacgttttggtattgatgcgctgcgcgtcgatgcggtggcgt

SEQ ID NO: 719770 - DNA, 75 bp, synthetic construct
  source 1..75: mol_type = other DNA
tttctgaaaatgaattgaaaaaattttatcaaacaagaagatacccttacattattagttttacatataatctag

SEQ ID NO: 719771 - DNA, 75 bp, synthetic construct
  source 1..75: mol_type = other DNA
acgaaaaaagtggccgggactgggaaatgaggtgacagcccgcctgctgaccgtgacgcgcaaaggaaaagtctg

SEQ ID NO: 719772 - DNA, 75 bp, synthetic construct
  source 1..75: mol_type = other DNA
gagattgccagccacggtcgtcagcattcattaagcctgacactaccaccgctggccactatctggctggttcgg

SEQ ID NO: 719773 - DNA, 75 bp, synthetic construct
  source 1..75: mol_type = other DNA
gacgttaatggataaaggttattactcactgggactgttaaatgcctggagcctggcgggagaacaccgccactg

SEQ ID NO: 719774 - DNA, 75 bp, synthetic construct
  source 1..75: mol_type = other DNA
acctcttcaccagattgtgaatcgtctggacatcatgctgccgggcaatcgccccttcgttgcccccagtgccgt

SEQ ID NO: 719775 - DNA, 75 bp, synthetic construct
  source 1..75: mol_type = other DNA
gatcgtaaggggtttagctggcaagatcagtcgccttttattactactgtagacattttaagagccatacgaact

SEQ ID NO: 719776 - DNA, 75 bp, synthetic construct
  source 1..75: mol_type = other DNA
gaacatatcgatgccggtatctctttagtcgatgccgtgaattttctggtggaaaagtacgaactggttcgcatc

SEQ ID NO: 719777 - DNA, 75 bp, synthetic construct
  source 1..75: mol_type = other DNA
tgtgaatgatgacttcgataccgcgttgaccgatttgaagaccattattcgcgccgaacgtctgcgcatgagccg

SEQ ID NO: 719778 - DNA, 75 bp, synthetic construct
  source 1..75: mol_type = other DNA
cagggagataaaacagacgatgcaactgagcaggctgacgctgagaagtaaaaagccggagcttgtggagcaaga

SEQ ID NO: 719779 - DNA, 75 bp, synthetic construct
  source 1..75: mol_type = other DNA
aagtctgccatctgctgacgtcgatgacggacgccatgcgcttccccggaggagaaatggcggatctgtacagtc

SEQ ID NO: 719780 - DNA, 75 bp, synthetic construct
  source 1..75: mol_type = other DNA
agttacagagaacttaagatgaaaacattacctgacacacacgtacgggaggcatcgtgctgcccgtctcccgtc

SEQ ID NO: 719781 - DNA, 75 bp, synthetic construct
  source 1..75: mol_type = other DNA
cgcgggcggcgaagccttgtctgtcgcccgttgcagtctggcaaatgcttcttacacggctactggaaaaacact

SEQ ID NO: 719782 - DNA, 75 bp, synthetic construct
  source 1..75: mol_type = other DNA
gctgtggggtgtctggatttgcccctatatttccagacatctgttatcacttaacccattacaagcccgctgccg

SEQ ID NO: 719783 - DNA, 75 bp, synthetic construct
  source 1..75: mol_type = other DNA
atgaacactctacctgctacaatttcgcaggcggcgaagccctgcctgtcgccagtggctgtctggcaaatgcta

SEQ ID NO: 719784 - DNA, 75 bp, synthetic construct
  source 1..75: mol_type = other DNA
atgaaatttctacttgcaacaaacttgcggtcggcgaaaccatgcctgtcatccgttgctgtctggcaaatgctg

SEQ ID NO: 719785 - DNA, 75 bp, synthetic construct
  source 1..75: mol_type = other DNA
ggcatcgtgctgcccgtctcccgtcaccatctggcagacactgctcacccgactgctggaccagcattacggcct

SEQ ID NO: 719786 - DNA, 75 bp, synthetic construct
  source 1..75: mol_type = other DNA
gtctacgcggtcgcgatcaggacagcgaagaggtcattgcaaagcgtatggcgcaagctgttgcagaaatgagcc

SEQ ID NO: 719787 - DNA, 75 bp, synthetic construct
  source 1..75: mol_type = other DNA
tatgggcgcttacgctatcgatctgctgctggcaggttacggcggtcgttgcgtaggtatccagaacgaacagct

SEQ ID NO: 719788 - DNA, 75 bp, synthetic construct
  source 1..75: mol_type = other DNA
cttacgaccgtattctggcttcccgtatgggcgcttacgctatcgatctgctgctggcaggttacggcggtcgtt

SEQ ID NO: 719789 - DNA, 75 bp, synthetic construct
  source 1..75: mol_type = other DNA
tgtgatgttgacgaactggcgcatttcatcgagaaagaaaccggtcgtgaaacccgcgcaactgtgctgggccac

SEQ ID NO: 719790 - DNA, 75 bp, synthetic construct
  source 1..75: mol_type = other DNA
ttgtgaaattaccgacgagaaggggaagtgaaccgccccgggaatcctggagactaaacttcctgagaaagaggt

SEQ ID NO: 719791 - DNA, 75 bp, synthetic construct
  source 1..75: mol_type = other DNA
gaagggaaagggccttcccgagagtggtaaaggagaggccctggaaataccccacaaccccgaaaaagagccagt

SEQ ID NO: 719792 - DNA, 75 bp, synthetic construct
  source 1..75: mol_type = other DNA
gttcctcggttctgcgcgcttcccggaattccgcgacgagaacatccgcgccgtggctatcgaaaacctgaaaaa

SEQ ID NO: 719793 - DNA, 75 bp, synthetic construct
  source 1..75: mol_type = other DNA
ggtaaaggcgatcatctggtgaagctgaaaaccagcccgcaggcacgaaaaaagtggccgggactgggaaatgaa

SEQ ID NO: 719794 - DNA, 75 bp, synthetic construct
  source 1..75: mol_type = other DNA
atgcaactgagcaggctgacgctgagaagtaaaaagccggagcttgtggagcaagagctgtggggtgtcttactg

SEQ ID NO: 719795 - DNA, 75 bp, synthetic construct
  source 1..75: mol_type = other DNA
gaaaggttactggccgaatcaactgagtttctcagaatcatgcggaatggtgatgagaatgctgatgacattgca

SEQ ID NO: 719796 - DNA, 75 bp, synthetic construct
  source 1..75: mol_type = other DNA
caagtggcggtgatgcgcctggcatgaacgcagcaatccgtggtgtcgtacgtgcggcgctgtcggaaggtctgg

SEQ ID NO: 719797 - DNA, 75 bp, synthetic construct
  source 1..75: mol_type = other DNA
attcagcgcggtggttctccggtgccttacgaccgtattctggcttcccgtatgggtgcttacgccattgaactg

SEQ ID NO: 719798 - DNA, 75 bp, synthetic construct
  source 1..75: mol_type = other DNA
caagcggcggtgatgcgccaggcatgaacgccgcaattcgcggggttgttcgttctgcgctgacagaaggtctgg

SEQ ID NO: 719799 - DNA, 75 bp, synthetic construct
  source 1..75: mol_type = other DNA
tcgactccggttggcgacgtgaaagaactggcagctatccgtgaagtgttcggcgataagagcccggcgatttct

SEQ ID NO: 719800 - DNA, 75 bp, synthetic construct
  source 1..75: mol_type = other DNA
ctaaatacaacgacaccccggaaaaagcctcccgtacttacgacgctcaccgtgacggtttcgttatcgctggcg

SEQ ID NO: 719801 - DNA, 75 bp, synthetic construct
  source 1..75: mol_type = other DNA
agcctcccgtacttacgacgctcaccgtgacggtttcgttatcgctggcggcggcggtatggtggtggttgaaga

SEQ ID NO: 719802 - DNA, 75 bp, synthetic construct
  source 1..75: mol_type = other DNA
cactctctgccgggcgggggcgcatgatatccctgaggggtatgtgcgcgtggctgccgtgcatggtgtgcctgc

SEQ ID NO: 719803 - DNA, 75 bp, synthetic construct
  source 1..75: mol_type = other DNA
aacgaatgcggtatcggtgacgtggttgaaatccgcgaatgtcgtccgctgtccaagactaaatcctggacgctg

SEQ ID NO: 719804 - DNA, 75 bp, synthetic construct
  source 1..75: mol_type = other DNA
tggcgacaagagcccggcaatttctgcaaccaaagcaatgaccggtcactcactgggcgcggcgggtgtgcagga

SEQ ID NO: 719805 - DNA, 75 bp, synthetic construct
  source 1..75: mol_type = other DNA
ctagcaggatataatggtgagatgctcgttagtaatgcacggaaacgtataaaaagaatgagctccggtcatgcg

SEQ ID NO: 719806 - DNA, 75 bp, synthetic construct
  source 1..75: mol_type = other DNA
tgttccgccgctgcgccagttgctctggcgtcatttacgtcgtcatggcctgtggcatctggcgggcgatgttgt

SEQ ID NO: 719807 - DNA, 75 bp, synthetic construct
  source 1..75: mol_type = other DNA
aaatctttccggcgggcggctatacacccatgcgctcgcggaactcctcccacaatttcacctgaccgcgcccct

SEQ ID NO: 719808 - DNA, 75 bp, synthetic construct
  source 1..75: mol_type = other DNA
ttaacattgaagagctggacgatcaggctgcgggtctgaacatcgtgacagaaactatcgatcgcgagctgacca

SEQ ID NO: 719809 - DNA, 75 bp, synthetic construct
  source 1..75: mol_type = other DNA
agttaagtcaggtggaacatatgaggagatagttgatgagtatcgtaaccagcttggtgttgaagctcgagctct

SEQ ID NO: 719810 - DNA, 75 bp, synthetic construct
  source 1..75: mol_type = other DNA
gtcaaagtttcgttacttgaggcgctcaaagatattgcttatacgccagaacttatagattttgttaagaatgaa

SEQ ID NO: 719811 - DNA, 75 bp, synthetic construct
  source 1..75: mol_type = other DNA
atgaagttaccgtattgcgcgacggtcagtggatcgccaccgaaccgctggcaggactgacgatggacaagatca

SEQ ID NO: 719812 - DNA, 75 bp, synthetic construct
  source 1..75: mol_type = other DNA
atgatgaaaaaaagtattctggcgtttctgttactcaccagttcggcagcggcgttggcggctccgcaggtgatt

SEQ ID NO: 719813 - DNA, 75 bp, synthetic construct
  source 1..75: mol_type = other DNA
ttctgttactcaccagttctgcagctgcgctggcggcaccgcaggtgattaccgtcagccgttttgaagtgggta

SEQ ID NO: 719814 - DNA, 75 bp, synthetic construct
  source 1..75: mol_type = other DNA
cagggctggggatgggtaaggtgaaatctatcaatcagtaccggcttacgccgggcttcggcggttttacttcag

SEQ ID NO: 719815 - DNA, 75 bp, synthetic construct
  source 1..75: mol_type = other DNA
aatggcgtatgagagccgcccgaaggaaattagggaagggtggttaatgtggttgggtctgggcaatccatcata

SEQ ID NO: 719816 - DNA, 75 bp, synthetic construct
  source 1..75: mol_type = other DNA
actggcttatgaaagccgccctaaagaaattcgcgacggctggttaatgtggttaggtctcggtgaaccacgtta

SEQ ID NO: 719817 - DNA, 75 bp, synthetic construct
  source 1..75: mol_type = other DNA
ataatgcttgagcagcacgccattgcaataccgcattgtgaggcgattcatgctaagtcgtcagccatttatctg

SEQ ID NO: 719818 - DNA, 75 bp, synthetic construct
  source 1..75: mol_type = other DNA
accagacagggagctaccgtcctcccgtgcgaaaacggtaccgattagcgctttcgcttgataaaagagaggaga

SEQ ID NO: 719819 - DNA, 75 bp, synthetic construct
  source 1..75: mol_type = other DNA
cttgatcgctacagactcgcgacgcaaacttactatgaggatccagacggaagctatgaggcatttagtgtcaaa

SEQ ID NO: 719820 - DNA, 75 bp, synthetic construct
  source 1..75: mol_type = other DNA
aaagttaatggaagaatggcatgatgctatatcaatattttctgccagagatcagctgagtctttgttttctaat

SEQ ID NO: 719821 - DNA, 75 bp, synthetic construct
  source 1..75: mol_type = other DNA
ccttccatgccgctggcgcggcatcaaaaaccctttcttccccagtgatctctgtactcaatgtgtattttcatt

SEQ ID NO: 719822 - DNA, 75 bp, synthetic construct
  source 1..75: mol_type = other DNA
gcgcgtggggcgtcatgccgtccgtcaggagattcgtggttttttcagggaagccgctgaggcctggcagaatgc

SEQ ID NO: 719823 - DNA, 75 bp, synthetic construct
  source 1..75: mol_type = other DNA
acacaccagaacagaaagcgattatctgggacaggtataagcaaggtgattccctgcatgatatcgccagaatgt

SEQ ID NO: 719824 - DNA, 75 bp, synthetic construct
  source 1..75: mol_type = other DNA
taaaaaaatcaaattgctatgcaaatggaacatcattaaaggaatttatactcaagggaaattgttacacgccaa

SEQ ID NO: 719825 - DNA, 75 bp, synthetic construct
  source 1..75: mol_type = other DNA
cgatttttgtgctcgaaaacgtcaaaaacctgaaaagccacgaccagggtaaaacgttccgcatcatcatgcaga

SEQ ID NO: 719826 - DNA, 75 bp, synthetic construct
  source 1..75: mol_type = other DNA
gtcaaaaacctgaaaagccacgaccaggggaaaacgttccgtatcatcatgcagacgttggacgaactgggctat

SEQ ID NO: 719827 - DNA, 75 bp, synthetic construct
  source 1..75: mol_type = other DNA
ggcacatcatccgcattatgcgtttcgctttatcgatctatttgccggaattggcggcatccgtcgcggttttga

SEQ ID NO: 719828 - DNA, 75 bp, synthetic construct
  source 1..75: mol_type = other DNA
tggaagtgggcaatattagccttacgaccagtgaaccagactttgaatttgacgtatacgcacaagcagaggaat

SEQ ID NO: 719829 - DNA, 75 bp, synthetic construct
  source 1..75: mol_type = other DNA
atgaacgacagagaatttagagcgatgcttcaagcatcaagagagcgcaacagacacaatggttacagccacaca

SEQ ID NO: 719830 - DNA, 75 bp, synthetic construct
  source 1..75: mol_type = other DNA
attacgccacgaggcagatatatgccaacacgcaaaacaacaaagaataacttaaaaactttcttgatgagcttt

SEQ ID NO: 719831 - DNA, 75 bp, synthetic construct
  source 1..75: mol_type = other DNA
ttgaggttggtaatatcagccttacgaccagtgagccagatttcgagtttgacccgtatttagttacagaggaat

SEQ ID NO: 719832 - DNA, 75 bp, synthetic construct
  source 1..75: mol_type = other DNA
agctaccatctgataagtattgcgctaatttaactaccatttgcaataaagttatcgagacaatcaatcatcatg

SEQ ID NO: 719833 - DNA, 75 bp, synthetic construct
  source 1..75: mol_type = other DNA
tccgtttataccggttttacgtcagttgggattcagtggtagcgatgaacaagtgctggaaaaggttgcccgcca

SEQ ID NO: 719834 - DNA, 75 bp, synthetic construct
  source 1..75: mol_type = other DNA
tgcttcaggcatcaaaagaacgtaacaagcacaactcctacgcttacacaaacacccccgccagctacgaactgc

SEQ ID NO: 719835 - DNA, 75 bp, synthetic construct
  source 1..75: mol_type = other DNA
acagcatcaagaattatctgactaactttgacagctacgagcaattaccgagcaagcttgacgacattcttatcg

SEQ ID NO: 719836 - DNA, 75 bp, synthetic construct
  source 1..75: mol_type = other DNA
cggaaatgggaaatatcagccttacgacaagtgagccagatttcgagtttgacccgtatttagttacagaggaat

SEQ ID NO: 719837 - DNA, 75 bp, synthetic construct
  source 1..75: mol_type = other DNA
cttaaaaactttcttgatgagttttgacagctacgaacaattaccgtcacgaattgaagatgtaattatcggcac

SEQ ID NO: 719838 - DNA, 75 bp, synthetic construct
  source 1..75: mol_type = other DNA
ggtatggagtaagactgccagatgttcctgttatagatactatgttatcgggattgtgggccacagaagacggta

SEQ ID NO: 719839 - DNA, 75 bp, synthetic construct
  source 1..75: mol_type = other DNA
acacaaacttaatgatgcaatgcttctttaaggcacgtaataagtacggattttttaaattaccctctgaaattg

SEQ ID NO: 719840 - DNA, 75 bp, synthetic construct
  source 1..75: mol_type = other DNA
tgtaatgcggttcaacccgcgtcgcagtatcgatccgaaagcgcaagcggtacacggcatcagtcttgaagattt

SEQ ID NO: 719841 - DNA, 75 bp, synthetic construct
  source 1..75: mol_type = other DNA
tagtggagatgaagcatttatcattcagcagcagcgtcaggaagcccttgagcaacaactgacgccttcagcccc

SEQ ID NO: 719842 - DNA, 75 bp, synthetic construct
  source 1..75: mol_type = other DNA
atggcgagaaaaacacccccattaaccacagtacagatcaaagcagccagaccagcagaaaaggaatacacccta

SEQ ID NO: 719843 - DNA, 75 bp, synthetic construct
  source 1..75: mol_type = other DNA
tacatggtatctctctggaagaactggctgctgaaccgctgttggctgatcacgcaggtaagattgctgcatata

SEQ ID NO: 719844 - DNA, 75 bp, synthetic construct
  source 1..75: mol_type = other DNA
ggaacaactaccgcagctaatgcacgatttatcgatcgccagcatagaacggcaaaccagattgctgattgagtg

SEQ ID NO: 719845 - DNA, 75 bp, synthetic construct
  source 1..75: mol_type = other DNA
atggcacgaaaaaccaccccactaactattacggagatcaaaaacgcacgaccaggggaaaaggaatataccctg

SEQ ID NO: 719846 - DNA, 75 bp, synthetic construct
  source 1..75: mol_type = other DNA
tcagcgacaagcaaccagacttagttatgaattaccaagcgataaatattgtgcattgcttgctgtaatgtgcgc

SEQ ID NO: 719847 - DNA, 75 bp, synthetic construct
  source 1..75: mol_type = other DNA
gaaggattcgagccggacgtaatcgaggccgcactcgcacacgtggacacgaacgaggtaaggcgagcatataac

SEQ ID NO: 719848 - DNA, 75 bp, synthetic construct
  source 1..75: mol_type = other DNA
aagaaatcaaccttgatgcggcaacatggacgataccagccggacgcatgaagatgcgccgtgatcatgtgatcc

SEQ ID NO: 719849 - DNA, 75 bp, synthetic construct
  source 1..75: mol_type = other DNA
aagcatagagattatgttttcccaggctaccgtaatccgcttgaaccaatgaatagtcagacagcaaacatggca

SEQ ID NO: 719850 - DNA, 75 bp, synthetic construct
  source 1..75: mol_type = other DNA
caatatccggacaatttataagagatttgcaatcccctgttcctccacttgccgaacaaaaaatcatcgctgaaa

SEQ ID NO: 719851 - DNA, 75 bp, synthetic construct
  source 1..75: mol_type = other DNA
aaaaacaggtcaacaacgccttagcccgcgtcaataacctgacgcaatccatcctggcaaaagcgttccgtggtg

SEQ ID NO: 719852 - DNA, 75 bp, synthetic construct
  source 1..75: mol_type = other DNA
atcatattgaatcatggacaggtaaagcatctggttatcaaactattctagaagatggcgtaactagtgctaagc

SEQ ID NO: 719853 - DNA, 75 bp, synthetic construct
  source 1..75: mol_type = other DNA
actgagagctcagatcaactttccagggcaacagatcgcgtacccggtttgccggccagtcctggatatgttcaa

SEQ ID NO: 719854 - DNA, 75 bp, synthetic construct
  source 1..75: mol_type = other DNA
ctttccctcaatcaattcatgagtatagttcgtggtgggataggttagagttgtcgtttcctgaaataatgcagt

SEQ ID NO: 719855 - DNA, 75 bp, synthetic construct
  source 1..75: mol_type = other DNA
ggtatcccgcggtacattcccgcaactgaaccttgcgccggttaacttcgatgcgctgttcatgaactatttgca

SEQ ID NO: 719856 - DNA, 75 bp, synthetic construct
  source 1..75: mol_type = other DNA
cgtcgaccacgcaggctgactccccgagagtgcgcacgccttatggggtttgaaaaacctggagggaaaccattc

SEQ ID NO: 719857 - DNA, 75 bp, synthetic construct
  source 1..75: mol_type = other DNA
tggctctgaaattttgctagaccgtggatgggatcacagcataggcgaaaaggactttaatgatcctgtaaatat

SEQ ID NO: 719858 - DNA, 75 bp, synthetic construct
  source 1..75: mol_type = other DNA
tctttggcctttcagacggtagcgcatggagaaaaaaagaaatccaaaaacagggaagtaaaaatacaaggctac

SEQ ID NO: 719859 - DNA, 75 bp, synthetic construct
  source 1..75: mol_type = other DNA
tgattgctgatgcccgcccggtcagccgccacatgacagggctgaatatcattcaggagatcccgggggatattt

SEQ ID NO: 719860 - DNA, 75 bp, synthetic construct
  source 1..75: mol_type = other DNA
gagtggtgggagttcggcggagaaccgggaacatttaccgttgaagtcggcacactggacagtggcgtgacggag

SEQ ID NO: 719861 - DNA, 75 bp, synthetic construct
  source 1..75: mol_type = other DNA
gccaaccattattgcgacccggcgacgcatcattttaatgaagatatccgcgacatcaccctcagccataaagaa

SEQ ID NO: 719862 - DNA, 75 bp, synthetic construct
  source 1..75: mol_type = other DNA
gttggctcatggcgagctatggcgtattcaccaggcggggtcggtgatattgggactgcctgttttttagctatt

SEQ ID NO: 719863 - DNA, 75 bp, synthetic construct
  source 1..75: mol_type = other DNA
atggctaaattaaaatcaaatctgaaagcgagcgcgagccaggtttatgcggtactgacagaccggggggcgcaa

SEQ ID NO: 719864 - DNA, 75 bp, synthetic construct
  source 1..75: mol_type = other DNA
agacaaaaccttaaagatggcgtttcaggatctgcgggaactgaaagttgacgctgcatggccgttcctgttggt

SEQ ID NO: 719865 - DNA, 75 bp, synthetic construct
  source 1..75: mol_type = other DNA
acgggatatgtccttactgatttcccgcaacttgaagaaggtacgcacatccgcgtactttttgacagcctttct

SEQ ID NO: 719866 - DNA, 75 bp, synthetic construct
  source 1..75: mol_type = other DNA
ggagctggcatttggtcagaagggatacactgactatttcgacagttttatgcgtaattacctgacggtaaaaac

SEQ ID NO: 719867 - DNA, 75 bp, synthetic construct
  source 1..75: mol_type = other DNA
gtgattgacggtcagcaacgcctgacaacggcgatgttattgctggaagcgttgtccagacaccttggcgatgac

SEQ ID NO: 719868 - DNA, 75 bp, synthetic construct
  source 1..75: mol_type = other DNA
aaatcaacagaaaaagacccggcagtaaaggccattgctcacgccattctgggcggtgcagtagcggcaatgcag

SEQ ID NO: 719869 - DNA, 75 bp, synthetic construct
  source 1..75: mol_type = other DNA
tgaagcgaaattccgcattccggtttctgacactcaggcctatcgccagttcggcaactcggtagtcgtaccggt

SEQ ID NO: 719870 - DNA, 75 bp, synthetic construct
  source 1..75: mol_type = other DNA
gtttgccggaattggtggcatccgtcgcggttttgagtcgattggcggtcaatgcgtgtttaccagtgaatggaa

SEQ ID NO: 719871 - DNA, 75 bp, synthetic construct
  source 1..75: mol_type = other DNA
gagtttgttcatgaatacgccctgtctgctacttatccattacataatcacataatcaacaaacaaccaaataaa

SEQ ID NO: 719872 - DNA, 75 bp, synthetic construct
  source 1..75: mol_type = other DNA
atgcttatcccactggcaaatattcttggctgcgatccgatgtggctgttaactggtaaaccaacaggtggggat

SEQ ID NO: 719873 - DNA, 75 bp, synthetic construct
  source 1..75: mol_type = other DNA
atggccagaacaatgacggttgatctcggcgatgagttgcgcgaatttatcgagtccttgattgaatccggcgac

SEQ ID NO: 719874 - DNA, 75 bp, synthetic construct
  source 1..75: mol_type = other DNA
aaatactttgatctgcgttactgcgtcgaaggcaagcacgcatacgtcgatccgtacacagaccaggtcaaagga

SEQ ID NO: 719875 - DNA, 75 bp, synthetic construct
  source 1..75: mol_type = other DNA
cataaagcaatatttcccgaatctgaaagtgaacaaggtggatgaacctcagtttgcattggtgaaagcaatggt

SEQ ID NO: 719876 - DNA, 75 bp, synthetic construct
  source 1..75: mol_type = other DNA
tgaacggccagcgagtgctgcaaagcgaagaagctggaaaatggaaaaatgacaatgttgatagagctggcagca

SEQ ID NO: 719877 - DNA, 75 bp, synthetic construct
  source 1..75: mol_type = other DNA
tgctggcgctggggattatcagcgagccgctgcggatgcagaacgatgacttcggctggggcgtggttatcctgc

SEQ ID NO: 719878 - DNA, 75 bp, synthetic construct
  source 1..75: mol_type = other DNA
atgaacaaaatatattgtcttaaatattgccatataaccaaaaacctgattgctgtctccgaactggctcgcggg

SEQ ID NO: 719879 - DNA, 75 bp, synthetic construct
  source 1..75: mol_type = other DNA
ataactcatgtaatagacagtgaagtgaaatctctggcagaaagcatcaggcaggaaatttcaacattctcagga

SEQ ID NO: 719880 - DNA, 75 bp, synthetic construct
  source 1..75: mol_type = other DNA
tcatgaatgcgctaacgaaagcctccacaccatgtaattattttattgctgatgagttaataaaaaacagacatg

SEQ ID NO: 719881 - DNA, 75 bp, synthetic construct
  source 1..75: mol_type = other DNA
agcaagctgtacgacaagatgcgtttgttcgtcgatgacatgtcagcgattggtcaaagtctcgacaaagcgcag

SEQ ID NO: 719882 - DNA, 75 bp, synthetic construct
  source 1..75: mol_type = other DNA
cgcagcaaaaagccgagcaattcgctgaacgtgaagagatggtcgcggagttaagtgcggcaaaacaacaaatta

SEQ ID NO: 719883 - DNA, 75 bp, synthetic construct
  source 1..75: mol_type = other DNA
ggctgtccgtcgcgcagaccgtcatccccgtatctgcatgcttcgcaccgtcgccggtgatgaacgcagtgcccg

SEQ ID NO: 719884 - DNA, 75 bp, synthetic construct
  source 1..75: mol_type = other DNA
tctcgccaatcgaatttttgagcacagtaatcgtcgtgttgatgaacaaaatcgtcagagtttgaacagcttgct

SEQ ID NO: 719885 - DNA, 75 bp, synthetic construct
  source 1..75: mol_type = other DNA
gtggatttctcaatcattgtttatgccattattgcgctggttagtgtggccattggctggctgtttgccagttat

SEQ ID NO: 719886 - DNA, 75 bp, synthetic construct
  source 1..75: mol_type = other DNA
aagcgttgaaaaacaatattatgctggttagccccaccacgctgctggtggcgttgcgtactatcgccaacctgt

SEQ ID NO: 719887 - DNA, 75 bp, synthetic construct
  source 1..75: mol_type = other DNA
gcagattatcaaagcctactattgcgcaaaaccttactcacgacagcttgaactcttaagcaaggtgaaaggcat

SEQ ID NO: 719888 - DNA, 75 bp, synthetic construct
  source 1..75: mol_type = other DNA
gatgaagaccttccagggtcgtgacattaccggtgcagcagaacgccggtatctgttccccatgcagctgccagc

SEQ ID NO: 719889 - DNA, 75 bp, synthetic construct
  source 1..75: mol_type = other DNA
ggtgagccccaccacgctgctggtggcgttgcgtactatcgccaacctgtggcgttatgagcatcaaagtcgtaa

SEQ ID NO: 719890 - DNA, 75 bp, synthetic construct
  source 1..75: mol_type = other DNA
atccgcagtttgtctttgtatttgctgctgttcgtcgcgcagaccttaccccccgtatttgtatgcttcgcaccg

SEQ ID NO: 719891 - DNA, 75 bp, synthetic construct
  source 1..75: mol_type = other DNA
acccgcagtttgtctttgtgtttgccgccgttcgtcgcgcagaccgtaaaccccgtatttgcatgctgcgcaccg

SEQ ID NO: 719892 - DNA, 75 bp, synthetic construct
  source 1..75: mol_type = other DNA
cgttgtcgattgagagctatctggccgatccgggcgatcgcctgctaaccgaaatcatcattaaagatccgtatc

SEQ ID NO: 719893 - DNA, 75 bp, synthetic construct
  source 1..75: mol_type = other DNA
gataactatcgccaggcaatgaaaaaactctcttcaggtcgcggaaatgtgctggcgcaggcagaagcgtttcgc

SEQ ID NO: 719894 - DNA, 75 bp, synthetic construct
  source 1..75: mol_type = other DNA
tattaacgcgagtactggaggcttccgggttgcgtgaggggtatgaatatgaaacccaggtcagcatcgaaaatg

SEQ ID NO: 719895 - DNA, 75 bp, synthetic construct
  source 1..75: mol_type = other DNA
gcacgcctttccctcgttcgtgattacgtcctctcgttcgctggccgtctgccggttgcggaggtgcacgcatga

SEQ ID NO: 719896 - DNA, 75 bp, synthetic construct
  source 1..75: mol_type = other DNA
gcgggagcttacggggaggaagggaactggatggtactggagaggaaatagcccatgacggaactggaaaaacag

SEQ ID NO: 719897 - DNA, 75 bp, synthetic construct
  source 1..75: mol_type = other DNA
caggttttgaggtggtccgcaccacaaagaacagtatcagcattgccgacccggacggggggcgaaacatccgac

SEQ ID NO: 719898 - DNA, 75 bp, synthetic construct
  source 1..75: mol_type = other DNA
ggacggggggcgaaacatccgactgaagggagccatctatgaacagtcttttaacgctggcgaaggacttagagc

SEQ ID NO: 719899 - DNA, 75 bp, synthetic construct
  source 1..75: mol_type = other DNA
atggtgacaatttttgctgccattgttggttgtctgatttacgttccacaatttctggcttccgttcagactatg

SEQ ID NO: 719900 - DNA, 75 bp, synthetic construct
  source 1..75: mol_type = other DNA
cagaacaattagtggagagtggaaaatttgatatgagacaggatggcgcacgaacgccatcctgcagtagcatta

SEQ ID NO: 719901 - DNA, 75 bp, synthetic construct
  source 1..75: mol_type = other DNA
aaagcagcatcagcattgccgacccggacggggggcgaaacatccgactgaagggagccatctatgaacagtctt

SEQ ID NO: 719902 - DNA, 75 bp, synthetic construct
  source 1..75: mol_type = other DNA
cgtcgctgaacacctgttgttacggcatgaatgcagattaccaaatcacctggctgtaagtaaccacagagaact

SEQ ID NO: 719903 - DNA, 75 bp, synthetic construct
  source 1..75: mol_type = other DNA
ccggtgactttgacatcccggacatactccctgagtccgccacagacacagacctgcaggagctcacggcaccac

SEQ ID NO: 719904 - DNA, 75 bp, synthetic construct
  source 1..75: mol_type = other DNA
tcaaaaccctgactcatgacactcgcgtcgcaaactctcgtttctttgataacgatgttaatcaggtgccaaaat

SEQ ID NO: 719905 - DNA, 75 bp, synthetic construct
  source 1..75: mol_type = other DNA
cagcagcatgaacggagccaggtccagaaaatactggagctagaaaaagcaccgagagctagatatgggccaact

SEQ ID NO: 719906 - DNA, 75 bp, synthetic construct
  source 1..75: mol_type = other DNA
agaaagacgcgctggagaagctgaacgccaggacgtggggcgtgaggtaccaggaagacagccaggggcgttttc

SEQ ID NO: 719907 - DNA, 75 bp, synthetic construct
  source 1..75: mol_type = other DNA
gcactgattcaaactgaagaagcactaaatcgtcgccagataaatcaggcgttattaagtacgggcgatttggcg

SEQ ID NO: 719908 - DNA, 75 bp, synthetic construct
  source 1..75: mol_type = other DNA
gtcaaagatgtatttctggattcctcactactgggccaaatgatgaaaacgcaaataataaaccgtcaagtgata

SEQ ID NO: 719909 - DNA, 75 bp, synthetic construct
  source 1..75: mol_type = other DNA
cgccactggatgatccctctcagaaagggagcgcaatatgaagagatcagaaaactgggtaaaggcgatcatctg

SEQ ID NO: 719910 - DNA, 75 bp, synthetic construct
  source 1..75: mol_type = other DNA
atggctacatacggcggtcagtttacgcttacagaaaacggtacggttgccattaataaccgaatcccgctgcag

SEQ ID NO: 719911 - DNA, 75 bp, synthetic construct
  source 1..75: mol_type = other DNA
atggttgaaggttcgattatcggttatgaaagcaacgttaaatcgggcggtgttggggcaagatattttgggatc

SEQ ID NO: 719912 - DNA, 75 bp, synthetic construct
  source 1..75: mol_type = other DNA
gccttcccgagagtggtaaaggagaggccctggaaataccccacagccccgaaaaagagccagtcagttgcttaa

SEQ ID NO: 719913 - DNA, 75 bp, synthetic construct
  source 1..75: mol_type = other DNA
atgtctggaaatataggggcaaatccagattctctgcgtaacccactgacttctctgggggattacctcgacccc

SEQ ID NO: 719914 - DNA, 75 bp, synthetic construct
  source 1..75: mol_type = other DNA
gcaagagctgtggggtgtcttactggcttataatctggtgagatatcagatgattaaaatggcggaacatctgaa

SEQ ID NO: 719915 - DNA, 75 bp, synthetic construct
  source 1..75: mol_type = other DNA
acgccgaagctggacgccaggcggccagccagttaattgcgcaggtaaccgggcgcagcgaaccgcaacaaatca

SEQ ID NO: 719916 - DNA, 75 bp, synthetic construct
  source 1..75: mol_type = other DNA
atgcaaaatcggctgaccatcaaagacatcgcgcgcttgagcggcgtgggaaaatccactgtttcccgggtgctg

SEQ ID NO: 719917 - DNA, 75 bp, synthetic construct
  source 1..75: mol_type = other DNA
tttctcaagatatcggcacaatcatgcgtgataaagctgggctaccggtcatgagcggaacctctggctcctcct

SEQ ID NO: 719918 - DNA, 75 bp, synthetic construct
  source 1..75: mol_type = other DNA
ctgtgggatttgcaaaataaagcagaacggcagaatgacattctggtgaaataccgccatatgtcggttccaccg

SEQ ID NO: 719919 - DNA, 75 bp, synthetic construct
  source 1..75: mol_type = other DNA
tcacggcattgaaagattctcgctggtttataccgctggagcgccagggcttacaaaacctgcttaacgagcgca

SEQ ID NO: 719920 - DNA, 75 bp, synthetic construct
  source 1..75: mol_type = other DNA
gctagcggtaatgatgaacaggctatgtataatattacacaagaaaccgtccgtatccttcacgaaactgaaaca

SEQ ID NO: 719921 - DNA, 75 bp, synthetic construct
  source 1..75: mol_type = other DNA
gtgagttccatccttgagatttatttcccgctttgcgccgctgatcccctccgttggcaacgccgtacacacgac

SEQ ID NO: 719922 - DNA, 75 bp, synthetic construct
  source 1..75: mol_type = other DNA
gaaaccaggccgatacctatgttgaaatgaatcttgaacataagcagaccctggataacggggcaacgacccgct

SEQ ID NO: 719923 - DNA, 75 bp, synthetic construct
  source 1..75: mol_type = other DNA
gtcatggcgcagggcagtaaggatcgctatgcccgtggagacagttatgaatgggtgaccctgaacacccgcttg

SEQ ID NO: 719924 - DNA, 75 bp, synthetic construct
  source 1..75: mol_type = other DNA
gcattaattgcaggttcacctaccattggattcctggggtttgcagttctcgaccctatttatggtgattccgta

SEQ ID NO: 719925 - DNA, 75 bp, synthetic construct
  source 1..75: mol_type = other DNA
cggccctgattgccggggcgagcatggcggcgctggggattatcgccgtactggttgccgcgatatggggaatgc

SEQ ID NO: 719926 - DNA, 75 bp, synthetic construct
  source 1..75: mol_type = other DNA
gtggatggactggagcaaaaaactcaataattacgccagcgatgacgcgctgggcagcagtggttttaaatcggg

SEQ ID NO: 719927 - DNA, 75 bp, synthetic construct
  source 1..75: mol_type = other DNA
gtaaagaccgttatgtcgatggcgacagctaccagtgggcaaccctcaacatgcgtctgatccaggagatcaatc

SEQ ID NO: 719928 - DNA, 75 bp, synthetic construct
  source 1..75: mol_type = other DNA
tggatccgcccgtggcacgatggcgagccgccgttcccgatcaatgcgttatccggtcgtccgtatcatggcatc

SEQ ID NO: 719929 - DNA, 75 bp, synthetic construct
  source 1..75: mol_type = other DNA
ctgttaacgtagttattgataacagtagcggaatgaaccaggcagatgctgataagcgctatttgcagataagca

SEQ ID NO: 719930 - DNA, 75 bp, synthetic construct
  source 1..75: mol_type = other DNA
cgatgttgaagtaggtttcagcgatctttctgagcttccttatgtgatgggattaattcgtcaggcatttgaaaa

SEQ ID NO: 719931 - DNA, 75 bp, synthetic construct
  source 1..75: mol_type = other DNA
tactcatgcagaagcagctgtatgtgcattaattgcaggttcacctaccattggattcctggggtttgcagttct

SEQ ID NO: 719932 - DNA, 75 bp, synthetic construct
  source 1..75: mol_type = other DNA
cactcaccgacgccagaaccgggcgtattactcaccgggacgcgactgcatcatcatgccgcatcctgagcagtt

SEQ ID NO: 719933 - DNA, 75 bp, synthetic construct
  source 1..75: mol_type = other DNA
tgagctggaaaacggcaatgtgccgtggatccgaccctggcgcgatggcgagccgccgttccctatcaatgcgtt

SEQ ID NO: 719934 - DNA, 75 bp, synthetic construct
  source 1..75: mol_type = other DNA
gacaataatcaggtgcttgtgcgtgagcgggatgaggcgcgtcaggtgctggcaaatcagcagcacaccctgcaa

SEQ ID NO: 719935 - DNA, 75 bp, synthetic construct
  source 1..75: mol_type = other DNA
tcgagaatgcctctctttgggatgcagggaatgtgacagagcgtctgatcgctgcaaccgaacgccagatggatt

SEQ ID NO: 719936 - DNA, 75 bp, synthetic construct
  source 1..75: mol_type = other DNA
acttggacagcatgtactttatgaagtgaatgatgaggcctgtcgtgtcaatatcctggcggttgttggtcagcg

SEQ ID NO: 719937 - DNA, 75 bp, synthetic construct
  source 1..75: mol_type = other DNA
gcatctctttgggatgcaaggaatgtgacagaacgtttgatcactgcaaccgatcgcctggcagattaccccagg

SEQ ID NO: 719938 - DNA, 75 bp, synthetic construct
  source 1..75: mol_type = other DNA
tttacgctctcaggtgacgatggcgctgaaaaaatatcgcccgcaggccgacgatacccggctgctcgcagaatt

SEQ ID NO: 719939 - DNA, 75 bp, synthetic construct
  source 1..75: mol_type = other DNA
gtgagttccatgcttgagatttttttcccgctttgcgcctccgaccccatccgttggcagcgccgtacacccgac

SEQ ID NO: 719940 - DNA, 75 bp, synthetic construct
  source 1..75: mol_type = other DNA
tgccgcatcgatgagtgccggggatggagcgccgggcgggcgctggctccggtcatgttccgcgcacagctcaat

SEQ ID NO: 719941 - DNA, 75 bp, synthetic construct
  source 1..75: mol_type = other DNA
ttgcaggagagaaccaaaggcgagctgaaattaaaactgttcccggatagcacccttggtaacgcacaggcaatg

SEQ ID NO: 719942 - DNA, 75 bp, synthetic construct
  source 1..75: mol_type = other DNA
gatgatttgaaagcctcacttgaaggtaaaggactgaaagtacttgcctactgggaaaacggctggcgcgatgtc

SEQ ID NO: 719943 - DNA, 75 bp, synthetic construct
  source 1..75: mol_type = other DNA
atcagcggcgtacgtggcggcaccatcgatatggaaatgtccggctcgaataactttgccgggttatcaccagtg

SEQ ID NO: 719944 - DNA, 75 bp, synthetic construct
  source 1..75: mol_type = other DNA
gcgccgcttggcgggattggcgatgcgatgttctggctaacgctactgccgatttgtggcgggataggcgcaagc

SEQ ID NO: 719945 - DNA, 75 bp, synthetic construct
  source 1..75: mol_type = other DNA
gacagtactgtctgggctggaaaacgctttgatcgcgacaattttgatattcactggttagactccgatgtcgta

SEQ ID NO: 719946 - DNA, 75 bp, synthetic construct
  source 1..75: mol_type = other DNA
cagtggttttgagtttcatggctatgcccgttccgggttactgatgaatgatgccgcttccagtagcaaaagtgg

SEQ ID NO: 719947 - DNA, 75 bp, synthetic construct
  source 1..75: mol_type = other DNA
tcccagcatggaacaacggcatgaaactcgcatatgaaagtcgcccgaaagaaattagggaagggtggctaatgt

SEQ ID NO: 719948 - DNA, 75 bp, synthetic construct
  source 1..75: mol_type = other DNA
acgcatgcagcagcgtcaccaccgggtttttgcaggcattgatgactattcaattatcaattttcgtggaaaaga

SEQ ID NO: 719949 - DNA, 75 bp, synthetic construct
  source 1..75: mol_type = other DNA
cgcagtggcattgcagcagattaaagagcgtggcgctttaccgatgattgatcgcggtgatatccgtcaggctat

SEQ ID NO: 719950 - DNA, 75 bp, synthetic construct
  source 1..75: mol_type = other DNA
gccgatttcgccgcggcactgaaaagcgtcggactgcccgacggactggcggatatgctggcggattctgacgtt

SEQ ID NO: 719951 - DNA, 75 bp, synthetic construct
  source 1..75: mol_type = other DNA
aaaaaataatataagatgttcattaattgaagaggggacagggacttataaaaccgaaaaagaaaacccagtagt

SEQ ID NO: 719952 - DNA, 75 bp, synthetic construct
  source 1..75: mol_type = other DNA
aagatttttctccagaaagccaggacgctgtagctctgcagcagattaaagagcgtggcgctttaccgatgattg

SEQ ID NO: 719953 - DNA, 75 bp, synthetic construct
  source 1..75: mol_type = other DNA
gtttttgcaggcattgatgactattcaattatcaattttcgtggaaaagattatgctgtccgcttcattaaagat

SEQ ID NO: 719954 - DNA, 75 bp, synthetic construct
  source 1..75: mol_type = other DNA
atccggcaaaagcccaggccctggcagcacaaggcattaccgtgcgtcaggctgactacggcgatgaagccgcac

SEQ ID NO: 719955 - DNA, 75 bp, synthetic construct
  source 1..75: mol_type = other DNA
cgctgttccggcaattccgtatcggaggtgctggataaattcagaaaaaactacgatcgaataatgtctctaccg

SEQ ID NO: 719956 - DNA, 75 bp, synthetic construct
  source 1..75: mol_type = other DNA
accgttgcgaaaagcaacaatagacaaattccctgaatatatcgacccgcgcctgcgtaattaccgctcacgcta

SEQ ID NO: 719957 - DNA, 75 bp, synthetic construct
  source 1..75: mol_type = other DNA
aaactatctcgccagcgccccggcagcactggagcacggcgtatttatcggtgccgcgggcgatggcaaaattgc

SEQ ID NO: 719958 - DNA, 75 bp, synthetic construct
  source 1..75: mol_type = other DNA
gatttcgccgcagcgctgaaaagcgttggtcttcctggcggactggcggatatgctggctgactctgacgttgac

SEQ ID NO: 719959 - DNA, 75 bp, synthetic construct
  source 1..75: mol_type = other DNA
aagcaggtcacgaaggcaaagtctatgagctggcgggcgacaacgcctggacgctgacacagttagcggcagagc

SEQ ID NO: 719960 - DNA, 75 bp, synthetic construct
  source 1..75: mol_type = other DNA
aatgttatccataaatattctataactagagatgatataatatatgcaaatcaaaagtatttgattgaacataca

SEQ ID NO: 719961 - DNA, 75 bp, synthetic construct
  source 1..75: mol_type = other DNA
aagctgttggtggtttttggtcgtgacgacaaagacctgttgcaggcagcgaaaggtatcgcccagggcaatatt

SEQ ID NO: 719962 - DNA, 75 bp, synthetic construct
  source 1..75: mol_type = other DNA
aaactgctggtcgtgtttggtcgtgacgacaaagacctgttgcaggcagcgaaaggtatcgcccagggcaatatt

SEQ ID NO: 719963 - DNA, 75 bp, synthetic construct
  source 1..75: mol_type = other DNA
gatatcaactatcgctacaccatgccgtcggtgaaagacagttcgcggatggatatcagcctgaataaccagttc

SEQ ID NO: 719964 - DNA, 75 bp, synthetic construct
  source 1..75: mol_type = other DNA
cctctttcatgacgcaggcgacgccagcaacgcaaccactgatcaatgctgagccagctgtagccgcccaggcgg

SEQ ID NO: 719965 - DNA, 75 bp, synthetic construct
  source 1..75: mol_type = other DNA
aaacggatgtctctattccggcgctgaaactgggcgcgaccaaccagctgcgcttcgactttgagtatatgaacc

SEQ ID NO: 719966 - DNA, 75 bp, synthetic construct
  source 1..75: mol_type = other DNA
taaatctgccgccggatctctacctgatgcgcagtaccggcattgatatggatatcaactatcgctacaccatgc

SEQ ID NO: 719967 - DNA, 75 bp, synthetic construct
  source 1..75: mol_type = other DNA
agtatgaacataaaatcggtgacctgattgcccgatttaaaaaagctggtggggtagtaaatgaggctgagatat

SEQ ID NO: 719968 - DNA, 75 bp, synthetic construct
  source 1..75: mol_type = other DNA
aaacttgtcacgctaaacccgaaactcaaatcaacagcagccggacgttaccagcttctttcccgttggtgggat

SEQ ID NO: 719969 - DNA, 75 bp, synthetic construct
  source 1..75: mol_type = other DNA
ccagttcaaagaggcatacatcaatgcctttaaccagatggagaaacagctttcaaatccctctgtactgagcga

SEQ ID NO: 719970 - DNA, 75 bp, synthetic construct
  source 1..75: mol_type = other DNA
gacgggcttcccggcgattaacctgacggtgaccgatgatggcagcaccattcagggcaaagatgccgacatcat

SEQ ID NO: 719971 - DNA, 75 bp, synthetic construct
  source 1..75: mol_type = other DNA
gcggatggatatcagcctgaataaccagttcctgcaatccttcaacctgagcagcaaacaggaggcgaaccgcct

SEQ ID NO: 719972 - DNA, 75 bp, synthetic construct
  source 1..75: mol_type = other DNA
cttcgcgtgatgtgaagctgacctttgcgcaaattgcgccgccgccgggcagcatggtgctacgtggcattaacc

SEQ ID NO: 719973 - DNA, 75 bp, synthetic construct
  source 1..75: mol_type = other DNA
ttccgtatcggaggtgctggataaattcagaaaaaactacgatcggataatgtcgctaccgcaggaaacgaaaga

SEQ ID NO: 719974 - DNA, 75 bp, synthetic construct
  source 1..75: mol_type = other DNA
cggaaattgagtggacggtacgcgtgatctccgccctactgctgttgggggtactggcagaaatagcatcctgga

SEQ ID NO: 719975 - DNA, 75 bp, synthetic construct
  source 1..75: mol_type = other DNA
gtgacagcccgctacacaggaatgaacccggacgggacgggaaacctgaatgatatggagcacctgaaacagtca

SEQ ID NO: 719976 - DNA, 75 bp, synthetic construct
  source 1..75: mol_type = other DNA
gtgacaacccgctacacaggaatgaatccggacgggacgggaaacctgaacgatatggaacacctgaaacagtca

SEQ ID NO: 719977 - DNA, 75 bp, synthetic construct
  source 1..75: mol_type = other DNA
gtgacaacccgctacacaggaatgaacccggacggaacgggaaacctgaacgatatggagcatctgaaacagtca

SEQ ID NO: 719978 - DNA, 75 bp, synthetic construct
  source 1..75: mol_type = other DNA
cctccagcgttcgccaaaatgaacaaaaatggcgtgccggtcactctggttatttctcagctagtgattacctct

SEQ ID NO: 719979 - DNA, 75 bp, synthetic construct
  source 1..75: mol_type = other DNA
cactcattattttgtgggcgctggcattcacgcagtttggtggtacgaaatataccgcgcgaatcgccaaagttg

SEQ ID NO: 719980 - DNA, 75 bp, synthetic construct
  source 1..75: mol_type = other DNA
atggtcgtactcaatatcgtacagatatttacaattatgatctgcctgcgcgatccagctcgcaaattgtatcga

SEQ ID NO: 719981 - DNA, 75 bp, synthetic construct
  source 1..75: mol_type = other DNA
accttactcagcgatacgaaaccgtggccacaactgaccggtaaagcaacgctgcgtcctggccagtggagtaat

SEQ ID NO: 719982 - DNA, 75 bp, synthetic construct
  source 1..75: mol_type = other DNA
aactgaccggcaaagcaacgttgcgcccagggcagtggagtaacgacgtaccggcgttgcgcgaaatattgcaac

SEQ ID NO: 719983 - DNA, 75 bp, synthetic construct
  source 1..75: mol_type = other DNA
cgcgattcatcaacacggataaagcgcccgcctatggtcgcgcgcttgctctgctcaaacgcgaaggccggtgcc

SEQ ID NO: 719984 - DNA, 75 bp, synthetic construct
  source 1..75: mol_type = other DNA
ccgtggcacatggatgaaacctacgtgaaggtcaatggccgctgggcgtatctgtaccgggccgtcgacagccgg

SEQ ID NO: 719985 - DNA, 75 bp, synthetic construct
  source 1..75: mol_type = other DNA
tgcaacgtacaggcatgctggacggggggccgaaaataactctgcctggcgatgacacgccaactgacgcggtgg

SEQ ID NO: 719986 - DNA, 75 bp, synthetic construct
  source 1..75: mol_type = other DNA
cgcgtctgcaatgcatgagtgctgccgtgattgcactgacacgatgggaaccccgcattgccctggacgccatcg

SEQ ID NO: 719987 - DNA, 75 bp, synthetic construct
  source 1..75: mol_type = other DNA
aaactaccgaactggacgccagcgaagcaacgcatattggccccagtgtggcgatgttactgcgcctggatttgc

SEQ ID NO: 719988 - DNA, 75 bp, synthetic construct
  source 1..75: mol_type = other DNA
ggtgaatctgccgattattcattactccgtggagtggtggaacaccctgcatcagggatcaacgcggatgcagca

SEQ ID NO: 719989 - DNA, 75 bp, synthetic construct
  source 1..75: mol_type = other DNA
ttgtgaatggttggatatgacaccgattaatacgaagttaacggcgatggatgaagttattgttcttagacgagc

SEQ ID NO: 719990 - DNA, 75 bp, synthetic construct
  source 1..75: mol_type = other DNA
ttcagaaaaaactacgacctgataatgtcgctaccgcaggaaacgaaagaggaaaaggaatttcgccattgtata

SEQ ID NO: 719991 - DNA, 75 bp, synthetic construct
  source 1..75: mol_type = other DNA
tacagccgactggatgaaagaaatgagttgcgtgatgcgatactgctgcattatgtcaacccaagcgaagcagac

SEQ ID NO: 719992 - DNA, 75 bp, synthetic construct
  source 1..75: mol_type = other DNA
agcaacgcatattggccccagtgtggcgatgttactgcgcctggatttgcgctatcgcagtgcccagcaaaactc

SEQ ID NO: 719993 - DNA, 75 bp, synthetic construct
  source 1..75: mol_type = other DNA
agagaacatcattgctgcggcgcaagcgggggccagtggctatgtggtgaagccatttaccgccgcgacgctgga

SEQ ID NO: 719994 - DNA, 75 bp, synthetic construct
  source 1..75: mol_type = other DNA
ccgcctgcgtccactgcggtggcaccgtgcggatcgtcgccagcatcgaggaacctgccgccatccgcgccatcc

SEQ ID NO: 719995 - DNA, 75 bp, synthetic construct
  source 1..75: mol_type = other DNA
cgatatggagcacctgaaacagtcagtcagggacatcctgaccaccccgctggcaagccgggttatgcgacggga

SEQ ID NO: 719996 - DNA, 75 bp, synthetic construct
  source 1..75: mol_type = other DNA
ttcgcaccgcgcagcagggactttgtgcctcgtacagtgtcccggtggcgatatttctgacgacggctttctctc

SEQ ID NO: 719997 - DNA, 75 bp, synthetic construct
  source 1..75: mol_type = other DNA
tccaactctcgcgcgtgaaaagctcgaagagctccacggactgtttcttggcaaagaaacagtccggcgcatcat

SEQ ID NO: 719998 - DNA, 75 bp, synthetic construct
  source 1..75: mol_type = other DNA
tgattgctggctgatgcagccaaccgacaaagcgatgccggcgatcacccgaaatatcgaccgcggtatctggcg

SEQ ID NO: 719999 - DNA, 75 bp, synthetic construct
  source 1..75: mol_type = other DNA
gcagtcggcaatgggtagcggcaaactgtgtggcgatggcggttttacccgtcgctgccagcagtggctggagca

SEQ ID NO: 720000 - DNA, 75 bp, synthetic construct
  source 1..75: mol_type = other DNA
ttgttggcgtagttattgcaggtgctattggtgcatttatcgatgataaatttgttgatgagttgaatcacaaga

SEQ ID NO: 720001 - DNA, 75 bp, synthetic construct
  source 1..75: mol_type = other DNA
attaggctcggcccttatagcctttggtctttcggccacagttgttggttttgttggcgtagttattgcaggtgc

SEQ ID NO: 720002 - DNA, 75 bp, synthetic construct
  source 1..75: mol_type = other DNA
cgctgtggcaaaactactacgatgcgttagcacctctggcgaaagccgggcgtatcgagctgccgtcgattcccg

SEQ ID NO: 720003 - DNA, 75 bp, synthetic construct
  source 1..75: mol_type = other DNA
gttctacattaagctgcgtgatattgatgaccggaatgcgttgattaacttcctgaaagaagcagaaatcatggc

SEQ ID NO: 720004 - DNA, 75 bp, synthetic construct
  source 1..75: mol_type = other DNA
gaagatgccgctcagggcgtgatgtccacttacaaagggcgtgcactgggaaccattggtcatattggctgcttt

SEQ ID NO: 720005 - DNA, 75 bp, synthetic construct
  source 1..75: mol_type = other DNA
cagggacatgtgacgcctcccccgtcccgggatgcacctgtccgttttgtactatgctgcgtagccaaaaccgat

SEQ ID NO: 720006 - DNA, 75 bp, synthetic construct
  source 1..75: mol_type = other DNA
agccgttgaaggcggtagcgaagccattaaaaaagcacttgcagagttagggccaaccaccgggaaagagaaacg

SEQ ID NO: 720007 - DNA, 75 bp, synthetic construct
  source 1..75: mol_type = other DNA
tctaaggtactggcgtattactcgctggcatccagtgcagtgacgacaaacactgcccccggccgctttcgccgt

SEQ ID NO: 720008 - DNA, 75 bp, synthetic construct
  source 1..75: mol_type = other DNA
gccagtagtggatgccgttccagttccggaccggagtcgtccgggaaccaatattaaagatgtttacagtgcccc

SEQ ID NO: 720009 - DNA, 75 bp, synthetic construct
  source 1..75: mol_type = other DNA
ggacttatggcggccctgagttcgttgaactataaagcaactcccattctggttgatattgtcgatgaacggttg

SEQ ID NO: 720010 - DNA, 75 bp, synthetic construct
  source 1..75: mol_type = other DNA
aatgtgctaccaggaccaacgaatcaactaactgcggtagaaagtaaaattatcggacatttttatgccccacac

SEQ ID NO: 720011 - DNA, 75 bp, synthetic construct
  source 1..75: mol_type = other DNA
aatcgaataaaactactatatatgcagttataactgtactctgcgttgttatatttttaattcagttaggcatcg

SEQ ID NO: 720012 - DNA, 75 bp, synthetic construct
  source 1..75: mol_type = other DNA
gtcagattcagaccccaggaagccgtatatactggcaatgatacctgtcatataaccattacctgtaatcagtcc

SEQ ID NO: 720013 - DNA, 75 bp, synthetic construct
  source 1..75: mol_type = other DNA
gcagctaaaattgtctttgtcgtcgggattattctgttcctggtgagtttgttcatgggccgaaaacgaccctag

SEQ ID NO: 720014 - DNA, 75 bp, synthetic construct
  source 1..75: mol_type = other DNA
gacgcgcgtctgacttctgaactggtgttgctgtttctttacgtgggagtaattgccctgtggcacgcctttgac

SEQ ID NO: 720015 - DNA, 75 bp, synthetic construct
  source 1..75: mol_type = other DNA
ctgctcttgtacaggaaggcgcatcgctggattctcccctgaatgccggtgaaattcgtgaactccgtgggataa

SEQ ID NO: 720016 - DNA, 75 bp, synthetic construct
  source 1..75: mol_type = other DNA
cggtacgccggtgattggcggcctgacctccgatcgcgccattaaactggtacgcggcctgaaagatctcaacat

SEQ ID NO: 720017 - DNA, 75 bp, synthetic construct
  source 1..75: mol_type = other DNA
cacgggtggcgcttcatgatgaaacgctgcaggcctttctggacgggacaccacctgatggtgcccgccgtctga

SEQ ID NO: 720018 - DNA, 75 bp, synthetic construct
  source 1..75: mol_type = other DNA
gttactcgcgatattggatctcgccgttcgtgacgttcatttcctgctggaaggtggacaaatgccatgcaaaac

SEQ ID NO: 720019 - DNA, 75 bp, synthetic construct
  source 1..75: mol_type = other DNA
tccatgtcctatattaagagtcggtcgtctctatgaaaagtcagataaggctgagtttacaaggatacttctgaa

SEQ ID NO: 720020 - DNA, 75 bp, synthetic construct
  source 1..75: mol_type = other DNA
tgatgcatgtttggcaatatcagaaagggtatgcagttaagttgcgtggtttattttcctgggcggcaaatgatc

SEQ ID NO: 720021 - DNA, 75 bp, synthetic construct
  source 1..75: mol_type = other DNA
gcggtgtttacctttattgcgttggttaccggctccgcgtggggaaaaccgatgtgggggacctggtgggtatgg

SEQ ID NO: 720022 - DNA, 75 bp, synthetic construct
  source 1..75: mol_type = other DNA
ccgtgtttacctttattgccctggttaccggctctgcatggggaaaaccgatgtggggcacctggtgggtatggg

SEQ ID NO: 720023 - DNA, 75 bp, synthetic construct
  source 1..75: mol_type = other DNA
ctgtggctggtttataccgtggctggcaattgccagtgtggtcgtgcttaccgtcggctggatctggggattcgg

SEQ ID NO: 720024 - DNA, 75 bp, synthetic construct
  source 1..75: mol_type = other DNA
cgcgccgccgtgctctggcaccaggtcggcggcggacgtctgcaactgatgttttctcgtaatcgcctgaccact

SEQ ID NO: 720025 - DNA, 75 bp, synthetic construct
  source 1..75: mol_type = other DNA
gagcgtggcgctttactaatgattgatcgcggtgacatccgtcaggcaatcgaccgttgcagtaatatctgggcc

SEQ ID NO: 720026 - DNA, 75 bp, synthetic construct
  source 1..75: mol_type = other DNA
atgtagatgctattattgttactcatacgcatgatgaccactgggatgctgctgcccgggcgctgatccctcgcg

SEQ ID NO: 720027 - DNA, 75 bp, synthetic construct
  source 1..75: mol_type = other DNA
atgcaggtactaaattcccagcgtaaagctttcctggatatggttgcatggtcagaaggaacggataacggacgg

SEQ ID NO: 720028 - DNA, 75 bp, synthetic construct
  source 1..75: mol_type = other DNA
gggtgagcgacacaattatagataatgatacccttcatgccctacggaagaaatggccgaatattatatataatc

SEQ ID NO: 720029 - DNA, 75 bp, synthetic construct
  source 1..75: mol_type = other DNA
aagtatgaaaataatagggatgatttttttaaagactcaaaatacaaaatcataaaaaaaatggcctcctggaaa

SEQ ID NO: 720030 - DNA, 75 bp, synthetic construct
  source 1..75: mol_type = other DNA
atgcaggtactaaattcccagcgtaaagctttcctcgatatggtggcttggtcagaaggaacggataacggacga

SEQ ID NO: 720031 - DNA, 75 bp, synthetic construct
  source 1..75: mol_type = other DNA
agttcgagcataaggctgacaacctgattgcaaaattcaaagaggctggcggaacggtcagagagattgaggtat

SEQ ID NO: 720032 - DNA, 75 bp, synthetic construct
  source 1..75: mol_type = other DNA
agtatgaacataaaatcggcgacctgattgcccgatttaaagaggctggtggggtggtaaatgaagttgagctat

SEQ ID NO: 720033 - DNA, 75 bp, synthetic construct
  source 1..75: mol_type = other DNA
aaacttgtcacgctaaatccgaaactcaaatcaacagccgccggacgttaccagcttctttcacgctggtgggat

SEQ ID NO: 720034 - DNA, 75 bp, synthetic construct
  source 1..75: mol_type = other DNA
cctcatattatttatatgcctcaaggcgcgcaacccgagttgcaggtctaaaaaatattagcgatatcatagcat

SEQ ID NO: 720035 - DNA, 75 bp, synthetic construct
  source 1..75: mol_type = other DNA
tttacgtcatattctgcaaattgcggatgcccgaggcctacaacgtctaagtttggaaacaggaacacaaaaagg

SEQ ID NO: 720036 - DNA, 75 bp, synthetic construct
  source 1..75: mol_type = other DNA
tttctcacccagctgtacaagcgctagttgcctatcatatttccggtatgctggaacagtctcctccagaaagca

SEQ ID NO: 720037 - DNA, 75 bp, synthetic construct
  source 1..75: mol_type = other DNA
tcgggttataaaaataaaatatatgatgtgtcttatattgatggaattaaggtggttagagtcaaaacttatata

SEQ ID NO: 720038 - DNA, 75 bp, synthetic construct
  source 1..75: mol_type = other DNA
agcagtcgccagggcttaaacgccgaattaacccgctacacactcagcttgatggtgcttgagcgcaaactctcc

SEQ ID NO: 720039 - DNA, 75 bp, synthetic construct
  source 1..75: mol_type = other DNA
atgagtaaaatgaaacttgggaatcataaggcaacaaacaccgctctggatgcactaaagaaacctgctggagca

SEQ ID NO: 720040 - DNA, 75 bp, synthetic construct
  source 1..75: mol_type = other DNA
atttacggcctgccatcaactttatttgaaacatggattcgttgattgcgaaccgtttgctgattatcaacttga

SEQ ID NO: 720041 - DNA, 75 bp, synthetic construct
  source 1..75: mol_type = other DNA
tgccttaccgacctacccgtccccgatcgggaaaaatggaaagcccattattgtcgatgatgagggtatgctcag

SEQ ID NO: 720042 - DNA, 75 bp, synthetic construct
  source 1..75: mol_type = other DNA
ataactcactggtttctaacgcctttggttttttacgcctgccgatgaacttccagccgtacgacagcgacgccg

SEQ ID NO: 720043 - DNA, 75 bp, synthetic construct
  source 1..75: mol_type = other DNA
ttgttaaaaatagagcattatgtgagtatttaatttgtcacacagagcctagtttagttagcatttcgcgtaaaa

SEQ ID NO: 720044 - DNA, 75 bp, synthetic construct
  source 1..75: mol_type = other DNA
attttcctcctgagggtaatgcaccggcgtcacgtacttacgaacatgcgatccgatgggttaaaaaagggcatt

SEQ ID NO: 720045 - DNA, 75 bp, synthetic construct
  source 1..75: mol_type = other DNA
ggaagcgaaagacgactaaacaggcaactccctttcttattggcgatctcaaggctctgataaagttacgcagta

SEQ ID NO: 720046 - DNA, 75 bp, synthetic construct
  source 1..75: mol_type = other DNA
gctgtcacacagcagcattaaaggttgtctgcacgcgctgaacagtatccataggaaagcactcgatcgccctgg

SEQ ID NO: 720047 - DNA, 75 bp, synthetic construct
  source 1..75: mol_type = other DNA
gcgctgtggcggcgggaatgacatgggagcatgcgccgtcaggcaccaccacggtggcggtcaaaatcaatgcct

SEQ ID NO: 720048 - DNA, 75 bp, synthetic construct
  source 1..75: mol_type = other DNA
cctgaaatggccagcgctgaatgaagaccccattaccaaaactattgcagcactcatcattctttgggcgctggc

SEQ ID NO: 720049 - DNA, 75 bp, synthetic construct
  source 1..75: mol_type = other DNA
gacgtatgttgccacacaggagggaggttgtacctcgctggcatcaaagatgtttatacgtgcgaaattgtcggc

SEQ ID NO: 720050 - DNA, 75 bp, synthetic construct
  source 1..75: mol_type = other DNA
tgcagccatcagcagcggagatctggggcaggtgggtgatgtttttgcggtggcgctgaccgatattccacaggg

SEQ ID NO: 720051 - DNA, 75 bp, synthetic construct
  source 1..75: mol_type = other DNA
taccggattacgctaacgaactgcatatcaccgaatcacgcctcacggacatctgccgccgctttgccaaccgtc

SEQ ID NO: 720052 - DNA, 75 bp, synthetic construct
  source 1..75: mol_type = other DNA
aactggcggcgctggaacactattggcaactgatagagcgggaatcggtggaacaactgcctggacgggaacaca

SEQ ID NO: 720053 - DNA, 75 bp, synthetic construct
  source 1..75: mol_type = other DNA
ccggaagatgcggagcatatttcttttattcgcgggcgtattggttttgaactgcctgactggtttatcccgaag

SEQ ID NO: 720054 - DNA, 75 bp, synthetic construct
  source 1..75: mol_type = other DNA
ccggaagatgccgaccatatttcttttattcgcgggcgtattggttttgaactgcctgactggtttatcccgaag

SEQ ID NO: 720055 - DNA, 75 bp, synthetic construct
  source 1..75: mol_type = other DNA
ccggaagatgctgatcatatttcttttattcgcgggcgtattggttttgaactgcctgactggtttatcccgaag

SEQ ID NO: 720056 - DNA, 75 bp, synthetic construct
  source 1..75: mol_type = other DNA
ctgcattacctgagaacgacgatgaggatgggcatgacattgattatcttgagccatctgaagtttacgcgcttg

SEQ ID NO: 720057 - DNA, 75 bp, synthetic construct
  source 1..75: mol_type = other DNA
aggaagtgggcgatcagtggcgcacgccggacaacattttctggggaattaacaccctgtttggcccgtttgttc

SEQ ID NO: 720058 - DNA, 75 bp, synthetic construct
  source 1..75: mol_type = other DNA
tattcgcgggcgtattggttttgaactgcctgtctggtttatcccgaaagacgagaagcaggtgccgacaggagc

SEQ ID NO: 720059 - DNA, 75 bp, synthetic construct
  source 1..75: mol_type = other DNA
ttgaaaaacacatgttctactaattggaagcatcaccaactggatattgatatcgatccgcgtgcgcgcgtcggc

SEQ ID NO: 720060 - DNA, 75 bp, synthetic construct
  source 1..75: mol_type = other DNA
tgttccggcaagcgagctgctgactcgctttaaaacgcatccggcagtgcgcccgcttatcaaaaacacggaatc

SEQ ID NO: 720061 - DNA, 75 bp, synthetic construct
  source 1..75: mol_type = other DNA
atcagcatgttccggcgcttttgcaacgccctggctggtatcgggcgtggcctgcgttaatgcaggatatttccc

SEQ ID NO: 720062 - DNA, 75 bp, synthetic construct
  source 1..75: mol_type = other DNA
ccgccagctacgggcaaagaaatttaatactaacgataatgggcggatgatcctctcgcagacggttgatcaaga

SEQ ID NO: 720063 - DNA, 75 bp, synthetic construct
  source 1..75: mol_type = other DNA
agctgcaatcggcgctggtggaaaccgcacaaaacaatcaggacgcggtaatgccaggttacactcacctgcaac

SEQ ID NO: 720064 - DNA, 75 bp, synthetic construct
  source 1..75: mol_type = other DNA
atcgcaatgacgagatatatcgtcgccagcgtgagatgaaagaagcgttaaattcactggaggatttgaagtcga

SEQ ID NO: 720065 - DNA, 75 bp, synthetic construct
  source 1..75: mol_type = other DNA
atcgcaatgacgagatttatcagcgtcagcgggagatgaagcaagagctgaatagtctgaatgatttggtttcaa

SEQ ID NO: 720066 - DNA, 75 bp, synthetic construct
  source 1..75: mol_type = other DNA
ccggggaatacttgttggaaatgagcggtatcaacaagtcttttcctggtgttaaggcacttgataacgttaact

SEQ ID NO: 720067 - DNA, 75 bp, synthetic construct
  source 1..75: mol_type = other DNA
cccggactcatgctaatgggcctgctgatgctggtcgcacgcgacttctccttgctgcagaaatttccccgatga

SEQ ID NO: 720068 - DNA, 75 bp, synthetic construct
  source 1..75: mol_type = other DNA
aaagctgttctttacctggcaataccgttaagcatttttgtcaccgttttgtcgatgtatggtcggccgtgggct

SEQ ID NO: 720069 - DNA, 75 bp, synthetic construct
  source 1..75: mol_type = other DNA
catttaatttccctccatccagtaaatgaaattattctcggctgtactcactatccaattgttcagaattttttt

SEQ ID NO: 720070 - DNA, 75 bp, synthetic construct
  source 1..75: mol_type = other DNA
gtgcggtggccgcgggggtagcctgggaaaatgcccctgcaaacagcgccactgtggcagtaaaaatcaatgtct

SEQ ID NO: 720071 - DNA, 75 bp, synthetic construct
  source 1..75: mol_type = other DNA
aacagtctgccgacgatattcagtccggcgcggtggtttatctgaaggacggggttgtgcagctggctgcagacg

SEQ ID NO: 720072 - DNA, 75 bp, synthetic construct
  source 1..75: mol_type = other DNA
ccggaagatgcagaacatatttcttttattcgcgggcgtattggttttgaactgcctgactggtttatcccgaag

SEQ ID NO: 720073 - DNA, 75 bp, synthetic construct
  source 1..75: mol_type = other DNA
cctcgatgcggctctccggtgtgcaaaaagacgtattgtttgttctgtatggtctggcagaacgtcagctggcgg

SEQ ID NO: 720074 - DNA, 75 bp, synthetic construct
  source 1..75: mol_type = other DNA
agaaagatattgcagaaaagatacaaaaacagggaggtgattatttattcgcggtaaaaggaaaccaggggcggc

SEQ ID NO: 720075 - DNA, 75 bp, synthetic construct
  source 1..75: mol_type = other DNA
ttagtgcgttctcaacaatgcacagtctggtcatcggacagatcaagacggatgagaaatccaatgagattacag

SEQ ID NO: 720076 - DNA, 75 bp, synthetic construct
  source 1..75: mol_type = other DNA
cccgtttgttctggatctgttcactgacggtgataacgccaaatgtgctgcgtattacacggcggaagacaacgc

SEQ ID NO: 720077 - DNA, 75 bp, synthetic construct
  source 1..75: mol_type = other DNA
atgagtaataaatattgccaggcgctggtggaactgcggaacaaaccagtccatgagctgaaggaagtgggtgat

SEQ ID NO: 720078 - DNA, 75 bp, synthetic construct
  source 1..75: mol_type = other DNA
tcaatagctatgaatccacatcttacaaacgtaagaatattgcgattctgcgatcaatatttgctgagatagagt

SEQ ID NO: 720079 - DNA, 75 bp, synthetic construct
  source 1..75: mol_type = other DNA
atgtctggaaatataggggcaaatccacgtcgttccggattagtcattgctgatttagccggtgaaagtgaagat

SEQ ID NO: 720080 - DNA, 75 bp, synthetic construct
  source 1..75: mol_type = other DNA
atgaggactcacttccctgaatatgaaataatatccagagcctccgcggaggatcttaccttattacaattacgt

SEQ ID NO: 720081 - DNA, 75 bp, synthetic construct
  source 1..75: mol_type = other DNA
acatcttcttcaggggttgatttgagtcaacttaccaattcaattgattttggttctgttcttactggtattatg

SEQ ID NO: 720082 - DNA, 75 bp, synthetic construct
  source 1..75: mol_type = other DNA
gcccgccgccagaaccggtgatgctattgactgcggcggcgtggttattggtggcggtacggtaaatataggctg

SEQ ID NO: 720083 - DNA, 75 bp, synthetic construct
  source 1..75: mol_type = other DNA
tggcaaaatcaggacggatgagaaatccaatgagatcacagctatccctgaacttcttaacatcttggatattaa

SEQ ID NO: 720084 - DNA, 75 bp, synthetic construct
  source 1..75: mol_type = other DNA
ccacgctgctgttgcaaacgctgtgcaaactggcgcagcagatgaaaacgctgtatgtcaccggcgaagagtcgc

SEQ ID NO: 720085 - DNA, 75 bp, synthetic construct
  source 1..75: mol_type = other DNA
gctggcgcatgactggtcagaacgtcttgcggagcttaaaggtgctgcctttggtaatcccccgtacccgtggta

SEQ ID NO: 720086 - DNA, 75 bp, synthetic construct
  source 1..75: mol_type = other DNA
gtcgaaacgcttatcaacattccagaagtgcaattaatggaatatttcaaaacatctgttttagattcaaatgaa

SEQ ID NO: 720087 - DNA, 75 bp, synthetic construct
  source 1..75: mol_type = other DNA
tcctattccggaagcccggaggaaaatatttcccggtgtgacgttgtgcgttgaatgtcaggcgtatcaggaaaa

SEQ ID NO: 720088 - DNA, 75 bp, synthetic construct
  source 1..75: mol_type = other DNA
aaaatatttcccggtgtgacgttgtgcgttgaatgtcaggcgtatcaggaaaagcagagaaaacattatgcataa

SEQ ID NO: 720089 - DNA, 75 bp, synthetic construct
  source 1..75: mol_type = other DNA
tccgaacaaccacaaaacgcacaacaaaatattccggaaaatattcccggtggcaactctccggtaactccggat

SEQ ID NO: 720090 - DNA, 75 bp, synthetic construct
  source 1..75: mol_type = other DNA
gacgggggatttactgcgccgctccctccggaacgttctcatgatgaactggtagctgacgctgaacagaaaaaa

SEQ ID NO: 720091 - DNA, 75 bp, synthetic construct
  source 1..75: mol_type = other DNA
ttgtgctggattacattgacgcggtgacagcaactgataccagcaccgcgccagatgtcatctggcctgaactgc

SEQ ID NO: 720092 - DNA, 75 bp, synthetic construct
  source 1..75: mol_type = other DNA
cacgttcagagacagaaaagatggaagaatcagtctctgaggggatcagttcgcctgccgtcgatactcataccc

SEQ ID NO: 720093 - DNA, 75 bp, synthetic construct
  source 1..75: mol_type = other DNA
gacggtgataacgccaaatgtgccgcgtattacacggcggaagataacgcgctggcgcatgactggtcagaacgt

SEQ ID NO: 720094 - DNA, 75 bp, synthetic construct
  source 1..75: mol_type = other DNA
ccatgaactgaaggaagtgggcgatcagtggcgcacgccggacaacattttctgtggaattaacaccctgtttgg

SEQ ID NO: 720095 - DNA, 75 bp, synthetic construct
  source 1..75: mol_type = other DNA
ttgaatgtcaggcgtatcaggaaaataagattcgcgaaaaacaaattcaggcattaaatgatgctcattcagtaa

SEQ ID NO: 720096 - DNA, 75 bp, synthetic construct
  source 1..75: mol_type = other DNA
atgaacagatctgatatgaattaccatgattactcatggacggctgtacaaggcgataatccacgaatgacgaag

SEQ ID NO: 720097 - DNA, 75 bp, synthetic construct
  source 1..75: mol_type = other DNA
aaacaccagtcattgtggtgaaaaaacgtcgaactttttcggaaccttccctatccgaaaaaacagatattatcg

SEQ ID NO: 720098 - DNA, 75 bp, synthetic construct
  source 1..75: mol_type = other DNA
taagtcaggaggctgaacgcctgttacagctttcccgacaacagttgcagttactggaaaaaatacctctctctg

SEQ ID NO: 720099 - DNA, 75 bp, synthetic construct
  source 1..75: mol_type = other DNA
attatacgtcgttttggcattgataataagcagacatttgcaaaatggttgaagtgccttaatctcataaggaat

SEQ ID NO: 720100 - DNA, 75 bp, synthetic construct
  source 1..75: mol_type = other DNA
cgcgcatgaggttggtcgcaatgatccacttgcctacatgtcatcaaaatacattaatccaaaattctcatctgc

SEQ ID NO: 720101 - DNA, 75 bp, synthetic construct
  source 1..75: mol_type = other DNA
gggatttatgcttacctggatattggctttaactcgttaatttctaatattcgcaactacaaaaacaaagtgggg

SEQ ID NO: 720102 - DNA, 75 bp, synthetic construct
  source 1..75: mol_type = other DNA
gccaaaactggatgatgaggacatcggtttcgatgaagaaatctaccagcaacgcatggctaagtgggcagagga

SEQ ID NO: 720103 - DNA, 75 bp, synthetic construct
  source 1..75: mol_type = other DNA
cgcagtaatcaataacctcgacaaacttctcgaaaaagcgcgcgacaccggtgattacaccgaataccgggcggc

SEQ ID NO: 720104 - DNA, 75 bp, synthetic construct
  source 1..75: mol_type = other DNA
gtcagcggcagatgaaagaggctgttgagcgtctgacggtgacagaggaaattaaccggtttgttgtcggatggg

SEQ ID NO: 720105 - DNA, 75 bp, synthetic construct
  source 1..75: mol_type = other DNA
aacaggtgaaactgtcgatgccggaactggaagaactggcagcagcactggcgcaggcgcaggtcgatcgcaacg

SEQ ID NO: 720106 - DNA, 75 bp, synthetic construct
  source 1..75: mol_type = other DNA
gcccccgttataccgaatccggtgcgattgactgcgacgttctgtttgaggaaatggaagcccctgttccctaca

SEQ ID NO: 720107 - DNA, 75 bp, synthetic construct
  source 1..75: mol_type = other DNA
ctgcaaagcggcaaatggggcgagattaccccgttcaccattacacctgaacttatcgccgcggcgaaggatgcc

SEQ ID NO: 720108 - DNA, 75 bp, synthetic construct
  source 1..75: mol_type = other DNA
cacgttcaaatggaacggtcgtacctggaacgctggccccgactcactggctcgcctttatccggtagtaatggc

SEQ ID NO: 720109 - DNA, 75 bp, synthetic construct
  source 1..75: mol_type = other DNA
gtgtggaagagtatttgccttacacagcatcgccggaagacatggatgaaacaggccagcgtatctgggaagagt

SEQ ID NO: 720110 - DNA, 75 bp, synthetic construct
  source 1..75: mol_type = other DNA
ccaggacccgtgctgacgcgggacatagaacgggtgctggagcgaagcggggaagccccggtctacgggccaaac

SEQ ID NO: 720111 - DNA, 75 bp, synthetic construct
  source 1..75: mol_type = other DNA
gctaggacggtataaatttaatatgccgagtacagacgctatctatttgcatgacacgcctaatcacaatctttt

SEQ ID NO: 720112 - DNA, 75 bp, synthetic construct
  source 1..75: mol_type = other DNA
gtcagcacgtcgggtttgtcttccagaactttaatttgtttccgcatcgtacggtgctggagaacattattgaag

SEQ ID NO: 720113 - DNA, 75 bp, synthetic construct
  source 1..75: mol_type = other DNA
gccagcatgtcggatttgtctttcagaattttaatctgtttccgcatcgcacagtgctggaaaacattattgaag

SEQ ID NO: 720114 - DNA, 75 bp, synthetic construct
  source 1..75: mol_type = other DNA
acgcaaatcgaatctcaattacccgcaggttataagccggtttatcttaaccagcttcaactgttgtatgccgca

SEQ ID NO: 720115 - DNA, 75 bp, synthetic construct
  source 1..75: mol_type = other DNA
ctggcaccgcagcatccgcaatatgcggcgatgcatgaatcgttactggccttactcagtgacaccaaaccgtgg

SEQ ID NO: 720116 - DNA, 75 bp, synthetic construct
  source 1..75: mol_type = other DNA
aagatattctgccaaaagtgcgcaacgatccgggatatctcgaaagccatggctatacggtgatgcgcggctgga

SEQ ID NO: 720117 - DNA, 75 bp, synthetic construct
  source 1..75: mol_type = other DNA
gtggcacagcctctgctgctggcagaacaggaccgcctccgggcagaacagcgtgcggcagaagtcgtcgtactg

SEQ ID NO: 720118 - DNA, 75 bp, synthetic construct
  source 1..75: mol_type = other DNA
cactgcagcggagagtgctgattgtgctggctgcccttgatgaaaaacgaccaggccccgtgctgacgcgggaca

SEQ ID NO: 720119 - DNA, 75 bp, synthetic construct
  source 1..75: mol_type = other DNA
attttgtggtgcgtctcgacggcagcacctgtctgcagttatggaataaagaaggcagggtggtacgccgggagg

SEQ ID NO: 720120 - DNA, 75 bp, synthetic construct
  source 1..75: mol_type = other DNA
atgagtgccattgaagttaaaaacctggtgaaaaaattccacggtcagacggtactgcacggtatcgatctggag

SEQ ID NO: 720121 - DNA, 75 bp, synthetic construct
  source 1..75: mol_type = other DNA
atgaaatattcttttcgagtggtaataggtaagtttattatatgcagttcaattctcttattgtgttttattggc

SEQ ID NO: 720122 - DNA, 75 bp, synthetic construct
  source 1..75: mol_type = other DNA
ttctgctggcagaacaggaccgcctccgggcagaacagcgcgcggcggaagttgtcgtactaccgctaatcccgt

SEQ ID NO: 720123 - DNA, 75 bp, synthetic construct
  source 1..75: mol_type = other DNA
atactgtgatttatcgtcgtcagcgtgagatgaaagagcagctttccctgttgaccacactgaacgaaataagag

SEQ ID NO: 720124 - DNA, 75 bp, synthetic construct
  source 1..75: mol_type = other DNA
acagccaccgctgatgatgtcgcaccgacgggtcagcaaatctggcaggaactgcaaagtggcaaatggggtgag

SEQ ID NO: 720125 - DNA, 75 bp, synthetic construct
  source 1..75: mol_type = other DNA
tggaagaacttgcggcagtaatggcacgggcacaggccgatcgcaatgacgagatttatcgtcgtcagcgggaga

SEQ ID NO: 720126 - DNA, 75 bp, synthetic construct
  source 1..75: mol_type = other DNA
tgctggtccggtttcgctgtcccgcctcttaccagtggtaatggcggcgaaatcaggagctggcagagaaacaat

SEQ ID NO: 720127 - DNA, 75 bp, synthetic construct
  source 1..75: mol_type = other DNA
tgagtttattttcacgtttgatggccgtcgttttgatggtggaaaaacctcgcagtcacgccttgcccccgtggt

SEQ ID NO: 720128 - DNA, 75 bp, synthetic construct
  source 1..75: mol_type = other DNA
ccggacacgctgcttggcgagcggatttgcgcgtttatcatcgcgcagcaggtgccaactgactatcagcagttg

SEQ ID NO: 720129 - DNA, 75 bp, synthetic construct
  source 1..75: mol_type = other DNA
gctggcgatgccctcgcaacgggctctggatatcgacgcgctgattgagctggcgcaacccgtcgcttacgttat

SEQ ID NO: 720130 - DNA, 75 bp, synthetic construct
  source 1..75: mol_type = other DNA
cgctgaaaggtttaccgctggcctataacaaagatatgcaggaagacaaagagggtttattcgatgcactcgata

SEQ ID NO: 720131 - DNA, 75 bp, synthetic construct
  source 1..75: mol_type = other DNA
tccatagctgggtggaaggcaaactgatcgacaaagtgggtcagttaggcaaaaagctgcataccgggcgtagcc

SEQ ID NO: 720132 - DNA, 75 bp, synthetic construct
  source 1..75: mol_type = other DNA
taactccgttcaccgtcacgccggaacttatcgcagcggcaaaagatgctaaaaagcgggaaatcgaggtatggc

SEQ ID NO: 720133 - DNA, 75 bp, synthetic construct
  source 1..75: mol_type = other DNA
cctggttggactgcctgcatatggcggcgctggtgctggacggcattcaggtgaaacgcccgcgttgccaggaag

SEQ ID NO: 720134 - DNA, 75 bp, synthetic construct
  source 1..75: mol_type = other DNA
gcgcccagccggtgacgttcgcgcactggtgcctggcctatgttgagatgctggcgcgtgatgaaagccgtttgc

SEQ ID NO: 720135 - DNA, 75 bp, synthetic construct
  source 1..75: mol_type = other DNA
gcgaaaggcgtgccgttccgcgaggcgcaccatatcgtgggtgaagcggtggtggaagctattcgtcagggcaaa

SEQ ID NO: 720136 - DNA, 75 bp, synthetic construct
  source 1..75: mol_type = other DNA
ccggcgcgtatacgccggatgcagatgccctgaattccgccatgaccattaaactggcagaaattaatcagtggc

SEQ ID NO: 720137 - DNA, 75 bp, synthetic construct
  source 1..75: mol_type = other DNA
caaagtggcaaatggggtgaaatcgccccgttcaccataacacctgaacttatcaccgtagcgaaagatgccaaa

SEQ ID NO: 720138 - DNA, 75 bp, synthetic construct
  source 1..75: mol_type = other DNA
ggtggggcacgtaaccaaagatggttcgctggctggccctaaagtgctggaacactgtattgactgttcggtgct

SEQ ID NO: 720139 - DNA, 75 bp, synthetic construct
  source 1..75: mol_type = other DNA
gggtggcaaaagtccagaaactctccgatatcagccttgaggagttgccgcgtttttcaaccggatttaaagagt

SEQ ID NO: 720140 - DNA, 75 bp, synthetic construct
  source 1..75: mol_type = other DNA
gtgaaatcgccccgttcagcgtcacgcccgaacttatcgcagcggcaaaagatgccaaaaagatggaaatcgagc

SEQ ID NO: 720141 - DNA, 75 bp, synthetic construct
  source 1..75: mol_type = other DNA
caatggctcgtctttatccggtagtaatggcggcgaaatccgatacggcacgaaccacccttacgtggggtgatg

SEQ ID NO: 720142 - DNA, 75 bp, synthetic construct
  source 1..75: mol_type = other DNA
agtaatcaccgggggtaatgaaatcagcatctgcatccctcgtcatgccagccatcaatttcagttgcttatgtc

SEQ ID NO: 720143 - DNA, 75 bp, synthetic construct
  source 1..75: mol_type = other DNA
tgtttccgccaccgcgttgttgttgctctcaggcggcacaaccggcacgccaaaactcatcccgcgccgacatgc

SEQ ID NO: 720144 - DNA, 75 bp, synthetic construct
  source 1..75: mol_type = other DNA
tggagagaccgtgagcgacgattttacgccgctcttctcccttcacggtgagcgacaggcatggccgcagcctga

SEQ ID NO: 720145 - DNA, 75 bp, synthetic construct
  source 1..75: mol_type = other DNA
ctggatatcgacgcgctgattgagctggcgcaacccgtcgcttacgttattcacggggaaaaccacgcagagctg

SEQ ID NO: 720146 - DNA, 75 bp, synthetic construct
  source 1..75: mol_type = other DNA
tttcgcaccttacgcagccataaaaaccgcttcggcgcggtgaatgagctgggcgtcttcgcgatgaccgaacag

SEQ ID NO: 720147 - DNA, 75 bp, synthetic construct
  source 1..75: mol_type = other DNA
cacgttcgaatggaacggtcgtacctggaatgctggccccgactcaatggctcgtctttatccggtggtaatggc

SEQ ID NO: 720148 - DNA, 75 bp, synthetic construct
  source 1..75: mol_type = other DNA
agagcagatcaaccgcgccggacacgctgcttggcgagcggatttgcgcgtttatcatcgcgcagcaggtgccaa

SEQ ID NO: 720149 - DNA, 75 bp, synthetic construct
  source 1..75: mol_type = other DNA
ggaagcacatgtttttgattttccgaaagatgaaactatcattcaggcactagtggaaatgaccactgcgggcga

SEQ ID NO: 720150 - DNA, 75 bp, synthetic construct
  source 1..75: mol_type = other DNA
ttcactggttatcatcgttaacgtcatctctgatattctgggtgctatggctaaccctctgaaacataaggaatg

SEQ ID NO: 720151 - DNA, 75 bp, synthetic construct
  source 1..75: mol_type = other DNA
tctatatcgacccgccgtacaacacgggaaacgattttgtttacgccgacgattttgtagacgaggtctctgagt

SEQ ID NO: 720152 - DNA, 75 bp, synthetic construct
  source 1..75: mol_type = other DNA
tgcgcagtagcggggtttactcctacaaagtgctctatttcgaaagtgaccatgagaagacgttccgcgcaccga

SEQ ID NO: 720153 - DNA, 75 bp, synthetic construct
  source 1..75: mol_type = other DNA
ggtgattggcgaagatctcggcactgtaccggtagagattgtcggtaagctgcgcagtagcggggtttactccta

SEQ ID NO: 720154 - DNA, 75 bp, synthetic construct
  source 1..75: mol_type = other DNA
ctttatttatcctgcactgcaacaacgctctggaaccgagaatgaaagtctctatcagcaggctatttccgcctg

SEQ ID NO: 720155 - DNA, 75 bp, synthetic construct
  source 1..75: mol_type = other DNA
agatgtcgtgttatcttatatatcaacgttgggtacttttgaaaaaaatattcttttagccaacgtcagttattt

SEQ ID NO: 720156 - DNA, 75 bp, synthetic construct
  source 1..75: mol_type = other DNA
aatatcagcttgacgagctaaaagaaaaacacagagttgtttgtattaatgtcagggggtttgataaaaatacta

SEQ ID NO: 720157 - DNA, 75 bp, synthetic construct
  source 1..75: mol_type = other DNA
ctgattattcatggtgccaacgatatggggataccattagagaaagcaattcaaatgcacaaaatgattgcgcat

SEQ ID NO: 720158 - DNA, 75 bp, synthetic construct
  source 1..75: mol_type = other DNA
ttcaaaaggcgaacacattgaagagagcgtcaacttcgacactaccaagaatatctttatcgagggagataatct

SEQ ID NO: 720159 - DNA, 75 bp, synthetic construct
  source 1..75: mol_type = other DNA
caggagaaagatttacaaaaaccagcttatacaggatataatcgcagagattcgaaagacagccagttacgttaa

SEQ ID NO: 720160 - DNA, 75 bp, synthetic construct
  source 1..75: mol_type = other DNA
cattacattacactataaaaaagatatcatttccttattactggaaaccacgcctattaaagctaaccatttgcg

SEQ ID NO: 720161 - DNA, 75 bp, synthetic construct
  source 1..75: mol_type = other DNA
tgcgcagtagcggtgtttactcctacaaagtgctctatttcgaaagcgatcacgagaagacgttccgcgcaccaa

SEQ ID NO: 720162 - DNA, 75 bp, synthetic construct
  source 1..75: mol_type = other DNA
gtgaagcagctcaccgttgccgcagtaaatggcggcatggttcggtaccgaagcaccaaagcagcacagcagaat

SEQ ID NO: 720163 - DNA, 75 bp, synthetic construct
  source 1..75: mol_type = other DNA
atcgcccggctgtgcagaggacaggggcacccggtaaaagccggtgaccgccatattgtccaggtaaaggttctg

SEQ ID NO: 720164 - DNA, 75 bp, synthetic construct
  source 1..75: mol_type = other DNA
ttgggaagaaatgacctgcttattcgcaccttccctaagcgttatacagatcaaacctattacactggcgacaac

SEQ ID NO: 720165 - DNA, 75 bp, synthetic construct
  source 1..75: mol_type = other DNA
acagagagcttacgaaaatgattgagtcggcccggcaactgctttcacgacaaaacccggtcgtggaagaaacgt

SEQ ID NO: 720166 - DNA, 75 bp, synthetic construct
  source 1..75: mol_type = other DNA
agtgccacaatctccccctgcatctctgcccgcagccagtcttccggtgcgatacgaaaatacgtaagcgtaaac

SEQ ID NO: 720167 - DNA, 75 bp, synthetic construct
  source 1..75: mol_type = other DNA
tcgaaagtaagcgccatcgctgcatggtgattggtgaagacctcggcactgtaccggtagagattgtcggtaaac

SEQ ID NO: 720168 - DNA, 75 bp, synthetic construct
  source 1..75: mol_type = other DNA
gaagaggctcaggcctggtggcagttaccgaccacgcaacagacgctgcaacaggcacgggatgccgactgggtc

SEQ ID NO: 720169 - DNA, 75 bp, synthetic construct
  source 1..75: mol_type = other DNA
gccgacagtaacagtgccctgttagggctacagccagaagattggctggatatggcggaacctgtaaatattcct

SEQ ID NO: 720170 - DNA, 75 bp, synthetic construct
  source 1..75: mol_type = other DNA
taagctcatcgattcagacttctgcgttttcgccctcagcaagctggcgatggcattgtccagtacgcttgattc

SEQ ID NO: 720171 - DNA, 75 bp, synthetic construct
  source 1..75: mol_type = other DNA
gggaagttttttatgacgttaaaactgtactggagatagatcgcgagcggcgacaacacaatcatagaacacctg

SEQ ID NO: 720172 - DNA, 75 bp, synthetic construct
  source 1..75: mol_type = other DNA
ggggctgtatccggatgaagtggtactgcgcggtctgtatcaggatcgagcacctgaattttcttttttttttgg

SEQ ID NO: 720173 - DNA, 75 bp, synthetic construct
  source 1..75: mol_type = other DNA
ggcagagcaggatccaccagagattgcgtccagttatatggagctgtgtaatggatggcaagacccagtcataaa

SEQ ID NO: 720174 - DNA, 75 bp, synthetic construct
  source 1..75: mol_type = other DNA
caatggaagactgggcggtggcgctgaaaggcaccgaagccctgttacgtcgctccatttatgcggtgatgccaa

SEQ ID NO: 720175 - DNA, 75 bp, synthetic construct
  source 1..75: mol_type = other DNA
tccggcgttaaaaccagcatggcgcgcaaagtgatcaacaacttctttgatgaattcagggagcagagcgggatc

SEQ ID NO: 720176 - DNA, 75 bp, synthetic construct
  source 1..75: mol_type = other DNA
tccggcgtcaaaaccagcatggcgcgcaaagtgatcaataacttctttgatgagttccgcgaacagagcgggatc

SEQ ID NO: 720177 - DNA, 75 bp, synthetic construct
  source 1..75: mol_type = other DNA
ttcgcagctccggtggtggaagttttccacagtcaacggaggctgccatcatggctacgatcccaaccctcactc

SEQ ID NO: 720178 - DNA, 75 bp, synthetic construct
  source 1..75: mol_type = other DNA
aacggcgcatcgcgatccatgttgcagggcattcttaacaaggcgttgggtaccgagatcgccagcagcgtgatc

SEQ ID NO: 720179 - DNA, 75 bp, synthetic construct
  source 1..75: mol_type = other DNA
cgcgcctggggccggtgccggtcagccgtatcgaacagatccgccgcgaaatcatgggcatcgcccgtgaactgg

SEQ ID NO: 720180 - DNA, 75 bp, synthetic construct
  source 1..75: mol_type = other DNA
tatgcattcattgtcagcaggagaaagatttacaaaaaccagcgtatacaggatataatcgcagaggttcgaaag

SEQ ID NO: 720181 - DNA, 75 bp, synthetic construct
  source 1..75: mol_type = other DNA
cgggaagccattcctggcgtgcgcttatgcattcattgtcagcaggagaaagatttacaaaaaccagcgtataca

SEQ ID NO: 720182 - DNA, 75 bp, synthetic construct
  source 1..75: mol_type = other DNA
tgctggtcgtcggctacttgctatggcattcgttccgagcggcgattgtgcgaagaggtgcacctgaacctggcc

SEQ ID NO: 720183 - DNA, 75 bp, synthetic construct
  source 1..75: mol_type = other DNA
atgggcattgcccgtgaactggaagaggcgggcgaaattcagctacagctctttgcggaacagacggcggagtaa

SEQ ID NO: 720184 - DNA, 75 bp, synthetic construct
  source 1..75: mol_type = other DNA
acgtggcttgccaccacggaggcggatgatgacagcattctggaaaccattcaggcctgctccgtgcgggaccgg

SEQ ID NO: 720185 - DNA, 75 bp, synthetic construct
  source 1..75: mol_type = other DNA
agaattgggcagttaatgatattgagcaatttagttctttcttgcgtagcaactatcaaatcagcaacataaaac

SEQ ID NO: 720186 - DNA, 75 bp, synthetic construct
  source 1..75: mol_type = other DNA
tgacggaagaggactttatgttcatgttattcgttgggagccagaaacacagcgcgttatctatcttcgcaaaga

SEQ ID NO: 720187 - DNA, 75 bp, synthetic construct
  source 1..75: mol_type = other DNA
gcttaacgccgtgcttgattacattgacgcggtgacggcaacagatacgaacaccgcgccggatgtcatctggcc

SEQ ID NO: 720188 - DNA, 75 bp, synthetic construct
  source 1..75: mol_type = other DNA
gagtggcagtatttacgggtaagggatggagccatgaagaagaccatcgcaatgagactgtttactcaacagaaa

SEQ ID NO: 720189 - DNA, 75 bp, synthetic construct
  source 1..75: mol_type = other DNA
tctatatgggtggcgcatatgtgttgatcaacgacactgacggtaaaatcattaaagcctacgacggcgaaatat

SEQ ID NO: 720190 - DNA, 75 bp, synthetic construct
  source 1..75: mol_type = other DNA
tactgtcctttattcccggtggctttctcggcatgacgctgttttttgccagcgggatgaactggacggtgacgt

SEQ ID NO: 720191 - DNA, 75 bp, synthetic construct
  source 1..75: mol_type = other DNA
cacagcgccagtcactgattgatgctgcaatggcttccatcagtctgattcagctgaaattacaggccgggcgga

SEQ ID NO: 720192 - DNA, 75 bp, synthetic construct
  source 1..75: mol_type = other DNA
tatgcccgcctgttccactggtattgaccctggcgaaaacattccgggaaaagtggctgtatttacaggtaaggg

SEQ ID NO: 720193 - DNA, 75 bp, synthetic construct
  source 1..75: mol_type = other DNA
gagtggcagtatttacaggtaagggatggagccatgaagaagatcatcgcaatgagactgtttactcaatcgaaa

SEQ ID NO: 720194 - DNA, 75 bp, synthetic construct
  source 1..75: mol_type = other DNA
atgaatatattaatactggtgtaagtatgcccgcctgctccactggtattgaccctggcgaatacattccgggaa

SEQ ID NO: 720195 - DNA, 75 bp, synthetic construct
  source 1..75: mol_type = other DNA
gcttaacgctgtgctggattacattgacgcggtgacggcaacagataccagcaccgcgccggatgtcatctggcc

SEQ ID NO: 720196 - DNA, 75 bp, synthetic construct
  source 1..75: mol_type = other DNA
atgaccataaaaaataagatgttgctgggtgcgcttttgctggtaaccagcgcagcatgggccgcaccagccacc

SEQ ID NO: 720197 - DNA, 75 bp, synthetic construct
  source 1..75: mol_type = other DNA
tggcgtgaccatgtcctgaatgtcgtcggggtcccggttccggatgcaaccggcgggcgtctggaaattctctgt

SEQ ID NO: 720198 - DNA, 75 bp, synthetic construct
  source 1..75: mol_type = other DNA
cggcagaagcacagcgccagtcactgattgatgcagcaatggcttccattagtctgattcaactgaaattgcagg

SEQ ID NO: 720199 - DNA, 75 bp, synthetic construct
  source 1..75: mol_type = other DNA
agtggaagatccatgctgatgaaagcatggtcagccaggctcgctcgctgttggttcggttgatgggggtacgta

SEQ ID NO: 720200 - DNA, 75 bp, synthetic construct
  source 1..75: mol_type = other DNA
ctttcgaccagctatctgttcctggtctggaacagccgttgcccgtgccttctgaaagcgcaatggactctcttt

SEQ ID NO: 720201 - DNA, 75 bp, synthetic construct
  source 1..75: mol_type = other DNA
ctaaactgaccgctcaattctggcaagaagatcgtggcactctgcttttgtggggcggtgatctcaatacgccag

SEQ ID NO: 720202 - DNA, 75 bp, synthetic construct
  source 1..75: mol_type = other DNA
aagcgtaaacctcattatgacctccccacctttcggtctcgtccggaaaaaatcctatggtaatgaggacgcaca

SEQ ID NO: 720203 - DNA, 75 bp, synthetic construct
  source 1..75: mol_type = other DNA
ggttgccgagtggaactccgcctttggcgggcgttatccgttcaacaacgccagcagcgatgtatctttgccgct

SEQ ID NO: 720204 - DNA, 75 bp, synthetic construct
  source 1..75: mol_type = other DNA
tcgcagactttggcggagcctggctggagttccttaatagcctgagctggaaccaggccgctacgctgtcggact

SEQ ID NO: 720205 - DNA, 75 bp, synthetic construct
  source 1..75: mol_type = other DNA
atctgggggcagaaacacgccgggatcaaatactactgctgatattgctgagtctggggttgctctttgtctgtt

SEQ ID NO: 720206 - DNA, 75 bp, synthetic construct
  source 1..75: mol_type = other DNA
ccagcattaacggtcagccgatagccgaacagttaaaagaggtctttccggcgacgattgagctatgcattctcg

SEQ ID NO: 720207 - DNA, 75 bp, synthetic construct
  source 1..75: mol_type = other DNA
gatccccgtggggatgattgccggaattacacgccataagtggcaggataatttgatcaacgccatcgcgttatt

SEQ ID NO: 720208 - DNA, 75 bp, synthetic construct
  source 1..75: mol_type = other DNA
tactaacgaaaccttccataccccagctggtgaaggtgaagaatacgccggtttgtttgcaaacggtggtgttgg

SEQ ID NO: 720209 - DNA, 75 bp, synthetic construct
  source 1..75: mol_type = other DNA
aataacctgagtggtgtgttgcgcagggaaggcaatcgatgggtaccggataccattaatacccgggggctgaca

SEQ ID NO: 720210 - DNA, 75 bp, synthetic construct
  source 1..75: mol_type = other DNA
ccccgagcctgacagaacagttctggcaggaagagcaggggacattgcttctctggggaggagccccctcgcagc

SEQ ID NO: 720211 - DNA, 75 bp, synthetic construct
  source 1..75: mol_type = other DNA
ccggaattaccacacaaaacaatcaacatcatcacacagaacaaacatccccaacacaaataccgcaatccgaat

SEQ ID NO: 720212 - DNA, 75 bp, synthetic construct
  source 1..75: mol_type = other DNA
cagcaacagtctcttgcagaacgtctgcaggcgttgctgaatctgcagaaatccctggtccgccttcagtatcat

SEQ ID NO: 720213 - DNA, 75 bp, synthetic construct
  source 1..75: mol_type = other DNA
tgaccccgggcctgacggctcaactttggcaggaagatcgcagcacgctgttactatggggcggtgacctcaata

SEQ ID NO: 720214 - DNA, 75 bp, synthetic construct
  source 1..75: mol_type = other DNA
tctgctgcttcgccatctgggaacacagaacagcgatgccatgctgtatcagaaaatgctggcacgggtggcaca

SEQ ID NO: 720215 - DNA, 75 bp, synthetic construct
  source 1..75: mol_type = other DNA
caaccgggaactatgtcttacagttatttcctgcacatgatgaaataggaattaactacagagaccttcaaggac

SEQ ID NO: 720216 - DNA, 75 bp, synthetic construct
  source 1..75: mol_type = other DNA
cacctggatgtgagactggatttgttgttaatattccagaggatatacagcaacacactccggaatgcggtgaaa

SEQ ID NO: 720217 - DNA, 75 bp, synthetic construct
  source 1..75: mol_type = other DNA
tcagtttgcggatatgcgtctgacggatatgaccggtgatacagatgtctcccgcctctttttcaccgatgaagt

SEQ ID NO: 720218 - DNA, 75 bp, synthetic construct
  source 1..75: mol_type = other DNA
aagagaaggagccatcttccccaataaagaagatattgcccgtgcaacaggggctgatatacgtgcgatggaaga

SEQ ID NO: 720219 - DNA, 75 bp, synthetic construct
  source 1..75: mol_type = other DNA
caatgctacactccaagattaaagccagacactattttatggtgggcaggtacgactctggggctggcagattta

SEQ ID NO: 720220 - DNA, 75 bp, synthetic construct
  source 1..75: mol_type = other DNA
cctaataccaaatatgccattcttaccaatgcacttgcgaatgcagctggtgctgcagggggatatactctatct

SEQ ID NO: 720221 - DNA, 75 bp, synthetic construct
  source 1..75: mol_type = other DNA
ctcccgcctcttttttacggatgaagtggtccccggtatgttcacccgccaggcctgggaagaggccgtattgcc

SEQ ID NO: 720222 - DNA, 75 bp, synthetic construct
  source 1..75: mol_type = other DNA
gattcactgactatcctcgtatatggtggcatgcaagagaaggagccatcttccctaataaagaagatattgccc

SEQ ID NO: 720223 - DNA, 75 bp, synthetic construct
  source 1..75: mol_type = other DNA
cgcagcagggggatttgcggtatccagactccccggagtagacccaatgttagcccctcatattggttcaatggc

SEQ ID NO: 720224 - DNA, 75 bp, synthetic construct
  source 1..75: mol_type = other DNA
acttgatcaacgccatcgccttactgggcttttcaatcccggtgttctggctggcgcttctattgacgctgtttt

SEQ ID NO: 720225 - DNA, 75 bp, synthetic construct
  source 1..75: mol_type = other DNA
tcccgtctaaagaggcgctgtatattgccgtgctgcgacaaattctggatatctggttggcaccattgaaggcgt

SEQ ID NO: 720226 - DNA, 75 bp, synthetic construct
  source 1..75: mol_type = other DNA
cgctataactactgcgcagatgcagttaagggcgtagaggatgcctgccgcgctgccatgcttaagggagataaa

SEQ ID NO: 720227 - DNA, 75 bp, synthetic construct
  source 1..75: mol_type = other DNA
acaaatatgaacgagtcaatagacgaaacgtaaaaataaaaccatcagaaaaatacaaagagttagaagaacact

SEQ ID NO: 720228 - DNA, 75 bp, synthetic construct
  source 1..75: mol_type = other DNA
cccggaaggttttcatgcatatggcaagtttattctatgaaatgaaaataaatacgcttaaggaaattcgtctcg

SEQ ID NO: 720229 - DNA, 75 bp, synthetic construct
  source 1..75: mol_type = other DNA
agtttgcggtacgaacgcttaagaatgaccgcaaaccggtattcttccattcgagttaattcaaaatatcggcta

SEQ ID NO: 720230 - DNA, 75 bp, synthetic construct
  source 1..75: mol_type = other DNA
gcatctatcggttttatgggcgcagaaaaagcacgcgacaagatcattgccgcctttaaccgcataacccaaaag

SEQ ID NO: 720231 - DNA, 75 bp, synthetic construct
  source 1..75: mol_type = other DNA
ttgttcatcgataaaacgctccccactgtagatgttgtcattctgtcacttgtcgtgggggcttctgctcagcaa

SEQ ID NO: 720232 - DNA, 75 bp, synthetic construct
  source 1..75: mol_type = other DNA
tttatttgcttctttgattcattctggggcgcttattattgctctttgttatccttttttcaaaaaaaatacata

SEQ ID NO: 720233 - DNA, 75 bp, synthetic construct
  source 1..75: mol_type = other DNA
aaagcattttaattgtatatgctctgttctacaaaagaaatacacctctggcgtttctaattttttcttttttaa

SEQ ID NO: 720234 - DNA, 75 bp, synthetic construct
  source 1..75: mol_type = other DNA
gttttttgacaaaagatctttatagaaggatgaattggctcactaataaggtaatatctgaaagtgatgataaat

SEQ ID NO: 720235 - DNA, 75 bp, synthetic construct
  source 1..75: mol_type = other DNA
gaaaggagagcgattcagctaagctggacgcatggattgctgaactgcctctgaacttgcaggaggagggaaagg

SEQ ID NO: 720236 - DNA, 75 bp, synthetic construct
  source 1..75: mol_type = other DNA
tgcttcagccaaccgaagtgcaggacagcgattctgggcagcgatacagttttgaagaggcacccgtatcgctgc

SEQ ID NO: 720237 - DNA, 75 bp, synthetic construct
  source 1..75: mol_type = other DNA
aatacgctgaaggaaacacggcctaatgaagcagagatgttaatggtagatgatgccttcatggaaggtatttat

SEQ ID NO: 720238 - DNA, 75 bp, synthetic construct
  source 1..75: mol_type = other DNA
tccagtctgacgggcgtgatggcgcagcgactggttcgcacgctgtgtcccgattgccgccagtccgcgcctgcc

SEQ ID NO: 720239 - DNA, 75 bp, synthetic construct
  source 1..75: mol_type = other DNA
atgatacttatctggatgcggacggtaaaaacgtctaaaacagattatgatcgtctggtaacagctgctcttggc

SEQ ID NO: 720240 - DNA, 75 bp, synthetic construct
  source 1..75: mol_type = other DNA
cattgatgcgctgatccgccgtcctcacggcattattttggtgactgggccaactgggtcggggaaaagcacgac

SEQ ID NO: 720241 - DNA, 75 bp, synthetic construct
  source 1..75: mol_type = other DNA
attacgcgccataagtggcaggataacttgatcaacgccatcgccttactgggcttttcaatcccggtgttctgg

SEQ ID NO: 720242 - DNA, 75 bp, synthetic construct
  source 1..75: mol_type = other DNA
cgttacaaggcgcgtcactgtggaatgcctgggtgttctggtttaacggcctgatccactgggattttggtgttt

SEQ ID NO: 720243 - DNA, 75 bp, synthetic construct
  source 1..75: mol_type = other DNA
cgggggctgaacgcgccctttacgctgcggcaaatcgacggggccgaatttgaacagcggctgaatgcggtctgg

SEQ ID NO: 720244 - DNA, 75 bp, synthetic construct
  source 1..75: mol_type = other DNA
atcactgataacctgattccggttacgatcggcaatattatcggcggtggtttgttggttgggttgacatactgg

SEQ ID NO: 720245 - DNA, 75 bp, synthetic construct
  source 1..75: mol_type = other DNA
atgattcgtctgagttatattacggggcgttttttaatgccccgctttacatatatttgcattaataaaataatt

SEQ ID NO: 720246 - DNA, 75 bp, synthetic construct
  source 1..75: mol_type = other DNA
cctgattccggttacgatcggcaacattatcggtggtggtttgttggttgggttgacatactgggtcatttacct

SEQ ID NO: 720247 - DNA, 75 bp, synthetic construct
  source 1..75: mol_type = other DNA
agggtagctgaaggtcctctgaatgtcacaactctgtcggctgaggcatttgaaaaacagctggtgagctgctat

SEQ ID NO: 720248 - DNA, 75 bp, synthetic construct
  source 1..75: mol_type = other DNA
acacattgatgcgctgatccgccgtcctcatggcattattttggtgaccgggcctacagggtcgggtaaaagtac

SEQ ID NO: 720249 - DNA, 75 bp, synthetic construct
  source 1..75: mol_type = other DNA
ggaatgtgtcacgcctgttccggagcatattcagcggaaggcaaacgggttattgctacgttatttttcgggaga

SEQ ID NO: 720250 - DNA, 75 bp, synthetic construct
  source 1..75: mol_type = other DNA
tttcgggaaacgctgaatacccgtcgtgaaaaatcgtggcacaagaccacggtcggggaagtggtgaaggaaata

SEQ ID NO: 720251 - DNA, 75 bp, synthetic construct
  source 1..75: mol_type = other DNA
gattaactggctgacgctgcgcgcgggtatcaccactgtgctggacaaccgcctgatggggcttacgctgacgga

SEQ ID NO: 720252 - DNA, 75 bp, synthetic construct
  source 1..75: mol_type = other DNA
acacttgatgccgaagatgttgtccctacaacctccctccggtcacaacctgtagctgctgcgacacctgaatca

SEQ ID NO: 720253 - DNA, 75 bp, synthetic construct
  source 1..75: mol_type = other DNA
atcactactgtgctggataaccgcctgatggggcttacgctgacggacaatcggggctttgaagcggaccagctt

SEQ ID NO: 720254 - DNA, 75 bp, synthetic construct
  source 1..75: mol_type = other DNA
aagctgaagatggcgctgggtaaagacctgtcggataagcccgtggaacatatagaccagactaatgagagtgac

SEQ ID NO: 720255 - DNA, 75 bp, synthetic construct
  source 1..75: mol_type = other DNA
gctatcgcgtcagtgaaaaatggcaatctgttattcatccgacagggacagggtaaaagtgccagcggtaaacca

SEQ ID NO: 720256 - DNA, 75 bp, synthetic construct
  source 1..75: mol_type = other DNA
tgagcaccggggggctcctgataccctgatcatccgggcgcgcagcgcggactttcgcggcacgctaaattccag

SEQ ID NO: 720257 - DNA, 75 bp, synthetic construct
  source 1..75: mol_type = other DNA
cagcgtgcctgagctgctccccataacacttgataccgaagatgttgttcctacaacctcctcccggtcacaacc

SEQ ID NO: 720258 - DNA, 75 bp, synthetic construct
  source 1..75: mol_type = other DNA
gagtgcgtatcggtacagttgattctggaaaacggcgcggtcgccgtaggtgactgtgctgccgtacagtattcc

SEQ ID NO: 720259 - DNA, 75 bp, synthetic construct
  source 1..75: mol_type = other DNA
ccgcgctatatgagttcaaaatcaaaatggttgaactctcgcatcgaccagagatctccgtagcgcaactcgctc

SEQ ID NO: 720260 - DNA, 75 bp, synthetic construct
  source 1..75: mol_type = other DNA
ttaccgccggtagcacgcccaaaggcatgtacgaatatctcatcactctggttaaaggtaagccctggtacgata

SEQ ID NO: 720261 - DNA, 75 bp, synthetic construct
  source 1..75: mol_type = other DNA
gcgcaggccatgcgcgccgctcaggcgaagtgggataagctgcaacggggcgttgcggagttctccatcagtctg

SEQ ID NO: 720262 - DNA, 75 bp, synthetic construct
  source 1..75: mol_type = other DNA
tagccgcgcgtcacaagctgaagatggcactgggtaaagacctgtcggataagcctgtggagcatatagaccaga

SEQ ID NO: 720263 - DNA, 75 bp, synthetic construct
  source 1..75: mol_type = other DNA
aagaagcgacatttaatctatggggtaattccagccgccccgttgttgctgaattaggtgatgattcaggatggc

SEQ ID NO: 720264 - DNA, 75 bp, synthetic construct
  source 1..75: mol_type = other DNA
gtttatgctaataacgttcatgttatgcgctttgtctccggcagcattcaaagtaataaaaccataaatattaca

SEQ ID NO: 720265 - DNA, 75 bp, synthetic construct
  source 1..75: mol_type = other DNA
cggttaccgaagatgttccagcttccgtgttgcagctgcatccttcgctgatggtaatcgctgataaagccgctg

SEQ ID NO: 720266 - DNA, 75 bp, synthetic construct
  source 1..75: mol_type = other DNA
cagagttttacaccacaacccgcaaaccctctgcgggggatgttggtgcatatacgcaggcagaatgtaactcaa

SEQ ID NO: 720267 - DNA, 75 bp, synthetic construct
  source 1..75: mol_type = other DNA
ttacgccacaggtgttaatattcagtgggattataccagtaacgccagcgtaacgattcatacatcaccatctta

SEQ ID NO: 720268 - DNA, 75 bp, synthetic construct
  source 1..75: mol_type = other DNA
ggaatgctgaatccggcgcatataatgtcacgcgttctggcgactcctatcttgttgcaaacttttataccggtg

SEQ ID NO: 720269 - DNA, 75 bp, synthetic construct
  source 1..75: mol_type = other DNA
gcagtgggaacgcctgcaacgcggtgttgcgtcattttcgctacaactggcagaagggcgggcagatctctacac

SEQ ID NO: 720270 - DNA, 75 bp, synthetic construct
  source 1..75: mol_type = other DNA
ggggtaattgccagctggttgcatacccgcgatcccgcgaagaaagaaagcactacggtgaagcgtaagcgcagg

SEQ ID NO: 720271 - DNA, 75 bp, synthetic construct
  source 1..75: mol_type = other DNA
acaaaagcaacaaaactccggcattcagcatcagtattgagggcagggatatcaccactgtgctggataaccgcc

SEQ ID NO: 720272 - DNA, 75 bp, synthetic construct
  source 1..75: mol_type = other DNA
atggttacgctttggggaaattatgaggggatctctcagtacctcaccaccctggttaaaggtaagccctggtat

SEQ ID NO: 720273 - DNA, 75 bp, synthetic construct
  source 1..75: mol_type = other DNA
acacttgatgccgaagatgttgtccctacaacctccccccggtcacaacctgcagctgctgcgacacctgaatca

SEQ ID NO: 720274 - DNA, 75 bp, synthetic construct
  source 1..75: mol_type = other DNA
aacctgctgatacgggagctcaaacgtcgatcccattaccatcagggacaaagatctggctggtcgctggcatca

SEQ ID NO: 720275 - DNA, 75 bp, synthetic construct
  source 1..75: mol_type = other DNA
acctcatgcgctgattaataacgtcgaagagaaactgggctttaaaggagaaaaactgcgcgaatatgtccgttg

SEQ ID NO: 720276 - DNA, 75 bp, synthetic construct
  source 1..75: mol_type = other DNA
gctactatccctgccctttctcaccctgacgtaaccatcgaaaatggtcgcgctgtcactacgtctattgcgatc

SEQ ID NO: 720277 - DNA, 75 bp, synthetic construct
  source 1..75: mol_type = other DNA
aattcctggcgatggtcgcactctggttgttcgcttcgacgaacacggcaatatcaaattcaccgaaaccgttcc

SEQ ID NO: 720278 - DNA, 75 bp, synthetic construct
  source 1..75: mol_type = other DNA
ttctgaaaaaaatagacaacctagaatgctctgagaaatttagcgggcgcaattttgcgcccgccgaatatcttg

SEQ ID NO: 720279 - DNA, 75 bp, synthetic construct
  source 1..75: mol_type = other DNA
aatacaccgactcaaccgggcgcaaactcccaatgtaccaaatcaccaaaaacggcttcgttttcctggtgatgg

SEQ ID NO: 720280 - DNA, 75 bp, synthetic construct
  source 1..75: mol_type = other DNA
agaataacgccccgtctcccgacaaaatgattcacggggacggacgtaccctggttatccgtctcgacgaacacg

SEQ ID NO: 720281 - DNA, 75 bp, synthetic construct
  source 1..75: mol_type = other DNA
aaagccttggtggtgagttatttaaactgactatcgaggctgccatcatggctactatccctgccctttctcacc

SEQ ID NO: 720282 - DNA, 75 bp, synthetic construct
  source 1..75: mol_type = other DNA
tttatcagtctgctgattatcacgctgtcgtttatcccgatcttcaccctggaagggcaggaagggcgtctgttt

SEQ ID NO: 720283 - DNA, 75 bp, synthetic construct
  source 1..75: mol_type = other DNA
ggataataaaacgcgctggcaggtgatcaccgatgcatctgttgaagtggggccggcgctgtttatcagtctgct

SEQ ID NO: 720284 - DNA, 75 bp, synthetic construct
  source 1..75: mol_type = other DNA
aggggacttgctgtatatgccttcgacgctaccggggatttccgcggcggaagcggcgagtatgctgcaaaaaac

SEQ ID NO: 720285 - DNA, 75 bp, synthetic construct
  source 1..75: mol_type = other DNA
tcagcctcggggaacacgctgagatggacgccgtgcatcctgatcagcaactggaaatgttctggcgcatctgga

SEQ ID NO: 720286 - DNA, 75 bp, synthetic construct
  source 1..75: mol_type = other DNA
attatgaaatatgaactgtggcatatccctcctgtcctgctgggtctggcaggagggttgtcatggtcgctgctg

SEQ ID NO: 720287 - DNA, 75 bp, synthetic construct
  source 1..75: mol_type = other DNA
gaagctggatgaagcgttatatcacggcgcggtactgcgcgtgcgcccgaaagcgatgacggtggcggtgattat

SEQ ID NO: 720288 - DNA, 75 bp, synthetic construct
  source 1..75: mol_type = other DNA
cttaacacttgaggatgccatcatggctactacccttaccctttctcaccctgacgtaaccattgaaaatggtcg

SEQ ID NO: 720289 - DNA, 75 bp, synthetic construct
  source 1..75: mol_type = other DNA
tgccgcatatttacaatggatttggcattacccgcaccatgttctggcgcggatgttctgagcgccacggtactg

SEQ ID NO: 720290 - DNA, 75 bp, synthetic construct
  source 1..75: mol_type = other DNA
tgcaccccaccccctttacgctcaccgccgacagtgtgcaatggatcgattcagttaactgatccgcccacccga

SEQ ID NO: 720291 - DNA, 75 bp, synthetic construct
  source 1..75: mol_type = other DNA
tggaaaacggcgcggtcgctgtaggtgactgtgctgccgtacagtattccggggcaggtggtcgcgatccactgt

SEQ ID NO: 720292 - DNA, 75 bp, synthetic construct
  source 1..75: mol_type = other DNA
ctgctgctgtagtgacaaagttcatcgcgagattgtcgcccgtttcgaactggcagaagacatggcggataatct

SEQ ID NO: 720293 - DNA, 75 bp, synthetic construct
  source 1..75: mol_type = other DNA
ttttgaataccaccacggcttactggagaaaatgtggaaagagatcttaaaaaatcatgcccacgacagtatcgg

SEQ ID NO: 720294 - DNA, 75 bp, synthetic construct
  source 1..75: mol_type = other DNA
ggacacgatcacagctattactttatctccagctacattggcgaccacattgcacatcatgcagcagcactgacg

SEQ ID NO: 720295 - DNA, 75 bp, synthetic construct
  source 1..75: mol_type = other DNA
aaccgcgtctacaaatgtacgctgtgcgttgaccgcgtggtggttgggcaagaaccagcctgcgtgaagacctgc

SEQ ID NO: 720296 - DNA, 75 bp, synthetic construct
  source 1..75: mol_type = other DNA
cgctgtcactacgtctgttgcggttgcagagttcttccgcaaaatgcacaaggacgttctgcgcaaaattgaaac

SEQ ID NO: 720297 - DNA, 75 bp, synthetic construct
  source 1..75: mol_type = other DNA
tcagcctcggggaacacgctgagatggacgccgtgcatcctgatcagcaactggaaatgttctttgcgcatctgg

SEQ ID NO: 720298 - DNA, 75 bp, synthetic construct
  source 1..75: mol_type = other DNA
gtcagccattgtcagctagaaaatttaagccttgcgatctgcacccccaccccctttacgctcaccgccgacagt

SEQ ID NO: 720299 - DNA, 75 bp, synthetic construct
  source 1..75: mol_type = other DNA
catcactgtcggtcagccattgccagcttgataatttaagcctggcgatctgcactcccaccccctttacgctct

SEQ ID NO: 720300 - DNA, 75 bp, synthetic construct
  source 1..75: mol_type = other DNA
catgctggagaatctcgcccaccatcatcgggataacacgttggcgctggcagataatcttgctgctttactgga

SEQ ID NO: 720301 - DNA, 75 bp, synthetic construct
  source 1..75: mol_type = other DNA
aaagtgaaatcagcgttacgttatcccatcatcattttagcgatggcaatcatggtggttgtggcaatgctgcat

SEQ ID NO: 720302 - DNA, 75 bp, synthetic construct
  source 1..75: mol_type = other DNA
gcgctaacgcaggggatcatgacgctggcaagctttagtggcgaatggggttggttgctggtgctattcggcttt

SEQ ID NO: 720303 - DNA, 75 bp, synthetic construct
  source 1..75: mol_type = other DNA
acacaaatccagctcgatatcagcaacgggcagcccatctggctggcgctaaaaaatgccgatgagtttagcccg

SEQ ID NO: 720304 - DNA, 75 bp, synthetic construct
  source 1..75: mol_type = other DNA
gtagttgtggcaatgctgcattttgttctgccggagtttgctgccatctataaaacctttaacactccactaccc

SEQ ID NO: 720305 - DNA, 75 bp, synthetic construct
  source 1..75: mol_type = other DNA
tgacaggtaagctggatgaatgctgctttgaactggctcgccagcaaaaagcccagcgtcagttaaccgataaag

SEQ ID NO: 720306 - DNA, 75 bp, synthetic construct
  source 1..75: mol_type = other DNA
ccagcatggagcgcgaccgcagaaccgacgttcgccgggtaaaagaaattttacccgtcaccacagaatacgatc

SEQ ID NO: 720307 - DNA, 75 bp, synthetic construct
  source 1..75: mol_type = other DNA
ggtcagcgcaacaaccaccaaaaaaccctcagcaacgccaatacccactccgccggtgcaacctgacgaggagtg

SEQ ID NO: 720308 - DNA, 75 bp, synthetic construct
  source 1..75: mol_type = other DNA
aaagccccactggagctgtttaccctgccgccggtcgcagtcgctacggtggcagaagttaaaccggtgctggat

SEQ ID NO: 720309 - DNA, 75 bp, synthetic construct
  source 1..75: mol_type = other DNA
aagaactggcgaaggcaacaaagatgtcccctattctggttaaaaagaaacatattgaattgctgtcatttgaaa

SEQ ID NO: 720310 - DNA, 75 bp, synthetic construct
  source 1..75: mol_type = other DNA
tgaggctgtttttgtagaagatccaaaagatgatgaatgggcaccgcacgtacttagggaagcatgtaaaaaagc

SEQ ID NO: 720311 - DNA, 75 bp, synthetic construct
  source 1..75: mol_type = other DNA
cactcgattacattgatttaaagaaaggtgtttttattggcttaaacaaagatgaccaaccgcaatacataacca

SEQ ID NO: 720312 - DNA, 75 bp, synthetic construct
  source 1..75: mol_type = other DNA
gatgaactctctcgcaaacagcttttacaaaataatcagaatgatttgcaacaggcggagcaggggttgtgcgaa

SEQ ID NO: 720313 - DNA, 75 bp, synthetic construct
  source 1..75: mol_type = other DNA
ctggagccgtggctggataaactgcctggtgcggttcttcattgctttaccggcacacgcgaagagatgcaggcg

SEQ ID NO: 720314 - DNA, 75 bp, synthetic construct
  source 1..75: mol_type = other DNA
tccgaagccatcgtcacggcgcaatgaacccgcgaatcttccccatattctgcaacgcattgcgcactggcgtgg

SEQ ID NO: 720315 - DNA, 75 bp, synthetic construct
  source 1..75: mol_type = other DNA
cgggcgtgcatcctcatgacagcagccagtggcaagccgcgaccgaagaagcaattattgaactggccgcgctgc

SEQ ID NO: 720316 - DNA, 75 bp, synthetic construct
  source 1..75: mol_type = other DNA
cttcagggactccttgagcggaagcactacaatgtagctgttgtcgccatggcggcaaaaacagcgaggatcatg

SEQ ID NO: 720317 - DNA, 75 bp, synthetic construct
  source 1..75: mol_type = other DNA
tctgccccatattttgcaacgtattgcgcactggcgtggagaagatgccgcatggctggctgccaccacggatgc

SEQ ID NO: 720318 - DNA, 75 bp, synthetic construct
  source 1..75: mol_type = other DNA
ctgcctcatattgtgcaacgtattgcgcactggcgaggggaggatgctgcgtggctggcggccaccacagatgcc

SEQ ID NO: 720319 - DNA, 75 bp, synthetic construct
  source 1..75: mol_type = other DNA
gggtagtgcaggagattcacccagaaccagtcactcttttgaaccagtcaaagaaccagtcaaagaaccagtcaa

SEQ ID NO: 720320 - DNA, 75 bp, synthetic construct
  source 1..75: mol_type = other DNA
attgcgaaaactggttctgattaagctggctgataatgccagcgatcagggcgagtgctggcccagctatcagca

SEQ ID NO: 720321 - DNA, 75 bp, synthetic construct
  source 1..75: mol_type = other DNA
atggatgtgaacagggcacaatgtataacgacgaaagaatatttcagccgtctgtacgatgatatttgtcataat

SEQ ID NO: 720322 - DNA, 75 bp, synthetic construct
  source 1..75: mol_type = other DNA
tagtgcaggagttgcaccagggggtagtgcaggagattcacccagaaccagtcactcttttgaaccagtcaaaga

SEQ ID NO: 720323 - DNA, 75 bp, synthetic construct
  source 1..75: mol_type = other DNA
atcttgctaaaaatgtgtttgcagttcactgcgttgaccaaaatggtaaagcagttctggttaaacccaaggtgt

SEQ ID NO: 720324 - DNA, 75 bp, synthetic construct
  source 1..75: mol_type = other DNA
aagcgttctgtgattaatcatattgcggcgctttgtgagtccgggctggtaaaaaaaatcacccggaaaggtgaa

SEQ ID NO: 720325 - DNA, 75 bp, synthetic construct
  source 1..75: mol_type = other DNA
gacaagccgagcgatactatattgatacgaatatgcttcaaaacctgccgccttttgtcagttatattttcacag

SEQ ID NO: 720326 - DNA, 75 bp, synthetic construct
  source 1..75: mol_type = other DNA
gcgccctggcgcgttccctgtgtgatcagggttttggctataacatgacgcggggatgtacattaaaaggccgtg

SEQ ID NO: 720327 - DNA, 75 bp, synthetic construct
  source 1..75: mol_type = other DNA
ggctgttctacccggatgcgatccgcaacaagacgaaaatccactttgatattaagggggatacctttacggcca

SEQ ID NO: 720328 - DNA, 75 bp, synthetic construct
  source 1..75: mol_type = other DNA
atgagactttttattgcagaaaaaccctccctggcgaaagctattttcgaagggctgggcggaaatccaaatact

SEQ ID NO: 720329 - DNA, 75 bp, synthetic construct
  source 1..75: mol_type = other DNA
agttaatgctggttatttgagtgtatgtatcggacgcttgcttagagtggaaaggagtgtgtcaaaactggttcg

SEQ ID NO: 720330 - DNA, 75 bp, synthetic construct
  source 1..75: mol_type = other DNA
cagatgagcttttaaaaactcttgaggaaaaaaaacagaagtacaatgcaatttacgaagaattaacacgaaaga

SEQ ID NO: 720331 - DNA, 75 bp, synthetic construct
  source 1..75: mol_type = other DNA
cgcggctgtacccttaaagggcaggagaaaggctttcatggcgtcctgaatgttggtcgtgtgcaaagcgctgtt

SEQ ID NO: 720332 - DNA, 75 bp, synthetic construct
  source 1..75: mol_type = other DNA
tctcatcgagaaagcgaccagtatcgttcatgccggagacccggacgatgaaggctgcctgttggttgatgaaat

SEQ ID NO: 720333 - DNA, 75 bp, synthetic construct
  source 1..75: mol_type = other DNA
gatcctcaagactatgacgtgaaatacgccgcctggcgttttgatgacctgccgatcaaaacgccctggccgccc

SEQ ID NO: 720334 - DNA, 75 bp, synthetic construct
  source 1..75: mol_type = other DNA
agacgacaccacctcgctatttcacagagtcaacgttactggctgcgatgacgagtgcggcaaaattcattgatg

SEQ ID NO: 720335 - DNA, 75 bp, synthetic construct
  source 1..75: mol_type = other DNA
agaagggctatgacggcgttctgaacgttggccgggtacaaagtgctgttcttggcctggtgaacatgcgcacgc

SEQ ID NO: 720336 - DNA, 75 bp, synthetic construct
  source 1..75: mol_type = other DNA
tcttatcgataaagccgacagcatagttcattctggcgaccccgatgatgaaggatgtttgctggtcgatgagat

SEQ ID NO: 720337 - DNA, 75 bp, synthetic construct
  source 1..75: mol_type = other DNA
gcggaagtgaatccggcaatcctcgccgcgctttcgccgaatgccgatgaaaatcacgatttcttttccggttca

SEQ ID NO: 720338 - DNA, 75 bp, synthetic construct
  source 1..75: mol_type = other DNA
acctgattgaagatattacgcccgatgaactggaagaattgtttgttgcaggtttcagtctggcggaaaaaggtc

SEQ ID NO: 720339 - DNA, 75 bp, synthetic construct
  source 1..75: mol_type = other DNA
cggcaactctccgtgatgtttataacggtgactacgttcagagcattgccgaaaaaatcaaagcatttttcggta

SEQ ID NO: 720340 - DNA, 75 bp, synthetic construct
  source 1..75: mol_type = other DNA
cgatgtccgcaccgtaaaatccctgctgccggaaacactgcattataacccgctggattatatcgacctgaataa

SEQ ID NO: 720341 - DNA, 75 bp, synthetic construct
  source 1..75: mol_type = other DNA
tatggataaagaaacaataccagttcccgacccacatgctgaaagcagggaagaactggaaaacaatgaatccga

SEQ ID NO: 720342 - DNA, 75 bp, synthetic construct
  source 1..75: mol_type = other DNA
aaagcccctgcctggaaaaagttaataatcgcattttctatgttatgttttttatttggaacactggcccccatt

SEQ ID NO: 720343 - DNA, 75 bp, synthetic construct
  source 1..75: mol_type = other DNA
ggatcttttcttcaacggaagcgaagtcaaaccggcagagccccaacctgatgagggagaacacctgtccccgct

SEQ ID NO: 720344 - DNA, 75 bp, synthetic construct
  source 1..75: mol_type = other DNA
cactgtccccgatagtgaacgggatgctggcggtgctggcttttgtgcaacagaaacaactggtgctggcattat

SEQ ID NO: 720345 - DNA, 75 bp, synthetic construct
  source 1..75: mol_type = other DNA
tgatccgcctgattatccgcgatgaagcagtacacggttattacattggctataaatatcagaaaagcctggaaa

SEQ ID NO: 720346 - DNA, 75 bp, synthetic construct
  source 1..75: mol_type = other DNA
taaagatctggaggtgtggaatcgcctgaccagcaatttctggctaccagaaaaggtgccactgtcgaacgatat

SEQ ID NO: 720347 - DNA, 75 bp, synthetic construct
  source 1..75: mol_type = other DNA
tgggtggcaagaatgtcaggcacgattctggtggatgacgaactccgcaaggctaagacggataatatgctgaca

SEQ ID NO: 720348 - DNA, 75 bp, synthetic construct
  source 1..75: mol_type = other DNA
gggaaaggtgttgccaccggcatattgctttatcaaagtattctggccggtgaaggtgtgtttgttatggacccc

SEQ ID NO: 720349 - DNA, 75 bp, synthetic construct
  source 1..75: mol_type = other DNA
taatacggtactggcgtggtcagtacggattgctttcactgtaaccgggattatttttcatattatgcttcgccg

SEQ ID NO: 720350 - DNA, 75 bp, synthetic construct
  source 1..75: mol_type = other DNA
gtgggtgatcagaccgggagaagcagattttaaatatggtgcatctccattacaggcaactctagggctggagtt

SEQ ID NO: 720351 - DNA, 75 bp, synthetic construct
  source 1..75: mol_type = other DNA
ggttgaaaaaaaatatgtcggtgcggatgaaatcgcaccggctatcgccaaaatgtttaacgatgggtggtggcg

SEQ ID NO: 720352 - DNA, 75 bp, synthetic construct
  source 1..75: mol_type = other DNA
atgtccgacgacacggtgatctccactatggtcaacggctaccgtagccacaaatttggcaaaataagtaacaag

SEQ ID NO: 720353 - DNA, 75 bp, synthetic construct
  source 1..75: mol_type = other DNA
ctacatggcgctgcgtgaagacatcatgtccgacgacacggtgatctccactatggtcaacggctaccgtagcca

SEQ ID NO: 720354 - DNA, 75 bp, synthetic construct
  source 1..75: mol_type = other DNA
gtgggtatttcttacgcttatccgtggaacgctccacggtcagcaatagccagcccatatctcacctatgagcaa

SEQ ID NO: 720355 - DNA, 75 bp, synthetic construct
  source 1..75: mol_type = other DNA
atggtgaaaccgatgacgaaagcggtgagctgctgaaagagacagcccccgctgtatcagcatgggcggcgcgct

SEQ ID NO: 720356 - DNA, 75 bp, synthetic construct
  source 1..75: mol_type = other DNA
atggaaaggagccagcccgtcggacacgcaaagttatctcaccggcctttgggcgcgcattcgtgccaaactaca

SEQ ID NO: 720357 - DNA, 75 bp, synthetic construct
  source 1..75: mol_type = other DNA
gttagtttgtcacaaagagacggtgatttcaagctactggccgctgcaggcgcatggtgtggctggcaaacgttg

SEQ ID NO: 720358 - DNA, 75 bp, synthetic construct
  source 1..75: mol_type = other DNA
aatatcgggatattcctgctgaaatgtcgtatgcgccgggagaacaaattaagggagggcaagaatgatgccacg

SEQ ID NO: 720359 - DNA, 75 bp, synthetic construct
  source 1..75: mol_type = other DNA
gctgtatggaacttccttcgggaaggctggtttcctctaacaccagtaaggccaattccgtacagtctaccgcca

SEQ ID NO: 720360 - DNA, 75 bp, synthetic construct
  source 1..75: mol_type = other DNA
ctggagtttctaagacatggagagtgggttttctttcagcggagcaaggacgtaggaggcgggtactggcttggc

SEQ ID NO: 720361 - DNA, 75 bp, synthetic construct
  source 1..75: mol_type = other DNA
ggcccggagctacctgtatcgttatctcagggattacagtacattatggcctctgataaggttgaggcagaaagc

SEQ ID NO: 720362 - DNA, 75 bp, synthetic construct
  source 1..75: mol_type = other DNA
cgctggatatcgaaggaagctatgataagcaacggacgataactattgcgccctccccctcggtcggggcccagg

SEQ ID NO: 720363 - DNA, 75 bp, synthetic construct
  source 1..75: mol_type = other DNA
tgagttgcgtcgcctcgctgataccgaaaccgcgcacggtctgagcgttgagtttgccgccgtccatgatgccgc

SEQ ID NO: 720364 - DNA, 75 bp, synthetic construct
  source 1..75: mol_type = other DNA
aggttattgtcgatctccacccagccattgcggcagtattcgttcagagcgtcccattgcttcagcagataggtg

SEQ ID NO: 720365 - DNA, 75 bp, synthetic construct
  source 1..75: mol_type = other DNA
gcactttaccgccgttctcctgaatggagcgcctttggtattcgcccgccgctacgtctgggtgaattcacaatg

SEQ ID NO: 720366 - DNA, 75 bp, synthetic construct
  source 1..75: mol_type = other DNA
attcgctgaaaatcgaaggtcgtaccaaatctttctactattgcgcacgcaccgcacaggtttaccgtaaagcta

SEQ ID NO: 720367 - DNA, 75 bp, synthetic construct
  source 1..75: mol_type = other DNA
ggacagccaatggcaccgatggtcaggcgtacatggacaacaatggcaactggctttgcggtgcgcaagttattc

SEQ ID NO: 720368 - DNA, 75 bp, synthetic construct
  source 1..75: mol_type = other DNA
ttagttccatgcacacctgatttattctcttcatattgtgtagggctgattggtgagatgttgccatcatttata

SEQ ID NO: 720369 - DNA, 75 bp, synthetic construct
  source 1..75: mol_type = other DNA
ataacaaaggtggtgttggtaaaacaactataatttggaatcttgcagtatcgctagcagataaaggaaaaagtg

SEQ ID NO: 720370 - DNA, 75 bp, synthetic construct
  source 1..75: mol_type = other DNA
tacaacgtccaggaagggaaagaagatgatgttggcaacatcgtacacaagtacgagccgattccggtgcaaaat

SEQ ID NO: 720371 - DNA, 75 bp, synthetic construct
  source 1..75: mol_type = other DNA
ggaaaaagttttatgtcgtggtcaacattgcaccgcacaacgccaagctgaaaacctttatccgtgacctgaaac

SEQ ID NO: 720372 - DNA, 75 bp, synthetic construct
  source 1..75: mol_type = other DNA
ccgcgttgcagagcctcaccatgacgggtgccctcactggcatatgctgatgtttatgctcccggaggacgtcga

SEQ ID NO: 720373 - DNA, 75 bp, synthetic construct
  source 1..75: mol_type = other DNA
cgctgcctgctctctggctatatcaacaaacgcgacccgaaccagggcacctgcaccaacgcctgccgctgggag

SEQ ID NO: 720374 - DNA, 75 bp, synthetic construct
  source 1..75: mol_type = other DNA
actccctgcgcgtgcgcaataatgaattcaaccatgaaaatctccagctcggcatcaatgaagcacacgctctgg

SEQ ID NO: 720375 - DNA, 75 bp, synthetic construct
  source 1..75: mol_type = other DNA
accgcgcaggtttatcgtaaagctatcgatgacgccgctgcgggcaaaccgttcgataccagcctgctggaaact

SEQ ID NO: 720376 - DNA, 75 bp, synthetic construct
  source 1..75: mol_type = other DNA
agtgacgctggacagttgcgcggtagcgcaggggaatctctcggttacggtaaatcgtcaggctaatgtcagtca

SEQ ID NO: 720377 - DNA, 75 bp, synthetic construct
  source 1..75: mol_type = other DNA
aatacaggggcaatactttcgtgccaatccggtacctggaaatcatcatcagcgtcgatatggacgaatataaaa

SEQ ID NO: 720378 - DNA, 75 bp, synthetic construct
  source 1..75: mol_type = other DNA
caggacggcaaaacagccacaggtgcattacgttcctggtcagtagctttaagtaattatggtgccaaaagcggt

SEQ ID NO: 720379 - DNA, 75 bp, synthetic construct
  source 1..75: mol_type = other DNA
cctgccgttatcacgacaaccatgctgaaaaataccggctttttatccagcggctttactgagacaaacagcgag

SEQ ID NO: 720380 - DNA, 75 bp, synthetic construct
  source 1..75: mol_type = other DNA
taaacgcgttaacaaaggtacgggtgtgaaatcactggccgatgtgctgggcattaagccggaagaaatcatggc

SEQ ID NO: 720381 - DNA, 75 bp, synthetic construct
  source 1..75: mol_type = other DNA
atatggatggcacccttctgctgcccgatcaccccatttcccccgccgttaaaaatgcgattgccgcagctcgcg

SEQ ID NO: 720382 - DNA, 75 bp, synthetic construct
  source 1..75: mol_type = other DNA
ctaccgtttcctggaaaaactctctcgtgaagtcggttcccatttccacgcgctggatcgcaccacgctgtacac

SEQ ID NO: 720383 - DNA, 75 bp, synthetic construct
  source 1..75: mol_type = other DNA
aatgaccgttctggtcaggtggatcaagacagccagtctgcctacatctactcttctgctcgcttcgcgaacaac

SEQ ID NO: 720384 - DNA, 75 bp, synthetic construct
  source 1..75: mol_type = other DNA
atcttgatggcgatggttatgctgataacgatactctcgatggtaagatcgataaagacagcccgctggatggca

SEQ ID NO: 720385 - DNA, 75 bp, synthetic construct
  source 1..75: mol_type = other DNA
ctattacaacggcgatatttatcccgtcatcaataaagctaccgttaatggcgtaatctctacctactatctgga

SEQ ID NO: 720386 - DNA, 75 bp, synthetic construct
  source 1..75: mol_type = other DNA
acaccatcactgttaaagattctaccgtgacctctggttcatggactgatgaaggtactactggttggttcggta

SEQ ID NO: 720387 - DNA, 75 bp, synthetic construct
  source 1..75: mol_type = other DNA
cttacgacagtatgcgttatgaactgggtgtagatgcaggttataccttcacctacagcgaagaccaggctctga

SEQ ID NO: 720388 - DNA, 75 bp, synthetic construct
  source 1..75: mol_type = other DNA
agccggttacgacttcaaactgggtgatgctggttacgtgactccttacggcagcatttctggtctgttccagtc

SEQ ID NO: 720389 - DNA, 75 bp, synthetic construct
  source 1..75: mol_type = other DNA
tggtccgggactggccgccgaccaacatggctcaaagagctgcttgatagtggtttatcacttgatgatctgaag

SEQ ID NO: 720390 - DNA, 75 bp, synthetic construct
  source 1..75: mol_type = other DNA
aacggcggttcgtgttgccaaagacggtagcattaaggcgatcgagtttgctgctgcggtagagcgaggattacg

SEQ ID NO: 720391 - DNA, 75 bp, synthetic construct
  source 1..75: mol_type = other DNA
gcatcatggtcggtgttgataccaaaattgacggtaacaacgctaagtggatcgtcggtgcggctggagcctgtt

SEQ ID NO: 720392 - DNA, 75 bp, synthetic construct
  source 1..75: mol_type = other DNA
ttccagagtggtgtatttaacgtagcgctgaataacggttctgaatgggacactactggtgattcgcttgttgat

SEQ ID NO: 720393 - DNA, 75 bp, synthetic construct
  source 1..75: mol_type = other DNA
ccgagtggcaacagttcccaggtccgtttccttgccgatatccagaatatgcaggttaatgtcaccccgcaggac

SEQ ID NO: 720394 - DNA, 75 bp, synthetic construct
  source 1..75: mol_type = other DNA
agtgaccctcgacagctgcgcggtagcgcaggggaatctctcagttacagttaatcgtcaggccaatgtcagcca

SEQ ID NO: 720395 - DNA, 75 bp, synthetic construct
  source 1..75: mol_type = other DNA
agtgaccctcgacagctgcgcggtagcgcagggaaatctctcagtaacagtcaatcgtcaggccaatgtcagcca

SEQ ID NO: 720396 - DNA, 75 bp, synthetic construct
  source 1..75: mol_type = other DNA
tcttataaagatggtgatgtaaccaaacacacaaatgagacatttgataccagtgaaggtgttgctgttaatctt

SEQ ID NO: 720397 - DNA, 75 bp, synthetic construct
  source 1..75: mol_type = other DNA
ttgaacattgctaacactactattgatgatgattatgaagctctttacttcactgattcttataaagatggtgat

SEQ ID NO: 720398 - DNA, 75 bp, synthetic construct
  source 1..75: mol_type = other DNA
atttctcatattcaccacttataatgcaatattattataatgacataataaatagtgtggaagtcgaaaatatct

SEQ ID NO: 720399 - DNA, 75 bp, synthetic construct
  source 1..75: mol_type = other DNA
aatgaagaacaatgtatatttcagcaattctactctggtgggtgatgttgcgtttaccagcacctggaatgctaa

SEQ ID NO: 720400 - DNA, 75 bp, synthetic construct
  source 1..75: mol_type = other DNA
tcgatactgaagctttccgtactgacaaactggaactgaccagcggcaacattgctgacaataacggcaacgtag

SEQ ID NO: 720401 - DNA, 75 bp, synthetic construct
  source 1..75: mol_type = other DNA
acggtggttgggctgatgatagcctgaacgtcgatgagctgaatattactcttgataatggtagtaagtgggttg

SEQ ID NO: 720402 - DNA, 75 bp, synthetic construct
  source 1..75: mol_type = other DNA
tgaagacgaaaggggatacccgaacacggcactggtcggcgtgcaggtggactcggagcagttcggcagccagca

SEQ ID NO: 720403 - DNA, 75 bp, synthetic construct
  source 1..75: mol_type = other DNA
ccgtgtctgctgggacaccggggggatcgatggtgaaattgtttatcagagatcaaaaaaacacggtgttttccg

SEQ ID NO: 720404 - DNA, 75 bp, synthetic construct
  source 1..75: mol_type = other DNA
tcttcatatggtgagggcgaatggaaaacgctgccattccagatcgccatcatgaacagtatggggaatgatcag

SEQ ID NO: 720405 - DNA, 75 bp, synthetic construct
  source 1..75: mol_type = other DNA
ttacagcccctgataagggcattgccggtgacgccagttgaatgggctgatcaaaattattatctgcctaaagaa

SEQ ID NO: 720406 - DNA, 75 bp, synthetic construct
  source 1..75: mol_type = other DNA
gagttgttactggaaaaggtctgccactatggtgcgcaggttcccctgcgggtggtttacctgaccgccgggatc

SEQ ID NO: 720407 - DNA, 75 bp, synthetic construct
  source 1..75: mol_type = other DNA
tggaaaacgctgccattccagatcgccatcatgaactgcatggggaatgatcagatccgcactgttaatctgatt

SEQ ID NO: 720408 - DNA, 75 bp, synthetic construct
  source 1..75: mol_type = other DNA
aacggtctgaaaacttttgttaacaccacgctgggcgagacctgggaagaggccgtgggcgaaaaactcgatcac

SEQ ID NO: 720409 - DNA, 75 bp, synthetic construct
  source 1..75: mol_type = other DNA
ggcaagccggtgatcaccatgccaaaaacccgcaatcagcggggcgtgtatctgtgtgaagtggggacggacacc

SEQ ID NO: 720410 - DNA, 75 bp, synthetic construct
  source 1..75: mol_type = other DNA
gaggtgatggcggagcggaaacccgccagatgtttgcgcagaaggtgtcggcatataccggcctgtccgtgcagg

SEQ ID NO: 720411 - DNA, 75 bp, synthetic construct
  source 1..75: mol_type = other DNA
cttcgttggtctggcggcggtgttggttggttttaacagctatctgcatcacgacgcggaaatggcgccgattct

SEQ ID NO: 720412 - DNA, 75 bp, synthetic construct
  source 1..75: mol_type = other DNA
tactggattgaaaatggtatattccagacttctgttccttatgttgtaccttatctcgacaaatttcttgcttca

SEQ ID NO: 720413 - DNA, 75 bp, synthetic construct
  source 1..75: mol_type = other DNA
ttgcaggaaaagaccaaaggtgaactgaaattaaagctatttcctgacagcaccctcggcaacgcgcaggcaatg

SEQ ID NO: 720414 - DNA, 75 bp, synthetic construct
  source 1..75: mol_type = other DNA
gagttccagcaagcactgatctcatctgcgcaggaagcgggtagctatcagcgcaaactggtcgccgaagatcag

SEQ ID NO: 720415 - DNA, 75 bp, synthetic construct
  source 1..75: mol_type = other DNA
ccgtactggtgattggtgctaacgatacggttaacccggcggcgcaggatgatccgaagagtccgattgctggta

SEQ ID NO: 720416 - DNA, 75 bp, synthetic construct
  source 1..75: mol_type = other DNA
ttcttcaaagaaaacacccacatgctgtttggtgacgccaaagccagcgtggatgcaatcctgaaagctctgtaa

SEQ ID NO: 720417 - DNA, 75 bp, synthetic construct
  source 1..75: mol_type = other DNA
cctgctgctgattgtatttgttcgcacggacagcgtcggcctgcaagtgctggcattgctgataatgaccgccat

SEQ ID NO: 720418 - DNA, 75 bp, synthetic construct
  source 1..75: mol_type = other DNA
aaaatttttcgaagtgcagaagtacctttctctgacgcaccacgcctattccccgcttctggtggtgatcaacaa

SEQ ID NO: 720419 - DNA, 75 bp, synthetic construct
  source 1..75: mol_type = other DNA
gttcagcacatcttctctggcggcacaatcattacgtttcggttatgaaacttcgcaaaccgactcgcaacatat

SEQ ID NO: 720420 - DNA, 75 bp, synthetic construct
  source 1..75: mol_type = other DNA
tatgctggtgtgcaaaacccgctgttcttcaaggaaaacacccacatgctgtttggtgacgccaaagccagcgtg

SEQ ID NO: 720421 - DNA, 75 bp, synthetic construct
  source 1..75: mol_type = other DNA
ggcgattacattcgtcaacgccgactgctactggctgccgttgaactgcgcaccaccgagcgccctatttttgat

SEQ ID NO: 720422 - DNA, 75 bp, synthetic construct
  source 1..75: mol_type = other DNA
ggttatcgaactggtgttgggtatcgataacctagtctttatcgctatcctcgccgagaagctccctcccgccca

SEQ ID NO: 720423 - DNA, 75 bp, synthetic construct
  source 1..75: mol_type = other DNA
attcagaagaatgcggacggttcctggacggcgaatggtcatatgccgctggaagatctggtgcaatatgtgccg

SEQ ID NO: 720424 - DNA, 75 bp, synthetic construct
  source 1..75: mol_type = other DNA
tgctggacgccatcttctcactcgactcggtgattaccgccgtcgggatggtcgaccatttgctggtcatgatgg

SEQ ID NO: 720425 - DNA, 75 bp, synthetic construct
  source 1..75: mol_type = other DNA
tgccgaccgcaaatttatgattggcggtctgggaaataagcaatttggcatctacatgattaataattcaaggac

SEQ ID NO: 720426 - DNA, 75 bp, synthetic construct
  source 1..75: mol_type = other DNA
gctgatcgcaaatttatgattggtggactggggaataagcaatttggcatctacatgattaataactcaaggaca

SEQ ID NO: 720427 - DNA, 75 bp, synthetic construct
  source 1..75: mol_type = other DNA
actgactgggcaaagattggttttaaaaataatgccgacagcgacactgattcatacatgtggtttgaaacaggc

SEQ ID NO: 720428 - DNA, 75 bp, synthetic construct
  source 1..75: mol_type = other DNA
tggacgccattgagctcagaatgggtgaaatgcgtcgctatatcattaccatgatcgacgaacacagcgattacg

SEQ ID NO: 720429 - DNA, 75 bp, synthetic construct
  source 1..75: mol_type = other DNA
gccactatggaactaaacgaacggctggagggaaaagacagcaataaccccactcagcgacgcggtgcgaaattc

SEQ ID NO: 720430 - DNA, 75 bp, synthetic construct
  source 1..75: mol_type = other DNA
atacagggtccaactctgccgataatatagcgggcgtttattacagacccgttcaaaagtatataaatggcacct

SEQ ID NO: 720431 - DNA, 75 bp, synthetic construct
  source 1..75: mol_type = other DNA
ttccgaaaggctatctgtacgctgccattggtttctcggtgatgatcgaggcgctcaatcagttggctatcttta

SEQ ID NO: 720432 - DNA, 75 bp, synthetic construct
  source 1..75: mol_type = other DNA
aatatcacaccattgccgggctgttgatggaatatttacagcgtattccaaaacctggcgaagaagttcaggtgg

SEQ ID NO: 720433 - DNA, 75 bp, synthetic construct
  source 1..75: mol_type = other DNA
gtggacccatacattgcattttagactaatcttatccatgatcgtgataacacatactgcagtcgtacaggtttt

SEQ ID NO: 720434 - DNA, 75 bp, synthetic construct
  source 1..75: mol_type = other DNA
gaacaggagttgtgtctgttggtaatggtgccaggattgatggcgggctggcacttggcacgaataacgcgttgg

SEQ ID NO: 720435 - DNA, 75 bp, synthetic construct
  source 1..75: mol_type = other DNA
gtgcagttgcatcccgcaaggatgcaactgcacaaccgacccttgaagaactggcagcgaagctgtccggaggag

SEQ ID NO: 720436 - DNA, 75 bp, synthetic construct
  source 1..75: mol_type = other DNA
cggcattgatcccaccatcgtctacaaccgctcaaaaaaacacggtctgtttcgtgtgatccctataaagggggc

SEQ ID NO: 720437 - DNA, 75 bp, synthetic construct
  source 1..75: mol_type = other DNA
tggacacgtgacggcctggcattttacagcgcgggtgatgaggagatgccgccaccgcgatccatcactttccac

SEQ ID NO: 720438 - DNA, 75 bp, synthetic construct
  source 1..75: mol_type = other DNA
gcctgaaatgggagaagggcaagccggagacggtgtattacctgtgtgaacataatggctgcgcgatccgtcagt

SEQ ID NO: 720439 - DNA, 75 bp, synthetic construct
  source 1..75: mol_type = other DNA
tggacgcgtgacggtctgacattttacagcgccggtgatgaggaaatcccgccaccgcgctcaatctcgtaccac

SEQ ID NO: 720440 - DNA, 75 bp, synthetic construct
  source 1..75: mol_type = other DNA
tatgaatataaatcgctggcgatgaacgctgagcagcgctatgtcaacccgctgggtttccgagtgacgagctac

SEQ ID NO: 720441 - DNA, 75 bp, synthetic construct
  source 1..75: mol_type = other DNA
taaaccgcacggcgtagcaacaatacgctttactacggttcgccgcgtgcgcagcaatcccgttgatgatcagcc

SEQ ID NO: 720442 - DNA, 75 bp, synthetic construct
  source 1..75: mol_type = other DNA
atgaaagctaataaaaaaacagggcttacacgtgaagccattaaagagttcaacgaaagccgtaaagggcttgaa

SEQ ID NO: 720443 - DNA, 75 bp, synthetic construct
  source 1..75: mol_type = other DNA
atttccatttgtaaatcttaagggaaaccaaatgtatgctataagcaacggccatacatgtgtgagttatccaat

SEQ ID NO: 720444 - DNA, 75 bp, synthetic construct
  source 1..75: mol_type = other DNA
tttacgaccgttcgccgctctcgtagcaataactttgacgatccaccgaagcgctggattgccatcctgggctac

SEQ ID NO: 720445 - DNA, 75 bp, synthetic construct
  source 1..75: mol_type = other DNA
ctatggcgacgaaattgataagtatttcctgactcaatacgttatccaccgagaatcctacgatttttattccct

SEQ ID NO: 720446 - DNA, 75 bp, synthetic construct
  source 1..75: mol_type = other DNA
ggtgtcaagggggggaaagctgttgaatacgatgtgatgtcgatgcccaccaaagaacgagagcaagttattgcg

SEQ ID NO: 720447 - DNA, 75 bp, synthetic construct
  source 1..75: mol_type = other DNA
ttgccgatcatttgctgccgcatttgaatctgcaaaacatcaccaccatggcagaacagcatcaggggattattc

SEQ ID NO: 720448 - DNA, 75 bp, synthetic construct
  source 1..75: mol_type = other DNA
caatttcaatatgagcaacgctatgcaggaagcggtcttacaattaattgaagtgcaactggcgcaggaagaggt

SEQ ID NO: 720449 - DNA, 75 bp, synthetic construct
  source 1..75: mol_type = other DNA
ccttctgccgagtttcgcggcgggcgttttgctgatacggataatattatttatcagcaaatccggggatgggat

SEQ ID NO: 720450 - DNA, 75 bp, synthetic construct
  source 1..75: mol_type = other DNA
taagtaccggaacaacgtgattgaatgcgatcatggcaaactgaaacggataatcggcgccacgctgggatttaa

SEQ ID NO: 720451 - DNA, 75 bp, synthetic construct
  source 1..75: mol_type = other DNA
tcctgtatggccgataacggaaatcatccagacattcagcggcctgcgtcgtgtggttaaaacgtcctgtatcga

SEQ ID NO: 720452 - DNA, 75 bp, synthetic construct
  source 1..75: mol_type = other DNA
tgagatccgcatgttccgcagccaggtcgcgccgcgcacacaaattttcattattcgcgatcaggatcgcgaagt

SEQ ID NO: 720453 - DNA, 75 bp, synthetic construct
  source 1..75: mol_type = other DNA
cgcattttacgggcaattaatgaagagatagtctcactgctgccgctcggcctgctggttcacgatcaggaatcg

SEQ ID NO: 720454 - DNA, 75 bp, synthetic construct
  source 1..75: mol_type = other DNA
aatgaaatccaggtcgggaacgcactgaaacaaagcggtatcgcccgtaacgaactctttgtcaccacaaaactc

SEQ ID NO: 720455 - DNA, 75 bp, synthetic construct
  source 1..75: mol_type = other DNA
aagaggaagaagaacgtttactggatgatgtcaccgtgatggtggatgtaacttccacagaaattcggaatattg

SEQ ID NO: 720456 - DNA, 75 bp, synthetic construct
  source 1..75: mol_type = other DNA
agttctaaaattgaaatctcttcggcgctcaactccaccgatatgcgattggtctggcaggttccttatggcact

SEQ ID NO: 720457 - DNA, 75 bp, synthetic construct
  source 1..75: mol_type = other DNA
cgcgatcaaacgcaaaggtttgcaactactgattaacaatcatctgacagcgcacgacatgcgccgcggcgatcg

SEQ ID NO: 720458 - DNA, 75 bp, synthetic construct
  source 1..75: mol_type = other DNA
tttctgtgtctccatggggagcaataaaaccgataattacagcgcggcaatgcgattcagtgatgacggcgccag

SEQ ID NO: 720459 - DNA, 75 bp, synthetic construct
  source 1..75: mol_type = other DNA
tattgaatactttattgatgagttaaatcccatcagcagttcaaaagctaacacatcagcgagatcaactggtaa

SEQ ID NO: 720460 - DNA, 75 bp, synthetic construct
  source 1..75: mol_type = other DNA
tacggcattgtgcgtgctgattaactacctagccccagagtccgctttcggactgttaatggcgctggtggtttc

SEQ ID NO: 720461 - DNA, 75 bp, synthetic construct
  source 1..75: mol_type = other DNA
tcgttagccgttctgctctcactgatgccgtggacccgcgttaccgccgataccagtccgtttgtgctgatcttc

SEQ ID NO: 720462 - DNA, 75 bp, synthetic construct
  source 1..75: mol_type = other DNA
tttaaaattacagatacaccgtggtacaacgcctggacgcaggataaaacgtttgtatatgacaatgtcatctat

SEQ ID NO: 720463 - DNA, 75 bp, synthetic construct
  source 1..75: mol_type = other DNA
gtgatttaatcgaatacgtaaatacagtcaaagaactaaaaaatcatatttcgatagaagaatacagaaatgaat

SEQ ID NO: 720464 - DNA, 75 bp, synthetic construct
  source 1..75: mol_type = other DNA
atgagaaaagtaaaaacagataacagtgatttaatagaatatttagatatagtaaaagaactaaaaaaccatatt

SEQ ID NO: 720465 - DNA, 75 bp, synthetic construct
  source 1..75: mol_type = other DNA
cgacgaaccgatgaaccgtatctttgtaaaagcgctggaaaaacgcctgagtaactttgcgacctttcgtttgga

SEQ ID NO: 720466 - DNA, 75 bp, synthetic construct
  source 1..75: mol_type = other DNA
agattttcctccatggtgcaactgggcagaaagtcctgagagaggtgcttagtgcccagttggtgggattgattc

SEQ ID NO: 720467 - DNA, 75 bp, synthetic construct
  source 1..75: mol_type = other DNA
aatcaattgtttaataatttcaacgaatatcttgaagtcaatgggttgccaaaaattaaaacatttgaagaagtt

SEQ ID NO: 720468 - DNA, 75 bp, synthetic construct
  source 1..75: mol_type = other DNA
cgaaagcgactaaccaggttatctaccgcatcctgattttctatattggttcgttagccgttctgctctcactga

SEQ ID NO: 720469 - DNA, 75 bp, synthetic construct
  source 1..75: mol_type = other DNA
ctgtacgttttagttgccatggcagagctgactgctgtgggtaaatacattcagttctggtatccggaaatccca

SEQ ID NO: 720470 - DNA, 75 bp, synthetic construct
  source 1..75: mol_type = other DNA
gtcgataaacgcggcgtaccagtcaataccattctggtatctgcgctggttacggcattgtgcgtactgattaac

SEQ ID NO: 720471 - DNA, 75 bp, synthetic construct
  source 1..75: mol_type = other DNA
gcatggaagagaacatcaacattctcgattttgaactcagtcctgaagatatgctgcaaattaccgccctggata

SEQ ID NO: 720472 - DNA, 75 bp, synthetic construct
  source 1..75: mol_type = other DNA
atgatattgtctgtttttataacggtaatttcaggccatgacaagccgcagccgccaggctgcctactcgattat

SEQ ID NO: 720473 - DNA, 75 bp, synthetic construct
  source 1..75: mol_type = other DNA
tttaacctgatgccctggccgcgtgaagaagttatcaacaccactgtgcggctgcgcgccagccagtttaatttg

SEQ ID NO: 720474 - DNA, 75 bp, synthetic construct
  source 1..75: mol_type = other DNA
tcggcccctggtatacccagaccgataccacgattgtttctgcggaatccatcgtccgtaatctgatgtacggaa

SEQ ID NO: 720475 - DNA, 75 bp, synthetic construct
  source 1..75: mol_type = other DNA
tgtcactcttagtcataacagcaggcgtattgatgtggatatcaaccttgataaccaggctgacgatcatcgcct

SEQ ID NO: 720476 - DNA, 75 bp, synthetic construct
  source 1..75: mol_type = other DNA
aaaatgccagtcccggactcacaactacgtggtctgctttcttgtcgcctaagtttattgagttataccggtacg

SEQ ID NO: 720477 - DNA, 75 bp, synthetic construct
  source 1..75: mol_type = other DNA
tactgggcaaagaagatctgcttttaaggcctgggcggcctaaatgccagtcccggactcacaactacgtggtct

SEQ ID NO: 720478 - DNA, 75 bp, synthetic construct
  source 1..75: mol_type = other DNA
tgtggtcgcgtgtatatcctgcttatatttatgcaattgaagaaagaataaatgtcagggcaaaggggagagagt

SEQ ID NO: 720479 - DNA, 75 bp, synthetic construct
  source 1..75: mol_type = other DNA
cgtaatgttcgcctgttccgtcgctttgaaacactggtgtcttacctgaaagaaatcggtattgcccgtttcgat

SEQ ID NO: 720480 - DNA, 75 bp, synthetic construct
  source 1..75: mol_type = other DNA
aaggccgttaatatgcaagcggcgattgattcagtaatcagtaattccggtaaagcaggtttatcacaagtcatt

SEQ ID NO: 720481 - DNA, 75 bp, synthetic construct
  source 1..75: mol_type = other DNA
tcgcggtcagcctgtaccgtattttattcgccatgcccgtgagatcgatccaggcctaatcgatcggcaaattgt

SEQ ID NO: 720482 - DNA, 75 bp, synthetic construct
  source 1..75: mol_type = other DNA
ccgacaaactcgtcctgtttaacctgatgccctggccgcgtgaagaagttattaacaccactgtgcgcctgcgcg

SEQ ID NO: 720483 - DNA, 75 bp, synthetic construct
  source 1..75: mol_type = other DNA
gtgagcatccggttatccattcggacaggggctcgcattatcgctggcctgcgtggatccgccgcactgaaaatg

SEQ ID NO: 720484 - DNA, 75 bp, synthetic construct
  source 1..75: mol_type = other DNA
gttattcttgccctgctggtactggcaccgctgctctcctggctgccactttccgccatggcagccctgctgttg

SEQ ID NO: 720485 - DNA, 75 bp, synthetic construct
  source 1..75: mol_type = other DNA
gtctggggaatatcattgccccgttctttggtggtattaccgctacagccgcgatcgcgcgttctgccgctaacg

SEQ ID NO: 720486 - DNA, 75 bp, synthetic construct
  source 1..75: mol_type = other DNA
aggcaggattaacgctgcctgtcactaaattatttcagcagcacatcgttacgcttctggcagaacaatctcagc

SEQ ID NO: 720487 - DNA, 75 bp, synthetic construct
  source 1..75: mol_type = other DNA
aagcgtgatgccgagaaaggcggcgttttgcgtctgggaacagaagtcgtcagtgaccagcaaggaaccattgcc

SEQ ID NO: 720488 - DNA, 75 bp, synthetic construct
  source 1..75: mol_type = other DNA
cgtggcattcagccagaagcctgggcaccgtttgcggaaggtaaaaatggtctgttccagcatcccgtgttaacg

SEQ ID NO: 720489 - DNA, 75 bp, synthetic construct
  source 1..75: mol_type = other DNA
cgaactctttgtcaccacgaaactctggttgcaggataccagttacgaaggggccaaagcccagttcgaacgctc

SEQ ID NO: 720490 - DNA, 75 bp, synthetic construct
  source 1..75: mol_type = other DNA
ccttaatcggctgcaacttgattacgtcgacctgtacctgattcaccagccttatggcgatgtccatggggcatg

SEQ ID NO: 720491 - DNA, 75 bp, synthetic construct
  source 1..75: mol_type = other DNA
gaaatcggcactgatgtgaactacggcgagatcacccgccagttaatagcttccttgcagaagaagtctaacttc

SEQ ID NO: 720492 - DNA, 75 bp, synthetic construct
  source 1..75: mol_type = other DNA
cacctggaccgtcaccgttgccgatctgaaaaacggcactgcacagaacatccgtgcgaaatttgtctttatcgg

SEQ ID NO: 720493 - DNA, 75 bp, synthetic construct
  source 1..75: mol_type = other DNA
cgttgccgatctgaaaaacggcactgcacagaacatccgcgccaaatttgtctttatcggcgcgggcggtgcggc

SEQ ID NO: 720494 - DNA, 75 bp, synthetic construct
  source 1..75: mol_type = other DNA
ttcattacaaaagaaatctaacttttcgctgcagctcagcagcgaagtccgcgccctgaaacgtaatgacgataa

SEQ ID NO: 720495 - DNA, 75 bp, synthetic construct
  source 1..75: mol_type = other DNA
gatcgtgtttccagcccacaatggcaggccacgctgaaagcgattgttccgtcttatggcagcaagctgaacggt

SEQ ID NO: 720496 - DNA, 75 bp, synthetic construct
  source 1..75: mol_type = other DNA
tgctgcgtctgggtacagaagtggtcagcgaccagcaaggaaccattgctgcgctgctcggcgcatcgccggggg

SEQ ID NO: 720497 - DNA, 75 bp, synthetic construct
  source 1..75: mol_type = other DNA
caatattgcggatgctaatgcgtctggtgctggcgcaactgcggcctatctgcaacctctttctgaagatgactc

SEQ ID NO: 720498 - DNA, 75 bp, synthetic construct
  source 1..75: mol_type = other DNA
cttgacgctcaggacttcagtggtcaggggcaggtggtggccaccggtgatgtcacactgaaactgattgctgcc

SEQ ID NO: 720499 - DNA, 75 bp, synthetic construct
  source 1..75: mol_type = other DNA
tcatgctgaacagcgcgtcttccacactggcgggtgaaaccagtgcgggcagcacggtgtctgtaaaaggcaaca

SEQ ID NO: 720500 - DNA, 75 bp, synthetic construct
  source 1..75: mol_type = other DNA
tccggggacgatttgattctgcggaacaaggaagaagatacagaagtccggattgaaggattctgggaggaatgc

SEQ ID NO: 720501 - DNA, 75 bp, synthetic construct
  source 1..75: mol_type = other DNA
ccgtgacgtcaaaaactgatggtgtggcagatgccccggtcctgagcattcctgaagtggctgacggttatgcca

SEQ ID NO: 720502 - DNA, 75 bp, synthetic construct
  source 1..75: mol_type = other DNA
cggtggtttctgctctgtttagtggcgcggctatggctgcgttgactaatggtcaagctgataactcagcaagct

SEQ ID NO: 720503 - DNA, 75 bp, synthetic construct
  source 1..75: mol_type = other DNA
caggagtattgcgaatacctgcatcacggactttcggcgattaagcgtcggctggggttacagcgctataacgaa

SEQ ID NO: 720504 - DNA, 75 bp, synthetic construct
  source 1..75: mol_type = other DNA
acccgatgtatcgctatcagcttgagaagaaagcggaaaaggttgtctttcgcggtgagtgggcggaagtgatgg

SEQ ID NO: 720505 - DNA, 75 bp, synthetic construct
  source 1..75: mol_type = other DNA
gaacctgtgaataaagctgatgcagatcggatagcagaagagatcgaaacggcagaacacattaagaagttacgt

SEQ ID NO: 720506 - DNA, 75 bp, synthetic construct
  source 1..75: mol_type = other DNA
ggtggtggttttgaggcatgggccgttccgactgaaaagggagccacccggaaatttctgactggcacaacacgc

SEQ ID NO: 720507 - DNA, 75 bp, synthetic construct
  source 1..75: mol_type = other DNA
ggtgacaccacgctgaacgcagccaccacggacaaccggggcagtctgctttcggccggcacgctctctcttgat

SEQ ID NO: 720508 - DNA, 75 bp, synthetic construct
  source 1..75: mol_type = other DNA
ctgctgcgcccgtggcggtcagcgttcacatattgtgcaacgttggttgcatgatgccgggattgactatccgct

SEQ ID NO: 720509 - DNA, 75 bp, synthetic construct
  source 1..75: mol_type = other DNA
acatctcgcattgtacctattgctgttcgccatcggcatcagcggctatctgatctcaactgccgatggtaaacc

SEQ ID NO: 720510 - DNA, 75 bp, synthetic construct
  source 1..75: mol_type = other DNA
ataccaacggtaatattcacgctggtgtattcgatatccatagcagcgattatgtaatggataccgacctggtca

SEQ ID NO: 720511 - DNA, 75 bp, synthetic construct
  source 1..75: mol_type = other DNA
accatctctctgactggtggctcttatctgaatattggtgaagacggtcatgtcgcaactgattcgctgaccatc

SEQ ID NO: 720512 - DNA, 75 bp, synthetic construct
  source 1..75: mol_type = other DNA
gatactaccaagtcaaactacggttatggcttaatcgcaatgaactctgatggtcacctgaccattaacggtaac

SEQ ID NO: 720513 - DNA, 75 bp, synthetic construct
  source 1..75: mol_type = other DNA
acctgaacatcggtgaagacggtcatgtagcgactaataccctgaccatcgacaatagtaccgttaaaatgtctg

SEQ ID NO: 720514 - DNA, 75 bp, synthetic construct
  source 1..75: mol_type = other DNA
aacttcagcgcctatactgatgctaactacctcggtggtggtgacgtagatcaagattggtctgcgaatgtaggt

SEQ ID NO: 720515 - DNA, 75 bp, synthetic construct
  source 1..75: mol_type = other DNA
gcgatgaactctgatggtcatctgactattaacggtaacggcgataacgacaatacggcttctgttgaagatgga

SEQ ID NO: 720516 - DNA, 75 bp, synthetic construct
  source 1..75: mol_type = other DNA
ctgtacgttttagttgccatggctgagctgactgccgtgggtaaatacattcagttctggtatccggaaatcccc

SEQ ID NO: 720517 - DNA, 75 bp, synthetic construct
  source 1..75: mol_type = other DNA
ttgccttttattacctgtgcgatcagcgggcatccgatcaggcgcgtgaccgttaccgtgaggcgctggcctggc

SEQ ID NO: 720518 - DNA, 75 bp, synthetic construct
  source 1..75: mol_type = other DNA
atgactcgtcttgccgcaaaggctggacatctcgcattgtacctattgctgttcgccatcggcatcagcggctat

SEQ ID NO: 720519 - DNA, 75 bp, synthetic construct
  source 1..75: mol_type = other DNA
gctcgcgcaggcattcaaccgatcccgggccgccttgctttcttcccgaatcgtcgcgcggcgatggcggattta

SEQ ID NO: 720520 - DNA, 75 bp, synthetic construct
  source 1..75: mol_type = other DNA
cgtatgactcgcctggcaccggtagtcgtagatgttccagacgatgtcctggttctgcgcgttattggcccgctg

SEQ ID NO: 720521 - DNA, 75 bp, synthetic construct
  source 1..75: mol_type = other DNA
gggctggtgatgatgatggcgattatcatgttctcgttcggcggtctggaactggtggggatcaccgcagcagaa

SEQ ID NO: 720522 - DNA, 75 bp, synthetic construct
  source 1..75: mol_type = other DNA
tccctgcaaaatcctgcgttctacccacaacaaagttcactacatccgaaaaggcagaacatgtatcgccagcat

SEQ ID NO: 720523 - DNA, 75 bp, synthetic construct
  source 1..75: mol_type = other DNA
atcggataaggaacagtggggatggaacattgtcgagttctacttgggcaacattagcgaacaaacgttaatgga

SEQ ID NO: 720524 - DNA, 75 bp, synthetic construct
  source 1..75: mol_type = other DNA
tcgttgcgacagcacttacgcttgcaggatgcagtaatacttcctggcgtaaaagtgaagtcctcgcggtaccat

SEQ ID NO: 720525 - DNA, 75 bp, synthetic construct
  source 1..75: mol_type = other DNA
cgtcgattttcatgaaatagaagagtgccagcgtcgcggggaatgggacaaaaccggggatattctggctgaggc

SEQ ID NO: 720526 - DNA, 75 bp, synthetic construct
  source 1..75: mol_type = other DNA
cacggtatttcattcggggaggggtgtatctatcttgatatggatatgatacttacaggtaagcttggtacaata

SEQ ID NO: 720527 - DNA, 75 bp, synthetic construct
  source 1..75: mol_type = other DNA
agaagatccgtttgagatccgtcttgaacgcctgaacgaagagtatttcttgcgtatgcatcatgattttaccca

SEQ ID NO: 720528 - DNA, 75 bp, synthetic construct
  source 1..75: mol_type = other DNA
tccgctgtggttgtggtatgaactggccattcatggtgcgccacagaacaatcacgcacaggcccaacgcatcga

SEQ ID NO: 720529 - DNA, 75 bp, synthetic construct
  source 1..75: mol_type = other DNA
gtgattgtactttcgaagtagtctttatggtgtttccgaaagaaaaaaatggtgacgaatttacatttgtgagtc

SEQ ID NO: 720530 - DNA, 75 bp, synthetic construct
  source 1..75: mol_type = other DNA
cggccatgccgatctgggtggccattttgatgaaaacaaacggtttggctatcgcgtgaacctgcttgatcagga

SEQ ID NO: 720531 - DNA, 75 bp, synthetic construct
  source 1..75: mol_type = other DNA
gctcagagattaatcgttagcggcggtgaaacaacgtcttcagcagatggtgcaatgataacgttgcatggttcc

SEQ ID NO: 720532 - DNA, 75 bp, synthetic construct
  source 1..75: mol_type = other DNA
gtgctgctacatagcgtcgattttcatgaaatagaagagtgccaacgtcgcggtgagtgggacaaaacaggagag

SEQ ID NO: 720533 - DNA, 75 bp, synthetic construct
  source 1..75: mol_type = other DNA
ggtttactggtgccagaagagcgcagtgttctgcctgtgtttgatactgcggctattcatgccgaggacgcagta

SEQ ID NO: 720534 - DNA, 75 bp, synthetic construct
  source 1..75: mol_type = other DNA
gtggtgatgccttttttgaattaaaaggaaatgcttctatgaagttatcaccaaaagctgcaatagaagtttgta

SEQ ID NO: 720535 - DNA, 75 bp, synthetic construct
  source 1..75: mol_type = other DNA
gctgccgccggtttctcgtctgactgccgatcaaacccagtatcacttcctctctggcttcaccgccaaactggc

SEQ ID NO: 720536 - DNA, 75 bp, synthetic construct
  source 1..75: mol_type = other DNA
tacctttatgcaattagatgaaatgcttacaaaagagtatgggaaacctgttgcgacgaaggaccatatctttga

SEQ ID NO: 720537 - DNA, 75 bp, synthetic construct
  source 1..75: mol_type = other DNA
aaaaggaaggtgtaacactactcaccatcaccgataaacaatttaaattttctcgtttagaagaagataaaataa

SEQ ID NO: 720538 - DNA, 75 bp, synthetic construct
  source 1..75: mol_type = other DNA
tgaagaaaatttatcacaaggaaggaaatttttactaggtggccataaagttgttgaaatagccgcattgaactc

SEQ ID NO: 720539 - DNA, 75 bp, synthetic construct
  source 1..75: mol_type = other DNA
gctggttgatgacgagcttctgagcagagaaaacagtcgtgtggcacggttgagaaaaaatgccggcctgaaata

SEQ ID NO: 720540 - DNA, 75 bp, synthetic construct
  source 1..75: mol_type = other DNA
cacgatagtggtaagtcagttcccggtagataaatggcatggtctgatggagaacccaacaacagcagatgccat

SEQ ID NO: 720541 - DNA, 75 bp, synthetic construct
  source 1..75: mol_type = other DNA
ctgataaccggtccgacaggatgtggcaagagctggatagccaatgcactgggcgaacaggcatgtcgacagaaa

SEQ ID NO: 720542 - DNA, 75 bp, synthetic construct
  source 1..75: mol_type = other DNA
ggggaaaggagttaagaaatattttaattttacaccattacataattataatcatttttgtgactttattgagtt

SEQ ID NO: 720543 - DNA, 75 bp, synthetic construct
  source 1..75: mol_type = other DNA
ggcaccggtaaaaccaccctttccaccgacccgaaacgtcgcctgattggcgatgacgagcacggctgggatgac

SEQ ID NO: 720544 - DNA, 75 bp, synthetic construct
  source 1..75: mol_type = other DNA
cgcttctccggaacagtggcaggaaaaagctgaaacgctggcgaaactgtttatcgacaacttcgataaatacac

SEQ ID NO: 720545 - DNA, 75 bp, synthetic construct
  source 1..75: mol_type = other DNA
cattgtttgcaggtaataaagatttagatgagcaacttttcaacaaaattgtcttttcttcagctgaattaaaaa

SEQ ID NO: 720546 - DNA, 75 bp, synthetic construct
  source 1..75: mol_type = other DNA
attgtgctaactatgcatgtataatggatttttctggtgaaaagctagcgttcaaatttttcaagctcgatagac

SEQ ID NO: 720547 - DNA, 75 bp, synthetic construct
  source 1..75: mol_type = other DNA
taatggtagaaaaacaccaaggtattataatgaagatgagttgttaggttggttaaaagtttctgaaatttgtga

SEQ ID NO: 720548 - DNA, 75 bp, synthetic construct
  source 1..75: mol_type = other DNA
ttgaccggattgaggaaaagtgtgaggccatgcagtcgctgattctgccgccagcggcacgccaggcactggcac

SEQ ID NO: 720549 - DNA, 75 bp, synthetic construct
  source 1..75: mol_type = other DNA
gcatactcgtgccgtgcgtggcattgacggggacgtgaagcttaaccgtgcgctgtgggtgatggctgaaacact

SEQ ID NO: 720550 - DNA, 75 bp, synthetic construct
  source 1..75: mol_type = other DNA
gcgaggtgcgagtgccacaccggggaaatgtcgtggagaaggtgattgaaggcgcttacgaagtcctcggtgtgt

SEQ ID NO: 720551 - DNA, 75 bp, synthetic construct
  source 1..75: mol_type = other DNA
ccgccaccagcacagcaggcgatggcgaaagcagcattaacctatcgctttggtgaagagcatcaaccggtgacg

SEQ ID NO: 720552 - DNA, 75 bp, synthetic construct
  source 1..75: mol_type = other DNA
gattactggcaaacaggttccggaaataattctgcttaacagccatgacggctccagttcatatcagatgctacc

SEQ ID NO: 720553 - DNA, 75 bp, synthetic construct
  source 1..75: mol_type = other DNA
caaaagcggcattaacctatcgctttggtgaagagcatcagccggtgacggaatcgcaaatcctttccccgcgcc

SEQ ID NO: 720554 - DNA, 75 bp, synthetic construct
  source 1..75: mol_type = other DNA
gggaggtgagagtgccgcataaaggggaagtggtggaaaaagtcattgaaggggcttacgaggtgctgggcattt

SEQ ID NO: 720555 - DNA, 75 bp, synthetic construct
  source 1..75: mol_type = other DNA
atgctgcaaaccagatacgccgtgaccgcccactgacacgcgaagaactgatgtaccacgtcccgagtatttttg

SEQ ID NO: 720556 - DNA, 75 bp, synthetic construct
  source 1..75: mol_type = other DNA
ggtgcttacgaagtggtgggcgtgtttgacctgattgaggaaaagcgtgatgccatgcagtcgctggtcctgccg

SEQ ID NO: 720557 - DNA, 75 bp, synthetic construct
  source 1..75: mol_type = other DNA
ccgccaccggcgcagcaggcactggcaaaagccgcgctgacgtaccgctttggtgaagaccaccagccggtgact

SEQ ID NO: 720558 - DNA, 75 bp, synthetic construct
  source 1..75: mol_type = other DNA
gggattatttcgtgcggtttgtcagaatgggctcgtctgcggtgagtcgtttggcgaggtgcgggtgccacacaa

SEQ ID NO: 720559 - DNA, 75 bp, synthetic construct
  source 1..75: mol_type = other DNA
ccgcccgctcagcaggtactggctaaagcggcgctggcgtatcgctttggtgaagaccaccagccggtgactgcc

SEQ ID NO: 720560 - DNA, 75 bp, synthetic construct
  source 1..75: mol_type = other DNA
gagaggtgcgtgttccgcaccggggagacgtggtggagaaagttattgaaggggcttacgaagtggtgggcgttt

SEQ ID NO: 720561 - DNA, 75 bp, synthetic construct
  source 1..75: mol_type = other DNA
cacaggcggcactgacttaccgttatggtgacgaacatcagcagccacaacagcggacatccttacgcaacgacg

SEQ ID NO: 720562 - DNA, 75 bp, synthetic construct
  source 1..75: mol_type = other DNA
ggcacagtgcaaaaggaaaacgtatccatacccgtgccattcacagcatcgacactgacattaagctcaatcgcg

SEQ ID NO: 720563 - DNA, 75 bp, synthetic construct
  source 1..75: mol_type = other DNA
cgactttcacgaacccggcagcggttacgatgcggtggatatcgatctggcacgcatcagtaaagaaatcatcga

SEQ ID NO: 720564 - DNA, 75 bp, synthetic construct
  source 1..75: mol_type = other DNA
cagggtcatcgaaggggcttacgaagtggtgggcgtttttgaccggattgaggaaaagcgtgatgccatgcagtc

SEQ ID NO: 720565 - DNA, 75 bp, synthetic construct
  source 1..75: mol_type = other DNA
ggagaacatgtccctgaaatcattctgctcaactcccatgacggtacctccagctaccagatgctgccgggttac

SEQ ID NO: 720566 - DNA, 75 bp, synthetic construct
  source 1..75: mol_type = other DNA
cacaggcggcactgacttaccgttatggtgacgaacatcagctgccacaacagcggacatcctgacgcaacgacg

SEQ ID NO: 720567 - DNA, 75 bp, synthetic construct
  source 1..75: mol_type = other DNA
agagaggacaggatttaataagagaagtaaaagagaaattatttaaatataacatattcacttttttcatttgct

SEQ ID NO: 720568 - DNA, 75 bp, synthetic construct
  source 1..75: mol_type = other DNA
tatgggaccgccaataatacgaaaatcaatcctggcggagaacagcatattaaagaatttggtataagtagtaag

SEQ ID NO: 720569 - DNA, 75 bp, synthetic construct
  source 1..75: mol_type = other DNA
atactcagtattaaatgatggttatcaaattgttcaaatgggtggcgcggtaaaccagactacgctcaataatgg

SEQ ID NO: 720570 - DNA, 75 bp, synthetic construct
  source 1..75: mol_type = other DNA
aagcgtgatgccatgcagtcgctggtcctgccgccaccggcacgccaggcgctggcacaggcggcgctgacttac

SEQ ID NO: 720571 - DNA, 75 bp, synthetic construct
  source 1..75: mol_type = other DNA
atgcagtcgctggtcctgccgccaccggcacgccaggcgctggcacaggcggcactgacttaccgttatggtgac

SEQ ID NO: 720572 - DNA, 75 bp, synthetic construct
  source 1..75: mol_type = other DNA
atgctgccgggttacttcaggttcgtctgccagaacgggtgcgtctgtggccagtctctgggggaagtgcgtgtt

SEQ ID NO: 720573 - DNA, 75 bp, synthetic construct
  source 1..75: mol_type = other DNA
ccagacccgcgtgcgcgacccgggccgccggggatacaccagacacatgctgcgtctgcggcgggccggagagat

SEQ ID NO: 720574 - DNA, 75 bp, synthetic construct
  source 1..75: mol_type = other DNA
gccatcagatggcgcagcaactgggcggcccgacggaagtgcgcgttgaggtcaacaaaagttcgcctgtcgtct

SEQ ID NO: 720575 - DNA, 75 bp, synthetic construct
  source 1..75: mol_type = other DNA
attcctccgccgctgcgtgaatatggtgcttcggaggtgcgttcggttacccgtgccttcaaccatatggcggct

SEQ ID NO: 720576 - DNA, 75 bp, synthetic construct
  source 1..75: mol_type = other DNA
tacggcaatggctggattaaagtcagcagtggaacggagccgaatcgcgcctggttccaggtggaagatgacggc

SEQ ID NO: 720577 - DNA, 75 bp, synthetic construct
  source 1..75: mol_type = other DNA
acttcagattcgtctgccagaatggctgcgtctgcggtcagtctccgggggaagtgcgtgttccacaccggggaa

SEQ ID NO: 720578 - DNA, 75 bp, synthetic construct
  source 1..75: mol_type = other DNA
cgagcaccatttctggctggcgttacgcaataaaacgttcaccattgaatggcaaggggaaggcccgacatgtca

SEQ ID NO: 720579 - DNA, 75 bp, synthetic construct
  source 1..75: mol_type = other DNA
attcttttccatcagtgaatcaaaacaaatatctgaatgcgatgttgcggagtgggaagaaattaaacaaatgtc

SEQ ID NO: 720580 - DNA, 75 bp, synthetic construct
  source 1..75: mol_type = other DNA
accgtgctggaaagtctgcagcgggaaggcttccagccattcttcgcctgccagacccgtgtgcgcgacccgggc

SEQ ID NO: 720581 - DNA, 75 bp, synthetic construct
  source 1..75: mol_type = other DNA
ttcagcccttctttgcctgccagacccgcgtgcgcgacccgggccgccggggatacacaaaacacatgctgcgtc

SEQ ID NO: 720582 - DNA, 75 bp, synthetic construct
  source 1..75: mol_type = other DNA
accgccgacattctgacgccacgacgccgggaggattacggtaaggacctgtggagtgcttatcagaccatccag

SEQ ID NO: 720583 - DNA, 75 bp, synthetic construct
  source 1..75: mol_type = other DNA
atgctgaaaggcggaatttcaggtcgcagcgctaaaggaaaacgtatccatacccgtgccattcacagcattgac

SEQ ID NO: 720584 - DNA, 75 bp, synthetic construct
  source 1..75: mol_type = other DNA
ggatgaaaataaaacgccagtgacgcctgaacaaataattactccccgtcgtcgggaggataaacagaacgatct

SEQ ID NO: 720585 - DNA, 75 bp, synthetic construct
  source 1..75: mol_type = other DNA
ccccctgcgcaacaggcgctggcaaaggcggcgctgacttaccgctttggcgaagagcaccagccagtgacggaa

SEQ ID NO: 720586 - DNA, 75 bp, synthetic construct
  source 1..75: mol_type = other DNA
ccgccaccggcacgccaggcgctggcacaggcggcactgacttaccgttatggtgatgaacatcagcccgtcacc

SEQ ID NO: 720587 - DNA, 75 bp, synthetic construct
  source 1..75: mol_type = other DNA
cgccggggatacacaaaacacatgctacgtctgcggcgggccggagagataaacggagaacatgtccctgaaatt

SEQ ID NO: 720588 - DNA, 75 bp, synthetic construct
  source 1..75: mol_type = other DNA
aaatgtggtggagaaagttatggaaggggcttacgaggtggtgggtgtgtttgaccggattgaggataagcgtga

SEQ ID NO: 720589 - DNA, 75 bp, synthetic construct
  source 1..75: mol_type = other DNA
aaatgtggtggagaaagttatcgaaggggcttacgaggtggtgggtgtgtttgaccggatggaggacaagcgtga

SEQ ID NO: 720590 - DNA, 75 bp, synthetic construct
  source 1..75: mol_type = other DNA
caccatgtgccggggattttcggggaagataaacacacgtcccgaagccagaactatacgtacatccccaccatc

SEQ ID NO: 720591 - DNA, 75 bp, synthetic construct
  source 1..75: mol_type = other DNA
agcatcgacaccgatattaagctcaatcgcgcattgtgggtgatggcagaaacgatgctggagagcctgcgctga

SEQ ID NO: 720592 - DNA, 75 bp, synthetic construct
  source 1..75: mol_type = other DNA
ctccgatgtacccaaccgcagaaatgggtaagcaatcgaaaaagaatcattggtatgtaagggaaaaggggagtg

SEQ ID NO: 720593 - DNA, 75 bp, synthetic construct
  source 1..75: mol_type = other DNA
tcacagcatcgacaccgacattaagctcaaccgcgcattgtgggtgatggctgaaacgctgctggagagtatgcg

SEQ ID NO: 720594 - DNA, 75 bp, synthetic construct
  source 1..75: mol_type = other DNA
tcgagagaggaattgcttaagcgaaactcgtttccatcagtgaatcagaacaaatatctgaatgcgatgtggcgt

SEQ ID NO: 720595 - DNA, 75 bp, synthetic construct
  source 1..75: mol_type = other DNA
tggtgatgaacatcagcccgtcaccactgccgacattctgacaccgcgacgccgggaggattacggtcaggacct

SEQ ID NO: 720596 - DNA, 75 bp, synthetic construct
  source 1..75: mol_type = other DNA
aaatgtggtggagaaagttattgaaggggcttacgaggtggtgggtgtgtttgaccggatagaggataagcgtga

SEQ ID NO: 720597 - DNA, 75 bp, synthetic construct
  source 1..75: mol_type = other DNA
aaatgtggtggagaaagttatagaaggggcttacgaggtggtgggtgtgtttgaccggatcgaggaaaagcgtga

SEQ ID NO: 720598 - DNA, 75 bp, synthetic construct
  source 1..75: mol_type = other DNA
agcatcgacaccgacattaagctcaaccgcgcattgtgggtgatggcagaaacgctgctggagagcctgcgctga

SEQ ID NO: 720599 - DNA, 75 bp, synthetic construct
  source 1..75: mol_type = other DNA
gccggaattggcggtagcaataaaagtagcgcccaggatgtattagcaagactgcaacgccaacagggcgagtaa

SEQ ID NO: 720600 - DNA, 75 bp, synthetic construct
  source 1..75: mol_type = other DNA
aagataagcacacatccagaagcgagaactatacctggatccccaccatcacagtactggaaagtctgcagcggg

SEQ ID NO: 720601 - DNA, 75 bp, synthetic construct
  source 1..75: mol_type = other DNA
accgtactagaaagcctgcagcgggaaggttttcagccattcttcgcctgccagacccgcgtgcgcgacccgggc

SEQ ID NO: 720602 - DNA, 75 bp, synthetic construct
  source 1..75: mol_type = other DNA
ttatcaacttcgcccgcgtgatgctggcggcgctggaaggcgggcgtgatgccaccagcggcaaagtgttcctgc

SEQ ID NO: 720603 - DNA, 75 bp, synthetic construct
  source 1..75: mol_type = other DNA
cagtaccgcgatctggtggtgcgcgtagcgggttattccgccttcttcaccgcgctctctccagacgcacaggac

SEQ ID NO: 720604 - DNA, 75 bp, synthetic construct
  source 1..75: mol_type = other DNA
taaggccactgaagctatgcaacgtgcgcagcaggctgtgacgacatctacagttggcgcgtcttccagcgtttc

SEQ ID NO: 720605 - DNA, 75 bp, synthetic construct
  source 1..75: mol_type = other DNA
tggtggacagagtcattgaaggggcttacgaggtagtgggcgtgtttgaccggattgaggaaaagcgtgatgcca

SEQ ID NO: 720606 - DNA, 75 bp, synthetic construct
  source 1..75: mol_type = other DNA
gttcaagctcataccaaatgttgccggggttattcagatcggtttgccagaatgggtgcgccgtgtcggcgtggt

SEQ ID NO: 720607 - DNA, 75 bp, synthetic construct
  source 1..75: mol_type = other DNA
gtgaggtacgtgtgccgcataaaggcaatgtggtggagaaagtcattgaaggggcttacgaagtgctggggatat

SEQ ID NO: 720608 - DNA, 75 bp, synthetic construct
  source 1..75: mol_type = other DNA
gggaaggcttgcagccattcttcgcctgccagacctgtgtgcgcgacccgggccgccggggatacacaaaacaca

SEQ ID NO: 720609 - DNA, 75 bp, synthetic construct
  source 1..75: mol_type = other DNA
tacccgtgccattcacagcatcgacaccgacattaagctcaaccgggcgttgtgggtgatggcagaaacactgct

SEQ ID NO: 720610 - DNA, 75 bp, synthetic construct
  source 1..75: mol_type = other DNA
gttcgtctgccagaacggctgcgtctgtggtctgtctctgggggaagtgcgtgttccacaccggggagacgtggt

SEQ ID NO: 720611 - DNA, 75 bp, synthetic construct
  source 1..75: mol_type = other DNA
caacctgacggtgctggaagatttgcacggcgagcagttcctgaaagcgattgatatcgtgctggtggcagtcag

SEQ ID NO: 720612 - DNA, 75 bp, synthetic construct
  source 1..75: mol_type = other DNA
gttgaactcaaccagacactggatcgcgaacacgccatcgaattgctgcatagctgctggctgaaactgctggaa

SEQ ID NO: 720613 - DNA, 75 bp, synthetic construct
  source 1..75: mol_type = other DNA
tcgcggggtattccgccttcttcaccgcgctctctccagaggcacaggacgatatcatcgcccgtactgaacata

SEQ ID NO: 720614 - DNA, 75 bp, synthetic construct
  source 1..75: mol_type = other DNA
gtgaagaaactggtgtttgaacaaggtgcgattggtcagcaacagcttgctgccgcactggcagatgacttcgac

SEQ ID NO: 720615 - DNA, 75 bp, synthetic construct
  source 1..75: mol_type = other DNA
gattaccggtaagcaggtgccggaaattatcctgctcaactcccatgatggcaccagctcgtaccagatgttacc

SEQ ID NO: 720616 - DNA, 75 bp, synthetic construct
  source 1..75: mol_type = other DNA
aaacggacaacatgtccctgaaatcatcctgctgaactcccatgacggtacctccagcaaccagatgctgccggg

SEQ ID NO: 720617 - DNA, 75 bp, synthetic construct
  source 1..75: mol_type = other DNA
gactgctggaccagcactatggcctcacactgaatgacacaccttttgccgatgaacgtgtgattgagcagcata

SEQ ID NO: 720618 - DNA, 75 bp, synthetic construct
  source 1..75: mol_type = other DNA
tggcggcaactattacgcgggtacgtcgtctatctccgctaacgtaccgtttggcgcgcaaactatggcaacgcc

SEQ ID NO: 720619 - DNA, 75 bp, synthetic construct
  source 1..75: mol_type = other DNA
atcgctgctatggcatgtttaccgatgagcaaaaaggcctgctggcgaccggtatcattaaagcggaaggtaata

SEQ ID NO: 720620 - DNA, 75 bp, synthetic construct
  source 1..75: mol_type = other DNA
ggcccaacggcggtcattggctcggtggggaaactgcctaccggatcaattctcggcggcgtgttgctcaaccag

SEQ ID NO: 720621 - DNA, 75 bp, synthetic construct
  source 1..75: mol_type = other DNA
atggacgcgtgggatacgcaaatccgttactacacccgcaaatcaatcgaaatcgaatatgtcgtcgacaccatg

SEQ ID NO: 720622 - DNA, 75 bp, synthetic construct
  source 1..75: mol_type = other DNA
atgaccacactgaaactggacacgctcagcgaccgcattaaagcgcacaaaaatgcgctggtgcatattgtgaaa

SEQ ID NO: 720623 - DNA, 75 bp, synthetic construct
  source 1..75: mol_type = other DNA
cgtcgcgcgctggcactggcgcatcacctggcgaatcgcactatctggatcaagcacgatgagttgatcatcggc

SEQ ID NO: 720624 - DNA, 75 bp, synthetic construct
  source 1..75: mol_type = other DNA
accgtgctggaaagcctgcagcgggaaggcttccagccattcttcgcctgccagacccgcgtgcgcgacccgggc

SEQ ID NO: 720625 - DNA, 75 bp, synthetic construct
  source 1..75: mol_type = other DNA
gagagttctgcgtctggtgtgcgcattgacccgacccagacgcagaatctgggggtgaaaacggcgaccgtcacg

SEQ ID NO: 720626 - DNA, 75 bp, synthetic construct
  source 1..75: mol_type = other DNA
gcagcatgatcgcgggcggcattatttctgcggcaggttttacctggtttgcaaaggcggaaccgccagtggaaa

SEQ ID NO: 720627 - DNA, 75 bp, synthetic construct
  source 1..75: mol_type = other DNA
tcaccgtactggaaagcctgcagcggaaggctttcagccattcttcgcctgccagacctgtgtgcgcgacccggg

SEQ ID NO: 720628 - DNA, 75 bp, synthetic construct
  source 1..75: mol_type = other DNA
ggaatgaatatcgccaaagataacgtggtcgcgaaagaggaaggtaggttgcttatctgtgtctgtcattgtcta

SEQ ID NO: 720629 - DNA, 75 bp, synthetic construct
  source 1..75: mol_type = other DNA
aagatgcctcgcagtttacactcaccgttccggcgcgacccgataaaacgctcaccatccgcaaatggacgctac

SEQ ID NO: 720630 - DNA, 75 bp, synthetic construct
  source 1..75: mol_type = other DNA
tggtcgcgaaaattcagggtatggacccggtgtggatcactgccgcgatcccggagtccatcgcctggaagtcga

SEQ ID NO: 720631 - DNA, 75 bp, synthetic construct
  source 1..75: mol_type = other DNA
ttcacagcatcgacaccgatattaagctcaaccgcgcattgtgggtaatggcagaaacgctgctggagagcctgc

SEQ ID NO: 720632 - DNA, 75 bp, synthetic construct
  source 1..75: mol_type = other DNA
gcttatcagaccatccaggagaatatgctgaaaggcgggatttccggtcgcagtgcaaaaggaaaacgtatccat

SEQ ID NO: 720633 - DNA, 75 bp, synthetic construct
  source 1..75: mol_type = other DNA
cacggtatcgcagttgctgaccccacgtcggcgggaggactacagcgatgacctgtggaccgtataccagcgcgt

SEQ ID NO: 720634 - DNA, 75 bp, synthetic construct
  source 1..75: mol_type = other DNA
ccatccaggagaatatgctgaaaggcggaatttccggccgcagtgcaaaaggaaaacgtatccacacccgtgcca

SEQ ID NO: 720635 - DNA, 75 bp, synthetic construct
  source 1..75: mol_type = other DNA
tgtggtggagaaagttatcgaaggggcttacgaagtggtgggggtttttgaccggattgaggaaaagcgtgatgc

SEQ ID NO: 720636 - DNA, 75 bp, synthetic construct
  source 1..75: mol_type = other DNA
aacgggtgcgtctgtggccagtctctgggggaagtgcgtgttccacaccggggaaatgtagtggagaaagttatc

SEQ ID NO: 720637 - DNA, 75 bp, synthetic construct
  source 1..75: mol_type = other DNA
accggggaaatgtggtggacagagtcattgaaggggcttacgaagtggtgggcgtgtttgaccggatagaggaga

SEQ ID NO: 720638 - DNA, 75 bp, synthetic construct
  source 1..75: mol_type = other DNA
ggctgaaactccctggcaaatattgattgaagaagctcgcctgatcgcgcctggcgcagatggagtgaaaatgca

SEQ ID NO: 720639 - DNA, 75 bp, synthetic construct
  source 1..75: mol_type = other DNA
cgcggcgctggaagggttaaccgcgcaattacagcgcaatctacagatgctggaaaaaatcgggcactttaaagc

SEQ ID NO: 720640 - DNA, 75 bp, synthetic construct
  source 1..75: mol_type = other DNA
atttaacagcccggaagaagcccgcgcacagattcattatcagtaccgttatttctacccgcaaactgaacctga

SEQ ID NO: 720641 - DNA, 75 bp, synthetic construct
  source 1..75: mol_type = other DNA
gaaaacgtatccatacccgggccattcacagcatcgacaccgatattaaactcaaccgcgcattgtgggtgatgg

SEQ ID NO: 720642 - DNA, 75 bp, synthetic construct
  source 1..75: mol_type = other DNA
gcggcgggccggagagataaacggagaacatgtccctgaaattattctgctcaactctcatgacggtacctccag

SEQ ID NO: 720643 - DNA, 75 bp, synthetic construct
  source 1..75: mol_type = other DNA
tatccatacccgtgccattcacagcatcgacaccgacattaagctcaatcgcgcattgtgggtgatggctgaaac

SEQ ID NO: 720644 - DNA, 75 bp, synthetic construct
  source 1..75: mol_type = other DNA
aaccggacaacatgtccctgaaatcattctgctcaactcccatgacggtacctccagctaccagatgctgccggg

SEQ ID NO: 720645 - DNA, 75 bp, synthetic construct
  source 1..75: mol_type = other DNA
aagataaacacacgtcccgaagccagaactatacgtacatccccaccatcaccgtgctggaaagtctgcagcggg

SEQ ID NO: 720646 - DNA, 75 bp, synthetic construct
  source 1..75: mol_type = other DNA
tacccgggccattcacaacatcgacaccgacattaagctcaatcgcgcattgtgggtgatggcggaaacgctgct

SEQ ID NO: 720647 - DNA, 75 bp, synthetic construct
  source 1..75: mol_type = other DNA
tgttcggttggtatggcgtaggggaatttaacagcccggaagaagcccgcgcgcagattcattatcagtaccgtt

SEQ ID NO: 720648 - DNA, 75 bp, synthetic construct
  source 1..75: mol_type = other DNA
tgctggatatccagcaacgcgatttcagtccgcaaattttacaagccaccggtattccacgccgactcttccctc

SEQ ID NO: 720649 - DNA, 75 bp, synthetic construct
  source 1..75: mol_type = other DNA
atttctggcgtcggagcctttagtttcaatacgttatataagttggtgtggttgaaagaaaatcatccacaactg

SEQ ID NO: 720650 - DNA, 75 bp, synthetic construct
  source 1..75: mol_type = other DNA
gtttctggacactacaaaaagtgatcgacaacatccaccgcgctgctgatcggcagaaaatcttgctggtttgta

SEQ ID NO: 720651 - DNA, 75 bp, synthetic construct
  source 1..75: mol_type = other DNA
tgcaaactctgccgaccagtggtgatccgttcggtgacgggattggcaaggtagccgggttcagcctgcacgccg

SEQ ID NO: 720652 - DNA, 75 bp, synthetic construct
  source 1..75: mol_type = other DNA
tgggtcgctatctggaacggcaaggcctgctggaacgggatgtcgaaaacagctatctggcctcggatgcggtgg

SEQ ID NO: 720653 - DNA, 75 bp, synthetic construct
  source 1..75: mol_type = other DNA
ggtccagcctgcacgccggcgtggcggccagggccgatgaacgcaagaagctcgaacggctgtgccggtacatca

SEQ ID NO: 720654 - DNA, 75 bp, synthetic construct
  source 1..75: mol_type = other DNA
ggcgaaaggtgttcactttgcaaactctgccgaccagtggtgatccgttcggtgacgggattggcaaggtagccg

SEQ ID NO: 720655 - DNA, 75 bp, synthetic construct
  source 1..75: mol_type = other DNA
gacggtgtgtatgtcgagcaatcccacggctcagcgcgtttccgctgggtcaaggcgccgaccaccccagagctc

SEQ ID NO: 720656 - DNA, 75 bp, synthetic construct
  source 1..75: mol_type = other DNA
cacctgccggagccaaaaccccgtctgccctcttccgaaggcgactggtcgcatatattccaggatgtgacgtgg

SEQ ID NO: 720657 - DNA, 75 bp, synthetic construct
  source 1..75: mol_type = other DNA
tgccgaaggagaaaagatacttgctgcggcgataccgattggtgacagcgtggatgaggaatttttggggcgttt

SEQ ID NO: 720658 - DNA, 75 bp, synthetic construct
  source 1..75: mol_type = other DNA
acgcggtgatgcgcgccattgctgataaacctggtatcgaacaggtggcactgatagaagcagcagtcagcacca

SEQ ID NO: 720659 - DNA, 75 bp, synthetic construct
  source 1..75: mol_type = other DNA
gccgagcaggaggcgctgtctcgcgccgatctgatcgtctggcagcacccgatgcagtggtacagcattccaccg

SEQ ID NO: 720660 - DNA, 75 bp, synthetic construct
  source 1..75: mol_type = other DNA
gtacagcattcctccgctcctcaaactttggatcgataaagttttctcccacggctgggcttacggtcatggcgg

SEQ ID NO: 720661 - DNA, 75 bp, synthetic construct
  source 1..75: mol_type = other DNA
atgattcttataatttatgcgcatccgtatccgcatcattcccatgcgaataaacggatgcttgaacaggcaagg

SEQ ID NO: 720662 - DNA, 75 bp, synthetic construct
  source 1..75: mol_type = other DNA
gcgactggatgcgggatacgggcgatatccctcaaagctgttttgccgtacagggatatggtgagagtcgtcccg

SEQ ID NO: 720663 - DNA, 75 bp, synthetic construct
  source 1..75: mol_type = other DNA
gcagaagctctgaccagtatttcccagaccacgctgcaaaacttaagcaatctggaaaaaggcgaatcctgcccg

SEQ ID NO: 720664 - DNA, 75 bp, synthetic construct
  source 1..75: mol_type = other DNA
gtatggcaaaacggcaggcgttatcggtaccggtaaaatcggtgtggcgatgctgcgcattctgaaaggttttgg

SEQ ID NO: 720665 - DNA, 75 bp, synthetic construct
  source 1..75: mol_type = other DNA
aagcggagtcaagtggacagacggtttcaacatttatacgaagctcttcactggataaggtggttaactgccgta

SEQ ID NO: 720666 - DNA, 75 bp, synthetic construct
  source 1..75: mol_type = other DNA
tggaacacattgatcgcattgaaaataacgttactgaatatgaccggatcctgtcccgcatggcaaaagcggatc

SEQ ID NO: 720667 - DNA, 75 bp, synthetic construct
  source 1..75: mol_type = other DNA
attcattgatccgcaaaggattcattaaacgcgctgacgaatacggcgacatttatgacattgcattgccggagg

SEQ ID NO: 720668 - DNA, 75 bp, synthetic construct
  source 1..75: mol_type = other DNA
tggaaggtctgactggctttaccatgtatggcaaaacagcgggcgttatcggcaccggtaagatcggtgtggcga

SEQ ID NO: 720669 - DNA, 75 bp, synthetic construct
  source 1..75: mol_type = other DNA
tgatagcctgttgattagcaaagttcatgctgaaggccttcgacttacatggctggttaagaccacgccaccagc

SEQ ID NO: 720670 - DNA, 75 bp, synthetic construct
  source 1..75: mol_type = other DNA
ggagttagagacgggcgcatttctgcgtcactgctcaacctcgcgagtgaattgtttactgcagtaactgccggg

SEQ ID NO: 720671 - DNA, 75 bp, synthetic construct
  source 1..75: mol_type = other DNA
ccttcggcaatagtaggtcagactgatattattgatgttatattacgtctcactttctgtcatgcagacaagcac

SEQ ID NO: 720672 - DNA, 75 bp, synthetic construct
  source 1..75: mol_type = other DNA
cagtttgttggggcgaagttattccggtggtggtgctggtggcggcgcgggtggcggaggcggtggtggctggta

SEQ ID NO: 720673 - DNA, 75 bp, synthetic construct
  source 1..75: mol_type = other DNA
cgttgcttgcggggcggttgaaactcgagaggaacagaagcaaatctttccattcttttcgccactcagtttcga

SEQ ID NO: 720674 - DNA, 75 bp, synthetic construct
  source 1..75: mol_type = other DNA
ttctgaaatcgccatgcgacaactttttccctcccgatgacaaaggtgagcgagagcaggatcacactgacatat

SEQ ID NO: 720675 - DNA, 75 bp, synthetic construct
  source 1..75: mol_type = other DNA
atcagttacgacagctttttcagcagcacacggctcgctggcagcacgagttacctgacctgaccaaaccacagt

SEQ ID NO: 720676 - DNA, 75 bp, synthetic construct
  source 1..75: mol_type = other DNA
acatgtgctggctgtgcgttattgcctatgcacttcgctggacgaagccgccaacaacaccacctgggggcggcg

SEQ ID NO: 720677 - DNA, 75 bp, synthetic construct
  source 1..75: mol_type = other DNA
atgaccgatgagatcctgacgccgcctgcggcgaataccctgcccttccagccatcagccgggggagtaaaaccg

SEQ ID NO: 720678 - DNA, 75 bp, synthetic construct
  source 1..75: mol_type = other DNA
atgaccgacgatattctgacgcaacctgcggtgaataccctgcaattacagccttcaatgaggggaacaaggtcg

SEQ ID NO: 720679 - DNA, 75 bp, synthetic construct
  source 1..75: mol_type = other DNA
accgccactgcaagggcatgtgaggcccatccgctgctcctcgcgctggaagacaccaccaccattaacttcagt

SEQ ID NO: 720680 - DNA, 75 bp, synthetic construct
  source 1..75: mol_type = other DNA
gggccagatttgaagctccgtttggctgagatcactgctgctgtgaatcctctcctggcggcggccagccctctg

SEQ ID NO: 720681 - DNA, 75 bp, synthetic construct
  source 1..75: mol_type = other DNA
cttcatttcatgcgtggagttataccaacgacggaaatgaaaaaatattgtagtgaaatctgtgccgaaaaagac

SEQ ID NO: 720682 - DNA, 75 bp, synthetic construct
  source 1..75: mol_type = other DNA
atatagcccccaaggtgtagttgttatacatggaggtatattgaactctgttgaaatattctctgtaatggttca

SEQ ID NO: 720683 - DNA, 75 bp, synthetic construct
  source 1..75: mol_type = other DNA
tctgcataccgatccaccgaaatggctggataacgatcatcccccttttgagaaacatatgtacggtgtttttat

SEQ ID NO: 720684 - DNA, 75 bp, synthetic construct
  source 1..75: mol_type = other DNA
acagacaacctgctcatcgcttgtaaggcatgtagcatgattaaaaaagatcagtttcctctcgatgaaaatggc

SEQ ID NO: 720685 - DNA, 75 bp, synthetic construct
  source 1..75: mol_type = other DNA
aagataatgcaaaaccaaacttaggagagcgagacgtaagaatgttcgaaaatattagttctgatgatacagata

SEQ ID NO: 720686 - DNA, 75 bp, synthetic construct
  source 1..75: mol_type = other DNA
cataccgacttacaaaatgttaccgccattcacagaaacacaaggtaattgttcttctggcgcagccacgttttt

SEQ ID NO: 720687 - DNA, 75 bp, synthetic construct
  source 1..75: mol_type = other DNA
gacccgggataacctcgagcgcatgatggttatcaaggcgtttatcgcggtgcgggtgctgggcctgcggcaggg

SEQ ID NO: 720688 - DNA, 75 bp, synthetic construct
  source 1..75: mol_type = other DNA
actaccgacagttaagcctccagttgccaaaagggagcgatccggtgtatcagaaagaggatgcgtcaaaaaaat

SEQ ID NO: 720689 - DNA, 75 bp, synthetic construct
  source 1..75: mol_type = other DNA
actaccggcagttaagcctccagctgccaaaagggaacgatccggtatatcagaaagatgatatagccaaaaaat

SEQ ID NO: 720690 - DNA, 75 bp, synthetic construct
  source 1..75: mol_type = other DNA
ggcatcattaaagcggaaggcaatatgacctccggcgatgcgcacctggcggtcaatttcccgctactgctggaa

SEQ ID NO: 720691 - DNA, 75 bp, synthetic construct
  source 1..75: mol_type = other DNA
atgttgttcttaaatgataaagagcaaatcatcaaatataaagatgaaatgctgaaaattaatccacaaattacc

SEQ ID NO: 720692 - DNA, 75 bp, synthetic construct
  source 1..75: mol_type = other DNA
atgttgtttttaaacgataaagagcaaatcataaaatataaaaatgaaatgctgcgaattactccacaaattacc

SEQ ID NO: 720693 - DNA, 75 bp, synthetic construct
  source 1..75: mol_type = other DNA
gtggtttaccgtcctgacatcaaccaggggaactatctgaccgctaacgacgtgtccaaaatacgcgttggcatg

SEQ ID NO: 720694 - DNA, 75 bp, synthetic construct
  source 1..75: mol_type = other DNA
atgtatcagacactgagtaaagaaaatgttgatacacgttatatgtctcttgatcctcaacatcgcacctcaatt

SEQ ID NO: 720695 - DNA, 75 bp, synthetic construct
  source 1..75: mol_type = other DNA
cgcatggccgaacggctgggggagatacagaaacgggtaatcactgtctgtgaccgggaggcagatatctggcat

SEQ ID NO: 720696 - DNA, 75 bp, synthetic construct
  source 1..75: mol_type = other DNA
agacaccaccaccattaacttcagtcacagtacggcatttgatgacctggggaataccaccactaacccaaagac

SEQ ID NO: 720697 - DNA, 75 bp, synthetic construct
  source 1..75: mol_type = other DNA
agaagagaattcaactctggttgataatccatttggaggggtctccagagttcttaattctttaattagtgatat

SEQ ID NO: 720698 - DNA, 75 bp, synthetic construct
  source 1..75: mol_type = other DNA
gatttccgggatggcgtgacgttcagaaaaaactacagcgtcagcttgaagctaagcaggctgagtactccgcag

SEQ ID NO: 720699 - DNA, 75 bp, synthetic construct
  source 1..75: mol_type = other DNA
aaagtcaggaagaacgggataaggttaacgttgatctggctgccagcggcgttgcttacaaagaacggctgaata

SEQ ID NO: 720700 - DNA, 75 bp, synthetic construct
  source 1..75: mol_type = other DNA
taacgtggtgatggagtccgacgccaatgccaacatcaagcccaacaaaaagaaatcctccaacaagatagatcc

SEQ ID NO: 720701 - DNA, 75 bp, synthetic construct
  source 1..75: mol_type = other DNA
gccgggaggattacggtaaggacctgtggagtactaaacaaaataaccatacaaaccaaacacacaaacacttaa

SEQ ID NO: 720702 - DNA, 75 bp, synthetic construct
  source 1..75: mol_type = other DNA
attattctgctcaactctcatgacggtacctccagctaccagatgctgccggggtacttcaggttcgtctgccag

SEQ ID NO: 720703 - DNA, 75 bp, synthetic construct
  source 1..75: mol_type = other DNA
acgccattaaatcgggtgaaattccggcctgtaagcgcgtgaaacaggccgttgagaggtacttttcagacctga

SEQ ID NO: 720704 - DNA, 75 bp, synthetic construct
  source 1..75: mol_type = other DNA
ggcaccttccaggctgagcatgaggattttgctttcgatatgagcgacagccacaaacaacggctggcgacattt

SEQ ID NO: 720705 - DNA, 75 bp, synthetic construct
  source 1..75: mol_type = other DNA
ggcaccttccaggctgagcacgaggattttgcatttgatatgagtgacagtcacaaacaacggctagctgatttc

SEQ ID NO: 720706 - DNA, 75 bp, synthetic construct
  source 1..75: mol_type = other DNA
tataaaatgaacgcctctatttccggtgcggaagtcggttgccagggcgaagtgggtgttgcctgttcaatggct

SEQ ID NO: 720707 - DNA, 75 bp, synthetic construct
  source 1..75: mol_type = other DNA
gccgcaggtggtcgcgtggtgacagcgcctaccaacggtgcgtgcggcattgttccggcagtgttggcctattac

SEQ ID NO: 720708 - DNA, 75 bp, synthetic construct
  source 1..75: mol_type = other DNA
gaaacgatgtacgaaaccggtaaagacatgaacgccaagtaccgcgaaacgtctcgtggtggtctggcaattaaa

SEQ ID NO: 720709 - DNA, 75 bp, synthetic construct
  source 1..75: mol_type = other DNA
tgaaaggcgggatttccggtcgcagtgcaaaaggaaaacgtatccatacccgtgccattcacagcatcgacaccg

SEQ ID NO: 720710 - DNA, 75 bp, synthetic construct
  source 1..75: mol_type = other DNA
tcgagagaggaattgcttaagagaaattcttttccatcagtgaatcaaaacaaatatctgaatgcgatgttacgg

SEQ ID NO: 720711 - DNA, 75 bp, synthetic construct
  source 1..75: mol_type = other DNA
aagagaaattcttttccatcagtgaatcaaaacaaatatctgaatgcgatgtggcgtaaaggaggcaagcagtga

SEQ ID NO: 720712 - DNA, 75 bp, synthetic construct
  source 1..75: mol_type = other DNA
tgacgatattctgcgcgacgctgaaatcttcaatatcaggctggtgggtttcgatacgtggaacgccacgcacct

SEQ ID NO: 720713 - DNA, 75 bp, synthetic construct
  source 1..75: mol_type = other DNA
tgaggttgttgagcggtttattgtcttttccagggtgtgcccgcacgtaaaagggccgatgcgtggaagacccat

SEQ ID NO: 720714 - DNA, 75 bp, synthetic construct
  source 1..75: mol_type = other DNA
tttttgaccggattgaagagaaacgtgatgccatgcagtcgctggtcctgccaccaccggcacgccaggcgctgg

SEQ ID NO: 720715 - DNA, 75 bp, synthetic construct
  source 1..75: mol_type = other DNA
atgtaaatcagaaccgtcgggagcgcccactgacacgcgaagaactgatgtaccacgtcccgagtatttttggag

SEQ ID NO: 720716 - DNA, 75 bp, synthetic construct
  source 1..75: mol_type = other DNA
tcgagagaagaattgcttaagagaaattcttttccatcagtgaatcaaaacaaatatctgaatgcgatgtggcgt

SEQ ID NO: 720717 - DNA, 75 bp, synthetic construct
  source 1..75: mol_type = other DNA
tgaaggggcttacgaggtggtggaggtttttgaccggattgaagagaaacgtgatgccatgcagtcgctggtcct

SEQ ID NO: 720718 - DNA, 75 bp, synthetic construct
  source 1..75: mol_type = other DNA
caccgcagcggtgagccgtgaccaggcgcggatcgtctttgatgatgcgcgtcagatgtgccttttatcccgacc

SEQ ID NO: 720719 - DNA, 75 bp, synthetic construct
  source 1..75: mol_type = other DNA
tggtgacgaacatcagccagtcaccaccgctgacattctgaccccccgacgctgggaggattacggtgaggacct

SEQ ID NO: 720720 - DNA, 75 bp, synthetic construct
  source 1..75: mol_type = other DNA
ctgccagacccgtgtgcgcgacccgggccgccggggatacacaaaacatatgctgcgtctgcggcgggccggaga

SEQ ID NO: 720721 - DNA, 75 bp, synthetic construct
  source 1..75: mol_type = other DNA
caaacataccttcgtttcagtccggcggcgaaatcgttcgaagtttttgttaaccggaaggtgattgtgcatcgt

SEQ ID NO: 720722 - DNA, 75 bp, synthetic construct
  source 1..75: mol_type = other DNA
tggtgacgaacatcagcccgtcaccaccgctgacattctgacccctcgacgcggggaggattacggtgaggacct

SEQ ID NO: 720723 - DNA, 75 bp, synthetic construct
  source 1..75: mol_type = other DNA
tggtgacgaacatcagcccgtcaccaccgctgacattctgaccccacgacgctgggaggattacggtgaggacct

SEQ ID NO: 720724 - DNA, 75 bp, synthetic construct
  source 1..75: mol_type = other DNA
tggtgacgaacatcagcctgtcaccaccgctgacattctgaccccgcgacgccgggaggattacggtgaggacct

SEQ ID NO: 720725 - DNA, 75 bp, synthetic construct
  source 1..75: mol_type = other DNA
ccataccgtagggcctatgaaggcaggtaaacagttcgtcgatgatctggtcgaaaaaggcttactggatagcgt

SEQ ID NO: 720726 - DNA, 75 bp, synthetic construct
  source 1..75: mol_type = other DNA
cagacggcatttttgcgtaaacctgaccatcaactggcggcgttacgcgaaaaaatcgctgttacgccgcaattg

SEQ ID NO: 720727 - DNA, 75 bp, synthetic construct
  source 1..75: mol_type = other DNA
cgttacaggaaaaaatcgccgttacgccgcaactgacattcaatggcgcaaagatccttgaactggatggtcggc

SEQ ID NO: 720728 - DNA, 75 bp, synthetic construct
  source 1..75: mol_type = other DNA
ctacctgctttcctgctggcgtgcgtacaagtttcgtaaaatgttaagcaaaagccagcaaggctacttgctaat

SEQ ID NO: 720729 - DNA, 75 bp, synthetic construct
  source 1..75: mol_type = other DNA
gccgccaaaaacgcgaggctgtgctgggcatcgttgcattacggtgatgatttcaggctgtactcagccagctaa

SEQ ID NO: 720730 - DNA, 75 bp, synthetic construct
  source 1..75: mol_type = other DNA
ttatttgctttcttgctggcgggcgtacaagtttcgcaaaatgttgcgcaaaagccagcaaggctatctgctcat

SEQ ID NO: 720731 - DNA, 75 bp, synthetic construct
  source 1..75: mol_type = other DNA
gaactggatggtcggcaaccagccgatgaaattctgcaagcgtcactacgcgcaattcacgccgcgctttcctga

SEQ ID NO: 720732 - DNA, 75 bp, synthetic construct
  source 1..75: mol_type = other DNA
tgtgcactggtcgccagtatcggtaatgcacatgattttaaaaatggacgtcaactggcagcctggctggggctg

SEQ ID NO: 720733 - DNA, 75 bp, synthetic construct
  source 1..75: mol_type = other DNA
actggcgtgccgttgtggccatagcggccaaaaatgcaagactgtgctgggcatcgctacattatggtgatgatt

SEQ ID NO: 720734 - DNA, 75 bp, synthetic construct
  source 1..75: mol_type = other DNA
ctgtcccgcatggcaaaagcggatcaccgcagccagcggctgatggaactgaaagggattggccccacaacagcc

SEQ ID NO: 720735 - DNA, 75 bp, synthetic construct
  source 1..75: mol_type = other DNA
aactggatgggcgaccccccgccgatgaaattctgaagcgtcactacgcgcaattcacgccgcgctttcctgatc

SEQ ID NO: 720736 - DNA, 75 bp, synthetic construct
  source 1..75: mol_type = other DNA
cgctgtcgatcaaacgtgcagtggcgaatatggtggtgaacgctgctcgttacggcaacggctggattaaagtca

SEQ ID NO: 720737 - DNA, 75 bp, synthetic construct
  source 1..75: mol_type = other DNA
tgctgaacttcgcgattttgccgagccttcagcagtttaataaagtcctcgcgtacgaagtgcgtatgttgatga

SEQ ID NO: 720738 - DNA, 75 bp, synthetic construct
  source 1..75: mol_type = other DNA
tgcaggtttaccgccctgtgttatcgggatggaagcgtgctccggggcccattactgggcaagactgtttcggca

SEQ ID NO: 720739 - DNA, 75 bp, synthetic construct
  source 1..75: mol_type = other DNA
cggacatggctagcaggtgatttagcggggcaggattgggtgacgctgggtacgtccgcctggttttctctgggg

SEQ ID NO: 720740 - DNA, 75 bp, synthetic construct
  source 1..75: mol_type = other DNA
ccggtcgcagtgcaaaaggaaaacgtatccatacccgggccattcacagcattgataccgacattaagctcaacc

SEQ ID NO: 720741 - DNA, 75 bp, synthetic construct
  source 1..75: mol_type = other DNA
cattgaacgtaacgccattgcgtcagtcaaggcgattaacgccgcgcggatggccctgcgtcgcaccagtgcacc

SEQ ID NO: 720742 - DNA, 75 bp, synthetic construct
  source 1..75: mol_type = other DNA
gcgcgtctcgctggataaggtcatcgaaacgatgtacgaaaccggtaaggacatgaacgccaaataccgcgaaac

SEQ ID NO: 720743 - DNA, 75 bp, synthetic construct
  source 1..75: mol_type = other DNA
cattcactttgatcgcgatcgcgttgctttgcggtgctgccgtatcgatagctggccccattggctttgtcggct

SEQ ID NO: 720744 - DNA, 75 bp, synthetic construct
  source 1..75: mol_type = other DNA
ccgccgtgtcgagtgggcgcaagaggttatgttggcagatgcagagctaccgttcgaaccggaattcattgatga

SEQ ID NO: 720745 - DNA, 75 bp, synthetic construct
  source 1..75: mol_type = other DNA
atgagcacttcagcacaaaaccaatcaattgaaaatgtatctatccctgacgtcctgaatgccggtatcccagcc

SEQ ID NO: 720746 - DNA, 75 bp, synthetic construct
  source 1..75: mol_type = other DNA
acaccatcacaatacagcagcggcggaaagtcgaagctcggcaggataacaaaagccggggattcgtatttgcga

SEQ ID NO: 720747 - DNA, 75 bp, synthetic construct
  source 1..75: mol_type = other DNA
tgggggaagtgcgtgttccacaccggggaaatgtggtggacagagtcattgaaggggcttacgaggtggtgggcg

SEQ ID NO: 720748 - DNA, 75 bp, synthetic construct
  source 1..75: mol_type = other DNA
tacgaacaaaagaagggggtcgcagacgaaatctatcaacgacgctatttccattgttcgctcatatctccgtta

SEQ ID NO: 720749 - DNA, 75 bp, synthetic construct
  source 1..75: mol_type = other DNA
gggaaatgtagtggagaaagttatcgaaggggcttacgaggtggtgggcgtgtttgaccggatagaggagaagcg

SEQ ID NO: 720750 - DNA, 75 bp, synthetic construct
  source 1..75: mol_type = other DNA
cgcacggtatacctggataccaaccattaccgttcttgaaaatctgcagtgtgaaggctttcagcctttctttgc

SEQ ID NO: 720751 - DNA, 75 bp, synthetic construct
  source 1..75: mol_type = other DNA
tggtacggcgctttccggtggtcgcggctccctgttcggtacgctgcttggcgttctggtcattacgctaatcgg

SEQ ID NO: 720752 - DNA, 75 bp, synthetic construct
  source 1..75: mol_type = other DNA
atttttaccctttcgggattattagcggcggtgaccggcattttgttggcggcgcgcctcggttccggtaacgca

SEQ ID NO: 720753 - DNA, 75 bp, synthetic construct
  source 1..75: mol_type = other DNA
taacgaccggattcaatatgactctgcttccatacattcagccggattcacaaaacctgcaattgctgttctcaa

SEQ ID NO: 720754 - DNA, 75 bp, synthetic construct
  source 1..75: mol_type = other DNA
agtgcatatgtcttcttgccggatgcggcgtaaacgccgccgagaatgttattaccagtggtgtatccatcgtgg

SEQ ID NO: 720755 - DNA, 75 bp, synthetic construct
  source 1..75: mol_type = other DNA
ttcagatgcgcgataacaacgctatctttgggaaaaatatagttaacactgatagcgcccaggcattgctacgtc

SEQ ID NO: 720756 - DNA, 75 bp, synthetic construct
  source 1..75: mol_type = other DNA
tgccaccgctgctggcgaaggtgagttattcattggctggagtggcacgagcggtgaccatgcgcccgtacatat

SEQ ID NO: 720757 - DNA, 75 bp, synthetic construct
  source 1..75: mol_type = other DNA
tggttcgacgaatgcgttaggtggtagctctattgttcttggtgataatgacaccggatttaaacagaatggaga

SEQ ID NO: 720758 - DNA, 75 bp, synthetic construct
  source 1..75: mol_type = other DNA
gaaaacagggtttcatccactcaccgccgactgccgctacaacctgacttttcgtcaggcgggtaaaaaagaata

SEQ ID NO: 720759 - DNA, 75 bp, synthetic construct
  source 1..75: mol_type = other DNA
aaaagacctgatgaatcttaaatgggatgctttgtctgttcttgttaaagcccttttcagcagtgaagtaaaaat

SEQ ID NO: 720760 - DNA, 75 bp, synthetic construct
  source 1..75: mol_type = other DNA
acggctaacacatggagtgcgcgccagattttcaacggagggatcaccggggcactgacagggaacgccgacacc

SEQ ID NO: 720761 - DNA, 75 bp, synthetic construct
  source 1..75: mol_type = other DNA
acatgtggtttgaaacaggcgacaacggcaatgaatatttcaaatggagaagcaaacaaagcaccacaacaaaag

SEQ ID NO: 720762 - DNA, 75 bp, synthetic construct
  source 1..75: mol_type = other DNA
tcaacatggcgggattcataaaaagccagagcctgacactgctcgaaaagctggacgcactcgatgccgacgaac

SEQ ID NO: 720763 - DNA, 75 bp, synthetic construct
  source 1..75: mol_type = other DNA
cagtgtggcactcacagagctggcgcaacaagccgggttacccaattccacgacccaccgcctgctaaccacgat

SEQ ID NO: 720764 - DNA, 75 bp, synthetic construct
  source 1..75: mol_type = other DNA
ggcggtaaattaccgatgcacgcttccggtgcgggtaaagcctttttagcccaactgagcgaagaacaggtgacg

SEQ ID NO: 720765 - DNA, 75 bp, synthetic construct
  source 1..75: mol_type = other DNA
gcttgctggctggcttatttcagatcataagtttcagtgcgaaggcagagtctttccctctgacggtttatattg

SEQ ID NO: 720766 - DNA, 75 bp, synthetic construct
  source 1..75: mol_type = other DNA
gggcttgacgcctatgatgcccggtctaaaactcagtgggagtgttataagatgcctatcgatgtctattatgat

SEQ ID NO: 720767 - DNA, 75 bp, synthetic construct
  source 1..75: mol_type = other DNA
tgtattttcgatgagcaccgcgaaccgtttgccgcaatttcaatttccggaccgatttcacgtattaccgatgac

SEQ ID NO: 720768 - DNA, 75 bp, synthetic construct
  source 1..75: mol_type = other DNA
accgatttcacgtattaccgatgatcgcgtaaccgagtttggtgcgatggtgattaaagctgcgaaggaagtgac

SEQ ID NO: 720769 - DNA, 75 bp, synthetic construct
  source 1..75: mol_type = other DNA
tactgctgaaagtgatcatcgaaaccggcgaactgaaagacgaagcgctgatccgcaaagcgtctgaaatctcca

SEQ ID NO: 720770 - DNA, 75 bp, synthetic construct
  source 1..75: mol_type = other DNA
atgactgatctgaaagcaagcagcctgcgtgcactgaaattgatggacctgaccaccctgaatgacgacgacacc

SEQ ID NO: 720771 - DNA, 75 bp, synthetic construct
  source 1..75: mol_type = other DNA
tcttatttaagaatatcggcggatgccgtccttctgcacagtctctggaaataaagcatggtgatctgtctatta

SEQ ID NO: 720772 - DNA, 75 bp, synthetic construct
  source 1..75: mol_type = other DNA
agcagccggataatgtcagtgctggctgacggtgtgctggtggcgggtgtggtggttgttgctttcccgttgctg

SEQ ID NO: 720773 - DNA, 75 bp, synthetic construct
  source 1..75: mol_type = other DNA
aggcgaccatgtgcgaacgactgcacgaactcgcagaaaaactccagaacagcatccagattcgctttgaggccg

SEQ ID NO: 720774 - DNA, 75 bp, synthetic construct
  source 1..75: mol_type = other DNA
aacctctaccggtaaagtggcagtgaacgcgacgccggaaagagcgcgcatcatgatggaagtgatccgtgatat

SEQ ID NO: 720775 - DNA, 75 bp, synthetic construct
  source 1..75: mol_type = other DNA
tgttttatcacggtattcaaccgttgaaagcggggtttcatcccactcaccaccgactgccgctacaacctgaca

SEQ ID NO: 720776 - DNA, 75 bp, synthetic construct
  source 1..75: mol_type = other DNA
acagtggggacgatggttaaagacgtcgctgataaggcgacaggcgatgacatcattttctgccaggatgacacg

SEQ ID NO: 720777 - DNA, 75 bp, synthetic construct
  source 1..75: mol_type = other DNA
cgtaatatgctgctgtatggcgtgaatgcagctaataacgaggggatcaccaactcaccgaacgcagtgacgctg

SEQ ID NO: 720778 - DNA, 75 bp, synthetic construct
  source 1..75: mol_type = other DNA
tatcagaaatatctgcgcatgacctcgcaggcgcaggtcagccagtctctgccgggccagttgccgtcttccagt

SEQ ID NO: 720779 - DNA, 75 bp, synthetic construct
  source 1..75: mol_type = other DNA
ctccggttcacccttcagcatcaatggtcgggctggatgctggcgtggctaaactcgccacgctgtcagatggca

SEQ ID NO: 720780 - DNA, 75 bp, synthetic construct
  source 1..75: mol_type = other DNA
gggcgattactgaaaaatccccgcctgtaccgcagctatggcccatactggccggaaattaaaaaattattactg

SEQ ID NO: 720781 - DNA, 75 bp, synthetic construct
  source 1..75: mol_type = other DNA
atggtcacactatctgatacaataaaaccgaataaaacatatcttgaggcggtactccgtacagcgttgttagga

SEQ ID NO: 720782 - DNA, 75 bp, synthetic construct
  source 1..75: mol_type = other DNA
cggatggcaacttcccgaacggtatcccgaacccgttgctgccagagtgccgcgacgacacccgcaatgcggtga

SEQ ID NO: 720783 - DNA, 75 bp, synthetic construct
  source 1..75: mol_type = other DNA
aactccgggaacggcgcggcggggccggtggtggacgccattgaagctcgctttaaagccctcggcgcacccgta

SEQ ID NO: 720784 - DNA, 75 bp, synthetic construct
  source 1..75: mol_type = other DNA
accgaaccggtggtgcggttgaatgttgaatcgcgcggtgatgtgccgctgatggaagcgcgaacgcgaactctg

SEQ ID NO: 720785 - DNA, 75 bp, synthetic construct
  source 1..75: mol_type = other DNA
gggaaaaatttatgaagctctacatcgctaactgctcacgtcagccgcacacgttcaactacaaactccccgaaa

SEQ ID NO: 720786 - DNA, 75 bp, synthetic construct
  source 1..75: mol_type = other DNA
gacgattgaggttccggaagcgcgtcacgccattaacaccaatattttctccacgctggtcccgaaccagcaggc

SEQ ID NO: 720787 - DNA, 75 bp, synthetic construct
  source 1..75: mol_type = other DNA
acgcggtcgctatcagcaaatcaatctgcgtgacgcttacgttgatcatctgttcggttatatcaacgtcaaaaa

SEQ ID NO: 720788 - DNA, 75 bp, synthetic construct
  source 1..75: mol_type = other DNA
acgtcagaatgagaatcatgaggtcggtaataaatacatcccttacgggaaaatggcttcctggctggttgagtg

SEQ ID NO: 720789 - DNA, 75 bp, synthetic construct
  source 1..75: mol_type = other DNA
tggcacgagcggtgaccatgcgcccgtacatatccgttcgcggcgggatactgattctgccaactggtctgaatg

SEQ ID NO: 720790 - DNA, 75 bp, synthetic construct
  source 1..75: mol_type = other DNA
cgatggtgatgaccccgcagtattcaggccaatacaaaaatacatcaatggcacatggtataacgtcgcacaggt

SEQ ID NO: 720791 - DNA, 75 bp, synthetic construct
  source 1..75: mol_type = other DNA
gctgtcatgcttgctgcggttattaaaactcgcggtaacgtcgttcagattttcaaaataacgaggtctaaacat

SEQ ID NO: 720792 - DNA, 75 bp, synthetic construct
  source 1..75: mol_type = other DNA
ccagtcgccgtttcgccagatggtcacccccggcggatataccatgtcggtggcgatgaccaactgcgggcgtct

SEQ ID NO: 720793 - DNA, 75 bp, synthetic construct
  source 1..75: mol_type = other DNA
atgattaataattcaaggacagccaatggcaccgatggtcaggcgtacatggataataacggaaactggctttgc

SEQ ID NO: 720794 - DNA, 75 bp, synthetic construct
  source 1..75: mol_type = other DNA
aagggatatcaggcttggtggcgcatcatcatacaaacctgcaaataatggcacaacatggacccatcaggcacc

SEQ ID NO: 720795 - DNA, 75 bp, synthetic construct
  source 1..75: mol_type = other DNA
ttatcaccaatgcagttatttgcactggcattgcaatccgagtgcttctgttccgccgcgacgggtcacgacatc

SEQ ID NO: 720796 - DNA, 75 bp, synthetic construct
  source 1..75: mol_type = other DNA
gctgtgtgcagcgttcaatgcgtggttgttaccagcatggaaactctccaccgtacgcacgcccgttcgcgaagg

SEQ ID NO: 720797 - DNA, 75 bp, synthetic construct
  source 1..75: mol_type = other DNA
acagcgactgcattcctgtatcgcaaatatccgcagggactaccttcacaaagtcacaacgaccgtcagcaaaaa

SEQ ID NO: 720798 - DNA, 75 bp, synthetic construct
  source 1..75: mol_type = other DNA
aaatataccgaagcggatcagtatggtacgaccgttatcgcaggggaagatgcgcagaaagatgtcggtgaagcg

SEQ ID NO: 720799 - DNA, 75 bp, synthetic construct
  source 1..75: mol_type = other DNA
cgcggttagaaagcggctatcgcgaaaaagcattaaaaatctatccgtgggtctgcggtcgctgttcccgcgagt

SEQ ID NO: 720800 - DNA, 75 bp, synthetic construct
  source 1..75: mol_type = other DNA
gaagatggggagggtggcttgcttatttccttattgttgctgcggccagtattcctgttcgtgtcgtctatgcaa

SEQ ID NO: 720801 - DNA, 75 bp, synthetic construct
  source 1..75: mol_type = other DNA
atggaggcaattgcattgtttaatctgatttatgcagatcccccctgggaatacaaagataagtgtaaggatggg

SEQ ID NO: 720802 - DNA, 75 bp, synthetic construct
  source 1..75: mol_type = other DNA
gggcaaaccgtcacagataatgttcaaagagcacccagaacaatcactattagtggtgtcgttgtagttggctat

SEQ ID NO: 720803 - DNA, 75 bp, synthetic construct
  source 1..75: mol_type = other DNA
ggaaattaactttaaagctattgtaggtcaaactgatatttcagcagctactggcaagaccgctaccacgaatga

SEQ ID NO: 720804 - DNA, 75 bp, synthetic construct
  source 1..75: mol_type = other DNA
ggattattctgttacaattccatacacttccggcatgcagcgtcatttcgcgagttacttgggggcccgttttaa

SEQ ID NO: 720805 - DNA, 75 bp, synthetic construct
  source 1..75: mol_type = other DNA
ttcaaaaggtaaataattctataaacccatatgccatgaagtgtcaaatcatggcatatgtggaatcaatatgtt

SEQ ID NO: 720806 - DNA, 75 bp, synthetic construct
  source 1..75: mol_type = other DNA
tcagcgacaacggtgtggggatcgccagcgggaaaatgaccggatttggcattcaggggatgcgtgaacgcgtca

SEQ ID NO: 720807 - DNA, 75 bp, synthetic construct
  source 1..75: mol_type = other DNA
gctgcaaaggtactcaaggcgggtaatgctttacggaagttttctgtgaatccgaacaagaagggcacttattga

SEQ ID NO: 720808 - DNA, 75 bp, synthetic construct
  source 1..75: mol_type = other DNA
actggcaacactacaacgagtcttggaagccctatgctgacctgtaaagagctttttagctattcggcaagtgag

SEQ ID NO: 720809 - DNA, 75 bp, synthetic construct
  source 1..75: mol_type = other DNA
aggtgtagagtttcgttcaatcgtaggtcagactgatatttcggctgcaactggaaaagccgcgactacgaatga

SEQ ID NO: 720810 - DNA, 75 bp, synthetic construct
  source 1..75: mol_type = other DNA
aacgttagcgttaagaatggtgaaagtaccttcacagactcagctaattcaggtgctgcaaagctactcaaggcg

SEQ ID NO: 720811 - DNA, 75 bp, synthetic construct
  source 1..75: mol_type = other DNA
ttcttgtcactatcagctactgagaacatggaatttgatagccctatgatggttaccactcaaaatatgcaatca

SEQ ID NO: 720812 - DNA, 75 bp, synthetic construct
  source 1..75: mol_type = other DNA
gtcttcgtattcagatgaccttccaaggtgtagagtttcgttcaatcgtaggacaaactgatgtctcagcagcta

SEQ ID NO: 720813 - DNA, 75 bp, synthetic construct
  source 1..75: mol_type = other DNA
ccagcatctgccgaaaagctttggcaaaggtcttccgtcgcttgtatcgccgttgaattgcccacgaatttatca

SEQ ID NO: 720814 - DNA, 75 bp, synthetic construct
  source 1..75: mol_type = other DNA
tggacgatcagcgtgaggttctgaatagtgtggtgcgggatttacaacctctattgcaatggattgcactcgagg

SEQ ID NO: 720815 - DNA, 75 bp, synthetic construct
  source 1..75: mol_type = other DNA
tctgccgaaaagctttggtaaaggtcttccgtcgctggtatcgccgctgaattgcccacgaatttatcatattgc

SEQ ID NO: 720816 - DNA, 75 bp, synthetic construct
  source 1..75: mol_type = other DNA
atgaaaatgaacccaagagcgtggtttaaccgctcacgtattctgatgaatgatgcagaaaacataacgttttca

SEQ ID NO: 720817 - DNA, 75 bp, synthetic construct
  source 1..75: mol_type = other DNA
tctacccaatgtggtgatggcgtggaaatttggctggcaaggtggcgtactctccgggcttttgggcagcatgat

SEQ ID NO: 720818 - DNA, 75 bp, synthetic construct
  source 1..75: mol_type = other DNA
tctcccgcagggagtttatctcgcccttgttattttgctctctcgccgctactggcctgcgttggtgctcccccc

SEQ ID NO: 720819 - DNA, 75 bp, synthetic construct
  source 1..75: mol_type = other DNA
tctttctgtgtcttgcgatgtgcctacaaatattcgttttttcctgttaagcaatacagctccggcatacagcca

SEQ ID NO: 720820 - DNA, 75 bp, synthetic construct
  source 1..75: mol_type = other DNA
aattactggggataaaacgttccggcactgactttagtgttcatgccaggttaccggatgagtggtcgtcttttt

SEQ ID NO: 720821 - DNA, 75 bp, synthetic construct
  source 1..75: mol_type = other DNA
ggttgtcaaaggattcggtattttacagcccggtcttgcggaggagataccacgcaacggtcaggggcgttacgc

SEQ ID NO: 720822 - DNA, 75 bp, synthetic construct
  source 1..75: mol_type = other DNA
ggtgatttaatcatggtggttgccgatatggcgcgctcccgacctccgttaaccagtgcgtttgtcgcagagctg

SEQ ID NO: 720823 - DNA, 75 bp, synthetic construct
  source 1..75: mol_type = other DNA
tatggtgataatggtggaggccgaactgcattttttgccgtcagcggtaatgactgttcgctgaccggggaccgt

SEQ ID NO: 720824 - DNA, 75 bp, synthetic construct
  source 1..75: mol_type = other DNA
ccatttcaatgggtacggtggattttctcaggatgggcgggagtatcagatcgtccttcgggaaaatgcgcttac

SEQ ID NO: 720825 - DNA, 75 bp, synthetic construct
  source 1..75: mol_type = other DNA
gaaggccaggcgatcggccgcaaccggcgtggccagtccggactgtggggctgggcaatttcaggggatctgccg

SEQ ID NO: 720826 - DNA, 75 bp, synthetic construct
  source 1..75: mol_type = other DNA
ggaaattaactttaaagctattgtgggtcagactgatatctcggctgcgaccggaaggacttctaccacaagtga

SEQ ID NO: 720827 - DNA, 75 bp, synthetic construct
  source 1..75: mol_type = other DNA
ctaaaactcagtgggagtgttatgagatgcctatcgatgtctattatgatggcgatctgcatggctgcccatggt

SEQ ID NO: 720828 - DNA, 75 bp, synthetic construct
  source 1..75: mol_type = other DNA
ccggtattgatacggatcttttccgttgtgcatatatgacatttaaagtcaccgttgcatctgataattatggtt

SEQ ID NO: 720829 - DNA, 75 bp, synthetic construct
  source 1..75: mol_type = other DNA
gttgcaacattgtatactcccattggatattcaacgcatactacaaagattgtttattatcttgatgttctcact

SEQ ID NO: 720830 - DNA, 75 bp, synthetic construct
  source 1..75: mol_type = other DNA
atattatggtgcgcgtagataccagcgtattgcagcccattgattcaacgtgtcgcttccagtatgtgctgaata

SEQ ID NO: 720831 - DNA, 75 bp, synthetic construct
  source 1..75: mol_type = other DNA
ctgcacgacatggtagtgcgtgtcgataccagcagcaggcagcccattgattccacctgccgcttccagtacacg

SEQ ID NO: 720832 - DNA, 75 bp, synthetic construct
  source 1..75: mol_type = other DNA
taatacatctatgtctaattgccctggcctgtccagtgtaccaggtaccgacggtagttgggagtgtattatggc

SEQ ID NO: 720833 - DNA, 75 bp, synthetic construct
  source 1..75: mol_type = other DNA
cccattacggacaaacagctacacgacatggtagtgcatgttgataccagcagcagacggccgatcaattccacc

SEQ ID NO: 720834 - DNA, 75 bp, synthetic construct
  source 1..75: mol_type = other DNA
cgactgcacgacatggtagtgcgtgtcgataccagcagccgccagccgattgattccacctgccgcttccagtac

SEQ ID NO: 720835 - DNA, 75 bp, synthetic construct
  source 1..75: mol_type = other DNA
gtagcgtaatggatgaccgcggcgcctattgccgctttgtagcgcaaatgatcaccttctccacctccggctgtg

SEQ ID NO: 720836 - DNA, 75 bp, synthetic construct
  source 1..75: mol_type = other DNA
agttggacagggcctggtcctgcaccatcgttaaaagtcatatcgatgacggagatatcaaaatcatcttgtccg

SEQ ID NO: 720837 - DNA, 75 bp, synthetic construct
  source 1..75: mol_type = other DNA
tgaagcgcgaattgaagtctggaaggaagactccagcgtccatggttgcccgtggctggtttcgacacatgctga

SEQ ID NO: 720838 - DNA, 75 bp, synthetic construct
  source 1..75: mol_type = other DNA
cagcagatcattatgtccaggattaccttcatcatgggactgtggattgttgaaattagaagtgattgttactgc

SEQ ID NO: 720839 - DNA, 75 bp, synthetic construct
  source 1..75: mol_type = other DNA
catctcgttgatgaactggcgatgccagatactgctttttatgcctgggatgcccgagggcatggaaaaacgtca

SEQ ID NO: 720840 - DNA, 75 bp, synthetic construct
  source 1..75: mol_type = other DNA
ctgggaacgttcgccgcaagatcaggagaagttctgggttaaatatctgcgtgactttatttcactgattggttt

SEQ ID NO: 720841 - DNA, 75 bp, synthetic construct
  source 1..75: mol_type = other DNA
gtcccacccaggatctggagcacgagccgattaagcagttggataatagcgagaaaggcggcaaagttagccagg

SEQ ID NO: 720842 - DNA, 75 bp, synthetic construct
  source 1..75: mol_type = other DNA
aggacgcgaatacctgtcagcattctcaagttttgttgccagaagcacagcgggaactaatgctgttgattctat

SEQ ID NO: 720843 - DNA, 75 bp, synthetic construct
  source 1..75: mol_type = other DNA
gtacgactgtagggcttgtcggcctggcggtggcactttattccggcatcaactggatgggtaacctgcgtgaag

SEQ ID NO: 720844 - DNA, 75 bp, synthetic construct
  source 1..75: mol_type = other DNA
tcagtttggcgcagcgatcacctatttctcgtttttgtcgatgatcccgattttgatggtgtcgtttgccgctgg

SEQ ID NO: 720845 - DNA, 75 bp, synthetic construct
  source 1..75: mol_type = other DNA
ctgttttgcgcggcgtggattgccaccgccgaatataaagacgacccgcgaatgccagggaaaacgcagccttaa

SEQ ID NO: 720846 - DNA, 75 bp, synthetic construct
  source 1..75: mol_type = other DNA
atggcgctgctttccagtgggctaatgatgcgcaagatacggcattcctggcacatgtagtttcgcgtaccggtt

SEQ ID NO: 720847 - DNA, 75 bp, synthetic construct
  source 1..75: mol_type = other DNA
cgtcggtcaccgccatgcgggtgattgcctccgttaacgccgaatttgcgcgtgaactgaaattgccgccgcata

SEQ ID NO: 720848 - DNA, 75 bp, synthetic construct
  source 1..75: mol_type = other DNA
tgcctctattaacccggaatttgcgcgtgagctgaaattaccgccgcatattcgtagtctggggctcatttctgc

SEQ ID NO: 720849 - DNA, 75 bp, synthetic construct
  source 1..75: mol_type = other DNA
acataggctctggacttggttctacagcaggagcaagtcaggcgtggactgatgcgtctgtgaaaaccaagtatg

SEQ ID NO: 720850 - DNA, 75 bp, synthetic construct
  source 1..75: mol_type = other DNA
actacaacctgttgataaggtgatgttgaataacctgaaaatcaatgcgacaaaatcaacacaggcaacgaaata

SEQ ID NO: 720851 - DNA, 75 bp, synthetic construct
  source 1..75: mol_type = other DNA
atgccagctttagatttgattcgaccgtcggtaaccgccatgcgggtgattgcctccgttaacgccgaatttgca

SEQ ID NO: 720852 - DNA, 75 bp, synthetic construct
  source 1..75: mol_type = other DNA
aaacgcggctataccatcgttgatcgtatcggcacccgtatcctgcgtgatccttacaccaacaaaccgtttgtg

SEQ ID NO: 720853 - DNA, 75 bp, synthetic construct
  source 1..75: mol_type = other DNA
accctgtcgcgacactcagagttggcgaaggcgttcgcgtacgcacttaaccagtggccggcactgacgtactat

SEQ ID NO: 720854 - DNA, 75 bp, synthetic construct
  source 1..75: mol_type = other DNA
acgcattggtgaggacgcacaccgcaacccgttaatgcaaaaaggaaaccggaaaaacctgaccattttgatcgt

SEQ ID NO: 720855 - DNA, 75 bp, synthetic construct
  source 1..75: mol_type = other DNA
ttctgttgtgcgcgtgacgctttgcacaatttgccttaaacatgaaaaaacaggcgaggcttatgtcgtcatttt

SEQ ID NO: 720856 - DNA, 75 bp, synthetic construct
  source 1..75: mol_type = other DNA
acctccagactggagctgattgaacctctcatgggggaaatctacggtaacccgcaggccacccagaaaatgctg

SEQ ID NO: 720857 - DNA, 75 bp, synthetic construct
  source 1..75: mol_type = other DNA
ctcagcgagctggaaaatctcaaaagcgaccttgaaaaagagctgcttgagctgaaacgtccagctggtggagcg

SEQ ID NO: 720858 - DNA, 75 bp, synthetic construct
  source 1..75: mol_type = other DNA
gccacggcccgacctattacaaccgctatccgccgcagttcaggaaatttacccccacctgcgacaccaacgaga

SEQ ID NO: 720859 - DNA, 75 bp, synthetic construct
  source 1..75: mol_type = other DNA
cataatgacttatggcatcgtcatcgaccgttcgatgattgccaatatcatggataccacacctgcggaaagcta

SEQ ID NO: 720860 - DNA, 75 bp, synthetic construct
  source 1..75: mol_type = other DNA
atcaacggcgagtgctatgatgaagtactgttccacgggctggaagattacatcaataacctgcagggtgatggc

SEQ ID NO: 720861 - DNA, 75 bp, synthetic construct
  source 1..75: mol_type = other DNA
catcatgacctatggcatcgtcatcgaccgttcaatgatcaccaatatcattgatactacgccggcggaaagtta

SEQ ID NO: 720862 - DNA, 75 bp, synthetic construct
  source 1..75: mol_type = other DNA
atcaacggcgaatgttatgacgaagtgcttttccacgggctggaagagtacatcactaacctgcaaggtgatggc

SEQ ID NO: 720863 - DNA, 75 bp, synthetic construct
  source 1..75: mol_type = other DNA
gcgctgattgcctgctggatcaaaatcaaacccaccacctcacgcctgcgcagcgttcttttccgcggggccaac

SEQ ID NO: 720864 - DNA, 75 bp, synthetic construct
  source 1..75: mol_type = other DNA
tgcttgtgcggttaccagtgatgcgatctataaaagcacggtagagaaacagaatgaaccgccccgggaatcctg

SEQ ID NO: 720865 - DNA, 75 bp, synthetic construct
  source 1..75: mol_type = other DNA
atatcaggacgttaacctgatacagcatgacatgacccgcttgctatctaagtcggatacgtcggttatggctgt

SEQ ID NO: 720866 - DNA, 75 bp, synthetic construct
  source 1..75: mol_type = other DNA
aggtcgcgcaggagttgcagcggaagtttgacgattttaaggaaaaaaacgacaaacgtatcgacgcaatcgagc

SEQ ID NO: 720867 - DNA, 75 bp, synthetic construct
  source 1..75: mol_type = other DNA
gtcggtttttataccaccaagcgcaccggcggcatgctggtcgattcgcaggccatcaaactgctgaagattgca

SEQ ID NO: 720868 - DNA, 75 bp, synthetic construct
  source 1..75: mol_type = other DNA
aaaaagctggatgagcatataaaaagaggttatttctttgatgacttttcctgtgttgttaatggaaaaacaata

SEQ ID NO: 720869 - DNA, 75 bp, synthetic construct
  source 1..75: mol_type = other DNA
aagagattggtggtattcagtatgtgtttgtatacccaaacattccaaaaaataaagtagataatttttcaaaat

SEQ ID NO: 720870 - DNA, 75 bp, synthetic construct
  source 1..75: mol_type = other DNA
ggtgatcaccgttggcggttccgactacaaaaaactggtgaatctgggcggcacggcttccggatgggtggggga

SEQ ID NO: 720871 - DNA, 75 bp, synthetic construct
  source 1..75: mol_type = other DNA
gcctttaccagtggcgacggcagcaaaaaaccaaaaggttttctggcttatgagtccaccgatgaagatgacaaa

SEQ ID NO: 720872 - DNA, 75 bp, synthetic construct
  source 1..75: mol_type = other DNA
tccatgactgttcgtcaactggtgcaggaatttgggctggataacgtcagctcatcggtgcaggggatgtggcaa

SEQ ID NO: 720873 - DNA, 75 bp, synthetic construct
  source 1..75: mol_type = other DNA
atgccttcttcaacgtggaggcctggatcaacagcgagctggcaaccgaatttgccgaacaggaagaaattgcct

SEQ ID NO: 720874 - DNA, 75 bp, synthetic construct
  source 1..75: mol_type = other DNA
gtttttataccaccaaacgcaccggcggcatgctggtcgattcgcaggccatcaaactgctgaagattgcagtgg

SEQ ID NO: 720875 - DNA, 75 bp, synthetic construct
  source 1..75: mol_type = other DNA
gatctggagcgcaaggcattacaggtgggcaccgatgaagacggcggctatgccgtgccggaagcactggatcgc

SEQ ID NO: 720876 - DNA, 75 bp, synthetic construct
  source 1..75: mol_type = other DNA
ctcattgtattacacaccatcggcagccacggcccgacctattacaaccgctatccgccgcagttcaggaaattt

SEQ ID NO: 720877 - DNA, 75 bp, synthetic construct
  source 1..75: mol_type = other DNA
aacggctgcgtctgtggccagtctctgggggaagtgcgtgttccgcaccggggaaatgtcgtggacacagtcatt

SEQ ID NO: 720878 - DNA, 75 bp, synthetic construct
  source 1..75: mol_type = other DNA
aacggctgcgtctgtggccagtctctgggggaagtgcgtgttccgcaccggggaaatgtcgtggaaacagtaatt

SEQ ID NO: 720879 - DNA, 75 bp, synthetic construct
  source 1..75: mol_type = other DNA
aacggctgcgtctgtggacagtctctgggggaagtgcgtgttccgcaccggggaaatgtcgtggacacagtaatt

SEQ ID NO: 720880 - DNA, 75 bp, synthetic construct
  source 1..75: mol_type = other DNA
gaaggggcttacgaggtggtgggagtatttgaccggattgaggacaagcgtgatgccatgcagtcgctgctactg

SEQ ID NO: 720881 - DNA, 75 bp, synthetic construct
  source 1..75: mol_type = other DNA
aacggctgcgtctgtgggcagtctctgggggaagtgcgtgttccgcaccggggaaatgtcgtggacacagtgatt

SEQ ID NO: 720882 - DNA, 75 bp, synthetic construct
  source 1..75: mol_type = other DNA
aacggctgcgtctgtggccagtctctgggggaagtgcgtgttccgcaccggggaaatgtcgtggagacagtgatt

SEQ ID NO: 720883 - DNA, 75 bp, synthetic construct
  source 1..75: mol_type = other DNA
aaggttttcagccattctttgcctgccagacccgcgtacgtgacccgggccgccgggggtataccaaacacatgc

SEQ ID NO: 720884 - DNA, 75 bp, synthetic construct
  source 1..75: mol_type = other DNA
gcgggccggagagataaacggagaacatgtccctgaaattattctgctcaactcccatgacggtacctccagcta

SEQ ID NO: 720885 - DNA, 75 bp, synthetic construct
  source 1..75: mol_type = other DNA
ccccttaactcgtgaagaactgatgcaggtcgtccccagcgtattcggagaagataagcacacatccagaagcga

SEQ ID NO: 720886 - DNA, 75 bp, synthetic construct
  source 1..75: mol_type = other DNA
tgaccggattgaggaaaagcgtgatgccatgcagtcgctggtcctgccgccaccggcacgccaggcgctggcaca

SEQ ID NO: 720887 - DNA, 75 bp, synthetic construct
  source 1..75: mol_type = other DNA
ccatacccgggccattcacagcatcggtaccgacattaagctcaatcgcgcattgtgggtgatggcagaaacgct

SEQ ID NO: 720888 - DNA, 75 bp, synthetic construct
  source 1..75: mol_type = other DNA
ggcgcagcgcaaaaggaaaacgtatccatacccgggccattcacagcatcggtaccgacattaagctcaatcgcg

SEQ ID NO: 720889 - DNA, 75 bp, synthetic construct
  source 1..75: mol_type = other DNA
gaaggggcttacgaggtggtgggagtttttgaccggatagaggacaagcgtgatgccatgcagtcgctgctactg

SEQ ID NO: 720890 - DNA, 75 bp, synthetic construct
  source 1..75: mol_type = other DNA
tcggctctggccatggtggtgagcggggagcgctactgtacagcctgatcgggacgtgcaaactgaatgacgtgg

SEQ ID NO: 720891 - DNA, 75 bp, synthetic construct
  source 1..75: mol_type = other DNA
gttatcgaaggggcttacgaagtggtgggggtttttgaccggattgaggaaaagcgtgatgccatgcagtcgctg

SEQ ID NO: 720892 - DNA, 75 bp, synthetic construct
  source 1..75: mol_type = other DNA
gaaggggcttacgaggtggtgggggtgtttgaccggattgaggacaagcgtgatgccatgcagtcgctgctactg

SEQ ID NO: 720893 - DNA, 75 bp, synthetic construct
  source 1..75: mol_type = other DNA
ttcttgtcgatgccggtcgtcgccttcagcgtgattaatattgtcctgacactaagctctttcttatggcttaat

SEQ ID NO: 720894 - DNA, 75 bp, synthetic construct
  source 1..75: mol_type = other DNA
aagcgattaatctgctgaaagaacatcaggataaatttaccaccagcctggtttatctttctgaccacggtgaat

SEQ ID NO: 720895 - DNA, 75 bp, synthetic construct
  source 1..75: mol_type = other DNA
tgctggatatcattcagcgagcgggcattaatgtgttatggaatgacaacgacggtggctgcaaaggtgtctgcg

SEQ ID NO: 720896 - DNA, 75 bp, synthetic construct
  source 1..75: mol_type = other DNA
gaaggggcttacgaggtggtgggtgtgtttgaccggatagaggacaagcgtgatgccatgcagtcgctgctactg

SEQ ID NO: 720897 - DNA, 75 bp, synthetic construct
  source 1..75: mol_type = other DNA
gaaggggcttacgaggtggtgggtgtttttgaccggattgaggacaagcgtgatgccatgcagtcgctgctactg

SEQ ID NO: 720898 - DNA, 75 bp, synthetic construct
  source 1..75: mol_type = other DNA
gaaggggcttacgaggtggtgggtgtatttgaccggatggaggacaagcgtgatgccatgcagtcgctgctactg

SEQ ID NO: 720899 - DNA, 75 bp, synthetic construct
  source 1..75: mol_type = other DNA
gaaggggcttacgaggtggtgggggtttttgaccggatggaggacaagcgtgatgccatgcagtcgctgctactg

SEQ ID NO: 720900 - DNA, 75 bp, synthetic construct
  source 1..75: mol_type = other DNA
gaaggggcttacgaggtggtgggcgtctttgaccggattgaggacaagcgtgatgccatgcagtcgctgctactg

SEQ ID NO: 720901 - DNA, 75 bp, synthetic construct
  source 1..75: mol_type = other DNA
gaaggggcttacgaggtggtgggcgtttttgaccggatcgaggacaagcgtgatgccatgcagtcgctgctactg

SEQ ID NO: 720902 - DNA, 75 bp, synthetic construct
  source 1..75: mol_type = other DNA
ctggaaacagcaaagcctgccgaattacaagaaggcatgcgcttcgctcagattgaagtcaacatggggcaatga

SEQ ID NO: 720903 - DNA, 75 bp, synthetic construct
  source 1..75: mol_type = other DNA
cgcgtccagtgcctgctcaagtttgtagatatagcgcggagcctgcggcgcagggtgatttcgcgctacgtgttc

SEQ ID NO: 720904 - DNA, 75 bp, synthetic construct
  source 1..75: mol_type = other DNA
tacacgcgaccatgctggcgatgcagcgtgcggttgcgggactgcatatcgtcccggaatatgtgttgattgatg

SEQ ID NO: 720905 - DNA, 75 bp, synthetic construct
  source 1..75: mol_type = other DNA
atctcctggtatgtgattcgccggatggtcagcaacatgtatgttctgcaaagctcgttgcagtggcaggcgtgg

SEQ ID NO: 720906 - DNA, 75 bp, synthetic construct
  source 1..75: mol_type = other DNA
aaattgtgtcagacgcaccaacatcctttttctgtcattcaggtcgatcttgaccattttaaagcgattaatgac

SEQ ID NO: 720907 - DNA, 75 bp, synthetic construct
  source 1..75: mol_type = other DNA
atgattttgaacaactccagtcactggccgaccgtcggctttatctcgctaaacaggccgggcgtaatcgggtat

SEQ ID NO: 720908 - DNA, 75 bp, synthetic construct
  source 1..75: mol_type = other DNA
agagtcggggcttgcattacacgctggattacccggagctactcgcgcattccggtccgtcgattctcacccccg

SEQ ID NO: 720909 - DNA, 75 bp, synthetic construct
  source 1..75: mol_type = other DNA
cacgctggtgagcaaggcgcagaaccatccgaatattcgcgtgctggagcgcagcaacgcggttgatctgattgt

SEQ ID NO: 720910 - DNA, 75 bp, synthetic construct
  source 1..75: mol_type = other DNA
gtgacgtgttgattatcggtagcggcgcagccggactttcactggcgctacgcctggctgaccagcatcaggtca

SEQ ID NO: 720911 - DNA, 75 bp, synthetic construct
  source 1..75: mol_type = other DNA
acgcgacgggttgttggcgcgtgggtatggaaccgaaataaagaaacggtggaaacctgccacgcaaaagcggtg

SEQ ID NO: 720912 - DNA, 75 bp, synthetic construct
  source 1..75: mol_type = other DNA
gtgagttataccggcttacacggcgctaaccgcatggcctcaaattcattactggagtgtctggtttacggctgg

SEQ ID NO: 720913 - DNA, 75 bp, synthetic construct
  source 1..75: mol_type = other DNA
tacgttaccgccgtgggatgaaagccgcgttgagaatcctgacgaactggtggtgattcaacataactggcatga

SEQ ID NO: 720914 - DNA, 75 bp, synthetic construct
  source 1..75: mol_type = other DNA
tgcagtataacgtcgacaaactgatctttttgcgtaatggcatgcgcgaagctctcgtagcgccactggatttca

SEQ ID NO: 720915 - DNA, 75 bp, synthetic construct
  source 1..75: mol_type = other DNA
attaaccgcgtggaacagcactttagccgcgaggcgctggcggtggatcgcaccgatggcatcagcatgaccttt

SEQ ID NO: 720916 - DNA, 75 bp, synthetic construct
  source 1..75: mol_type = other DNA
actaacaaaattccgttccaggctcgctattatgcaaccggacaggccactgctggtattgccaatgccgacgct

SEQ ID NO: 720917 - DNA, 75 bp, synthetic construct
  source 1..75: mol_type = other DNA
ttgccgatcccgaggagctggagtttatggggatccgcgattattttgccaacgatgccatctgcctggtggagt

SEQ ID NO: 720918 - DNA, 75 bp, synthetic construct
  source 1..75: mol_type = other DNA
cgtcgaacagcactttagccgcgaggcgctggcggtggatcgcaccgacggtattagcatgacctttgccgactg

SEQ ID NO: 720919 - DNA, 75 bp, synthetic construct
  source 1..75: mol_type = other DNA
ctggtgattaactccgggaacggcgcggcgggtccggtggtggacgccatcgaagcccgctttaaagccctcggc

SEQ ID NO: 720920 - DNA, 75 bp, synthetic construct
  source 1..75: mol_type = other DNA
atgcgaaaccgcggtgtaaataacgacaaaaaaaaattggccgcttcggtcagggccaactattgcctgaaaaag

SEQ ID NO: 720921 - DNA, 75 bp, synthetic construct
  source 1..75: mol_type = other DNA
tcctggtatgtgattcgccggatggttagcaacatgtatgttctgcaaagctcgttgcagtggcaggcgtggcac

SEQ ID NO: 720922 - DNA, 75 bp, synthetic construct
  source 1..75: mol_type = other DNA
aaactcgcacgccgcctggggcctggtcatgtcgttaatctctgctttatcgtggtattgcttttttccaccttg

SEQ ID NO: 720923 - DNA, 75 bp, synthetic construct
  source 1..75: mol_type = other DNA
gacggtgtgctggtgcgcgtccatacgctaagcgaaggcgtgcgcggcgatttcggcagtatcagcattgcatta

SEQ ID NO: 720924 - DNA, 75 bp, synthetic construct
  source 1..75: mol_type = other DNA
ccgtgcgttcaatgcagcaatttttaaaaaacgccattgataaaaacctcgatggcgaatatcaactctatgaca

SEQ ID NO: 720925 - DNA, 75 bp, synthetic construct
  source 1..75: mol_type = other DNA
cacgcggggcggcattcgtatgaacagtcgctatgttagctgggaacggctggatcactttgacggtgtgctggt

SEQ ID NO: 720926 - DNA, 75 bp, synthetic construct
  source 1..75: mol_type = other DNA
aagagatgttgatcgccaagagtacgacgatacgcatcagtgcctcgctgggggtaagcagcagcgaggaaaccg

SEQ ID NO: 720927 - DNA, 75 bp, synthetic construct
  source 1..75: mol_type = other DNA
aattgcagaggtggaggcgcgggaaataaaaccagcaaaaggcgaagttcttgtcgttgtatctggttttactgg

SEQ ID NO: 720928 - DNA, 75 bp, synthetic construct
  source 1..75: mol_type = other DNA
cggtgataatgttttggtcaattctttatcggtcattgtgttgtcctgcatagcaatgcgccgtaatacctcaca

SEQ ID NO: 720929 - DNA, 75 bp, synthetic construct
  source 1..75: mol_type = other DNA
cgatatggagccgcctttctgaacaattaacccgctgcgcattatgtgtcaacaaacataagccagggcatgata

SEQ ID NO: 720930 - DNA, 75 bp, synthetic construct
  source 1..75: mol_type = other DNA
gacagtttgatgatatcagtgcggtgcatggtaatccgtctgttggcgtgtcacaggtcacccgagcagctgcag

SEQ ID NO: 720931 - DNA, 75 bp, synthetic construct
  source 1..75: mol_type = other DNA
caacatcaacaatgcgctgaaatatgccaaaggcgagttcgtgtcgattttcgactgcgaccacgtaccaacgcg

SEQ ID NO: 720932 - DNA, 75 bp, synthetic construct
  source 1..75: mol_type = other DNA
caaaaatcaacgccccgcagtgctgggaacacatacggggcgtctaaccaacaacgtaaactaggagccgttatg

SEQ ID NO: 720933 - DNA, 75 bp, synthetic construct
  source 1..75: mol_type = other DNA
aattaccattgtacttgccattacacaaaaatcaacgccccgcagtgctgggaacacatacggggcgtctaacca

SEQ ID NO: 720934 - DNA, 75 bp, synthetic construct
  source 1..75: mol_type = other DNA
cgttaaccatctttgtgctgttcgtcttaccgatttggctctggctgcattacagcaatcgttccagtcgcggcg

SEQ ID NO: 720935 - DNA, 75 bp, synthetic construct
  source 1..75: mol_type = other DNA
gggtatggcatcgttgagaatgagcagatgccggatattgccgccgatgcaaaagccattgcgtttggtaacttc

SEQ ID NO: 720936 - DNA, 75 bp, synthetic construct
  source 1..75: mol_type = other DNA
ctgatttacaccctgcgcaaggcgcaccgtagcggcgcgaagttcatgatgaataacagcagcctgtttgccatt

SEQ ID NO: 720937 - DNA, 75 bp, synthetic construct
  source 1..75: mol_type = other DNA
ggtggcactgggatgcgaccacagcatctgaaactatggtgctgcctcattttccagaatcacgcaaacctcttt

SEQ ID NO: 720938 - DNA, 75 bp, synthetic construct
  source 1..75: mol_type = other DNA
atgacggagaaagatccgccggaaaagtcagaggttcctaccccgccccaaatccagcgacctgaaggtggacag

SEQ ID NO: 720939 - DNA, 75 bp, synthetic construct
  source 1..75: mol_type = other DNA
cttctttaactcagacgggcactgggatagcgtgaagcggcgattccctctggaatatgccgcctggaaaaatgg

SEQ ID NO: 720940 - DNA, 75 bp, synthetic construct
  source 1..75: mol_type = other DNA
cgaacgaaggcacgctgttctatggtctggtgcggacggcaatgatatgtgggatgccactttcttctgcggttc

SEQ ID NO: 720941 - DNA, 75 bp, synthetic construct
  source 1..75: mol_type = other DNA
tgcgtgaggcagcagaagcaataaaagtcgtggcaacgccgcaaaaattgcttgcgtttcgtatgaaggtcacac

SEQ ID NO: 720942 - DNA, 75 bp, synthetic construct
  source 1..75: mol_type = other DNA
gtgagcaaaattaactatcaggcactgcgtgaggcggcagaaaaagcgctacatggtgaatgggggcacgaggca

SEQ ID NO: 720943 - DNA, 75 bp, synthetic construct
  source 1..75: mol_type = other DNA
agtcgatctctgctatgagctggacccgtatgaattaaaactggatgagatgatcgaggcagaaccggaccgaga

SEQ ID NO: 720944 - DNA, 75 bp, synthetic construct
  source 1..75: mol_type = other DNA
cgtggaagttaatgtgccacgcgtcgctggcattcgcatcaaaggagacgcaggagagcaaaacgatgaaaaacc

SEQ ID NO: 720945 - DNA, 75 bp, synthetic construct
  source 1..75: mol_type = other DNA
attgatggacaaaggaatgctggtgctaatgcccgttatattgcggctatcccaccaaaagttgcgctggcactc

SEQ ID NO: 720946 - DNA, 75 bp, synthetic construct
  source 1..75: mol_type = other DNA
gtggaagttaatgtgccacgcgtcgctggcattcgcatcaaaggagacgcaggagagcaaaacgatgaaaaaccg

SEQ ID NO: 720947 - DNA, 75 bp, synthetic construct
  source 1..75: mol_type = other DNA
cggggaactcagtcggtacccttaatgttgccggcgatgtcagttttgctccgggttcgcgttatgtggttgaag

SEQ ID NO: 720948 - DNA, 75 bp, synthetic construct
  source 1..75: mol_type = other DNA
ctgtttcttggcaccgggcttggctaccaatgggataaggtgttactgaatgtcggtcgtaacaacacaagcttc

SEQ ID NO: 720949 - DNA, 75 bp, synthetic construct
  source 1..75: mol_type = other DNA
actgattgttttcgcagccgaaaatgagaacaactacaatgtccccatgcacagcgcaacgctgccttatctctt

SEQ ID NO: 720950 - DNA, 75 bp, synthetic construct
  source 1..75: mol_type = other DNA
atctgtctccaacctcggtatgtcaggctcgttttcctgttgaagtcagtcagctgctggctaaatatcagattg

SEQ ID NO: 720951 - DNA, 75 bp, synthetic construct
  source 1..75: mol_type = other DNA
tagctataaatgattatggatttagcgaggacaacttgtttgggacaaggaaagatttcgctctgtatctaccaa

SEQ ID NO: 720952 - DNA, 75 bp, synthetic construct
  source 1..75: mol_type = other DNA
ttaacaacagctggggggaagagccccctgtggaggaagacgccgatggtaataaactgtatcttcccgatggta

SEQ ID NO: 720953 - DNA, 75 bp, synthetic construct
  source 1..75: mol_type = other DNA
ataaaaattatcgtaatattgtttctttaactcagaatcaatcatttccgttagtgaatcgcctggcagctttta

SEQ ID NO: 720954 - DNA, 75 bp, synthetic construct
  source 1..75: mol_type = other DNA
cattgtgcaggaagggcaacagccgtcctggctgttttacctgacgcgaggccgcgccaggctttacgccacgct

SEQ ID NO: 720955 - DNA, 75 bp, synthetic construct
  source 1..75: mol_type = other DNA
taatggtcgcgtgtcgctgatcgatttctttgccgccccctgttttattggcgagattgagttaatcgacaaaga

SEQ ID NO: 720956 - DNA, 75 bp, synthetic construct
  source 1..75: mol_type = other DNA
aggaaaggtgagcacgaacctgatttttaaggagtgtcgccagagtgcagcgatgaaactggtattggcggtata

SEQ ID NO: 720957 - DNA, 75 bp, synthetic construct
  source 1..75: mol_type = other DNA
gctttttaacggatgtttcagccgatacgcggctgtttcattttttagcgcgtgactacattgtgcaggaagggc

SEQ ID NO: 720958 - DNA, 75 bp, synthetic construct
  source 1..75: mol_type = other DNA
aaaacagaaagcagttgtcaggactggcgctggagatggagatggacccggagaataaattctccgggatgatgc

SEQ ID NO: 720959 - DNA, 75 bp, synthetic construct
  source 1..75: mol_type = other DNA
tttatcacactgttttatgatgctaagggctgggacggtgcggctttcgcgttgacgctgtttagttgtgcgttt

SEQ ID NO: 720960 - DNA, 75 bp, synthetic construct
  source 1..75: mol_type = other DNA
ggttcgctaccagggaagaacgggaaggaaaggtgagcacgaatctgattttcaaggagtgtcgccagagtgccg

SEQ ID NO: 720961 - DNA, 75 bp, synthetic construct
  source 1..75: mol_type = other DNA
aggaaaggtgagcacgaatctgattttcaaggagtgtcgccagagtgccgcgatgaagcgggtgttgagcgttta

SEQ ID NO: 720962 - DNA, 75 bp, synthetic construct
  source 1..75: mol_type = other DNA
taaagtgatgcctgttccggctgcggcgttgagctataaaaaacaaaaagccgctcagatggcggcggcggggca

SEQ ID NO: 720963 - DNA, 75 bp, synthetic construct
  source 1..75: mol_type = other DNA
agcggtgcggggtggcgtgtcacagacgtcagcagacggtgatgcggacgtgaaaatgctcatggccatgccatg

SEQ ID NO: 720964 - DNA, 75 bp, synthetic construct
  source 1..75: mol_type = other DNA
ccggtctgggcactgtgtaatgacacggcctgttctgcggccatgctgctggcgtcggcctgctcccgacggctg

SEQ ID NO: 720965 - DNA, 75 bp, synthetic construct
  source 1..75: mol_type = other DNA
gcctccgtcagcagaagccggtctgggcactgtgcaatgacacggcctgttctgcagccatgctgctggcgtcgg

SEQ ID NO: 720966 - DNA, 75 bp, synthetic construct
  source 1..75: mol_type = other DNA
atcgtgaccttcctcggttggacactgtatggtctggtatcaccacgctttgaactgaaaaataaacacggttaa

SEQ ID NO: 720967 - DNA, 75 bp, synthetic construct
  source 1..75: mol_type = other DNA
gcagtccttggcggtacgttaggtgcggcggtgatttatatcgtctccaccaacgtgattgccgggattgtgccc

SEQ ID NO: 720968 - DNA, 75 bp, synthetic construct
  source 1..75: mol_type = other DNA
gcggtgcggggtggcgtgtcacagacgtcagcagacggtgatgcggacgtgaaaatgctcatggccatgccatga

SEQ ID NO: 720969 - DNA, 75 bp, synthetic construct
  source 1..75: mol_type = other DNA
cggatgccgaccctcactccgtgatcagatcatggcactggatgaggcaaaaggggctgaggcgcaggctgaaca

SEQ ID NO: 720970 - DNA, 75 bp, synthetic construct
  source 1..75: mol_type = other DNA
gcgaaatcgctcggaatgaacaacacgcgctttgttgaaccgaccggattgtcggtgcataacgtttcaactgcc

SEQ ID NO: 720971 - DNA, 75 bp, synthetic construct
  source 1..75: mol_type = other DNA
taccacagcttcgcagccggaaatcgcttccggtagtgcgatgattgttgatctgaataccaacaaagtgatcta

SEQ ID NO: 720972 - DNA, 75 bp, synthetic construct
  source 1..75: mol_type = other DNA
tctctgcatccacaaccgccctgtttgaacatttcatggcgaatcattcaccggcagcggtgcggggtggcgtgt

SEQ ID NO: 720973 - DNA, 75 bp, synthetic construct
  source 1..75: mol_type = other DNA
gacaactggcatttgggcttcaacccgcatctgctgatttttataagcgggttgcatatattcatcagggaataa

SEQ ID NO: 720974 - DNA, 75 bp, synthetic construct
  source 1..75: mol_type = other DNA
cattgtcacttacggggcgatggcgatgggcgcgccgttgggcgtgctgttttatcactggggcgggttgcagac

SEQ ID NO: 720975 - DNA, 75 bp, synthetic construct
  source 1..75: mol_type = other DNA
atttactccaggctggaacacagcaaagggattgattacccgttcattaacttcgtccataaaggcagcgatgct

SEQ ID NO: 720976 - DNA, 75 bp, synthetic construct
  source 1..75: mol_type = other DNA
ttgcctgttggtgtaccggttccatggcccaccgccacaccgccagcaggctggttacagtgcaacggagctacg

SEQ ID NO: 720977 - DNA, 75 bp, synthetic construct
  source 1..75: mol_type = other DNA
ggcacgctctgttccgccgggatctgaatacctatcacgaatgccgcatcaatgatgaatggggcggcgtggaaa

SEQ ID NO: 720978 - DNA, 75 bp, synthetic construct
  source 1..75: mol_type = other DNA
agcacaacgtgatcgtagatgtgaaaaaagttgcagacatggatcgctttgcccgtcacatcgaggaattccgct

SEQ ID NO: 720979 - DNA, 75 bp, synthetic construct
  source 1..75: mol_type = other DNA
accagtgagtttgtgctggaggctgaccgcacgcgtattaacagcgaagtagtgatcaatggtggcgttacccag

SEQ ID NO: 720980 - DNA, 75 bp, synthetic construct
  source 1..75: mol_type = other DNA
ggtgagcaggtggtactgctgagtctgggcggcaatctggaaacagcctttgctttgcccgccatctattctaat

SEQ ID NO: 720981 - DNA, 75 bp, synthetic construct
  source 1..75: mol_type = other DNA
atggcaaaaagtggatatttgatgcatcctctaaaggtgcacaaagatatgactggtgggcttatgtatcagctc

SEQ ID NO: 720982 - DNA, 75 bp, synthetic construct
  source 1..75: mol_type = other DNA
gtccgctgacaatatcaccatgaaaaccagtgagtttgtactggaggctgaccgcacgcggattaacagcgaagt

SEQ ID NO: 720983 - DNA, 75 bp, synthetic construct
  source 1..75: mol_type = other DNA
gaccgctgacaatatcaccatgaaaaccagtgagtttgtactggaggctgaccgcacgcgtattaacagcgaagt

SEQ ID NO: 720984 - DNA, 75 bp, synthetic construct
  source 1..75: mol_type = other DNA
ggggcatcaaatcaatggtcattgagaccgctgacaatatcaccgtgaaaaccagtgagtttgtgctggaggctg

SEQ ID NO: 720985 - DNA, 75 bp, synthetic construct
  source 1..75: mol_type = other DNA
ggccgctgacaatatcaccgtgaaaaccagtgagtttgtactggaggctgaccgcacgcgtattaacagcgaagt

SEQ ID NO: 720986 - DNA, 75 bp, synthetic construct
  source 1..75: mol_type = other DNA
gcccgctgacaatatcaccctgaaaaccagtgagtttgtactggaggctgaccgcacgcgtattaacagcgaagt

SEQ ID NO: 720987 - DNA, 75 bp, synthetic construct
  source 1..75: mol_type = other DNA
gtccgctgacaatatcaccgtgaaaaccagtgagtttgtactggaggctgaccgcacgcgaattaacagcgaagt

SEQ ID NO: 720988 - DNA, 75 bp, synthetic construct
  source 1..75: mol_type = other DNA
gacgtcggcggaagcctgcgtgacagaacatcctgacggaggctggtttgaatacgaaccagccaccgggcgctg

SEQ ID NO: 720989 - DNA, 75 bp, synthetic construct
  source 1..75: mol_type = other DNA
aaccgaatctggaaaccgcgcaggcctatgtggcaagcggcgaatattactggaacagcggcatgttcctgttcc

SEQ ID NO: 720990 - DNA, 75 bp, synthetic construct
  source 1..75: mol_type = other DNA
gggcttgtcggtacagatgcatcatcaccgcgcagaacactgggtggtggttgcgggaacggcaaaagtcactat

SEQ ID NO: 720991 - DNA, 75 bp, synthetic construct
  source 1..75: mol_type = other DNA
accgatggatgcgggctggagtgatgtgggctcttgggcttcgttatgggagagctgcactcacacagctgaagg

SEQ ID NO: 720992 - DNA, 75 bp, synthetic construct
  source 1..75: mol_type = other DNA
attaatgacctgaaaaacaaccaaatggaccatgaacgtttgctgggatggctggcattccacagcgcgtgggaa

SEQ ID NO: 720993 - DNA, 75 bp, synthetic construct
  source 1..75: mol_type = other DNA
ccggatctcgattttattcgtgtggatgaagaagcgtttcttgcctgcccggaagagtcggtggattacgcggtt

SEQ ID NO: 720994 - DNA, 75 bp, synthetic construct
  source 1..75: mol_type = other DNA
tatcgtccgtggggcaaatatgactctatcgacgcgggcgaccgctaccaggtgaaacgcatcaccgtgaaaccg

SEQ ID NO: 720995 - DNA, 75 bp, synthetic construct
  source 1..75: mol_type = other DNA
gtatgtcaggggcatcaaatctatggtgatcgaggcagcagacagcgtcacctacaaaacccgtgagtttgtggt

SEQ ID NO: 720996 - DNA, 75 bp, synthetic construct
  source 1..75: mol_type = other DNA
gtatgtaaggggcatcaaatcaatggtcattgaggccgctgacaatatcaccatgaaaaccagtgagtttgtgct

SEQ ID NO: 720997 - DNA, 75 bp, synthetic construct
  source 1..75: mol_type = other DNA
tgcgccttatcaccaacctgatccgcacaggtgtagtcaccgaagtggaccgggagaactggctttgccgggtga

SEQ ID NO: 720998 - DNA, 75 bp, synthetic construct
  source 1..75: mol_type = other DNA
cgaagtgtatcgcccgtggggcaaatatgactctatcgacgcaggcgaccgctaccaggtgaaacgcatcaccgt

SEQ ID NO: 720999 - DNA, 75 bp, synthetic construct
  source 1..75: mol_type = other DNA
cggcggagcgatgagttctaacgggatcgtggttgatgcgcatcagcatactggcgtcctgaaaggcggcgatac

SEQ ID NO: 721000 - DNA, 75 bp, synthetic construct
  source 1..75: mol_type = other DNA
attcgaatcagttcgcgccgccgtcgacgtcggcggacgcctgcgtgacagaatatcctgacggtggctggtttg

SEQ ID NO: 721001 - DNA, 75 bp, synthetic construct
  source 1..75: mol_type = other DNA
cagcggagataccggactgcgcgaagtccagcgtctggcagaagctaacgactttccccccgtcgatgaaaccaa

SEQ ID NO: 721002 - DNA, 75 bp, synthetic construct
  source 1..75: mol_type = other DNA
ggcaccgaagagatttatttcgccacgttccatctcggcgtggatggcggcatggaagttaccgccagccataat

SEQ ID NO: 721003 - DNA, 75 bp, synthetic construct
  source 1..75: mol_type = other DNA
ggcaccgaagagatttatttcgccacgttccatctcggcgtggatggcggcatggaagttactgccagccataac

SEQ ID NO: 721004 - DNA, 75 bp, synthetic construct
  source 1..75: mol_type = other DNA
cagcggggataccggactgcgcgatgtccagcgtctggcagaagcaaacgactttccccccgtcgatgaaaccaa

SEQ ID NO: 721005 - DNA, 75 bp, synthetic construct
  source 1..75: mol_type = other DNA
cagcggcgataccggactgcgcgacgtccagcgtctggcagaagctaacgactttccccccgtcgatgaaaccaa

SEQ ID NO: 721006 - DNA, 75 bp, synthetic construct
  source 1..75: mol_type = other DNA
cagcggagataccggactgcgcgatgtccagcgtctggcagaagcgaacgactttccccccgtcgatgaaaccaa

SEQ ID NO: 721007 - DNA, 75 bp, synthetic construct
  source 1..75: mol_type = other DNA
acacccgcaatgcggtcatcaaacacggcgcggatatgggcattgcctttgatggcgattttgaccgctgtttcc

SEQ ID NO: 721008 - DNA, 75 bp, synthetic construct
  source 1..75: mol_type = other DNA
accgaaccggtggtgcgcctgaatgtggaatcacgcggtgatgtaaagctaatggaaaagaaaactaaagctctt

SEQ ID NO: 721009 - DNA, 75 bp, synthetic construct
  source 1..75: mol_type = other DNA
aactccgggaacggcgcagcgggtccggtagttgacgccatcgaagcccgctttaaagccctcggcgcacccgtg

SEQ ID NO: 721010 - DNA, 75 bp, synthetic construct
  source 1..75: mol_type = other DNA
ggcaccgaagagatttatttcgccacgttccatctcggcgtggatggcggcatcgaagttacggccagccataat

SEQ ID NO: 721011 - DNA, 75 bp, synthetic construct
  source 1..75: mol_type = other DNA
ggcaccgaagagatttatttcgccacgttccatctcggcgtggatggcggcatcgaagttactgccagccataag

SEQ ID NO: 721012 - DNA, 75 bp, synthetic construct
  source 1..75: mol_type = other DNA
ggcaccgaagagatttatttcgccacgttccatctcggcgtggatggcggcattgaagttacagccagccataaa

SEQ ID NO: 721013 - DNA, 75 bp, synthetic construct
  source 1..75: mol_type = other DNA
cagcggggataccggactgcgcgaggtccagcgtctggcagaagctaacgactttccccccgtcgatgaaaccaa

SEQ ID NO: 721014 - DNA, 75 bp, synthetic construct
  source 1..75: mol_type = other DNA
acggtatcagtattgaataccctgagtggcgctttaacctgcgcacgtccaacacggagccggtggtgcgtctga

SEQ ID NO: 721015 - DNA, 75 bp, synthetic construct
  source 1..75: mol_type = other DNA
ctggtggcggagctgctgtgtctgaagaacagctcgctgaaatcgctggtggcggaccgccagaaggcgttccct

SEQ ID NO: 721016 - DNA, 75 bp, synthetic construct
  source 1..75: mol_type = other DNA
cgacagcgggatgatcccgtggctgctggtggcggagctgctgtgcctgaagaacagctcgctgaaatcgctggt

SEQ ID NO: 721017 - DNA, 75 bp, synthetic construct
  source 1..75: mol_type = other DNA
tagttctcctttaccttgctggtgtagttttaatgggcgctcttcagaaagctgtaggtagtgacggcgttattt

SEQ ID NO: 721018 - DNA, 75 bp, synthetic construct
  source 1..75: mol_type = other DNA
tcgcctgtgttctcttatgggagttccgaatgtccatatattatccgttatagcaccgagctgcacgacgtcatt

SEQ ID NO: 721019 - DNA, 75 bp, synthetic construct
  source 1..75: mol_type = other DNA
agtttatcgagggctactacattgtcggccttctggcagaagcgttcctcgaaaaaaatcccggcgcgaagatca

SEQ ID NO: 721020 - DNA, 75 bp, synthetic construct
  source 1..75: mol_type = other DNA
gcattgatgcggcgcgccggatgtttgctgaaaaagtagcgatgtataccggtctgtctgttgatgctgtcacgg

SEQ ID NO: 721021 - DNA, 75 bp, synthetic construct
  source 1..75: mol_type = other DNA
catgcgtcaggacgacgcggtttatggcggtgaaatgagcgctcaccactacttccgtgattttgcctactgcga

SEQ ID NO: 721022 - DNA, 75 bp, synthetic construct
  source 1..75: mol_type = other DNA
gaacttgttggtcaacgaatgcaggctttccctgcatcaggtgagattaaccgcaagcttggaaatgctcaggta

SEQ ID NO: 721023 - DNA, 75 bp, synthetic construct
  source 1..75: mol_type = other DNA
cttatgacatccgtggtgaactgggtgaggaactgaacgaggacatcgcctaccgtatcggtcgcgcctacggcg

SEQ ID NO: 721024 - DNA, 75 bp, synthetic construct
  source 1..75: mol_type = other DNA
caatcagtttgaagcgttgccggcagaggttcgccaggacatgcagcagcgcattgatgcggcgcgccggatgtt

SEQ ID NO: 721025 - DNA, 75 bp, synthetic construct
  source 1..75: mol_type = other DNA
ggggctgaggcgcaggctgaaaaactggcggcctgcccgggaatgaccgtggagaatgcccgggctgtgctggct

SEQ ID NO: 721026 - DNA, 75 bp, synthetic construct
  source 1..75: mol_type = other DNA
tcgtggtctcccggttcgcggtcagcgcaccaagaccaacgcacgtacccgtaagggtccgcgcaaaccgatcaa

SEQ ID NO: 721027 - DNA, 75 bp, synthetic construct
  source 1..75: mol_type = other DNA
aggctgaacagctggctgcctgcccgggaatgactgtggagagcgcccgggctgtgctggctgcgggatcaggta

SEQ ID NO: 721028 - DNA, 75 bp, synthetic construct
  source 1..75: mol_type = other DNA
tcggcatcgcgacggctggtcacgcaaacggccagaaccggctccatcggggtaatgatggcgcacagcaactat

SEQ ID NO: 721029 - DNA, 75 bp, synthetic construct
  source 1..75: mol_type = other DNA
gtactgaagccgccgtttatgacggtcaggccggaatagatatcggactggcggatgaattaatcaatgcgtcag

SEQ ID NO: 721030 - DNA, 75 bp, synthetic construct
  source 1..75: mol_type = other DNA
cagcggtgataccggactgcgcgacgtccagcgtctggcagaagccaacgattttcctcccgtcgatgaaaccaa

SEQ ID NO: 721031 - DNA, 75 bp, synthetic construct
  source 1..75: mol_type = other DNA
tatggctctggatgaggcaaaaggggctgaggcgcaggctgaaaaactggcggcgtttcccggaatgacggtgga

SEQ ID NO: 721032 - DNA, 75 bp, synthetic construct
  source 1..75: mol_type = other DNA
aaggggctgaggcgcaggctgaacagctggctgcctgcccgggcatgaccgtggagaatgcccgggctgtgctgg

SEQ ID NO: 721033 - DNA, 75 bp, synthetic construct
  source 1..75: mol_type = other DNA
cggcaacgctggcggcgatgccggatatgacggtggaaaaagcccgccctgtcctggctgcttcaccgcaagcgg

SEQ ID NO: 721034 - DNA, 75 bp, synthetic construct
  source 1..75: mol_type = other DNA
tggcagaggtcgggacgatctcgattatctcctggctggttacagctgtaggctcaatggcgctggcctgggcct

SEQ ID NO: 721035 - DNA, 75 bp, synthetic construct
  source 1..75: mol_type = other DNA
gtcacacaaacggcaaaaattggttcgattggtgtgatgatggcgcataccagttacgagaaacaactggcacag

SEQ ID NO: 721036 - DNA, 75 bp, synthetic construct
  source 1..75: mol_type = other DNA
tcgccggcgcgtttgataccgctgatttactcgcacgggcgcgagagcaaaaaccggtgtgggcgctggccagcg

SEQ ID NO: 721037 - DNA, 75 bp, synthetic construct
  source 1..75: mol_type = other DNA
tcgccgcccgggcgtttaatcaaccgcttttactggaacccgtctacgcacgggtatttttttcggcgctgagcg

SEQ ID NO: 721038 - DNA, 75 bp, synthetic construct
  source 1..75: mol_type = other DNA
tgcgtgacgcttacgttgatcacctgttcggttatatcaacgtcaaaaaccttactccgctgaaacttgtgatca

SEQ ID NO: 721039 - DNA, 75 bp, synthetic construct
  source 1..75: mol_type = other DNA
atggcagcattgtcgcggaaaatggtcaggtttatctggctacgccgtgacgtgctcaattccgagtggaaagat

SEQ ID NO: 721040 - DNA, 75 bp, synthetic construct
  source 1..75: mol_type = other DNA
gatattggtatgtccggcaccgaagagatctatttcgccacgttccatctcggtgtggatggcggcatcgaagtt

SEQ ID NO: 721041 - DNA, 75 bp, synthetic construct
  source 1..75: mol_type = other DNA
acttccgtgatttcgcttactgcgacagcggcatgatcccgtggctgctggtagccgaactggtgtgcctgaaag

SEQ ID NO: 721042 - DNA, 75 bp, synthetic construct
  source 1..75: mol_type = other DNA
tactataacgtgcgcattggtggcgatatggcgttgctcaaggggatgatgcgcctgttaattgagcgcgatgat

SEQ ID NO: 721043 - DNA, 75 bp, synthetic construct
  source 1..75: mol_type = other DNA
tgttaaatccgtagcgaatgcagtacgtaagcagatggatatacgccaggatgttattgccatgtttgacatgaa

SEQ ID NO: 721044 - DNA, 75 bp, synthetic construct
  source 1..75: mol_type = other DNA
ttgaaatatgatgccgtcagcgactgttacaagccattaagctggcaacaagctttcgacgaaattggcgcacgc

SEQ ID NO: 721045 - DNA, 75 bp, synthetic construct
  source 1..75: mol_type = other DNA
ggtggcacgccggtaatgtcgaaaacaggacacgcctttattaaagaacgtatgcgcaaggaagacgccatctac

SEQ ID NO: 721046 - DNA, 75 bp, synthetic construct
  source 1..75: mol_type = other DNA
tgtgcgcgagcatcaggccgacatggggattgcctttgacggcgacttcgatcgctgcttcctgttcgatgacga

SEQ ID NO: 721047 - DNA, 75 bp, synthetic construct
  source 1..75: mol_type = other DNA
tggtgaactccggaaacggggctgcggggcacgtgattgatgaggtggagaaacgcttcgcggcggctggggtgc

SEQ ID NO: 721048 - DNA, 75 bp, synthetic construct
  source 1..75: mol_type = other DNA
tggcagaagccaacgactttcctcccgttgatgcaaccaaacgcggtcgctatcagcaaatcaatctgcgtgacg

SEQ ID NO: 721049 - DNA, 75 bp, synthetic construct
  source 1..75: mol_type = other DNA
actgacagccccagtgaaacgctggcagccaccgcaaaagcggtgaaaattgcgatggataatgccaatgcccgt

SEQ ID NO: 721050 - DNA, 75 bp, synthetic construct
  source 1..75: mol_type = other DNA
aatggaaataaaaactaaagagataatggctctattagataataataattcagggggccgagctgagaatgttta

SEQ ID NO: 721051 - DNA, 75 bp, synthetic construct
  source 1..75: mol_type = other DNA
tacaacggcaagggtgatgcttatgcaaacccgttgtcagacgatgactggcagcgactggctaaggtgaaggat

SEQ ID NO: 721052 - DNA, 75 bp, synthetic construct
  source 1..75: mol_type = other DNA
gtgacgggggttaaggctggaaaagtgagtatccccgtgatttccggtaatggtcagtttgccacggtagctgaa

SEQ ID NO: 721053 - DNA, 75 bp, synthetic construct
  source 1..75: mol_type = other DNA
cagagcggtttccgccgatccgtcgaaagccaccattagtgtgaaagatatgacaattacggtaaacggcgtggc

SEQ ID NO: 721054 - DNA, 75 bp, synthetic construct
  source 1..75: mol_type = other DNA
gtggcggaagaacgcagcgaaattacgccggtcactgcgattaaggtgacgccgacatccggtacggtggcaaaa

SEQ ID NO: 721055 - DNA, 75 bp, synthetic construct
  source 1..75: mol_type = other DNA
aaaggatctgacgccgggcgagatgacggcagaaccctacgatgataactacctggatgatgaagacgcggactg

SEQ ID NO: 721056 - DNA, 75 bp, synthetic construct
  source 1..75: mol_type = other DNA
atcacccgcacggtgaaggtcaccaatgtgggacgcccgtcgatggctgaagatcgcagtacggtgacggcggca

SEQ ID NO: 721057 - DNA, 75 bp, synthetic construct
  source 1..75: mol_type = other DNA
tgaaagggaacacgatcacggtgaaaggtgttgcggccggtaaagcgcagatccctgttgtcactggcaatggtg

SEQ ID NO: 721058 - DNA, 75 bp, synthetic construct
  source 1..75: mol_type = other DNA
gcagcgcgatttgatcgcctggtttgacagcagtgagagccgagcctacaaaatccgtttcccgaacggcacggt

SEQ ID NO: 721059 - DNA, 75 bp, synthetic construct
  source 1..75: mol_type = other DNA
gatccacagactgccacggtgaccctgaacgggcttgtggccacggtgaaaggcgtgaagcagggcagtgtcagc

SEQ ID NO: 721060 - DNA, 75 bp, synthetic construct
  source 1..75: mol_type = other DNA
ctgcgattaaggtgacgccgacatccggtacggtggcaaaagggaaaacaaccaccctgacggtttcttttgagc

SEQ ID NO: 721061 - DNA, 75 bp, synthetic construct
  source 1..75: mol_type = other DNA
gcagcgtgatttgattgcctggtttgacagcagcgagacccgggcctacaaaatccgcttcccgaacggcacggt

SEQ ID NO: 721062 - DNA, 75 bp, synthetic construct
  source 1..75: mol_type = other DNA
aggcgtgaagcagggcagtgtcagcattgtgggcatgacttctgacggcgagtttgtggcagtggctacggtggc

SEQ ID NO: 721063 - DNA, 75 bp, synthetic construct
  source 1..75: mol_type = other DNA
gaacgtcggtgtggtgaccatgaccgacaataacgtagaaattcactgcctgatccgttctctgatcgacagcgg

SEQ ID NO: 721064 - DNA, 75 bp, synthetic construct
  source 1..75: mol_type = other DNA
gaaagcggggatgtgcgggcctataaaatccgtttccaatggcacggtggatgtgttccgtggctgggtcagcag

SEQ ID NO: 721065 - DNA, 75 bp, synthetic construct
  source 1..75: mol_type = other DNA
gcgaaagaagtgatcacccgcacggtgaaagtcactaacgtgggtaaaccttctgtagcggaagaacgcagcaaa

SEQ ID NO: 721066 - DNA, 75 bp, synthetic construct
  source 1..75: mol_type = other DNA
atatgaccttgctaacgcaaaatataccgctcaggacgcaacgacggcacgaaaagggatagttcagctcagtag

SEQ ID NO: 721067 - DNA, 75 bp, synthetic construct
  source 1..75: mol_type = other DNA
taacgcgcttgcgggtaagcaaccgaaagatgccaccctgacggcgctggccgggcttgctactgcggcagacag

SEQ ID NO: 721068 - DNA, 75 bp, synthetic construct
  source 1..75: mol_type = other DNA
cgggccttaggtgttgagcttgagtcagagcggtttaaccagacagtgaaagagataaacgagctggtgggaaaa

SEQ ID NO: 721069 - DNA, 75 bp, synthetic construct
  source 1..75: mol_type = other DNA
tttcaacggcggcacactgcgtaacgccatcccgcgtgaagcctttgcgaccattgctgtcgcagctgataaagt

SEQ ID NO: 721070 - DNA, 75 bp, synthetic construct
  source 1..75: mol_type = other DNA
gatggcgaatgggttaaagcgcgcggcaccacgctcggtgcagataacggcattggcatggcgtctgcgctggcg

SEQ ID NO: 721071 - DNA, 75 bp, synthetic construct
  source 1..75: mol_type = other DNA
aatacattgttggttgggcaaaagagaaaggtttccatgtcgaacgcgatcaggtgggtaatatcctgattcgta

SEQ ID NO: 721072 - DNA, 75 bp, synthetic construct
  source 1..75: mol_type = other DNA
atggcaacaccaaatccccttgagccggtaaaaggtgccggtaccactctgtgggtttacaacggtcagggtgac

SEQ ID NO: 721073 - DNA, 75 bp, synthetic construct
  source 1..75: mol_type = other DNA
ggtgtgtctgtcacgctttccgaattgtctgcgctgcagcgtatcgagcatcttgccctcctgaaacggcgtgca

SEQ ID NO: 721074 - DNA, 75 bp, synthetic construct
  source 1..75: mol_type = other DNA
ctgggtttacaccggtaagggcgatgcttatgcaaacccgctgtcagatgatgagtggactcgcctggcaaaaat

SEQ ID NO: 721075 - DNA, 75 bp, synthetic construct
  source 1..75: mol_type = other DNA
acagaaaaaactgattcagttgtttgattccggtgaagttcgtgcattccgcatcaaataccctaacggtaccgt

SEQ ID NO: 721076 - DNA, 75 bp, synthetic construct
  source 1..75: mol_type = other DNA
gcgggggcgattctgactgaaaccatcttctcgtggccgggtctggggcgctggttgattgacgcactgcaacgc

SEQ ID NO: 721077 - DNA, 75 bp, synthetic construct
  source 1..75: mol_type = other DNA
caatgctaaacgcccaccacagaaacgggataccttcactgatttacacaacgcggctgacaaagtcctggatga

SEQ ID NO: 721078 - DNA, 75 bp, synthetic construct
  source 1..75: mol_type = other DNA
aatggtagataaaaagatatttgcacaatatgccagagcttcacattgttcgatagcttacaattcaattcgtca

SEQ ID NO: 721079 - DNA, 75 bp, synthetic construct
  source 1..75: mol_type = other DNA
gcgggtgagtgatgtggtgtttcttgacgacaccaatccattaaccggttttatgctaatcgacaccgctatctg

SEQ ID NO: 721080 - DNA, 75 bp, synthetic construct
  source 1..75: mol_type = other DNA
gcaggcgcgattctgaccgaaaccatcttctcgtggcccggtttggggcgctggttgattgacgcgctgcaacgc

SEQ ID NO: 721081 - DNA, 75 bp, synthetic construct
  source 1..75: mol_type = other DNA
gggtgaagacggtaactttatcgatgccgtcgcccatatgatcttgcccgccattgtgctgggtactatcccgct

SEQ ID NO: 721082 - DNA, 75 bp, synthetic construct
  source 1..75: mol_type = other DNA
atcactgacatgcagcagcgccagcgtgatgttgctgcactcgatgaaaaatatacaaaggagttagcggatgcg

SEQ ID NO: 721083 - DNA, 75 bp, synthetic construct
  source 1..75: mol_type = other DNA
aaagctgaaaatgatgctcttcggcgcaagcttgataatggtggcagggtgctcgtcaaaggaaagtgtcaagtg

SEQ ID NO: 721084 - DNA, 75 bp, synthetic construct
  source 1..75: mol_type = other DNA
agagcaccacgctgaccgtggcattccagccggaaggcgcaaccgacaagagcttccgtgcggtgtctgcggata

SEQ ID NO: 721085 - DNA, 75 bp, synthetic construct
  source 1..75: mol_type = other DNA
tgatgttcctgtgctgttttttctgggttcgtgaacgggtgccgctctccacaatggggaaatttaccctgcgcg

SEQ ID NO: 721086 - DNA, 75 bp, synthetic construct
  source 1..75: mol_type = other DNA
atgagcagagtaaccgcgattatctccgctctgattatctgcatcgtcgtctgtctgtcgtgggctgttaatcat

SEQ ID NO: 721087 - DNA, 75 bp, synthetic construct
  source 1..75: mol_type = other DNA
ccattgtactgggtacgataccgctggcagtcattgtgcgtatgacgcgctcctcgatgctggaagtgctgggcg

SEQ ID NO: 721088 - DNA, 75 bp, synthetic construct
  source 1..75: mol_type = other DNA
gatgagggcgattcaagagcctacaaaattcgttttcccaatggcacggtggatgtgttccgtggctgggtgagc

SEQ ID NO: 721089 - DNA, 75 bp, synthetic construct
  source 1..75: mol_type = other DNA
attcccatcatgagcaatggcggcgcttttgctgcagtggccaccgtaacggtcaccgtccctgcagcacaaccc

SEQ ID NO: 721090 - DNA, 75 bp, synthetic construct
  source 1..75: mol_type = other DNA
catggcgacaggtaaggtgcagatccctgtgatgtccggtaatggtcagttcgctgcagtggctgaaattaccgt

SEQ ID NO: 721091 - DNA, 75 bp, synthetic construct
  source 1..75: mol_type = other DNA
cgatccgtcaacgggaaccattgctgtgaaagatatggcgatcactgtgacgggggttaaggctggaaaagtgag

SEQ ID NO: 721092 - DNA, 75 bp, synthetic construct
  source 1..75: mol_type = other DNA
ggttaaggatggaaaagtcagcatccttgtgatttccggtaatggtcagtttgctgcggtggctgaaattaccgt

SEQ ID NO: 721093 - DNA, 75 bp, synthetic construct
  source 1..75: mol_type = other DNA
tcagcaggaccttgtgatctggttcgatgagggcaccgtgaggggatataaaatcaaatacccaaatggtgttgt

SEQ ID NO: 721094 - DNA, 75 bp, synthetic construct
  source 1..75: mol_type = other DNA
gccgcatcccggtttgggaagagttcgtgccgcgctttcaggccacgctggaacttggcgtctgcgcgatgattt

SEQ ID NO: 721095 - DNA, 75 bp, synthetic construct
  source 1..75: mol_type = other DNA
atgactggacgcgactggcgaaaatcaaggatctgacaccgggagaaatgacggcagagtcctacgacgataact

SEQ ID NO: 721096 - DNA, 75 bp, synthetic construct
  source 1..75: mol_type = other DNA
gccagccagtgcttccgtagtgaaagggcagagcaccacgctgaccgtggcatttcagccggaaggtgcaaccga

SEQ ID NO: 721097 - DNA, 75 bp, synthetic construct
  source 1..75: mol_type = other DNA
caggagataccagttttacgctggcctggaaaccgggagaagaaggtcagaaagggcttataggctggtttgaaa

SEQ ID NO: 721098 - DNA, 75 bp, synthetic construct
  source 1..75: mol_type = other DNA
gtgcagtattatccgggtaagcatccctgcgaaaaaccggcggatatgttgcgtcagataatttctgccagcagt

SEQ ID NO: 721099 - DNA, 75 bp, synthetic construct
  source 1..75: mol_type = other DNA
aacattaccaggggccatatcggccaaaaaatgatggctatgtggcaaaggggcgcgagcttaaacagcatgtca

SEQ ID NO: 721100 - DNA, 75 bp, synthetic construct
  source 1..75: mol_type = other DNA
aattacaggccctgtttgcccgggtggcagaagagaagcatcagcgcggtgatagatatgccggcagggcggggt

SEQ ID NO: 721101 - DNA, 75 bp, synthetic construct
  source 1..75: mol_type = other DNA
ttggcgtgacggcgcaggtgtcgtacacggatgtgtggacgcataaaccggtgcagtactatcccgggaaacatc

SEQ ID NO: 721102 - DNA, 75 bp, synthetic construct
  source 1..75: mol_type = other DNA
ccgggagatttggttgccgactttttcatggggtcaggctccataataaaagcagcgctggcacttgggggcatg

SEQ ID NO: 721103 - DNA, 75 bp, synthetic construct
  source 1..75: mol_type = other DNA
agtctctacctgttctgtggtcatcgcctggcatctgatatcgaaatcatgatgcgtgagcgctttaatgtgctg

SEQ ID NO: 721104 - DNA, 75 bp, synthetic construct
  source 1..75: mol_type = other DNA
tacggatgtctggacgcataaacctgtacagttttatccgggcaaacatccctgtgaaaaaccggcggatatgtt

SEQ ID NO: 721105 - DNA, 75 bp, synthetic construct
  source 1..75: mol_type = other DNA
aagggcgacgatgattacctgaaatggctggaccagtgtctggcgcagttctggcgggtgctgaaacctgccgga

SEQ ID NO: 721106 - DNA, 75 bp, synthetic construct
  source 1..75: mol_type = other DNA
taccgacgtctggacgcataaacccgttcagttctacccgggtaaacatccgtgtgagaagcctgcggatatgct

SEQ ID NO: 721107 - DNA, 75 bp, synthetic construct
  source 1..75: mol_type = other DNA
tttttatggggtcgggatcaacaataaaagcagcattatcgctgggacggcatgcaataggtgtggagcaggaag

SEQ ID NO: 721108 - DNA, 75 bp, synthetic construct
  source 1..75: mol_type = other DNA
aagccccaccaccagctgctggagacgtatacttcactgaaccggcagtatgcggaactgcagagtgaatataag

SEQ ID NO: 721109 - DNA, 75 bp, synthetic construct
  source 1..75: mol_type = other DNA
cctggaatttatccagaccttaccggaaaactctgtcgatctgatagtcacagacccgccgtactttaaagtgaa

SEQ ID NO: 721110 - DNA, 75 bp, synthetic construct
  source 1..75: mol_type = other DNA
cagggcgctggaacgggtgcaacaaggaaagcctgcgggcgtatttcccggcaacagagcgcattctgtttgcag

SEQ ID NO: 721111 - DNA, 75 bp, synthetic construct
  source 1..75: mol_type = other DNA
ttctaacgggatcgtggttgatgcgcatcagcatactggcgtcctgaaaggcggcgacacaaccggaggtccggt

SEQ ID NO: 721112 - DNA, 75 bp, synthetic construct
  source 1..75: mol_type = other DNA
ggaagctgaccgcacgcgtattaacagcgaagtagtaatcaatggtggcgttacccagggcggcggtgcaatgag

SEQ ID NO: 721113 - DNA, 75 bp, synthetic construct
  source 1..75: mol_type = other DNA
gtgaccgaagtggaccggaacaaatggctgtgccgggtgaaggtaggcgagcttgaaaccaactggattaactgg

SEQ ID NO: 721114 - DNA, 75 bp, synthetic construct
  source 1..75: mol_type = other DNA
ggggcatcaaatcaatggtcattgagaccgctgacaaaatcaccgtgaaaaccagtgagtttgttctggaggctg

SEQ ID NO: 721115 - DNA, 75 bp, synthetic construct
  source 1..75: mol_type = other DNA
ggggcatcaaatcaatggtcattgagaccgctgacaaaatcaccttgaaaaccagtgagtttgtgctggaggctg

SEQ ID NO: 721116 - DNA, 75 bp, synthetic construct
  source 1..75: mol_type = other DNA
tgcgccttatcaccaacctgatccgcacaggggtagtcaccgaagtggacagggaaaactggctttgtcgggtga

SEQ ID NO: 721117 - DNA, 75 bp, synthetic construct
  source 1..75: mol_type = other DNA
gtggtaacagataaccgctcactgatgagtagtgctcatcagaaggcattcagtcttgcaacacagttacctcct

SEQ ID NO: 721118 - DNA, 75 bp, synthetic construct
  source 1..75: mol_type = other DNA
aaaggcggctatggcgcttgggcgtcgtgcaattggtgttgagctggagaccggacgttttgagcagacagtcag

SEQ ID NO: 721119 - DNA, 75 bp, synthetic construct
  source 1..75: mol_type = other DNA
tgatgcgcgtgaatcactgggaataacgtcaaaacagatagcggaagccaccggaaagaaaaacatggcttcgca

SEQ ID NO: 721120 - DNA, 75 bp, synthetic construct
  source 1..75: mol_type = other DNA
ttctaacgggatcgtggttgatgcgcatcagcatactggcgtcctgaaaggcggcgatacaaccggaggcccggt

SEQ ID NO: 721121 - DNA, 75 bp, synthetic construct
  source 1..75: mol_type = other DNA
tggcccagctgatttcttactttcgtgatgcacgcgcggccctggggataacggcaaaacagattgcagatgcca

SEQ ID NO: 721122 - DNA, 75 bp, synthetic construct
  source 1..75: mol_type = other DNA
gagttgagcggcgtggacgtgatgactgaagagcttgagtcccgaatcaaaagcattctgacaggtaaagcctga

SEQ ID NO: 721123 - DNA, 75 bp, synthetic construct
  source 1..75: mol_type = other DNA
tggttgctgatttctttatgggatccggttccacaataaaagcagcaatggcgctggggcgtcgggccttaggtg

SEQ ID NO: 721124 - DNA, 75 bp, synthetic construct
  source 1..75: mol_type = other DNA
atgagtaaggaatatatgaacgatggttcattaagtgaaaaatggaaatatcgctttagtttttatgatcaacat

SEQ ID NO: 721125 - DNA, 75 bp, synthetic construct
  source 1..75: mol_type = other DNA
agcattaccaggggccgtataaaccaaagagcgacgggtacgctgagaagggaagcgagctgaagcagcatgtaa

SEQ ID NO: 721126 - DNA, 75 bp, synthetic construct
  source 1..75: mol_type = other DNA
tggcgttaacattctgggaattgttgtagtagcctatgttgctgttaacacgaataaatggttctatgagaaaga

SEQ ID NO: 721127 - DNA, 75 bp, synthetic construct
  source 1..75: mol_type = other DNA
cgaagggcagggcactgaaacagcatgtgatggctccgctgatttcttactttcgtgatgcgcgtgcggctctgg

SEQ ID NO: 721128 - DNA, 75 bp, synthetic construct
  source 1..75: mol_type = other DNA
aacaaggaaagcctgcgggcgtatttccccgccacagagcgcattctgttcgcggaacattatcaggggccgtat

SEQ ID NO: 721129 - DNA, 75 bp, synthetic construct
  source 1..75: mol_type = other DNA
cctgtgaaaaaccggcggagatgctgcggcagataatttgtgcgagcagtcgtcctggtgacatggtggcggatt

SEQ ID NO: 721130 - DNA, 75 bp, synthetic construct
  source 1..75: mol_type = other DNA
agcattatcaggggccatataagccgaaaagcgacggatttgctgagaaaagcaacgaggtcaaacagcacgtca

SEQ ID NO: 721131 - DNA, 75 bp, synthetic construct
  source 1..75: mol_type = other DNA
ccggaaagaaaaacatggcgtcacactggtttggtgcaagccaatggcaactaccaaatgaagtggactatagaa

SEQ ID NO: 721132 - DNA, 75 bp, synthetic construct
  source 1..75: mol_type = other DNA
gtgctgagttaatcaacgctgatagcctgcattacgtcgccaccctcccggataactctattgatcttatagtta

SEQ ID NO: 721133 - DNA, 75 bp, synthetic construct
  source 1..75: mol_type = other DNA
gcctggcatctgatatcgaaatcatgatgcgtgaacgcttcagtgtgctgaaccatattatctgggcgaagcctt

SEQ ID NO: 721134 - DNA, 75 bp, synthetic construct
  source 1..75: mol_type = other DNA
cgaacaaatggttttatgagaaagaggtaggtaatgactccaacttattgatagtgttttatgttcagataatgc

SEQ ID NO: 721135 - DNA, 75 bp, synthetic construct
  source 1..75: mol_type = other DNA
aacactatctggagccgtatcgcccgaaagatgatggttatgaggcgaagggcagggcactgaaacagcatgtga

SEQ ID NO: 721136 - DNA, 75 bp, synthetic construct
  source 1..75: mol_type = other DNA
gcagcagataatcaacgcgagcagtcgtccgggagacctggttgcagattttttatgggttcaggttcaacggta

SEQ ID NO: 721137 - DNA, 75 bp, synthetic construct
  source 1..75: mol_type = other DNA
ggataacggcaaaacagattgcagatgccacaggaaagaaaaacatggtgtcgcactggttcagtgccagtcagt

SEQ ID NO: 721138 - DNA, 75 bp, synthetic construct
  source 1..75: mol_type = other DNA
ctgggacgtcgtgcaactggcgttgaactggagactgaacgttttgagcagacggtgcgggaagtacaggattta

SEQ ID NO: 721139 - DNA, 75 bp, synthetic construct
  source 1..75: mol_type = other DNA
gaaccggcagtatatggaactgctgagtgaatataaaaatttgcggcggtatttcggtgtgacggtgcaggtgcc

SEQ ID NO: 721140 - DNA, 75 bp, synthetic construct
  source 1..75: mol_type = other DNA
gaactggaaaagcctcaccaccagctgctggagacgtatacttcactgaaccggcagtatgcggaactgcagagt

SEQ ID NO: 721141 - DNA, 75 bp, synthetic construct
  source 1..75: mol_type = other DNA
ccgtacacggatgtgtggacgcataaaccggtgcagtactatcccgggaaacatccgtgcgaaaaaccggcagaa

SEQ ID NO: 721142 - DNA, 75 bp, synthetic construct
  source 1..75: mol_type = other DNA
aaaagcggcgatggcactggggcgtcgtgcgattggtgttgagctggagaccggacgttttgagcagacagtcag

SEQ ID NO: 721143 - DNA, 75 bp, synthetic construct
  source 1..75: mol_type = other DNA
cagacccgccatactttaaagtgaagcccgagggctgggataatcagtggaagggtgacgatgattacctgaaat

SEQ ID NO: 721144 - DNA, 75 bp, synthetic construct
  source 1..75: mol_type = other DNA
cgcgattatctgaaattgcaggcgctgtttgccagggtggcagaagagaaacatcagtgcggtgaactggaaaag

SEQ ID NO: 721145 - DNA, 75 bp, synthetic construct
  source 1..75: mol_type = other DNA
tgcggcagaaaaacaccagcgcggtgaactggagcagccacaccaccagctggtcagcacatacagcgaactgaa

SEQ ID NO: 721146 - DNA, 75 bp, synthetic construct
  source 1..75: mol_type = other DNA
gaaaatcgcgctggaacttggccgccaggctatcggcgttgaactcgaggaggacaggtttagccagacggtgga

SEQ ID NO: 721147 - DNA, 75 bp, synthetic construct
  source 1..75: mol_type = other DNA
cggcattgggcgtagtggcggtaaaagccgttccgcaacagaatcagggggcggcgctggcaacctataccgtgt

SEQ ID NO: 721148 - DNA, 75 bp, synthetic construct
  source 1..75: mol_type = other DNA
ctggaaaagccccaccaccagctggtggatacgtatacgtcactgaaccggcagtatgtggagctgcagagtgaa

SEQ ID NO: 721149 - DNA, 75 bp, synthetic construct
  source 1..75: mol_type = other DNA
acatgccagaaaacggtcatgttatgcgtgacgttgtcacttcctacgcgcaagccgttgatgaaaaactggcac

SEQ ID NO: 721150 - DNA, 75 bp, synthetic construct
  source 1..75: mol_type = other DNA
ggcgatgctactgtcatattcagatatgcaacaagtacaaataatttagttttctacaaaccgacgcagcttgga

SEQ ID NO: 721151 - DNA, 75 bp, synthetic construct
  source 1..75: mol_type = other DNA
ccaaaatggcgagagacaggtcccaatggagatgttaccgtcaaattccggtatggttcaggcaccaataattta

SEQ ID NO: 721152 - DNA, 75 bp, synthetic construct
  source 1..75: mol_type = other DNA
aaatacccgaatattacaatcgcggttgacgcagacggttttggttcagatacctgtgcgcagctggtgcgccgt

SEQ ID NO: 721153 - DNA, 75 bp, synthetic construct
  source 1..75: mol_type = other DNA
agctcaggggtcgtttattctggtggggtatccctggtatatggggaatatcctctttacgttcgccgttaccgg

SEQ ID NO: 721154 - DNA, 75 bp, synthetic construct
  source 1..75: mol_type = other DNA
ctatctctaggccatcgtggtcatgtacacgactatgatgtggagttccgcgagcatgatcataaccacgatcac

SEQ ID NO: 721155 - DNA, 75 bp, synthetic construct
  source 1..75: mol_type = other DNA
gtagccacaaggcggggcaatggaacctattctcaggttttcgacttcgttgaaaaagacgggtttatggaatca

SEQ ID NO: 721156 - DNA, 75 bp, synthetic construct
  source 1..75: mol_type = other DNA
caacaggtggttgaagacgaacaggcatttgtcgtaatgcccgttcgcacattgtttgagatgacccttggcgaa

SEQ ID NO: 721157 - DNA, 75 bp, synthetic construct
  source 1..75: mol_type = other DNA
caccagcgtcattccttttttcacctcgttagaagcacttcaacaggcggttgaagacgaacaggcatttgtcgt

SEQ ID NO: 721158 - DNA, 75 bp, synthetic construct
  source 1..75: mol_type = other DNA
ccacgacagtatgagcacaatgttggtaagttaccgacgtcaatacaaggggataggagttatctatccccataa

SEQ ID NO: 721159 - DNA, 75 bp, synthetic construct
  source 1..75: mol_type = other DNA
gctaatgaagatattggtgccgaaatggcaactttccgagatcaggttctggcggatatcgaaatgccggatctg

SEQ ID NO: 721160 - DNA, 75 bp, synthetic construct
  source 1..75: mol_type = other DNA
gaaattgctggagtacggcggcagggattcgctggagtacatggttaaggtgctgggccagttcccgcgtgcaat

SEQ ID NO: 721161 - DNA, 75 bp, synthetic construct
  source 1..75: mol_type = other DNA
gttccccaggatgaagtgcttagcgtcgaagacgaagcgcaggttgatgaagctctggcatggcttaatgaataa

SEQ ID NO: 721162 - DNA, 75 bp, synthetic construct
  source 1..75: mol_type = other DNA
actgaatttgttgcccagcggatgcgtgatgcccagcaaaaaggcgagataagcccagacatcaacacgtcaatg

SEQ ID NO: 721163 - DNA, 75 bp, synthetic construct
  source 1..75: mol_type = other DNA
cagccgttcagaattggacgacgacatacctggcaccgtagagatgtagaagcatggttagataaacaacgagaa

SEQ ID NO: 721164 - DNA, 75 bp, synthetic construct
  source 1..75: mol_type = other DNA
cgcaaacggaagctgaagagctggaagaagtggtgatggggcttatcatcaactccggacaagcgcgcagcctgg

SEQ ID NO: 721165 - DNA, 75 bp, synthetic construct
  source 1..75: mol_type = other DNA
gaagcagggcgattttgccgcagcaaaagccatgatggatcagtcacggatggcattgaatgaagcgcatctggt

SEQ ID NO: 721166 - DNA, 75 bp, synthetic construct
  source 1..75: mol_type = other DNA
cacaggaaaagtttttggtcgctcttgctgataagtcaggtatcgatatatacagcttaaaaattaaggagtcat

SEQ ID NO: 721167 - DNA, 75 bp, synthetic construct
  source 1..75: mol_type = other DNA
tattgttctgcgtatgggttatagctttgattgtgattttatttatatttgttaaatattacaggcgtgtccatt

SEQ ID NO: 721168 - DNA, 75 bp, synthetic construct
  source 1..75: mol_type = other DNA
gatgcccgcaaatgaagatctcctgaatgaagattcagcggcaccggttatccgcttgatcaatgcgattttgag

SEQ ID NO: 721169 - DNA, 75 bp, synthetic construct
  source 1..75: mol_type = other DNA
tctggctgaaaagcgaagcattgatgtgggcagtcacctacatcggcgtgattgtctttgtcggattgacggcgt

SEQ ID NO: 721170 - DNA, 75 bp, synthetic construct
  source 1..75: mol_type = other DNA
caatcgtacaaccccgtgctggcttgcaaacctatatggcgcaagtctatggctggatgacagttggtttgttac

SEQ ID NO: 721171 - DNA, 75 bp, synthetic construct
  source 1..75: mol_type = other DNA
ttcttggcgcattaacgctgtatctcgatttcatcaacctgttcctgatgttgctgcggatcttcggcaaccgcc

SEQ ID NO: 721172 - DNA, 75 bp, synthetic construct
  source 1..75: mol_type = other DNA
ttagctccgcaatcggagagcaggtggcaaagattgctggcgctgtgtggattcataaccttcattctactggtg

SEQ ID NO: 721173 - DNA, 75 bp, synthetic construct
  source 1..75: mol_type = other DNA
aatagaaaaattcatgcttatcaacatgccagactgtattatacatgcagcgggattagttggaggcattcatgc

SEQ ID NO: 721174 - DNA, 75 bp, synthetic construct
  source 1..75: mol_type = other DNA
atttcattgcttaataaaattggttggtcaagtcactttgaactcagagatggcatcagaaagacctataattat

SEQ ID NO: 721175 - DNA, 75 bp, synthetic construct
  source 1..75: mol_type = other DNA
taagaaaagcgatgcggggctatctggaatatctcggcaacatgccgctggcggaacggattacaaatgatgctg

SEQ ID NO: 721176 - DNA, 75 bp, synthetic construct
  source 1..75: mol_type = other DNA
ccgcaggcagggccatttgagattgcaggtgcagatatatttgaacgggtgaagcctgagtgtcgctacaatccg

SEQ ID NO: 721177 - DNA, 75 bp, synthetic construct
  source 1..75: mol_type = other DNA
ctggcggatgcagaaaaggggaattgatccgtttaaagtagagaaaacccctcccgccgtagacgaaaggggtta

SEQ ID NO: 721178 - DNA, 75 bp, synthetic construct
  source 1..75: mol_type = other DNA
tgattcttatctccagcgttatcaggatgttaactattaccggtcttctccgtgcttcaacagtaatgtcacatg

SEQ ID NO: 721179 - DNA, 75 bp, synthetic construct
  source 1..75: mol_type = other DNA
tggtggacgttgcgcgtctccagcgggtctttgcccggcttcagtttgtgggaagcggaaaagacctggcacgca

SEQ ID NO: 721180 - DNA, 75 bp, synthetic construct
  source 1..75: mol_type = other DNA
cagcgatgaagtggagcccggcttccggcgcgatcctgtactgcgtcgtgaacgccgtgaagcccgtgcagctgc

SEQ ID NO: 721181 - DNA, 75 bp, synthetic construct
  source 1..75: mol_type = other DNA
ccgcaacgggaagcttggttttgaaccggaaggttcatatcagcagtttaatgatgtgtttgcagaaatggtggc

SEQ ID NO: 721182 - DNA, 75 bp, synthetic construct
  source 1..75: mol_type = other DNA
aacatgctgcagaacaccgtagcacctgcggcctatatctgggaccaggcaaattcaacaattaataaattgttg

SEQ ID NO: 721183 - DNA, 75 bp, synthetic construct
  source 1..75: mol_type = other DNA
acagcaaagtgctgccgcgacgcttgcacaggcagaggcagataaagatgcgcagcgtactgctgcatctgcggc

SEQ ID NO: 721184 - DNA, 75 bp, synthetic construct
  source 1..75: mol_type = other DNA
atgtatctgccgtcgcttaatcgcgcggatgacctgtttccggttgctgacgttatggcgttctgcggcgactca

SEQ ID NO: 721185 - DNA, 75 bp, synthetic construct
  source 1..75: mol_type = other DNA
ggaaccttacagcaggacgctgataacctggctgacctccagactcaggccagcggagcaacaggacagatgaag

SEQ ID NO: 721186 - DNA, 75 bp, synthetic construct
  source 1..75: mol_type = other DNA
gcttctgcagattcgttcaattttggtggctcagcaaaatgcagcggctacagtagctcaggtacaagcagatag

SEQ ID NO: 721187 - DNA, 75 bp, synthetic construct
  source 1..75: mol_type = other DNA
atgaagttaatgctccgagtactttcatcaccgagagggattttagccgctaaaaaagtcttagtagcttccttc

SEQ ID NO: 721188 - DNA, 75 bp, synthetic construct
  source 1..75: mol_type = other DNA
gtcagaaatggcgtttgagcaggaaaaagagccggatggtgaacgctggcatgactggtcagatccttaccgtga

SEQ ID NO: 721189 - DNA, 75 bp, synthetic construct
  source 1..75: mol_type = other DNA
tgtgcgtgctgtggtgcatcgttctgctaacgctgccgagggaggatatcacgctgggcgtttgtgcggcctatc

SEQ ID NO: 721190 - DNA, 75 bp, synthetic construct
  source 1..75: mol_type = other DNA
atggttacacggacagaccaactactaagaaaagtgatgcggggctatttggaacacctcggcaatataccgctg

SEQ ID NO: 721191 - DNA, 75 bp, synthetic construct
  source 1..75: mol_type = other DNA
gtcgcctggcaacatgaacgcgatgctggcgagctaccgccaacaaaaccaagggctgggcgttgtttatccggg

SEQ ID NO: 721192 - DNA, 75 bp, synthetic construct
  source 1..75: mol_type = other DNA
attaaaattgccttgcgcatgctggagcagggctttgaacgtgagattgtgctggcgacaacccaactcactgat

SEQ ID NO: 721193 - DNA, 75 bp, synthetic construct
  source 1..75: mol_type = other DNA
agcagggtatcgatcttgacctggtgctggcaacaacccagctaaccgaggccgatctcgctccattaagcctgc

SEQ ID NO: 721194 - DNA, 75 bp, synthetic construct
  source 1..75: mol_type = other DNA
cctgaacgcattaaaaattctgctgcgttcgatgatgtgtatcacttcctgttgaatggttcaggacggctggag

SEQ ID NO: 721195 - DNA, 75 bp, synthetic construct
  source 1..75: mol_type = other DNA
ccccagctcaggcactggataaactcgacgcgctgtatgagcaatctgtagtcgcattacgcaacgccattggca

SEQ ID NO: 721196 - DNA, 75 bp, synthetic construct
  source 1..75: mol_type = other DNA
caagttcgatgtgcagttgagatatctaaaactatggttaaacggcataaaaaactgatactcgctgctcttcaa

SEQ ID NO: 721197 - DNA, 75 bp, synthetic construct
  source 1..75: mol_type = other DNA
ggtgtttgcccggcttcagtttgtggggggcggaaaagacctggcccgcagtgtggcgtccagccttctgtcatc

SEQ ID NO: 721198 - DNA, 75 bp, synthetic construct
  source 1..75: mol_type = other DNA
cttcgatattgagattgtcggagtgccgattatgcgcgcgaaagacggtctggcgctcagttcccgtaacggcta

SEQ ID NO: 721199 - DNA, 75 bp, synthetic construct
  source 1..75: mol_type = other DNA
attgctattgcagggcaagaactgaatgaaaaaggtttccgcgccgatgatattcagattcgtgatgctgacacg

SEQ ID NO: 721200 - DNA, 75 bp, synthetic construct
  source 1..75: mol_type = other DNA
ttgatcagtgcatgaacttccatgccgacaacctttctctgcatgaaaacggtatgcgcattaccgcgctggcgg

SEQ ID NO: 721201 - DNA, 75 bp, synthetic construct
  source 1..75: mol_type = other DNA
aggaccttgccgacgccccgatgacgctcgtaacagacgtcggcaaacagtggttaacctcgtttcttaaaaaga

SEQ ID NO: 721202 - DNA, 75 bp, synthetic construct
  source 1..75: mol_type = other DNA
atgccccatttgatgttgtaaaagacatcagcaaaagtttattagcccagttctttaaaaataaactcggtatgg

SEQ ID NO: 721203 - DNA, 75 bp, synthetic construct
  source 1..75: mol_type = other DNA
gctatgctatccgccgttcggagaatttaaattcatgggagtatacgccagatcatcgtggtgaaaccgtctata

SEQ ID NO: 721204 - DNA, 75 bp, synthetic construct
  source 1..75: mol_type = other DNA
tcaccgatccggattccatcggtattcagatcgacggcgacaaggcggttgtcaataacgacggtgacagtgcca

SEQ ID NO: 721205 - DNA, 75 bp, synthetic construct
  source 1..75: mol_type = other DNA
tgatatcaccggcgacagcgcgacggtggacaacaaaggcggcatgactgtcaccgatccggattccatcggtat

SEQ ID NO: 721206 - DNA, 75 bp, synthetic construct
  source 1..75: mol_type = other DNA
gttgaaaatggttttatcagcaacagatatctggaaacaggcaccgcaaaaagcattggtctcaccccaacaagc

SEQ ID NO: 721207 - DNA, 75 bp, synthetic construct
  source 1..75: mol_type = other DNA
ccccggcgatgttcggtaggttgccggaccagcgtgattatgtgcgctggcgggtgagcgcgaacgaaggacagg

SEQ ID NO: 721208 - DNA, 75 bp, synthetic construct
  source 1..75: mol_type = other DNA
acgtcgctggggtggttttttgggtaatgactctaacttattgatagtgttttatgttcagataatgcccgatga

SEQ ID NO: 721209 - DNA, 75 bp, synthetic construct
  source 1..75: mol_type = other DNA
acgcttttcctcaatgccaaactgccaaccggtaaagagtttatgccgcgtgaaatcagtttgttgatcggtgaa

SEQ ID NO: 721210 - DNA, 75 bp, synthetic construct
  source 1..75: mol_type = other DNA
tgtggcaggcgtggctgaaccagcagacgtggctgggacaggggcggcatattgttctgccggaaggaacggatg

SEQ ID NO: 721211 - DNA, 75 bp, synthetic construct
  source 1..75: mol_type = other DNA
atgcgccgggctgcggtggtatcggttccggcgatgttcggcagactgccggatcagcgggactacgtgcgctgg

SEQ ID NO: 721212 - DNA, 75 bp, synthetic construct
  source 1..75: mol_type = other DNA
accgcagcgcagccgggaactcaccggcctgccggacgcaccggtagtggaactgcccggcgtgcggcacctgcc

SEQ ID NO: 721213 - DNA, 75 bp, synthetic construct
  source 1..75: mol_type = other DNA
tcagcaacggcggcaccggcacgcaggttaacggcgacgaagccaccgtgaacaataacggcaacaccaccgttg

SEQ ID NO: 721214 - DNA, 75 bp, synthetic construct
  source 1..75: mol_type = other DNA
aacaatacaggatgtaattcgccgtagtgaaattcttttacgcccacctccaggaaaatcaaatatcagtgtgaa

SEQ ID NO: 721215 - DNA, 75 bp, synthetic construct
  source 1..75: mol_type = other DNA
aaaattttttaaattgtgcatacagagacgatgaaataaatatttatgcagaagcacatcttccaaagataaaac

SEQ ID NO: 721216 - DNA, 75 bp, synthetic construct
  source 1..75: mol_type = other DNA
gagtgtgaaggtgagccgtgcctgtttgtaaatcgccaggacgagtttgctgcaacatgccgattgaaaaatttt

SEQ ID NO: 721217 - DNA, 75 bp, synthetic construct
  source 1..75: mol_type = other DNA
aggtgagcgtttgcgactggaggataaaggaacagagaaagttcagtggattgaaaggatgaaggatggaagaga

SEQ ID NO: 721218 - DNA, 75 bp, synthetic construct
  source 1..75: mol_type = other DNA
gctggggattgctcttgaactggccaaagaacgttttggcagtacactgactatcaaggggaatgaagaatttcg

SEQ ID NO: 721219 - DNA, 75 bp, synthetic construct
  source 1..75: mol_type = other DNA
gaaataacagggaaagacgagcggaatataccaccggcaggaaaacgtttttcaagaatagttcatacactgaaa

SEQ ID NO: 721220 - DNA, 75 bp, synthetic construct
  source 1..75: mol_type = other DNA
gccggacatcgcctgcttcggtgaaaaggactttcagcaactggcgctgatccgcaaaatggttgctgatatggg

SEQ ID NO: 721221 - DNA, 75 bp, synthetic construct
  source 1..75: mol_type = other DNA
ccgattatgcgcgccaaagatggccttgcgctcagttcccgtaatggttatctgacggcggaacaacgcaaaatt

SEQ ID NO: 721222 - DNA, 75 bp, synthetic construct
  source 1..75: mol_type = other DNA
ctttgatattgagattgtcggcgtgccgattatgcgcgccaaagacggtctggcgctgagttcccgtaacggtta

SEQ ID NO: 721223 - DNA, 75 bp, synthetic construct
  source 1..75: mol_type = other DNA
ccgattatgcgcgcgaaagacggtctggcgctcagttcccgtaacggctatctgacggcggaacaacgtaaaatt

SEQ ID NO: 721224 - DNA, 75 bp, synthetic construct
  source 1..75: mol_type = other DNA
tgctgcgtcagcaaattcgccgcctgcgtatggaaggcaagcgcgtggcgctggtgcctaccatgggtaacctgc

SEQ ID NO: 721225 - DNA, 75 bp, synthetic construct
  source 1..75: mol_type = other DNA
atgaaaaaggcttccgcgccgatgatatccagattcgtgatgccgacaccttgctggaagtctccgaaaacagca

SEQ ID NO: 721226 - DNA, 75 bp, synthetic construct
  source 1..75: mol_type = other DNA
aagtactggagggcggtgaatcgctgatattatcggaagtcgcagagccaccagcacaaatgattgattctctca

SEQ ID NO: 721227 - DNA, 75 bp, synthetic construct
  source 1..75: mol_type = other DNA
aagaagtttttgccactgtgttgaattatcttggtaaagatccgaacagcaccaaagcggatgattacaccggac

SEQ ID NO: 721228 - DNA, 75 bp, synthetic construct
  source 1..75: mol_type = other DNA
ctgggcgaaaacgcgccggtcgatagctgggacttgattctcaaacctgaaaatctggaaaaactgaaaagctgt

SEQ ID NO: 721229 - DNA, 75 bp, synthetic construct
  source 1..75: mol_type = other DNA
tgcgaagctgttcactctgaaagtgcaggatccgaaaatcgaccgtgtgcgcacccgcgcgtggaccaaagtgaa

SEQ ID NO: 721230 - DNA, 75 bp, synthetic construct
  source 1..75: mol_type = other DNA
agaatggcgttaatgtctcgttctcgattccaaaagaaggggcgatggcgttctttgatgtattcgccatgcctg

SEQ ID NO: 721231 - DNA, 75 bp, synthetic construct
  source 1..75: mol_type = other DNA
cgcgaagttgttcactctgaaagtacaggctccgaaaatcgaccgtgtgcgcacccgcgcgtggaccaaagtgaa

SEQ ID NO: 721232 - DNA, 75 bp, synthetic construct
  source 1..75: mol_type = other DNA
tgtgggcgacgaccgggattggctataacgtcgataaagtcaaagcggtgctgggcgaaaacgcgcccgtcgata

SEQ ID NO: 721233 - DNA, 75 bp, synthetic construct
  source 1..75: mol_type = other DNA
gagtatggcagcgagttcgggggctttttccccgtccaggtgcgtttcacgcccgttcatgagcgattccatctg

SEQ ID NO: 721234 - DNA, 75 bp, synthetic construct
  source 1..75: mol_type = other DNA
tgtaatgcgaacaatgcaaaagaatgtcaggcaataatggtacgttctgaaccatttcatcaaattgattattct

SEQ ID NO: 721235 - DNA, 75 bp, synthetic construct
  source 1..75: mol_type = other DNA
acgattgaaaagattaagcctgctatggagaagtttgttaatgagcaggttggtgttttttttcatgatgatgag

SEQ ID NO: 721236 - DNA, 75 bp, synthetic construct
  source 1..75: mol_type = other DNA
ctatcagttcctgaattatctgctgcgcccggatgtggtagcacatatctctgaccatgtgttctatgctaatgc

SEQ ID NO: 721237 - DNA, 75 bp, synthetic construct
  source 1..75: mol_type = other DNA
ggcactggcggcgtcactggatacgcagggatacggcgttaacgacatcatccatatcctgatggcggaaggagg

SEQ ID NO: 721238 - DNA, 75 bp, synthetic construct
  source 1..75: mol_type = other DNA
tggttaccgtattgaaggttatttatgtaatgcgaacaatgcaaaagaatgtcaggcaataatggtacgttctga

SEQ ID NO: 721239 - DNA, 75 bp, synthetic construct
  source 1..75: mol_type = other DNA
actggaaggcaaattaatggccgggagcaccggctttgacctggtggtgccgtcagcaagctttctggagcgcca

SEQ ID NO: 721240 - DNA, 75 bp, synthetic construct
  source 1..75: mol_type = other DNA
tacagtccatgaacgcacaggaatatgaagatatccgtgctgcgggaagcgatatgcgccgtaatctcactcacg

SEQ ID NO: 721241 - DNA, 75 bp, synthetic construct
  source 1..75: mol_type = other DNA
agttgcgtgtagtgttttgcggtatcaatccggggctttctactgcagagtttggttttccgttcgcccatccgg

SEQ ID NO: 721242 - DNA, 75 bp, synthetic construct
  source 1..75: mol_type = other DNA
ccgcaggcgttggcgattctgggcaaacaagcatatgaacagggattcagccagcgcggtgcacagtgggggaaa

SEQ ID NO: 721243 - DNA, 75 bp, synthetic construct
  source 1..75: mol_type = other DNA
caccggaagcgtcagccattcactggcactggcggcgtcactggatacgcagggatacagcgttaacgacatcat

SEQ ID NO: 721244 - DNA, 75 bp, synthetic construct
  source 1..75: mol_type = other DNA
gtggttcaggtacagcagcggtttgcaccggaagccatcagccattcactggcactggcagcgtcactggatgaa

SEQ ID NO: 721245 - DNA, 75 bp, synthetic construct
  source 1..75: mol_type = other DNA
ttcagaccatgaacgcacaggaatatgaagatatccgtgctgcgggaagcgatatgcgccgtaatctcactcacg

SEQ ID NO: 721246 - DNA, 75 bp, synthetic construct
  source 1..75: mol_type = other DNA
acgccgtgatgcgggagctggatgcgccggacaactggacgatgaacggcgagtacggcagcgagtttggcggat

SEQ ID NO: 721247 - DNA, 75 bp, synthetic construct
  source 1..75: mol_type = other DNA
atgaatgctttttctttacataacaaaaccgcgttgatcaccggtgcagccagtgggctggggctggcaatggcg

SEQ ID NO: 721248 - DNA, 75 bp, synthetic construct
  source 1..75: mol_type = other DNA
caccaacatccattttctgtcattcaggtcgatcttgaccattttaaagcgattaatgaccgctttggtcatcag

SEQ ID NO: 721249 - DNA, 75 bp, synthetic construct
  source 1..75: mol_type = other DNA
ggcactggcggcgtcactggatacgcaggggtacagcgttaatgacatcattcatatcctgatggcggaaggagg

SEQ ID NO: 721250 - DNA, 75 bp, synthetic construct
  source 1..75: mol_type = other DNA
gaataccggagtgagttcggtggcttttttccggtacagattcgcttcacgccatcacacggcaacttccatatc

SEQ ID NO: 721251 - DNA, 75 bp, synthetic construct
  source 1..75: mol_type = other DNA
ggcactggcggcatcactggatgcgcaggagtacagcgttaatgacatcattcatatcctgatggcggaaggaga

SEQ ID NO: 721252 - DNA, 75 bp, synthetic construct
  source 1..75: mol_type = other DNA
gatgtctggtatctgttaccgatcaccgccaagcttatggtagaaacggaggcctccggctggctacctgcggcg

SEQ ID NO: 721253 - DNA, 75 bp, synthetic construct
  source 1..75: mol_type = other DNA
ctggacaagagcgaatcgcgcaccgactggctcgccagaccgttaaccgaacgtcagtgcgaatacgcggcggcg

SEQ ID NO: 721254 - DNA, 75 bp, synthetic construct
  source 1..75: mol_type = other DNA
ccgaaattcgggccatgctggcggcggccggaaaggctgacgctgtacgttgccagcgtaatcgggctattttgt

SEQ ID NO: 721255 - DNA, 75 bp, synthetic construct
  source 1..75: mol_type = other DNA
ctgctgattttcttgcgctcgtatcggttacagatcacaccggcgatcttgtctactccgatgtttacgatggga

SEQ ID NO: 721256 - DNA, 75 bp, synthetic construct
  source 1..75: mol_type = other DNA
tccctaatctggcaaaagtggaacaggtgtgggtatccgtattgacgatgcggaaagcggaaaccttatgccact

SEQ ID NO: 721257 - DNA, 75 bp, synthetic construct
  source 1..75: mol_type = other DNA
tatccggtagcgaaatccgtttccacggtaaaacgctgctggcgctggtggagaaagcacaggcattgcctgaag

SEQ ID NO: 721258 - DNA, 75 bp, synthetic construct
  source 1..75: mol_type = other DNA
aaggaaaatcgaaatgcagcatgaagagtttcagaaaatgactgagcgcgagcaagtgatcttacccagcaatag

SEQ ID NO: 721259 - DNA, 75 bp, synthetic construct
  source 1..75: mol_type = other DNA
gaggaaaatcgaaattcagcatgaagagtttcagaaaatgacagagcgcgagcaagtacctttattgaaatcacc

SEQ ID NO: 721260 - DNA, 75 bp, synthetic construct
  source 1..75: mol_type = other DNA
aaggaaaatcgaaatgcagcatgaagagtttcagaaaatgacagagcgcgagcaattacctttattgaaatcgcc

SEQ ID NO: 721261 - DNA, 75 bp, synthetic construct
  source 1..75: mol_type = other DNA
accgatacggcgctaccgtgatgccgctattgtgctgacactttgcggaacgggcctgcgggccggggaactggt

SEQ ID NO: 721262 - DNA, 75 bp, synthetic construct
  source 1..75: mol_type = other DNA
gtcggtgaacatggcattatcagcgctacggggtgtggcgctgacggcctttaacctcaattgtgtggatgccga

SEQ ID NO: 721263 - DNA, 75 bp, synthetic construct
  source 1..75: mol_type = other DNA
gacagacaggaaatccgggcactgattcaggctgcaaaacagcatcagcaaccggtacggcgctgtcgtgatacc

SEQ ID NO: 721264 - DNA, 75 bp, synthetic construct
  source 1..75: mol_type = other DNA
atttagatatggcgggtgggtaactataagtaacataatatctcctatattagcgagtatggatagatttattct

SEQ ID NO: 721265 - DNA, 75 bp, synthetic construct
  source 1..75: mol_type = other DNA
tgctcagcagcggtccaatcaaaactgaaacaatcgaaagtaaaaactaaaataaccaccatccagaatgggatt

SEQ ID NO: 721266 - DNA, 75 bp, synthetic construct
  source 1..75: mol_type = other DNA
cggcaggaaggacatcaaattggctggcaggagggtaagattgaaggctggcaagaaggtaaattagaaggcttg

SEQ ID NO: 721267 - DNA, 75 bp, synthetic construct
  source 1..75: mol_type = other DNA
tcaactggctggatgaatttaacgatccgcaacttgcccggcagttgtacaccgaagcttttccgttggtggata

SEQ ID NO: 721268 - DNA, 75 bp, synthetic construct
  source 1..75: mol_type = other DNA
ccgccgtggaaatgtttatgttcgctgtctttcggcctcgtgggatgcagagaacccacaatgggagccgtggtc

SEQ ID NO: 721269 - DNA, 75 bp, synthetic construct
  source 1..75: mol_type = other DNA
tggctgcgctacgactacgggcagtatacctggcgcgccgcctccagccagatgctggataaacgcgggatggtg

SEQ ID NO: 721270 - DNA, 75 bp, synthetic construct
  source 1..75: mol_type = other DNA
ggaaaaacacggatttgatagtgaaaaaagaatatttatatattgtggctcgttatcattaaggaaaaatattgc

SEQ ID NO: 721271 - DNA, 75 bp, synthetic construct
  source 1..75: mol_type = other DNA
ggcaccccgcaggatgctggctggatcggctggatgatcaaccccctgggccgctggtcgttaatcatggaaatc

SEQ ID NO: 721272 - DNA, 75 bp, synthetic construct
  source 1..75: mol_type = other DNA
atatggtcgaatctgttccatatcggcattctggggatcttcttcggtcatctgttcggcatgttaacaccgcac

SEQ ID NO: 721273 - DNA, 75 bp, synthetic construct
  source 1..75: mol_type = other DNA
ttccacggcgcctgccagcgaattactggaccaactttcacacatcgacatgaataacgcaccgttgctgattgc

SEQ ID NO: 721274 - DNA, 75 bp, synthetic construct
  source 1..75: mol_type = other DNA
ctttcggctgatgcgctatgccaccgccgccatgcagcgtcacctggataaaggttatgacaaagtcccgctggt

SEQ ID NO: 721275 - DNA, 75 bp, synthetic construct
  source 1..75: mol_type = other DNA
ggatggaaggtgcacttgaaaaagccctggctattgcgtgccagcttcagaaaatggggatgacgccggagcaga

SEQ ID NO: 721276 - DNA, 75 bp, synthetic construct
  source 1..75: mol_type = other DNA
ttgataaagaaaaggttaaggctaattcaccttttaacaagtggtatgatgaagggcgttttggtggcgtcccat

SEQ ID NO: 721277 - DNA, 75 bp, synthetic construct
  source 1..75: mol_type = other DNA
atcgaaatgcaacatgaagagtttcagaaaatgacagagcgcgagcaagtacctttattgaaatcgccagaatga

SEQ ID NO: 721278 - DNA, 75 bp, synthetic construct
  source 1..75: mol_type = other DNA
attccgattgcaggtggcgatgactttggctccgtcaccgccgggctggcacgctgggcggaagtggtgtttcgt

SEQ ID NO: 721279 - DNA, 75 bp, synthetic construct
  source 1..75: mol_type = other DNA
tcgatcgtgaagccagcctcctgggtcatagtggttgccgtattggtggtaacgatctggatatcgcactggcgt

SEQ ID NO: 721280 - DNA, 75 bp, synthetic construct
  source 1..75: mol_type = other DNA
gaaacaaaaacctgtgcatcactgccatttatcagcaacgaactgacaacacatattagccaacaagatctggat

SEQ ID NO: 721281 - DNA, 75 bp, synthetic construct
  source 1..75: mol_type = other DNA
gcgtgaagcggtaagcgaatggctgtaccgccatcatgatgttccggcagacgacgatgaaacgcaggcgctgct

SEQ ID NO: 721282 - DNA, 75 bp, synthetic construct
  source 1..75: mol_type = other DNA
ggcactggcggaacagttgccggggattccgattgctggcggcgatgactttggctccgtcaccgccggactggc

SEQ ID NO: 721283 - DNA, 75 bp, synthetic construct
  source 1..75: mol_type = other DNA
gttatcgcctggtacgctgcgcagaagagagcaaaattgcgctttccagtgaagttgaaactcgcgcgtcgctgc

SEQ ID NO: 721284 - DNA, 75 bp, synthetic construct
  source 1..75: mol_type = other DNA
tttgactgcgctgacatgatttaccgcctccggcagcagaagccggtctgggcactgtgcaatgacacggcctgt

SEQ ID NO: 721285 - DNA, 75 bp, synthetic construct
  source 1..75: mol_type = other DNA
ctatgccggtcatctggcgcaggccggtgtggatatcacgctgatttacgcaggggcgcacaaggtggatggcaa

SEQ ID NO: 721286 - DNA, 75 bp, synthetic construct
  source 1..75: mol_type = other DNA
tgaacgcttcatggcgaaccattcaccgactgcgttgcagggcggtatgtcacagacgtcagcagacggtgatgc

SEQ ID NO: 721287 - DNA, 75 bp, synthetic construct
  source 1..75: mol_type = other DNA
gtgttgtgatagaaacgattcccaatttctatccagttgtggttgatgttgagaaattctttttagctaacaata

SEQ ID NO: 721288 - DNA, 75 bp, synthetic construct
  source 1..75: mol_type = other DNA
gagtttcacttgatgggggttaatattgaggattatgctcacatgatgaactttgtggatttcatttctgataac

SEQ ID NO: 721289 - DNA, 75 bp, synthetic construct
  source 1..75: mol_type = other DNA
atggccctggatgaggcaaaaggggctgaggcgcaggctgaaaaactggcggcctgcccgggaatgaccgtggag

SEQ ID NO: 721290 - DNA, 75 bp, synthetic construct
  source 1..75: mol_type = other DNA
cagcaaactgttcagtggcggtgatgcgcgacggtaaaccgcagatgttgaaaatggaaaatgacagcacactgc

SEQ ID NO: 721291 - DNA, 75 bp, synthetic construct
  source 1..75: mol_type = other DNA
gctaatgctgcttaatggcatcgcgcgaaaaattaaattcaaagcattacaggaacatgcccgcgagaaaatcaa

SEQ ID NO: 721292 - DNA, 75 bp, synthetic construct
  source 1..75: mol_type = other DNA
acggaacgccattaccgcatcagccagtgggaatccagcgcctcatcgatagatgaatcaccagatgtgattttt

SEQ ID NO: 721293 - DNA, 75 bp, synthetic construct
  source 1..75: mol_type = other DNA
tgccctgcaggcggtgcagaaacgtaacttctggcaactgcaggctgaaatccaccaccggggacgttactgcca

SEQ ID NO: 721294 - DNA, 75 bp, synthetic construct
  source 1..75: mol_type = other DNA
accgccacgctgtcggttaaaaaaggcggcacgcttaaaggcacttacacccacagcagcggcagttttacctcc

SEQ ID NO: 721295 - DNA, 75 bp, synthetic construct
  source 1..75: mol_type = other DNA
tgcagcgctcggcaaagccggtgaagcacaggataacgcccgcgctgccttgcgtatgctcaccgaaaacggtca

SEQ ID NO: 721296 - DNA, 75 bp, synthetic construct
  source 1..75: mol_type = other DNA
tgcctgatgtggctcagcgtctgatacagcatcttgcagagcatggcattcagccagcccggaatgtggctgaac

SEQ ID NO: 721297 - DNA, 75 bp, synthetic construct
  source 1..75: mol_type = other DNA
atccgagcgttaatttcaaaaataacgagtgcagcttctgttacgcctgcgcgcaggcttgccccgaatcgctat

SEQ ID NO: 721298 - DNA, 75 bp, synthetic construct
  source 1..75: mol_type = other DNA
cgaaccggagaaagtggccctgttacagaaagtctggcgtcagcgtttaagttatcggctggtacgcagcgcgga

SEQ ID NO: 721299 - DNA, 75 bp, synthetic construct
  source 1..75: mol_type = other DNA
aaaaagcgctggcagaacagttgccgggcattccgattgcaggcggcgatgactttggctccgtcaccgccgggc

SEQ ID NO: 721300 - DNA, 75 bp, synthetic construct
  source 1..75: mol_type = other DNA
ttttccggtttctgctgtcagggggatggtgcctgtttcgaaggtgattaccgctatcagcccggagccgcacaa

SEQ ID NO: 721301 - DNA, 75 bp, synthetic construct
  source 1..75: mol_type = other DNA
tttctccgcgccacaccagggcctgggatttgctgttcaccatcggggagacgtgcctggcgtatcaggcagtcg

SEQ ID NO: 721302 - DNA, 75 bp, synthetic construct
  source 1..75: mol_type = other DNA
aatgccgccgctgtcaggatagctgtgagccaatggcaattatctttcgcccgacgctctccgggatctaccagc

SEQ ID NO: 721303 - DNA, 75 bp, synthetic construct
  source 1..75: mol_type = other DNA
tcgctctggcagcgagccagtcgctcggcggacagcccgatctggtggcgttgtttgttgtggtcaccggcgtat

SEQ ID NO: 721304 - DNA, 75 bp, synthetic construct
  source 1..75: mol_type = other DNA
gcggtgcgttcggtcactacgccatttgctctggcagcgagccagtcgctcggcggacagcccgatctggtggcg

SEQ ID NO: 721305 - DNA, 75 bp, synthetic construct
  source 1..75: mol_type = other DNA
aatggcgagcgtaactcccagaagtcactggcagaatggattgaagactgggcagactaccttgtgggctttgat

SEQ ID NO: 721306 - DNA, 75 bp, synthetic construct
  source 1..75: mol_type = other DNA
atcgatgactttacccgttattctaaagatcttgcagatgaaggcacccgctgctttatcgatgccgataatatg

SEQ ID NO: 721307 - DNA, 75 bp, synthetic construct
  source 1..75: mol_type = other DNA
caaaagcggctgcggcagtccgtaaaatcacgattgaagcaaaccagaccgctgattttgaagataatgacttca

SEQ ID NO: 721308 - DNA, 75 bp, synthetic construct
  source 1..75: mol_type = other DNA
gggatggcgaaaggcgccggatttggcgcggcgtctcatggcgccgggactgcgcgatcgtatgaactgggtcaa

SEQ ID NO: 721309 - DNA, 75 bp, synthetic construct
  source 1..75: mol_type = other DNA
atgctgataatatgcgtgccgtcagtgtgcttaacctgggtactattgatgaaccaggtcacgcagataacaccg

SEQ ID NO: 721310 - DNA, 75 bp, synthetic construct
  source 1..75: mol_type = other DNA
ggcgtatccgttcaagtggggaaggtggattactgctctcgtttactaatatcgttaacgaaggtatggcgcgac

SEQ ID NO: 721311 - DNA, 75 bp, synthetic construct
  source 1..75: mol_type = other DNA
tcaaatgggattacccgcactcgatctctttccgcgtgagctgtgggcgcgggtgatgggccgtcgcctgcgaac

SEQ ID NO: 721312 - DNA, 75 bp, synthetic construct
  source 1..75: mol_type = other DNA
atgatgagcattgatgccctgacagccatagagaactttgccagcggtattttcagtgctggtatggaatttctc

SEQ ID NO: 721313 - DNA, 75 bp, synthetic construct
  source 1..75: mol_type = other DNA
atttaggcgttttattcattctattgtatcaggggagatttctttttttttggatctttattctctgtgttttgg

SEQ ID NO: 721314 - DNA, 75 bp, synthetic construct
  source 1..75: mol_type = other DNA
gctaatggtgacgctattcaggcaacaaaagcggctgcggctgtccgtaaaatcacgattgaagcaaaccagacc

SEQ ID NO: 721315 - DNA, 75 bp, synthetic construct
  source 1..75: mol_type = other DNA
cactggcagaatggattgaagactgggccgactatcttgtgggctttgatgctaatggtgacgccattcaggcaa

SEQ ID NO: 721316 - DNA, 75 bp, synthetic construct
  source 1..75: mol_type = other DNA
tgacaggattgcctggccgtcgggttcttgatgaatcctttgattatcaattgagtaatgccgaaccactgaatc

SEQ ID NO: 721317 - DNA, 75 bp, synthetic construct
  source 1..75: mol_type = other DNA
tattacgcaccctggcaacttacttagccagttggacgcgcgattacgaaacggtttatcgctacgggggcgaag

SEQ ID NO: 721318 - DNA, 75 bp, synthetic construct
  source 1..75: mol_type = other DNA
atcatctggggccactcgataacgatgaattaccttacgttcggctaatggattctgcccatcaacatatgcata

SEQ ID NO: 721319 - DNA, 75 bp, synthetic construct
  source 1..75: mol_type = other DNA
tcactattgagcgggagcacagccggaatattctggctcttaatgagctgaatttcggacgtcagccgggagatt

SEQ ID NO: 721320 - DNA, 75 bp, synthetic construct
  source 1..75: mol_type = other DNA
caaatccatgcccttatttctgctcagggtgttaatgaaattatcagtaagattggtgccgatgctgtggcattg

SEQ ID NO: 721321 - DNA, 75 bp, synthetic construct
  source 1..75: mol_type = other DNA
atggtgccgatgctgtggcattgcctgagaatttccgcattcatgatctggaaaaatttaatttaaatcgcttcc

SEQ ID NO: 721322 - DNA, 75 bp, synthetic construct
  source 1..75: mol_type = other DNA
aagaacgtccgtttaaattacgcctcagcattatcactggcgatcgtcctgtactggttctgcgcattattcagc

SEQ ID NO: 721323 - DNA, 75 bp, synthetic construct
  source 1..75: mol_type = other DNA
accgttctctgctctgttgtctgttaatggcgagcgtaactcccagaaatcactgacagaatggattgaagactg

SEQ ID NO: 721324 - DNA, 75 bp, synthetic construct
  source 1..75: mol_type = other DNA
cgaatttcgtgatctgcttgttgagaaattcaaagacagcaaagtagaaacctttattggtactttcaccgcctg

SEQ ID NO: 721325 - DNA, 75 bp, synthetic construct
  source 1..75: mol_type = other DNA
ttcacccgactggtgcatgtgtggagcgcgccgtttgagtactttactcgtcgatatcaaattgtgcgttcgcgg

SEQ ID NO: 721326 - DNA, 75 bp, synthetic construct
  source 1..75: mol_type = other DNA
tcatgatctggaaaaatttaatttaaatcgtttccgtttccgtggtgcgctttccactgccagcatcgatgactt

SEQ ID NO: 721327 - DNA, 75 bp, synthetic construct
  source 1..75: mol_type = other DNA
taacgaatttcgtgatctgcttgttgagaaattcaaagacagcaaagtagaaacctttattggtactttcaccgc

SEQ ID NO: 721328 - DNA, 75 bp, synthetic construct
  source 1..75: mol_type = other DNA
gggcttttacgcctgttaaaaagaaatcatcttttttctctaaactgaacctgcttcgcctggttcgtgctgtga

SEQ ID NO: 721329 - DNA, 75 bp, synthetic construct
  source 1..75: mol_type = other DNA
aagtattcaatgctggtcgctttcactgcacacaacgctacaccacccgaaccggtaatatttacattcggatgc

SEQ ID NO: 721330 - DNA, 75 bp, synthetic construct
  source 1..75: mol_type = other DNA
ttctaaccgaccccggtatttacagtgttacaggaaaggcaacaaacggtccgatgctggacaccgttggcgcga

SEQ ID NO: 721331 - DNA, 75 bp, synthetic construct
  source 1..75: mol_type = other DNA
atttgatgtctccgggtatttacagtgtgacaggcaaagcgacccacaccccaatccaggggcagtctggttttc

SEQ ID NO: 721332 - DNA, 75 bp, synthetic construct
  source 1..75: mol_type = other DNA
tccggaagataatgctgtcggtgtgcttgaggtttttgctgccggcaattttgcaggcacgcaacgctttatcac

SEQ ID NO: 721333 - DNA, 75 bp, synthetic construct
  source 1..75: mol_type = other DNA
acgtttatgaaaaacaatggcgaaatgccgcttgatgctgatctgaatacatttggtcccgttaaggcttatctg

SEQ ID NO: 721334 - DNA, 75 bp, synthetic construct
  source 1..75: mol_type = other DNA
agtcagtacgtttaactacggaacaaaaaccactaataccactggtaaccatacacataccatttacagagggaa

SEQ ID NO: 721335 - DNA, 75 bp, synthetic construct
  source 1..75: mol_type = other DNA
tggatgtttatgctaataacgtccatgttatgcgctttgtttccggcagcattcagagtaataaaaccgtaaata

SEQ ID NO: 721336 - DNA, 75 bp, synthetic construct
  source 1..75: mol_type = other DNA
tgccttgcggcaagctgggatgtatcaaatccgcagtgggaaccgtggttaagagtcggtcatcagtcagagagt

SEQ ID NO: 721337 - DNA, 75 bp, synthetic construct
  source 1..75: mol_type = other DNA
tgttacaggtaaagcgaccaacggtccaatgctggacacaattggcgcgacactcctcgggattctggaagtatt

SEQ ID NO: 721338 - DNA, 75 bp, synthetic construct
  source 1..75: mol_type = other DNA
tcatggagcgaatggcgggaagtctacacctcgtattcacttcccctgaatctgggtatcggcggtgctgtggca

SEQ ID NO: 721339 - DNA, 75 bp, synthetic construct
  source 1..75: mol_type = other DNA
gcacgattacaacaagacgagtaccaatcattgacgaagcccagacatggggcgcgaaacagacattcagtgctg

SEQ ID NO: 721340 - DNA, 75 bp, synthetic construct
  source 1..75: mol_type = other DNA
aaacatcgcagttggtccgagtgatgattccggtacgggacgctcaatgcatgtatggcgaagcactgtaagtaa

SEQ ID NO: 721341 - DNA, 75 bp, synthetic construct
  source 1..75: mol_type = other DNA
ccgctgccttgcggcaagctgggatgcatcaaatccgcagtgggaaccgtggttaagagtcggtcatcagtcaga

SEQ ID NO: 721342 - DNA, 75 bp, synthetic construct
  source 1..75: mol_type = other DNA
gatgaccaaaaacgtcaagttcctggccggttttgccatcatctctgtatttattgctgtaggtatgaccgtcgt

SEQ ID NO: 721343 - DNA, 75 bp, synthetic construct
  source 1..75: mol_type = other DNA
tcaggacctgatggcaagcggtaacaccacggttaaggcgaccttcggtaaggactccagtgttgttaaatgggt

SEQ ID NO: 721344 - DNA, 75 bp, synthetic construct
  source 1..75: mol_type = other DNA
gatgactaaaaacgtcaagttcctcgccggttttgccatcatctctgtatttattgccgtgggtatggccgtcgt

SEQ ID NO: 721345 - DNA, 75 bp, synthetic construct
  source 1..75: mol_type = other DNA
ctgaatatgcttcgcctggttcgtgcagtgatcccggttgctgttctgatgatgttcttcccgcaactggcactg

SEQ ID NO: 721346 - DNA, 75 bp, synthetic construct
  source 1..75: mol_type = other DNA
acctccggtattgcgctgaaattaaagctggacagcagcacggtgattacccactgggcgtatcaattaaccttt

SEQ ID NO: 721347 - DNA, 75 bp, synthetic construct
  source 1..75: mol_type = other DNA
gttcattaactgaaaagtggaagtaccgcttttctttttatgatgaacatgggttccctggattttggggtgcaa

SEQ ID NO: 721348 - DNA, 75 bp, synthetic construct
  source 1..75: mol_type = other DNA
ggtgccattgctgttttatcatggcgaaacctcgccctacccgtactcactcaactggctggatgagtttgacga

SEQ ID NO: 721349 - DNA, 75 bp, synthetic construct
  source 1..75: mol_type = other DNA
agaccccgctgccatctacccgtactggccctttgtataatgcgttctcatatccaacaaagatttcaccagaag

SEQ ID NO: 721350 - DNA, 75 bp, synthetic construct
  source 1..75: mol_type = other DNA
ggcaaagctcaccagcctggactggcagacccacgactttgtgccgggcagtctgataaccgttcggcttgataa

SEQ ID NO: 721351 - DNA, 75 bp, synthetic construct
  source 1..75: mol_type = other DNA
gccgccggcagcagtggtcaggacctgatggcaagcggtaacaccacggttaaggcgaccttcggtaaggactcc

SEQ ID NO: 721352 - DNA, 75 bp, synthetic construct
  source 1..75: mol_type = other DNA
atgcgcagttatctcctttgccagtggtttagtcgtgatgtttttattattatggcgcgaaaagaaacccggcaa

SEQ ID NO: 721353 - DNA, 75 bp, synthetic construct
  source 1..75: mol_type = other DNA
gcaggaggggaaattggagggtttgcagaaaggcaaagtagaaggtatgcatgaacaagccattaaaattgcctt

SEQ ID NO: 721354 - DNA, 75 bp, synthetic construct
  source 1..75: mol_type = other DNA
tcagcgacaacggtgtggggatcgccagcgggaaaatggccggatttggcattcaggggatgcgtgagcgcgtca

SEQ ID NO: 721355 - DNA, 75 bp, synthetic construct
  source 1..75: mol_type = other DNA
atgagccggttgccgccgtgacgccgggccagtctgccgtcttctataacggtgaagtgtgcctcggtggcggta

SEQ ID NO: 721356 - DNA, 75 bp, synthetic construct
  source 1..75: mol_type = other DNA
cagcaacgtctggggcttttagagcaacgagataccgcaatgttgcatcgtttgttgcatgatattgaaaaaaat

SEQ ID NO: 721357 - DNA, 75 bp, synthetic construct
  source 1..75: mol_type = other DNA
aaatcggcgtggatgaatcatgtggcgctggtctttggtcgtgaagattccgggctgaccaacgaggaactggca

SEQ ID NO: 721358 - DNA, 75 bp, synthetic construct
  source 1..75: mol_type = other DNA
tcttccagctttggcattcaggcggcggtgagcctgcatctggtgaatcagattcgcccggatattccagtgatc

SEQ ID NO: 721359 - DNA, 75 bp, synthetic construct
  source 1..75: mol_type = other DNA
tcttccagtttcggtattcaagcagcggtgagcctgcatctggtgaaccagattcgcccggatattccggtgatc

SEQ ID NO: 721360 - DNA, 75 bp, synthetic construct
  source 1..75: mol_type = other DNA
atgtccaaactcgatctaaacaccctgaacgaactgccgaaggtagatcgcattctggcgctggcccaaaccaac

SEQ ID NO: 721361 - DNA, 75 bp, synthetic construct
  source 1..75: mol_type = other DNA
cacccgccagagcagaaaatataggtgcagcggcgcgggcaatgaaaacaatgggatttagcgaactgcgcattg

SEQ ID NO: 721362 - DNA, 75 bp, synthetic construct
  source 1..75: mol_type = other DNA
agtatttttcagcttttcattctgactgcaatgggcaatatgtctctgtgtggattaaaaaaagagtctctgaca

SEQ ID NO: 721363 - DNA, 75 bp, synthetic construct
  source 1..75: mol_type = other DNA
gttacacgatgtcgacttcactgtcgccaccactgcacgcagtcgggcgaaatatcattactacgccactccggt

SEQ ID NO: 721364 - DNA, 75 bp, synthetic construct
  source 1..75: mol_type = other DNA
gctttacgcgaacgagccatggcattgctgacgactctggcagtggcagatgacataaaactggtcgactggtta

SEQ ID NO: 721365 - DNA, 75 bp, synthetic construct
  source 1..75: mol_type = other DNA
gtgatggtctattgctatcaattagcaacattaatacaacaaccgacgaaaagtgacacaacggcagaccaacat

SEQ ID NO: 721366 - DNA, 75 bp, synthetic construct
  source 1..75: mol_type = other DNA
atggtggcggattatccttcgctcaatctggggcaggcggtgatggtctattgctatcaattagcaacattaata

SEQ ID NO: 721367 - DNA, 75 bp, synthetic construct
  source 1..75: mol_type = other DNA
ggctaaaccgtgaaggggtgcatctgcatgatgaggatccggcccgcgtctggcgaacgcagcgtgaaggaccgg

SEQ ID NO: 721368 - DNA, 75 bp, synthetic construct
  source 1..75: mol_type = other DNA
ggcggataaacatgatctaccgcgcatcgtcacgattcaaaatccctatagcctgttaaaccgcagcttcgaagt

SEQ ID NO: 721369 - DNA, 75 bp, synthetic construct
  source 1..75: mol_type = other DNA
gcgtatgttgatatcgccagacgtcatggtctcgatcctgcgcagatggcgctggcctttgtacgccgtcaaccg

SEQ ID NO: 721370 - DNA, 75 bp, synthetic construct
  source 1..75: mol_type = other DNA
agtccggaaaggggatgtgttattaaagcttacagcactgggagctgaagctgatacgttaaaaacacagtcatc

SEQ ID NO: 721371 - DNA, 75 bp, synthetic construct
  source 1..75: mol_type = other DNA
ccttaacgacggctaccgaccaagcgtagaagagcaagaaggttttttgttgagcttgtccgtctttaagaactt

SEQ ID NO: 721372 - DNA, 75 bp, synthetic construct
  source 1..75: mol_type = other DNA
atcacttctatggcagaatgaaagaatcatcaagataattaaagatgatatatcagaatcaaagcacactaaaag

SEQ ID NO: 721373 - DNA, 75 bp, synthetic construct
  source 1..75: mol_type = other DNA
aaaaaatattacacaatttgtctaaaaacttttccaagttgcacctgtgttatataaacagtagaattataaatg

SEQ ID NO: 721374 - DNA, 75 bp, synthetic construct
  source 1..75: mol_type = other DNA
ctacgacagcctgctggcctcagcccccaccacaatcagccgcagcacactggtcaacagcggatacctgaacag

SEQ ID NO: 721375 - DNA, 75 bp, synthetic construct
  source 1..75: mol_type = other DNA
tgaccggcagaattgctaatggccagcaaattcccctgccgtcaggattttctgccagccagtgttcctggagtg

SEQ ID NO: 721376 - DNA, 75 bp, synthetic construct
  source 1..75: mol_type = other DNA
tcggaccttcttgcagacacaaccggccttgtagcccatgacagcactggtgccacactttcgtgccaatccggt

SEQ ID NO: 721377 - DNA, 75 bp, synthetic construct
  source 1..75: mol_type = other DNA
cgccggttgtctggagtgcggcacctgtcgggtgctgtgcggcaacactattctcgaacagtggcaatatcccgc

SEQ ID NO: 721378 - DNA, 75 bp, synthetic construct
  source 1..75: mol_type = other DNA
ctgtgcggcaacactattctcgaacagtggcaatatcccgcaggcaccttcggtattgaatttcgctacggctaa

SEQ ID NO: 721379 - DNA, 75 bp, synthetic construct
  source 1..75: mol_type = other DNA
catatcattttggcggcaaatcccgatatcaatgaattccgtaaattaatgaaagcttgccctgccggactttat

SEQ ID NO: 721380 - DNA, 75 bp, synthetic construct
  source 1..75: mol_type = other DNA
atgacccgcagcctggaactgcgtgtctgtattgctcacaaatcaattcccgcccttgtcggacagggaatgaag

SEQ ID NO: 721381 - DNA, 75 bp, synthetic construct
  source 1..75: mol_type = other DNA
gcaacctgctgctggtgactacttctggtgattcttatttaatagatcgcaaccaaacaccaccagtaaatggta

SEQ ID NO: 721382 - DNA, 75 bp, synthetic construct
  source 1..75: mol_type = other DNA
atcaagatgattcttcgtttgagtgcagcctggatgatatcgaggttgttggccgcgcattgaaaatcattaaga

SEQ ID NO: 721383 - DNA, 75 bp, synthetic construct
  source 1..75: mol_type = other DNA
cttcccggaaacagattagttgtacatcaagatgattcttcgtttgagtgcagcctggatgatatcgaggttgtt

SEQ ID NO: 721384 - DNA, 75 bp, synthetic construct
  source 1..75: mol_type = other DNA
acaagcaattaaaccgttatccaaactcataactccatctattcctaaaggaaccttggagaatggacaactcag

SEQ ID NO: 721385 - DNA, 75 bp, synthetic construct
  source 1..75: mol_type = other DNA
ttccctgcagaatgggtgatccaatgcgctcttgaaacaggcgtttcattactctggctaactacaggacaaggc

SEQ ID NO: 721386 - DNA, 75 bp, synthetic construct
  source 1..75: mol_type = other DNA
cttgtatctcctgaaattgacaaggcaactctcaacggtggtttattggtcgatgctggaaaagcaatcattgat

SEQ ID NO: 721387 - DNA, 75 bp, synthetic construct
  source 1..75: mol_type = other DNA
gcgcaacaaatgcttaacacccctgcggtagagtcagctatagagaagttcgagcacgactggaatgccgcattt

SEQ ID NO: 721388 - DNA, 75 bp, synthetic construct
  source 1..75: mol_type = other DNA
tgaaaatcccggtgacttccgaaggtctggccgccattaagatgctgaaaaaagagggtattactacgcttggca

SEQ ID NO: 721389 - DNA, 75 bp, synthetic construct
  source 1..75: mol_type = other DNA
cgggctgatgacgatggaattatttaccccggcacgcgatgtgctggcgcagcgcaccctcggttgggtggcgcg

SEQ ID NO: 721390 - DNA, 75 bp, synthetic construct
  source 1..75: mol_type = other DNA
actgtggctaaccaccggacaaggcgagccaggttcaaacattgaccctaaaaaaaatatcaattctgtgaactc

SEQ ID NO: 721391 - DNA, 75 bp, synthetic construct
  source 1..75: mol_type = other DNA
ttgccaacgttattacgtgaatttattacttcggaagatatcgctaaccactttggcgtattgcttgcactttat

SEQ ID NO: 721392 - DNA, 75 bp, synthetic construct
  source 1..75: mol_type = other DNA
gttttccctgttttaattttattggctgggggtgggatcgctttacctgcattacagggagtgatgtctatccaa

SEQ ID NO: 721393 - DNA, 75 bp, synthetic construct
  source 1..75: mol_type = other DNA
tcccggatgagatttacgttttcacaccggaaggccgcattgtcgagttgcctgccggtgccacacctgtcgact

SEQ ID NO: 721394 - DNA, 75 bp, synthetic construct
  source 1..75: mol_type = other DNA
gttatcccatcagtacggcaggcaaccattgagaacggaacgctcgaagagctggaagatgttttccttgatcag

SEQ ID NO: 721395 - DNA, 75 bp, synthetic construct
  source 1..75: mol_type = other DNA
caaacccgtggctcatccatacagatgatggctcttacctcattgaccgtagcggtactccaccagtaaatggcg

SEQ ID NO: 721396 - DNA, 75 bp, synthetic construct
  source 1..75: mol_type = other DNA
atacgggaggtagagaggcgatcgaaagattgcttaaggcatatggattcagcaccaaacaagcactagctgacc

SEQ ID NO: 721397 - DNA, 75 bp, synthetic construct
  source 1..75: mol_type = other DNA
tttctcgctttgcaccggatgacaacgccagcctgaaaacggtcattatcatctatagtgtggtttacatcttgt

SEQ ID NO: 721398 - DNA, 75 bp, synthetic construct
  source 1..75: mol_type = other DNA
atcacttgtgaagtctttcggaaaaggttttgtggccccggatcttgacgagctacaaccacatgaagtgtctca

SEQ ID NO: 721399 - DNA, 75 bp, synthetic construct
  source 1..75: mol_type = other DNA
acttaaatcatgccaacatttttttattcaacacaaatttttcgcatggattaatttgacgccacaagtagcaag

SEQ ID NO: 721400 - DNA, 75 bp, synthetic construct
  source 1..75: mol_type = other DNA
ttgtatctgtttgaaagcctgaatcaactaattcaaaactacctgccggaagaccaaattaaacgtctgcggcag

SEQ ID NO: 721401 - DNA, 75 bp, synthetic construct
  source 1..75: mol_type = other DNA
aacatccgtggctaccagaaagagccagagaagtttatggctgtggaatgggataaagagacggcgcaggagttc

SEQ ID NO: 721402 - DNA, 75 bp, synthetic construct
  source 1..75: mol_type = other DNA
actttgtcgtcagctcgaaagcgcgcgccaaaattcgccagttgctgaaaaacctcaagcgtgatgattccgtaa

SEQ ID NO: 721403 - DNA, 75 bp, synthetic construct
  source 1..75: mol_type = other DNA
aaagcgttgggcctgaataatcattactgcattgacgtatattcaggccacaaaatctataaaagcaacctcgtc

SEQ ID NO: 721404 - DNA, 75 bp, synthetic construct
  source 1..75: mol_type = other DNA
atcaccgaaatcaaggtggagatgttcaaccatcagggcgcactggcaaacctgacggcggcgatcaataccacc

SEQ ID NO: 721405 - DNA, 75 bp, synthetic construct
  source 1..75: mol_type = other DNA
gtgttgccgctcactgggcgtataaagaacacggcgaaaccagcacgactgcacaaatccgcgcccagcgttgga

SEQ ID NO: 721406 - DNA, 75 bp, synthetic construct
  source 1..75: mol_type = other DNA
ctgtttgcctccggtgtggcatcgattattcaaattaaggcctggggtccggttggctccgggttgttgtctatt

SEQ ID NO: 721407 - DNA, 75 bp, synthetic construct
  source 1..75: mol_type = other DNA
ggaggcgaatatgccattcagcacgcggtggaaggcgctgaagatagccgggaaggcggtgttaatgatctgaaa

SEQ ID NO: 721408 - DNA, 75 bp, synthetic construct
  source 1..75: mol_type = other DNA
taagcggcggcggtcgtctgatttatctcggtgcgggaacatccggtcgtctggggattctggatgccagcgaat

SEQ ID NO: 721409 - DNA, 75 bp, synthetic construct
  source 1..75: mol_type = other DNA
taaaagagttatagatctagctagttggtttggtggatttgataatgcgtcgattgcggtagttgagatttcgaa

SEQ ID NO: 721410 - DNA, 75 bp, synthetic construct
  source 1..75: mol_type = other DNA
cgcttgtaatgtttggcaccatcgccgcctccggtgtgcgtatcgtttctcgtgagccgctgaaccgccgggcga

SEQ ID NO: 721411 - DNA, 75 bp, synthetic construct
  source 1..75: mol_type = other DNA
gctgaagaccggtggtgctgatgttcctaccatgatggcggctttgttcggcacgttgatgctggcaagttgcac

SEQ ID NO: 721412 - DNA, 75 bp, synthetic construct
  source 1..75: mol_type = other DNA
ctggaatacgcacgccagctcggctgccgcacagtgggaatttcctgtaatccggggagtgccgtttccaccacc

SEQ ID NO: 721413 - DNA, 75 bp, synthetic construct
  source 1..75: mol_type = other DNA
aagcaccgccatgatacagcgagagctggcagataaagtgcttggtagtcatgaactgatgtttgataaaccctg

SEQ ID NO: 721414 - DNA, 75 bp, synthetic construct
  source 1..75: mol_type = other DNA
atgcagcacggacatatcgcccagcgtggcaatcatgatgagctggcgcaacaaagcggctggtatcgcgatatg

SEQ ID NO: 721415 - DNA, 75 bp, synthetic construct
  source 1..75: mol_type = other DNA
acggcgtgaaaccgggtctggtggttggtttgattgctggaggcgaatatgccattcagcacgcggtggaaggcg

SEQ ID NO: 721416 - DNA, 75 bp, synthetic construct
  source 1..75: mol_type = other DNA
tggttgtcggtattgctgccagtggtcgcacgccgtatatgattgccgggctggaatacgctcgccagttgggct

SEQ ID NO: 721417 - DNA, 75 bp, synthetic construct
  source 1..75: mol_type = other DNA
aaggttcgaacagcgcctcggctgaaatcgaccgcgtatcgacactggaaatgtgccgaattatcaatgatgaag

SEQ ID NO: 721418 - DNA, 75 bp, synthetic construct
  source 1..75: mol_type = other DNA
gcacccttatccgcatttttgctttgcaggagttacaccgtcttaaagagcgaggcttaacgcgcggggcgctca

SEQ ID NO: 721419 - DNA, 75 bp, synthetic construct
  source 1..75: mol_type = other DNA
actggaagccgcttaccggttagggctgcaaacgcaggcaccggttaaacgcatctactggtcaaacggccctac

SEQ ID NO: 721420 - DNA, 75 bp, synthetic construct
  source 1..75: mol_type = other DNA
gatcgctttgcagctttctttcagccgacccgcgatgatcaaaacgcaggttgtcaacctgactacgtcctcgcg

SEQ ID NO: 721421 - DNA, 75 bp, synthetic construct
  source 1..75: mol_type = other DNA
attgaaacctatagaagacattgctgatgaactgcgcggggccgactatctggtatggcgcaatgggaggggagc

SEQ ID NO: 721422 - DNA, 75 bp, synthetic construct
  source 1..75: mol_type = other DNA
tacggcggatatgattccgccattattgttccctcggctcaagaatttatacaaccgccgcgccgagcgtctgcg

SEQ ID NO: 721423 - DNA, 75 bp, synthetic construct
  source 1..75: mol_type = other DNA
gtggcagatgacctcgcctccttggtactggacgcacgaatggagcaagaaggctatgcccgtagttccatcaac

SEQ ID NO: 721424 - DNA, 75 bp, synthetic construct
  source 1..75: mol_type = other DNA
gcggcctcaagacaggactttcttttgaaaaaagagaaaattgtgatagaggtgaagaaaacccgtgaatctctg

SEQ ID NO: 721425 - DNA, 75 bp, synthetic construct
  source 1..75: mol_type = other DNA
cgtatttctggctcattctcagcccgagtaccgcaagctcggcccgttcgtggcagatattcaccagtggcataa

SEQ ID NO: 721426 - DNA, 75 bp, synthetic construct
  source 1..75: mol_type = other DNA
gcacgagttacaccgtcttaaagagcgaggcttaactcgcgcggcgcttctcgattatcacagccgctataaact

SEQ ID NO: 721427 - DNA, 75 bp, synthetic construct
  source 1..75: mol_type = other DNA
cgtatttctggcgcattctcagccggagtaccgcaaacttggcccgttcgtggcagatattcatcagtggcaaaa

SEQ ID NO: 721428 - DNA, 75 bp, synthetic construct
  source 1..75: mol_type = other DNA
gtaagttggcagcattacccagcattgaacattaccattttggcgatcatcgtggcatgtgtgacgtggcaggtg

SEQ ID NO: 721429 - DNA, 75 bp, synthetic construct
  source 1..75: mol_type = other DNA
caaaaggttgcctgacacttaacccatggctggtaaaagcgacctcagaatgcatcgactatgtattgctgcacg

SEQ ID NO: 721430 - DNA, 75 bp, synthetic construct
  source 1..75: mol_type = other DNA
gctgcggggacgtctggaagtcacagtcagacaaaaatctgcggaacgcgtgaaggcgttgcttactgagtggta

SEQ ID NO: 721431 - DNA, 75 bp, synthetic construct
  source 1..75: mol_type = other DNA
agcgcgacggtagcacagagcgcattaatctcgacaaaatccatcgcgttctggattgggcggcagaaggactgc

SEQ ID NO: 721432 - DNA, 75 bp, synthetic construct
  source 1..75: mol_type = other DNA
atgacacaacctctttttctgatcgggcctcggggctgtggtaaaacaacggtcggaatggcccttgccgattcg

SEQ ID NO: 721433 - DNA, 75 bp, synthetic construct
  source 1..75: mol_type = other DNA
ctgaaattcaaagcattacaggagcgggcaaaagaaaaaattgccgacattgccgagagccgcgaactcacggtg

SEQ ID NO: 721434 - DNA, 75 bp, synthetic construct
  source 1..75: mol_type = other DNA
ccggcctgctgcctgcggcgctcggcaaagccggtgaagcacaggataacgcccgcgctgccttgcgtatgctta

SEQ ID NO: 721435 - DNA, 75 bp, synthetic construct
  source 1..75: mol_type = other DNA
attcctttccattctgacgggattattaactgtaatgacgctgacggacatcgccgtctgtcggcttccccggat

SEQ ID NO: 721436 - DNA, 75 bp, synthetic construct
  source 1..75: mol_type = other DNA
taataatcatcatcctggcggttattctttatcttgcatacagcaccgccgccatctatctgtcagcagtacacg

SEQ ID NO: 721437 - DNA, 75 bp, synthetic construct
  source 1..75: mol_type = other DNA
cgcgtcactgtggttcggcatgatatacctgttacgacgcatttttctggcagcgaaagggacggaagcgcttgg

SEQ ID NO: 721438 - DNA, 75 bp, synthetic construct
  source 1..75: mol_type = other DNA
gaggctttctgtcattacatagatacctacataacatattattcagctcaggcgacctatgaggaactctcggaa

SEQ ID NO: 721439 - DNA, 75 bp, synthetic construct
  source 1..75: mol_type = other DNA
gtattttacgagttgctaactggtgagttgccctacgaaaatattgatcaaatgatcgaagccgatggtaaattc

SEQ ID NO: 721440 - DNA, 75 bp, synthetic construct
  source 1..75: mol_type = other DNA
actttggtgaccgatgatatttcaggtcaagcgctgcgtcagcatttaaaaaagcctacttttgcgctcacaaca

SEQ ID NO: 721441 - DNA, 75 bp, synthetic construct
  source 1..75: mol_type = other DNA
acaaaagaaaatacgcactctgggaaataatgctggaaaaaatcgctggtttagtgatagagaaagattcagtat

SEQ ID NO: 721442 - DNA, 75 bp, synthetic construct
  source 1..75: mol_type = other DNA
gggtaattaaaacaaaacgcttttatgattattatgaagcagcggttttttttgaggggctatacaggaatgtca

SEQ ID NO: 721443 - DNA, 75 bp, synthetic construct
  source 1..75: mol_type = other DNA
tagacggatttaagaacaggtgtgatgttattttttataatatctataatcgggtagagaaaaataatgactcac

SEQ ID NO: 721444 - DNA, 75 bp, synthetic construct
  source 1..75: mol_type = other DNA
tatagcgccgaaaaccagctactggcttgctttcgcgtagcagaagataacagctccagcaccgctgacgatgat

SEQ ID NO: 721445 - DNA, 75 bp, synthetic construct
  source 1..75: mol_type = other DNA
tcgcacgccgtatgtgattgccgggctggaatacgcacgccagctcggctgccgtacagtgggaatttcctgtaa

SEQ ID NO: 721446 - DNA, 75 bp, synthetic construct
  source 1..75: mol_type = other DNA
ggacctggtggttggtttgattgctggcggtgaatatgccattcagcacgcggtggaaggcgcagaagatagccg

SEQ ID NO: 721447 - DNA, 75 bp, synthetic construct
  source 1..75: mol_type = other DNA
gcgatcgatgttatccacgcccaggtaagcggcggcggtcgactgatttacatcggtgcggggacttccggtcgt

SEQ ID NO: 721448 - DNA, 75 bp, synthetic construct
  source 1..75: mol_type = other DNA
agctgttctcgctgatgatgcaggaacgtgcgtctaccggtcgtatctatattcagaacgttgaccactgcaata

SEQ ID NO: 721449 - DNA, 75 bp, synthetic construct
  source 1..75: mol_type = other DNA
gtcgtcgcacgctgggtattggtgtaatcaacttcgcttactacctggcgaagcacggtaaacgctactctgacg

SEQ ID NO: 721450 - DNA, 75 bp, synthetic construct
  source 1..75: mol_type = other DNA
ctctcagggcggtgtgcgcggcggtgcagcaacgctgttctacccaatttggcatctggaagtagaaagcctgct

SEQ ID NO: 721451 - DNA, 75 bp, synthetic construct
  source 1..75: mol_type = other DNA
tataaaattaagctacgtggtgccggatatcgccttgtctatcgtgtagaggacgacattgtcacagtcactgtt

SEQ ID NO: 721452 - DNA, 75 bp, synthetic construct
  source 1..75: mol_type = other DNA
gttacgcagccatgagcgataacaccttcggcgcaccgaaaaatctgttgctggcaggcgtggtcttagccttaa

SEQ ID NO: 721453 - DNA, 75 bp, synthetic construct
  source 1..75: mol_type = other DNA
gttaaccggtgttgccagccgctatgtcggttttgtcgtcgcgctgatgttgatcgtgctgggtctgttcccggc

SEQ ID NO: 721454 - DNA, 75 bp, synthetic construct
  source 1..75: mol_type = other DNA
ctggaatacgcccgccagctcggttgccgcacagtgggaatttcctgtaatccggggagcgccgtttcaaccacc

SEQ ID NO: 721455 - DNA, 75 bp, synthetic construct
  source 1..75: mol_type = other DNA
taggtgccgaagtggttaccggttcttcgcgaatgaaagcaggcacagcgcagaaactggtgctcaatatgctct

SEQ ID NO: 721456 - DNA, 75 bp, synthetic construct
  source 1..75: mol_type = other DNA
ttggggccgaagtggtcacgggttcttcgcgaatgaaagctggcacggcgcagaaactggtgctcaatatgctct

SEQ ID NO: 721457 - DNA, 75 bp, synthetic construct
  source 1..75: mol_type = other DNA
cgtgatcgtaaacaagtggcagagatcccgctggcagagctttccgttccggcgatcatgaacgccattgcggcg

SEQ ID NO: 721458 - DNA, 75 bp, synthetic construct
  source 1..75: mol_type = other DNA
gtcactcactttctcgatcaggtctatcaggtcagcgatcggatcactgtcttacgcaacggcagtttcgtaggc

SEQ ID NO: 721459 - DNA, 75 bp, synthetic construct
  source 1..75: mol_type = other DNA
tttcccgaaccggttattccgagtactgggcgggaatgatgttcttaaacggtgaagaaggttttatcgagaaga

SEQ ID NO: 721460 - DNA, 75 bp, synthetic construct
  source 1..75: mol_type = other DNA
aaaaacaccgcccacgcacaacagctaggcatcggcaccgtctatcaggaagtcaacctgttacccaacatgtcg

SEQ ID NO: 721461 - DNA, 75 bp, synthetic construct
  source 1..75: mol_type = other DNA
cttacgcaacggcaacttcgttggctgtcgggaaacccgcgagctaccgcagatcgaactggtcaaaatgatgct

SEQ ID NO: 721462 - DNA, 75 bp, synthetic construct
  source 1..75: mol_type = other DNA
ctgcgatcgccacatcaggcttcggtactgggcattggcttctgcccggaagacaggaaaaccgatggcatcatc

SEQ ID NO: 721463 - DNA, 75 bp, synthetic construct
  source 1..75: mol_type = other DNA
ctggagaacagcatcaatattcccccaacgctctataagaatcagggcgagatcatcaacctaatcacaggcgag

SEQ ID NO: 721464 - DNA, 75 bp, synthetic construct
  source 1..75: mol_type = other DNA
ctgattaaagtactgccgcgcatgaccatgccgtcactgaccgaacaggaggccgccgcgctggaactgcccgac

SEQ ID NO: 721465 - DNA, 75 bp, synthetic construct
  source 1..75: mol_type = other DNA
accctgttaaaaccgtgtgccggaacccttcgcggtgtcagcctggcatctgtcgcaaactctgacgtcgatgcg

SEQ ID NO: 721466 - DNA, 75 bp, synthetic construct
  source 1..75: mol_type = other DNA
ctcgatcctgatctctatattgaggaaaacaggcttataccgtgtgctttaaccacacgctttgtttctgatgtt

SEQ ID NO: 721467 - DNA, 75 bp, synthetic construct
  source 1..75: mol_type = other DNA
ccgattaccggcagcgtaacgatctcggcatgtccaccgatacagccgaagaagagccggaacaacaggataacg

SEQ ID NO: 721468 - DNA, 75 bp, synthetic construct
  source 1..75: mol_type = other DNA
caacgaccaccgaaaaacaggacagcagcgcggccacaaatactgccgcaccgtcgccgggacaaagccccgcac

SEQ ID NO: 721469 - DNA, 75 bp, synthetic construct
  source 1..75: mol_type = other DNA
aaaaacaccgcccacgcgcagcagcttggtataggcactgtctatcaggaagttaacttgctgcccaacatgtcg

SEQ ID NO: 721470 - DNA, 75 bp, synthetic construct
  source 1..75: mol_type = other DNA
cagctaacgccgatgccattctggggctgacggaagtggatattgctgccggtgacacagcggcagcacgtagcc

SEQ ID NO: 721471 - DNA, 75 bp, synthetic construct
  source 1..75: mol_type = other DNA
gcgaatatttatcgccagcagtcgccagaaaaagctgaagcgtttatcgcctcgctctctgccagccagcggcgc

SEQ ID NO: 721472 - DNA, 75 bp, synthetic construct
  source 1..75: mol_type = other DNA
agggaatggtgcgcgaacatgagcgctatctgaatacttatccctgcgcctggctacatggacagtttgattacg

SEQ ID NO: 721473 - DNA, 75 bp, synthetic construct
  source 1..75: mol_type = other DNA
cgatggtctggaagagattggcgttgtctgccagcaggcgggcggtcacgcggcattcgttgatgccggtaaact

SEQ ID NO: 721474 - DNA, 75 bp, synthetic construct
  source 1..75: mol_type = other DNA
ccgctcggctgacggggaagagtcggacaacgctgcacaggttgattaaaacaggggaactgtccacctgtcatg

SEQ ID NO: 721475 - DNA, 75 bp, synthetic construct
  source 1..75: mol_type = other DNA
cgaccagttaaccggtaaaaatgtcgaagataactggcgcgtgcgctggatgacgggctattactataaggtcat

SEQ ID NO: 721476 - DNA, 75 bp, synthetic construct
  source 1..75: mol_type = other DNA
tccggaagcgccgtggatagtcagggcacgctcaccctgtgctataccggcaacgtaaaatttgacgacggcagc

SEQ ID NO: 721477 - DNA, 75 bp, synthetic construct
  source 1..75: mol_type = other DNA
cgattttgcaggctgttatgcagggccagccgcgcgcgctggccgacagccactatccccgctggcaccatgcgc

SEQ ID NO: 721478 - DNA, 75 bp, synthetic construct
  source 1..75: mol_type = other DNA
agcaggaataacatatatggtattcaatgtcatccagaaaaaagccattcatcgggatcccaactactaaaaaat

SEQ ID NO: 721479 - DNA, 75 bp, synthetic construct
  source 1..75: mol_type = other DNA
ttcatcaataatggtgaaggtgtaatgagtaatcgttattttccccatcatccagcttcgctgataatacagggt

SEQ ID NO: 721480 - DNA, 75 bp, synthetic construct
  source 1..75: mol_type = other DNA
ccttgttggcatctcgctcccgtcaccggactaatgaacgatccaaatggcttttgctggtctggaggccgctat

SEQ ID NO: 721481 - DNA, 75 bp, synthetic construct
  source 1..75: mol_type = other DNA
gaattctatgcaccacagacgatggaagccccggacgggcgacgattgctggtcggctggatgggggttcctgat

SEQ ID NO: 721482 - DNA, 75 bp, synthetic construct
  source 1..75: mol_type = other DNA
atgcaaaccattgctcatatcgtattataagcttgctatataaaaacaataacaagattagggatgagcacctta

SEQ ID NO: 721483 - DNA, 75 bp, synthetic construct
  source 1..75: mol_type = other DNA
caaaatgcaggtgtctattcctttaatctggcattgtcatataacccgataacaacgacctgcaaacctgatgat

SEQ ID NO: 721484 - DNA, 75 bp, synthetic construct
  source 1..75: mol_type = other DNA
cacttttaaatatcactgataacagcaaaggatacacaaatttaaaagaaattgcggcaaagtcaaacttacaga

SEQ ID NO: 721485 - DNA, 75 bp, synthetic construct
  source 1..75: mol_type = other DNA
caacgcttcaatttccgccgtctgcatgaggaggtcggtcgccgctggacgttcagtttcgattcttccatcggc

SEQ ID NO: 721486 - DNA, 75 bp, synthetic construct
  source 1..75: mol_type = other DNA
accaccagccagttgcatgaggctttggttaaatctgccgctgatttgatctcaccagaagcaccaaattactca

SEQ ID NO: 721487 - DNA, 75 bp, synthetic construct
  source 1..75: mol_type = other DNA
gcgctcatgtttacacgctggaagaagcccaaaaagcctggaattgtgggcgagatatcgatcagcctgtttgcg

SEQ ID NO: 721488 - DNA, 75 bp, synthetic construct
  source 1..75: mol_type = other DNA
cgagatatcgatcagcctgtttgcgcggatagcgtggatgcaatggcagtgtggcacgttgattgccagtacatc

SEQ ID NO: 721489 - DNA, 75 bp, synthetic construct
  source 1..75: mol_type = other DNA
ttgtcaatagtaatactgatgaattaattgatatcgcgcaggcaagacctgttcagtattgtattaatggcacat

SEQ ID NO: 721490 - DNA, 75 bp, synthetic construct
  source 1..75: mol_type = other DNA
ccgctggcccaaaggcgaaagattgattgcagaagcgttagaggtcgcgcctgagaacatctggccatcacgcta

SEQ ID NO: 721491 - DNA, 75 bp, synthetic construct
  source 1..75: mol_type = other DNA
ctttggttttactgctggagtgcagttttgtattgcgtggggaaaaattatcaactacctatggagttgttttat

SEQ ID NO: 721492 - DNA, 75 bp, synthetic construct
  source 1..75: mol_type = other DNA
attgaaatatattagtgcaataacatttcatcgggcgccgattagatacggcgtggaaaaggtggaaggcaaaag

SEQ ID NO: 721493 - DNA, 75 bp, synthetic construct
  source 1..75: mol_type = other DNA
tttaaacaaaatggtgatggtaatctggatgtttatgctaatagcgtccatgttatgcgctttgtctcgggaagt

SEQ ID NO: 721494 - DNA, 75 bp, synthetic construct
  source 1..75: mol_type = other DNA
caagtggcacggtggtggggaatggaactgtgccttcttctggcgcacatacccactcagtatcaggtaccgcta

SEQ ID NO: 721495 - DNA, 75 bp, synthetic construct
  source 1..75: mol_type = other DNA
tctaatgtaccgtcgactcgtcagaagcgagaacatcactctgttcagccgcatgatgtgcctgatatgtacgaa

SEQ ID NO: 721496 - DNA, 75 bp, synthetic construct
  source 1..75: mol_type = other DNA
atgagaaggggtaaacattggttaaataattggcttagaaattgggtcgtttggtcgctgtacgacggcagtggg

SEQ ID NO: 721497 - DNA, 75 bp, synthetic construct
  source 1..75: mol_type = other DNA
ttcccggatgtttacccggcgcgcgacgcgtatacaaagaaaacttgtatttggtgcggtaacggatttaagcag

SEQ ID NO: 721498 - DNA, 75 bp, synthetic construct
  source 1..75: mol_type = other DNA
ttctcccctgaattgtctgtttatccagagcctgacattatcttgggctttccgccgtgcgatgatctcgctgtg

SEQ ID NO: 721499 - DNA, 75 bp, synthetic construct
  source 1..75: mol_type = other DNA
ttctcccctgaattgtctgtatatccagatcctgacattatcctggcttttcctccgtgcgatgatctcgccgtg

SEQ ID NO: 721500 - DNA, 75 bp, synthetic construct
  source 1..75: mol_type = other DNA
gccggaagatgacaagcatcctgctttccctgatgtttacccaccgcgcgacgcgtacacgaagaaaacttgcat

SEQ ID NO: 721501 - DNA, 75 bp, synthetic construct
  source 1..75: mol_type = other DNA
atgagaaaggctaaacactggttaaataactggctaagaagttgggttgtgtggtcgctgtacgacggcagcggg

SEQ ID NO: 721502 - DNA, 75 bp, synthetic construct
  source 1..75: mol_type = other DNA
gttgaagtgaaaagcgttacgactgttgaagaactgcttgcccagcaaaaagcgtgcgatgctgcgccgaccctg

SEQ ID NO: 721503 - DNA, 75 bp, synthetic construct
  source 1..75: mol_type = other DNA
gacgtcaacgacgagaacggtgaaatcgcgctgtgtacgctgtctgctttcaacctgggcgcaattaatagcctg

SEQ ID NO: 721504 - DNA, 75 bp, synthetic construct
  source 1..75: mol_type = other DNA
gatgtcaacgacgagaacggtgaaatcgcgctgtgtacgttgtctgctttcaacctgggcgcaattaatagcctg

SEQ ID NO: 721505 - DNA, 75 bp, synthetic construct
  source 1..75: mol_type = other DNA
gaggatctgcttgctgctgccaataccgcccaggcggcaggaaatggtgcggctcgcgatcgctggctacaacag

SEQ ID NO: 721506 - DNA, 75 bp, synthetic construct
  source 1..75: mol_type = other DNA
gggtgatgatgccggtgaaaaatccgatgtccggcaccggtctacgctggaagccgctgcgcgatcagatctttt

SEQ ID NO: 721507 - DNA, 75 bp, synthetic construct
  source 1..75: mol_type = other DNA
caacgcttcaatttccgccgtttgcatgaggaggtcggtcgccgctggacgttcagtttcgattcttctatcggc

SEQ ID NO: 721508 - DNA, 75 bp, synthetic construct
  source 1..75: mol_type = other DNA
gtggaagtcaaaacagtgaataccgtcgaggagctgttggcacagcaaaaagcgtgcgatgctgcgccgactctg

SEQ ID NO: 721509 - DNA, 75 bp, synthetic construct
  source 1..75: mol_type = other DNA
ctttatatctggcagaagcctatcgccattttggtcatgatgaccgcgcgcggctgttgcttgaggatcagctta

SEQ ID NO: 721510 - DNA, 75 bp, synthetic construct
  source 1..75: mol_type = other DNA
gcaacgggcaatctacctgaaacaatggtcccaggcagatacgctatacaatgaagcacgccagcagaacacatt

SEQ ID NO: 721511 - DNA, 75 bp, synthetic construct
  source 1..75: mol_type = other DNA
cataatgtcccggcggcggtgagtgatttgcgcgccgcgctggaactggaaccgaatacaggcagcgcttggtta

SEQ ID NO: 721512 - DNA, 75 bp, synthetic construct
  source 1..75: mol_type = other DNA
tcgggcgcaatatgctgctggaaggcgacctgctttcggtttacagccgtgtgtttgccgacaccggagaaaacg

SEQ ID NO: 721513 - DNA, 75 bp, synthetic construct
  source 1..75: mol_type = other DNA
gcgcttggttacgccttgtgggatagcggtgatatcgcacagtcgcgggaaatgctcgaacaggcgcataaaggg

SEQ ID NO: 721514 - DNA, 75 bp, synthetic construct
  source 1..75: mol_type = other DNA
cctgctactcagccgctggaaagccaccgatttgttcctgaaagatattcaggttctggtttctgaactgtcgat

SEQ ID NO: 721515 - DNA, 75 bp, synthetic construct
  source 1..75: mol_type = other DNA
ccaggaagcctgaaaggcggcctgcgcgtgaccgaacagggcgagatgatccgctttaagtacggtctgccagaa

SEQ ID NO: 721516 - DNA, 75 bp, synthetic construct
  source 1..75: mol_type = other DNA
gccgaaaggcgaggctgccagcaacccggaagtgatcgcccgcaccctgcgtaaactgaaaaaccagccggaact

SEQ ID NO: 721517 - DNA, 75 bp, synthetic construct
  source 1..75: mol_type = other DNA
gcaggcagagctactgcaccgctcccgccaggcggaaaaagaaggtcatgaaccggatccccgcgtagaacaagc

SEQ ID NO: 721518 - DNA, 75 bp, synthetic construct
  source 1..75: mol_type = other DNA
agtcgtggcataccgatgaaatccgcaaactacgcccaagcccaattgatgaagccaaatggggttttgcagtag

SEQ ID NO: 721519 - DNA, 75 bp, synthetic construct
  source 1..75: mol_type = other DNA
ccaggaagcctgaaaggtggcctgcgcgtgaccgaacagggcgagatgatccgctttaaatatggtctgccagaa

SEQ ID NO: 721520 - DNA, 75 bp, synthetic construct
  source 1..75: mol_type = other DNA
cattatatctggcggaagcctatcgccattttaatcatgatgaccgcgcacgactgttgcttgaggatcaactga

SEQ ID NO: 721521 - DNA, 75 bp, synthetic construct
  source 1..75: mol_type = other DNA
ttgcggaaaccctgactcaggcgcaggagcgcggagaagacatgggtgattacggcgtattgtgccgttatcagc

SEQ ID NO: 721522 - DNA, 75 bp, synthetic construct
  source 1..75: mol_type = other DNA
aagctatcgtagctacgggcaactggaagccgagtaccgcatcggacgcaatatgctgctggaaggcgacctgct

SEQ ID NO: 721523 - DNA, 75 bp, synthetic construct
  source 1..75: mol_type = other DNA
tcgatgcggcgcaatatgtccgccaggatattcaggcgtggacggcagattatcgcgtcagctggcatcagaagg

SEQ ID NO: 721524 - DNA, 75 bp, synthetic construct
  source 1..75: mol_type = other DNA
gtacatctttttgccaaccgttggacgccgctggttgtcgggcgcaacatcgggctgatggcaatggaattattc

SEQ ID NO: 721525 - DNA, 75 bp, synthetic construct
  source 1..75: mol_type = other DNA
tgccgcagaagattaccaactggcggcgctagggcaggttgtcgaattgcacaatgttgggcaacggctgtttgc

SEQ ID NO: 721526 - DNA, 75 bp, synthetic construct
  source 1..75: mol_type = other DNA
cgttgaggtgaaactggagagtggtgagacgctgacggggagcgtgctggtagccgctgacggcacccattcagc

SEQ ID NO: 721527 - DNA, 75 bp, synthetic construct
  source 1..75: mol_type = other DNA
acataagcacgatcctaaaggcggctggcatattgatacattaattttagctgtcagtggtgaagatactaataa

SEQ ID NO: 721528 - DNA, 75 bp, synthetic construct
  source 1..75: mol_type = other DNA
ctactagtacagctctgcaggctagagtcattctgtaccaaccaagtcaacgtcccttggcgctgaaggggcagt

SEQ ID NO: 721529 - DNA, 75 bp, synthetic construct
  source 1..75: mol_type = other DNA
ggacaactggaagccgaataccgcatcgagcgcaatatgctgctggaaggcgacctgctttcggtttacagccgt

SEQ ID NO: 721530 - DNA, 75 bp, synthetic construct
  source 1..75: mol_type = other DNA
cgcttacgttgcgcgggcgacaatttatcgccaacgtcataatgtcccggcggcggtgagtgatttgcgcgccgc

SEQ ID NO: 721531 - DNA, 75 bp, synthetic construct
  source 1..75: mol_type = other DNA
ggatcatgattgtgatggggttcaccgggaaagctgctgcggcaatcaaggagagctatatcgcagcattcaact

SEQ ID NO: 721532 - DNA, 75 bp, synthetic construct
  source 1..75: mol_type = other DNA
cggcacgcagatgttgttgaggcaatattgcactgtgctgaacgtcgccgcgatgtgtcagatggtggtgtggag

SEQ ID NO: 721533 - DNA, 75 bp, synthetic construct
  source 1..75: mol_type = other DNA
aggcgagtggcatcaccgtgaaaatccttaccggcgacagcgaactggtggcggcgaaggtgtgccacgaagtgg

SEQ ID NO: 721534 - DNA, 75 bp, synthetic construct
  source 1..75: mol_type = other DNA
agccataccaactgtaaaaatgatggctgccacctgctgtttattcagtgtccagtatgtgcggaaaaatacaaa

SEQ ID NO: 721535 - DNA, 75 bp, synthetic construct
  source 1..75: mol_type = other DNA
gttgaaacatttcgcgcgcagctctatgccttcgacccggctttagagggcttacgcctgaatatcgcgttggat

SEQ ID NO: 721536 - DNA, 75 bp, synthetic construct
  source 1..75: mol_type = other DNA
accggcggcattcgttgtgaaaaggccagtgcctggatgaaacataacggattcaacaaagtctggcatatcgag

SEQ ID NO: 721537 - DNA, 75 bp, synthetic construct
  source 1..75: mol_type = other DNA
ggatgcgcaaaattctgcgagcagaaggaagcgaaattcgcttgcgcatgtggctttatccgtggctcacctggc

SEQ ID NO: 721538 - DNA, 75 bp, synthetic construct
  source 1..75: mol_type = other DNA
agcgggcccggcggtattactggcctatctgttcgccggattactggtggttatgattatgcggatgctggcgga

SEQ ID NO: 721539 - DNA, 75 bp, synthetic construct
  source 1..75: mol_type = other DNA
ggcttattagcgatagggattatctgtaccgtgccaattatggctcgctggaaaaagctggtattgtggcaaaaa

SEQ ID NO: 721540 - DNA, 75 bp, synthetic construct
  source 1..75: mol_type = other DNA
ataccttttctcagaagtggccgtccaggcggtcaccgaactcgataataaagcggctcattgccatacgccagt

SEQ ID NO: 721541 - DNA, 75 bp, synthetic construct
  source 1..75: mol_type = other DNA
tatcgtgaagaagcgattattaaatccggtatgaacccatttctgctggatagcgaagatgtgtttatcgattta

SEQ ID NO: 721542 - DNA, 75 bp, synthetic construct
  source 1..75: mol_type = other DNA
gaaagagaacgcggcgaatattaaaggattaacctttacctacgaaccaaaagtattgcgtcacttcaccgcaaa

SEQ ID NO: 721543 - DNA, 75 bp, synthetic construct
  source 1..75: mol_type = other DNA
gatgacgggaaatccttctgggtactgcgcatgaaggtacgcgatcgcattgttgccgacggtattgacgatcct

SEQ ID NO: 721544 - DNA, 75 bp, synthetic construct
  source 1..75: mol_type = other DNA
gtctggaaggtggagcgatggagcgtctggctgtgggtctgtatgatggcatgaatcatgactggctggcttatc

SEQ ID NO: 721545 - DNA, 75 bp, synthetic construct
  source 1..75: mol_type = other DNA
tcgatactggcgtgcgttacgactttaaaggtaactttgacctcgaaggattagaacgcggtattgaagaagttg

SEQ ID NO: 721546 - DNA, 75 bp, synthetic construct
  source 1..75: mol_type = other DNA
attaagcgttaaaaactacggcgaatttgagttctggctggcgctatgcaaagtgattgccatcctggcctttat

SEQ ID NO: 721547 - DNA, 75 bp, synthetic construct
  source 1..75: mol_type = other DNA
ccgtcgggctgattgcccagcaattgcactgggttgatcgtgaaccgtttaccgacacaatgcgttgtacggtga

SEQ ID NO: 721548 - DNA, 75 bp, synthetic construct
  source 1..75: mol_type = other DNA
aggctgtctgcgacaagctcggcattgaactgcacacagtaaactttgcagccgaatactgggacaacgtctttg

SEQ ID NO: 721549 - DNA, 75 bp, synthetic construct
  source 1..75: mol_type = other DNA
agctggaaaacacctgccgctggttaacggtaatggccgccgggcaggaagtgttgattcaggatttgcccggcg

SEQ ID NO: 721550 - DNA, 75 bp, synthetic construct
  source 1..75: mol_type = other DNA
atcgaccagctagtgcccggcgatattattaaactggcagcaggagatatgatcccggctgatttacgtattttg

SEQ ID NO: 721551 - DNA, 75 bp, synthetic construct
  source 1..75: mol_type = other DNA
cagattgcgcaaagcctgttcccggtcggcgaactggaaaaaccgcaggtgcgtaagattgctgaagatctcggt

SEQ ID NO: 721552 - DNA, 75 bp, synthetic construct
  source 1..75: mol_type = other DNA
ctgtcggtctgattgcccagcagctgcactgggtcgatcgcgagccgttcaccggcactatgcgttgcacggtaa

SEQ ID NO: 721553 - DNA, 75 bp, synthetic construct
  source 1..75: mol_type = other DNA
attccgatctggatgctgccgtcagcgcctatcaacaaggggcgtttgattatctgcccaaaccgtttgatatcg

SEQ ID NO: 721554 - DNA, 75 bp, synthetic construct
  source 1..75: mol_type = other DNA
ctgtaccgtgccaattatggcgcgctggaaaaagctaataatgtggcaaaaattacccgcgcataatacgcatta

SEQ ID NO: 721555 - DNA, 75 bp, synthetic construct
  source 1..75: mol_type = other DNA
tttgaattctggctggcgctgtgcaaagtcattgccattctggcgtttatattccttggcgctgtagcgattagc

SEQ ID NO: 721556 - DNA, 75 bp, synthetic construct
  source 1..75: mol_type = other DNA
ttgaacagcgggtgcaggaaggtaagttccgtgaggatctgttccaccgcctgaacgttatccgcgttcatctgc

SEQ ID NO: 721557 - DNA, 75 bp, synthetic construct
  source 1..75: mol_type = other DNA
gtgttgattcaggatttgcccggcgaactgtttgaatcaacggttgcggagagtacttcgcaaatgcaaccggac

SEQ ID NO: 721558 - DNA, 75 bp, synthetic construct
  source 1..75: mol_type = other DNA
ccaaaagatttgatcgaatcagaactgtttggccacgagaaaggcgcgtttactggcgcgaataccattcgtcag

SEQ ID NO: 721559 - DNA, 75 bp, synthetic construct
  source 1..75: mol_type = other DNA
tccccggcaaagcccgcgctgaatacggcgagcaacgtcaatattgcccggtttgtggttctatgccggtgtcca

SEQ ID NO: 721560 - DNA, 75 bp, synthetic construct
  source 1..75: mol_type = other DNA
tgccggagaatgtaaagatccgcagaccatggtgcctaaagccattaacagcgtgatttggcgtattggcctgtt

SEQ ID NO: 721561 - DNA, 75 bp, synthetic construct
  source 1..75: mol_type = other DNA
attcagggcgtagtgtttgcttttgcctccattgaaatggtgggtacagctgccggagaatgtaaagatccgcag

SEQ ID NO: 721562 - DNA, 75 bp, synthetic construct
  source 1..75: mol_type = other DNA
cgaatggctgattcataactaccgcagacgtgggtatgagtttaggaaagccctcagcctcgattatcgtcactg

SEQ ID NO: 721563 - DNA, 75 bp, synthetic construct
  source 1..75: mol_type = other DNA
ggatgttgggtcttgaaccgaagaccacggcggtgcggagtccggagagtaacggcatagcagagagcttcgtga

SEQ ID NO: 721564 - DNA, 75 bp, synthetic construct
  source 1..75: mol_type = other DNA
ggatgttgggacttgaaccgaagatcacggcggtgcggagtccggagagtaacgggatagcagagagcttcgtga

SEQ ID NO: 721565 - DNA, 75 bp, synthetic construct
  source 1..75: mol_type = other DNA
tttttgggtgagaaagccgcttatgttgctggctggatgtacttcatcaactgggcgatgacggggattgttgat

SEQ ID NO: 721566 - DNA, 75 bp, synthetic construct
  source 1..75: mol_type = other DNA
cgtgacatgttccgcccgatggtggagcgtccggtaagacgctgcgaaatccagtggctgaacaatatttactac

SEQ ID NO: 721567 - DNA, 75 bp, synthetic construct
  source 1..75: mol_type = other DNA
aacaggacaagccgctgaatgctcgccagaaatctgcaatgcgcgagctgccgtcctggtcagaactgattgagg

SEQ ID NO: 721568 - DNA, 75 bp, synthetic construct
  source 1..75: mol_type = other DNA
atccgcaggggcgcggcattattgagcgcctgaaccggacgctgccgatgcgtatagccaggaggtatcgcacct

SEQ ID NO: 721569 - DNA, 75 bp, synthetic construct
  source 1..75: mol_type = other DNA
gtcatgctgttatgcagcgaggacgatgatcgggaatggataaagcgccgccgtgaaacgtgtctggagaacgtg

SEQ ID NO: 721570 - DNA, 75 bp, synthetic construct
  source 1..75: mol_type = other DNA
gctgaggaaaaaattcgcgatgctgaagatgaaggtattcagattctggaacacaaacaggctgaaccctggctg

SEQ ID NO: 721571 - DNA, 75 bp, synthetic construct
  source 1..75: mol_type = other DNA
tagctggctacctgaatttctggcgcagtatcgccaggtgaacggcagacctatgtctgaagcctacgaggattt

SEQ ID NO: 721572 - DNA, 75 bp, synthetic construct
  source 1..75: mol_type = other DNA
ggatgttgggccttgaaccgaagaacacggcggtgcggagtccggagagtaacggtatagcagagagcttcgtga

SEQ ID NO: 721573 - DNA, 75 bp, synthetic construct
  source 1..75: mol_type = other DNA
ggccgaatggctcattcagtgttaccgcaggcgcggatgcgaggttaaaaaagcccttagcctcgactaccgtca

SEQ ID NO: 721574 - DNA, 75 bp, synthetic construct
  source 1..75: mol_type = other DNA
agtgacctttgttatcgacggtggcacgcgctttgtggtgggctggagccttgacctggctgaaaatgttttcgc

SEQ ID NO: 721575 - DNA, 75 bp, synthetic construct
  source 1..75: mol_type = other DNA
aatgttttcgccgtagccggtgccatacagcacggtattcgccatcacggcaaaccgtttctgtattactcggat

SEQ ID NO: 721576 - DNA, 75 bp, synthetic construct
  source 1..75: mol_type = other DNA
agacgtgggtatgagtttgagaaagacctcagccttgaccgtcgccactggataatctccgtcaggctcccttat

SEQ ID NO: 721577 - DNA, 75 bp, synthetic construct
  source 1..75: mol_type = other DNA
atggcgcacgataccagattgcacaattctgccgcctttgccagtaggcaagggcggcgttcgcacgtatttaaa

SEQ ID NO: 721578 - DNA, 75 bp, synthetic construct
  source 1..75: mol_type = other DNA
tatgagtttaggaaagccctcagcctcgattatcgtcactggataatctacgtcaggctcccttattccgaacgc

SEQ ID NO: 721579 - DNA, 75 bp, synthetic construct
  source 1..75: mol_type = other DNA
gaatacgagcgtaatttccagcggggattgcagctgctcgaagcgaaattaaaagaaaatgatccgctggcctga

SEQ ID NO: 721580 - DNA, 75 bp, synthetic construct
  source 1..75: mol_type = other DNA
aaataccgcacctatttcgggaaaggtgcagatcgcgagacgttacgcaaaaccaaccgcgatttacgctcggca

SEQ ID NO: 721581 - DNA, 75 bp, synthetic construct
  source 1..75: mol_type = other DNA
attctgatgattctgccgtctttgccagctggcacgggcggcgctcccgcactttcaaatctgactggttccagc

SEQ ID NO: 721582 - DNA, 75 bp, synthetic construct
  source 1..75: mol_type = other DNA
ttgtcaacgtgctggagcacaagccacaggagccatggctggaaaacatataccgcccggtaggtaatacggtgg

SEQ ID NO: 721583 - DNA, 75 bp, synthetic construct
  source 1..75: mol_type = other DNA
acaaaagcagctgcgggaaatgcagccatgttacgcaaacgtaagggaacaaaagccatcgaatttaatatcgat

SEQ ID NO: 721584 - DNA, 75 bp, synthetic construct
  source 1..75: mol_type = other DNA
aacggctccggggaaaccgccgacatcctggataaggaggttgtggggatcctgccgcgactggggattaatcac

SEQ ID NO: 721585 - DNA, 75 bp, synthetic construct
  source 1..75: mol_type = other DNA
tctatggcggtgaacagaatctgatcaccatcaacatgagcgagtatcaggagtctcacacagtctccactctga

SEQ ID NO: 721586 - DNA, 75 bp, synthetic construct
  source 1..75: mol_type = other DNA
ctgggatttacgcttctggtcggagactcgctgtgtgagtttacggtgaaggaacgtaatattgagttcaaggct

SEQ ID NO: 721587 - DNA, 75 bp, synthetic construct
  source 1..75: mol_type = other DNA
agtcatagtgctgtgtttaacggtgctgggatttacgcttctggtcggagattcgctgtgtgagttcaccgtaaa

SEQ ID NO: 721588 - DNA, 75 bp, synthetic construct
  source 1..75: mol_type = other DNA
gtcagatcatcgaagacgtgctggcagaaatgcaaaccagcgacaagtccgtttcatttcgcgcacctgtcgccg

SEQ ID NO: 721589 - DNA, 75 bp, synthetic construct
  source 1..75: mol_type = other DNA
gcgggtcattggtaaaggcaacaaagagcgcctggtaccgttaggtgaagaggcggtttactggctggaaacgta

SEQ ID NO: 721590 - DNA, 75 bp, synthetic construct
  source 1..75: mol_type = other DNA
cggacctacgcgtggtacaaatgctgctgggccatagcgatctctccacgactcaaatttatacgcatgtcgcca

SEQ ID NO: 721591 - DNA, 75 bp, synthetic construct
  source 1..75: mol_type = other DNA
tcgctgtgtgagtttacggtgaaggaacgtaatattgagttcaaggctgttctcgcttacgaaccgaagaagtag

SEQ ID NO: 721592 - DNA, 75 bp, synthetic construct
  source 1..75: mol_type = other DNA
cgagcagtcttctcttaagtacggcagctatggctgctgatgccagtgactgggagagcatggttgcccaggcaa

SEQ ID NO: 721593 - DNA, 75 bp, synthetic construct
  source 1..75: mol_type = other DNA
gacggataatggttcatgctaccgggcgaatgaaacacgacagttggcctggatgttgggccttgaaccgaagag

SEQ ID NO: 721594 - DNA, 75 bp, synthetic construct
  source 1..75: mol_type = other DNA
gacggataatggttcatgctaccgggccaatgaaacacgacagttggcctggatgttgggccttgaaccgaagac

SEQ ID NO: 721595 - DNA, 75 bp, synthetic construct
  source 1..75: mol_type = other DNA
atcgccagattggcaaaaacgccgcgcgttatgcgaagcgcgagtctccacaacctgttccgaccctcaacgatc

SEQ ID NO: 721596 - DNA, 75 bp, synthetic construct
  source 1..75: mol_type = other DNA
aagtgattgccggtatcgaagaagaaggtgttaaagcccgtgtgattcgctgctttaaatcgtctgatgttgcct

SEQ ID NO: 721597 - DNA, 75 bp, synthetic construct
  source 1..75: mol_type = other DNA
cacaacgcgattttgaaagagctggttgctggcatcgaagaagaggggctgcatgcgcgagtagtgaggatcctg

SEQ ID NO: 721598 - DNA, 75 bp, synthetic construct
  source 1..75: mol_type = other DNA
gctgggtcacagtgatctctccacgactcaaatttatacgcatgtcgccactgagcgtctgcggcaacttcatca

SEQ ID NO: 721599 - DNA, 75 bp, synthetic construct
  source 1..75: mol_type = other DNA
cgcttacggaaaatcaacgtaaagttgcagaagcgcgcattgctcttgtctgtgaagttctacgaattagccagg

SEQ ID NO: 721600 - DNA, 75 bp, synthetic construct
  source 1..75: mol_type = other DNA
tggaatctttggtcattactgctaatgcccgtaaagggaaagagcgaactctgagcgcaattacgctcaaacgtt

SEQ ID NO: 721601 - DNA, 75 bp, synthetic construct
  source 1..75: mol_type = other DNA
gcgcagggtaacctggaagaacgcctggaatctttggtcattactgctaatgcccgtaaagggaaagagcgaact

SEQ ID NO: 721602 - DNA, 75 bp, synthetic construct
  source 1..75: mol_type = other DNA
gagaatgacattcacaatgtgcttcgacattatcaaataacatctgctgatgttgagaaggcgttaattcagcaa

SEQ ID NO: 721603 - DNA, 75 bp, synthetic construct
  source 1..75: mol_type = other DNA
gagtctcacaccgtctccacgctgaaaggcgcgccgcccggctatgttggctatggcgaaggcggtgtgttgacg

SEQ ID NO: 721604 - DNA, 75 bp, synthetic construct
  source 1..75: mol_type = other DNA
gacacactggcgtcgcagattatatcgctgaaaagagaactatttgatgcggatgaacgctggcagcaagaacta

SEQ ID NO: 721605 - DNA, 75 bp, synthetic construct
  source 1..75: mol_type = other DNA
tttaatctgcggcctgttttcgttttttattttgcgtgcgttgggtgagttggtattacatcgcccttccagtgg

SEQ ID NO: 721606 - DNA, 75 bp, synthetic construct
  source 1..75: mol_type = other DNA
attcctcaactatctggtgccgtcgcgcgtatttgagattgtgttgaacttcgcgtcgctgggaatcatcgcttc

SEQ ID NO: 721607 - DNA, 75 bp, synthetic construct
  source 1..75: mol_type = other DNA
tacagaccagtggagaaagtcgtgttagtactggctgatgaaccggatgatgaatatgagagtgaccgcgacgaa

SEQ ID NO: 721608 - DNA, 75 bp, synthetic construct
  source 1..75: mol_type = other DNA
gcacagggcaacctggaagaccgcctggaatctttggtcattactgctaatgcccgtaaggggaaagaacgaacc

SEQ ID NO: 721609 - DNA, 75 bp, synthetic construct
  source 1..75: mol_type = other DNA
gcgttgagtgaaatcacgctgaaacgctggattgcggcctttaacaaggcacagaacgccgctgaacgcctgctt

SEQ ID NO: 721610 - DNA, 75 bp, synthetic construct
  source 1..75: mol_type = other DNA
cgaacccagggcagttttgtttcgacacagcgtgacagccatttcagctcatgggcacgcaggggcgtcatttca

SEQ ID NO: 721611 - DNA, 75 bp, synthetic construct
  source 1..75: mol_type = other DNA
agtggagtggctgacggataatggttcatgctaccgggctaatgaaacacggcagtttgcccggatgctgggcct

SEQ ID NO: 721612 - DNA, 75 bp, synthetic construct
  source 1..75: mol_type = other DNA
agtggagtggctgacggataatggttcatgctaccgggctaatgaaacacgccagtttgcccggatggtgggcct

SEQ ID NO: 721613 - DNA, 75 bp, synthetic construct
  source 1..75: mol_type = other DNA
agtggagtggctgacggataatggttcatgctaccgggctaatgaaacacgccagtttgcccggatgctggggct

SEQ ID NO: 721614 - DNA, 75 bp, synthetic construct
  source 1..75: mol_type = other DNA
cgcatagtgcgctgggttaccgctcgccacgggaatatctgcggcagcgggcttgtaatgggttaagtgataaca

SEQ ID NO: 721615 - DNA, 75 bp, synthetic construct
  source 1..75: mol_type = other DNA
cactgggcggtgactaccggcggcttcaacagtgaaacagtacaggacgtcatgctgggagcggtggaacgccgc

SEQ ID NO: 721616 - DNA, 75 bp, synthetic construct
  source 1..75: mol_type = other DNA
tctccagtggagtggctgacggataatggttcatgctaccgggctaatgaaacacggcagtttgcccggatgttg

SEQ ID NO: 721617 - DNA, 75 bp, synthetic construct
  source 1..75: mol_type = other DNA
tagggatcgcctcagaaaacggaatctatggtcactcccgtttttgcaacaccgattttgacgacaagttggctt

SEQ ID NO: 721618 - DNA, 75 bp, synthetic construct
  source 1..75: mol_type = other DNA
atattcaggtcaaatgcctgcattgtggagcatggtttccttcagctatatggattggggatcgtgagtcccttc

SEQ ID NO: 721619 - DNA, 75 bp, synthetic construct
  source 1..75: mol_type = other DNA
ccggaacgccaacaacgccaacagcgccacaggggactaataatactcagatcgcaagcacggcttatgttatgg

SEQ ID NO: 721620 - DNA, 75 bp, synthetic construct
  source 1..75: mol_type = other DNA
tcatgctaccgggctaatgaaacacggcagtttgcccggatgttggggcttgaaccgaatgatcctacccacgta

SEQ ID NO: 721621 - DNA, 75 bp, synthetic construct
  source 1..75: mol_type = other DNA
ccgcttcggcaacgatcttccgtcgtctccagtggagtggctgacggataatggttcatgctaccgggctaatga

SEQ ID NO: 721622 - DNA, 75 bp, synthetic construct
  source 1..75: mol_type = other DNA
gagtggctgacggataatggttcatgctaccgggctaatgaaacacgccagttcgcccggatgttgggacttgaa

SEQ ID NO: 721623 - DNA, 75 bp, synthetic construct
  source 1..75: mol_type = other DNA
tgtctccggtgtcgcgtgcgcagttgcacgtcattctcagacgaaccgatgactggatggatggccgccgcagtc

SEQ ID NO: 721624 - DNA, 75 bp, synthetic construct
  source 1..75: mol_type = other DNA
tccgctgatgaatctgatcccgaccgactggcaggaagaagctgcgcggcaatccaacgatggcggcagcagtca

SEQ ID NO: 721625 - DNA, 75 bp, synthetic construct
  source 1..75: mol_type = other DNA
ctgagctacgataaaggtgaagcaaacggcgtctgggcatcgcttagcggtgaccagttaaccggtaaaaatgtc

SEQ ID NO: 721626 - DNA, 75 bp, synthetic construct
  source 1..75: mol_type = other DNA
tgcgtaatagcctctactggcatctggataacgacgcggtcagccatctgatgcgtgttgccagtgggcttgatt

SEQ ID NO: 721627 - DNA, 75 bp, synthetic construct
  source 1..75: mol_type = other DNA
tgggccaggcatattcacagaaaggcgatcgcgccaatgcagtggcgaatctggaaaaagccctcgcactggacc

SEQ ID NO: 721628 - DNA, 75 bp, synthetic construct
  source 1..75: mol_type = other DNA
ctctggtcatgaccaggacagagcggcgctggcgcatatcaacagcctgccgcgcgcgcagtggaacagcaatat

SEQ ID NO: 721629 - DNA, 75 bp, synthetic construct
  source 1..75: mol_type = other DNA
tcaggagctggttaatcgactgcaaagcgatcaggtgctggaaaccgctaaccgcctgcgagaaagcggcaaaga

SEQ ID NO: 721630 - DNA, 75 bp, synthetic construct
  source 1..75: mol_type = other DNA
atgttgagccggaagtaggtaaactggcgaatgcttatctttatagcgttgacgatctgcaaagcattatttcgc

SEQ ID NO: 721631 - DNA, 75 bp, synthetic construct
  source 1..75: mol_type = other DNA
aaccatcgagctggtagcgcgtcatctgcgcgaacataaagtacagaagatgattatcgccaaccgcactcgcga

SEQ ID NO: 721632 - DNA, 75 bp, synthetic construct
  source 1..75: mol_type = other DNA
cagccgttgtctccgggtgtcgcgtgcgcagttgcacgtcattctcagacgaaccgatgactggatggatggccg

SEQ ID NO: 721633 - DNA, 75 bp, synthetic construct
  source 1..75: mol_type = other DNA
ggcgaatgcttatctttatagcgttgacgatctgcaaagcatcatttcgcataacctggcgcagcgtaaagccgc

SEQ ID NO: 721634 - DNA, 75 bp, synthetic construct
  source 1..75: mol_type = other DNA
tgcgtaatagcctctactggcatcaggataacgatgcggttagccacttaatgcgtgtcgccagtggtctggatt

SEQ ID NO: 721635 - DNA, 75 bp, synthetic construct
  source 1..75: mol_type = other DNA
gggcggcgacgcccaagccattatgcaggatctggcatggaaactgactaaccgcctgatccatgcgccaacgaa

SEQ ID NO: 721636 - DNA, 75 bp, synthetic construct
  source 1..75: mol_type = other DNA
taaactcccttattttacaggtgcagatcgcgccgcgttaaccgcactgacaagtgttggacgtgccattcttag

SEQ ID NO: 721637 - DNA, 75 bp, synthetic construct
  source 1..75: mol_type = other DNA
attctgataactcagccgaccctgccatccggtacgggcggcgttcacacgtctttaaaactgactggtaccagc

SEQ ID NO: 721638 - DNA, 75 bp, synthetic construct
  source 1..75: mol_type = other DNA
atggcgcacgataccaaattacacaattctgatgattctgccgtctttgccagcaggcacgggctgcgttctcac

SEQ ID NO: 721639 - DNA, 75 bp, synthetic construct
  source 1..75: mol_type = other DNA
gggtaacggactttacggctgataagacatcggctaaagcggacggcaacgaagcgattacttataccgcgacgg

SEQ ID NO: 721640 - DNA, 75 bp, synthetic construct
  source 1..75: mol_type = other DNA
gactggttccagcatcccccatgcactgaagaacaggccgagtggctaattcagtgctaccgcagacacggatac

SEQ ID NO: 721641 - DNA, 75 bp, synthetic construct
  source 1..75: mol_type = other DNA
attacacaattctgatgattctgccgtctttgccagcaggcacgggcggcgttcccgcactttcaaatctgactg

SEQ ID NO: 721642 - DNA, 75 bp, synthetic construct
  source 1..75: mol_type = other DNA
atctacgtcagactcccttattccgaacgcccaccgcgtccgtcccgcacattccagcaacgcatctggaggtaa

SEQ ID NO: 721643 - DNA, 75 bp, synthetic construct
  source 1..75: mol_type = other DNA
ggacccggcacaagcataagctaaaaaaaacatttattatgcttagtgctggtttaggattgtttttttatgtta

SEQ ID NO: 721644 - DNA, 75 bp, synthetic construct
  source 1..75: mol_type = other DNA
cttataacctaataacacaaaaccctcttcctggggttaatgttaatactccaaatgtctatgcggtttgtgtag

SEQ ID NO: 721645 - DNA, 75 bp, synthetic construct
  source 1..75: mol_type = other DNA
cggtaaggcaaccgtaacgttgaagtcgagtacgccaggacaggtcgtcgtgtctgctaaaaccgcggagatgac

SEQ ID NO: 721646 - DNA, 75 bp, synthetic construct
  source 1..75: mol_type = other DNA
tgatgaaagagggtcagccagtgcagggacactccgttgcattcacaacaaactttgggatgttcaacggtaagt

SEQ ID NO: 721647 - DNA, 75 bp, synthetic construct
  source 1..75: mol_type = other DNA
gttcaaataatgctgcatatttatctgtctcagtagacagtttgaaaaaattatatagtcaatgggggccagcaa

SEQ ID NO: 721648 - DNA, 75 bp, synthetic construct
  source 1..75: mol_type = other DNA
cagtatgttaacgagttaagaacattatcaggcagccgttacgatctggttcagcgtaataacaatattattctg

SEQ ID NO: 721649 - DNA, 75 bp, synthetic construct
  source 1..75: mol_type = other DNA
gcctcgattatcgtcactggataatctctgtcaggctcccttattccgaacgcccaccgcgtccgtcccgcacat

SEQ ID NO: 721650 - DNA, 75 bp, synthetic construct
  source 1..75: mol_type = other DNA
aagttgactgagttaccagcagttgaacctattcctactggttcttggttcaaaaaaaaaatgaagaaatggatg

SEQ ID NO: 721651 - DNA, 75 bp, synthetic construct
  source 1..75: mol_type = other DNA
cagctggatgccttgccagaagaagtgagtccgcagaagagcgactcctggctggcgacccgcgttaaaaagtta

SEQ ID NO: 721652 - DNA, 75 bp, synthetic construct
  source 1..75: mol_type = other DNA
tatcattttattttcgcttggtacactggcctgtggtctggctcccggatatgcagtaatgtttattgcccgcat

SEQ ID NO: 721653 - DNA, 75 bp, synthetic construct
  source 1..75: mol_type = other DNA
ttaaaactgaaacccggtgacgtcctgccgatagaaaaacccgaccgcatcatcgcccatgttgacggcgtcccg

SEQ ID NO: 721654 - DNA, 75 bp, synthetic construct
  source 1..75: mol_type = other DNA
cctgtttgatgagtcaggggcattgattgccgtggggaactgcccggaaagttataaaccgcaactggctgaagg

SEQ ID NO: 721655 - DNA, 75 bp, synthetic construct
  source 1..75: mol_type = other DNA
atagccgctattatcaaggatgagtattcaagtttacttgaatggattgcttaccatcgagtattaggtgttgat

SEQ ID NO: 721656 - DNA, 75 bp, synthetic construct
  source 1..75: mol_type = other DNA
ttcgttaggcgttgatgcctgtcaggtcgcaatgagagttggcgagcgcggacgaacgatagttctcttcgattg

SEQ ID NO: 721657 - DNA, 75 bp, synthetic construct
  source 1..75: mol_type = other DNA
caagatgtttacaggtaggctcactgtacaccctgactatgtggacaatcggccatcacgccgcgatttcttcaa

SEQ ID NO: 721658 - DNA, 75 bp, synthetic construct
  source 1..75: mol_type = other DNA
agtgcactgggttatcgctcgccacgggaatatctgcggcagcaggccagtaatgggttaagtgataacaggtgt

SEQ ID NO: 721659 - DNA, 75 bp, synthetic construct
  source 1..75: mol_type = other DNA
ggtcagccattaacacaatgggtggcgtttgtgatgcttgtccgggataacccgggcaaacctctggcattggat

SEQ ID NO: 721660 - DNA, 75 bp, synthetic construct
  source 1..75: mol_type = other DNA
cgtggcagttgatgaagctaacggtcagtatgctgggaaaattgatcaccggtgatgtgaaactgaacaacctca

SEQ ID NO: 721661 - DNA, 75 bp, synthetic construct
  source 1..75: mol_type = other DNA
gttgggttatcgctcgccacgggaatatctgcggcagcgggcctgtaatgggttaagtgataacagatgtctgga

SEQ ID NO: 721662 - DNA, 75 bp, synthetic construct
  source 1..75: mol_type = other DNA
ggataaagagaaaattcggggaaacgccccgttgttggcgggggctggcaaaatcagcttggctctgttttgcga

SEQ ID NO: 721663 - DNA, 75 bp, synthetic construct
  source 1..75: mol_type = other DNA
gaccgactggagttaagtgagcggatgatcgcgcaacttgttggtcatgttcgcggaaacactactgccatgaca

SEQ ID NO: 721664 - DNA, 66 bp, synthetic construct
  source 1..66: mol_type = other DNA
gcggcggcggtcacggtattgatatcaccggcgacagcgccaaagtggataacaaaggcggtatga

SEQ ID NO: 721665 - DNA, 75 bp, synthetic construct
  source 1..75: mol_type = other DNA
atgtgccgctgtatgcccttgtgtctaaccagcgtggctttctgattgatgatttcagcacgcttgagcgtgatc

SEQ ID NO: 721666 - DNA, 75 bp, synthetic construct
  source 1..75: mol_type = other DNA
gaccgactggagttaagtgaacggatgatcgcccaacttgtcggacatgttcgaggaagcactactgccatgaca

SEQ ID NO: 721667 - DNA, 75 bp, synthetic construct
  source 1..75: mol_type = other DNA
gctcaatgcgttgagacaggttcccattcatccaaggctgattgagcttggctttcttgaatacgttaaagcttt

SEQ ID NO: 721668 - DNA, 75 bp, synthetic construct
  source 1..75: mol_type = other DNA
acttatcgggactgggccttaacgactcggggcggtatgcagtttgacctgctggcaggcatgaatgataaagcg

SEQ ID NO: 721669 - DNA, 75 bp, synthetic construct
  source 1..75: mol_type = other DNA
taagcctaaccccctttatatgcagggatgcagtcgtgtcggttgtatgccatgcattcatgctcgcaagtcaga

SEQ ID NO: 721670 - DNA, 75 bp, synthetic construct
  source 1..75: mol_type = other DNA
tctggttgaagaatgtggcatgtctaacgaggaggccgcagaacgtatcacccaggcgctgaatatcctcaagcc

SEQ ID NO: 721671 - DNA, 75 bp, synthetic construct
  source 1..75: mol_type = other DNA
attaccacctgccggatggtgcaattgccggaagcgttgaagcattgctggaactggcagaacgtgcgcgactga

SEQ ID NO: 721672 - DNA, 75 bp, synthetic construct
  source 1..75: mol_type = other DNA
atgattaacctgtcacttaccgatcttaaccgcgttcagtttcgtgagaaatttaccggacagctactcgtcaat

SEQ ID NO: 721673 - DNA, 75 bp, synthetic construct
  source 1..75: mol_type = other DNA
ttaagccgttaacgagccatcacgatgatgatctgcattttaccggacgcatggtgagtcactacgaaaacggcg

SEQ ID NO: 721674 - DNA, 75 bp, synthetic construct
  source 1..75: mol_type = other DNA
gctgcggtaaacggttatatgaagctttaccagccgcagtttgcccttgttgaattgctgaacgagcgagaggtt

SEQ ID NO: 721675 - DNA, 75 bp, synthetic construct
  source 1..75: mol_type = other DNA
agagagaagagtgttcgtttacccccgcttactttgaatcatagcaacagcaaggctaacgtaatcaatggtact

SEQ ID NO: 721676 - DNA, 75 bp, synthetic construct
  source 1..75: mol_type = other DNA
ctgagccactcaccagtcactcgcatatcgcactttgcgaagacgctgccaaccatattggtcgcgtcctgcgta

SEQ ID NO: 721677 - DNA, 75 bp, synthetic construct
  source 1..75: mol_type = other DNA
gatatcgcccgcgtcagcaaacgtaagcgtgagctgacctttaacacggactttggcgatctcaccttgtttcag

SEQ ID NO: 721678 - DNA, 75 bp, synthetic construct
  source 1..75: mol_type = other DNA
tctccagatatcctggccctcgctacgagtcgcttggagagaatagtggcgaaaaattccgcgaattttatttag

SEQ ID NO: 721679 - DNA, 75 bp, synthetic construct
  source 1..75: mol_type = other DNA
agagaaaagggtattaatttaccgcttcttactttgaaggagagcaaaaactatgttaacgaaaccaatggcgct

SEQ ID NO: 721680 - DNA, 75 bp, synthetic construct
  source 1..75: mol_type = other DNA
tactgttttaattgcaatgaacatttcgctttataccatcaccgtatggataccgaccatatttgttaactccgg

SEQ ID NO: 721681 - DNA, 75 bp, synthetic construct
  source 1..75: mol_type = other DNA
atgtgccgctgtatgcccttgtgtcgaaccagcgtggctttctgattgatgatttcagcactcttgagcgtgatc

SEQ ID NO: 721682 - DNA, 75 bp, synthetic construct
  source 1..75: mol_type = other DNA
tttccattcgctgcggcatacttttatcaatgccgtagacgagtttgagatcaacgagcgcacgattgcgcagct

SEQ ID NO: 721683 - DNA, 75 bp, synthetic construct
  source 1..75: mol_type = other DNA
aatgcagaatatgcccggcaatctgtatttgatgcggcgaaaatacaagatttcagatacgcataagctgattga

SEQ ID NO: 721684 - DNA, 75 bp, synthetic construct
  source 1..75: mol_type = other DNA
accggcaccgcctgctccggcgcgtgtcagcacattgcttgactgggtgccaggtattcgcgcgatcgccgtcaa

SEQ ID NO: 721685 - DNA, 75 bp, synthetic construct
  source 1..75: mol_type = other DNA
cagttgaatgaaagtctgtgcgtaagctgcaaactgtgcggcatcgcctgcccgtttggcgcaattgaattttcc

SEQ ID NO: 721686 - DNA, 75 bp, synthetic construct
  source 1..75: mol_type = other DNA
cgtgagctgacctttaacacggactttggcgatctcaccttgtttcagcaggctcaaagtggagaggctaaatga

SEQ ID NO: 721687 - DNA, 75 bp, synthetic construct
  source 1..75: mol_type = other DNA
ctgaaaataccatcaatgttatttttgtttcaggtggaaaggacagccttgctcagtggcttgtcgctattgaag

SEQ ID NO: 721688 - DNA, 75 bp, synthetic construct
  source 1..75: mol_type = other DNA
gtgctgctgttccaggatattgccgcaatcccgctggtagcgatgatcccgctactggcggcgagcagtgcctcg

SEQ ID NO: 721689 - DNA, 75 bp, synthetic construct
  source 1..75: mol_type = other DNA
atttaaaggtttgctgctggggctgtttttcatcggtgttggcatgtcgatagactttggcacgctgcttgaaaa

SEQ ID NO: 721690 - DNA, 75 bp, synthetic construct
  source 1..75: mol_type = other DNA
cgcgtgattatcgccggattcggtcgttttgggcagattaccggacgtttactgctctccagcggggtgaaaatg

SEQ ID NO: 721691 - DNA, 75 bp, synthetic construct
  source 1..75: mol_type = other DNA
cggtcgttttgggcagatcaccggacgtttactgctctccagcggggtgaaaatggtggtgctcgatcacgatcc

SEQ ID NO: 721692 - DNA, 75 bp, synthetic construct
  source 1..75: mol_type = other DNA
gcgatgtcgaccactacattcgtttgcgtcaggcaggcgttgaaaagccggagcgtgaaaccttcgaaggtgcgc

SEQ ID NO: 721693 - DNA, 75 bp, synthetic construct
  source 1..75: mol_type = other DNA
gatggcagcaacgccgattctgctggtgatcctcaatcgccttgagcaatcttctactgaagaggcgcgtgaagc

SEQ ID NO: 721694 - DNA, 75 bp, synthetic construct
  source 1..75: mol_type = other DNA
taaaaaggtctttaactacacactgaacggcgaacagtattcatttgatccaatcagcccggatgctgtagtcac

SEQ ID NO: 721695 - DNA, 75 bp, synthetic construct
  source 1..75: mol_type = other DNA
atcaccaggtatcgcaacaagagactcaccttagccagaattttacaggctgccataggtgagggactggataca

SEQ ID NO: 721696 - DNA, 75 bp, synthetic construct
  source 1..75: mol_type = other DNA
aaagccgaaagctgtgatgactgcggcacttacctgaagattttttatcaggaaaaagatccaaaagttgaagcc

SEQ ID NO: 721697 - DNA, 75 bp, synthetic construct
  source 1..75: mol_type = other DNA
acgcggatggatttactggaatctgccggagcggcgaaagcggaagtgctgattaacgccatcgacgatccgcaa

SEQ ID NO: 721698 - DNA, 75 bp, synthetic construct
  source 1..75: mol_type = other DNA
ggaatacgcagttatttttatcatcggctgcactgaaagccggtgataaatacgccacgatacgtacgatgctga

SEQ ID NO: 721699 - DNA, 75 bp, synthetic construct
  source 1..75: mol_type = other DNA
gtggcagatgacctcgcctctctggtactggacgcgcgaatggagcaagaaggctacgcccgcagttccatcaac

SEQ ID NO: 721700 - DNA, 75 bp, synthetic construct
  source 1..75: mol_type = other DNA
cgatcccgctggtggcgatgattccgctactggcggcgagcagtgcctcgacgacgatgggcgcatttgctctct

SEQ ID NO: 721701 - DNA, 75 bp, synthetic construct
  source 1..75: mol_type = other DNA
atgcagcagtatcactatccactggaagacggatttaccgaaaggattcacacacctggaggcgtcagatcacta

SEQ ID NO: 721702 - DNA, 75 bp, synthetic construct
  source 1..75: mol_type = other DNA
gtttggtctgaaaacatcaatgtcgcgtaaaggtaactgttacgactacgctccgatggaaagcttctggggaac

SEQ ID NO: 721703 - DNA, 75 bp, synthetic construct
  source 1..75: mol_type = other DNA
caggtatttggtgtatccaggagcggttattacaactgggtacagcatgaaccctcagacagaaaacaaagtgat

SEQ ID NO: 721704 - DNA, 75 bp, synthetic construct
  source 1..75: mol_type = other DNA
accattcaaccacaatccaaaccatcatccgcaatcaccgtatcgaaaactggctacgtgtttttcgacaggtga

SEQ ID NO: 721705 - DNA, 75 bp, synthetic construct
  source 1..75: mol_type = other DNA
gtggggcaggagctgcccccagaacctatcactcttttgaaccagtcaatgaacctaaaaacattatgttcgaac

SEQ ID NO: 721706 - DNA, 75 bp, synthetic construct
  source 1..75: mol_type = other DNA
gctgaactggttgctcttgtgaactacgtcacaagttctcaaatgaccatgcaggatctgcaaactcatctcgat

SEQ ID NO: 721707 - DNA, 75 bp, synthetic construct
  source 1..75: mol_type = other DNA
cttgaagatatatacttcaagagtgacgaagatataatcccaggccaccatttgattgtggcatttgatgactat

SEQ ID NO: 721708 - DNA, 75 bp, synthetic construct
  source 1..75: mol_type = other DNA
catgcctgaagtagagctatttataaaggatagatttgataaaatatttaaaaccaagatgttaaaatacttttg

SEQ ID NO: 721709 - DNA, 75 bp, synthetic construct
  source 1..75: mol_type = other DNA
cagaaccatctcaacttttgacggtaaaaccctgaaagacgaccgactccgcaccatcgctacctttgatggcaa

SEQ ID NO: 721710 - DNA, 75 bp, synthetic construct
  source 1..75: mol_type = other DNA
atggctaaaaattttgtggacggtatatcttcccctggactgctgaaacgggatgtggttatccgcactcgcgaa

SEQ ID NO: 721711 - DNA, 75 bp, synthetic construct
  source 1..75: mol_type = other DNA
cagggcaccagcttcaactttgttgccccgctgattatgggcggtaccgcgctgaaaaccggtggtgctggtgtt

SEQ ID NO: 721712 - DNA, 75 bp, synthetic construct
  source 1..75: mol_type = other DNA
actggctgaaaaatctgctctcctccgggattgccgctggcggtatcactgccattgtactgaatctgattttcc

SEQ ID NO: 721713 - DNA, 75 bp, synthetic construct
  source 1..75: mol_type = other DNA
atgacaaatgagctgacaggtaaagccctgtttatggcgctcaggagccagcgcccacctgccgggctaatccac

SEQ ID NO: 721714 - DNA, 75 bp, synthetic construct
  source 1..75: mol_type = other DNA
atgtgtcaggtatttggtgtatccaggagcggttattacaaccgggtacagcatgaaccctcagacagaaaacaa

SEQ ID NO: 721715 - DNA, 75 bp, synthetic construct
  source 1..75: mol_type = other DNA
taatccaccactctgatcgaggttcacagtactgcgcatacgattaccgggtcatacaggagcagtttggtctga

SEQ ID NO: 721716 - DNA, 75 bp, synthetic construct
  source 1..75: mol_type = other DNA
tgatggtgggtctgggtgaaaccaatgaagaaattattgaggtaatgcgcgatctgcgtcgtcacggtgtgacga

SEQ ID NO: 721717 - DNA, 75 bp, synthetic construct
  source 1..75: mol_type = other DNA
cgtaggcggcattccctccacagcattaaaaggcgcaggtttgctgccacatattcgcgctactgtgaaactgcc

SEQ ID NO: 721718 - DNA, 75 bp, synthetic construct
  source 1..75: mol_type = other DNA
gatccggtgggggtgctgtatgcggtgtttccgctgatctgggtcggagtggtgtgcggcattgccaccttcagc

SEQ ID NO: 721719 - DNA, 75 bp, synthetic construct
  source 1..75: mol_type = other DNA
atgacaacccagactgtctctggtcgccgttatttcacgaaagcgtggctgatggagcagaaatcgcttatcgct

SEQ ID NO: 721720 - DNA, 75 bp, synthetic construct
  source 1..75: mol_type = other DNA
ggcaacgcagccaggccgatacgttaatgcgcaatctggcgcaacagaagccgaacgacccggagcaggtttacg

SEQ ID NO: 721721 - DNA, 75 bp, synthetic construct
  source 1..75: mol_type = other DNA
gtgaagatctggtgcaacagtcgttatatcggctgggaacttattgatccgaataacccggacgtcgttgccgcc

SEQ ID NO: 721722 - DNA, 75 bp, synthetic construct
  source 1..75: mol_type = other DNA
tagaatcaaaatcatcgtctactctctttgtggactgctggcatcgctggctgggatcattgaagtagcgcgtct

SEQ ID NO: 721723 - DNA, 75 bp, synthetic construct
  source 1..75: mol_type = other DNA
gtctggatcatggggattgtcttcctcgcggcctggtacatgctgcatcacacgcgtctggggcgttacatctac

SEQ ID NO: 721724 - DNA, 75 bp, synthetic construct
  source 1..75: mol_type = other DNA
tcgtccgctgggcgtaccgacgccagtctggatcatggggattgtcttcctcgcggcctggtacatgctgcatca

SEQ ID NO: 721725 - DNA, 75 bp, synthetic construct
  source 1..75: mol_type = other DNA
tctggtgccggatttccgtggtcgtatggatcgcgcgctggatattctgaccgccacgccgccagacgtgttcaa

SEQ ID NO: 721726 - DNA, 75 bp, synthetic construct
  source 1..75: mol_type = other DNA
ccacggtggagttttatggcaaagcgtacagtacacagctcaaaaaagatttcgttcgtgaggtcatgatgcagt

SEQ ID NO: 721727 - DNA, 75 bp, synthetic construct
  source 1..75: mol_type = other DNA
catggcggaagtcaaacgcaaatggggcgaccgctttgttgccgtcacgcaaaaaaacaccggtaaaggtggcgc

SEQ ID NO: 721728 - DNA, 75 bp, synthetic construct
  source 1..75: mol_type = other DNA
cgacacactggcggtagcgattggtacggcacacggcatctatccgaaagggatgcagccgaagctgcaaatgga

SEQ ID NO: 721729 - DNA, 75 bp, synthetic construct
  source 1..75: mol_type = other DNA
gacggataatggttcatgctaccgggctaatgaaacacgacagttggcctggatgttgggccttgaaccgaagat

SEQ ID NO: 721730 - DNA, 75 bp, synthetic construct
  source 1..75: mol_type = other DNA
gacggataatggttcatgctaccgggcaaatgaaacacgacagttggcctggatgttgggccttgaaccgaagaa

SEQ ID NO: 721731 - DNA, 75 bp, synthetic construct
  source 1..75: mol_type = other DNA
cgtgcgcaaacgcgttgccgaaattcacagcacagcccccgtagccgaagaaaaaaaacaggaaatcgtgtttaa

SEQ ID NO: 721732 - DNA, 75 bp, synthetic construct
  source 1..75: mol_type = other DNA
tgcttcaaactttatcaatggtcatattttatatgtcgatggtggcattctggcctacattggcaaacagcctta

SEQ ID NO: 721733 - DNA, 75 bp, synthetic construct
  source 1..75: mol_type = other DNA
tgtccatagcaatgttgctatggtttttaagtacgctaaaacgtaaacccagtcaaaagaaaggctgtattgacg

SEQ ID NO: 721734 - DNA, 75 bp, synthetic construct
  source 1..75: mol_type = other DNA
cgacaaacccacccgctattccgcactggtggaagcgtcaaccgcttattcccaaccttctgtcacaggaactga

SEQ ID NO: 721735 - DNA, 75 bp, synthetic construct
  source 1..75: mol_type = other DNA
atggtgagcaatgaagaactaaaaatggctgatgaaatcagaaaggcacttgacgcggcagaaaacaatgaaacc

SEQ ID NO: 721736 - DNA, 75 bp, synthetic construct
  source 1..75: mol_type = other DNA
ttcagcagaaaataatgaaaccatctatctttccgaacaggaagtagaaaagatgatgagtgaatttaaattaag

SEQ ID NO: 721737 - DNA, 75 bp, synthetic construct
  source 1..75: mol_type = other DNA
agtgcactgggttatcgctcgccacgggaatatctacggcagcgggccagtaatgggttaagtgataacaggtgt

SEQ ID NO: 721738 - DNA, 75 bp, synthetic construct
  source 1..75: mol_type = other DNA
ctcacttggtcagggcggttactacagcccgcaggaatacctgtcgtttgccataccggtgatgtggcgggagcg

SEQ ID NO: 721739 - DNA, 75 bp, synthetic construct
  source 1..75: mol_type = other DNA
gttacgctgccgcaggtgtagagattaaagtggtcgatgacgcacgcaagaccttaccgccaggttgcgaaggtg

SEQ ID NO: 721740 - DNA, 75 bp, synthetic construct
  source 1..75: mol_type = other DNA
gtttccgtgccgctgttgccttcctggcgggaagcagaactggtgtgggtgctcaataagtgtcaggcaaaaatg

SEQ ID NO: 721741 - DNA, 75 bp, synthetic construct
  source 1..75: mol_type = other DNA
ggatttgatgaattccctattctggcgccgcgctgggaagtgaatggcgaagacgtttacgcctcatcctgtcct

SEQ ID NO: 721742 - DNA, 75 bp, synthetic construct
  source 1..75: mol_type = other DNA
ggtattgaatcaggcgatcgcatcgcatttcaactgcctggctggtgtgaatttaccgttatctatcttgcctgc

SEQ ID NO: 721743 - DNA, 75 bp, synthetic construct
  source 1..75: mol_type = other DNA
gacctttcagcgctgcgcttctttctttgcggcggtaccacaatccccaaaaaagtggcgcgtgaatgccagcag

SEQ ID NO: 721744 - DNA, 75 bp, synthetic construct
  source 1..75: mol_type = other DNA
gcagcagcgttgcacctgtatgctcggcgcaacgccgtttgtctatgatcttttgaatttactagagaaacaacc

SEQ ID NO: 721745 - DNA, 75 bp, synthetic construct
  source 1..75: mol_type = other DNA
cgcctggacgcaaaaccgcctgatgctccccgcctggctgggtgcaggtacggcgctgcaaaaagtggtcgaaga

SEQ ID NO: 721746 - DNA, 75 bp, synthetic construct
  source 1..75: mol_type = other DNA
caccaccttacaaaatttgtcgaaacgacgagctgctgcccgttgcgcgtgcgtttagtcagttcctgaacctgg

SEQ ID NO: 721747 - DNA, 75 bp, synthetic construct
  source 1..75: mol_type = other DNA
tcctcacggctcacccaaccgaaattacccgtcgtacactgatccacaaaatggtggaagtgaacgcctgcttaa

SEQ ID NO: 721748 - DNA, 75 bp, synthetic construct
  source 1..75: mol_type = other DNA
gtaaacgctatgagggcaaaccgctgggttctcagggtgcaagtacctcagttctttacgggcgctaccagagtg

SEQ ID NO: 721749 - DNA, 75 bp, synthetic construct
  source 1..75: mol_type = other DNA
gctgcagcataaagccagcgccggtgatgatgaggctcttaaaatcctgcgtcagagaaatgctcaggcggccag

SEQ ID NO: 721750 - DNA, 75 bp, synthetic construct
  source 1..75: mol_type = other DNA
caaaccggacagcgtaacgaaggaagggacgattatttaccgcgtgggagagagtgctatccgtgacggtggtaa

SEQ ID NO: 721751 - DNA, 75 bp, synthetic construct
  source 1..75: mol_type = other DNA
aacctggttgtcgatatgctgggcttcagcattatgaagaaagtgtctggtaactcgccggtgattttcgacgtg

SEQ ID NO: 721752 - DNA, 75 bp, synthetic construct
  source 1..75: mol_type = other DNA
ggaagcgatgctgcgccagcaaccgccttcctcgcgtattgatctgacgctggctgactgggcgcaacaacgacg

SEQ ID NO: 721753 - DNA, 75 bp, synthetic construct
  source 1..75: mol_type = other DNA
ttgcctcccgtcgcaacgaagcgattcgtcagttgaaaatacttaatattgataatcctgactctggtgccatat

SEQ ID NO: 721754 - DNA, 75 bp, synthetic construct
  source 1..75: mol_type = other DNA
cgatgtggcgatggcgcgaaaagattatcccgccgccgaacgttattatcagcagaccttgcgtatggacagcgg

SEQ ID NO: 721755 - DNA, 75 bp, synthetic construct
  source 1..75: mol_type = other DNA
tttccgcgctcgtgcgcaaggtttagcggcggtggactctggtatggcgggtaaagccattcccgaactacaaca

SEQ ID NO: 721756 - DNA, 75 bp, synthetic construct
  source 1..75: mol_type = other DNA
acagctatgcggtgctggggctgggcgatgtggcaatggcgcgaaaagattaccccgccgccgaacgttattatc

SEQ ID NO: 721757 - DNA, 75 bp, synthetic construct
  source 1..75: mol_type = other DNA
tgatgtggcgatggcgcgcaaagattaccctgcagccgaacgttattatcagcagacgctacggatggacagtag

SEQ ID NO: 721758 - DNA, 75 bp, synthetic construct
  source 1..75: mol_type = other DNA
caatggcgacaacaatttcccattgaagcgatgtgtcaggtatttggtgtatccaggagcggttattacaactgg

SEQ ID NO: 721759 - DNA, 75 bp, synthetic construct
  source 1..75: mol_type = other DNA
atgtttatacgtgtgaaattgtcggctacgccatgggagagcgcatgacaaaagagctgacaggtaaagccctgt

SEQ ID NO: 721760 - DNA, 75 bp, synthetic construct
  source 1..75: mol_type = other DNA
atcgttgataaattcaaagaaggcggcaacgaaaaagtgattctttgcgatcgcggtgctaacttcggctatgac

SEQ ID NO: 721761 - DNA, 75 bp, synthetic construct
  source 1..75: mol_type = other DNA
gtgtgtcggcgctgaaaaaatatctctcgatctttagtgatggcgatagcgtggcggctgcgcaatcgcaactgg

SEQ ID NO: 721762 - DNA, 75 bp, synthetic construct
  source 1..75: mol_type = other DNA
gtccgttaaactcaggctacctcagtgtatccaggagcggttattacaactgggtacagcatgaaccctcagaca

SEQ ID NO: 721763 - DNA, 75 bp, synthetic construct
  source 1..75: mol_type = other DNA
cgctgtaagcagaaacgcaagttcagagcgactacgaactcgaaccacaatctgccagttgcgccaaatctgctg

SEQ ID NO: 721764 - DNA, 75 bp, synthetic construct
  source 1..75: mol_type = other DNA
taagagactttgcattaatactggatgagtggctggataaagacatggtcagtacagcgagagtaaatcgtggat

SEQ ID NO: 721765 - DNA, 75 bp, synthetic construct
  source 1..75: mol_type = other DNA
cgcgagatctggctggaataattccaccagcaggaaaaacaccgccaacatttcatgaacaacgctccctgtcag

SEQ ID NO: 721766 - DNA, 75 bp, synthetic construct
  source 1..75: mol_type = other DNA
caaaaaatttacaatgcaacgcctgaaaaacactttatccgtaacgcaatgcttcttgcgattgttactggtcag

SEQ ID NO: 721767 - DNA, 75 bp, synthetic construct
  source 1..75: mol_type = other DNA
acctttaccgtacgtcagaaccttcgctttgcgcaaaataaagtttcgcaaaagagcgtatatggctacggcatg

SEQ ID NO: 721768 - DNA, 75 bp, synthetic construct
  source 1..75: mol_type = other DNA
ggatgatgacggcgtttactcttatcgtctgactggtattgcgcgttcagccaatgctcagcagaagggggcaga

SEQ ID NO: 721769 - DNA, 75 bp, synthetic construct
  source 1..75: mol_type = other DNA
gccggtactgacagcctgttccagaccggttttgacttcagcgatgcactggatgatgacggcgtttattcttat

SEQ ID NO: 721770 - DNA, 75 bp, synthetic construct
  source 1..75: mol_type = other DNA
atgaacataatgggttgccttgacgtacccaatagaggtgattactacatcgacggacaaaatgccgcctgtctt

SEQ ID NO: 721771 - DNA, 75 bp, synthetic construct
  source 1..75: mol_type = other DNA
gagcatatcaaacccgattatataccttcattcatgactgaaatcagacaggaacaggtgattacatttctcact

SEQ ID NO: 721772 - DNA, 75 bp, synthetic construct
  source 1..75: mol_type = other DNA
cagaaagagcgtaccggttttatatcgaatacatgaagaaaaacatcgaagggtaccgggagcgcactccgctaa

SEQ ID NO: 721773 - DNA, 75 bp, synthetic construct
  source 1..75: mol_type = other DNA
acgaggcagccgtcggatgtacgcaaccgcgctgcttggtagacttgggctgaaaggacgtgagcatcataaacc

SEQ ID NO: 721774 - DNA, 75 bp, synthetic construct
  source 1..75: mol_type = other DNA
ggattagccgaacttatggcaatggtagtcaggcacgaaccgtccttaaaaacgtcgatttgactatcgcggccg

SEQ ID NO: 721775 - DNA, 75 bp, synthetic construct
  source 1..75: mol_type = other DNA
gatcgtacgcgtgaatcgctgcaaatggcgctaaaagcgatgaatgcgcaccgtttacgcaccacacttaccatg

SEQ ID NO: 721776 - DNA, 75 bp, synthetic construct
  source 1..75: mol_type = other DNA
ggatgatgacggcgtttactcttatcgcctgaccggccttgcgcgttctgcgaatgcccagcagaagggggctga

SEQ ID NO: 721777 - DNA, 75 bp, synthetic construct
  source 1..75: mol_type = other DNA
atccgcatggcgatgaatgtctgggcgcatccggacggcgaaaaagtaccggctgcgaaaattaccaaagcgtat

SEQ ID NO: 721778 - DNA, 75 bp, synthetic construct
  source 1..75: mol_type = other DNA
catcaggcaacggctgtcggatgcagcgtgaacgccttatccgacctactgttctacccctgcgtaggcctgata

SEQ ID NO: 721779 - DNA, 75 bp, synthetic construct
  source 1..75: mol_type = other DNA
agcgtcgcatcaggcaagaccgtattaattcggtgtatagcccattaccacgccacttaagccagaaagctgctt

SEQ ID NO: 721780 - DNA, 75 bp, synthetic construct
  source 1..75: mol_type = other DNA
cccacaaagaaaaggcgcgaatggctgcatacctggtttcccgcctgggaaatcacccattgatagacctggaag

SEQ ID NO: 721781 - DNA, 75 bp, synthetic construct
  source 1..75: mol_type = other DNA
caatgccgtgcgctacagacaacgcaagggacttgtttgatgatgccggaccgaatgttggtgtcgcatatgaca

SEQ ID NO: 721782 - DNA, 75 bp, synthetic construct
  source 1..75: mol_type = other DNA
aaaatcaaacatgagcacatccgcatggcgatgaatgcctgggcgcgtcctgatggcgaaaaagttccagcagct

SEQ ID NO: 721783 - DNA, 75 bp, synthetic construct
  source 1..75: mol_type = other DNA
atgttaccactgaaacataccatcgttgatctgtatgttctggataaaacggcaggtattatttacaaagtaagc

SEQ ID NO: 721784 - DNA, 75 bp, synthetic construct
  source 1..75: mol_type = other DNA
gtggagcctgccgcagtcgggatgcatgccgcgatgctggcagatgttaaaccgggtaagaagataattattctg

SEQ ID NO: 721785 - DNA, 75 bp, synthetic construct
  source 1..75: mol_type = other DNA
tggcggtgttaactatctgttcgacaacggcgtaacgccttatttcagctacagtgaatcgtttgaacccgcttc

SEQ ID NO: 721786 - DNA, 75 bp, synthetic construct
  source 1..75: mol_type = other DNA
acggctgtcggatgcggcgtgaacgccttatccgacctacggttctacccctgcacaggcctgataagatgcgcc

SEQ ID NO: 721787 - DNA, 75 bp, synthetic construct
  source 1..75: mol_type = other DNA
gtctacttcaagcagtgggcgcgtcggccatgctggtggcgacgttcgcgacggttcgcgacgtttatgccaacc

SEQ ID NO: 721788 - DNA, 75 bp, synthetic construct
  source 1..75: mol_type = other DNA
gcttcactggcgatggatatttatctccctgtcgttccagcgatgcccggcatcctgaacacgacgcccgctatg

SEQ ID NO: 721789 - DNA, 75 bp, synthetic construct
  source 1..75: mol_type = other DNA
cctgtggccttcatcaactgttggcgtagaaaacagcgactctgaatacagcgaatttgatcacatcatcggtaa

SEQ ID NO: 721790 - DNA, 75 bp, synthetic construct
  source 1..75: mol_type = other DNA
ggcgcagtaaaaaaagcctctgcgcctgggcaaatatcggtgaatgatttgcgcacagtattaactattttgcac

SEQ ID NO: 721791 - DNA, 75 bp, synthetic construct
  source 1..75: mol_type = other DNA
tgatattctggaatggcgtgtggaccactatgccgacctctccaatgtggagtctgtcatggcggcagcaaaaat

SEQ ID NO: 721792 - DNA, 75 bp, synthetic construct
  source 1..75: mol_type = other DNA
tcgtcattggcgcgggcgcaccaaagattatcgtgtcgctgatggcgaaagatatcgccagcgtgaaatcagaag

SEQ ID NO: 721793 - DNA, 75 bp, synthetic construct
  source 1..75: mol_type = other DNA
cgcttgactggattaggacgtagtcaggatgcgcaacaaaagtatgcaaaaactacacggtatgcagtagctccc

SEQ ID NO: 721794 - DNA, 75 bp, synthetic construct
  source 1..75: mol_type = other DNA
ggatttactacacccagtacagtaaataccaaccaatatctggatggcttaaaacttcagggggataactactct

SEQ ID NO: 721795 - DNA, 75 bp, synthetic construct
  source 1..75: mol_type = other DNA
atgtgttacaggttccaatattccacacttggcagccacctaatcagacagaatttagcagatgctgaatttgaa

SEQ ID NO: 721796 - DNA, 75 bp, synthetic construct
  source 1..75: mol_type = other DNA
catcttttttccctgagttattcccaacccatattcggtgcagtggtattgctctaatttggcaattaggctcat

SEQ ID NO: 721797 - DNA, 75 bp, synthetic construct
  source 1..75: mol_type = other DNA
atggttagttccgtcgatataaaaaatgaaatcaaaaatacacctgtcgttcgacgtgttgcgtcggcttcagcg

SEQ ID NO: 721798 - DNA, 75 bp, synthetic construct
  source 1..75: mol_type = other DNA
tatctctatcggcggtttgattctgatgccagaaacagcgcctcagaaattaaaatcagaatatcaggagtgggc

SEQ ID NO: 721799 - DNA, 75 bp, synthetic construct
  source 1..75: mol_type = other DNA
aataccgccaccttcctgattatcttttttttgataaagatcgtggcgtgtataagttcacgcttataactggga

SEQ ID NO: 721800 - DNA, 75 bp, synthetic construct
  source 1..75: mol_type = other DNA
attcagcagatgaaggagcgaaacgccgaactgtcaaaacttgataagaggtatcacgatgagattaaagctatc

SEQ ID NO: 721801 - DNA, 75 bp, synthetic construct
  source 1..75: mol_type = other DNA
atggacaaggtgaagacgttaatcatcgccgttgttgtttgcattatcgtcgggcttgttgccgcgctcagtcac

SEQ ID NO: 721802 - DNA, 75 bp, synthetic construct
  source 1..75: mol_type = other DNA
atgagaaccgtatcgatatttaaaaatggcaacaaccgcgccatccgtctgcctcgtgatctggattttgagggg

SEQ ID NO: 721803 - DNA, 75 bp, synthetic construct
  source 1..75: mol_type = other DNA
catatttcggagggtgcgattaatgggagtcttaaagaataccaattaattcaggatctggaatcggctttattt

SEQ ID NO: 721804 - DNA, 75 bp, synthetic construct
  source 1..75: mol_type = other DNA
accagcgaaatggcaccggctctggttgctgcatttggtggtaaagaaaacattactaacctcgacgcatgtatt

SEQ ID NO: 721805 - DNA, 75 bp, synthetic construct
  source 1..75: mol_type = other DNA
tctggtggtttcctgttcaaaatgtacggtctgccagctgctgcaattgctatctggcactctgctaagccagaa

SEQ ID NO: 721806 - DNA, 75 bp, synthetic construct
  source 1..75: mol_type = other DNA
caggtttaccagagcggtctgttcaatgtgaccctgaataccggttctggatttgcccctatatttccagacatc

SEQ ID NO: 721807 - DNA, 75 bp, synthetic construct
  source 1..75: mol_type = other DNA
accgtctggcgctgactgttgataattcaacgatcgacgacaactacgaacactacacatataacggcacctaca

SEQ ID NO: 721808 - DNA, 75 bp, synthetic construct
  source 1..75: mol_type = other DNA
gccagtccggatgccatcatcatcaactccggccccaccggttccggtaaatccacgaccgggcgcagcttcatg

SEQ ID NO: 721809 - DNA, 75 bp, synthetic construct
  source 1..75: mol_type = other DNA
atagccagtcctttgaaccgagtgctttcgatctgtggagcaacccgcgcgtttcctataagccatcgaaaggtg

SEQ ID NO: 721810 - DNA, 75 bp, synthetic construct
  source 1..75: mol_type = other DNA
tagttttgaacatggttttaatgacaccttcaccgtgcgtcagaatctgcgtttcagtgaaatgaaaacctcaca

SEQ ID NO: 721811 - DNA, 75 bp, synthetic construct
  source 1..75: mol_type = other DNA
cctccgcccgagctggagctcattcctggagctagaaaaggccgatccgggctttatgacggaacgcgaggacgt

SEQ ID NO: 721812 - DNA, 75 bp, synthetic construct
  source 1..75: mol_type = other DNA
ttactacaccatcttccgtgtgctgattaaagctctggatctgaaaacgccgggccgtgaagacgcaactgaaga

SEQ ID NO: 721813 - DNA, 75 bp, synthetic construct
  source 1..75: mol_type = other DNA
ccgcgaatttcagctggctgcccgccgttgtatcgcatgttatggcagaagcaggcggttccgtctttgcaaaca

SEQ ID NO: 721814 - DNA, 75 bp, synthetic construct
  source 1..75: mol_type = other DNA
ctagagtgcgaaaaagccgatccagattttatggcggagcgcgaggatgttgtcagcgacgaagggcgatttaac

SEQ ID NO: 721815 - DNA, 75 bp, synthetic construct
  source 1..75: mol_type = other DNA
ccatgggcagcgctgacgactggagcgcatttgcggaagacctcaatgctgatgctccggggaatgccactgttc

SEQ ID NO: 721816 - DNA, 75 bp, synthetic construct
  source 1..75: mol_type = other DNA
accggcacagcagaaacagattcaccttctgaacctgcagagattcagccagtgcagcaggccagtcctgaacca

SEQ ID NO: 721817 - DNA, 75 bp, synthetic construct
  source 1..75: mol_type = other DNA
aacggcagaaaataaaccgcaggaagagggggttatgtctgcaacggataccagtgaagagagtgccgctgccgt

SEQ ID NO: 721818 - DNA, 75 bp, synthetic construct
  source 1..75: mol_type = other DNA
atgaatcttctaactcaagtacagaaaactattagagacagtttaaataatatcatgccaattcgtaaagcaatg

SEQ ID NO: 721819 - DNA, 75 bp, synthetic construct
  source 1..75: mol_type = other DNA
acgggcagtgatgcctttaagcaaaaagcgatgcggttgattatcgagcacaacatcaatgtgcgcatgaaacac

SEQ ID NO: 721820 - DNA, 75 bp, synthetic construct
  source 1..75: mol_type = other DNA
acctgacagtattgtctacgccccggaacgccctgatgcaccgatatcgctcaatctggacgaaatcattaaatc

SEQ ID NO: 721821 - DNA, 75 bp, synthetic construct
  source 1..75: mol_type = other DNA
ttcacactggccggtaataaaaccacactgcatgtgccgctgacggccccccgtaagctgtctgccgacaacttc

SEQ ID NO: 721822 - DNA, 75 bp, synthetic construct
  source 1..75: mol_type = other DNA
tgggggagggtttatgggcagtacgctgtactgtgacgcttctgaggacgatcttgccagtgttgcccgtaaatg

SEQ ID NO: 721823 - DNA, 75 bp, synthetic construct
  source 1..75: mol_type = other DNA
tctatttgttcgccatggctggacttattgaaggtatgaaaaatgttaataagcataattataactaccagaaat

SEQ ID NO: 721824 - DNA, 75 bp, synthetic construct
  source 1..75: mol_type = other DNA
accccgtcagctgacaaccgtcagctggtcatcaatgccctgacggataacggtctgcagtttgccggttacggt

SEQ ID NO: 721825 - DNA, 75 bp, synthetic construct
  source 1..75: mol_type = other DNA
ggcaaacgggaatactggggaaacggcctggaagaactggtcaaaaaccaccagaaaggcaaccccgtcacactg

SEQ ID NO: 721826 - DNA, 75 bp, synthetic construct
  source 1..75: mol_type = other DNA
caggccgcgtatgcccgccgctatgtcaacaaatggccgcaggccacggcacatgaatacctgacccggaaaggc

SEQ ID NO: 721827 - DNA, 75 bp, synthetic construct
  source 1..75: mol_type = other DNA
ccgcagtcggactggcatttgccgtttccgggtgttccagtgattatgttatggcaaccaaagatggtcgaatga

SEQ ID NO: 721828 - DNA, 75 bp, synthetic construct
  source 1..75: mol_type = other DNA
tgaatggtataagggagatttttttgcgccgcagccgtggcagcagttcggtgtcaccactgatgaggcgctgcg

SEQ ID NO: 721829 - DNA, 75 bp, synthetic construct
  source 1..75: mol_type = other DNA
agatgattgaacgctgtctgaaactgggagcttccattgatttgctgaatcagtattttggtatgacgtcactgg

SEQ ID NO: 721830 - DNA, 75 bp, synthetic construct
  source 1..75: mol_type = other DNA
tttactttcgttatgttctcttgtgtcgccttttttggtaccgcctttgtgaacagcctgaactgggcgctggtg

SEQ ID NO: 721831 - DNA, 75 bp, synthetic construct
  source 1..75: mol_type = other DNA
cccgtcgcaggcagggcaaaccattgagaacctgtttgccatcggttcggtgctgggcggatttgatcccatcgc

SEQ ID NO: 721832 - DNA, 75 bp, synthetic construct
  source 1..75: mol_type = other DNA
ggttgaatgaaaaactaccttgttcactgatgcttttgccaacgctgccgccttccgtgctgggcattcgtctgc

SEQ ID NO: 721833 - DNA, 75 bp, synthetic construct
  source 1..75: mol_type = other DNA
cggactggtggcggaacgtaacggcattcgcgagccgattctcggccttgatgtgctacaaaccgccacgcgggg

SEQ ID NO: 721834 - DNA, 75 bp, synthetic construct
  source 1..75: mol_type = other DNA
tacggtactatattcgaatacttccgtactaatactattaaagagtttaaagataataacgtcactctactttct

SEQ ID NO: 721835 - DNA, 75 bp, synthetic construct
  source 1..75: mol_type = other DNA
agacaattagaaccagtctgaataatatcatgccaattcgaaaggcaatgaatatccaggcaggtaaagatctat

SEQ ID NO: 721836 - DNA, 75 bp, synthetic construct
  source 1..75: mol_type = other DNA
atggccactaaagatggtcgaatgatcctgactgatggaaaaccggaaattgacgatgataccgggcttgtgagt

SEQ ID NO: 721837 - DNA, 75 bp, synthetic construct
  source 1..75: mol_type = other DNA
cattgctaacctgtgtaccctggcggcatttaatatcaaactggcgattcaggtctattacacccaatatgtgct

SEQ ID NO: 721838 - DNA, 75 bp, synthetic construct
  source 1..75: mol_type = other DNA
agtaactctttcactttcgtcatgttctcttgtgtcgccttttttggcacggcctttgtaaacagcctgaactgg

SEQ ID NO: 721839 - DNA, 75 bp, synthetic construct
  source 1..75: mol_type = other DNA
agttaatgaacgcctgacccgcaatattgagcttgatgcctttctggccaggagtggagatactgaatccagcat

SEQ ID NO: 721840 - DNA, 75 bp, synthetic construct
  source 1..75: mol_type = other DNA
ttcaaggcgttttatataatacgtattaacatatcgattaatgattgcttaattgcatcttcatttacatggttt

SEQ ID NO: 721841 - DNA, 75 bp, synthetic construct
  source 1..75: mol_type = other DNA
tggtttacaccattctgccgatcatctacgacgtcgccattaagaacaacatccgtccggaacgtccgatggcgg

SEQ ID NO: 721842 - DNA, 75 bp, synthetic construct
  source 1..75: mol_type = other DNA
ttatcgaacataccgatgttgatgaaagtctgaaagggcaggggattggtaaacggctggtggcgaaggtggtgg

SEQ ID NO: 721843 - DNA, 75 bp, synthetic construct
  source 1..75: mol_type = other DNA
gcagctctttattctgttgacccccgactgttaacgctaatcagtgtttttttcagtgagaaaatcactgcagaa

SEQ ID NO: 721844 - DNA, 75 bp, synthetic construct
  source 1..75: mol_type = other DNA
atgctggttatcattgcggtggtggcggcatcggcgaccttgcaagcttcgggcggtcttgatgtcatgctgcaa

SEQ ID NO: 721845 - DNA, 75 bp, synthetic construct
  source 1..75: mol_type = other DNA
ccggcatacatcgtggcttcagcaccggcttgctacggttattacatcctgccgacttatccgagcgatctggca

SEQ ID NO: 721846 - DNA, 75 bp, synthetic construct
  source 1..75: mol_type = other DNA
tgcagggacagaatattgagtccatacctgattcatagtcggcaccagaaacaaccaaaaccaatgagtaaagac

SEQ ID NO: 721847 - DNA, 75 bp, synthetic construct
  source 1..75: mol_type = other DNA
gtttttcagatgtatggaatggacatctacatataacccaaggaaaaaccggaatgcgtctggccttacctctta

SEQ ID NO: 721848 - DNA, 75 bp, synthetic construct
  source 1..75: mol_type = other DNA
agaagcacagcatgcaggggaagttcctcctggatggaatcctccggaggctacccgtaaaccgatccctaaagt

SEQ ID NO: 721849 - DNA, 75 bp, synthetic construct
  source 1..75: mol_type = other DNA
atttttatattaatgatgcgcagggaaagcaaatagcagaaattgtctttgtgccaaccggagaaaatttagcca

SEQ ID NO: 721850 - DNA, 75 bp, synthetic construct
  source 1..75: mol_type = other DNA
ttgaaattaacagaatggtaggagacataatttttaaaggcctttgggcatgtaaaccggaaacatcagggaata

SEQ ID NO: 721851 - DNA, 75 bp, synthetic construct
  source 1..75: mol_type = other DNA
atggttggagaatttaacccgtgcaacaacccggcagacgcatggccgattatcaaagaaaacatgataagcatt

SEQ ID NO: 721852 - DNA, 75 bp, synthetic construct
  source 1..75: mol_type = other DNA
caacaggatacacatccacatcaattgatataagtgtgttaaaaaacatcatagaggcatcttcagaaaacaaat

SEQ ID NO: 721853 - DNA, 75 bp, synthetic construct
  source 1..75: mol_type = other DNA
tcaggaaaaagaataaacatggttttttacccaatcacacggcagatgccagaaagaaaaaactaaatgaatgtc

SEQ ID NO: 721854 - DNA, 75 bp, synthetic construct
  source 1..75: mol_type = other DNA
aggcggaggggcttgtgttcccctgtaagaaatatcgcaaactcgaacaccgcagtttcatgaagaaagtaccca

SEQ ID NO: 721855 - DNA, 75 bp, synthetic construct
  source 1..75: mol_type = other DNA
tatatgtccgcagtaaaccgcgcatcgcagcgcgtaacaatcccgagtctttcagaaagctgagcctgagaactg

SEQ ID NO: 721856 - DNA, 75 bp, synthetic construct
  source 1..75: mol_type = other DNA
aaccccgcagatcattttcaaataattttaaacttcaaatggttaaactggctttgcaaccaggagcctctgttg

SEQ ID NO: 721857 - DNA, 75 bp, synthetic construct
  source 1..75: mol_type = other DNA
atcgcggcgttcggggaaagataatgcctttaccgccagataagtgggatatgctgccgctccaggcctgccttc

SEQ ID NO: 721858 - DNA, 75 bp, synthetic construct
  source 1..75: mol_type = other DNA
aaagatatttctcaagatgaattgccacaaagggtgtttaatttaataaatcaataccaagcaaaatataatagc

SEQ ID NO: 721859 - DNA, 75 bp, synthetic construct
  source 1..75: mol_type = other DNA
aagttacgccatacggtataaaaattggcaatacaaccatagattatgccgaggccgtacagcgacttaatgatg

SEQ ID NO: 721860 - DNA, 75 bp, synthetic construct
  source 1..75: mol_type = other DNA
aaaaatatttcaacatctttgatttctaaatctaatgatgggttgatgttttttttctggggaatatgtagatat

SEQ ID NO: 721861 - DNA, 75 bp, synthetic construct
  source 1..75: mol_type = other DNA
taatgtttttattagtgctatgtcatggagcatggttatcgaaacactcaatacaaacgaaggttgttttttcgt

SEQ ID NO: 721862 - DNA, 75 bp, synthetic construct
  source 1..75: mol_type = other DNA
gttgaaatgaaatctgacccggttgtgttctggtttgaaaaatatcaagaagggaggctacagcatgaccacttt

SEQ ID NO: 721863 - DNA, 75 bp, synthetic construct
  source 1..75: mol_type = other DNA
cagaactgcgcatgaagttcggtggtcgctgtgcttattgcggctgcgaacttggcgaaaagtggcatgcagacc

SEQ ID NO: 721864 - DNA, 75 bp, synthetic construct
  source 1..75: mol_type = other DNA
aggtgtgtttattatgaagacgaaattatatggcagtaaggcgtggataaagaaggcgtatcgtgtagcgttgca

SEQ ID NO: 721865 - DNA, 75 bp, synthetic construct
  source 1..75: mol_type = other DNA
gcgttcggtggcgtcggcgtgatcatggccctgctctacatccagctaaatccacagtggcgtaaagctgaacct

SEQ ID NO: 721866 - DNA, 75 bp, synthetic construct
  source 1..75: mol_type = other DNA
atcaggagttggttaaactggtagccgaacgcagcaaccaaccgctgcatgatgtagatctggataaatacctat

SEQ ID NO: 721867 - DNA, 75 bp, synthetic construct
  source 1..75: mol_type = other DNA
aacgcctttattttcccgggcatcgggctgggcgttattgcttccggcgcgtcacgtatcaccgatgagatgctg

SEQ ID NO: 721868 - DNA, 75 bp, synthetic construct
  source 1..75: mol_type = other DNA
ccagtgcaagtgtcagtgaactgaaaaaaaaccctatggctacagtcagtgccggagatggttaccctgtcgcca

SEQ ID NO: 721869 - DNA, 75 bp, synthetic construct
  source 1..75: mol_type = other DNA
tcagtgcaagtgtcagtgaactgaaaaaaaatccgatggcgacagtcggtgctggtgatggttatccggtcgcca

SEQ ID NO: 721870 - DNA, 75 bp, synthetic construct
  source 1..75: mol_type = other DNA
cgccaccggtatcgctatcgcactgcctgtagcggctgcgggtcaggtactgaccgtgtttgcccgtaccatcac

SEQ ID NO: 721871 - DNA, 75 bp, synthetic construct
  source 1..75: mol_type = other DNA
atgcggtggttgattttttgcaaccaccttcggatcagagcgggacggatacgggcagcgcgtcatccgatgccc

SEQ ID NO: 721872 - DNA, 75 bp, synthetic construct
  source 1..75: mol_type = other DNA
acgaataacccgcctcaggagagctatctggaggaaacctattaccatcgcctcaacccggaacaggggttctgc

SEQ ID NO: 721873 - DNA, 75 bp, synthetic construct
  source 1..75: mol_type = other DNA
ctacaaccgtgacgtggtgatggtgccgaagggctaccacccggtggcaaccatggcggggtatgacagctacta

SEQ ID NO: 721874 - DNA, 75 bp, synthetic construct
  source 1..75: mol_type = other DNA
atgcgcatcgccgggttagcttacccaggcaaaaaaataatagctatgttcaaaaccactaatattcatggcgcg

SEQ ID NO: 721875 - DNA, 75 bp, synthetic construct
  source 1..75: mol_type = other DNA
atgcgtgaacgtttcaacgtgcttaaccatatcatctgggcgaagccgtccggacgttggaatgggtgtaataaa

SEQ ID NO: 721876 - DNA, 75 bp, synthetic construct
  source 1..75: mol_type = other DNA
aagaaacttccacctgtgctatatggagcagctgagcagataaaacaagagttaggttatcgacttggttatatt

SEQ ID NO: 721877 - DNA, 75 bp, synthetic construct
  source 1..75: mol_type = other DNA
agtcaatactgactgctgaagaacgaaggaaagagtcgtgtgttgcccgcgaacaaatatgttcccagcgtaaag

SEQ ID NO: 721878 - DNA, 75 bp, synthetic construct
  source 1..75: mol_type = other DNA
ttatgcgtttgaacatggtaataatggtgatatctttgtgcaaaaagcacctgcagcaactattgacacattagc

SEQ ID NO: 721879 - DNA, 75 bp, synthetic construct
  source 1..75: mol_type = other DNA
aataaaaaattgaaattctatattggtgatgttagagattatcgtagtattttgaatgcgactcgcggagttgat

SEQ ID NO: 721880 - DNA, 75 bp, synthetic construct
  source 1..75: mol_type = other DNA
tgggtatatccaaggcaatgatggaaaaagtaattgtagctaaaggtcgcaatctaaataaaagtgatacagtta

SEQ ID NO: 721881 - DNA, 75 bp, synthetic construct
  source 1..75: mol_type = other DNA
tgggaacatctaaagcaatgatggaaaaggtcatagttgctaaatctcgtaatgttcctgatgaaatggttatat

SEQ ID NO: 721882 - DNA, 75 bp, synthetic construct
  source 1..75: mol_type = other DNA
aatctcagtctagtggaggattataattctcataatactcaacagttagacattgaaggtatgaagacacttctg

SEQ ID NO: 721883 - DNA, 75 bp, synthetic construct
  source 1..75: mol_type = other DNA
agttatttgaagctttgctcagtcgtgaggaaatgctctctgctgaagatatgggggattattatcgtataccac

SEQ ID NO: 721884 - DNA, 75 bp, synthetic construct
  source 1..75: mol_type = other DNA
acgccgtttaaatatcagttaagcccgtcattgccagtgaaaaaagacggtccgggtaaggcgattattgtgatc

SEQ ID NO: 721885 - DNA, 75 bp, synthetic construct
  source 1..75: mol_type = other DNA
tcgataccgctcgattatgtctgtctgaaaatattgagagtggatttcgaagcgctatctcaagggcgtattaca

SEQ ID NO: 721886 - DNA, 75 bp, synthetic construct
  source 1..75: mol_type = other DNA
ttttaatggaaccaatattgaagatggaaacaaaaaatcagatctcgggattaaaaaagagaaaaaacaaatgga

SEQ ID NO: 721887 - DNA, 75 bp, synthetic construct
  source 1..75: mol_type = other DNA
taaccggtgggactggttcttttggaaatgctgtattgcggcgatttcttgacacagatattaaagaaattcgtg

SEQ ID NO: 721888 - DNA, 75 bp, synthetic construct
  source 1..75: mol_type = other DNA
aaacggtgacatttttgttcagaaagcgcctgccgcgacaattgctgtgcttgctaaagcattagttgaattgat

SEQ ID NO: 721889 - DNA, 75 bp, synthetic construct
  source 1..75: mol_type = other DNA
catgagtcatttgcgcacgaaagaatctactcttctgtgatgcagttatacaaaggtaaccggaaagaagaaatt

SEQ ID NO: 721890 - DNA, 75 bp, synthetic construct
  source 1..75: mol_type = other DNA
gcgatcacttccgtgcttaaacaggctggatcactgcgcggcttaaaagcctatgacgtgctgacttccaactat

SEQ ID NO: 721891 - DNA, 75 bp, synthetic construct
  source 1..75: mol_type = other DNA
tgcatatggatattcgtccgctgcctggcatgacactcaatgaacttaatgtttgctcaacgatgcattggctcc

SEQ ID NO: 721892 - DNA, 75 bp, synthetic construct
  source 1..75: mol_type = other DNA
gaggcactcgatcaaagcaatgcagatttaatcactctgctggcggactggtttaaagatttgggcttcaatgtg

SEQ ID NO: 721893 - DNA, 75 bp, synthetic construct
  source 1..75: mol_type = other DNA
aactgttggtaaaagcagaaccgttatcctttcatcgttcctgattgtctatgcggtcaggtttaatggcgtgtt

SEQ ID NO: 721894 - DNA, 75 bp, synthetic construct
  source 1..75: mol_type = other DNA
ccatgctggagtttgaggctggcaccaaaagtggctttagcagcagtaaagatcacgatgaacgcattgccggag

SEQ ID NO: 721895 - DNA, 75 bp, synthetic construct
  source 1..75: mol_type = other DNA
gcaacaaatttaatatgctggcaagtaccggacagggggctggcggcttgttgctggcggggcataccgatacgg

SEQ ID NO: 721896 - DNA, 75 bp, synthetic construct
  source 1..75: mol_type = other DNA
acgcgtttaccgtgccataccctacgctcaacctcgggcatatccacggcggcgatgcatctaaccgtatttgcg

SEQ ID NO: 721897 - DNA, 75 bp, synthetic construct
  source 1..75: mol_type = other DNA
ttaaacgtgccaatggttatagcgaactggaaatcagtcagaaacgcagtatgttagaaaacgtgatgctgaccg

SEQ ID NO: 721898 - DNA, 75 bp, synthetic construct
  source 1..75: mol_type = other DNA
atgttagaaaacgtgatgctgaccgattctgtggaaacccataaagcacgcctgcataaagccggatttgaacat

SEQ ID NO: 721899 - DNA, 75 bp, synthetic construct
  source 1..75: mol_type = other DNA
catttcgcgaagcgttgttgcatctgattaatgaatttgcctttagtgaacgcggcattcattgccagtttgcct

SEQ ID NO: 721900 - DNA, 75 bp, synthetic construct
  source 1..75: mol_type = other DNA
aggtttacgatctgggttgttctctgggcgcggcgacgctctcagtgcgtcgcaatattcatcatgataattgca

SEQ ID NO: 721901 - DNA, 75 bp, synthetic construct
  source 1..75: mol_type = other DNA
ttaaacgagccaacggttacagtgagctggaaatcagccagaagcgcagcatgttagaaaacgtaatgctgaccg

SEQ ID NO: 721902 - DNA, 75 bp, synthetic construct
  source 1..75: mol_type = other DNA
cgctggtgctttcggaaaaattcagttttgaagatgccaaagttggtgaactgctcttcaacatgcaccacgact

SEQ ID NO: 721903 - DNA, 75 bp, synthetic construct
  source 1..75: mol_type = other DNA
caatataatgtagtcatatttgaggatcttgaccgtcataatgacggagccatttttatcaaactccgggaaata

SEQ ID NO: 721904 - DNA, 75 bp, synthetic construct
  source 1..75: mol_type = other DNA
gccaatgatgatgaaaattggtgtaagcattaaggagaataaacgaagaaatcagatattaaaaagcgcacataa

SEQ ID NO: 721905 - DNA, 75 bp, synthetic construct
  source 1..75: mol_type = other DNA
aaccttaagcgcggtagcggttgcccaaaatgtaaagcaataaaaatatcgcaaaaacaaacattatcacacgaa

SEQ ID NO: 721906 - DNA, 75 bp, synthetic construct
  source 1..75: mol_type = other DNA
accgggcgctatccgtcgtatgacatcaccaacctggcggccttcctgcaatcaggctatgacatcaataatctc

SEQ ID NO: 721907 - DNA, 75 bp, synthetic construct
  source 1..75: mol_type = other DNA
atgcatcaggatatcaaagagtacagagccgggaaccgttgcgcggcgtattcactgggagcgtcaagagctgaa

SEQ ID NO: 721908 - DNA, 75 bp, synthetic construct
  source 1..75: mol_type = other DNA
atgcatcaggatatcaaagagtacagagccggaaatagttgcgcggcgtattcgctgggcgcgtccagagcagaa

SEQ ID NO: 721909 - DNA, 75 bp, synthetic construct
  source 1..75: mol_type = other DNA
acttatcccactggcgaacagtacaggagttttctatcacccaggccgctttattgttggccggaattgatcctt

SEQ ID NO: 721910 - DNA, 75 bp, synthetic construct
  source 1..75: mol_type = other DNA
tgttgtttgcgctgtttgtgttcatcagccgcaaaaccgccttcgggcgctcggtttttgctgttggcggtaatg

SEQ ID NO: 721911 - DNA, 75 bp, synthetic construct
  source 1..75: mol_type = other DNA
taaggagaacgagcgaagaaatgaaatattaaaaagcgcacataaagcaggtgttagaattcctgatttgcatat

SEQ ID NO: 721912 - DNA, 75 bp, synthetic construct
  source 1..75: mol_type = other DNA
ggggggcaatatgattttgatgatgtaatccaaaatgaaaattcatttctttctttgctgagcaaccaaataatc

SEQ ID NO: 721913 - DNA, 75 bp, synthetic construct
  source 1..75: mol_type = other DNA
aacaaccttaaacacgggaacggttgccctaaatgcgcaaggttaaaaaaaacattaacacacgaagaacatatt

SEQ ID NO: 721914 - DNA, 75 bp, synthetic construct
  source 1..75: mol_type = other DNA
aaaaactttggctatgaagagatgttgagtgagctggaagcgatagtcgctgatgctgaaacgcggttagccgag

SEQ ID NO: 721915 - DNA, 75 bp, synthetic construct
  source 1..75: mol_type = other DNA
gaaagaacctgctcgtaccgccaaaaattttggctatgaagagatgttgagcgaactggaagccatcgtcgcgga

SEQ ID NO: 721916 - DNA, 75 bp, synthetic construct
  source 1..75: mol_type = other DNA
cttggccaccccacgcatatccgaatcgttgactcgtatggtgattgctgcccgaggtgaatttccggcggcttt

SEQ ID NO: 721917 - DNA, 75 bp, synthetic construct
  source 1..75: mol_type = other DNA
agcccttaagccaaagctccgtcgtaggggcgctattgatactcaggcggcgctgttacgtttagcccgtagccg

SEQ ID NO: 721918 - DNA, 75 bp, synthetic construct
  source 1..75: mol_type = other DNA
ccggggcaggagcaccggaaatctattgagtgggaggccaagggggtcacacccatcctttacaccgtaccggcg

SEQ ID NO: 721919 - DNA, 75 bp, synthetic construct
  source 1..75: mol_type = other DNA
gatcattccctggttgggcgttgacgaaaatacagtgctgaccaatcggcaaaaaatcagcgccaacggcgtact

SEQ ID NO: 721920 - DNA, 75 bp, synthetic construct
  source 1..75: mol_type = other DNA
gggatcgggtaaatatcgaacctggcgttccttgcggtcactgtcgttactgtctggaaggcaaatataacatct

SEQ ID NO: 721921 - DNA, 75 bp, synthetic construct
  source 1..75: mol_type = other DNA
ttcacaaacatgatgaattagaaaatattgacatcttgatttctgataagacagcaaagccaaatgtaaaaaaag

SEQ ID NO: 721922 - DNA, 75 bp, synthetic construct
  source 1..75: mol_type = other DNA
agcattggtgaaatacttaaaatacatggttgctgctccactcctgaaagcataataataaaccgcgatgactac

SEQ ID NO: 721923 - DNA, 75 bp, synthetic construct
  source 1..75: mol_type = other DNA
catagatattcaaactatcttcgagaactcctcgaaaaggttagggatggagaggagtttgagttaggaataaag

SEQ ID NO: 721924 - DNA, 75 bp, synthetic construct
  source 1..75: mol_type = other DNA
ggcgcggcggcgttgtttattgctgcgcttatcagcacagtacaattatttaagctgcaagtggtcacttcatga

SEQ ID NO: 721925 - DNA, 75 bp, synthetic construct
  source 1..75: mol_type = other DNA
atttgtcttctgttttagattacgcatatggtgacgaaatagaaatatcacaaaaaatgcaagatattaaattca

SEQ ID NO: 721926 - DNA, 75 bp, synthetic construct
  source 1..75: mol_type = other DNA
tgagattgtcgtctttgaaggctgtgaacacgcaaaatacgtggtgctgatggacccactggatggctcgtccaa

SEQ ID NO: 721927 - DNA, 75 bp, synthetic construct
  source 1..75: mol_type = other DNA
cagtctttgatgaaagtgtacccggatcctgcgctcaatccggcagccagggaggagctggatgctgcctccacc

SEQ ID NO: 721928 - DNA, 75 bp, synthetic construct
  source 1..75: mol_type = other DNA
tgaccggtaaccactggccgtttggaatttataagacccgattttctctccagttctctaatattgcgggtaatc

SEQ ID NO: 721929 - DNA, 75 bp, synthetic construct
  source 1..75: mol_type = other DNA
ttgcgatgcgagcgaaagaaagagtctatgtcagaggatatgacgaattgttgcttccgcatctggctgaggcat

SEQ ID NO: 721930 - DNA, 75 bp, synthetic construct
  source 1..75: mol_type = other DNA
gttcggaactgcaatatgcgactcaattccttcgtgacaaggagatggatcaaatggagcctccgaaacctgact

SEQ ID NO: 721931 - DNA, 75 bp, synthetic construct
  source 1..75: mol_type = other DNA
gtggtatttacgaccaagatgaagcagaacgtatccgtgaaatggagcaggcatcagccattaacccggccattg

SEQ ID NO: 721932 - DNA, 75 bp, synthetic construct
  source 1..75: mol_type = other DNA
atggcaacaatggacagtaaatatattcagcacctcaggaaaataagtactgtgctgctcatgctgataagcaga

SEQ ID NO: 721933 - DNA, 75 bp, synthetic construct
  source 1..75: mol_type = other DNA
cagttagttgataccggagctttacagctcaactgcgtaaggctatctggtcatccgataaaaatgaatggaagg

SEQ ID NO: 721934 - DNA, 75 bp, synthetic construct
  source 1..75: mol_type = other DNA
ttcagccatcttcttttaccctccacgtcatcgttgttaatttggtttccgtgtctgttcctggtttgtggatag

SEQ ID NO: 721935 - DNA, 75 bp, synthetic construct
  source 1..75: mol_type = other DNA
cctctaccgctggcctcacgctttacttagcaatgcctcggctccgcaaacgacgaatattttcagccatcttct

SEQ ID NO: 721936 - DNA, 75 bp, synthetic construct
  source 1..75: mol_type = other DNA
atttggtttccgtgtctgttcctggtttgtggatggttatatctctggaagcgcaggccgcaatttacgccgata

SEQ ID NO: 721937 - DNA, 75 bp, synthetic construct
  source 1..75: mol_type = other DNA
tgttctcgtgtcgcgttcggtttcagtggtatttacgaccaagatgaagcagaacgtatccgtgaaatggagcag

SEQ ID NO: 721938 - DNA, 75 bp, synthetic construct
  source 1..75: mol_type = other DNA
gtagcagagcaatacaaccttaatccgtttactcgggagatctatgcgtttcctgatagacaaaacgggatcatc

SEQ ID NO: 721939 - DNA, 75 bp, synthetic construct
  source 1..75: mol_type = other DNA
gttacatgagcttattaaactatatgatattgtttctaaagatgaacgtaaccctgaaagttggcctggaaagtt

SEQ ID NO: 721940 - DNA, 75 bp, synthetic construct
  source 1..75: mol_type = other DNA
cggcttgctacggttattacatcctgccgacttatccgagcgatctggcagcgattcagtttgaccgttccggca

SEQ ID NO: 721941 - DNA, 75 bp, synthetic construct
  source 1..75: mol_type = other DNA
ccttcttttgctggcgtacgcttcgaaatgggtaacgacggctggcacagttttgtggcgttaaatgatgaatcc

SEQ ID NO: 721942 - DNA, 75 bp, synthetic construct
  source 1..75: mol_type = other DNA
taaagatgaccagcaggataccgaagccacggcaatcgcaagtgatttgttaagtggtaagaaacgctgggaaac

SEQ ID NO: 721943 - DNA, 75 bp, synthetic construct
  source 1..75: mol_type = other DNA
cggctcccttcaatccggaaaccttagaacgtgttttacgcgtggtgcgtcatcgtggtttccacgtctgttcaa

SEQ ID NO: 721944 - DNA, 75 bp, synthetic construct
  source 1..75: mol_type = other DNA
catcatgaagcatgatgatttgctgacatatattaaatatgtcgaaagtaagcgttatgcttttagtacattatg

SEQ ID NO: 721945 - DNA, 75 bp, synthetic construct
  source 1..75: mol_type = other DNA
ctgtgctggtatgaagactcaaaattacaaaccccactgtttgtcggtcagtttgatggcactgccgaacaggca

SEQ ID NO: 721946 - DNA, 75 bp, synthetic construct
  source 1..75: mol_type = other DNA
agcttctgtgtggcggtgccgtattcacacggtattgccgaagagatgctttcgcacatcagccaggaaaacgac

SEQ ID NO: 721947 - DNA, 75 bp, synthetic construct
  source 1..75: mol_type = other DNA
acgtatcgtttgcttaagcacggataaggcagtatatccgattaatgccatgggtatttccaaagcaatgatgga

SEQ ID NO: 721948 - DNA, 75 bp, synthetic construct
  source 1..75: mol_type = other DNA
ttactggcggtactggttcatttggaaatgcagtactagatcgatttctaaatacagatatttgcgaaatccgta

SEQ ID NO: 721949 - DNA, 75 bp, synthetic construct
  source 1..75: mol_type = other DNA
agaggaagtattagcgtcggttgatctaggggattactataaggtatcaccagatcgtagagatctaaactacgg

SEQ ID NO: 721950 - DNA, 75 bp, synthetic construct
  source 1..75: mol_type = other DNA
accgtgacgcctcttgcgctcaggaaacgctgaatgccattgtcgccaatggtggtaacgggcgtttgctcagtt

SEQ ID NO: 721951 - DNA, 75 bp, synthetic construct
  source 1..75: mol_type = other DNA
cgtggcctgtgcatggctgaccctgtgcgaacgccagtgccgctacccacacctcacccttgacgcgctggaaag

SEQ ID NO: 721952 - DNA, 75 bp, synthetic construct
  source 1..75: mol_type = other DNA
tgtagaagggatgaaaacgctgcttcttaagttgccgtttattcgcgcactgcgtgctggtgaaaattacgatct

SEQ ID NO: 721953 - DNA, 75 bp, synthetic construct
  source 1..75: mol_type = other DNA
acgagctgctggaagctatcgcaagtgccgatttaaccgctcgccagttgaaagttatgctggcctacgtccgga

SEQ ID NO: 721954 - DNA, 75 bp, synthetic construct
  source 1..75: mol_type = other DNA
caaggggccaggcgtggtacatggacatgatgtgcgaagcgcgtggcgcggcggatttactttcgtcctcagcgc

SEQ ID NO: 721955 - DNA, 75 bp, synthetic construct
  source 1..75: mol_type = other DNA
gatggcgtttatattgtgcgcgggattatgtacactggcgacacaaggggccaggcgtggtacatggatatgatg

SEQ ID NO: 721956 - DNA, 75 bp, synthetic construct
  source 1..75: mol_type = other DNA
ggcttcagtattccgcaccgcgctgtcgaacaaccatatcgcgatggccggcgggcagatcaccgaccagaacac

SEQ ID NO: 721957 - DNA, 75 bp, synthetic construct
  source 1..75: mol_type = other DNA
tagttgataaagggctgaacaatattattgttaccatgagcgaaaaaggcgcattatggatgacccgtgatcagg

SEQ ID NO: 721958 - DNA, 75 bp, synthetic construct
  source 1..75: mol_type = other DNA
ggctggagaaaggcgtcaccatcgggccgctgatcgatgaaaaagcggtagcaaaagtggaagagcatattgccg

SEQ ID NO: 721959 - DNA, 75 bp, synthetic construct
  source 1..75: mol_type = other DNA
tagtaagaaaaggtatagatcctcgtcatattagaaaaaatgaaaaacaaaaaaatgaacaaatgattatttact

SEQ ID NO: 721960 - DNA, 75 bp, synthetic construct
  source 1..75: mol_type = other DNA
tatatcggcctgccacgaattgagccagcaagccagactgccaagctgtcattccaggaatggttgtcagaacaa

SEQ ID NO: 721961 - DNA, 75 bp, synthetic construct
  source 1..75: mol_type = other DNA
atgattaaactaacaaacacgcttggtatgcaaaaggagctattagttccggttaaagagagcaaaatcggcatg

SEQ ID NO: 721962 - DNA, 75 bp, synthetic construct
  source 1..75: mol_type = other DNA
caaaaaagtttctcagaagttcgacccgctagaaacagagttgcctgattggttatcagcagaaacatggttgtc

SEQ ID NO: 721963 - DNA, 75 bp, synthetic construct
  source 1..75: mol_type = other DNA
tatcggcaacggcgtaaacgtccgcgcgctgattaacccgaacatccgggttaacgggctcattaagctggatca

SEQ ID NO: 721964 - DNA, 75 bp, synthetic construct
  source 1..75: mol_type = other DNA
ctgtctgcagatacctccaaccgtataaccggcaaagagttttcgaaagttcggctgattgccggttacgacggt

SEQ ID NO: 721965 - DNA, 75 bp, synthetic construct
  source 1..75: mol_type = other DNA
gcgcttattaatccgaacatccgggttaacgggctcattcagctggatcaggcttccgtctatcgtaccgcgttg

SEQ ID NO: 721966 - DNA, 75 bp, synthetic construct
  source 1..75: mol_type = other DNA
atgatgttgctggcaacaaaaaaacaccttttatcattactccaccattatttaaactcgatcctgaaaaaaaca

SEQ ID NO: 721967 - DNA, 75 bp, synthetic construct
  source 1..75: mol_type = other DNA
gtcatctacacaaccaacgccatcgagtcgctgaacagcgtaatccggcatgccatcaaaaaacgcaaggtgttc

SEQ ID NO: 721968 - DNA, 75 bp, synthetic construct
  source 1..75: mol_type = other DNA
gacctgcaatgtctgcttgataacggtgagcaaatgacactcagccacgtcagcaataccgtttatatcagtttt

SEQ ID NO: 721969 - DNA, 75 bp, synthetic construct
  source 1..75: mol_type = other DNA
tggctacgttcaaatatatgaagtgtgaccgtatcattgaagctgacattgtgaccgatacgggtagctggacat

SEQ ID NO: 721970 - DNA, 75 bp, synthetic construct
  source 1..75: mol_type = other DNA
gggcgcgacactgcttggactgctgtttattatgtccagcgtcgtggtgatcggcgctcagttgatgggctacca

SEQ ID NO: 721971 - DNA, 75 bp, synthetic construct
  source 1..75: mol_type = other DNA
gtgagcgaaattgactatcaggcactgcgtgaggcggcggaacgtgcaattccagcaatggaacgcctgttaatg

SEQ ID NO: 721972 - DNA, 75 bp, synthetic construct
  source 1..75: mol_type = other DNA
ttgaatgtgtcattaacggtatgccttttcagcttcacgccgcaccaggaatgccactttcggagatgctccgcg

SEQ ID NO: 721973 - DNA, 75 bp, synthetic construct
  source 1..75: mol_type = other DNA
acagcgtcaccctgctggttgaaggttttccaccttcacatgccgggaccattaccgtctatgaaggttccagac

SEQ ID NO: 721974 - DNA, 75 bp, synthetic construct
  source 1..75: mol_type = other DNA
ggcaaaccactgaccaatgatgtcaatgttacatcacaggatatttttaacggtcagagtattgagattggtgca

SEQ ID NO: 721975 - DNA, 75 bp, synthetic construct
  source 1..75: mol_type = other DNA
gcgacactaacagcgtgtctgaaacacaggctgcaacaccaaaggcggtaaaggcagcatatgaccttgctaacg

SEQ ID NO: 721976 - DNA, 75 bp, synthetic construct
  source 1..75: mol_type = other DNA
caaaatacctggggtgtacaaggctcagtaggtatgtctacgggggcgttagctaataccagtacagatggtaac

SEQ ID NO: 721977 - DNA, 75 bp, synthetic construct
  source 1..75: mol_type = other DNA
gtgtatcagtctctggggggagatggtctttataccaccaacggaaaggaagcgtatataggattatttgtgcgg

SEQ ID NO: 721978 - DNA, 75 bp, synthetic construct
  source 1..75: mol_type = other DNA
cgcctcagctgcggcaggctcaaaaacagcggctgcatcatctgccagcgccgcgtcaacaagtgccgggcaggc

SEQ ID NO: 721979 - DNA, 75 bp, synthetic construct
  source 1..75: mol_type = other DNA
taaacggtatgacggttaataccatggcttcatccttcaccgaaggggcgcgaatgatgatcgcccctgccctac

SEQ ID NO: 721980 - DNA, 75 bp, synthetic construct
  source 1..75: mol_type = other DNA
tccgcagagaagcgcatagcagaactggaagcacgggaaatatcgctcccagaacgtagcagcatgcttcatcga

SEQ ID NO: 721981 - DNA, 75 bp, synthetic construct
  source 1..75: mol_type = other DNA
ccagcagtacatcaaatcccgcgaccaggagaacgaggaaattgctcttacggttgggaagctgctaatcgaaaa

SEQ ID NO: 721982 - DNA, 75 bp, synthetic construct
  source 1..75: mol_type = other DNA
gcttcatcgaacagattttcacgatgattaccaaacggtaatggcatacaaagtttctgaggtcatcgatgcaat

SEQ ID NO: 721983 - DNA, 75 bp, synthetic construct
  source 1..75: mol_type = other DNA
tattaatgtatcatcatgtcagtcattgccccggactggttacactttctcccgtgacattccggaagcaaatga

SEQ ID NO: 721984 - DNA, 75 bp, synthetic construct
  source 1..75: mol_type = other DNA
gccgatctactgccagccgtagtagtctcccctccctggctttcgaaaaaaaaaaatcgccgattccggtgctgg

SEQ ID NO: 721985 - DNA, 75 bp, synthetic construct
  source 1..75: mol_type = other DNA
tcgcattaacactgcttatacgtgtagccgggcatactaaacgctgtcacgatcggatgacgaaagcctgcgctg

SEQ ID NO: 721986 - DNA, 75 bp, synthetic construct
  source 1..75: mol_type = other DNA
gcgaagcgggtgatgccagcgtgctgaatactattctcaatagcattgccaatgccattagcggcctggataacg

SEQ ID NO: 721987 - DNA, 75 bp, synthetic construct
  source 1..75: mol_type = other DNA
tcctcaacagcattgccaatgccattagcggtctggataacgcggtcgcggcctggtttatgttgctcttccagg

SEQ ID NO: 721988 - DNA, 75 bp, synthetic construct
  source 1..75: mol_type = other DNA
cgttaaccatgccgttactggcaccgcttggcgatctggtcggtgttaaccgtcaggttaccgtgctggcgttcc

SEQ ID NO: 721989 - DNA, 75 bp, synthetic construct
  source 1..75: mol_type = other DNA
agcacgggaaatatcgctcccagaacgtagcagcatgcttcatcgaacagattttcacgaggattaccaaacggt

SEQ ID NO: 721990 - DNA, 75 bp, synthetic construct
  source 1..75: mol_type = other DNA
tgcgtgatgcggcagagaaagcaacgtggggagactgggactcatataaaccacaccgtggcgcacgtggttatg

SEQ ID NO: 721991 - DNA, 75 bp, synthetic construct
  source 1..75: mol_type = other DNA
cgattttatgaatactattcacccagaggcattccggatggtgtttccgcagcattactgccagtgactgttacg

SEQ ID NO: 721992 - DNA, 75 bp, synthetic construct
  source 1..75: mol_type = other DNA
gcgcacatactcataccgttccattaaggagaccaaacagtggaggtatgaatttcgactggcttgatggtgcat

SEQ ID NO: 721993 - DNA, 75 bp, synthetic construct
  source 1..75: mol_type = other DNA
accgccacgaaacttcaggcagccagaacgattaacggtgtgtcatttgatggtagtgcaaatatcacattgacc

SEQ ID NO: 721994 - DNA, 75 bp, synthetic construct
  source 1..75: mol_type = other DNA
gtcaccagcatattctgctaataagccggaagggttaacggacggtacagtttattcactctatacgccatcaga

SEQ ID NO: 721995 - DNA, 75 bp, synthetic construct
  source 1..75: mol_type = other DNA
taatgacaatgcgaatggtcgggtaccttctgcccgtaaggtgaatggtaaggcgctttcagcggatataacact

SEQ ID NO: 721996 - DNA, 75 bp, synthetic construct
  source 1..75: mol_type = other DNA
aaaagaggcggcaaaatcatcagaaacgagcgcagcctcgagcgccagtagtgcagcctcctcggcaacggcggc

SEQ ID NO: 721997 - DNA, 75 bp, synthetic construct
  source 1..75: mol_type = other DNA
ctggttggttcaaattagcaacggtaaccatgccacaggcgagttctgttgtttcaattacgttgattggtggtg

SEQ ID NO: 721998 - DNA, 75 bp, synthetic construct
  source 1..75: mol_type = other DNA
tttaactgctgctggtgaggttatttcaaggtcagcaaatggtctgcgtattgcctatggcaactatggattctt

SEQ ID NO: 721999 - DNA, 75 bp, synthetic construct
  source 1..75: mol_type = other DNA
atggtgcaaaccagggggggaaaattccactgacatctgggcgtctggcaactcaatatacatcagcaacaacag

SEQ ID NO: 722000 - DNA, 75 bp, synthetic construct
  source 1..75: mol_type = other DNA
ccgggaaattggtgtatttgatgagcacggcgatttgatcgcggtgggcaatactgccgaaagttacaaaccaac

SEQ ID NO: 722001 - DNA, 75 bp, synthetic construct
  source 1..75: mol_type = other DNA
ggtattggtgctcatacgcactccgttgcgattggctcacatggacacaccatcaccgttaacgctgctggtaac

SEQ ID NO: 722002 - DNA, 75 bp, synthetic construct
  source 1..75: mol_type = other DNA
atgactgccagtcagcactattctccgcagcaaattgccgcctgggcgcagattgacgaatctcgctggaaggag

SEQ ID NO: 722003 - DNA, 75 bp, synthetic construct
  source 1..75: mol_type = other DNA
cacaacaaattgccgcctgggcgcagattgacgaatctcgctggaaggagaaactcgcgaaatcacaagtgcggg

SEQ ID NO: 722004 - DNA, 75 bp, synthetic construct
  source 1..75: mol_type = other DNA
atgccaccacagcgcggaaaggccttgtccagctcagtagcgccaccaacagcacgtctgaagcactggccgcaa

SEQ ID NO: 722005 - DNA, 75 bp, synthetic construct
  source 1..75: mol_type = other DNA
gtacaaggctcagtaggtatgtctacggggtggttagctaataccagtacagatggtaatcatagccactcactg

SEQ ID NO: 722006 - DNA, 75 bp, synthetic construct
  source 1..75: mol_type = other DNA
aatcgcacacccacagcgccagcgcatccagtacggatttggggacgaaaaacacatcgtcgtttgattacggaa

SEQ ID NO: 722007 - DNA, 75 bp, synthetic construct
  source 1..75: mol_type = other DNA
gtgactattcatacgtcaccagcatattctgctaataagccggaagggttaacggacggtacagtttattcactc

SEQ ID NO: 722008 - DNA, 75 bp, synthetic construct
  source 1..75: mol_type = other DNA
gtgctggttggttcaaattagcaacggtaaccatgccgcaggcgagttctgttgtttcaattacgttgattggtg

SEQ ID NO: 722009 - DNA, 75 bp, synthetic construct
  source 1..75: mol_type = other DNA
ggcggtaaaggcagcatatgaccttgctaacgggaaatataccgctcaggacgctacgacagcacaaaaaggaat

SEQ ID NO: 722010 - DNA, 75 bp, synthetic construct
  source 1..75: mol_type = other DNA
gcggtcagacacgattaagggtttatcgctggcagaggatagtaacggtacgaaaggctatgtttttgttggtga

SEQ ID NO: 722011 - DNA, 75 bp, synthetic construct
  source 1..75: mol_type = other DNA
ggctcaatccaccagaaaaataaaaaagcggattactcaaacgtgatggttttccatcaaccctttacggtggga

SEQ ID NO: 722012 - DNA, 75 bp, synthetic construct
  source 1..75: mol_type = other DNA
cgaatggtcgggtaccttctgcccgtaaggtgaatggtaaggcgctttcatcggatataacactgacgccgaaag

SEQ ID NO: 722013 - DNA, 75 bp, synthetic construct
  source 1..75: mol_type = other DNA
tcagtatggttctacagctgtcggaagtaactcataccaggtacaaggggcggttggtctgggcattggcacgat

SEQ ID NO: 722014 - DNA, 75 bp, synthetic construct
  source 1..75: mol_type = other DNA
atcagataccgttccgtctggctatgccctgatgcaggggcagacttttgacaaatctgcatacccgaaacttgc

SEQ ID NO: 722015 - DNA, 75 bp, synthetic construct
  source 1..75: mol_type = other DNA
caccacaacaaattgccgcctgggcgcagattgacgaatctcgctggaaggagaaactcgcgaaatcacaagtgc

SEQ ID NO: 722016 - DNA, 75 bp, synthetic construct
  source 1..75: mol_type = other DNA
gtcacgcttccagcctgacagaattaaaatcagtcaggaattgagatgtttcagggagatctgtttgctaaagct

SEQ ID NO: 722017 - DNA, 75 bp, synthetic construct
  source 1..75: mol_type = other DNA
tcagctaacttatgatgacagagcgctgcaattttttcgtacttttgttctttcaactgaaaaatcaacctattt

SEQ ID NO: 722018 - DNA, 75 bp, synthetic construct
  source 1..75: mol_type = other DNA
ctggaaggtccggaagaacaggttcaaatgatttatcgggccatatgccaggatccacggcactataatattgtt

SEQ ID NO: 722019 - DNA, 75 bp, synthetic construct
  source 1..75: mol_type = other DNA
cccggttaaacgtccggcgccggtggcgcataaatggcggaataatttcaggccggaaacggaaataaaaccgga

SEQ ID NO: 722020 - DNA, 75 bp, synthetic construct
  source 1..75: mol_type = other DNA
gtgacagcacggccaccgcctaccggaaggcacatcatcaccttctgagtctgtatgcagagaatgagctggaac

SEQ ID NO: 722021 - DNA, 75 bp, synthetic construct
  source 1..75: mol_type = other DNA
atggaattatttgatttgcgcctgcacgagcgagatgacgttttacaggccgtattcgacaaaggcacatcaaaa

SEQ ID NO: 722022 - DNA, 75 bp, synthetic construct
  source 1..75: mol_type = other DNA
cgccgtgtttttgttgagccagcaggcgacaaatttttatgattttgcctgctatgccaaagcgaaactgggtga

SEQ ID NO: 722023 - DNA, 75 bp, synthetic construct
  source 1..75: mol_type = other DNA
ggcgcacggcctttcgtgcagccggtggtgtcctgagcgatgagctgaaacagcgccacattgagcgcgtggcac

SEQ ID NO: 722024 - DNA, 75 bp, synthetic construct
  source 1..75: mol_type = other DNA
atttgtctgttactgatgatgttgttgttcctgctactgctcttctttttcctgctgctctcattcctgtcagtt

SEQ ID NO: 722025 - DNA, 75 bp, synthetic construct
  source 1..75: mol_type = other DNA
caatctggccgtggtgctgaattttgaacgcgaacgcctgaaaggggcgtgtgacagcacggccaccgcctaccg

SEQ ID NO: 722026 - DNA, 75 bp, synthetic construct
  source 1..75: mol_type = other DNA
attcagccctgcctgttgtttaagtggaaaaacaatctctggaaggaagtctcactgctgttgcttcaggagagg

SEQ ID NO: 722027 - DNA, 75 bp, synthetic construct
  source 1..75: mol_type = other DNA
atggcgcatcggctattcattggtaaaggaatgctcaccttgaatctcaaacggatttttctcaccctcacctta

SEQ ID NO: 722028 - DNA, 75 bp, synthetic construct
  source 1..75: mol_type = other DNA
agacatcccgctggggcgttttctgcgggaatttacctgtgaccgtcctgacctgtttaaacgcagccccgtaaa

SEQ ID NO: 722029 - DNA, 75 bp, synthetic construct
  source 1..75: mol_type = other DNA
gagtatcgacaccgaatacagctatcatggtatgcgcggaatactgccggcagtacgaacgcctataactatttc

SEQ ID NO: 722030 - DNA, 75 bp, synthetic construct
  source 1..75: mol_type = other DNA
tctgctgccgccgccagcattcgttaaaaccccgttattttcagatgttaaatctaatctactgtcagagctgca

SEQ ID NO: 722031 - DNA, 75 bp, synthetic construct
  source 1..75: mol_type = other DNA
gatattatatccacaatttaacgcactcctggagtcagacccggcagttaaactgctggaaatagttgcatacag

SEQ ID NO: 722032 - DNA, 75 bp, synthetic construct
  source 1..75: mol_type = other DNA
actgctctccagcggggtgaaaatggtggtgctcgatcacgacccggaccatatcgaaacgctgcgtaaattcgg

SEQ ID NO: 722033 - DNA, 75 bp, synthetic construct
  source 1..75: mol_type = other DNA
gatgccgaatctattctgcactttgccgagattggcgtggtgctgatgctgtttattatcggcctcgaactcgat

SEQ ID NO: 722034 - DNA, 75 bp, synthetic construct
  source 1..75: mol_type = other DNA
cccagcctggatacgtcgatatgtatgtcctgtcgcgaaccggcgacggcactccgccacaatcactactgaata

SEQ ID NO: 722035 - DNA, 75 bp, synthetic construct
  source 1..75: mol_type = other DNA
ggggtaacaaagccggaacaaccgaaaacgctggaggaagtgattgcacactataaaggagactcacgggttgtg

SEQ ID NO: 722036 - DNA, 75 bp, synthetic construct
  source 1..75: mol_type = other DNA
aggaagtgattgcacactataaaggagactcacgggttgtggatgcaaaccatgatgttttcgattatgtgatgc

SEQ ID NO: 722037 - DNA, 75 bp, synthetic construct
  source 1..75: mol_type = other DNA
tgccgcgattgcactgtggccggtcggacgccgcgtggtatcggtagaaacagctcaagctgcgcgtgaagccaa

SEQ ID NO: 722038 - DNA, 75 bp, synthetic construct
  source 1..75: mol_type = other DNA
ttaatggcaccgcatattgcgcggatgatgggctttcgacggacgatgccacacatcgtaatttcggcgctggtg

SEQ ID NO: 722039 - DNA, 75 bp, synthetic construct
  source 1..75: mol_type = other DNA
gaaagaaatggccggagacccggaattacagaaatggcgggaaaaatatctggatatttacccgcaggacactgt

SEQ ID NO: 722040 - DNA, 75 bp, synthetic construct
  source 1..75: mol_type = other DNA
gtactgaaagaaatggccggagacccggaattacagaaatggcgggagaaatatctggatatttacccgcaggac

SEQ ID NO: 722041 - DNA, 75 bp, synthetic construct
  source 1..75: mol_type = other DNA
agtacgttaagcgggcatctcggggtggggtatagcaacggtgccggtgtggaatccccgtggaacgcggtggct

SEQ ID NO: 722042 - DNA, 75 bp, synthetic construct
  source 1..75: mol_type = other DNA
caccggtactaaaacagatacgccgattcaaaaagtaccgcagtctatttctgtggtcacagccgaagagatggc

SEQ ID NO: 722043 - DNA, 75 bp, synthetic construct
  source 1..75: mol_type = other DNA
gccaaaacacatggcttctctgtgggctgactacaccttctttgatggtccgctttccggtctgacgctgggcac

SEQ ID NO: 722044 - DNA, 75 bp, synthetic construct
  source 1..75: mol_type = other DNA
ccctgagggttccttcttctcggttgaaggtggcgagatccgcgcacgtggcgtagaaatcgaagcgaaagcggc

SEQ ID NO: 722045 - DNA, 75 bp, synthetic construct
  source 1..75: mol_type = other DNA
tcttatacttacaccgatgcggaatacaccaccgatactacctataaaggcaatacgcctgcacaggtgccaaaa

SEQ ID NO: 722046 - DNA, 75 bp, synthetic construct
  source 1..75: mol_type = other DNA
gcggaatacaccaccgatactacctacaaaggcaatacgcctgcgcaggtgccaaaacacatggcttctctgtgg

SEQ ID NO: 722047 - DNA, 75 bp, synthetic construct
  source 1..75: mol_type = other DNA
cgtaaatatgtcgttgatgatgagaagctgcaaaacttctctgttgatacccagctgcagagcaaatttgccact

SEQ ID NO: 722048 - DNA, 75 bp, synthetic construct
  source 1..75: mol_type = other DNA
ggccgacgcgaccacgctgaccgaagccggttatgtgggcgaagacgttgaaaacatcattcagaagctgttgca

SEQ ID NO: 722049 - DNA, 75 bp, synthetic construct
  source 1..75: mol_type = other DNA
gcctgattactggctgtgctggtcttacagcgcatccggctattggcgtacagcagactcggtatgaacctcggg

SEQ ID NO: 722050 - DNA, 75 bp, synthetic construct
  source 1..75: mol_type = other DNA
tatgaggtccactacgaacttcgtgacaatgacatttatatcgtggatctctggcataccagagaagaacgatga

SEQ ID NO: 722051 - DNA, 75 bp, synthetic construct
  source 1..75: mol_type = other DNA
tattacggctggttgccgaaagagggaaccgttgagccgctgccgaacggtaagcgtctgccgacagactttaac

SEQ ID NO: 722052 - DNA, 75 bp, synthetic construct
  source 1..75: mol_type = other DNA
gaaccgttgagccgctgccgaacggtaagcgtctgccgacagactttaatgaaggggcgaagaacaacacctatt

SEQ ID NO: 722053 - DNA, 75 bp, synthetic construct
  source 1..75: mol_type = other DNA
cgacggtaaaagcgaagtccgacaaagcaagcgaaggcgagctgctggcgcaggttgaaccggaagatctgatca

SEQ ID NO: 722054 - DNA, 75 bp, synthetic construct
  source 1..75: mol_type = other DNA
cccgcaccgggctggatattggcgcgcgcttctttatgcaacatctgccagagaatctcgaaggggagattgtcg

SEQ ID NO: 722055 - DNA, 75 bp, synthetic construct
  source 1..75: mol_type = other DNA
gaaaaacggactatacaacccagtttgcggaaatatgtcttttgaagtattcaaattccttgacccaaataaagt

SEQ ID NO: 722056 - DNA, 75 bp, synthetic construct
  source 1..75: mol_type = other DNA
aagcatatttttggcacacaccaagacggcaaggctttgtcaaaagcacaaattgaaacattttttaaacatagc

SEQ ID NO: 722057 - DNA, 75 bp, synthetic construct
  source 1..75: mol_type = other DNA
acgcccattattatttcatgttgatgctggatggaatactgatcaggcagttggtaatattgaaaagcttatcga

SEQ ID NO: 722058 - DNA, 75 bp, synthetic construct
  source 1..75: mol_type = other DNA
ggggtggggtatagcaacggtgccggtgtggaatccccgtggaacgcggtggctggtgtgaactggtcgttctga

SEQ ID NO: 722059 - DNA, 75 bp, synthetic construct
  source 1..75: mol_type = other DNA
accgctgataaccccgaatatcatttatccaatggcatgaaatcgaaatcagtcgatacccgcagtatatatcgt

SEQ ID NO: 722060 - DNA, 75 bp, synthetic construct
  source 1..75: mol_type = other DNA
cttcctccgcacgcttttacgcactgcgcctcctccccgggcaggaagttttttcccagctacacgcttttgcac

SEQ ID NO: 722061 - DNA, 75 bp, synthetic construct
  source 1..75: mol_type = other DNA
ttgataaaaacccgcaggcgaaagtggtgtttgtcgatgaatcaccgatggcggttgcttccagccgtttgaacg

SEQ ID NO: 722062 - DNA, 75 bp, synthetic construct
  source 1..75: mol_type = other DNA
atctcggttgtggtaatggcgttattggtctgacgctgcttgataaaaacccgcaggcgaaagtggtgtttgtcg

SEQ ID NO: 722063 - DNA, 75 bp, synthetic construct
  source 1..75: mol_type = other DNA
atggaaaaaagcgcgcctgattaattgcactttcaatgaaccgccgctggccgatgcgccgcagaccgttagctg

SEQ ID NO: 722064 - DNA, 75 bp, synthetic construct
  source 1..75: mol_type = other DNA
gcttcgccaataagctgcgtgccgactggcagtgggtgatcggcatcggcggcctcggccatatcgccattaagc

SEQ ID NO: 722065 - DNA, 75 bp, synthetic construct
  source 1..75: mol_type = other DNA
aaatggacgaagaaatgctctgcttcttcgacagcaacgggcgaaccaccatgccccgtaaagctttctccctgc

SEQ ID NO: 722066 - DNA, 75 bp, synthetic construct
  source 1..75: mol_type = other DNA
ggccgatgcgccgcagaccgttagctggaagctggaaggcactgactggactatccacaaccatgcgaatgtttt

SEQ ID NO: 722067 - DNA, 75 bp, synthetic construct
  source 1..75: mol_type = other DNA
acaccgcctatccgtttgcggtatcaggtggcaaggtagtgatcccgaaagcgatgatttatgacgcggtgattg

SEQ ID NO: 722068 - DNA, 75 bp, synthetic construct
  source 1..75: mol_type = other DNA
catatcagtgcgaactcgggcacgctcaataatgtcgtgatagcggagaactgtacgataaatggcacgctgaaa

SEQ ID NO: 722069 - DNA, 75 bp, synthetic construct
  source 1..75: mol_type = other DNA
ttcggcatcgcagttgtttgtctttgacccgaacaacccggataacacagcctatccctttgcggtgtcaggtgg

SEQ ID NO: 722070 - DNA, 75 bp, synthetic construct
  source 1..75: mol_type = other DNA
atcatcggagatatcgtcaagggatattccttcgaacctcatgatggcacgctccatattacgaaccacaagtat

SEQ ID NO: 722071 - DNA, 75 bp, synthetic construct
  source 1..75: mol_type = other DNA
ataaaagaagaggcggcgaagtctcccgtcatagaagagcttcgcaaggaaataaaaaacgcgcaggggcaggct

SEQ ID NO: 722072 - DNA, 75 bp, synthetic construct
  source 1..75: mol_type = other DNA
atgaccagaaaaccgtggcgtgcggggaaggatttatccactgttgtggagaatatggaaattggcaccgggcag

SEQ ID NO: 722073 - DNA, 75 bp, synthetic construct
  source 1..75: mol_type = other DNA
catggcgatgcacaagcctgggcagtctatcgggtcatccttcaacagcccatcactaatgatcaggcagcgctg

SEQ ID NO: 722074 - DNA, 75 bp, synthetic construct
  source 1..75: mol_type = other DNA
catggagatgcagccgcctgggcggtttatcgcgttattctgaaacagcccattactaacgatcaggccgcgatg

SEQ ID NO: 722075 - DNA, 75 bp, synthetic construct
  source 1..75: mol_type = other DNA
cgatacgagtggattatgcccctgatgacgctaatgatgttattcatccagcagcacacctaaccctaggtcagt

SEQ ID NO: 722076 - DNA, 75 bp, synthetic construct
  source 1..75: mol_type = other DNA
attaaaaacgattggtggcgtggaaacccgcataaccgatatggactcatcaaccagtgaatcgcttaatgaggt

SEQ ID NO: 722077 - DNA, 75 bp, synthetic construct
  source 1..75: mol_type = other DNA
actgaaaactatcggtggtattgatacccgtgttacggggatgaataagtcaaccagtgaagagcttaataaggt

SEQ ID NO: 722078 - DNA, 75 bp, synthetic construct
  source 1..75: mol_type = other DNA
tcactgactgaaatctggcggggtacggaggatgacctttcggatgcggtgctggttgccacgacgccggggcag

SEQ ID NO: 722079 - DNA, 75 bp, synthetic construct
  source 1..75: mol_type = other DNA
tctctgctatgggcgtggcaacaccagaagagtggatgtggcttgaatctgcaggaattgagatgtttcagggag

SEQ ID NO: 722080 - DNA, 75 bp, synthetic construct
  source 1..75: mol_type = other DNA
gtgagcggcgcgcgacctggggtttagggaccgtattttcattgcgcatgctgggcatgtttatggtactgccgg

SEQ ID NO: 722081 - DNA, 75 bp, synthetic construct
  source 1..75: mol_type = other DNA
agtgcagttgttggggcgttactggctgatcaccaacggcaatggccgtgaaaccgaagtccagggcgaaggtgt

SEQ ID NO: 722082 - DNA, 75 bp, synthetic construct
  source 1..75: mol_type = other DNA
acctacctaataatccgcttaatcttaattgtgagggaacagttgatttagttaagagcaacatggctagagcgc

SEQ ID NO: 722083 - DNA, 75 bp, synthetic construct
  source 1..75: mol_type = other DNA
cccacaaatttgggctgcacgcgctgttctggatgatcgctattctggcaaccacaggcattgcattgaccattt

SEQ ID NO: 722084 - DNA, 75 bp, synthetic construct
  source 1..75: mol_type = other DNA
gcgtcgggttgatcgtggttgcggaaattgtgttgtggaacgcacaaacgcagttctggcaactggtggtcggcg

SEQ ID NO: 722085 - DNA, 75 bp, synthetic construct
  source 1..75: mol_type = other DNA
agggatcgtattttcattgcgcatgctgggcatgtttatggttctgccggttctgaccacgtatggtatggctct

SEQ ID NO: 722086 - DNA, 75 bp, synthetic construct
  source 1..75: mol_type = other DNA
catttgatctattacatataggtcatgtcaaatttttagaaagagctaaaaaatatggtgatcgcctaattgttg

SEQ ID NO: 722087 - DNA, 75 bp, synthetic construct
  source 1..75: mol_type = other DNA
ggcgacagcgatatcgactgcgaaatcaacggcggtgtactgaccattacctttgaaaacggcagcaaaatcatt

SEQ ID NO: 722088 - DNA, 75 bp, synthetic construct
  source 1..75: mol_type = other DNA
gatgagtggatttgcgatcgtagcggcgaaaccttctgggatttgctggaacaggcggcaacgcagcaagcgggt

SEQ ID NO: 722089 - DNA, 75 bp, synthetic construct
  source 1..75: mol_type = other DNA
ggcgtacaactgacgaacgaaggggataaccgtaagggcgtttattcgtggtctggacagcagctacaccctgat

SEQ ID NO: 722090 - DNA, 75 bp, synthetic construct
  source 1..75: mol_type = other DNA
tgcaatctcgatggatgtgctgactgttggcgatcaagtattctacagtttttttgatgactacgttttcatagc

SEQ ID NO: 722091 - DNA, 75 bp, synthetic construct
  source 1..75: mol_type = other DNA
aacataatctcaataatttgtttaatttttataggaatagcattttatttctatagaaggtttaaaggattgacg

SEQ ID NO: 722092 - DNA, 75 bp, synthetic construct
  source 1..75: mol_type = other DNA
aaagtatatgtgacgttccttaacgacaaagatgaagatgcggttaaagcgggcatcaaagcgttacaagaagcc

SEQ ID NO: 722093 - DNA, 75 bp, synthetic construct
  source 1..75: mol_type = other DNA
aagcagcatcaccatgttgttcagaaaatagaatccctcgaatgctctgaatgttttttaaccagcaacttttcg

SEQ ID NO: 722094 - DNA, 75 bp, synthetic construct
  source 1..75: mol_type = other DNA
cccaagaactccatgataaaattttatatactattgatgttttgaagttaaacaaggatgatggcttagttcaaa

SEQ ID NO: 722095 - DNA, 75 bp, synthetic construct
  source 1..75: mol_type = other DNA
cccaccagcgtgttaccccgctcggtaccctgcgttctacctggctaagtgcgccagaagtccccgtctggccgc

SEQ ID NO: 722096 - DNA, 75 bp, synthetic construct
  source 1..75: mol_type = other DNA
gccagatgggctcgtggtaacagctggctgacgattgtgatccctgactttttagaattgcttaatttgccggaa

SEQ ID NO: 722097 - DNA, 75 bp, synthetic construct
  source 1..75: mol_type = other DNA
ggcgccacgaccaaaaatgttaatactatggctccatttctaaccctggcttatcgctacgaagacactggcaga

SEQ ID NO: 722098 - DNA, 75 bp, synthetic construct
  source 1..75: mol_type = other DNA
ttttatcgcgagatcccgctgacatccatgccctacggtcaggcaatggcagtgttgtgtctgacagaatatctg

SEQ ID NO: 722099 - DNA, 75 bp, synthetic construct
  source 1..75: mol_type = other DNA
ccattccgtctaaaagtgacgacagcgaaaacaaaaatgtattacagattgctgttcgcacccgcatcaaactgt

SEQ ID NO: 722100 - DNA, 75 bp, synthetic construct
  source 1..75: mol_type = other DNA
ggcattaaatatcacattacccgccggggtaggtagcgtttctaaaattaaatataacaccatcaatgactttgg

SEQ ID NO: 722101 - DNA, 75 bp, synthetic construct
  source 1..75: mol_type = other DNA
ctgcgatttacgcgtaacggtaatcagctccgcgttgataatccgacagtttttaatattacctttaatcaattt

SEQ ID NO: 722102 - DNA, 75 bp, synthetic construct
  source 1..75: mol_type = other DNA
cactgtactgctggtggcaaatttgtttgtaacgatggatctatcagcgcatcgaaaaagacatgtactaactga

SEQ ID NO: 722103 - DNA, 75 bp, synthetic construct
  source 1..75: mol_type = other DNA
gcagtaagaaagaagcctcgctgaccgtacagaataaaagtaagacggaagagtttcttatccagtcctgggtgg

SEQ ID NO: 722104 - DNA, 75 bp, synthetic construct
  source 1..75: mol_type = other DNA
ggggcaggtagcgtttcgaagattaaatataacactatcaatgactttggatcgtcagcggaaatgatgactaaa

SEQ ID NO: 722105 - DNA, 75 bp, synthetic construct
  source 1..75: mol_type = other DNA
catatcggtatccccacacccaacagtgacactgccgaccaccgtgaggctgtcgtgatcggcaacctgatattc

SEQ ID NO: 722106 - DNA, 75 bp, synthetic construct
  source 1..75: mol_type = other DNA
gccatgataagcgtacgtatacccggcggcattctgcccgcgcacctgctgacggtggcacgcgagattgcggaa

SEQ ID NO: 722107 - DNA, 75 bp, synthetic construct
  source 1..75: mol_type = other DNA
tttacctccatatgggacatctcattgataagggggggtatctgcgcttcagagagcgggtactgcgcggcgtac

SEQ ID NO: 722108 - DNA, 75 bp, synthetic construct
  source 1..75: mol_type = other DNA
atgatgagtgtggatattgatatcattaagacccgggcaaacaatgaatatcgcctttcgaaagtccgtggcgaa

SEQ ID NO: 722109 - DNA, 75 bp, synthetic construct
  source 1..75: mol_type = other DNA
gtggaaggcgcactggcctcgaaattccgcaacgccgggcaaacctgcgtctgcgccaaccgtttatacgtgcag

SEQ ID NO: 722110 - DNA, 75 bp, synthetic construct
  source 1..75: mol_type = other DNA
attgccgggtgtccgaatgactgtgccaaagcgtccatgtcagactttggcattattggtgtggccagaatgcgt

SEQ ID NO: 722111 - DNA, 75 bp, synthetic construct
  source 1..75: mol_type = other DNA
gacggtggcacgcgagattgcggaaacctggggtaacggtcagatccatctgaccacccgccagaaactggccat

SEQ ID NO: 722112 - DNA, 75 bp, synthetic construct
  source 1..75: mol_type = other DNA
tcccctgaaccaacagcagaagacaaacctcaggagagcgttatacctgccgctgataccggtgaaaaaaatgcc

SEQ ID NO: 722113 - DNA, 75 bp, synthetic construct
  source 1..75: mol_type = other DNA
ccggaaaagggcgctgcttttttgtggagctcaccaaccgcagtggcaaacgggaatactggggaaacggcctgg

SEQ ID NO: 722114 - DNA, 75 bp, synthetic construct
  source 1..75: mol_type = other DNA
tacacacaaagagtttcccgacaggactgcgctctacagcgttgacggtgaacccgccttcctggacagactcta

SEQ ID NO: 722115 - DNA, 75 bp, synthetic construct
  source 1..75: mol_type = other DNA
ttaaccagcaacttttcgcgggttaaattcgaacaccggggtaatacctataacgcctatcaaatcaccaaaaac

SEQ ID NO: 722116 - DNA, 75 bp, synthetic construct
  source 1..75: mol_type = other DNA
cgttttctgaccggtggaaaatcacgtaccgccgaacctcccgttattcaggagaacaagcttacggaggccgaa

SEQ ID NO: 722117 - DNA, 75 bp, synthetic construct
  source 1..75: mol_type = other DNA
agcacaagaacccaatgctgacgccacggttacagttacgaccacggctcacgacaccggcacagcagaaacaga

SEQ ID NO: 722118 - DNA, 75 bp, synthetic construct
  source 1..75: mol_type = other DNA
gacgccgatgcataaagaacgcattgtgaccttactgaagcgcgaagggcatgtggttggctttatgggcgatgg

SEQ ID NO: 722119 - DNA, 75 bp, synthetic construct
  source 1..75: mol_type = other DNA
cgccgttatttctggtgcataatgctgggaagatatagaggatttggggaaacacatcccgattttttgaagtga

SEQ ID NO: 722120 - DNA, 75 bp, synthetic construct
  source 1..75: mol_type = other DNA
agggactgaagttggtcagacgctctggttaaccactgatgttgccagacaatttatttcgatattagaagcagg

SEQ ID NO: 722121 - DNA, 75 bp, synthetic construct
  source 1..75: mol_type = other DNA
gtatcaaaaatctatctagctattattgaattgtataaagaccattctgatatacaggacgaaatcgaaaaaaaa

SEQ ID NO: 722122 - DNA, 75 bp, synthetic construct
  source 1..75: mol_type = other DNA
tgctggagaatcataccgatatctccggtaaaactagcgaacgcgtgctgcatagcgcgtggttgaacagccatt

SEQ ID NO: 722123 - DNA, 75 bp, synthetic construct
  source 1..75: mol_type = other DNA
aagctatttcccgtggctggttgcgattctggcagggtatatgacattaacccagttggtgaaagggttctatag

SEQ ID NO: 722124 - DNA, 75 bp, synthetic construct
  source 1..75: mol_type = other DNA
agttttcaagctctgcctcctgggtcgatgttgatgctaccggtaaagtgacatttaaaaatgtcggcagcaatt

SEQ ID NO: 722125 - DNA, 75 bp, synthetic construct
  source 1..75: mol_type = other DNA
agtagttcccgaggcatcgggtcactgtacagtgaatggggagatatggggcattacacgactgaagctggtttt

SEQ ID NO: 722126 - DNA, 75 bp, synthetic construct
  source 1..75: mol_type = other DNA
atcgacgagctgcacaacgtcttggccggcaacagcgtcaaccggcgggaatttctcaacctgctgcgcttcctc

SEQ ID NO: 722127 - DNA, 75 bp, synthetic construct
  source 1..75: mol_type = other DNA
gcggagagggtatcgcaacgctgatccctgtattgaatggtgttcatcaagctggtctgagtaccacaatacaat

SEQ ID NO: 722128 - DNA, 75 bp, synthetic construct
  source 1..75: mol_type = other DNA
actttaccgatagtgctgagctacatcttgttttgcacgatatatcaggcaatccgatcaaagtttctgaaggga

SEQ ID NO: 722129 - DNA, 75 bp, synthetic construct
  source 1..75: mol_type = other DNA
tccgtcgactatcgccgccaccaacagtgatttaagtaccttaaaggcaacggttgaggatggcagtggtaacct

SEQ ID NO: 722130 - DNA, 75 bp, synthetic construct
  source 1..75: mol_type = other DNA
atagcgaatacagaacgtgtcgtttcaaaagcaattaccggctgtggtgtcttccgtgatataccacaagtaaaa

SEQ ID NO: 722131 - DNA, 75 bp, synthetic construct
  source 1..75: mol_type = other DNA
ggcgacacaggtctgaaacaaaacggcgacggtaatcttgatgtttatgttggtaacgcacgtgtaatgcgctta

SEQ ID NO: 722132 - DNA, 75 bp, synthetic construct
  source 1..75: mol_type = other DNA
ttacgaaaaatattggtgcctgccgtgccttcggtgggtcagtaagcacaacaacaggaaactggacgactgcac

SEQ ID NO: 722133 - DNA, 75 bp, synthetic construct
  source 1..75: mol_type = other DNA
ccgccgccggaaaatcggcagaaagcgccgcatcatccgcttcaacagccacaacgaaggctggcgaagccactg

SEQ ID NO: 722134 - DNA, 75 bp, synthetic construct
  source 1..75: mol_type = other DNA
cagtaggtatgtctacggggtggttagcgaataccagtacagatggtaatcatagccactcactgtccggcacag

SEQ ID NO: 722135 - DNA, 75 bp, synthetic construct
  source 1..75: mol_type = other DNA
aagcagctaatgacaatgcgaatggtcgggtaccttctgcccgtaaggtgaatggtaaggcgctttcagcggata

SEQ ID NO: 722136 - DNA, 75 bp, synthetic construct
  source 1..75: mol_type = other DNA
gctgcgccacgacggcatccacgaaggcgacagaggcagctggtagtgcgacggcggcagctcagagcaaaagta

SEQ ID NO: 722137 - DNA, 75 bp, synthetic construct
  source 1..75: mol_type = other DNA
ttaaggctgccggtttgtgttctttggcatttgcgttgaccggatgtatcaccgcaggactggtttttaataccg

SEQ ID NO: 722138 - DNA, 75 bp, synthetic construct
  source 1..75: mol_type = other DNA
atgaatcacagcgaaacaattaccatcgaatgcaccattaacgggatgccttttcagcttcacgccgcaccaggc

SEQ ID NO: 722139 - DNA, 75 bp, synthetic construct
  source 1..75: mol_type = other DNA
cattgctaacttatctgaggcgaatccaattgagatacgaaaaaaaatcaaaagcattgaccgacaattatcttc

SEQ ID NO: 722140 - DNA, 75 bp, synthetic construct
  source 1..75: mol_type = other DNA
cggatataacactgacgccgaaagatattggtacgcttaactcaacaacaatgtcattcagcggtggtgctggtt

SEQ ID NO: 722141 - DNA, 75 bp, synthetic construct
  source 1..75: mol_type = other DNA
gtggcgcttgaggatgcaagtacgacgaaaaaggggatagtacagctcagcagtgcgaccaacagcacttccgag

SEQ ID NO: 722142 - DNA, 75 bp, synthetic construct
  source 1..75: mol_type = other DNA
tcgctggcagaagatagtaacggtacgaaaggctatgtttttgttggtgaatcgttggactatctgttgaccacc

SEQ ID NO: 722143 - DNA, 75 bp, synthetic construct
  source 1..75: mol_type = other DNA
gcgatcaaccatcgcacactcagcatggccgtttacaccggacccagcgagcggcggcggcaattcgagcgggaa

SEQ ID NO: 722144 - DNA, 75 bp, synthetic construct
  source 1..75: mol_type = other DNA
cagcgtattttgctcagttacctggtaactacacgttacggccacgcctgagttctatcagcagtctgaactttg

SEQ ID NO: 722145 - DNA, 75 bp, synthetic construct
  source 1..75: mol_type = other DNA
atttaatcgcgacatggcagattgatggagcttattttgaatgtgttagtgatgaagaccttgcattacttactg

SEQ ID NO: 722146 - DNA, 75 bp, synthetic construct
  source 1..75: mol_type = other DNA
tcccggttgagtatgtacagacttcctcttttactccgatagacaagcagtctgcaatcaaggcgctggatgatc

SEQ ID NO: 722147 - DNA, 75 bp, synthetic construct
  source 1..75: mol_type = other DNA
gttcgatgaaatctggaaagaaggaatgaagccggaagagtggcttgatacctatctggaacaggcgaacctgat

SEQ ID NO: 722148 - DNA, 75 bp, synthetic construct
  source 1..75: mol_type = other DNA
gtgcatcaaaaccccagttagaactgttcgatgaaatctggaaagaaggaatgaagccggaagagtggcttgata

SEQ ID NO: 722149 - DNA, 75 bp, synthetic construct
  source 1..75: mol_type = other DNA
attctggatgctctgatgtatctccccgttgagtatgtcgtgacatcgtcctttactgcgatggataagcaatca

SEQ ID NO: 722150 - DNA, 75 bp, synthetic construct
  source 1..75: mol_type = other DNA
aaaaataataacgtaccattatatctatggttactttggtgtacgttttgcctgtacatcactaccccgtggcaa

SEQ ID NO: 722151 - DNA, 75 bp, synthetic construct
  source 1..75: mol_type = other DNA
cggcggctgaacactggaaggtctatctggcgacgatgttaatcgcctttggctcggtcgtgcctttcattatct

SEQ ID NO: 722152 - DNA, 75 bp, synthetic construct
  source 1..75: mol_type = other DNA
tcgccagtacgatgaaagaaccgccgtatgtcagcagcttgcgcattgaaatcccggctgaagttgccgcaaatg

SEQ ID NO: 722153 - DNA, 75 bp, synthetic construct
  source 1..75: mol_type = other DNA
atactttaagagtctcgatgatgcaattgctgtaaggcgtgaggctgaaaagacctatggttatcatgagaatca

SEQ ID NO: 722154 - DNA, 75 bp, synthetic construct
  source 1..75: mol_type = other DNA
gagaaagcgtttggtgctccggttggccgcgcttgcggcgtaatagtcggtgccccagcgtcagtcggcgtactg

SEQ ID NO: 722155 - DNA, 75 bp, synthetic construct
  source 1..75: mol_type = other DNA
cccgcagatcatggcggctgatgaagctgtcaaagccacaaatactgaagtcgttgcaattgagctggcccgtga

SEQ ID NO: 722156 - DNA, 75 bp, synthetic construct
  source 1..75: mol_type = other DNA
gatgaagagtcagcgcgctcgctggccagccgttggcaaaaaattgatgagattccgtttgatttcgagcgtcgt

SEQ ID NO: 722157 - DNA, 75 bp, synthetic construct
  source 1..75: mol_type = other DNA
ttgcgaacgttgatagcgccgaaacttgaaaaacgctatcgttccattggcattctgggggcgcgtattggcgca

SEQ ID NO: 722158 - DNA, 75 bp, synthetic construct
  source 1..75: mol_type = other DNA
ctggacgcgcaatcacaccgatatcccgctgcgcccacgatttgcggtgcttgcgagcggcagtttctttagcgg

SEQ ID NO: 722159 - DNA, 75 bp, synthetic construct
  source 1..75: mol_type = other DNA
tgcgcgaactcgaccttgccgttgaaaccgcagaaattgaactgccggaactggatgtgctgcgcaacaacgcca

SEQ ID NO: 722160 - DNA, 75 bp, synthetic construct
  source 1..75: mol_type = other DNA
cacgccccgctttgattagggggctgggcgttccgctctacccctttcttggaatgtgcgttatctgcgttttgc

SEQ ID NO: 722161 - DNA, 75 bp, synthetic construct
  source 1..75: mol_type = other DNA
ggcatgggcttaaagcccgtctgaagccctggactcagggagaggaatttggctgggtgatcgataaccctgaag

SEQ ID NO: 722162 - DNA, 75 bp, synthetic construct
  source 1..75: mol_type = other DNA
cgtagcgacgccagagcatgaggttctcccgaaaaccactcatcaaacacgagagacggctatggcagaaaaaag

SEQ ID NO: 722163 - DNA, 75 bp, synthetic construct
  source 1..75: mol_type = other DNA
caattacaatcttcgtcctcgcctaagtatgctgagtagcctcaactttgccgagatggaaagtttccataactt

SEQ ID NO: 722164 - DNA, 75 bp, synthetic construct
  source 1..75: mol_type = other DNA
gtcagagttacaaatagccctttttacacttatctggggggcaaagatttgttctttggaaatgatgccggacag

SEQ ID NO: 722165 - DNA, 75 bp, synthetic construct
  source 1..75: mol_type = other DNA
actctatttaacgatttgttataagccttttaatatcgaggataaggtttctcattttatctcgaagaataaaaa

SEQ ID NO: 722166 - DNA, 75 bp, synthetic construct
  source 1..75: mol_type = other DNA
gtagtgaatgaaatctggacccgcaatcacgccgatattccgctacgtccacgtttcgcggttctcgccagcggc

SEQ ID NO: 722167 - DNA, 75 bp, synthetic construct
  source 1..75: mol_type = other DNA
ccgctgcgtccacgctttgccgtgctagccagcggtagtttctttagcggtggactggtagcagaacgtaatggc

SEQ ID NO: 722168 - DNA, 75 bp, synthetic construct
  source 1..75: mol_type = other DNA
ttcgcggctctggtaacgatgtctaccatctcaattatcacatgactacggagaatattaactttttcggcaaga

SEQ ID NO: 722169 - DNA, 75 bp, synthetic construct
  source 1..75: mol_type = other DNA
tgcgtatacgtgatcgtaatgattaccgggcttatttacagagaatcaaaacagagattcaagggtaaacaatga

SEQ ID NO: 722170 - DNA, 75 bp, synthetic construct
  source 1..75: mol_type = other DNA
acccatgtggggcggcggcaccgggtaatcctaccgctatcgatacccactggatttggcaggagggcgattgtc

SEQ ID NO: 722171 - DNA, 75 bp, synthetic construct
  source 1..75: mol_type = other DNA
aatattggtggggcacataacgcatatttcacccgcaatattgtggtactcaccgataacgccgggcataccggc

SEQ ID NO: 722172 - DNA, 75 bp, synthetic construct
  source 1..75: mol_type = other DNA
tttttggtttatccggcgagttaacggaaaaagatattaaagccgcatacaaaaaagccgctttaaaatatcatc

SEQ ID NO: 722173 - DNA, 75 bp, synthetic construct
  source 1..75: mol_type = other DNA
atgaaacgtattagctttgctgtgctggcacttttaatgaccgcacaacagtgttttgctggtggcgtagcctta

SEQ ID NO: 722174 - DNA, 75 bp, synthetic construct
  source 1..75: mol_type = other DNA
cgcaatatcgtggtactcaccgataatgccggacattccggcattggtgaagcgccaggcggagaggtgatttat

SEQ ID NO: 722175 - DNA, 75 bp, synthetic construct
  source 1..75: mol_type = other DNA
tcctaccgctatcgatacccactggatttggcaggagggcgattgtcgcctgaccaaaaatccgctggagattaa

SEQ ID NO: 722176 - DNA, 75 bp, synthetic construct
  source 1..75: mol_type = other DNA
aggtcgccccggttgtgtagtcatgtgggatggctggttcagacttcaggatatggttgagggttacctggtgat

SEQ ID NO: 722177 - DNA, 75 bp, synthetic construct
  source 1..75: mol_type = other DNA
gtcagtataaaaaatcccgacaacagcggccaggcgctctcgctcacgtatgtctgttgcggggagcaggagagg

SEQ ID NO: 722178 - DNA, 75 bp, synthetic construct
  source 1..75: mol_type = other DNA
tcccggttgggtcgtcatgtgggatggctggttcagacttcaggatatggttgagggttacctggtgatgaagtc

SEQ ID NO: 722179 - DNA, 75 bp, synthetic construct
  source 1..75: mol_type = other DNA
tttgattttttgatggcgaatctggacaaaattaatcagtaccagagcaccgaaaaaagtgcaatatataactac

SEQ ID NO: 722180 - DNA, 75 bp, synthetic construct
  source 1..75: mol_type = other DNA
gtctggattagcggagaaactaaagaacacaaagatattttaaaggaaatgggctgtaagtgggcatcgaagaaa

SEQ ID NO: 722181 - DNA, 75 bp, synthetic construct
  source 1..75: mol_type = other DNA
tgggttaagctggaaggaaagccgcttccggcgcaggcaccgaccctgaaatgggcctgtctgaaactggctaaa

SEQ ID NO: 722182 - DNA, 75 bp, synthetic construct
  source 1..75: mol_type = other DNA
gcggcaagaaagaagcgtcgctgaccgttgaaaaccataataaaaatgaagagtttttgatccagtcatggattg

SEQ ID NO: 722183 - DNA, 75 bp, synthetic construct
  source 1..75: mol_type = other DNA
agcgggcgctggataattttaaagcggtgctggatttacgcgtcaaccagagcgatatcagtgatgcacaaataa

SEQ ID NO: 722184 - DNA, 75 bp, synthetic construct
  source 1..75: mol_type = other DNA
agcagtcgctgattaccatccgcgaagaggaaggtggtaagaagcagattgcgctgaccgaacaaggcgcgcagt

SEQ ID NO: 722185 - DNA, 75 bp, synthetic construct
  source 1..75: mol_type = other DNA
ggacgtgcgttgtttaacctggtcacaggcagcgatccacaagagctggcaggcgacggcgtgttccttgatcat

SEQ ID NO: 722186 - DNA, 75 bp, synthetic construct
  source 1..75: mol_type = other DNA
cgacgaagagggctttttttatttcgtcgatcgccgctgcaatatgatcaaacgcggtggcgagaatgtctcctg

SEQ ID NO: 722187 - DNA, 75 bp, synthetic construct
  source 1..75: mol_type = other DNA
ttgatggtgcagccgccttcagcgaacgatcagcaacaccgcctgcgggaagtgatgttttatctcaacttgtcg

SEQ ID NO: 722188 - DNA, 75 bp, synthetic construct
  source 1..75: mol_type = other DNA
cgatcgtcgctgcaatatgatcaaacgcggtggcgagaatgtctcttgtgtagagctggaaaatattatctctgc

SEQ ID NO: 722189 - DNA, 75 bp, synthetic construct
  source 1..75: mol_type = other DNA
aagggcgtgcgctatacccgccacgtcacgcaaatctggtgcggctttttcatcattaacggtggaattgccctc

SEQ ID NO: 722190 - DNA, 75 bp, synthetic construct
  source 1..75: mol_type = other DNA
ctggtggtgatcagccgttcccatgcggatgcggagctgaaagagtatctgcaacagcttggcgaacatcagacc

SEQ ID NO: 722191 - DNA, 75 bp, synthetic construct
  source 1..75: mol_type = other DNA
ggtttacgtacgctgacaccggatattccggtcctttctgaagaagatcctcccggttgggaagtccgtcagcac

SEQ ID NO: 722192 - DNA, 75 bp, synthetic construct
  source 1..75: mol_type = other DNA
agttttgtgctttcgggctacccgcatctggaagaagcgtatcgggttggcgagttgctgttcccgcatctggat

SEQ ID NO: 722193 - DNA, 75 bp, synthetic construct
  source 1..75: mol_type = other DNA
ctggttgatcatgattatctgcaacaaattgcgcaagcggcggatcgtctgggctataccggtgtgctaattcca

SEQ ID NO: 722194 - DNA, 75 bp, synthetic construct
  source 1..75: mol_type = other DNA
tgcactggctgttgccgctgatggcgctgctgcttttattgcgcctgcgccagactcgttgccaggccgagccgc

SEQ ID NO: 722195 - DNA, 75 bp, synthetic construct
  source 1..75: mol_type = other DNA
gcgagtgccgccgatgcgcgacgtatcgtcagccattacgagcgacgctggctgatagaggaataccacaaggcg

SEQ ID NO: 722196 - DNA, 75 bp, synthetic construct
  source 1..75: mol_type = other DNA
gggaggggtcagcagtaaacccatccgggaacgtctctcccgggctgcggactccccggtccgcgaggcgtatga

SEQ ID NO: 722197 - DNA, 75 bp, synthetic construct
  source 1..75: mol_type = other DNA
agagctccttgcgttaaaagccccgcctgcgcgcccgggttatccaatcatcgaagacaaaaagctgcctgcaca

SEQ ID NO: 722198 - DNA, 75 bp, synthetic construct
  source 1..75: mol_type = other DNA
gttatgagagtgatccacaggttgtcaccttgcaacaccaggacgaaaactatggctacggttatcgctcagaaa

SEQ ID NO: 722199 - DNA, 75 bp, synthetic construct
  source 1..75: mol_type = other DNA
aactgagtcagattcacgttatgtgagagacatgcggctgggcggtgcatctacatataaaccagcaaataatgg

SEQ ID NO: 722200 - DNA, 75 bp, synthetic construct
  source 1..75: mol_type = other DNA
cgcgtcgttatttcaactggttgttataacggcgattatgtaatgaataactgcgagtttaatggcatggttatg

SEQ ID NO: 722201 - DNA, 75 bp, synthetic construct
  source 1..75: mol_type = other DNA
aggtggcgaattgccgtttggcttttacacgacacggctggccgcactcaagtttgcgaaagttagcttgcagga

SEQ ID NO: 722202 - DNA, 75 bp, synthetic construct
  source 1..75: mol_type = other DNA
cctaccgacaactacattcccttcgcaggggttcaccggggcgtattatcagttgaataatgacaactttgcccc

SEQ ID NO: 722203 - DNA, 75 bp, synthetic construct
  source 1..75: mol_type = other DNA
agttgaataatgacatgaagctggttttcaatcaaatatgtattggtcatctagtcccgcaaactcaagcgaaca

SEQ ID NO: 722204 - DNA, 75 bp, synthetic construct
  source 1..75: mol_type = other DNA
cgtgcgaccgcgtcgcgttcccgatgctgcaacgggagagtccccggcgttttctggcgatgcgcagccaacccc

SEQ ID NO: 722205 - DNA, 75 bp, synthetic construct
  source 1..75: mol_type = other DNA
tggtcgtggggaaaaccggtagcggtaagacagccatcagcgttgaggttatgcggacctttttatcagaacgac

SEQ ID NO: 722206 - DNA, 75 bp, synthetic construct
  source 1..75: mol_type = other DNA
attcttcgttgtaagtgccacggaaagattcacaagaaaggtgatttacacaataaccgcagacaaggcgggtta

SEQ ID NO: 722207 - DNA, 75 bp, synthetic construct
  source 1..75: mol_type = other DNA
cagaacaccaaagtttgcatagaagttaacggaaaggttaaaacgccatgtattagtcatgttctaactggtcag

SEQ ID NO: 722208 - DNA, 75 bp, synthetic construct
  source 1..75: mol_type = other DNA
cgtaatggtaaccgtaatgcgtcgaacgtgtaccgcctgaatgtggcgaaacttcaggctgccgcattttctcaa

SEQ ID NO: 722209 - DNA, 75 bp, synthetic construct
  source 1..75: mol_type = other DNA
atggaatttcgtaatctgacacctttttccgcaatggaatacgcgatggacgataaatattacaaacgtcatcac

SEQ ID NO: 722210 - DNA, 75 bp, synthetic construct
  source 1..75: mol_type = other DNA
gctcgccatccggcgacgtgctgctggataaaaaactgcggataaccggccagcgcttttaccgccatcagccgc

SEQ ID NO: 722211 - DNA, 75 bp, synthetic construct
  source 1..75: mol_type = other DNA
acagacctggcgttatgtattgccggtcagttcgtcagtccgggtgatggaagcgcgttacagcctcgcaggaga

SEQ ID NO: 722212 - DNA, 75 bp, synthetic construct
  source 1..75: mol_type = other DNA
acggctacggcgcattctggccagaacccggctggggcgcaccttattacaccaatgcggttagccaggtaacgc

SEQ ID NO: 722213 - DNA, 75 bp, synthetic construct
  source 1..75: mol_type = other DNA
atgtcacgccccaaaattaacagaattaaactaaacagaagggatataaacatcagacaggtttacgttactatc

SEQ ID NO: 722214 - DNA, 75 bp, synthetic construct
  source 1..75: mol_type = other DNA
acggctatggtgcattctggccggaaccgggctggggtgcgccttactacaccaatgcggtgagtcaggtaacac

SEQ ID NO: 722215 - DNA, 75 bp, synthetic construct
  source 1..75: mol_type = other DNA
ccaaagagaacagggcacgtattgatgacgtggtggatttcctgaaaaacgccagtgacagcgagcagtatgccg

SEQ ID NO: 722216 - DNA, 75 bp, synthetic construct
  source 1..75: mol_type = other DNA
gaacatgcgcaaatccaaggtgtgacaaggaagccgaagaaaaaggccaatgcaaacctcgcaaatcttgcgaag

SEQ ID NO: 722217 - DNA, 75 bp, synthetic construct
  source 1..75: mol_type = other DNA
cagtaccagtacatgcgaccggaaacgctgtttggcccgaagaaattcgagagctatctgcaaagcgctacccgc

SEQ ID NO: 722218 - DNA, 75 bp, synthetic construct
  source 1..75: mol_type = other DNA
gagtattcatgaggcggtgtggcagctggcgtggaagaagtcagggccggagatggcttcgctggaagcctggct

SEQ ID NO: 722219 - DNA, 75 bp, synthetic construct
  source 1..75: mol_type = other DNA
tgagtattcatgaggcggtgtggcagctggcgtggaagaaatcggggccggagatggcttcgctggaggcctggc

SEQ ID NO: 722220 - DNA, 75 bp, synthetic construct
  source 1..75: mol_type = other DNA
acggcacttacggccagtattttaactctgatgagccgtccctgcgggatgacgcaaaaatggtggtgctggagc

SEQ ID NO: 722221 - DNA, 75 bp, synthetic construct
  source 1..75: mol_type = other DNA
tcaggaagacaattattaatagacaagttttcagttaaagcggcagcgttacaaattattaaggggattaagcat

SEQ ID NO: 722222 - DNA, 75 bp, synthetic construct
  source 1..75: mol_type = other DNA
tcattagctgcttcccattcatttcataatttccccggcaagctattaaactatatggcacattctgtgccaatt

SEQ ID NO: 722223 - DNA, 75 bp, synthetic construct
  source 1..75: mol_type = other DNA
tgaaatcctggcagagttcattcgccagcattctgcggctgggcagctggtggcgcgcgccgtgtttctctcgcc

SEQ ID NO: 722224 - DNA, 75 bp, synthetic construct
  source 1..75: mol_type = other DNA
cggcatcatgctctcaacacgcttgctaatgatgttaatcagcctgaagaagcgctgcgcaagaaaagggcctga

SEQ ID NO: 722225 - DNA, 75 bp, synthetic construct
  source 1..75: mol_type = other DNA
tgtgccagcgatgattataattcccttcgccaaaaatacgatctaaaagataaagtcattttttttatggaggta

SEQ ID NO: 722226 - DNA, 75 bp, synthetic construct
  source 1..75: mol_type = other DNA
tatgatgcgttatcatgatgctcatttcctgtttatagggcagggtgatgaagttgacctgataaaatctcttgc

SEQ ID NO: 722227 - DNA, 75 bp, synthetic construct
  source 1..75: mol_type = other DNA
gtgatgaggtagtgctgataaattctctagcaagagattgggaattaacaaattttacttatttagcgtctatta

SEQ ID NO: 722228 - DNA, 75 bp, synthetic construct
  source 1..75: mol_type = other DNA
tggcttgatggttatgacataaacgcctcaatggtagacagcggctatgcatgggtataccggtttgacggtaat

SEQ ID NO: 722229 - DNA, 75 bp, synthetic construct
  source 1..75: mol_type = other DNA
aatactggttcatggggagcaatgatgtgggattctggaagtaaagtagggcattgggtacttgttaagggtgtt

SEQ ID NO: 722230 - DNA, 75 bp, synthetic construct
  source 1..75: mol_type = other DNA
atgaaccatcgggatgaattgccgttagcgaaagtcagcgaagttgacgaggcgaagcggcaatggttacagggg

SEQ ID NO: 722231 - DNA, 75 bp, synthetic construct
  source 1..75: mol_type = other DNA
tgatccgtgacatccaactggctcgccataatattgagatggtgttttacatctggcagcccggcggcatggcag

SEQ ID NO: 722232 - DNA, 75 bp, synthetic construct
  source 1..75: mol_type = other DNA
cttcacgcgatttgcacagcagcacagcgcggagttgatgtcagtattattctgccgcgtaaaaatgactcaatg

SEQ ID NO: 722233 - DNA, 75 bp, synthetic construct
  source 1..75: mol_type = other DNA
atgcatacctccgagttgctgaaacatatttatgacatcaatttgtcatatttacttcttgcacaacgtctgatc

SEQ ID NO: 722234 - DNA, 75 bp, synthetic construct
  source 1..75: mol_type = other DNA
atgctacaaaattgcgcacaatcaaattgccgcattattcctaagaaattacgcgatatgaaacgtgaagagatt

SEQ ID NO: 722235 - DNA, 75 bp, synthetic construct
  source 1..75: mol_type = other DNA
tgcagggaaagaaggctggagtgcaaacgccacgctggaaggtgggccgaatctgagctatgtgaaaagtcaacg

SEQ ID NO: 722236 - DNA, 75 bp, synthetic construct
  source 1..75: mol_type = other DNA
ctgggtaacgacacacagtacgacatgatggcgctgcgtaaatctctgacgctgactgaacatcagaacctgagt

SEQ ID NO: 722237 - DNA, 75 bp, synthetic construct
  source 1..75: mol_type = other DNA
tgtatggcgagaaccccggcgcacgtacgccggtgatgtatgagcctggcatcataattctcttttccgggaata

SEQ ID NO: 722238 - DNA, 75 bp, synthetic construct
  source 1..75: mol_type = other DNA
atggacattggcgaagatgagcatttccagccgtcgatggcagccagcgggattaactccgccacgttatcagaa

SEQ ID NO: 722239 - DNA, 75 bp, synthetic construct
  source 1..75: mol_type = other DNA
cctcgcctttgcagtatttgaagaactaccggctgcataaggcgcgaatgatgatcatccacgatggcatgaaag

SEQ ID NO: 722240 - DNA, 75 bp, synthetic construct
  source 1..75: mol_type = other DNA
cttggtcttgattctgatgatttcgaatacatcccgccgataacttaccgcgacgttgatgatttcatggctgaa

SEQ ID NO: 722241 - DNA, 75 bp, synthetic construct
  source 1..75: mol_type = other DNA
ttgagcgcatcaaataaaccttacaaaatccggtgtaaaggtgaatatcctggctttacggttggttgcgaatac

SEQ ID NO: 722242 - DNA, 75 bp, synthetic construct
  source 1..75: mol_type = other DNA
aatacatcccgccagtcacttaccgtgacgtcgatgatttcctggctgaacaagaagacgatgaagaggatgatt

SEQ ID NO: 722243 - DNA, 75 bp, synthetic construct
  source 1..75: mol_type = other DNA
gccaacgccggcactattaatgtgcagggtgatggtgcagtcgctatcagcgggggaaccaccagctatacggtt

SEQ ID NO: 722244 - DNA, 75 bp, synthetic construct
  source 1..75: mol_type = other DNA
cttagaaaagagtttgatgtagagggggttgctgtagaaatattaaggaaggttactgaattttatgaagaaaat

SEQ ID NO: 722245 - DNA, 75 bp, synthetic construct
  source 1..75: mol_type = other DNA
cttgatcttgattctgatgatttcgaatacatcccgccagtaacttaccgcgtagttgattatttcctagctgaa

SEQ ID NO: 722246 - DNA, 75 bp, synthetic construct
  source 1..75: mol_type = other DNA
ttgtcacgcaaaatgtaattggaacagaattaacatctatgacgtcgctggcaaacaagcttaataaatttgatg

SEQ ID NO: 722247 - DNA, 75 bp, synthetic construct
  source 1..75: mol_type = other DNA
aatccgggaggttgccaggattcgcgccgatttcgatgattttgacggtgacaggcgaggtatcggtgattgtct

SEQ ID NO: 722248 - DNA, 75 bp, synthetic construct
  source 1..75: mol_type = other DNA
attcgtctgcatgtgattgttcgtgaaaccaacgacgaagcgtggcaggcccacgagcggttaatctcgcatctt

SEQ ID NO: 722249 - DNA, 75 bp, synthetic construct
  source 1..75: mol_type = other DNA
aggcgtgtctgttggtgaccagtgcacaattttatcctatgtatcggcagattcagcaggaagatgccacgcaac

SEQ ID NO: 722250 - DNA, 75 bp, synthetic construct
  source 1..75: mol_type = other DNA
caaagtgaagccaataagagcatttctggtgcaatggcgggttttctcagttccagcgttatcaatggaagaaaa

SEQ ID NO: 722251 - DNA, 75 bp, synthetic construct
  source 1..75: mol_type = other DNA
gcagcaggttatatgaatgtagctcaaaaggctgctaacagggctgtatcatttggtgagcataacagaccgttg

SEQ ID NO: 722252 - DNA, 75 bp, synthetic construct
  source 1..75: mol_type = other DNA
aaaaatatagagctttcacatatttatcaggaaatatcttggatgacgtaacccactggatgacgctgccagaac

SEQ ID NO: 722253 - DNA, 75 bp, synthetic construct
  source 1..75: mol_type = other DNA
agtgctggaagccgacggctggctacatacggcgataccggatactgcgacgaagagggctttttttatttcgtc

SEQ ID NO: 722254 - DNA, 75 bp, synthetic construct
  source 1..75: mol_type = other DNA
agtgcgtggatcctgcaaaacagccaggcgtgcctgctggtgaccagtgcgcaattttatcccatgtatcaacag

SEQ ID NO: 722255 - DNA, 75 bp, synthetic construct
  source 1..75: mol_type = other DNA
ccacctcccgaccgaaaggggtggtgattacccattacaacctgcgcttcgctggatattactccgcctggcagt

SEQ ID NO: 722256 - DNA, 75 bp, synthetic construct
  source 1..75: mol_type = other DNA
gttggcattatcggcgatcgccccggcgataaacgacgctggccgtcaattggccgtgcaggattttgctacgaa

SEQ ID NO: 722257 - DNA, 75 bp, synthetic construct
  source 1..75: mol_type = other DNA
cgcttgctgacgtcttatgggatgacggaaaccattgtgggcattatcggcgatcgccctggcgataaacgacgc

SEQ ID NO: 722258 - DNA, 75 bp, synthetic construct
  source 1..75: mol_type = other DNA
aggcgtgcctgctggtgaccagtgcgcaattttatcctatgtatcaacagattcagcaggaagatgccactcagt

SEQ ID NO: 722259 - DNA, 75 bp, synthetic construct
  source 1..75: mol_type = other DNA
aaagctttaaggctccagataaagggaatggtggtggatcttccggtggtagttcatcacccactgaaagtaatg

SEQ ID NO: 722260 - DNA, 75 bp, synthetic construct
  source 1..75: mol_type = other DNA
caaaaagcgaatgctcggcgtgaaatctgtcggatggattgaggccgagattgatgagtggttatcacaacgctg

SEQ ID NO: 722261 - DNA, 75 bp, synthetic construct
  source 1..75: mol_type = other DNA
atgaatgttaattacctgaatgattcagatctggattttcttcagcattgtagtgaggaacagttggcaaatttc

SEQ ID NO: 722262 - DNA, 75 bp, synthetic construct
  source 1..75: mol_type = other DNA
atcttgatcactgcctggaggatgcgcttcatgccgatcatgccggaactgaaacaacgctaagcgaatttaaag

SEQ ID NO: 722263 - DNA, 75 bp, synthetic construct
  source 1..75: mol_type = other DNA
ctattcatgtgcgttaatggcagatggcgcccgttacgatctgaaggggctgccgtgcggggaagtgacactaca

SEQ ID NO: 722264 - DNA, 75 bp, synthetic construct
  source 1..75: mol_type = other DNA
ggcgcaggtacattacgcgcggcagtggcgtcttatgtgcagtctccgcgctattaccgtgcgttaatggcaggt

SEQ ID NO: 722265 - DNA, 75 bp, synthetic construct
  source 1..75: mol_type = other DNA
agccgtgcggggaagtgaagccacaggagcagaaagaggcagaaacccggctgatgatgctgaatgccagaaaac

SEQ ID NO: 722266 - DNA, 75 bp, synthetic construct
  source 1..75: mol_type = other DNA
caaaagatatttatttaaaaaatggtctcttatatttttcaagtcaggatgaagagtataaatgttttgagttca

SEQ ID NO: 722267 - DNA, 75 bp, synthetic construct
  source 1..75: mol_type = other DNA
tggtgccatatccaaaggcgctcaacgctggctggatctcggtatcgtccgtttccagccatcggaaatcgccaa

SEQ ID NO: 722268 - DNA, 75 bp, synthetic construct
  source 1..75: mol_type = other DNA
ttcgaacgcgttaggtaatcagatcagaaacgggcaaatgaataaagaccgtgaacaacaacgtgagcttcaaca

SEQ ID NO: 722269 - DNA, 75 bp, synthetic construct
  source 1..75: mol_type = other DNA
tcctgataatatccccttccgtgaggataatattaagaaatctgcgagcaatgcatcaaaaataactgtgtcggt

SEQ ID NO: 722270 - DNA, 75 bp, synthetic construct
  source 1..75: mol_type = other DNA
tggtatatgagtggcaggaatatgtcgattgggaaggaatgaatagtgggatattctttgaaagtgattatgttc

SEQ ID NO: 722271 - DNA, 75 bp, synthetic construct
  source 1..75: mol_type = other DNA
taaaagacaaggccgaaaattttcacgagattacagaggatgacatattcaaaatgcttataatacattgtgacc

SEQ ID NO: 722272 - DNA, 75 bp, synthetic construct
  source 1..75: mol_type = other DNA
acgggtgtgctgggcggactgaatgcagggaatccggggcaggtactggctggcggtctgaatccggcagtggca

SEQ ID NO: 722273 - DNA, 75 bp, synthetic construct
  source 1..75: mol_type = other DNA
ggtatttatgttttctggtcgaaaggcgatgaagcgacagtttataaacgcgatcgcatcgtcctgaataactgt

SEQ ID NO: 722274 - DNA, 75 bp, synthetic construct
  source 1..75: mol_type = other DNA
attcatggctaaaggcacagagcgatagcgaaaaaattcgatttattgcacaagcgctggggagtgtcgaatatc

SEQ ID NO: 722275 - DNA, 75 bp, synthetic construct
  source 1..75: mol_type = other DNA
cagggcctggcgggcggcaatatggcaggcgcgctggcaggtgcttcagcgccggagctggcgaacatcatcggt

SEQ ID NO: 722276 - DNA, 75 bp, synthetic construct
  source 1..75: mol_type = other DNA
attttgattcgtgcgtcgttaccgcgtccgcgttatgaccaggtaatgtcctgctggaaatactgctgccgctga

SEQ ID NO: 722277 - DNA, 75 bp, synthetic construct
  source 1..75: mol_type = other DNA
gctggcaaggcccgttgttaccgccattcatctggttcgcgctgaaaaccgcgttctttatgatgatgttcattt

SEQ ID NO: 722278 - DNA, 75 bp, synthetic construct
  source 1..75: mol_type = other DNA
gattggcgacaatacggcggttgccggtggcgtcattatggcgggcagcctgaaaattggtcgttactgcatgat

SEQ ID NO: 722279 - DNA, 75 bp, synthetic construct
  source 1..75: mol_type = other DNA
aacttgttattcatatctcgattgtgggtggtcaggctcatgattatacggttgagggtttcagggctatggtgg

SEQ ID NO: 722280 - DNA, 75 bp, synthetic construct
  source 1..75: mol_type = other DNA
aaaccgctttgcatcgatactgatccacttaatccgactttttccaattatcagaaactaaacgtgcggcagctg

SEQ ID NO: 722281 - DNA, 75 bp, synthetic construct
  source 1..75: mol_type = other DNA
gttgatgattggtggcgcgtttctctgctttgaaggggtagagaaagtgctgcatatgctggaggcgcgtaaaca

SEQ ID NO: 722282 - DNA, 75 bp, synthetic construct
  source 1..75: mol_type = other DNA
gtgattattggcgatcgcgtggagattggtgcctgtactaccatcgatcgcggcgcgctggatgacacggtgatc

SEQ ID NO: 722283 - DNA, 75 bp, synthetic construct
  source 1..75: mol_type = other DNA
tagcgcagcagttggatgcagaactacacggtgatggcgatatcgtcatccccggcgttgcgtccatgcaatctg

SEQ ID NO: 722284 - DNA, 75 bp, synthetic construct
  source 1..75: mol_type = other DNA
tggtgaaacgcggcgcgctgtacattggctggagtgcaggggctaaccttgcctgtccgactatccgtactacca

SEQ ID NO: 722285 - DNA, 75 bp, synthetic construct
  source 1..75: mol_type = other DNA
aaagatggtgtaccattaattagaattcgtgatgttctaaaaggtaatacatcgacttattactcgggtcaaatt

SEQ ID NO: 722286 - DNA, 75 bp, synthetic construct
  source 1..75: mol_type = other DNA
taatcaaattgcctcaactggatttgaagttatacatccggtacaagtcgaaagtaagtatatttttggactagt

SEQ ID NO: 722287 - DNA, 75 bp, synthetic construct
  source 1..75: mol_type = other DNA
tcgaaaaaaacccggattttccgcgctggctgtgcaatgaacttaacgtggctaccgacgttgacctgtttgaca

SEQ ID NO: 722288 - DNA, 75 bp, synthetic construct
  source 1..75: mol_type = other DNA
aagcaggaaatgttttgctggaacgaattaaagaaggtaactggagcaatcagatattcattgagccctgtttat

SEQ ID NO: 722289 - DNA, 75 bp, synthetic construct
  source 1..75: mol_type = other DNA
gtgttgagcataatagtaccgtgcgtcacttgctcaaaaatgcctcgattcctgttatagaaatcggtgccattc

SEQ ID NO: 722290 - DNA, 75 bp, synthetic construct
  source 1..75: mol_type = other DNA
tcgaagctggcagtgatgtctttttgttgaagcgtattcgttatgtcgatgaagaagcggtatcgattgaagaat

SEQ ID NO: 722291 - DNA, 75 bp, synthetic construct
  source 1..75: mol_type = other DNA
cccagaccacccaattggcgactggcgggcaacaactgaacgtccctggcatcagcggttcagtcgccgcataca

SEQ ID NO: 722292 - DNA, 75 bp, synthetic construct
  source 1..75: mol_type = other DNA
ttgtcggcggcggtaatactttccagttgctgaaacagtgccgcgagcgcgggctgctggcaccaattactgacg

SEQ ID NO: 722293 - DNA, 75 bp, synthetic construct
  source 1..75: mol_type = other DNA
cgcagacctgggatgattacacagcgaaaacggctgcggttctcgctccgctgggtgtttctgtcaccggtattc

SEQ ID NO: 722294 - DNA, 75 bp, synthetic construct
  source 1..75: mol_type = other DNA
aggatgggagattaaatcaaggacacttttcattggtgatattcagttatggggcgcaatgccggatatgacaat

SEQ ID NO: 722295 - DNA, 75 bp, synthetic construct
  source 1..75: mol_type = other DNA
cccagactactcaactgtcgaccggcggccaacaactgaatgtccctggcatcagtggtccggttgctgcgtaca

SEQ ID NO: 722296 - DNA, 75 bp, synthetic construct
  source 1..75: mol_type = other DNA
tggacaccggtcgatcaatccaaaacccagaccactcatctggcaaccgatggacaacaactgaacgtccctggc

SEQ ID NO: 722297 - DNA, 75 bp, synthetic construct
  source 1..75: mol_type = other DNA
tacgcgggacgatcatcgccgcttagttcagaaattattagaaataagtgcgcgtggtgctgcaaaagttgttat

SEQ ID NO: 722298 - DNA, 75 bp, synthetic construct
  source 1..75: mol_type = other DNA
aatgtgcgctgacccaacggtgaaattaatgatcaccgagggaattaattacagcataacgattaatgatacacg

SEQ ID NO: 722299 - DNA, 75 bp, synthetic construct
  source 1..75: mol_type = other DNA
cacagccaaccagtgctggacatccttcctggatgcgggcggtctgcgcgatatcggggttgaggctgtcaccaa

SEQ ID NO: 722300 - DNA, 75 bp, synthetic construct
  source 1..75: mol_type = other DNA
cggactgtcatcacgtaaagtacctgaccaactcatgtggcagccgtgcctgcccgtcctgcggaaaaaaggcca

SEQ ID NO: 722301 - DNA, 75 bp, synthetic construct
  source 1..75: mol_type = other DNA
acaaaatgccaaacaggacgatattgcggtccgaattgacaccgccctctcgaccattgagaaacgtaacctaac

SEQ ID NO: 722302 - DNA, 75 bp, synthetic construct
  source 1..75: mol_type = other DNA
gaatatggtcggagacgatctcagacggtcagaaaatcgtgtttatgctgaatatatagtaaagaacggaaaaaa

SEQ ID NO: 722303 - DNA, 75 bp, synthetic construct
  source 1..75: mol_type = other DNA
gttgaaggctgggaaaacgcagaagccgctaaagctgaaatcgttgcctccttcgagcgcgcaaagaataaataa

SEQ ID NO: 722304 - DNA, 75 bp, synthetic construct
  source 1..75: mol_type = other DNA
gccatccatacgtatggccgtcgtctcaactggcatccgcatgtgcatgtgtcagtgacctgcggaggtctgaat

SEQ ID NO: 722305 - DNA, 75 bp, synthetic construct
  source 1..75: mol_type = other DNA
gctgtgtggcggccggatggtataccgccgggccattgcggggctgaatgtatcagggctgaagaaaaacgcgcg

SEQ ID NO: 722306 - DNA, 75 bp, synthetic construct
  source 1..75: mol_type = other DNA
ctgggtgtgaaggaatacaactgcgataaacctgagtgcccccacgtcagatacgtcactaactcatgtggcagc

SEQ ID NO: 722307 - DNA, 75 bp, synthetic construct
  source 1..75: mol_type = other DNA
gagtcgtgacccgttcgaatgcgtgctgtgtggcggccggatggtataccgccgggccattgcggggctgaatgt

SEQ ID NO: 722308 - DNA, 75 bp, synthetic construct
  source 1..75: mol_type = other DNA
gtggcgaaagtgtgctatgcacaaatggtgaaacagttcctgagtcgtgacccgttcgaatgcgtgctgtgtggc

SEQ ID NO: 722309 - DNA, 75 bp, synthetic construct
  source 1..75: mol_type = other DNA
aggccacagacctgtggatagcgacacagctgaatcgtcttcctgactgcgactgggtacatctggtcttcaccc

SEQ ID NO: 722310 - DNA, 75 bp, synthetic construct
  source 1..75: mol_type = other DNA
atgtcagaagattatgtaattgagtgggataaggattttgaagacgatctcaacgttgtcgccagcgtgtttttc

SEQ ID NO: 722311 - DNA, 75 bp, synthetic construct
  source 1..75: mol_type = other DNA
ggtacgcgccgtagcgccaaagtacgattcagcgctgcccgacgccgacccgcgcattgtcgcgctcgatgtgct

SEQ ID NO: 722312 - DNA, 75 bp, synthetic construct
  source 1..75: mol_type = other DNA
acaacacatacgcgaagccatcgtggcgatggaacgtaataatcagagcaattattgggaagcgttgggtaaggt

SEQ ID NO: 722313 - DNA, 75 bp, synthetic construct
  source 1..75: mol_type = other DNA
atgacgacattaattgacactgtaaaaccgacggaatcctaccttgaggacattttgccgcaggcgctcaatggc

SEQ ID NO: 722314 - DNA, 75 bp, synthetic construct
  source 1..75: mol_type = other DNA
gcagtcggcgcggtttctctatttgaatcggcacggttataacggcgtttgccgctataacaataaactggaata

SEQ ID NO: 722315 - DNA, 75 bp, synthetic construct
  source 1..75: mol_type = other DNA
cgggaattatttaaagaaggtaattcaaaagaatattatttaaagattcgcaaagaatttaacgaactaaataca

SEQ ID NO: 722316 - DNA, 75 bp, synthetic construct
  source 1..75: mol_type = other DNA
gctgatatcaacccggatcttattaacctgtatcgggaagtcacccgttacccggacttagtgatcgatgcggcc

SEQ ID NO: 722317 - DNA, 75 bp, synthetic construct
  source 1..75: mol_type = other DNA
tcgcgtatggagcgcggcggcttcgaccggcgaagagccgtacagcattgcgatgacactggctgacacattggg

SEQ ID NO: 722318 - DNA, 75 bp, synthetic construct
  source 1..75: mol_type = other DNA
aacatggattccaccagaagaagcaggtttaatcaggaatgccgaggaacgtggatatattgatgaagcgctgtt

SEQ ID NO: 722319 - DNA, 75 bp, synthetic construct
  source 1..75: mol_type = other DNA
gaagacgaatatggattgcaagacgttctcgattgcagtggaggcgatctcggaaatcatgacctggcgcaggca

SEQ ID NO: 722320 - DNA, 75 bp, synthetic construct
  source 1..75: mol_type = other DNA
agtcgcgctttatgctgatgatacagagccatacgtatacacaagttacgacgagtctatagagaaatatcgaat

SEQ ID NO: 722321 - DNA, 75 bp, synthetic construct
  source 1..75: mol_type = other DNA
tttctggtcgaaaggcgatgaagcgactgtctataaacgcgaccgcatcgtattgaataactgtcagttacaaaa

SEQ ID NO: 722322 - DNA, 75 bp, synthetic construct
  source 1..75: mol_type = other DNA
gtgcagatgcctccggcgcgggccggattattcagaggaggtcaggttcagggggaagctgtggccagccggctg

SEQ ID NO: 722323 - DNA, 75 bp, synthetic construct
  source 1..75: mol_type = other DNA
acaaaaagtggctgaagcgccagaaaaaatgcgccaggcgaccgcagcgttaaccgcacttagcgatgtggacaa

SEQ ID NO: 722324 - DNA, 75 bp, synthetic construct
  source 1..75: mol_type = other DNA
tggcgtcggcaaattgtccgcatcagcctcgcgttgctgcctatccatttctggtctgtggtggcagaactttcc

SEQ ID NO: 722325 - DNA, 75 bp, synthetic construct
  source 1..75: mol_type = other DNA
catgccggaacagcagaccagccactggcgtcggcaaattgtccgcatcagtctcgcgttgctgcctatccattt

SEQ ID NO: 722326 - DNA, 75 bp, synthetic construct
  source 1..75: mol_type = other DNA
attaaagcgttcccacaaacgctgcaggatgaattcaagtcgatgaaaattacggtgaactgggaaaaagcctgg

SEQ ID NO: 722327 - DNA, 75 bp, synthetic construct
  source 1..75: mol_type = other DNA
ctaacaaagtgcgcgttgttcatgccggatgcggcgtgaccgccttatccggcctacgaaaccgcaagaattcaa

SEQ ID NO: 722328 - DNA, 75 bp, synthetic construct
  source 1..75: mol_type = other DNA
gcaacgtaaaagcctggaagggaacaccgtcttacaggataccctgcaaaagcaacgcgattatgtgacggcgaa

SEQ ID NO: 722329 - DNA, 75 bp, synthetic construct
  source 1..75: mol_type = other DNA
ggtttacaagagatcttcggtaacttcgtttccggtttgatcattctgttcgaacgtccggtgcgcattggcgac

SEQ ID NO: 722330 - DNA, 75 bp, synthetic construct
  source 1..75: mol_type = other DNA
tctggaacttgctctaccagacggtattgcgcggcttaagcgtagcggcgcggcgtatcgcctggcgtcgtgcgc

SEQ ID NO: 722331 - DNA, 75 bp, synthetic construct
  source 1..75: mol_type = other DNA
ttgattaccgctaccgaaaacggtaatcagctgatgcagcaaaacatcaaagttaaaaactggcttgagcgggcg

SEQ ID NO: 722332 - DNA, 75 bp, synthetic construct
  source 1..75: mol_type = other DNA
gcagcgtaaaagcctggaagggaataccgtcttgcaggataccttgcaaaagcaacgtgattacgtgacggcgaa

SEQ ID NO: 722333 - DNA, 75 bp, synthetic construct
  source 1..75: mol_type = other DNA
gtgataaagaatcccacaccatgcgtctggtcaccattaccgtgctgtcgatcatcccgattgcgctgatggtgc

SEQ ID NO: 722334 - DNA, 75 bp, synthetic construct
  source 1..75: mol_type = other DNA
gcagcgtaaaagcctggaagggaacacagtcttacaggataccttgcaaaagcaacgggattacgtgacggcgaa

SEQ ID NO: 722335 - DNA, 75 bp, synthetic construct
  source 1..75: mol_type = other DNA
ggaagtgctggtgctctcgcggttgaacatgcgccagggtgcgtcgtatgccattaccaccatccttaactacat

SEQ ID NO: 722336 - DNA, 75 bp, synthetic construct
  source 1..75: mol_type = other DNA
agctatctgtttggtttctttgtggctattgcattgttcgctttatgttgttggggattgttccgcatggcaccg

SEQ ID NO: 722337 - DNA, 75 bp, synthetic construct
  source 1..75: mol_type = other DNA
ctggcgttgccgttgatggcggggccaggggcgatcagttctaccatcgtctggggtacgcgttatcacagcatt

SEQ ID NO: 722338 - DNA, 75 bp, synthetic construct
  source 1..75: mol_type = other DNA
tgaccagttatcagacagcggcagcgcgaaacaaaactaaccttacagccaacctgtctgtggccattatcttgt

SEQ ID NO: 722339 - DNA, 75 bp, synthetic construct
  source 1..75: mol_type = other DNA
ggcagggaataaaccagccgctgtcgaatgccccatcagggcttggtgaatcgctgctttcctccctgaaagagg

SEQ ID NO: 722340 - DNA, 75 bp, synthetic construct
  source 1..75: mol_type = other DNA
aatccagcgacgctgagtcgtattgaaagactggaacaaattccatctacatcaactgcaccggatattgagtgg

SEQ ID NO: 722341 - DNA, 75 bp, synthetic construct
  source 1..75: mol_type = other DNA
aaaccgcggtacgtgaaagcattggtgtggtgccattggcgttgccgttgatggcggggccaggggcgatcagtt

SEQ ID NO: 722342 - DNA, 75 bp, synthetic construct
  source 1..75: mol_type = other DNA
agatgtgaacggcgcgccggaagagatgacggacagtgacgggaaaatcgtgtgggagacggggtatcaggtctg

SEQ ID NO: 722343 - DNA, 75 bp, synthetic construct
  source 1..75: mol_type = other DNA
ttaatcaaatttttgccggatgcggcgtgaacgccttatccggcctacaacgggcaattttacggcccctgttaa

SEQ ID NO: 722344 - DNA, 75 bp, synthetic construct
  source 1..75: mol_type = other DNA
gatcacgagctgcgcctgtacgttcgtgaactgcgcgaccgtagccgtactgtcgatgaactgaaccgtaccatt

SEQ ID NO: 722345 - DNA, 75 bp, synthetic construct
  source 1..75: mol_type = other DNA
ccatatgaatccggcacgagtggcgtgggtcagggcgcagacagggcacccagcgccggaaggactggttaaagc

SEQ ID NO: 722346 - DNA, 75 bp, synthetic construct
  source 1..75: mol_type = other DNA
gaaaggtggtgtaatggactggaaaattaaagataatgttgatccaaaagatatagtaaatcgagggaaagtcag

SEQ ID NO: 722347 - DNA, 75 bp, synthetic construct
  source 1..75: mol_type = other DNA
tgcactaccgttatgacgaatttggccgtgcggtggaaaaggagggccggagcggaacgcagagttaccgttatg

SEQ ID NO: 722348 - DNA, 75 bp, synthetic construct
  source 1..75: mol_type = other DNA
cgctgccggtgtgcctgattattctcgcggttggcctgattctgttgaccatgcagctcaacatcagcgaactgc

SEQ ID NO: 722349 - DNA, 75 bp, synthetic construct
  source 1..75: mol_type = other DNA
gattctggcgattgtttcaacctcgcagttgtggatgcaattcgtccccgtgcaacgttttatccgcgctttgtt

SEQ ID NO: 722350 - DNA, 75 bp, synthetic construct
  source 1..75: mol_type = other DNA
gatacactccctggcgtgaagccgcagcttattcgtcaggcaatgggattaaacgatttgcctgagtggctgcgt

SEQ ID NO: 722351 - DNA, 75 bp, synthetic construct
  source 1..75: mol_type = other DNA
ggatgcaccaccacaactgcgcgtttcggctatcaatgccgccagcgaaaaattactgactcgtcttggcgtctg

SEQ ID NO: 722352 - DNA, 75 bp, synthetic construct
  source 1..75: mol_type = other DNA
cgcatgctattacgctctggttgcgcattctggctatcgtttcaacctcacagttgtggatgcagtacgtccccg

SEQ ID NO: 722353 - DNA, 75 bp, synthetic construct
  source 1..75: mol_type = other DNA
ttttctgccttattgcgctaaaggccacgcggcggcgggcaaaatatgtcgtctggctgatgttctcgctggggg

SEQ ID NO: 722354 - DNA, 75 bp, synthetic construct
  source 1..75: mol_type = other DNA
cgcactacgttatgggcaccgcctgacagtaacctggaaaaagtggcacgttacgccatgatcttgctgatgctg

SEQ ID NO: 722355 - DNA, 75 bp, synthetic construct
  source 1..75: mol_type = other DNA
ccatattgctttacagcacgtacaggagttcgagaagttgcttaaacgtcataactgtcgcggtctgttttgcca

SEQ ID NO: 722356 - DNA, 75 bp, synthetic construct
  source 1..75: mol_type = other DNA
acaataacggggtaaataccggttctggtggcacaatgctgcatccggatggttcttcaatgaacaatgacggca

SEQ ID NO: 722357 - DNA, 75 bp, synthetic construct
  source 1..75: mol_type = other DNA
ataaaaacactgccgggctttccccaaaaaattagctacctgcggaaaattgacccctttgtatttgaagaactg

SEQ ID NO: 722358 - DNA, 75 bp, synthetic construct
  source 1..75: mol_type = other DNA
atcgcttttgataatcgcctgggcttatgcaaggttgagagcgcgcgtcaggtgttcccactgacggggcgttat

SEQ ID NO: 722359 - DNA, 75 bp, synthetic construct
  source 1..75: mol_type = other DNA
gcgcgatattggtttgaaactggccgacacgctgcctggcgttaagccgcagcttattcgtcaggcaatggggtt

SEQ ID NO: 722360 - DNA, 75 bp, synthetic construct
  source 1..75: mol_type = other DNA
tgatgatccgcgcttctccatcatacatggacctttctccgcgctgggcgaatacgtcgccgagcgtgatcttat

SEQ ID NO: 722361 - DNA, 75 bp, synthetic construct
  source 1..75: mol_type = other DNA
aaccagcgaacaggaagcacgccagcaatctcctgatggttgcgtgatggtattcgccgcccgtattcgtcagga

SEQ ID NO: 722362 - DNA, 75 bp, synthetic construct
  source 1..75: mol_type = other DNA
ctttcgttgcgccagctggaaactcgcgttgcccaggcgctggacgatttgcaaaacgcacaaaacgatctggcg

SEQ ID NO: 722363 - DNA, 75 bp, synthetic construct
  source 1..75: mol_type = other DNA
cactggtgaaattacctggcattggtaagaaaactgctgaacgcctgatcgttgaaatgaaagatcgctttaaag

SEQ ID NO: 722364 - DNA, 75 bp, synthetic construct
  source 1..75: mol_type = other DNA
gttgaaatgaaagaccgatttaaaggtttgcatggcgatctctttacgccagccgccgacctggtactcacatca

SEQ ID NO: 722365 - DNA, 75 bp, synthetic construct
  source 1..75: mol_type = other DNA
caaactggaagaaggtcacaccaacgaagtcaacagcgaagttcacgatgcgttattgcaagtagttgatatgcg

SEQ ID NO: 722366 - DNA, 75 bp, synthetic construct
  source 1..75: mol_type = other DNA
cgttaacaagctggaagaaggccacgccaacgaagttaacagtgaagttcatgacgcattactccaggttgtgga

SEQ ID NO: 722367 - DNA, 75 bp, synthetic construct
  source 1..75: mol_type = other DNA
tacagacgcagcccgaacgcgtgcaaaatgcgatgtataacgcttcgcagcagctgcaacaaattcgcagtcgtc

SEQ ID NO: 722368 - DNA, 75 bp, synthetic construct
  source 1..75: mol_type = other DNA
atcaaggacgttggcgcttttgaatttgataagggtaaggttcttatcccaaaagtgaaggataagctgcatttg

SEQ ID NO: 722369 - DNA, 75 bp, synthetic construct
  source 1..75: mol_type = other DNA
agtaccgctgctagatgcgtttggaattgtagttattcaagtcccattaggagaattgcttactatcctacaaat

SEQ ID NO: 722370 - DNA, 75 bp, synthetic construct
  source 1..75: mol_type = other DNA
accattcgcgttcaaccaaactacccgcaactctcccgccgcaatttgcacgcgctgtcgttaaatattttcaaa

SEQ ID NO: 722371 - DNA, 75 bp, synthetic construct
  source 1..75: mol_type = other DNA
atattttagataaagaatacattggattttttacagagagtgcaaaagaagatctcgcagatgtaattaacctca

SEQ ID NO: 722372 - DNA, 75 bp, synthetic construct
  source 1..75: mol_type = other DNA
tgacgcgacagaaaaactacgcacttacttttcaaatgtatgtgctgattttgaagctgaacgggttgaaatgga

SEQ ID NO: 722373 - DNA, 75 bp, synthetic construct
  source 1..75: mol_type = other DNA
atatatacaaaaaagaatacgctggctttttcacagaagattccattggcagtcttgaggatgtaataaatgtta

SEQ ID NO: 722374 - DNA, 75 bp, synthetic construct
  source 1..75: mol_type = other DNA
caagcattattcagttaaaaaataaagctatcctggaaattggtcgtgatgctttgttgggtgtaaaggatatta

SEQ ID NO: 722375 - DNA, 75 bp, synthetic construct
  source 1..75: mol_type = other DNA
gatgacgcgacgatggcgaacgccgacccggcggatatggccgcgcagatagcattgataaccagccggataaac

SEQ ID NO: 722376 - DNA, 75 bp, synthetic construct
  source 1..75: mol_type = other DNA
atcctttcagccgtggactcatccgatttttgtcttgaatgcctgctgaatgccatcaaaaacgatgatgctgtt

SEQ ID NO: 722377 - DNA, 75 bp, synthetic construct
  source 1..75: mol_type = other DNA
cacacactgaccatgtgaccatccagaactacaagcgcaacgttctgcgcacccctgccaataacaaaatccggc

SEQ ID NO: 722378 - DNA, 75 bp, synthetic construct
  source 1..75: mol_type = other DNA
gggtgctgtgaaagaattttcacggaagaagctgataacctaaacgtacttcttggtattaaggcgctggaaaaa

SEQ ID NO: 722379 - DNA, 75 bp, synthetic construct
  source 1..75: mol_type = other DNA
taatatctgcgaaatttgatgagcaagttagagtaattgatgatgacggaaaattcattgctaatgtaccttact

SEQ ID NO: 722380 - DNA, 75 bp, synthetic construct
  source 1..75: mol_type = other DNA
caaggtcagtaccgaatatggcggcaagagccagctaaacctcggtcatcttgttgatgccgggaaacagcagcg

SEQ ID NO: 722381 - DNA, 75 bp, synthetic construct
  source 1..75: mol_type = other DNA
cgatctctggcgagagtctggcgtatcgttttactggagatacgccagaacagtggttagcgagttttcgtcagc

SEQ ID NO: 722382 - DNA, 75 bp, synthetic construct
  source 1..75: mol_type = other DNA
gactttaccggcaagcttccgctgcaggagagggtgaacctactgcggcatgccagcttcttcattggcctgcca

SEQ ID NO: 722383 - DNA, 75 bp, synthetic construct
  source 1..75: mol_type = other DNA
tcagcacggccccgacaacatcctgtatgactttaatgatggagcacgggtgctccttcctgaaggtaaatggca

SEQ ID NO: 722384 - DNA, 75 bp, synthetic construct
  source 1..75: mol_type = other DNA
cgcaacgttctgcgcaccccggcgaacaacaaaatccgcctcgacgatgagcgcggcaaagagcatatcaaggtc

SEQ ID NO: 722385 - DNA, 75 bp, synthetic construct
  source 1..75: mol_type = other DNA
cgtcctttcaagatcggtcgttcgtttaaatggaaagacgccgaaattatggcttggcttgaaacgcgacgcgtt

SEQ ID NO: 722386 - DNA, 75 bp, synthetic construct
  source 1..75: mol_type = other DNA
agggaaaataggctcgttaggagggaattacagcaaaacgctctcggtgtcgaagagacgccaagcgacttccct

SEQ ID NO: 722387 - DNA, 75 bp, synthetic construct
  source 1..75: mol_type = other DNA
tacactttgttattttgtctgtggtttttagtgctgggcgctattgaatattttattcttagatttatctggcga

SEQ ID NO: 722388 - DNA, 75 bp, synthetic construct
  source 1..75: mol_type = other DNA
ctggaaacgtttaaaaagcagaaaggtgtacagaaagacagtagcggattctggtaccgggttgagcatatcggc

SEQ ID NO: 722389 - DNA, 75 bp, synthetic construct
  source 1..75: mol_type = other DNA
ttcaatatctaatcaagaatttattgaatgaaaaaaacatgatattttggtttgcatcagcgagtttaactcaat

SEQ ID NO: 722390 - DNA, 75 bp, synthetic construct
  source 1..75: mol_type = other DNA
atcacaacctctacagataccaaacagaatatacctgtcgtagcgtgcaaaatcagcattacgaccgcaatcact

SEQ ID NO: 722391 - DNA, 75 bp, synthetic construct
  source 1..75: mol_type = other DNA
agaacccgcgtctggtgaaagcgccgggaaaaaagcgttatctctggccggaaggaatgacaaagcaggccggac

SEQ ID NO: 722392 - DNA, 75 bp, synthetic construct
  source 1..75: mol_type = other DNA
cgacgctgaacggaagtaaaaagcagaatgatgaacgggttcgtaaggctgagaaagcgcaggaggtactgagtc

SEQ ID NO: 722393 - DNA, 75 bp, synthetic construct
  source 1..75: mol_type = other DNA
gcagggacatattatcactgcaggctgcagatgctctgtcgggcattacaacagataatcgtgttctgctggccg

SEQ ID NO: 722394 - DNA, 75 bp, synthetic construct
  source 1..75: mol_type = other DNA
tcatcactttcgtctttgggttctcgtttaacgggtatcgtcaccaccacggataatggtggctcgacggggcgt

SEQ ID NO: 722395 - DNA, 75 bp, synthetic construct
  source 1..75: mol_type = other DNA
attcgccgctcagaaggcggtattgcctggggcgatatgcgcaactgccttaatcagttgattacggaacccagc

SEQ ID NO: 722396 - DNA, 75 bp, synthetic construct
  source 1..75: mol_type = other DNA
tgccggcccccgcgctgggattgacactggcgcaaaaactggtaaccctcttccatttggtagatcttagccagc

SEQ ID NO: 722397 - DNA, 75 bp, synthetic construct
  source 1..75: mol_type = other DNA
agaagtacgttatatgggcgatatcatggcggatgatgaaaatacggcaaaagtgccctcttatacacgcgtcgg

SEQ ID NO: 722398 - DNA, 75 bp, synthetic construct
  source 1..75: mol_type = other DNA
cagaccgacaccgatgatgaaattgttgtcgatagcagtagcggtgggcgtacgacttacaaaaatgctggaaag

SEQ ID NO: 722399 - DNA, 75 bp, synthetic construct
  source 1..75: mol_type = other DNA
cactgtcttatcgggctgatgggcaaagcggtatgaactttggtttaaaaccatccaccaacgatacaattgaga

SEQ ID NO: 722400 - DNA, 75 bp, synthetic construct
  source 1..75: mol_type = other DNA
gcggagtaaacgcgatccggtcggaaacggtggtgttcctcgtgtgctctgggaaatcaggagaatgagtaccac

SEQ ID NO: 722401 - DNA, 75 bp, synthetic construct
  source 1..75: mol_type = other DNA
cagatcgaatcaacccggcgcacactggaaagcatggttgctggtgggttgcttgagcgggtgatagtgtatgaa

SEQ ID NO: 722402 - DNA, 75 bp, synthetic construct
  source 1..75: mol_type = other DNA
agtggtgatggcagtgattccggagaagaaaatgaagactctggagggaactgcgtgaccggaagtggtggtgat

SEQ ID NO: 722403 - DNA, 75 bp, synthetic construct
  source 1..75: mol_type = other DNA
tcctgaacggggacccggaccagccgataatcatggggcggacgtaccatgaggacaaccgttcgccggggagcc

SEQ ID NO: 722404 - DNA, 75 bp, synthetic construct
  source 1..75: mol_type = other DNA
caacgcacagtggttgcaagccagcatggatgcaccacgtcagtatgcaacatacgactgcgtgaaggtgaagta

SEQ ID NO: 722405 - DNA, 75 bp, synthetic construct
  source 1..75: mol_type = other DNA
atgagccatgtctcgttacaggaatttttgaaaacggagccagacggtacgctggaggcgatcgccgaacaatac

SEQ ID NO: 722406 - DNA, 75 bp, synthetic construct
  source 1..75: mol_type = other DNA
aataaggaaggcagcgcaatgctgaaaatcttcctcggcagggatgaccatcgtcagctcctgagcgaacaagtc

SEQ ID NO: 722407 - DNA, 75 bp, synthetic construct
  source 1..75: mol_type = other DNA
catcgtccgatcagaatgataacaacgatgagggtgaggaagcgccagaaaaatcggtgtgtaaggagtgcctga

SEQ ID NO: 722408 - DNA, 75 bp, synthetic construct
  source 1..75: mol_type = other DNA
ggcgctgacgcaacagcgctttgtcggtgccgataatggcccctgtcaggccggagccgtcgcgctcggcgtggc

SEQ ID NO: 722409 - DNA, 75 bp, synthetic construct
  source 1..75: mol_type = other DNA
gccaaagccacgcatccacggctacgaaattgacacaatcatcgttaatgaacagcagttgcacgaggtgaagtg

SEQ ID NO: 722410 - DNA, 75 bp, synthetic construct
  source 1..75: mol_type = other DNA
acggagaccattggtaacgaccagaagataacggtggtgaaggggcagacggttcaggtcgggaccagaaaagaa

SEQ ID NO: 722411 - DNA, 75 bp, synthetic construct
  source 1..75: mol_type = other DNA
ggcggtgctgaagacactgggggatgagaagagtggtgatggcagtgattccggagaagaaaatgaagactctgg

SEQ ID NO: 722412 - DNA, 75 bp, synthetic construct
  source 1..75: mol_type = other DNA
cacacggagaccattggtaacgaccagaagataacggtggtgaaggggcagacggttcaggtcgggaccagaaaa

SEQ ID NO: 722413 - DNA, 75 bp, synthetic construct
  source 1..75: mol_type = other DNA
gcacaccgcgcagccgatattgccagcgcaaaatcaggccttaccgccggaagtacgcgcgttcctcaatgccgg

SEQ ID NO: 722414 - DNA, 75 bp, synthetic construct
  source 1..75: mol_type = other DNA
gatattacaaaccacagtttaagaaagaatatgaaatgattaattataatgatggttggtattatgttcttgctc

SEQ ID NO: 722415 - DNA, 75 bp, synthetic construct
  source 1..75: mol_type = other DNA
aacagacgaacccggtttaagggtgccttcctcactacgagccattagctctcgtaatgtaaaacggtttggtga

SEQ ID NO: 722416 - DNA, 75 bp, synthetic construct
  source 1..75: mol_type = other DNA
ccagccgtagtgcaccgaattatcgccagtcctggcggttagcgggagtgtggcgacgggcgattaacctgatga

SEQ ID NO: 722417 - DNA, 75 bp, synthetic construct
  source 1..75: mol_type = other DNA
tgatggttggtgcaatgggaatgatcgagattggcacgaaaaaatgaagggctatatctgcgatttcttacgtaa

SEQ ID NO: 722418 - DNA, 75 bp, synthetic construct
  source 1..75: mol_type = other DNA
gccgacgtgggcaacaaataccacctgtaggaattccgaatcacacatggttttgcatacttgatatcgatggta

SEQ ID NO: 722419 - DNA, 75 bp, synthetic construct
  source 1..75: mol_type = other DNA
ccgctttacccggccatgcggggcatggccttgtgggttttcagttatgtggcctcagcgccgtgtgcgggctgt

SEQ ID NO: 722420 - DNA, 75 bp, synthetic construct
  source 1..75: mol_type = other DNA
cattgattggtattcttccttcattctcgactattggctggtgggcaccgattttactggtgacgctgcgtgcca

SEQ ID NO: 722421 - DNA, 75 bp, synthetic construct
  source 1..75: mol_type = other DNA
tggtcgccgcagggtttatatcacaggtgcgttaatcggaacgttgagcgcatttcctttctttatggcgcttga

SEQ ID NO: 722422 - DNA, 75 bp, synthetic construct
  source 1..75: mol_type = other DNA
gcacaccgcgcagccggtactgccagcgcaaaatcaggctctaccgccggaagttcgtgcgttccttaatgccgg

SEQ ID NO: 722423 - DNA, 75 bp, synthetic construct
  source 1..75: mol_type = other DNA
tttgatctattatcagatgaatcaattataaaaaaattaaagtatccggatcaagatattttaaacttgatgttt

SEQ ID NO: 722424 - DNA, 75 bp, synthetic construct
  source 1..75: mol_type = other DNA
cctttcacataatcgctgattacttagacaaagagtatattgaattattatcacaattagcaacgaagtatcaaa

SEQ ID NO: 722425 - DNA, 75 bp, synthetic construct
  source 1..75: mol_type = other DNA
tgctgggcgcattgtgggtgcgtaatggcatggaggagtccgctgaatttgaacaacagcaacataatcaagtga

SEQ ID NO: 722426 - DNA, 75 bp, synthetic construct
  source 1..75: mol_type = other DNA
tttcggaactcggcgtggtgttcctgatgtttatcatcggcctggagttgaatccctccaagctttggcaattgc

SEQ ID NO: 722427 - DNA, 75 bp, synthetic construct
  source 1..75: mol_type = other DNA
gagttgcagcgggcatttagtcaaatggaacaggattttacccagatgatccagcggagtgccagggggagtgaa

SEQ ID NO: 722428 - DNA, 75 bp, synthetic construct
  source 1..75: mol_type = other DNA
ttacgctactggaaatgctgttggcactggctgtttttgcagcgttgagcatcagcgcatttcaggtgctgcagg

SEQ ID NO: 722429 - DNA, 75 bp, synthetic construct
  source 1..75: mol_type = other DNA
tctttaacgagaagccacaccataacgccaaagccgaaacgctccgcgagaagatcgcagataagcgtaaagaac

SEQ ID NO: 722430 - DNA, 75 bp, synthetic construct
  source 1..75: mol_type = other DNA
tctttaacgagaagccgcaccataacgccaaagccgaaacgcttcgcgagaaaatcgcagataagcgcaaagaac

SEQ ID NO: 722431 - DNA, 75 bp, synthetic construct
  source 1..75: mol_type = other DNA
gcttcgacagcagtatgaggatttactaggcaagaagccgggcaataaaacggctgaaactctggcaaaagagat

SEQ ID NO: 722432 - DNA, 75 bp, synthetic construct
  source 1..75: mol_type = other DNA
ggtgaaaccgacagcgaaaaagccttttgctggctcctgcataaattaacgcagcgttacccgcgcacaccgggc

SEQ ID NO: 722433 - DNA, 75 bp, synthetic construct
  source 1..75: mol_type = other DNA
aggcaaaggttgtcgcacatttaaagatccacaacccagctttaattcccccatcgccaaacttgtccaggacta

SEQ ID NO: 722434 - DNA, 75 bp, synthetic construct
  source 1..75: mol_type = other DNA
ctttcggatgggcgctatgtaatggcgtattgctcgaccaatctgcactggatcacccgccgcgcgccgtttggc

SEQ ID NO: 722435 - DNA, 75 bp, synthetic construct
  source 1..75: mol_type = other DNA
cagtttgtgatctggcaatacaacgcatacaaacatggaatgaaagagcatcaacttaatgctccgttgacaaag

SEQ ID NO: 722436 - DNA, 75 bp, synthetic construct
  source 1..75: mol_type = other DNA
caagattatgactatccatagtcggggaagtgcatcagcggtgcttgatgagattgaaaatatcgatggggtggc

SEQ ID NO: 722437 - DNA, 75 bp, synthetic construct
  source 1..75: mol_type = other DNA
ctgtcgaattacagtacatgctggaaatgtttttccgtgccgatatcgctctttcgccattgcttgatgccatta

SEQ ID NO: 722438 - DNA, 75 bp, synthetic construct
  source 1..75: mol_type = other DNA
gtggccagacaggcattcataacatgaaagccgtggccaccgaccccaccgtggattattaccgcccgcagatta

SEQ ID NO: 722439 - DNA, 75 bp, synthetic construct
  source 1..75: mol_type = other DNA
taatctaagggatgatgtgtttctgaaggaaatgaaggatggattttacagggagatattcataatggatattat

SEQ ID NO: 722440 - DNA, 75 bp, synthetic construct
  source 1..75: mol_type = other DNA
taatctaagtgaagatgtatttctgaagaaattgatggatgggttttacagggagatattcataatggatattat

SEQ ID NO: 722441 - DNA, 75 bp, synthetic construct
  source 1..75: mol_type = other DNA
taaaaagaataccttcctgattggcgctttgctgggaacctgcggttatctgctgttcttctgggtttccgtctg

SEQ ID NO: 722442 - DNA, 75 bp, synthetic construct
  source 1..75: mol_type = other DNA
gattcatcactcactcctgttgatggatctcttcttgtatgtgctctggatggggaatatcgcgtaaaaagatac

SEQ ID NO: 722443 - DNA, 75 bp, synthetic construct
  source 1..75: mol_type = other DNA
gacatcaaaaaactggtatttgccgttaccatctatgatgcagaagcgcgtaaacaaaacttcggcatggtgagc

SEQ ID NO: 722444 - DNA, 75 bp, synthetic construct
  source 1..75: mol_type = other DNA
aattaaactggacgccgtcccgtctgaagttgacaagatcatcttcgttgtgaccatccacgatgctcaggctcg

SEQ ID NO: 722445 - DNA, 75 bp, synthetic construct
  source 1..75: mol_type = other DNA
ttttatccgctcacggataaaaaattcaaagaaattgtagttgaaattgataatcgcaaacaaatgcagcagaaa

SEQ ID NO: 722446 - DNA, 75 bp, synthetic construct
  source 1..75: mol_type = other DNA
gcaatcggtggttcaattcccgcctttattttgggattaagcggatatattgcaaatcaagtgcaaacaccggaa

SEQ ID NO: 722447 - DNA, 75 bp, synthetic construct
  source 1..75: mol_type = other DNA
gcatcggtgcgctgtgtgtgctgatttcgaccttcgcggtcagcgcctcgtcgttgttctacgtgcgctatgtgt

SEQ ID NO: 722448 - DNA, 75 bp, synthetic construct
  source 1..75: mol_type = other DNA
tcccgcctttattttgggattaagcggatatattgcgaatcaggcacaaacgccggaagttattatggggatccg

SEQ ID NO: 722449 - DNA, 75 bp, synthetic construct
  source 1..75: mol_type = other DNA
gcaatcggaggttcaattcctgcctttattttggggttaagcggatatatcgccaatcaggtgatgctgccaact

SEQ ID NO: 722450 - DNA, 75 bp, synthetic construct
  source 1..75: mol_type = other DNA
ttggccatcgcttcaattggtcagggcgttaccatgaccgtgatgtgggcactggaagctgataccgtagaatac

SEQ ID NO: 722451 - DNA, 75 bp, synthetic construct
  source 1..75: mol_type = other DNA
attgcgacacagccgctgacgggcaatgaaacctggcaaaagattatgccaggtgaatggcgcttattttgcctc

SEQ ID NO: 722452 - DNA, 75 bp, synthetic construct
  source 1..75: mol_type = other DNA
tgatgcagcagataagacgtctgcagcatcagtcagcattgcgcccggcagttgcgccgcaaccggtaaataacg

SEQ ID NO: 722453 - DNA, 75 bp, synthetic construct
  source 1..75: mol_type = other DNA
tggttaagcaagaaaaagcaaaaaataaagcgacatggttttttgatgcgggcgactattttaccgggccatata

SEQ ID NO: 722454 - DNA, 75 bp, synthetic construct
  source 1..75: mol_type = other DNA
atccggtgttgcagctcaacctggcgaacgcttatctacaaggcggtcaaccacaagaagcggccaatattctga

SEQ ID NO: 722455 - DNA, 75 bp, synthetic construct
  source 1..75: mol_type = other DNA
agtgggtatacaagcagccagataccttcgaagactctgtagagttgatcggcacaatacttaaattggtacgtg

SEQ ID NO: 722456 - DNA, 75 bp, synthetic construct
  source 1..75: mol_type = other DNA
acagtagagcgtcctgtcactctggatgggatgacggtggatgcgatacctcaagttcatccagttactcaggat

SEQ ID NO: 722457 - DNA, 75 bp, synthetic construct
  source 1..75: mol_type = other DNA
ggatgtgaccggatttttgaagataaaatatccggtgctaaatcaaaacgaccaggacttgataagctacttaag

SEQ ID NO: 722458 - DNA, 75 bp, synthetic construct
  source 1..75: mol_type = other DNA
acgcttatctgcaaggcggtcaaccacaagaagcggccaatattctgaatcgctacacctttaataataaagatg

SEQ ID NO: 722459 - DNA, 75 bp, synthetic construct
  source 1..75: mol_type = other DNA
taggcagtctgcaacaggcccgctatgatgcgcgtatcgaccagttgcgccagttgcaggaacgctttaagcctt

SEQ ID NO: 722460 - DNA, 75 bp, synthetic construct
  source 1..75: mol_type = other DNA
ttcgcgatgcgcaggcactgctgcccgattccgtacagcaactgattagcgtgattggcttccccgccctgaccc

SEQ ID NO: 722461 - DNA, 75 bp, synthetic construct
  source 1..75: mol_type = other DNA
cgcgatcaggagctggctgcgcgagcagaaggttatgcgctcgccggacgactcgatcaggccatttcgctgttg

SEQ ID NO: 722462 - DNA, 75 bp, synthetic construct
  source 1..75: mol_type = other DNA
caccagtgatttgctggatgaatgggcaaaaggtaacgttcgtcagcaacgggcagcgcaatatggtcgcgcttt

SEQ ID NO: 722463 - DNA, 75 bp, synthetic construct
  source 1..75: mol_type = other DNA
acaggcggaagccgcgctaaataaccgcgatcaggaactggctgcgcgagcagaaggttatgcgctcgccgggcg

SEQ ID NO: 722464 - DNA, 75 bp, synthetic construct
  source 1..75: mol_type = other DNA
cataatggccgacctgcagggctatttcttctgaatgaaacaggcgagctcaccgaattatatctgctggggtcg

SEQ ID NO: 722465 - DNA, 75 bp, synthetic construct
  source 1..75: mol_type = other DNA
gaaaacgatgattttgtgcgcaagttgccacgacaagttacatagcggaaaactacccgatttgagacaggaaaa

SEQ ID NO: 722466 - DNA, 75 bp, synthetic construct
  source 1..75: mol_type = other DNA
ctggttctgaccacctatagtgcggaaaccagtctggggatgctggtggcgttatcgctgctgcgtgaactgggg

SEQ ID NO: 722467 - DNA, 75 bp, synthetic construct
  source 1..75: mol_type = other DNA
acttgtcagattatatctgaaggtgacatttacatgtgcgtttgtggctgtttttctcaattatcttttttctga

SEQ ID NO: 722468 - DNA, 75 bp, synthetic construct
  source 1..75: mol_type = other DNA
tggaaataccatcgctcatattctggcacgccacaaggtgggataatttctcccttactggcaaatatatacctc

SEQ ID NO: 722469 - DNA, 75 bp, synthetic construct
  source 1..75: mol_type = other DNA
tcacaacccgcacaacagagatcatgcgtcgattagtgaaccgccccgggtttcctggagagtgttttatctgtg

SEQ ID NO: 722470 - DNA, 75 bp, synthetic construct
  source 1..75: mol_type = other DNA
cggtatggcaactgattctgaatcagaaaaagaagccataaagaaagaaattgaacgactgcttgaagaaaaacg

SEQ ID NO: 722471 - DNA, 75 bp, synthetic construct
  source 1..75: mol_type = other DNA
gctgcgcgttgagcttgaagcagaaaaacagcgggcaaaagttctatttatggaaaatgctcggcttaagtcagg

SEQ ID NO: 722472 - DNA, 75 bp, synthetic construct
  source 1..75: mol_type = other DNA
ttgccgactggtttagtgagcaattctcaacgggcgtgttgatcgtgccttgtatgctgacgttggcaattcctg

SEQ ID NO: 722473 - DNA, 75 bp, synthetic construct
  source 1..75: mol_type = other DNA
cggggcgattggttcggtcagtattgatagtctggatttctggcctttgcttgccgactggtttagtgagcaatt

SEQ ID NO: 722474 - DNA, 75 bp, synthetic construct
  source 1..75: mol_type = other DNA
atatccttgtaaaagaagagaaactggctctggaacttctggagcagatcaagaacggcgccgatttcggcaagc

SEQ ID NO: 722475 - DNA, 75 bp, synthetic construct
  source 1..75: mol_type = other DNA
gtcaggcaaacgcggcggtgatttaggtgaattccgccagggccagatggttccggcgttcgataaagtggtttt

SEQ ID NO: 722476 - DNA, 75 bp, synthetic construct
  source 1..75: mol_type = other DNA
ctcttgtccggtactggagccgactggcccgctgcatacccagttcggttaccacatcattaaggtgctgtaccg

SEQ ID NO: 722477 - DNA, 75 bp, synthetic construct
  source 1..75: mol_type = other DNA
gcggctatctggaatgaccaaacggtggatgcagataatcgcattgcctggtttgaagcgcggactttagctggt

SEQ ID NO: 722478 - DNA, 75 bp, synthetic construct
  source 1..75: mol_type = other DNA
gcggctatctggaatgaccaaacggtggatgcggataaccgcattgcctggtttgaagcgcggaccatagcaggt

SEQ ID NO: 722479 - DNA, 75 bp, synthetic construct
  source 1..75: mol_type = other DNA
gcgcccggaagagggggctaacaagctgtcattagcactgaccctgatcccttcaggtgtgaattttgatgccga

SEQ ID NO: 722480 - DNA, 75 bp, synthetic construct
  source 1..75: mol_type = other DNA
agtaacaaatggggcaacagcagccagtttaatttctggagcagtggccctcttgtggatgattctgtcagtctg

SEQ ID NO: 722481 - DNA, 75 bp, synthetic construct
  source 1..75: mol_type = other DNA
acgtgactcccaacggtttttctgccatgaatacagggttcatgcctcctctggccgcgattgagcgtattgagg

SEQ ID NO: 722482 - DNA, 75 bp, synthetic construct
  source 1..75: mol_type = other DNA
gggattgcgggaagcatgtcatggtcgccgggatcgaatcgcaaaatcaggcttcgctgcatctccaccagtcgc

SEQ ID NO: 722483 - DNA, 75 bp, synthetic construct
  source 1..75: mol_type = other DNA
tgtctggtgttgggaagactcgaatcgttcaggcgctctttgatgaaactgttggaacagatgcgcttgaccgaa

SEQ ID NO: 722484 - DNA, 75 bp, synthetic construct
  source 1..75: mol_type = other DNA
acgaacaatcggaatatccgctgcaatccagaggttccaaagagatcacaacgatctcggcggatatctggatta

SEQ ID NO: 722485 - DNA, 75 bp, synthetic construct
  source 1..75: mol_type = other DNA
tgcaatggaacgtgttatcgatgccacattgcgcttcgatggcaacgaggctgaaaagctagaatggctgaatac

SEQ ID NO: 722486 - DNA, 75 bp, synthetic construct
  source 1..75: mol_type = other DNA
ccctgaaaagcggcgaaaccgtcgccctgctggggcgcagcggctgcggaaaaagcactctcgcgcggctgctgg

SEQ ID NO: 722487 - DNA, 75 bp, synthetic construct
  source 1..75: mol_type = other DNA
gtttatggtgatgaagaaaaaacaaaagaaattgtaaataaacttccgggttatgtcgttaagatttttgaagaa

SEQ ID NO: 722488 - DNA, 75 bp, synthetic construct
  source 1..75: mol_type = other DNA
gctgaaaagctagaatggctgaatacaatcttcgctgttgttgatgagcattttggctacatttattctttcgaa

SEQ ID NO: 722489 - DNA, 75 bp, synthetic construct
  source 1..75: mol_type = other DNA
ggacttgccggccagccgagggagcttaaggagtcgaattttatcctgaattccttactgcttgcacctgtgggt

SEQ ID NO: 722490 - DNA, 75 bp, synthetic construct
  source 1..75: mol_type = other DNA
catattaccgcctctaaccgtggcataccggcctttaatatatcgtatcgcctggtatgccgaacattccaaaat

SEQ ID NO: 722491 - DNA, 75 bp, synthetic construct
  source 1..75: mol_type = other DNA
ataacaaaaacaggttattcaaccaaagatactctttccagattaagtcagggatggcagcaattcgaagtgtat

SEQ ID NO: 722492 - DNA, 75 bp, synthetic construct
  source 1..75: mol_type = other DNA
ctggccgccatcgaacgtattgagattatcaggggccccatgtccactctgtacggctctgatgccatggggggc

SEQ ID NO: 722493 - DNA, 75 bp, synthetic construct
  source 1..75: mol_type = other DNA
ggtgcaatcgtcagaagatttctatctggcaaaagtgcgcacactggggatgtacaattcagggcgtaaccaact

SEQ ID NO: 722494 - DNA, 75 bp, synthetic construct
  source 1..75: mol_type = other DNA
gatgaagcgcggaaaacactgcaaccattgctggcggcagaaccgggtaatgcgtggtatctcgatctggcaacg

SEQ ID NO: 722495 - DNA, 75 bp, synthetic construct
  source 1..75: mol_type = other DNA
ccaacgtcacctggcgcgagcgatggaagatcagcagcgcagcgcgccgctgacctgggtcggcgcgttaggttc

SEQ ID NO: 722496 - DNA, 75 bp, synthetic construct
  source 1..75: mol_type = other DNA
ggtgacgcaacggcttaagttcctcgtcgctctacgcccaagtgtgacatcgcctaccgtagccgctcgccaggc

SEQ ID NO: 722497 - DNA, 75 bp, synthetic construct
  source 1..75: mol_type = other DNA
gattacagtgatgtgagcctgtaccgtgccggcagcagcacactttatgccggtgattacttccagacgggagcc

SEQ ID NO: 722498 - DNA, 75 bp, synthetic construct
  source 1..75: mol_type = other DNA
gtcagggctcatcggtcacatccctgagcgacacagcagccacgcgtattccttatcccacggagtcacagaatt

SEQ ID NO: 722499 - DNA, 75 bp, synthetic construct
  source 1..75: mol_type = other DNA
ggcgaaaccttccggcagaaaagctggtcggcatttgttgaggatgagtggcatatcacggatgcggttgcactg

SEQ ID NO: 722500 - DNA, 75 bp, synthetic construct
  source 1..75: mol_type = other DNA
gattacagtgacgtgagcctgtacagtgccggtaagagtacgctttatgccggtgattacttccagacgggatca

SEQ ID NO: 722501 - DNA, 75 bp, synthetic construct
  source 1..75: mol_type = other DNA
tcttggaacggaagaaggttcacgcccggttgatcacggttatctgcaacaaattgcgcaagcggcggatcgtct

SEQ ID NO: 722502 - DNA, 75 bp, synthetic construct
  source 1..75: mol_type = other DNA
attcattgaagttgcggttaatgcaggaacttgcggaattcctgcggttgaggaaactgcgcggcagcttttagc

SEQ ID NO: 722503 - DNA, 75 bp, synthetic construct
  source 1..75: mol_type = other DNA
ccggcccagcccgctgcgggggtatatgacagtaataataattttgtcagctgcaaggatgcgtcggtcacgctg

SEQ ID NO: 722504 - DNA, 75 bp, synthetic construct
  source 1..75: mol_type = other DNA
tccgatggccgttcgtcagcttttgggagcaatggccgaccaactcgacgacacaaagagtcgccttgaagacat

SEQ ID NO: 722505 - DNA, 75 bp, synthetic construct
  source 1..75: mol_type = other DNA
aacctacacgcgcgtgtttgcgctcgatgttggtcgtcagtatggcgtccgattcagcctgccagacagtcattt

SEQ ID NO: 722506 - DNA, 75 bp, synthetic construct
  source 1..75: mol_type = other DNA
tagaggcaatcatcgaagcggcgcggatgcgtttacgcccaatcctgatgacctctctggcctttattctcggcg

SEQ ID NO: 722507 - DNA, 75 bp, synthetic construct
  source 1..75: mol_type = other DNA
gcgatagggttactggtggatgacgccatcgtggtggtggagaacgtcgagcgtgtcattgcggaagataagcta

SEQ ID NO: 722508 - DNA, 75 bp, synthetic construct
  source 1..75: mol_type = other DNA
gcagaccagcaactaaacgcctcgatcattgtgcagacgcgtctgcaaacgccggaagaatttggcaaaatcctg

SEQ ID NO: 722509 - DNA, 75 bp, synthetic construct
  source 1..75: mol_type = other DNA
accactcaagaatagccgcgaaacgttgtcattacaacacaggcggctatatgacgctcgcagagctgggcatgg

SEQ ID NO: 722510 - DNA, 75 bp, synthetic construct
  source 1..75: mol_type = other DNA
atgtctggaaatataggggcaaatccaattacctatcaggcagtttgcgccaatcactaccggaccctgaataac

SEQ ID NO: 722511 - DNA, 75 bp, synthetic construct
  source 1..75: mol_type = other DNA
ccgtttcgggtggagaaaatgccattgttaacataacccgcaccagcgattcactcgcgcaagttaaccgcggca

SEQ ID NO: 722512 - DNA, 75 bp, synthetic construct
  source 1..75: mol_type = other DNA
aaaggtcagatatatatctgacctttattaagtctgctatcgttaaccaaaatgattttgtgaaatatttcctat

SEQ ID NO: 722513 - DNA, 75 bp, synthetic construct
  source 1..75: mol_type = other DNA
actgacaaatcatcaggttcttgatgcgagtcttgggtattttatcaatccactctttgttattttacttggcta

SEQ ID NO: 722514 - DNA, 75 bp, synthetic construct
  source 1..75: mol_type = other DNA
ctcgcgcgatcctctcacctgagaagatcatcaaaaaaattgcagatatagcttccatgtgtgatggaaaagaag

SEQ ID NO: 722515 - DNA, 75 bp, synthetic construct
  source 1..75: mol_type = other DNA
gtaggtaccggcgtgatgggcgggatgtttgccgcaacagtgctggcaatttacttcgttccggtctttttcgtt

SEQ ID NO: 722516 - DNA, 75 bp, synthetic construct
  source 1..75: mol_type = other DNA
gccttgaagatgaggacggacaggtgacgcactggtgtcatatttcggccttaccggaattacaggggatacata

SEQ ID NO: 722517 - DNA, 75 bp, synthetic construct
  source 1..75: mol_type = other DNA
tgagagtttagccctactttcagatgcgcagttgtttaatcgcttgtttgaacaacgtaatcatcccgacggcca

SEQ ID NO: 722518 - DNA, 75 bp, synthetic construct
  source 1..75: mol_type = other DNA
tcgccctcgccgcgttgtatgaaagctggtcaattccattctcggtgatgttggttgttccgttgggcgttattg

SEQ ID NO: 722519 - DNA, 75 bp, synthetic construct
  source 1..75: mol_type = other DNA
tccttagtgtattccttctccatctcaaccagtgaaggcgggattaacgaattggaggcgttaggctcactcggc

SEQ ID NO: 722520 - DNA, 75 bp, synthetic construct
  source 1..75: mol_type = other DNA
gataattgcccatcagcactacactctttattggcaggtaagatatcagccgtaggtaacaaggtaagacttatt

SEQ ID NO: 722521 - DNA, 75 bp, synthetic construct
  source 1..75: mol_type = other DNA
atgaattactccgactcaccgatagtcaacttgaagagttgactgctcgtcttgctgaggcagaggtagcagctc

SEQ ID NO: 722522 - DNA, 75 bp, synthetic construct
  source 1..75: mol_type = other DNA
atcgccctgagccgcattaacaaagcggtcgtcttcccgttcaacttacctgcggtggcagaactgggaacagca

SEQ ID NO: 722523 - DNA, 75 bp, synthetic construct
  source 1..75: mol_type = other DNA
gcgatagggcttttggtggatgacgccatcgtagtggtagagaacgtcgagcgtgtgatggcggaagataaactg

SEQ ID NO: 722524 - DNA, 75 bp, synthetic construct
  source 1..75: mol_type = other DNA
cggtttttgcctgggtacttgccattattatgatgcttgcaggcggtctggcgatcatgaacttaccggttgcgc

SEQ ID NO: 722525 - DNA, 75 bp, synthetic construct
  source 1..75: mol_type = other DNA
tgagcggcgcgaccggggaaatttatcgccagttctccattacgctgatttcatccatgttgctttcggtgtttg

SEQ ID NO: 722526 - DNA, 75 bp, synthetic construct
  source 1..75: mol_type = other DNA
catcaccatcagcgctacctatccgggggctgatgcgcaaacggtagaagactcggtcactcaagtgatcgaaca

SEQ ID NO: 722527 - DNA, 75 bp, synthetic construct
  source 1..75: mol_type = other DNA
ttagttgtcccattgggcgtcattggcgcattactggcaacagacctgcgcggtttaagtaatgacgtctacttc

SEQ ID NO: 722528 - DNA, 75 bp, synthetic construct
  source 1..75: mol_type = other DNA
ttattgtcctgttttgcgccagcggcaccggaatcttcggggcgatgaacgaagggatgaccggcgatccgagta

SEQ ID NO: 722529 - DNA, 75 bp, synthetic construct
  source 1..75: mol_type = other DNA
gaaaaaggcgtcaatacagtggtcgccaaagcgcataatctgtttcaccactcgcgtaagaagccagcgcatgaa

SEQ ID NO: 722530 - DNA, 75 bp, synthetic construct
  source 1..75: mol_type = other DNA
ttttaatcgccaagtcatttctggatttctttaccgcgatgatcttcgcctgttcacttggcattgcggtatcgg

SEQ ID NO: 722531 - DNA, 75 bp, synthetic construct
  source 1..75: mol_type = other DNA
atgttgacgatattagcaggatgaatactctgcttagcaatcttattgccctgcgtcctgaaattattatccagg

SEQ ID NO: 722532 - DNA, 75 bp, synthetic construct
  source 1..75: mol_type = other DNA
cacctgttatgcctgactgagagaacatctgtctggcagtcggctgagattaataaatatatcagtgaacttaca

SEQ ID NO: 722533 - DNA, 75 bp, synthetic construct
  source 1..75: mol_type = other DNA
ttagcaaccttactcggagcattaatcggcgaaatttgtctgctggaatcggcgaaatttgtctgctggaaaaag

SEQ ID NO: 722534 - DNA, 75 bp, synthetic construct
  source 1..75: mol_type = other DNA
tggtttgctgcctgcgctggtgttgattcagggcgtagtgtttgcttttgcctccattgaaatggtgggtacagc

SEQ ID NO: 722535 - DNA, 75 bp, synthetic construct
  source 1..75: mol_type = other DNA
tgatacggtattgattaattatcgggcgagactattgcctgcgacggaatggtatctggcaactatacgtggctt

SEQ ID NO: 722536 - DNA, 75 bp, synthetic construct
  source 1..75: mol_type = other DNA
ttcctgatcttgatgtgttagatgccgtccaatctccttatgaattccgccaactgcatgctaccgacaaactcc

SEQ ID NO: 722537 - DNA, 75 bp, synthetic construct
  source 1..75: mol_type = other DNA
gctggggattggtattttactggtggtgaaatgcgccaaccttccagcgatggttttagctacgctacttggcgc

SEQ ID NO: 722538 - DNA, 75 bp, synthetic construct
  source 1..75: mol_type = other DNA
gcgctgattttaccgctgaccacaccgtcgatgatggcagacttcaagcgccgtaggcggtttattgctgctggc

SEQ ID NO: 722539 - DNA, 75 bp, synthetic construct
  source 1..75: mol_type = other DNA
ctagtgcagtcttactgggtggcgttctcggcgcactgctcagccaacgtttaccggaacgtatccgcgtctcca

SEQ ID NO: 722540 - DNA, 75 bp, synthetic construct
  source 1..75: mol_type = other DNA
taccttagtaaaaattatagcggcgcgcttgttttttatacagaaggaaggcaaataagtcttgatgatttgata

SEQ ID NO: 722541 - DNA, 75 bp, synthetic construct
  source 1..75: mol_type = other DNA
aaaccgtgacggaaagcctgcgccgtcacggactgagggcaaaagcatcctggaatttcagtccggtctgttact

SEQ ID NO: 722542 - DNA, 75 bp, synthetic construct
  source 1..75: mol_type = other DNA
ctggctggcctcgccgccgctggtggttgcctatgcgctggcgggaaatatgaatatcaacctggctgctgagcc

SEQ ID NO: 722543 - DNA, 75 bp, synthetic construct
  source 1..75: mol_type = other DNA
caggtgcagtattaacaggcggcgttcttggcgctctgttgagtcaacgcttaccggagcggatccgtgtctcga

SEQ ID NO: 722544 - DNA, 75 bp, synthetic construct
  source 1..75: mol_type = other DNA
cccgcggtgccggtgatggtattcgcgtggatgtacgggcggtggatgcagaggctgattatcgcggacgtctga

SEQ ID NO: 722545 - DNA, 75 bp, synthetic construct
  source 1..75: mol_type = other DNA
cccctctccaggaggtgtttattttttctcgttttatttatttcttttttattgcctgtacatggctcttgtttt

SEQ ID NO: 722546 - DNA, 75 bp, synthetic construct
  source 1..75: mol_type = other DNA
gtcacccgcggtgccggtgatggtattcgcgtggatgtacgggcggtggatgcgcaggctgattatcgcggacgt

SEQ ID NO: 722547 - DNA, 75 bp, synthetic construct
  source 1..75: mol_type = other DNA
tgatatgcagagacacgtggatgaaagcaatgctggcagcactattgacgagggggagaaaaatactggtactgt

SEQ ID NO: 722548 - DNA, 75 bp, synthetic construct
  source 1..75: mol_type = other DNA
atttttccatcctttgataatattattcatttattgcatgatacatcaattaatacttccggtgaacttgttcag

SEQ ID NO: 722549 - DNA, 75 bp, synthetic construct
  source 1..75: mol_type = other DNA
caatttcctcagtaataatcaacgatttatccgactcaacaaacaggacatagaacctctgaaaattcagtataa

SEQ ID NO: 722550 - DNA, 75 bp, synthetic construct
  source 1..75: mol_type = other DNA
tgacatcgatttttggtctggcatcgttggggattggtattttactggtggtgaaatgcgccaaccttccggcga

SEQ ID NO: 722551 - DNA, 75 bp, synthetic construct
  source 1..75: mol_type = other DNA
aaatgttcccggtggtcaacatgcttccggcactgcttctggcaatgccactttccgccgcctggaccgcctggt

SEQ ID NO: 722552 - DNA, 75 bp, synthetic construct
  source 1..75: mol_type = other DNA
gtggtcatcggtccttttatcaacgcaagtgcagtattactgggtggcgtcctcggcgcactgcttagtcaacgc

SEQ ID NO: 722553 - DNA, 75 bp, synthetic construct
  source 1..75: mol_type = other DNA
ggttagtacctgaacgaatccgtgctagggccaatggttactcttttctgatatatgacacatcgtggacattgg

SEQ ID NO: 722554 - DNA, 75 bp, synthetic construct
  source 1..75: mol_type = other DNA
tcgtcattccctgtctcgggttttcagccagcagcatggcagcagaggatgtgatgattgtctcggcatccggct

SEQ ID NO: 722555 - DNA, 75 bp, synthetic construct
  source 1..75: mol_type = other DNA
ccttgccagcacaggtgaaactttccggcagaaaagctggtcggtatttgctgaggatgagtggcatctcacgga

SEQ ID NO: 722556 - DNA, 75 bp, synthetic construct
  source 1..75: mol_type = other DNA
gggatcagcggcgtatccgggcagggacgtacgaatctactaggtaaccccgaactgaagccggaagagagtgta

SEQ ID NO: 722557 - DNA, 75 bp, synthetic construct
  source 1..75: mol_type = other DNA
gtttgaagcgcggactttagcaggttatccagtgctggtgagcgaggaaaacggcgtagtgacgggatatgcctc

SEQ ID NO: 722558 - DNA, 75 bp, synthetic construct
  source 1..75: mol_type = other DNA
ttataaccacgccgtgttgtatacggcggctatctggaatgaccaaacggttgatgcagataaccgcattgcctg

SEQ ID NO: 722559 - DNA, 75 bp, synthetic construct
  source 1..75: mol_type = other DNA
tactttcaccttcggtacctggaaatcgtatctgaactggaacgagacggaaaataaaggtcgtgagcttgtacg

SEQ ID NO: 722560 - DNA, 75 bp, synthetic construct
  source 1..75: mol_type = other DNA
gatggctttagggcaatcactggctgctttatttaataaaggcgcatcatcatttcagaaatcattggcgcgtaa

SEQ ID NO: 722561 - DNA, 75 bp, synthetic construct
  source 1..75: mol_type = other DNA
cactccgggtccagctttacgatgccagccgctttcatgatggtgcgacggcggaacaggctggtgaactgcaca

SEQ ID NO: 722562 - DNA, 75 bp, synthetic construct
  source 1..75: mol_type = other DNA
ttgcaggctggatgtacttcatcaactgggcgatgacagggattgtcgatatcaccgctgtagcgctgtatatgc

SEQ ID NO: 722563 - DNA, 75 bp, synthetic construct
  source 1..75: mol_type = other DNA
aaaccgaaagataaagccaaagctgaagttggcgttcaggttgttgaacgctggatcatggcccgaatcaggcat

SEQ ID NO: 722564 - DNA, 75 bp, synthetic construct
  source 1..75: mol_type = other DNA
acgatcgcttgtcagcgcgcgcattgcgcaaatgtgcctgtgtgagttttgcgtggatatcaccagtatgaaagt

SEQ ID NO: 722565 - DNA, 75 bp, synthetic construct
  source 1..75: mol_type = other DNA
ctgtcagcccgttttaattctgccatggacattcccgctcaggggctgtgccgtattcctgaaaaacgttcttaa

SEQ ID NO: 722566 - DNA, 75 bp, synthetic construct
  source 1..75: mol_type = other DNA
cagaagttgggttattcacgtgcagaactcttcatccagcttgataaacccgcacttcagttgaaaaagtgggca

SEQ ID NO: 722567 - DNA, 75 bp, synthetic construct
  source 1..75: mol_type = other DNA
tgaaagtgaacctggatcgggccagcgatccggcaaatcatcttaaacgttataacctgtacaaaaatattgcca

SEQ ID NO: 722568 - DNA, 75 bp, synthetic construct
  source 1..75: mol_type = other DNA
gaaaaactggtgtcggcacacagtaaaaacctgaccggtttttggatcatgccagacaccggcttcagctttgaa

SEQ ID NO: 722569 - DNA, 75 bp, synthetic construct
  source 1..75: mol_type = other DNA
acctggcgtccggtggcggataacaacacccgcgcggcaatgctgcaaaccggtgaagcgcagtttgctttcccc

SEQ ID NO: 722570 - DNA, 75 bp, synthetic construct
  source 1..75: mol_type = other DNA
aactcttcatccagcttgataaacccgcactgaagcctcttcctgaagccagttacaccctggtgaagaaagtca

SEQ ID NO: 722571 - DNA, 75 bp, synthetic construct
  source 1..75: mol_type = other DNA
ccgtccttatgcagatactatgcgcaaagtgattggtcaccttgcgagcggtaatctggaatataagcacccata

SEQ ID NO: 722572 - DNA, 75 bp, synthetic construct
  source 1..75: mol_type = other DNA
gcgctgaaaactaccgatcctgtggaaaaagccagattgtataaggccgcgcaggatattatctggcaagagtcg

SEQ ID NO: 722573 - DNA, 75 bp, synthetic construct
  source 1..75: mol_type = other DNA
atccaagaactatccacgatggttggcaacctgtagaaaaaggttaccagcctacaagcaggccagaccaacaaa

SEQ ID NO: 722574 - DNA, 75 bp, synthetic construct
  source 1..75: mol_type = other DNA
gttgaaaatcgacgggaaagattatctgaaaggttcgatgtgtgctgacggagattgtggcgatcacaacctgat

SEQ ID NO: 722575 - DNA, 75 bp, synthetic construct
  source 1..75: mol_type = other DNA
aagttggcgttcaggttgttgaacgctggatcatggcccgaatcaggcatgagatcttctgtaagcgtcaacgga

SEQ ID NO: 722576 - DNA, 75 bp, synthetic construct
  source 1..75: mol_type = other DNA
ggtcggcttcaaccggcgaagcggactgggcgctatcgccactgttcgcctcgcaaaactggccaccgacgctgt

SEQ ID NO: 722577 - DNA, 75 bp, synthetic construct
  source 1..75: mol_type = other DNA
actgtgagcgtaatccaggcggtttttacagctataaccattactgccggatgtaccgtgaatggctcaaaacca

SEQ ID NO: 722578 - DNA, 75 bp, synthetic construct
  source 1..75: mol_type = other DNA
tcttaacattttatttaatgttcctttaagtctgcttgatccaaatcatcctgcaataaatcagaatcttcaaaa

SEQ ID NO: 722579 - DNA, 75 bp, synthetic construct
  source 1..75: mol_type = other DNA
tctgagcaggaaaaatccctgctggcccatgagaaagagacgctggagtacaaacgccagctggctgagctgggc

SEQ ID NO: 722580 - DNA, 75 bp, synthetic construct
  source 1..75: mol_type = other DNA
cagggctgagcgtgaggcgtcacagctgaagtataccggagaggcgcagaaggcgtatgaacgcctgcagacgcc

SEQ ID NO: 722581 - DNA, 75 bp, synthetic construct
  source 1..75: mol_type = other DNA
tggcccgcaagggggcgcaggatgagattcaggcgcagatgcgtgatggcggcgtattttccggaggcaggcgat

SEQ ID NO: 722582 - DNA, 75 bp, synthetic construct
  source 1..75: mol_type = other DNA
aagccggtgaactggctaccagggaccgggccgaacgggacgcatcacggctgaagtataccggagaggcgcaga

SEQ ID NO: 722583 - DNA, 75 bp, synthetic construct
  source 1..75: mol_type = other DNA
actttaatgaatcacccaatatatatgataagaagtatatatccggtataaccagaggagtagctgaactaaaac

SEQ ID NO: 722584 - DNA, 75 bp, synthetic construct
  source 1..75: mol_type = other DNA
agggcgtgtcacctataaatactaaatatgctgaacatgtggtgaaaaatatttacccggaaattaaacatgatt

SEQ ID NO: 722585 - DNA, 75 bp, synthetic construct
  source 1..75: mol_type = other DNA
ggcccagcagttccataacgttaccgcagaacagattgcccatgtggcgcagctgcagcgtgccggtgatgaggc

SEQ ID NO: 722586 - DNA, 75 bp, synthetic construct
  source 1..75: mol_type = other DNA
gggaaatcttcagggagtttaacggacgcaaccaccacgaactggcccgcaagtttggtgtttcgcttcagtggg

SEQ ID NO: 722587 - DNA, 75 bp, synthetic construct
  source 1..75: mol_type = other DNA
tctttgctgaccttgcgcaccatgtcgcgagcacgttgcaagaaatggttggaatggaagatgatatagctgaac

SEQ ID NO: 722588 - DNA, 75 bp, synthetic construct
  source 1..75: mol_type = other DNA
gtttcacccgttctgtgctctccatgctgacagagatttttctgaagcaggccatggtggggattgtcgggagta

SEQ ID NO: 722589 - DNA, 75 bp, synthetic construct
  source 1..75: mol_type = other DNA
ttgccgaactgaacaataccggaagcgcggcgtatccggcaggcgcgagcacggcggcgggcttcctgtcgcact

SEQ ID NO: 722590 - DNA, 75 bp, synthetic construct
  source 1..75: mol_type = other DNA
gatgcggcgaccctcaccggggcggcgaaaactgcgctgggtaatgattatcacgcgctgttcagttttgacgat

SEQ ID NO: 722591 - DNA, 75 bp, synthetic construct
  source 1..75: mol_type = other DNA
ggtggcggttgccactggagaacgacattatcaaagatgggcggattgttgatgtgcagcggctggctaacacgt

SEQ ID NO: 722592 - DNA, 75 bp, synthetic construct
  source 1..75: mol_type = other DNA
atggcatttaagaactggcaaattggtttgcatttacaacagcaagaagcggtagcggttgctatcgtgcggagc

SEQ ID NO: 722593 - DNA, 75 bp, synthetic construct
  source 1..75: mol_type = other DNA
attgccaccaagcttcattcctttgatgtgggcataactgtagccgccgggcttccatttgctataacaacaccg

SEQ ID NO: 722594 - DNA, 75 bp, synthetic construct
  source 1..75: mol_type = other DNA
caatgttacagcctttccgctagtgcaggaacgtctgaccagctatctgttaagttccgatgccgacatttggtt

SEQ ID NO: 722595 - DNA, 75 bp, synthetic construct
  source 1..75: mol_type = other DNA
ttgcggggcagtccgaatttgcaatgcggtatccggcagaagggctaatcaacctctgggttgctgacatggctt

SEQ ID NO: 722596 - DNA, 75 bp, synthetic construct
  source 1..75: mol_type = other DNA
ctgtccgtcagccgccgctaccgccgccaggtggagattttgctatcgcgctggggctggcgcttggggaggggg

SEQ ID NO: 722597 - DNA, 75 bp, synthetic construct
  source 1..75: mol_type = other DNA
cgcgggattgaactacgagatttcccggcagaaatcgcccgccttgcgcttgttatcgctgagtaccaatgtgat

SEQ ID NO: 722598 - DNA, 75 bp, synthetic construct
  source 1..75: mol_type = other DNA
cggtgaactggtggcaagggaccgggctgagcgtgaggcgtcacagctgaagtataccggagaggcgcagaaggc

SEQ ID NO: 722599 - DNA, 75 bp, synthetic construct
  source 1..75: mol_type = other DNA
ggacgatgcccagcgccaggaactggataaccgcctgatgatcatcgactgggtgcgtgacaccatcaacgcacc

SEQ ID NO: 722600 - DNA, 75 bp, synthetic construct
  source 1..75: mol_type = other DNA
gcccgtcgcgacgcggaaggcatggagcaccatgttagtgaagagacgctcgacgcttttcgtttgtttacccag

SEQ ID NO: 722601 - DNA, 75 bp, synthetic construct
  source 1..75: mol_type = other DNA
aatgataccgagaggcttgagaagctgttcgacctctatatcaagacggccacctcggctgtaccggctaagggg

SEQ ID NO: 722602 - DNA, 75 bp, synthetic construct
  source 1..75: mol_type = other DNA
tttgctcaatttgcgcaagcgtatcgcccgtatacgcatttttgatccagcctgtggttcgggcaactttttggt

SEQ ID NO: 722603 - DNA, 75 bp, synthetic construct
  source 1..75: mol_type = other DNA
gtgaagcgtgtaagaaaagaagaaatcagccggttacaggggcagttatttgaagacgatgacgaaccggatgac

SEQ ID NO: 722604 - DNA, 75 bp, synthetic construct
  source 1..75: mol_type = other DNA
tggcgtcactcgtgatggtattcctgaaccctggcaacttgactggcatatcgggttgatgagtattgtcgtggg

SEQ ID NO: 722605 - DNA, 75 bp, synthetic construct
  source 1..75: mol_type = other DNA
tacggatgcagaaattttatctgccgcgtaaaaagtcttcgttttaccgacctgatgcgtttttgcaatggggtg

SEQ ID NO: 722606 - DNA, 75 bp, synthetic construct
  source 1..75: mol_type = other DNA
acacggaaactggattacgcgttgttaggttgggctatatcggcaaatttggggagggaatgggcgttacgcatc

SEQ ID NO: 722607 - DNA, 75 bp, synthetic construct
  source 1..75: mol_type = other DNA
aagccaacggacacccgctggcggtcagcggtcaggcgggccggataagcgccataaaaatcttttaccgctggc

SEQ ID NO: 722608 - DNA, 75 bp, synthetic construct
  source 1..75: mol_type = other DNA
cggaactctcaggatgaaaggtgaactgacaccggcgttattacagacacttatccgcgaaataaaagggagcag

SEQ ID NO: 722609 - DNA, 75 bp, synthetic construct
  source 1..75: mol_type = other DNA
atttggttaccgtgtctgttactggtgtgtggatggttatatctctggaagcgcaggccacaatttacgccggta

SEQ ID NO: 722610 - DNA, 75 bp, synthetic construct
  source 1..75: mol_type = other DNA
caccaataccaatcggcaaattcatgccctgcgtgataacgtcgggttggcaaaagcggaagtgatggcggaacg

SEQ ID NO: 722611 - DNA, 75 bp, synthetic construct
  source 1..75: mol_type = other DNA
atgtctgtggtaattagtgatgcatggcgtcagcgttttggtggcacagcgcgtctgtatggtgaaaaagcgttg

SEQ ID NO: 722612 - DNA, 75 bp, synthetic construct
  source 1..75: mol_type = other DNA
ccatgggcatccggaaatatttctgtctacctgaaaggtctgtcggtaccggtcatcctgaacgtaaccagtggc

SEQ ID NO: 722613 - DNA, 75 bp, synthetic construct
  source 1..75: mol_type = other DNA
gtggcctcagtcggatccgccttataacgcggcacccggtcactttgatgtgcagttcaacggcaatatggtctc

SEQ ID NO: 722614 - DNA, 75 bp, synthetic construct
  source 1..75: mol_type = other DNA
tctccggaaatgttccgggcaccaccatctggcagcacggcgatgatctgctcgtgcgatcgcgggccatgctgc

SEQ ID NO: 722615 - DNA, 75 bp, synthetic construct
  source 1..75: mol_type = other DNA
gtgcatctggatttggcgcggcaacgatggtgaccgccacctttggttttgttgcggtttctcatgcgctgaaga

SEQ ID NO: 722616 - DNA, 75 bp, synthetic construct
  source 1..75: mol_type = other DNA
ctggctaacctgatgctgtgggacgtggacgccgggcgtggcgtgatgaacgtgcgccagggtaaggggcgtaag

SEQ ID NO: 722617 - DNA, 75 bp, synthetic construct
  source 1..75: mol_type = other DNA
tgcgcagaaaccggaactgattattgatgccgcgaccctgaccggagcggcgaaaaccgcgctgggtaatgatta

SEQ ID NO: 722618 - DNA, 75 bp, synthetic construct
  source 1..75: mol_type = other DNA
gctgttcctctgctgtgcggataacctgatcagcggcaacgcgttcaaactgggcgatatcattacctatcgcaa

SEQ ID NO: 722619 - DNA, 75 bp, synthetic construct
  source 1..75: mol_type = other DNA
tcaacgtgatcggcaacgttcaggccagcggcgcattgcaggacagcggtggcaactccaaccaccatacacact

SEQ ID NO: 722620 - DNA, 75 bp, synthetic construct
  source 1..75: mol_type = other DNA
caagactgcacaggcattcaaatccatgtgggatgcggtgctggatattggccgcccggactcctctgcagatat

SEQ ID NO: 722621 - DNA, 75 bp, synthetic construct
  source 1..75: mol_type = other DNA
caggcgctggctgcacagaaagctggtatctctgtagggcagtataaagctgccatgcgtatgcttcctgcacag

SEQ ID NO: 722622 - DNA, 75 bp, synthetic construct
  source 1..75: mol_type = other DNA
tgctggtgctgatagttcgttagtgaacaacaccggaaccatcaataaaatcgtgcagaacgcgggggtattcaa

SEQ ID NO: 722623 - DNA, 75 bp, synthetic construct
  source 1..75: mol_type = other DNA
caacatatacgctaataattcctttgcgtttagtatgctaggttccgtaggccacctcgtgaataacggtacggt

SEQ ID NO: 722624 - DNA, 75 bp, synthetic construct
  source 1..75: mol_type = other DNA
ggaggccagaacaacctaaatggctatgttgtgggaaccagttctgatggcagcgcaggtaagttgaaagtgagc

SEQ ID NO: 722625 - DNA, 75 bp, synthetic construct
  source 1..75: mol_type = other DNA
cgtcgatgacggtcagaagggcggcggcatcaatagcctgacaagcgtcggcgtgaagtacagcagcaaagaaag

SEQ ID NO: 722626 - DNA, 75 bp, synthetic construct
  source 1..75: mol_type = other DNA
cagaaagcgggtgataatggcgttacaggcggttatagccagttttttggcctgaaacatcagatgtcgttcgat

SEQ ID NO: 722627 - DNA, 75 bp, synthetic construct
  source 1..75: mol_type = other DNA
taccaacgttaacggcagcgccgggaagctgaaggttaacaatgccagcatgaacggcgtggagattaacacggg

SEQ ID NO: 722628 - DNA, 75 bp, synthetic construct
  source 1..75: mol_type = other DNA
tcggtacaccgggcagcatggcggacagtcggtcgcaggcgtccgggaagtttgagcagaataaccatgtggtga

SEQ ID NO: 722629 - DNA, 75 bp, synthetic construct
  source 1..75: mol_type = other DNA
aagtgcgacggacagtttttcgcaggttaaaagtgcggccacgcagacctttgacggtattgcacagaatatggc

SEQ ID NO: 722630 - DNA, 75 bp, synthetic construct
  source 1..75: mol_type = other DNA
gcggcgctgccagtagtggcgcatcggcctcaaccggcacagccattcaggcggcagcggcaaacttccattttg

SEQ ID NO: 722631 - DNA, 75 bp, synthetic construct
  source 1..75: mol_type = other DNA
tgtggaagtggacaaggttgcagaggctttcggaaaactgaccaccgacccgacgtcggggctgatggcgatggc

SEQ ID NO: 722632 - DNA, 75 bp, synthetic construct
  source 1..75: mol_type = other DNA
gctgacgctctcaagagccgggcaggcagcagggctgacgtttaaccaggcgagagagtcactggcagccctggt

SEQ ID NO: 722633 - DNA, 75 bp, synthetic construct
  source 1..75: mol_type = other DNA
ctgaaaaagccgaagtcgtcaggagtcaaagtgtcagccggtgagcgtcaggaagaccaggcgcatgctgccctg

SEQ ID NO: 722634 - DNA, 75 bp, synthetic construct
  source 1..75: mol_type = other DNA
cgggagagtcactggcagccctggtcagtgccggtgtgcgtggtggtgagcagtttgatgccattaaccagagtg

SEQ ID NO: 722635 - DNA, 75 bp, synthetic construct
  source 1..75: mol_type = other DNA
gtgttttcttattactttcaaggtcttgcacttggtgcggctatgatcctaccgctcggtccacaaaatgctttt

SEQ ID NO: 722636 - DNA, 75 bp, synthetic construct
  source 1..75: mol_type = other DNA
gatgctggaaacctgggcagataaaacagggaaggcgttcaaatcgatgtgggatgccattctggatattggtcg

SEQ ID NO: 722637 - DNA, 75 bp, synthetic construct
  source 1..75: mol_type = other DNA
cccgccgcctgaaagagaacatggggatgctggaaacctgggcagataaaacagggaaggcgttcaaatcgatgt

SEQ ID NO: 722638 - DNA, 75 bp, synthetic construct
  source 1..75: mol_type = other DNA
atgacatggcccgtaagggagcccgtgatgagatccaggcacagatgcgtgatggcggtatgttctccggaggtg

SEQ ID NO: 722639 - DNA, 75 bp, synthetic construct
  source 1..75: mol_type = other DNA
tgatggcacgccgctgtgggtttccggtagcggaaccagcaaaacggtattgacccgttatgccaccgctcttaa

SEQ ID NO: 722640 - DNA, 75 bp, synthetic construct
  source 1..75: mol_type = other DNA
tcaacgggcgctatcgcgtgatgtttgccaatggtaaccacattacctttgttagccacggcgagacgaccttgc

SEQ ID NO: 722641 - DNA, 75 bp, synthetic construct
  source 1..75: mol_type = other DNA
ctgctggacgattcgaaaatgggggtggcgtcgatgctcggcagtcgggtccgggtgaaaacctggagctggttt

SEQ ID NO: 722642 - DNA, 75 bp, synthetic construct
  source 1..75: mol_type = other DNA
tattggcgtggatttctttaccaacgcttgcgggagagctgccgctgcaactggcgctgcgtggtacgcagcatg

SEQ ID NO: 722643 - DNA, 75 bp, synthetic construct
  source 1..75: mol_type = other DNA
tttaactcatgagtacctgcatcttgcctttgatggataccccaccgggctggatgagaactatatcgaagcgct

SEQ ID NO: 722644 - DNA, 75 bp, synthetic construct
  source 1..75: mol_type = other DNA
aagcctggctggcggaaaaaatgccgcagtggcggcaaatcttacaaagtgagacgggctataacgagcctgaag

SEQ ID NO: 722645 - DNA, 75 bp, synthetic construct
  source 1..75: mol_type = other DNA
catgctgacagagatttttctgaagcaggcaatggtgggaattgtcgggggtatcggcagtgccattggcggtgc

SEQ ID NO: 722646 - DNA, 75 bp, synthetic construct
  source 1..75: mol_type = other DNA
cgaactgatagctgctatcaaacagggctatctcacggttaaagctgctggtgtatgggccggtgatgttgaaac

SEQ ID NO: 722647 - DNA, 75 bp, synthetic construct
  source 1..75: mol_type = other DNA
atacgatcctgattcaggatacatgtatctcagcgatgaaacttatcgtgtcattcttaaagcgaagattgcgat

SEQ ID NO: 722648 - DNA, 75 bp, synthetic construct
  source 1..75: mol_type = other DNA
cgatggtcggggtcacctcgctggcggtggcgacaggtgcgctggcgtacgcctggtaccagggcgacgccacgc

SEQ ID NO: 722649 - DNA, 75 bp, synthetic construct
  source 1..75: mol_type = other DNA
tgccggaagtccggcgcagatgcggcgggcggaaggcattaattttaatcagaacaatcacgtggtgattcagaa

SEQ ID NO: 722650 - DNA, 75 bp, synthetic construct
  source 1..75: mol_type = other DNA
gtcttatggccgtggttacacctatttattgtcgcgtgcgggcgtgaccggagctgaaaaccgcgccgcgttacc

SEQ ID NO: 722651 - DNA, 75 bp, synthetic construct
  source 1..75: mol_type = other DNA
gagacgctggagtacaaacgccagctggctgagctgggcgacaaggttgaataccagaaacggctgaatgagctg

SEQ ID NO: 722652 - DNA, 75 bp, synthetic construct
  source 1..75: mol_type = other DNA
gcacagcaggcggcacggtttgaagagcagcagagcgcgaagcaggccgccatcagcgcaaaagcccgtggtctc

SEQ ID NO: 722653 - DNA, 75 bp, synthetic construct
  source 1..75: mol_type = other DNA
ggcggcgcggtttgaacagcagcagagcgcgaagcaggcagccatcagcgcaaaagcccgcggcctcaccgaccg

SEQ ID NO: 722654 - DNA, 75 bp, synthetic construct
  source 1..75: mol_type = other DNA
gtgctggttgccgatgtgcccgtggaagagtccgcgcccttccgccaggccgcgttgcgtcataatgtcgcacct

SEQ ID NO: 722655 - DNA, 75 bp, synthetic construct
  source 1..75: mol_type = other DNA
atagtaaccaggacaacccgctactctatttctgtcagcatcgctggcgggtaacgcctcgcggcgaactccagc

SEQ ID NO: 722656 - DNA, 75 bp, synthetic construct
  source 1..75: mol_type = other DNA
caatgttaccgcttttccgctggttcaggagcgtttgactacctacctgttaagttccgatgcggatatttggtt

SEQ ID NO: 722657 - DNA, 75 bp, synthetic construct
  source 1..75: mol_type = other DNA
gtttatgacgtggcccgtaagggtgcccttgatgttgttccggggcagatgcgtgatggtggtctgttctccgga

SEQ ID NO: 722658 - DNA, 75 bp, synthetic construct
  source 1..75: mol_type = other DNA
gccggtacggccattcaggctgcggcggcgaacttccattttgcgaccggaggatttacggggacgggcggcaaa

SEQ ID NO: 722659 - DNA, 75 bp, synthetic construct
  source 1..75: mol_type = other DNA
ttaataaaaccctggttctttccggtaatcagtccggactgactgccgatcgcatgctgacgctctccagagccg

SEQ ID NO: 722660 - DNA, 75 bp, synthetic construct
  source 1..75: mol_type = other DNA
cagcaattcttaccctggattccacccgtttttctgaagaaatggggcgggtgaaaaaatcgctgggcgaaacca

SEQ ID NO: 722661 - DNA, 75 bp, synthetic construct
  source 1..75: mol_type = other DNA
tgctcgccagtgcgcagaaggcatttgatgaggcggataaaaaatggcagtggtaccagagccggagccagcgcc

SEQ ID NO: 722662 - DNA, 75 bp, synthetic construct
  source 1..75: mol_type = other DNA
atattattgtgggtggtgtgatgtggtttatcgctctgcaactggcgaaagatggcattgctcatgtacaagcct

SEQ ID NO: 722663 - DNA, 75 bp, synthetic construct
  source 1..75: mol_type = other DNA
gtatcggcagcgccattggtggtgctgtcagtggtggagcatcagcgtcaggtggtacagccattcaggccgctg

SEQ ID NO: 722664 - DNA, 75 bp, synthetic construct
  source 1..75: mol_type = other DNA
ggaggcattcctggcagagcacggtggctggaaggcgtttctgtggacaccgccttatgcctggcggcagataaa

SEQ ID NO: 722665 - DNA, 75 bp, synthetic construct
  source 1..75: mol_type = other DNA
gactaaggatattcagcaaaccatcaaactggggatatgcaaaatcaacgttgcaacggagctgaaaaatgcctt

SEQ ID NO: 722666 - DNA, 75 bp, synthetic construct
  source 1..75: mol_type = other DNA
gcaagtaaaggtgggcaacagaacatatcgtgttgtggtcactgataataagttttgcgttacaagagaaagtca

SEQ ID NO: 722667 - DNA, 75 bp, synthetic construct
  source 1..75: mol_type = other DNA
gaaccgattttcaatagacgtgaggtgaaggggaagacatataccatcgtcgaagagtggtgtttcgggtatatg

SEQ ID NO: 722668 - DNA, 75 bp, synthetic construct
  source 1..75: mol_type = other DNA
ggcaggagcggatcgactggcagcgggtggcaaaaatgcgcgacaacggtatccgcttacagtttgcttttatta

SEQ ID NO: 722669 - DNA, 75 bp, synthetic construct
  source 1..75: mol_type = other DNA
catctggaactacaagaggtcggttagaggtcggaaagacttgaagagaggctacagtaggcctcaggtcggaca

SEQ ID NO: 722670 - DNA, 75 bp, synthetic construct
  source 1..75: mol_type = other DNA
atggatggatcactgctgctgtagcaagtgaggtattgcagataaaacaaattcttctctttatttttattgcag

SEQ ID NO: 722671 - DNA, 75 bp, synthetic construct
  source 1..75: mol_type = other DNA
cacccaggagtttgaaaactttgtgctggagaagcggcatatttccccggcattaatggaattactgctccagga

SEQ ID NO: 722672 - DNA, 75 bp, synthetic construct
  source 1..75: mol_type = other DNA
tgattactggcgcgcactacaaaaccgcattcgtgaagggcatgtggaagatgtttatgcgtatcggcgcaggca

SEQ ID NO: 722673 - DNA, 75 bp, synthetic construct
  source 1..75: mol_type = other DNA
tctcggcgaacaaattgtgattcgccatctttatattgagcggcggatggtgccgctcaatatctggctggaaca

SEQ ID NO: 722674 - DNA, 75 bp, synthetic construct
  source 1..75: mol_type = other DNA
acctcgacgcaggaactgaccgaagagctgaaccgacttgaggccagcaaaggcaatccttaccctttgcttgag

SEQ ID NO: 722675 - DNA, 75 bp, synthetic construct
  source 1..75: mol_type = other DNA
cttgcacagggagaaaaagtcgtgatgacaatgaccaacgaaaacgtttaattgtcattgatgatcctatatcca

SEQ ID NO: 722676 - DNA, 75 bp, synthetic construct
  source 1..75: mol_type = other DNA
cctgtaccggaagaaaaagtcgcgatgacgatgatcagcggaaacgcttaatcgttattgatgatccgatatcca

SEQ ID NO: 722677 - DNA, 75 bp, synthetic construct
  source 1..75: mol_type = other DNA
gtggatatgtctttcgctcgcggcctgcgcgccatacttcgccaggacccggatgtcgtcatggtgggggaaatt

SEQ ID NO: 722678 - DNA, 75 bp, synthetic construct
  source 1..75: mol_type = other DNA
acgcgaagtatgccggtagctccccagcacgtacctcttatggcgattgtatggtggaaatgaacgatatcttcg

SEQ ID NO: 722679 - DNA, 75 bp, synthetic construct
  source 1..75: mol_type = other DNA
aggcttaacgactctgccgcaattgctgcacgatcaaggctatgtaacccaggctatcggtaaatggcatatggg

SEQ ID NO: 722680 - DNA, 75 bp, synthetic construct
  source 1..75: mol_type = other DNA
cggcgtgcgccatattccgatgggagtaccgctacagaccgaaatgcatgcatatatggagatcctgaaaaaata

SEQ ID NO: 722681 - DNA, 75 bp, synthetic construct
  source 1..75: mol_type = other DNA
tatcgtaccctggtaaaagcgggcgaaaagagcgggctgctggccccggtgttggaaaagctggctgattacaat

SEQ ID NO: 722682 - DNA, 75 bp, synthetic construct
  source 1..75: mol_type = other DNA
atgctcactacggtggcgattgtggtcgtgattattctcctcactgctgtcgtgcccaaaattaccgaacagttc

SEQ ID NO: 722683 - DNA, 75 bp, synthetic construct
  source 1..75: mol_type = other DNA
ttcttcgatattgtcatatcaattttggaacagggcgcttaaatgatcttactcgctctcagcttcagatggctc

SEQ ID NO: 722684 - DNA, 75 bp, synthetic construct
  source 1..75: mol_type = other DNA
tatggaagatctggatcaacgctggatccggcaatcaaccgcaggcggccgccgatttctacttactcaccacca

SEQ ID NO: 722685 - DNA, 75 bp, synthetic construct
  source 1..75: mol_type = other DNA
gaacgtgatgttgccagctcccgacctttactccctctcatttattcacattacaaggatttcatacatgaaaac

SEQ ID NO: 722686 - DNA, 75 bp, synthetic construct
  source 1..75: mol_type = other DNA
cggtattatcctggtgaccggaccgacaggctccggtaaaagcaccacgctctacgccatcctttcggcgctgaa

SEQ ID NO: 722687 - DNA, 75 bp, synthetic construct
  source 1..75: mol_type = other DNA
ccaacctgtataaagcactggagaaaaacggtcagctcgataacacgctgattatctttacctccgataatggcc

SEQ ID NO: 722688 - DNA, 75 bp, synthetic construct
  source 1..75: mol_type = other DNA
gcagaacttgagaaaaaaaccggtaagaaaccgaacgtggttgttttcttgctggatgatgtgggctggatggat

SEQ ID NO: 722689 - DNA, 75 bp, synthetic construct
  source 1..75: mol_type = other DNA
atggactatggcgttaagttcctcgacaagatggcgaagagcgataaaccattcttcctctactacggcactcgt

SEQ ID NO: 722690 - DNA, 75 bp, synthetic construct
  source 1..75: mol_type = other DNA
cggcacattgccatttttgctgccgatccaccagacggacgacggcgagttatttattgatacctgcctgacgac

SEQ ID NO: 722691 - DNA, 75 bp, synthetic construct
  source 1..75: mol_type = other DNA
ttatccctccttctacgagggattcggtttacctattcttgaagcgatgtcttgcggtgtgccggtagtatgctc

SEQ ID NO: 722692 - DNA, 75 bp, synthetic construct
  source 1..75: mol_type = other DNA
gattatatctaccatggccccaatttttatctgccgcataaactggaacgcgccgtgaccacgtttcatgacata

SEQ ID NO: 722693 - DNA, 75 bp, synthetic construct
  source 1..75: mol_type = other DNA
gagcatctgcaacagggcaaagcgcaactgttaggtgcatgggcgggtgaattgcttgcggaagaactacgccag

SEQ ID NO: 722694 - DNA, 75 bp, synthetic construct
  source 1..75: mol_type = other DNA
atgcagaaacgagaacccgtcatcatcgtgccagactataccgatgatgaactttatgagtggatacaccagaaa

SEQ ID NO: 722695 - DNA, 75 bp, synthetic construct
  source 1..75: mol_type = other DNA
tttgaaattggtgtcactatcagtaaccctgtatttactgaagatgccattaacaagagaaaacacgaacgggag

SEQ ID NO: 722696 - DNA, 75 bp, synthetic construct
  source 1..75: mol_type = other DNA
caggatatcaccaggctggaaaaaagcagcggcattaagcattgccagaatggttacatacccacgttaatagct

SEQ ID NO: 722697 - DNA, 75 bp, synthetic construct
  source 1..75: mol_type = other DNA
gcggcttcctggcgcgtcgtcgtcacttacaggcgctggaacaggcggcagagcacctgcaacagggtaaagcgc

SEQ ID NO: 722698 - DNA, 75 bp, synthetic construct
  source 1..75: mol_type = other DNA
aacgccggtaaatcgagcctgttaaacgcgctggcgggccgtgaagcggcaatcgtaaccgatatcgccggaacc

SEQ ID NO: 722699 - DNA, 75 bp, synthetic construct
  source 1..75: mol_type = other DNA
atatcgtcatgccgccgaactacactggtccgcaacgctggcagaaattgaacgggtaaagcggctttatcagac

SEQ ID NO: 722700 - DNA, 75 bp, synthetic construct
  source 1..75: mol_type = other DNA
agggcagtctgctgcgcgaagggatgaaggtggtgattgccgggcgtcctaacgccggtaaatcgagcctgttaa

SEQ ID NO: 722701 - DNA, 75 bp, synthetic construct
  source 1..75: mol_type = other DNA
atggcggtccggtgatcctcgacctgctgttaaaacgtattctgaccattcctggcctgcggattgctcgccctg

SEQ ID NO: 722702 - DNA, 75 bp, synthetic construct
  source 1..75: mol_type = other DNA
agcgaaatcaccggggaatttacttctgacgacctgctggggcggattttctccagcttctgtatcggtaagtaa

SEQ ID NO: 722703 - DNA, 75 bp, synthetic construct
  source 1..75: mol_type = other DNA
gcgattgtcgtctgaaggtcggcaaagagatgtttacattgtttgggccacagtttgtgcgcgaacttcaacagc

SEQ ID NO: 722704 - DNA, 75 bp, synthetic construct
  source 1..75: mol_type = other DNA
agcatctgcaaacactttttattcatggcgtccgtgctgtcgttagagttgctacgaataataatgatgtatacc

SEQ ID NO: 722705 - DNA, 75 bp, synthetic construct
  source 1..75: mol_type = other DNA
atgaacaggttatgtatcctgacagtgattttttcactgttatgctcacttcctgccgcacaggcatccccgcag

SEQ ID NO: 722706 - DNA, 75 bp, synthetic construct
  source 1..75: mol_type = other DNA
ttaccgccggaaaacgttattccattgatccaggattactcaaaattattgcccgcagggaaagcagtctgaatc

SEQ ID NO: 722707 - DNA, 75 bp, synthetic construct
  source 1..75: mol_type = other DNA
ggggaacgctgtagtatatgaagatgctgaggatgcaacaaaagtcctgaagatgtttactacatctcaaagcaa

SEQ ID NO: 722708 - DNA, 75 bp, synthetic construct
  source 1..75: mol_type = other DNA
gtggcgcttacccgacagttacaaattaccctgcgcggtagcgatgtgattggtcggtttggcggcgatgagttt

SEQ ID NO: 722709 - DNA, 75 bp, synthetic construct
  source 1..75: mol_type = other DNA
atgagcggattgccagcctgatggcgtttctcgagttggcagaaatagctggatatactattacaccccctgacg

SEQ ID NO: 722710 - DNA, 75 bp, synthetic construct
  source 1..75: mol_type = other DNA
cgtgtggatggtaaacgttcatgcctctggcggcgcacgtatgatgaccgcagcacgtgaggcgttggttccgtt

SEQ ID NO: 722711 - DNA, 75 bp, synthetic construct
  source 1..75: mol_type = other DNA
atgctcgccgtttacctgtttcgcgccacttccggtgctcatcatcaagaaggtctggtcatgacgttaactgct

SEQ ID NO: 722712 - DNA, 75 bp, synthetic construct
  source 1..75: mol_type = other DNA
gtgttgattatatggtgattggtcgcccggtaacgcaatcggtagatccagcgcagacgctgaaagcgatcaacg

SEQ ID NO: 722713 - DNA, 75 bp, synthetic construct
  source 1..75: mol_type = other DNA
tccgaccaacacgcaaccagtgcgtattttcatgaaaggagatcactcaataacttccatcgagatcgggtaata

SEQ ID NO: 722714 - DNA, 75 bp, synthetic construct
  source 1..75: mol_type = other DNA
tcccacgataagaagagcattcgctttctgagcgcctttctggtggggatcacatggccgatgagttttccagta

SEQ ID NO: 722715 - DNA, 75 bp, synthetic construct
  source 1..75: mol_type = other DNA
aagccagcgatctggccgatcttggtgtgacactgtcaccggcagattatgcagagcgtctggcggcgctgacgc

SEQ ID NO: 722716 - DNA, 75 bp, synthetic construct
  source 1..75: mol_type = other DNA
gatgatcgttatcctggctgccctgtttttgcctgtgttgatttgccagaaggcgcggtacttgaagacgacgaa

SEQ ID NO: 722717 - DNA, 75 bp, synthetic construct
  source 1..75: mol_type = other DNA
aggcgtatgagcgcctgcagacgccgctggataaatataccgcccgtcagaaagagctgaataaggccctgaaag

SEQ ID NO: 722718 - DNA, 75 bp, synthetic construct
  source 1..75: mol_type = other DNA
tctgctgcaacagggcggtcaggtgaaagactcgttcggtggtcttatcccgatgttccggggactggcgggagc

SEQ ID NO: 722719 - DNA, 75 bp, synthetic construct
  source 1..75: mol_type = other DNA
tggttttacaggtactggcggcaaatacgagcctgcggggatagtccatcgcggggagtttgtcttcactaagga

SEQ ID NO: 722720 - DNA, 75 bp, synthetic construct
  source 1..75: mol_type = other DNA
tggcagatggactgattgacgccagtgcgcagaaaccggaactgattatcgatgccgcgacactcaccggtgcgg

SEQ ID NO: 722721 - DNA, 75 bp, synthetic construct
  source 1..75: mol_type = other DNA
ctgggatcgtctgcgtgggcgcgatgtgacgccgcgctatctggcccggttgaccaaagaagagcaggaaagtga

SEQ ID NO: 722722 - DNA, 75 bp, synthetic construct
  source 1..75: mol_type = other DNA
gattcgcttgctgatggacagttaattaaagacgacgaaggacgcgaccagcttcaggcaatgccgaaagcaaaa

SEQ ID NO: 722723 - DNA, 75 bp, synthetic construct
  source 1..75: mol_type = other DNA
actgaccgaaccgcaatacttcctgcaaccacggcagttattcccggtctggccacagtggcgtcctgaactggc

SEQ ID NO: 722724 - DNA, 75 bp, synthetic construct
  source 1..75: mol_type = other DNA
ctgagctccggacgctggagaagcacagtaagcgtaaactgaccgccgtatgtagccatcagacgagaattggta

SEQ ID NO: 722725 - DNA, 75 bp, synthetic construct
  source 1..75: mol_type = other DNA
cgccgcagtccgcgttcttgcgccagtatcgggctttatcacaactacccgcatgcattgcaccgaagccgcatt

SEQ ID NO: 722726 - DNA, 75 bp, synthetic construct
  source 1..75: mol_type = other DNA
acagaaatcctgcttaaacaggccatggtgggcattgtcgggcgtatcggcagcgccattggtggtgctttcggt

SEQ ID NO: 722727 - DNA, 75 bp, synthetic construct
  source 1..75: mol_type = other DNA
caccttttgagaacggcaatgacctggaagggttcctgatcgtcacggcaactgcggatgagggactgctggaca

SEQ ID NO: 722728 - DNA, 75 bp, synthetic construct
  source 1..75: mol_type = other DNA
gcggagctggcagatacgctcccgcaggcggccaattaccgtgcggcaccactgtgtaatggcgatcctgacgat

SEQ ID NO: 722729 - DNA, 75 bp, synthetic construct
  source 1..75: mol_type = other DNA
cgcaaagcgcgctgcttacctgggtaaatggctggctggctggcgattgtgccttaccagagatgccctcggtgg

SEQ ID NO: 722730 - DNA, 75 bp, synthetic construct
  source 1..75: mol_type = other DNA
aaataactggctggcaggcgattgcgaattaccgcagatgccttccgttgcctttggcgtaagttgtgcattggc

SEQ ID NO: 722731 - DNA, 75 bp, synthetic construct
  source 1..75: mol_type = other DNA
aagctatcatcgacgctgctgtggttatcgctaatgagttacaagttgcagccaacaacgctacccagacttata

SEQ ID NO: 722732 - DNA, 75 bp, synthetic construct
  source 1..75: mol_type = other DNA
aaagctggtactcagcaatatcgcttcattaaaaatgatttctacaattatttagctgatgctttcaaagcgtaa

SEQ ID NO: 722733 - DNA, 75 bp, synthetic construct
  source 1..75: mol_type = other DNA
aaataactggctggcaggcgattgcgaattaccgcaaatgccttccgtcgcctttggcgtaagctgtgcattggc

SEQ ID NO: 722734 - DNA, 75 bp, synthetic construct
  source 1..75: mol_type = other DNA
atggctacatacggcggtcagtttacgcttacgccttatccctgtcctggcgagcatgaactggtttcagaagtg

SEQ ID NO: 722735 - DNA, 75 bp, synthetic construct
  source 1..75: mol_type = other DNA
atgattgtgccgctgactcagcacctgtttgagttaattgcccgcgatgccgcagaattagaaaaagtgctgccg

SEQ ID NO: 722736 - DNA, 75 bp, synthetic construct
  source 1..75: mol_type = other DNA
atgaataaccacgccactgtgcaatcttctgcgccagtttccaccgcgccgctccttcaggtgagtggcgcactg

SEQ ID NO: 722737 - DNA, 75 bp, synthetic construct
  source 1..75: mol_type = other DNA
caggtgcgctggcgtacgcctggtaccagggcgacgccacgctttcagaatttaataaaacgctggtcctttccg

SEQ ID NO: 722738 - DNA, 75 bp, synthetic construct
  source 1..75: mol_type = other DNA
ataccggtgaagtccacatgatgacgaaggcctggagcagtgaaccggcctcgcttgacggtggcggggagatct

SEQ ID NO: 722739 - DNA, 75 bp, synthetic construct
  source 1..75: mol_type = other DNA
aaggttttattatcaaacatgaaataccatcatcaaaaagaaaattaactgtttggggtattactatgcaaggat

SEQ ID NO: 722740 - DNA, 75 bp, synthetic construct
  source 1..75: mol_type = other DNA
cgagcactgcgcactggctccgctgccgggcgaaggttcctttgccggttcaatcctgtcacatgactttgtaga

SEQ ID NO: 722741 - DNA, 75 bp, synthetic construct
  source 1..75: mol_type = other DNA
catccgatcattccgttcatcaccgaaaccatctggcagcgtgtgaaagtactttgcggtatcactgctgacacc

SEQ ID NO: 722742 - DNA, 75 bp, synthetic construct
  source 1..75: mol_type = other DNA
ctgacctggaagtggaaaaccgcgaatcgaaaggttcgatgtggcacatccgctatccgctggctgacggcgcga

SEQ ID NO: 722743 - DNA, 75 bp, synthetic construct
  source 1..75: mol_type = other DNA
ctatctgcataagccattacgtagtcttgaagaagtagcaactgacattatcaatctagagcagaaggctgatgg

SEQ ID NO: 722744 - DNA, 75 bp, synthetic construct
  source 1..75: mol_type = other DNA
ctcggcctgctggaagagattaaaccgcacgatctgaccgttccttacggcgaccgtggcggtgtggttatcgaa

SEQ ID NO: 722745 - DNA, 75 bp, synthetic construct
  source 1..75: mol_type = other DNA
acggcactgatgccctgcgctttaccctggccgcactcgcttctaccggtcgtgacatcaactgggatatgaagc

SEQ ID NO: 722746 - DNA, 75 bp, synthetic construct
  source 1..75: mol_type = other DNA
gccgggtaaaccgctggagctgctgctgcgtggttgcagcgcggatgcagaacgtcgcgtaaatgaaaaccgtgg

SEQ ID NO: 722747 - DNA, 75 bp, synthetic construct
  source 1..75: mol_type = other DNA
aaaagaaataatattctttatctgcgtagggggtttggtaggcggagccatttctaggatgttttttaatttgta

SEQ ID NO: 722748 - DNA, 75 bp, synthetic construct
  source 1..75: mol_type = other DNA
ggcgcggtcgctggctatggggtgctgtggtgtgtttactggggcgtctggttagtttgtcacaaagagggattg

SEQ ID NO: 722749 - DNA, 75 bp, synthetic construct
  source 1..75: mol_type = other DNA
ttattgtcgctgtaggtttctggctctggttaaaacgcggcaataaccgccaccgttttcatgccatgttgctgc

SEQ ID NO: 722750 - DNA, 75 bp, synthetic construct
  source 1..75: mol_type = other DNA
tattaagctttcagcacctgagaaaaatgccattcttcacgcggtgagctggtatgacgaaaccgccaagaaagt

SEQ ID NO: 722751 - DNA, 75 bp, synthetic construct
  source 1..75: mol_type = other DNA
tggttggcacaggttcaagccgtcgtaaggctgagcagctgccgccgaacaggcgttgaaaaactggagctggaa

SEQ ID NO: 722752 - DNA, 75 bp, synthetic construct
  source 1..75: mol_type = other DNA
ccgttgcgctttatctgggaagtgcctggcggtgggcggttaattccgccgctgaaagtacaacgtaatgaagtg

SEQ ID NO: 722753 - DNA, 75 bp, synthetic construct
  source 1..75: mol_type = other DNA
ccgatgctgaccgaccagtggtacgttcgtgccgacgtgctggcgaaaccggcggttgaagcagttgagaacggc

SEQ ID NO: 722754 - DNA, 75 bp, synthetic construct
  source 1..75: mol_type = other DNA
tgattcactccgcgtggtggatgaacgtgactctaccgaaacaccggcaacttatgccagccctcaccagttgct

SEQ ID NO: 722755 - DNA, 75 bp, synthetic construct
  source 1..75: mol_type = other DNA
gaacacggcggcgcgctgaagggcgacagaatgcaggtatctggcctacgtgatatccctagcccgtctatcacc

SEQ ID NO: 722756 - DNA, 75 bp, synthetic construct
  source 1..75: mol_type = other DNA
caaaagcggaagtcatggcggagcgtattcgccagattaacccggagtgccgtgtaacggtggtggatgacttcg

SEQ ID NO: 722757 - DNA, 75 bp, synthetic construct
  source 1..75: mol_type = other DNA
tcactgaactgattaacaaggtcgctgaaaacggtgattcactccgcgtggtggatgaacgtgactctaccgaaa

SEQ ID NO: 722758 - DNA, 75 bp, synthetic construct
  source 1..75: mol_type = other DNA
gcaggacaatattgactgcgaatcggaaattatctttgacaacgatgaggacaaaacggattcggcagcactgtt

SEQ ID NO: 722759 - DNA, 75 bp, synthetic construct
  source 1..75: mol_type = other DNA
gttattcactccgcgtggtggatgaccgtgactctaccgaaacaccggcaacttatgccagccctcaccagttgc

SEQ ID NO: 722760 - DNA, 75 bp, synthetic construct
  source 1..75: mol_type = other DNA
catataacatagaaagatattttgaaataagattaattgaaagtgagatagactcgattgatgatgaaatattaa

SEQ ID NO: 722761 - DNA, 75 bp, synthetic construct
  source 1..75: mol_type = other DNA
attcctttcgttaaatcactcgctactccgttgccacaatttaataagtttgtttcaaacttgatcgcttcgtca

SEQ ID NO: 722762 - DNA, 75 bp, synthetic construct
  source 1..75: mol_type = other DNA
gattgtattgatgacggtaataatgccgacatttgcgcgcgtggctggaacaacgccaaagcggcattttatgcc

SEQ ID NO: 722763 - DNA, 75 bp, synthetic construct
  source 1..75: mol_type = other DNA
aagcgaaaagcacgcctcctgaagcagcgaaagccatgaccgtggcgattcgcacgtttttacagcaaaacgccg

SEQ ID NO: 722764 - DNA, 75 bp, synthetic construct
  source 1..75: mol_type = other DNA
ggcagtggcaccagcaaaacggtactgacccgttatgcgacggtgcttaatcgggttttgccagtgccgacgcaa

SEQ ID NO: 722765 - DNA, 75 bp, synthetic construct
  source 1..75: mol_type = other DNA
caggagcggatcgactggcagcgggtggcaaaaatgcgcgacaacggtatccgcttacagtttgcttttattaag

SEQ ID NO: 722766 - DNA, 75 bp, synthetic construct
  source 1..75: mol_type = other DNA
ggcggtggtgctgctgaccggggaatatatttccgaacgcgagctgccgctggcgattgcgagtacgccgatccc

SEQ ID NO: 722767 - DNA, 75 bp, synthetic construct
  source 1..75: mol_type = other DNA
attatcaggattacagctattactcggcaccatcatgcggtaattgtgacgacacctgcgcgtcggaacccggcg

SEQ ID NO: 722768 - DNA, 75 bp, synthetic construct
  source 1..75: mol_type = other DNA
ttcctttggcgaagcgattcatgagcacccggagctggtgaagaaatatctcggcaccgtggtgcctgggaatga

SEQ ID NO: 722769 - DNA, 75 bp, synthetic construct
  source 1..75: mol_type = other DNA
acccacaggatttcgcctggcaaggcttaacgctgacacccgcagcggcgatacacatccgcgagctggtggcaa

SEQ ID NO: 722770 - DNA, 75 bp, synthetic construct
  source 1..75: mol_type = other DNA
tgtgggcgcagttccggcactcgccgcattgatatggtcgatcataatattccgccgctggcctgtggcactcga

SEQ ID NO: 722771 - DNA, 75 bp, synthetic construct
  source 1..75: mol_type = other DNA
ctgcagttaagcaccgcagcggcgcatccgcagaagcattcagctttggtgatccgatcccggttctggaccgcc

SEQ ID NO: 722772 - DNA, 75 bp, synthetic construct
  source 1..75: mol_type = other DNA
acagttatcgcggcctagtgaaaatcatgccgacggcaaccaatgcgcgcaatttcactcagtgcgactcaatgc

SEQ ID NO: 722773 - DNA, 75 bp, synthetic construct
  source 1..75: mol_type = other DNA
ggaaaagatacaaaagtacatattgatatgtatgacggcaaaaacatcacgggagatggcttcggttttcggcag

SEQ ID NO: 722774 - DNA, 75 bp, synthetic construct
  source 1..75: mol_type = other DNA
tgcagcgttccggtgatgaggccggggcattgcaggcggcgaacgatatcgccacgaaaggctttgatgagcaga

SEQ ID NO: 722775 - DNA, 75 bp, synthetic construct
  source 1..75: mol_type = other DNA
ggtctaccgggttatctgtccgctattccatcagcgctgctgaatgagtccgcaacactgttccgccgtaagtat

SEQ ID NO: 722776 - DNA, 75 bp, synthetic construct
  source 1..75: mol_type = other DNA
ccttcaagaaaggattaaagaactcaatgaatggttaggtgatgaagtcataagatttgcgaaatatacactcga

SEQ ID NO: 722777 - DNA, 75 bp, synthetic construct
  source 1..75: mol_type = other DNA
caaaatggcgatttgagaaggacaggccgtgtaaaggcgtgaagaaaacgtttatctttagtccttctgcacact

SEQ ID NO: 722778 - DNA, 75 bp, synthetic construct
  source 1..75: mol_type = other DNA
tgtcggggcgatacctgctctcgccgcgttaatatggtcaatcatcatatttcgccgctggccagtcactctgga

SEQ ID NO: 722779 - DNA, 75 bp, synthetic construct
  source 1..75: mol_type = other DNA
gtctgcgggagagcgtcaggaagatcgagcacatgcagctcttcttgcgttacaagctgaactaaaaatgcttga

SEQ ID NO: 722780 - DNA, 75 bp, synthetic construct
  source 1..75: mol_type = other DNA
ggggatgtggagaaggccagccgcgtttttgtgcgaaatgagttaattcctttacaaaagcgacttgaagaattt

SEQ ID NO: 722781 - DNA, 75 bp, synthetic construct
  source 1..75: mol_type = other DNA
cgctggtatgagccgcccgtcagctttgacggactggcgcgcaccttccgcgctgccgtgcatcacagttccccg

SEQ ID NO: 722782 - DNA, 75 bp, synthetic construct
  source 1..75: mol_type = other DNA
atgggaaagagtaaaaaaaaacgcgctgcggcgacgaaccagatccagcataaaagccaagcttcagccgaagca

SEQ ID NO: 722783 - DNA, 75 bp, synthetic construct
  source 1..75: mol_type = other DNA
catcctgtcgtttttatcgtggagttttactgttctggtgatcagccgtattggcgtagctttcgctcatgctat

SEQ ID NO: 722784 - DNA, 75 bp, synthetic construct
  source 1..75: mol_type = other DNA
actggtcaatgtcgatgattggttatgtgggcgcggtgcctgcttttgccgcgttaatatggtcaatcatcattt

SEQ ID NO: 722785 - DNA, 75 bp, synthetic construct
  source 1..75: mol_type = other DNA
tggtatgcaggttaaagtgctggcgctggccagtgacactcgaagaacagacgcaatagttgaaaggcccattcg

SEQ ID NO: 722786 - DNA, 75 bp, synthetic construct
  source 1..75: mol_type = other DNA
tccgctgctgagccagcaggcattcagccgcttcgtgcaggactacctggtgtttggtaatgcctatctggagaa

SEQ ID NO: 722787 - DNA, 75 bp, synthetic construct
  source 1..75: mol_type = other DNA
catcagactggaaacctcaccggcaaaatatacccgccgtggcgtggaagaggatgtttactggtgggtgccgtc

SEQ ID NO: 722788 - DNA, 75 bp, synthetic construct
  source 1..75: mol_type = other DNA
atgattggttatgtgggcgcagttccggcactcgccgcgttgatatggtcaattatcatattccgccgctggcct

SEQ ID NO: 722789 - DNA, 75 bp, synthetic construct
  source 1..75: mol_type = other DNA
gaccggcagtgagcagaactggcgtggtttcacccgttccgtgctctccatgctgacagagatttttctgaagca

SEQ ID NO: 722790 - DNA, 75 bp, synthetic construct
  source 1..75: mol_type = other DNA
aaaaagccgggatttccgtcgggcagtataaagcggccatgcgaaccctgcccgcacagtttacggatatcgcca

SEQ ID NO: 722791 - DNA, 75 bp, synthetic construct
  source 1..75: mol_type = other DNA
gaacttccatttcgcgaccgggggatttacggggacggggggtaaatatgaacctgcgggaattgttcatcgcgg

SEQ ID NO: 722792 - DNA, 75 bp, synthetic construct
  source 1..75: mol_type = other DNA
gcacaaaaagccgggatttccgtcgggcagtataaagcggccatgcgaaccctgcccgcacagtttacggatatc

SEQ ID NO: 722793 - DNA, 75 bp, synthetic construct
  source 1..75: mol_type = other DNA
tcacccgttctgtgctgtccatgctgacagagatttttctgaagcaggcgatggtggggatagtcgggagtatcg

SEQ ID NO: 722794 - DNA, 75 bp, synthetic construct
  source 1..75: mol_type = other DNA
tgatgttaatcgtcgtctgtgtgacgattctgtgttttgtctggatggtgagggattcgctttgcggattccggc

SEQ ID NO: 722795 - DNA, 75 bp, synthetic construct
  source 1..75: mol_type = other DNA
atcagccagcagcgccgtgatttatggaaggcggaaagccagtatgccgtgttacatgaaaagctgcttgtggat

SEQ ID NO: 722796 - DNA, 75 bp, synthetic construct
  source 1..75: mol_type = other DNA
ggccttgcaggcggcgaacgatatcgccacgaaaggctttgatgagcagacccgtcgcctgaaagaaaacatggg

SEQ ID NO: 722797 - DNA, 75 bp, synthetic construct
  source 1..75: mol_type = other DNA
cagagccggagccagcgccggggaaaaacctcctcttttcgtgccaaccttcagggcgcatgggatgaccgggaa

SEQ ID NO: 722798 - DNA, 75 bp, synthetic construct
  source 1..75: mol_type = other DNA
taagctgatgaatacgattgctcaacgcaaggccgctgaggaaaaagccgctgaggaaaaacgccaggcggagga

SEQ ID NO: 722799 - DNA, 75 bp, synthetic construct
  source 1..75: mol_type = other DNA
gtgatttaccttcagtgcggcgtaaaacccgcaaaacagaaaatgaccgaaattctgtctgatgagttttatgct

SEQ ID NO: 722800 - DNA, 75 bp, synthetic construct
  source 1..75: mol_type = other DNA
aaacccgcaaaacagaaaatgaccgaaatactgtctgatgagttttatgctgctgaaaagcgagtcagggggtga

SEQ ID NO: 722801 - DNA, 75 bp, synthetic construct
  source 1..75: mol_type = other DNA
acagcataacgattaatgatacacgtacaggtaaccagtatcagcggaaactggatcgtaccacctgtggaatag

SEQ ID NO: 722802 - DNA, 75 bp, synthetic construct
  source 1..75: mol_type = other DNA
gcttcattgatgatgcgctggcaacggcagcaaacaaaatcagtgataataacaataataacagcattaaagttg

SEQ ID NO: 722803 - DNA, 75 bp, synthetic construct
  source 1..75: mol_type = other DNA
gtctgggggctgcgggtattccggcatgggttgatttgcatttctggcagcgttttggcaatgcgatcatgctta

SEQ ID NO: 722804 - DNA, 75 bp, synthetic construct
  source 1..75: mol_type = other DNA
gaagcttccggtgctcagaacatccagctggtgctgtctactgacaacgctaccgcgctgaccaacaaaatcatc

SEQ ID NO: 722805 - DNA, 75 bp, synthetic construct
  source 1..75: mol_type = other DNA
cggtaggtctgggttacggcgtcagaaaatttgttggcggcaatacagatataccccactggtcaattgatggac

SEQ ID NO: 722806 - DNA, 75 bp, synthetic construct
  source 1..75: mol_type = other DNA
atgaatgcccagcttcaggcggtaggtctgggttacggcgtcagaaaatttgtaggcggaaatacagatataccc

SEQ ID NO: 722807 - DNA, 75 bp, synthetic construct
  source 1..75: mol_type = other DNA
tgctttaagggactgcgttttacggaggacaaatatccttttcatcgcgacttatggcgaaaaccgactgcgtcg

SEQ ID NO: 722808 - DNA, 75 bp, synthetic construct
  source 1..75: mol_type = other DNA
aagggcgctggtgaacaaccctaaaatacttatttttgatgaagcaaccagtgctctggattatgagtcggagca

SEQ ID NO: 722809 - DNA, 75 bp, synthetic construct
  source 1..75: mol_type = other DNA
caaagatgatccggcgcaaagtcagcagcgtctggaggcactggcggcgcaagatccactgaagtttgaaaagga

SEQ ID NO: 722810 - DNA, 75 bp, synthetic construct
  source 1..75: mol_type = other DNA
tgccgcctaatatttctgtaaaagccaaggataataagtctggcgtagctgctgcatatcttcagggggtggtca

SEQ ID NO: 722811 - DNA, 75 bp, synthetic construct
  source 1..75: mol_type = other DNA
ttagtgccagtgatagtaatggccgaaaattaaattttcaaataaccagacagtatgggaacttacagaccatcc

SEQ ID NO: 722812 - DNA, 75 bp, synthetic construct
  source 1..75: mol_type = other DNA
tggtgtaccgtcgtgcagtcgcggggctgaatgtgtcagggctgaagaaaaacgcgcgggatataagcctgctga

SEQ ID NO: 722813 - DNA, 75 bp, synthetic construct
  source 1..75: mol_type = other DNA
ctgtggaggtctgaataagcatggtcagtggaaaaagctgagcttcctgaaagacgcgatgcgttcacggtggat

SEQ ID NO: 722814 - DNA, 75 bp, synthetic construct
  source 1..75: mol_type = other DNA
ctgccggatggtataccgccgggccattgcggggctgaatgtatcagggctgaagaaaaacgcgcgggatatcag

SEQ ID NO: 722815 - DNA, 75 bp, synthetic construct
  source 1..75: mol_type = other DNA
acgaagagtttatctatctgtctggcggcattcttgaagtgcagcctggcaacgtgaccgttctggccgacaccg

SEQ ID NO: 722816 - DNA, 75 bp, synthetic construct
  source 1..75: mol_type = other DNA
acgtatggccgtcgtctcaactggcatccgcatgtacatgtgtctgtaacctgtggaggtctgaataagcatggt

SEQ ID NO: 722817 - DNA, 75 bp, synthetic construct
  source 1..75: mol_type = other DNA
atagccacactggtacgtgcttcggtgacccacaagcgattccgggccgaggtgctggcaaaaattgaggcgcgg

SEQ ID NO: 722818 - DNA, 75 bp, synthetic construct
  source 1..75: mol_type = other DNA
cgcaaagcagcggcacgacggtaaaaatgaccatcatcagcgaagcgggtgctcagaccacgcagacgcctgacg

SEQ ID NO: 722819 - DNA, 75 bp, synthetic construct
  source 1..75: mol_type = other DNA
aatgacattgataatatagagttagctaatagagatgtagtgctatcatttatgcttacatcctattattgtttt

SEQ ID NO: 722820 - DNA, 75 bp, synthetic construct
  source 1..75: mol_type = other DNA
cggagaagttttttaagatggtgaggtacttcgggttccttgccaaccgggtgtgtggagagaagctgccgcagg

SEQ ID NO: 722821 - DNA, 75 bp, synthetic construct
  source 1..75: mol_type = other DNA
aacttgtaaaaaccccacaaccataaccacttcctatccaggaattgaatggaaacttgagggtatgcagtgtga

SEQ ID NO: 722822 - DNA, 75 bp, synthetic construct
  source 1..75: mol_type = other DNA
ggcatgtgtacatgtcgaaaaaaacggccggcgggaggaatacggcgcgctacctgggtcgttatctgaagaagc

SEQ ID NO: 722823 - DNA, 75 bp, synthetic construct
  source 1..75: mol_type = other DNA
atcatcggtgtattaacgctaacgggtattgcggtggggttggttatccgtttcagccagggtcatgccggacca

SEQ ID NO: 722824 - DNA, 75 bp, synthetic construct
  source 1..75: mol_type = other DNA
cccgacgcgggttagacctagatacctactggtttgtgcaatacggtatgacaacccagccatatcagttcacga

SEQ ID NO: 722825 - DNA, 75 bp, synthetic construct
  source 1..75: mol_type = other DNA
atttctgaacatcaagaacgtcagccgtgatgacatgatggcggcacaccgcgtaccgcctcagatgatgggaat

SEQ ID NO: 722826 - DNA, 75 bp, synthetic construct
  source 1..75: mol_type = other DNA
tacctactggtttgtgcaagacggtatgacagcccagccgtatcagttcacgaaaggcaacatttttcatctgat

SEQ ID NO: 722827 - DNA, 75 bp, synthetic construct
  source 1..75: mol_type = other DNA
tttacaaaaaagactgatggaagtaaatgtctggctcaatgaagaagtgattgtattcaatagatacattttaga

SEQ ID NO: 722828 - DNA, 75 bp, synthetic construct
  source 1..75: mol_type = other DNA
tctttgttcgtaatgaactgattcctttacaaaaaagactgatggaagtaaatgtctggctcaatgaagaagtga

SEQ ID NO: 722829 - DNA, 75 bp, synthetic construct
  source 1..75: mol_type = other DNA
actgcaaaagcggctgcaagagctgaacaactggctaggtgaaaaagtgatttgttttgaatcttacaacttaga

SEQ ID NO: 722830 - DNA, 75 bp, synthetic construct
  source 1..75: mol_type = other DNA
tatcagaagtcgcggcgaaggatgagtttctgaacatcaagaacgtgagccgggatgacatgatggcagcgcacc

SEQ ID NO: 722831 - DNA, 75 bp, synthetic construct
  source 1..75: mol_type = other DNA
aatgcctaataatgttggagggtttggggatgtggagaaggcgagtaaggtttttgttagaaatgaactaattcc

SEQ ID NO: 722832 - DNA, 75 bp, synthetic construct
  source 1..75: mol_type = other DNA
cgccgccgtgcaccacagctcaccgattgcagtgaagtgcaacattctgaccagcacctacatccctcacccgct

SEQ ID NO: 722833 - DNA, 75 bp, synthetic construct
  source 1..75: mol_type = other DNA
tgtcagaggtcgcagcaaaggatgagtttctaaacatcaagaacgtgagccgggatgacatgatggcggcgcacc

SEQ ID NO: 722834 - DNA, 75 bp, synthetic construct
  source 1..75: mol_type = other DNA
aaaaaggacgggcttcagatcatcccgttgtcagaagtcgcagcgaaagatgaatttctgaacatcaagaacgtg

SEQ ID NO: 722835 - DNA, 75 bp, synthetic construct
  source 1..75: mol_type = other DNA
accaggcaatggcccaacagcagaggctttcagctttggcgatcctgttcctgttctggaccgccgcgaactgct

SEQ ID NO: 722836 - DNA, 75 bp, synthetic construct
  source 1..75: mol_type = other DNA
tatttgttaaaaatgagttaacagtattacaaaaaaaaatactggaactgaacacttggttagatgatgatgtaa

SEQ ID NO: 722837 - DNA, 75 bp, synthetic construct
  source 1..75: mol_type = other DNA
gtgctctggattatgagtcggagcatatcatcatgcgcaatatgcacaaaatatgtaagggcagaacggttataa

SEQ ID NO: 722838 - DNA, 75 bp, synthetic construct
  source 1..75: mol_type = other DNA
gtgctgagaatgtgaaggcctattttgagcctaatgcgaccactgattatgatagtcataaccttaatattgcaa

SEQ ID NO: 722839 - DNA, 75 bp, synthetic construct
  source 1..75: mol_type = other DNA
gagctcaaagtgtgaaggcttattttgagcctaatgcgaccactgattatgatagccataaccttaatatttcaa

SEQ ID NO: 722840 - DNA, 75 bp, synthetic construct
  source 1..75: mol_type = other DNA
taaatccatggcagtatcgccacaaatgattgctacatgggataaacaactggccgggtatgttgcttccagttt

SEQ ID NO: 722841 - DNA, 75 bp, synthetic construct
  source 1..75: mol_type = other DNA
ttgcagatccagaatggttacgacgccagattggtgttgtattgcaggaaaacatactattaaatcgtagtatta

SEQ ID NO: 722842 - DNA, 75 bp, synthetic construct
  source 1..75: mol_type = other DNA
caggtggttatggacaaagtattagtacacagggggttttcaacccttaatgttattactgtcgcattatctgtt

SEQ ID NO: 722843 - DNA, 75 bp, synthetic construct
  source 1..75: mol_type = other DNA
tgtcagaagtcgcagcgaaggatgagtttctgaatatcaaaaacgtgagccgtgacgacatgatggctgcgcacc

SEQ ID NO: 722844 - DNA, 75 bp, synthetic construct
  source 1..75: mol_type = other DNA
cgggacgacatgatggcggcgcatcgtgtgccgccgcaaatgatgggtatcattcccaacaacactggtggcttc

SEQ ID NO: 722845 - DNA, 75 bp, synthetic construct
  source 1..75: mol_type = other DNA
gccactgcaaaagcgactgcaggagctgaacgactggctgggtgaagaagtgatccgtttcgaagcctatgactt

SEQ ID NO: 722846 - DNA, 75 bp, synthetic construct
  source 1..75: mol_type = other DNA
catggactttgacttgatgtatttgtcggaattggacccaacatggctgaacgatgaactggccttttttactca

SEQ ID NO: 722847 - DNA, 75 bp, synthetic construct
  source 1..75: mol_type = other DNA
tgcttgtgtgaagacaacttaggcgtgccaaggccaggtattgttaccagcatgtgggagccagcgcgtctgatt

SEQ ID NO: 722848 - DNA, 75 bp, synthetic construct
  source 1..75: mol_type = other DNA
ccatccgtaagccgttctctgaaatatgggtgagcttcaacccgaaaaacatcctcgacgatacctatcagcgat

SEQ ID NO: 722849 - DNA, 75 bp, synthetic construct
  source 1..75: mol_type = other DNA
catggcccgcaagggggcgcaggatgagctccggctgcagttgcgtgatggcggtatgttatcagggagcggacg

SEQ ID NO: 722850 - DNA, 75 bp, synthetic construct
  source 1..75: mol_type = other DNA
gtgtatgacatggcccgcaagggggcgcaggatgagattcaggcgcagatgcgtgatggcggcgtcttttccgga

SEQ ID NO: 722851 - DNA, 75 bp, synthetic construct
  source 1..75: mol_type = other DNA
ttctaccgtggtctgaatgtcagcgaagcttccgtactggttacgcgcgcttctgatcacaatccgctactcgtt

SEQ ID NO: 722852 - DNA, 75 bp, synthetic construct
  source 1..75: mol_type = other DNA
tgcagcgttccggtgatgaggccggggccttacaggcggcgaacgatgctgccacgaaaggctttgatgagcaga

SEQ ID NO: 722853 - DNA, 75 bp, synthetic construct
  source 1..75: mol_type = other DNA
ccagggccggagccagcgccgcggtaaaaccgcctctttccgggccaaccttcagggcgcatgggatgaccggga

SEQ ID NO: 722854 - DNA, 75 bp, synthetic construct
  source 1..75: mol_type = other DNA
tgcgaaaaaacacctatgccatgcgctatgttgccggacaacctgcggaaaggatcttaccgccggggtcttttg

SEQ ID NO: 722855 - DNA, 75 bp, synthetic construct
  source 1..75: mol_type = other DNA
atgctgaataatgtttatcttggcggaattgataacccaacgtcgcggcgttatgccgtcatcaccgcctataac

SEQ ID NO: 722856 - DNA, 75 bp, synthetic construct
  source 1..75: mol_type = other DNA
atgctgaacaatgtttatctcggcggaattgataacccaacatcccggcgttatgccgtcatcaccgcctataac

SEQ ID NO: 722857 - DNA, 75 bp, synthetic construct
  source 1..75: mol_type = other DNA
ctggcgaaatcggcactggtgacggtctatccattacctgacacccgcctgttgatggtagtcaatatccatgcg

SEQ ID NO: 722858 - DNA, 75 bp, synthetic construct
  source 1..75: mol_type = other DNA
atttggccgcccgctcgattttgtcttctaccgaggtttgaacgtcagcgaagcttctgtactggtgactcgcgc

SEQ ID NO: 722859 - DNA, 75 bp, synthetic construct
  source 1..75: mol_type = other DNA
tttatccattgccagacacacgtctattgatggtagtaaatattcatgcagttaatttcagtctgggtgtagatg

SEQ ID NO: 722860 - DNA, 75 bp, synthetic construct
  source 1..75: mol_type = other DNA
gtgtttatctcttacggacaaaccttgatgccgcttttgacgacaatggccaacagacaaatccgctgacagtac

SEQ ID NO: 722861 - DNA, 75 bp, synthetic construct
  source 1..75: mol_type = other DNA
cgatgacggtaaggtacgtgcgctggcagcggcattgggcggcggtttctggacatggtggttctggcttggcgt

SEQ ID NO: 722862 - DNA, 75 bp, synthetic construct
  source 1..75: mol_type = other DNA
acatgatttgcttgccctgcaacaacgctggttgccgaagttggggatcgtgcaaaaggttctgagcctgctgac

SEQ ID NO: 722863 - DNA, 75 bp, synthetic construct
  source 1..75: mol_type = other DNA
acgttgctgcgcaccacgctgattgtcgggcctggcgcggtgatcctcggtctgttgatcctcgtcttccacctg

SEQ ID NO: 722864 - DNA, 75 bp, synthetic construct
  source 1..75: mol_type = other DNA
acaccgtatggaaatccccgtggtatggggtgaaatcttcctgctggtggcgttttttgtcggtctggcgctggg

SEQ ID NO: 722865 - DNA, 75 bp, synthetic construct
  source 1..75: mol_type = other DNA
gtgccggaagtccggcgcagatgcggcggacggaaggcattaattttaatcagaacaatcacgtggtgattcaga

SEQ ID NO: 722866 - DNA, 75 bp, synthetic construct
  source 1..75: mol_type = other DNA
gtgcggtttgaagagcagcagagcgcgaagcaggccgccatcagcgcaaaagcccgcggtctcactgaccgtcag

SEQ ID NO: 722867 - DNA, 75 bp, synthetic construct
  source 1..75: mol_type = other DNA
ttacgggaaccggtggcaaatacgaacctgccggtattgtccaccgcggggagtttgtcttcacgaaggaggcaa

SEQ ID NO: 722868 - DNA, 75 bp, synthetic construct
  source 1..75: mol_type = other DNA
acctgccggtattgtccaccgcggggagtttgtcttcacgaaggaggcaaccagccggattggcgtcggcaacct

SEQ ID NO: 722869 - DNA, 75 bp, synthetic construct
  source 1..75: mol_type = other DNA
aaatcagccagcagcgccgggatttatggaaagcggaaaatcagtatgtggtcctgaaagaggccgccacgaaac

SEQ ID NO: 722870 - DNA, 75 bp, synthetic construct
  source 1..75: mol_type = other DNA
tcatgtaaaaatcgctaatacactacgggaaattcaactaccttgggttgtgtcttatgacaatgtgcctgaaat

SEQ ID NO: 722871 - DNA, 75 bp, synthetic construct
  source 1..75: mol_type = other DNA
gtgcagctcgacatcctcggtctgtggatcggacgcagtcgcatagtcagccagccaattagcggagtttatttc

SEQ ID NO: 722872 - DNA, 75 bp, synthetic construct
  source 1..75: mol_type = other DNA
tcgccaccttcaaccttgccgatactgccatttgtgtcggtgcggcgttgatcgtgctggaagggtttttacctt

SEQ ID NO: 722873 - DNA, 75 bp, synthetic construct
  source 1..75: mol_type = other DNA
gtggtggtgaacagtttgatgccatcaaccagagtgtcgcgcgttttgcttctgcatccggtgtggaggtggaca

SEQ ID NO: 722874 - DNA, 75 bp, synthetic construct
  source 1..75: mol_type = other DNA
tttcggtggtggtgcgtctgcctccacggggacggccattcaggctgcggcggcgaacttccatttcgcgaccgg

SEQ ID NO: 722875 - DNA, 75 bp, synthetic construct
  source 1..75: mol_type = other DNA
gggcgcgaagcaggcggcaatcagtgcccaggcgcggggcctcaccgaccgtcaggcgcagcgggagtcggaaga

SEQ ID NO: 722876 - DNA, 75 bp, synthetic construct
  source 1..75: mol_type = other DNA
gcgttttcgccaggatctctactatcggctgaacgtggtggcgattgaagtaccgtcgctgcggcaacgacggga

SEQ ID NO: 722877 - DNA, 75 bp, synthetic construct
  source 1..75: mol_type = other DNA
tttctgcagcgctttgccgagcgtaatcgcaaggcggtaaaaggctttacgccacaggcgatggatttgctgatc

SEQ ID NO: 722878 - DNA, 75 bp, synthetic construct
  source 1..75: mol_type = other DNA
cggctgattgcggcgacccatcgcgatcttgccgcagaggtaaaggccgggcgttttcgccaggatctctactat

SEQ ID NO: 722879 - DNA, 75 bp, synthetic construct
  source 1..75: mol_type = other DNA
gtttccttgccgatagcggcggctggcagcgttggttctttgccggtattgcgattggtattagcgtgatcctgg

SEQ ID NO: 722880 - DNA, 75 bp, synthetic construct
  source 1..75: mol_type = other DNA
gcagatagtcgataaccaggacatgacgatatcggtctggggctttcctgatactgatatttcagatgtatcgcg

SEQ ID NO: 722881 - DNA, 75 bp, synthetic construct
  source 1..75: mol_type = other DNA
atttcgataacctgcaggcgacgctggaaaaggcgctcgcacatacgcacagtgttgacgctgaaacgcctgcgg

SEQ ID NO: 722882 - DNA, 75 bp, synthetic construct
  source 1..75: mol_type = other DNA
acatggcccgcaagggggcgcaggatgagctccggctgcagttgcgtgatggcggtatgttatcagggagcggac

SEQ ID NO: 722883 - DNA, 75 bp, synthetic construct
  source 1..75: mol_type = other DNA
tcgcgcgttttgcttctgcatccggtgtggaggtggacaaggttgcagaggctttcggaaaactgactaccgacc

SEQ ID NO: 722884 - DNA, 75 bp, synthetic construct
  source 1..75: mol_type = other DNA
tggttatgtgggcggtgccggaagtccggcgcagatgcggcgggctgaaggcattaattttaatcagaacaatca

SEQ ID NO: 722885 - DNA, 75 bp, synthetic construct
  source 1..75: mol_type = other DNA
aaggtggttatgtcggcggtgccggaagtccggcgcagatgcggcgggcggaaggcattaattttaatcagaaca

SEQ ID NO: 722886 - DNA, 75 bp, synthetic construct
  source 1..75: mol_type = other DNA
atgaatatgatgatctcatatcaggaacttgttcgcaccttccctaacctaatgggcaataaagaaaaggcggat

SEQ ID NO: 722887 - DNA, 75 bp, synthetic construct
  source 1..75: mol_type = other DNA
aaaggtcagccagtccttaaaaaaaccggcagaggtgattgaacagagtctgagccgtcaggctgttgccgcgca

SEQ ID NO: 722888 - DNA, 75 bp, synthetic construct
  source 1..75: mol_type = other DNA
caatcacgtggtgattcagaacgacggcaccaacggacaggcggggccgcagctgatgaaggcggtgtatgacat

SEQ ID NO: 722889 - DNA, 75 bp, synthetic construct
  source 1..75: mol_type = other DNA
agcagcagcgggcaaaacaggctgccatcagagcaaaggaacgtggactgacggacaggcaggcacagcgggagt

SEQ ID NO: 722890 - DNA, 75 bp, synthetic construct
  source 1..75: mol_type = other DNA
tgtcgggagtatcggtagtgccattgggtttgccggtggtggttttacaggtactggcggcaaatacgagcctgc

SEQ ID NO: 722891 - DNA, 75 bp, synthetic construct
  source 1..75: mol_type = other DNA
aaagtgcgatggacagtttttcgcaggtgaaaagtgctgcaacgcagacctttgatggtattgcacagaatatgg

SEQ ID NO: 722892 - DNA, 75 bp, synthetic construct
  source 1..75: mol_type = other DNA
cgacattttgcaaatacagcagcttttatctgccctcattcaacgtcttacgcgtgagacagttgttcaactgac

SEQ ID NO: 722893 - DNA, 75 bp, synthetic construct
  source 1..75: mol_type = other DNA
gatatgttcagcaacggcggcacggacggcggagcggtgcacttaaccggtactggcgtacccacagtggtaatg

SEQ ID NO: 722894 - DNA, 75 bp, synthetic construct
  source 1..75: mol_type = other DNA
ttggcaacgtgcgcatggctgcccgacagcttcagccggtgcgcatcaccacccgtgaagagtgcaaaatacctg

SEQ ID NO: 722895 - DNA, 75 bp, synthetic construct
  source 1..75: mol_type = other DNA
ttgggcacgactccaacattgcctctctgttaacggcgctggatttcaaaccgtatcagttgcatgaccagaacg

SEQ ID NO: 722896 - DNA, 75 bp, synthetic construct
  source 1..75: mol_type = other DNA
gggcactatggacccaacgtttaacccggtaatcaccgacgattctgccgcctttagtgagcaggcggtggcggc

SEQ ID NO: 722897 - DNA, 75 bp, synthetic construct
  source 1..75: mol_type = other DNA
gaatgccggtgtgcgtggtggtgagcagtttgaggcaatcagccagagtgtggcgcgtttctcctctgcatccgg

SEQ ID NO: 722898 - DNA, 75 bp, synthetic construct
  source 1..75: mol_type = other DNA
cagttcaggccagcggtcgttgagagcgtcgcacgagggacatccgttcgtatgggaacgttggatcccctgggg

SEQ ID NO: 722899 - DNA, 75 bp, synthetic construct
  source 1..75: mol_type = other DNA
atgaaatgttataatatcacacttctcatattcattacgatgattggtcgcattatgttacataaaaaaacgctt

SEQ ID NO: 722900 - DNA, 75 bp, synthetic construct
  source 1..75: mol_type = other DNA
ccgcgtggattgaaaccgtggcggcagaaattggcgtgccgttgcaggcggatatgttcagcaacggcggcacgg

SEQ ID NO: 722901 - DNA, 75 bp, synthetic construct
  source 1..75: mol_type = other DNA
gaaacaggtaacgattgcgcagctagaagatgtgaaaccgctgctgatgaaaagtattcacggcgatgatgatga

SEQ ID NO: 722902 - DNA, 75 bp, synthetic construct
  source 1..75: mol_type = other DNA
acccggtgatcaccgatgattccgccgcattcagtgaacaggcggtggcggcaatggagaaagagctcagcaaac

SEQ ID NO: 722903 - DNA, 75 bp, synthetic construct
  source 1..75: mol_type = other DNA
gcgctgaaggcggtttatgacgtagcccgtaaggcggcaatggatgttgtgaccgggcagatgcgtgatggtggt

SEQ ID NO: 722904 - DNA, 75 bp, synthetic construct
  source 1..75: mol_type = other DNA
acatggcccgcaagggggcgcaggatgagctccggctgcagttgcgtgatggcggtatgttatcggggagcgggc

SEQ ID NO: 722905 - DNA, 75 bp, synthetic construct
  source 1..75: mol_type = other DNA
gtattaagcaacaggtcgatgcttcgcgttcgatggtgatagggcataccggcgacaaaatttttaatagcatta

SEQ ID NO: 722906 - DNA, 75 bp, synthetic construct
  source 1..75: mol_type = other DNA
tgcagcgttccggagacgaggccgggcattgcaggcggcgaacgatatcgccacgaaaggctttgatgagcagac

SEQ ID NO: 722907 - DNA, 75 bp, synthetic construct
  source 1..75: mol_type = other DNA
caggctgcggcggcgaacttccatttcgcgaccgggggatttacggggacggggggtaaatatgaacctgcggga

SEQ ID NO: 722908 - DNA, 75 bp, synthetic construct
  source 1..75: mol_type = other DNA
tgacgctggaattaaccggttgcccgatagacgctgatggtttttgcccgatagataaatttgatagcgtgttga

SEQ ID NO: 722909 - DNA, 75 bp, synthetic construct
  source 1..75: mol_type = other DNA
cacgactccaacattgcctctctgttaacggcgctggatttcaaaccgtatcagttgcatgaccagaacgaacgc

SEQ ID NO: 722910 - DNA, 75 bp, synthetic construct
  source 1..75: mol_type = other DNA
aaaaattgtctacgccagcaatggcaccttgagtgatgatgaccgggcgtcgttggcaaccgatatccagggtat

SEQ ID NO: 722911 - DNA, 75 bp, synthetic construct
  source 1..75: mol_type = other DNA
gtggcctgaaaaactcgctgaataatgtgctcaccgtacgcgcggaattaggtacgcagctgaacgagctggagt

SEQ ID NO: 722912 - DNA, 75 bp, synthetic construct
  source 1..75: mol_type = other DNA
tagtgaagcggatcaagaaacctccgctgcggcgttagataaaaccaaccgtggcctgaaaaactcgctgaataa

SEQ ID NO: 722913 - DNA, 75 bp, synthetic construct
  source 1..75: mol_type = other DNA
gaaaaagccgaagtcgtcaggcgtcaaagtgtcagccggtgagcgtcaggaagaccagtcgcatgccgcactgct

SEQ ID NO: 722914 - DNA, 75 bp, synthetic construct
  source 1..75: mol_type = other DNA
ccggtggtcagaatcccttccttatcatgctgcagcaggggggcagatcagcgattcattcggtggaccgctcag

SEQ ID NO: 722915 - DNA, 75 bp, synthetic construct
  source 1..75: mol_type = other DNA
gtcagccggtgagcgtcaggaagaccaggcgcatgctgccctgctggcgcttgaaaccgagctcaggacgctgga

SEQ ID NO: 722916 - DNA, 75 bp, synthetic construct
  source 1..75: mol_type = other DNA
ggacgatttatgtcggtggcccgtggtggccggcaggtggcggggtttgccgtactggccgcgcttgctgccgcc

SEQ ID NO: 722917 - DNA, 75 bp, synthetic construct
  source 1..75: mol_type = other DNA
tggcgcgttttgcttctgcatccggtgtggaagtggacaaggttgcagaggcttttggaaagctgaccaccgacc

SEQ ID NO: 722918 - DNA, 75 bp, synthetic construct
  source 1..75: mol_type = other DNA
gcagcgccttcgtgaggtgtacggtgataatccggctgcgctggcgaaggccacatcggcactgaagaacacctg

SEQ ID NO: 722919 - DNA, 75 bp, synthetic construct
  source 1..75: mol_type = other DNA
ttattgacctgagtctggatgctgtccgtttcgatgagcagatgagccgggtaaggcgtcatttttcaggcctgg

SEQ ID NO: 722920 - DNA, 75 bp, synthetic construct
  source 1..75: mol_type = other DNA
ggccctcaggtactgttctgggtaaagccaagcttgtggtgaatgatcaatactggatacaaaatacgaaaaccg

SEQ ID NO: 722921 - DNA, 75 bp, synthetic construct
  source 1..75: mol_type = other DNA
gacgctggaaacctgggcggataaaaccgggaaggcattcaaattgatgtgggatgccatcctggatatcggtcg

SEQ ID NO: 722922 - DNA, 75 bp, synthetic construct
  source 1..75: mol_type = other DNA
aaatgcccgtctggggctggcggcagccacgctgcagtcggatatggaaaaagccggtgaactggtggcaaggga

SEQ ID NO: 722923 - DNA, 75 bp, synthetic construct
  source 1..75: mol_type = other DNA
gaaaaagccgaagtcgtcaggcgttaaagtgtcagccggtgagcgtcaggaagaccaggcgcatgccgcgctgct

SEQ ID NO: 722924 - DNA, 75 bp, synthetic construct
  source 1..75: mol_type = other DNA
gaaaaagccgaagtcgtcaggcgtaaaagtgtcagccggtgagcgtcaggaagaccaggcgcatgccgctctgct

SEQ ID NO: 722925 - DNA, 75 bp, synthetic construct
  source 1..75: mol_type = other DNA
gctgcagcgttccggagacgaggccggtgccttacaggcggcgaacgatattgccacgaaaggctttgatgagca

SEQ ID NO: 722926 - DNA, 75 bp, synthetic construct
  source 1..75: mol_type = other DNA
aatatggcagcgatgctgaccggcagcgaacagaactggcgtggtttcacccgttctgtgctctccatgctgaca

SEQ ID NO: 722927 - DNA, 75 bp, synthetic construct
  source 1..75: mol_type = other DNA
tccggggggcatgggagaagagagagaatgcgcgacttgggctttcagccgccacgttgcaggccgatcttgaaa

SEQ ID NO: 722928 - DNA, 75 bp, synthetic construct
  source 1..75: mol_type = other DNA
cacagatgatgaaggcagtgtatgacatggcccgcaagggtgcccgtgatgaaattcaggcacagatgcgcgatg

SEQ ID NO: 722929 - DNA, 75 bp, synthetic construct
  source 1..75: mol_type = other DNA
cgtggttgattacttcaaagcgggcaataccattacggatgaacagatcaacggtatgcgcgtgaaagatatcaa

SEQ ID NO: 722930 - DNA, 75 bp, synthetic construct
  source 1..75: mol_type = other DNA
gacaaaaaagaagagcgctatggcctgaactggcatggtaaacgtcaggcttgccagcttgctctcaccccttcc

SEQ ID NO: 722931 - DNA, 75 bp, synthetic construct
  source 1..75: mol_type = other DNA
gctggctgtagatattgtcaacggtacgctgcaaagcccggtagcgcaaagggttcacgatgcgctactggcggg

SEQ ID NO: 722932 - DNA, 75 bp, synthetic construct
  source 1..75: mol_type = other DNA
cgctaaccaacgtctgggggcagaagtcatgagccagcgtatccgtgaaatgtctgataacgatccgcgcgtggt

SEQ ID NO: 722933 - DNA, 75 bp, synthetic construct
  source 1..75: mol_type = other DNA
atactgctttgagctgggaattgttgatggcgatgctgaaatgagcgcgttgaaagcggaaattgcaggctaccg

SEQ ID NO: 722934 - DNA, 75 bp, synthetic construct
  source 1..75: mol_type = other DNA
atgtgtaccccacagcccggttttgacgagcaggtttactatctcacgttgaatagcgacagtcaggggatgagt

SEQ ID NO: 722935 - DNA, 75 bp, synthetic construct
  source 1..75: mol_type = other DNA
taaaaacctcatgatcgaaggtgataaccttgaagtgttgaagcttcttcaaaaaagttatgctggaaaagttaa

SEQ ID NO: 722936 - DNA, 75 bp, synthetic construct
  source 1..75: mol_type = other DNA
tgatgcaaaagaaattgccattcttgagaagacaatttctgctctgcctgagttttctccgtttgcaggtgagat

SEQ ID NO: 722937 - DNA, 75 bp, synthetic construct
  source 1..75: mol_type = other DNA
cctttgcgccgttctccggtgagcttgcacaaatgagtgcaaatatccgcgcccgttatgaagcgtcgccgcgtt

SEQ ID NO: 722938 - DNA, 75 bp, synthetic construct
  source 1..75: mol_type = other DNA
ctggtggttacgtaaccgcgatcacaacggcaacggcgtgccggaatatggcgcgacccgcgacaaagcccacaa

SEQ ID NO: 722939 - DNA, 75 bp, synthetic construct
  source 1..75: mol_type = other DNA
gtcctgctgccgccaggccggctatcagttgatgatcgcctgcacctacagcgacagcgagcacgaaaacagtct

SEQ ID NO: 722940 - DNA, 75 bp, synthetic construct
  source 1..75: mol_type = other DNA
cattggtccggatgaagaagcacagctcaagaaaattgctcaggcgcttcagctaccgctggagcagtacctgtg

SEQ ID NO: 722941 - DNA, 75 bp, synthetic construct
  source 1..75: mol_type = other DNA
gcagtggaggcgaccgtctggggtgcgtattccattgcatatgctgacggcacctgtgacgcgaaagaaatcgcg

SEQ ID NO: 722942 - DNA, 75 bp, synthetic construct
  source 1..75: mol_type = other DNA
cttacctgaaagggctggcggtaacagatacacctgccagcgttggcaccacacggctgcgctttagtagtcggc

SEQ ID NO: 722943 - DNA, 75 bp, synthetic construct
  source 1..75: mol_type = other DNA
aaagttctgcgctcggtgatgccaatcttcatcattccaatcgtcggcacactgattaccgctggcgtcatgatg

SEQ ID NO: 722944 - DNA, 75 bp, synthetic construct
  source 1..75: mol_type = other DNA
ataaaaatgcgtttttccctgtggagcttaaaatcgcttatcaggaatccggtgaatggcccgatgatggaatcg

SEQ ID NO: 722945 - DNA, 75 bp, synthetic construct
  source 1..75: mol_type = other DNA
aaagaaattggcgctgacagttcaggacggccaatatggattaattccccgccgccttcaaaagaggatgagatg

SEQ ID NO: 722946 - DNA, 75 bp, synthetic construct
  source 1..75: mol_type = other DNA
cggcgattgtgggcaacttactcgataacgctttcgaagccagtttgcgcagcgatgaagggaataagatcgtcg

SEQ ID NO: 722947 - DNA, 75 bp, synthetic construct
  source 1..75: mol_type = other DNA
ctggcagcgcatatccgtcggcaaatgatgggcatggagccaaagcaaatcgcacgcgtggtccgtcagcaagag

SEQ ID NO: 722948 - DNA, 75 bp, synthetic construct
  source 1..75: mol_type = other DNA
atacaggcaccgcaatgactaagcctcagcgccaggttaactccagtatgattcagttatctggatacgcgttct

SEQ ID NO: 722949 - DNA, 75 bp, synthetic construct
  source 1..75: mol_type = other DNA
ccgaaaatcttcacccaaaaagaattcaatttcaatttgttttaccggatttgaccagtctgataaatctcgctt

SEQ ID NO: 722950 - DNA, 75 bp, synthetic construct
  source 1..75: mol_type = other DNA
acctttttgaaagaccgtgttattcagatgttttctagcgaccaggagttgaataaggttgcatctgaaactgat

SEQ ID NO: 722951 - DNA, 75 bp, synthetic construct
  source 1..75: mol_type = other DNA
tctgcgatttttcttctgttgcggttattgtctgctttggagacgaactggatattacccggttcgtagcctttg

SEQ ID NO: 722952 - DNA, 75 bp, synthetic construct
  source 1..75: mol_type = other DNA
ttttattaatttttacccctttaacttatgctaccggtatcccatgtgccagctgtgcaacggttgagaatgcga

SEQ ID NO: 722953 - DNA, 75 bp, synthetic construct
  source 1..75: mol_type = other DNA
ctggcgagactaaaggcggctccgtacatctggacgcgcaaaccgttgtacgccttaagcaataccgcaacgatc

SEQ ID NO: 722954 - DNA, 75 bp, synthetic construct
  source 1..75: mol_type = other DNA
attaccaggtgtggcgcagattgtcaggcatgccgtaaacgcctggcttaatcagagtggttttgcatcggagag

SEQ ID NO: 722955 - DNA, 75 bp, synthetic construct
  source 1..75: mol_type = other DNA
atctgctgacctccggtgaatcagaatatcaggtgcataaatccctgccggtgcagactgaaatcaacggtaatc

SEQ ID NO: 722956 - DNA, 75 bp, synthetic construct
  source 1..75: mol_type = other DNA
acaggtaattcgtgatgcatggctgatacaccgacacaaagggaccatcagcgcactgcgaagagccgtggagcc

SEQ ID NO: 722957 - DNA, 75 bp, synthetic construct
  source 1..75: mol_type = other DNA
taggtgcaatccggcgtgtggtggagccgctaggctatctaattaacgtaaaggaatggtgggagacaaacgacc

SEQ ID NO: 722958 - DNA, 75 bp, synthetic construct
  source 1..75: mol_type = other DNA
aattcctggaaggcgcagcgcgtcaacctgatctgattcctctgctgcgtattcagttctttatcgttatgggtc

SEQ ID NO: 722959 - DNA, 75 bp, synthetic construct
  source 1..75: mol_type = other DNA
agagcggtgaaattaatgtcgttattcctgcggccgtctttgatggacgagaagttcagccggaccagatgatca

SEQ ID NO: 722960 - DNA, 75 bp, synthetic construct
  source 1..75: mol_type = other DNA
atgaaatttcaggccattgtattagcaagttttcttatcatgccttatgcgttggcagatgaccaggggggatta

SEQ ID NO: 722961 - DNA, 75 bp, synthetic construct
  source 1..75: mol_type = other DNA
accgttgatttcgcaaaaaccatgcacgatggcgcttcggtttcactacgcggtaatttgatttctcacaaagga

SEQ ID NO: 722962 - DNA, 75 bp, synthetic construct
  source 1..75: mol_type = other DNA
acctctgctgaactgcagagcgcagcggcaatggggcaacgattcggggaggcactggcggaaggactgaatatg

SEQ ID NO: 722963 - DNA, 75 bp, synthetic construct
  source 1..75: mol_type = other DNA
tggcggtactgcgcggtggactggctgccgcaggcgcggtgcttcgtgtgctggcatctggtccgctggcgatgc

SEQ ID NO: 722964 - DNA, 75 bp, synthetic construct
  source 1..75: mol_type = other DNA
ttgcggggatgtatgacagcggcggctatatcccgcgcgggcagtttggcatcgtcggtgaaaacgggcctgaaa

SEQ ID NO: 722965 - DNA, 75 bp, synthetic construct
  source 1..75: mol_type = other DNA
gttatgggtctggtggatgctatcccgatgatagctgtaggtctgggtctgtacgtgatgttcgctgtcgcgtag

SEQ ID NO: 722966 - DNA, 75 bp, synthetic construct
  source 1..75: mol_type = other DNA
aatgcaaaactgtacttttaccccggcccggaatccgaacctattctggccgcggctgaatcgtcgttcaggaag

SEQ ID NO: 722967 - DNA, 75 bp, synthetic construct
  source 1..75: mol_type = other DNA
atgaactgtcagaaagtctgggaaaaatcgcccagctctacaaaatccctacccgcaatattgaacagctcggtg

SEQ ID NO: 722968 - DNA, 75 bp, synthetic construct
  source 1..75: mol_type = other DNA
acatagcggcagtctggataagaaaagcgcgccggccgtcgttcgggtcactcatttgcagaaataaaaataaat

SEQ ID NO: 722969 - DNA, 75 bp, synthetic construct
  source 1..75: mol_type = other DNA
gcgtaccggaatatggcgcaacccgcgataaagcccacaatactgagaatggcgagatgctgtttacagtgaaaa

SEQ ID NO: 722970 - DNA, 75 bp, synthetic construct
  source 1..75: mol_type = other DNA
ctcgctattgcaggagtcggtggatcaggccagctatatgtacagcgataaccattatctggcggagatggcgac

SEQ ID NO: 722971 - DNA, 75 bp, synthetic construct
  source 1..75: mol_type = other DNA
agcaaggggctccaaatttctcctggagtgccgcacatttgtatatgttgtataacgattttttccgtaagcagt

SEQ ID NO: 722972 - DNA, 75 bp, synthetic construct
  source 1..75: mol_type = other DNA
atctactggcgcgggcgcgtatgggtggatcagttctggtttggtctgaaaggaatggagcgttacggttatcgc

SEQ ID NO: 722973 - DNA, 75 bp, synthetic construct
  source 1..75: mol_type = other DNA
cgttcttccggcacgccaaaggattaaccgccgatggcccaattcaggagaattacaacccgctcactggcgcgc

SEQ ID NO: 722974 - DNA, 75 bp, synthetic construct
  source 1..75: mol_type = other DNA
gacggaagagtacatcaactttatggccagcaatttcgaccgcctgaccgtctggcaggacggcaagaaagtcga

SEQ ID NO: 722975 - DNA, 75 bp, synthetic construct
  source 1..75: mol_type = other DNA
cccgcaaggccattactgaagtaaagaaaatggagaaccgcgacgcagtggaggcgaccgtctggggggcgtatt

SEQ ID NO: 722976 - DNA, 75 bp, synthetic construct
  source 1..75: mol_type = other DNA
gtaaggctattactgaagtgaagaaaatggagaaccgcgacgcggtggaggcgaccgtctggggcgcgtattcca

SEQ ID NO: 722977 - DNA, 75 bp, synthetic construct
  source 1..75: mol_type = other DNA
gcaatcacctaccttatccatataggtttgcttgatagagttgtgaaaaaatccatagaaaacatacctctagag

SEQ ID NO: 722978 - DNA, 75 bp, synthetic construct
  source 1..75: mol_type = other DNA
gtgcataaatccctgccggtgcagactgaaatcaacggtaatcgctttaccagtaaggcgcatatcaacggttcg

SEQ ID NO: 722979 - DNA, 75 bp, synthetic construct
  source 1..75: mol_type = other DNA
gcgcggtaaagggccggaaggctggtcgccgctgtttaacggtgcggcaacgcaggccaatgccgacgcggtggt

SEQ ID NO: 722980 - DNA, 75 bp, synthetic construct
  source 1..75: mol_type = other DNA
ctcgtaaagctgttatcgaagtcaaaaaaatggagaaccgtgatgcggttgaagccaccgtgtggggcgggtaca

SEQ ID NO: 722981 - DNA, 75 bp, synthetic construct
  source 1..75: mol_type = other DNA
cgatgtgtaaacgtctgggtgcttctggtgtagtaaaactgaacaaacagactattcaggtgattgttggcgcga

SEQ ID NO: 722982 - DNA, 75 bp, synthetic construct
  source 1..75: mol_type = other DNA
tgtttgcagcaatatcgacgatttcagcggcctggttattaaagcccaggggcacgtcgtagcgggtcaaacacc

SEQ ID NO: 722983 - DNA, 75 bp, synthetic construct
  source 1..75: mol_type = other DNA
accaaatgcagtgtctatcgctgagctggtatcgccgatcactggtgatgttgtcgcactggatcaggtgccaga

SEQ ID NO: 722984 - DNA, 75 bp, synthetic construct
  source 1..75: mol_type = other DNA
atgattcacctgttcaaaacctgcatgattaccgccttcattctgaggttaacgtggtctgccccactccgggca

SEQ ID NO: 722985 - DNA, 75 bp, synthetic construct
  source 1..75: mol_type = other DNA
aactgaagaaagtaacggccatcgtgtcagttgccgttatcggttttcaatccccaggactaccatccactgctg

SEQ ID NO: 722986 - DNA, 75 bp, synthetic construct
  source 1..75: mol_type = other DNA
gttacttcgggcagttgctggaagaactggagatttaccaggaaaagttacgcatctggcaagcaccgccgcaag

SEQ ID NO: 722987 - DNA, 75 bp, synthetic construct
  source 1..75: mol_type = other DNA
taaccgttggtccgatattaaactgccggacttcctgagcttcttcggcggcaaacgctttgtgccgattgccac

SEQ ID NO: 722988 - DNA, 75 bp, synthetic construct
  source 1..75: mol_type = other DNA
gactcggtagggcgttacagctccctatcgcggtgctgccggtggcggcactgttgctgcgattcggtcagccag

SEQ ID NO: 722989 - DNA, 75 bp, synthetic construct
  source 1..75: mol_type = other DNA
tgcgttcttcccgcgtaccgacgggcgctaccactcaggatgccgaagtggatgatgcgaaatatggcttcgtcg

SEQ ID NO: 722990 - DNA, 75 bp, synthetic construct
  source 1..75: mol_type = other DNA
attggtgaattcaccaacgcggcgggtgctgtattccacggcgatatcaaccgcttctatgcgggtgacggcacg

SEQ ID NO: 722991 - DNA, 75 bp, synthetic construct
  source 1..75: mol_type = other DNA
ggtattggcggctatttttggttatgtctggccaccggtgcagcacgctattcatgctggtggtgaatggatcgt

SEQ ID NO: 722992 - DNA, 75 bp, synthetic construct
  source 1..75: mol_type = other DNA
tgtggcggtgaaaccgacagataaaatcgtcgtatcaccagccgcagggacaatcgtgaaaatcttcaacaccaa

SEQ ID NO: 722993 - DNA, 75 bp, synthetic construct
  source 1..75: mol_type = other DNA
atgattcaccagttcaaaacctgcattattactggcgtcattctggggttaacgtggtctgccccactccgggca

SEQ ID NO: 722994 - DNA, 75 bp, synthetic construct
  source 1..75: mol_type = other DNA
gggtatatcccgcgcgggcagtttggcatcgtcggtgaaaacgggccggaaattgttaacggcccggcaaatgtg

SEQ ID NO: 722995 - DNA, 75 bp, synthetic construct
  source 1..75: mol_type = other DNA
acggtgcggtggatttcgctgcactggttgaaggtggtgcgcgtatgaatgtcgcaaaccctgacgacagctggg

SEQ ID NO: 722996 - DNA, 75 bp, synthetic construct
  source 1..75: mol_type = other DNA
atgagtgacaataacctgcgtctgcaggtgattctgaatgcggttgacaagctcacccgcccatttcgtgctgca

SEQ ID NO: 722997 - DNA, 75 bp, synthetic construct
  source 1..75: mol_type = other DNA
gtgtttcagtggattggcgacaaagtgcaggcgttgtggggctggtttactgatctgctgatgcccgttaagtcg

SEQ ID NO: 722998 - DNA, 75 bp, synthetic construct
  source 1..75: mol_type = other DNA
gttgctgtgatgtttatgaatcctctggcggtactgcgcggtggactggccgccgcaggcacggtgctgcgagta

SEQ ID NO: 722999 - DNA, 75 bp, synthetic construct
  source 1..75: mol_type = other DNA
atggaagatttcttccagcttctcaaggtgaacgcactgccgcaggacaagcgtctgtctgccatgaccatgttg

SEQ ID NO: 723000 - DNA, 75 bp, synthetic construct
  source 1..75: mol_type = other DNA
atgagtgataataacctgcgcctgcaggtcattcttaatgcggttgacaaactcacccgcccattccgtgctgca

SEQ ID NO: 723001 - DNA, 75 bp, synthetic construct
  source 1..75: mol_type = other DNA
ttatcgccatccttcgcggcatcaaacccgatgaggcacatgcccatgtggcagcgctcattgaagcgggatttg

SEQ ID NO: 723002 - DNA, 75 bp, synthetic construct
  source 1..75: mol_type = other DNA
tactggcgctgcccaacttgggattatcttcaactacatgaaatctcttgacccgcagtcagtcgttcgtgaagg

SEQ ID NO: 723003 - DNA, 75 bp, synthetic construct
  source 1..75: mol_type = other DNA
tcctgaagcgattgaaaagcagatgacgaaggatgcaatgggaactatccagcgtgtgctggagaaggtgaacgc

SEQ ID NO: 723004 - DNA, 75 bp, synthetic construct
  source 1..75: mol_type = other DNA
atgccatcgggtggttttccgtcatggggatatggctttgcggggttgtatgacagcggcgggtatatcccgcgc

SEQ ID NO: 723005 - DNA, 75 bp, synthetic construct
  source 1..75: mol_type = other DNA
cggctgttgtggctgcggttaccgtgggactcggcaccttagcgatggtgttagctgcagtgctggggccgctgg

SEQ ID NO: 723006 - DNA, 75 bp, synthetic construct
  source 1..75: mol_type = other DNA
catgagcgcagacggtcccttcaatctgtataacgcggtagttaccgcagctgataaagcctccgctaatcgtgg

SEQ ID NO: 723007 - DNA, 75 bp, synthetic construct
  source 1..75: mol_type = other DNA
tccggcattatgggcgcacgtaaaagtgcggaagatcgcgctcgcgatatgctctacccggagcgtatttatcag

SEQ ID NO: 723008 - DNA, 75 bp, synthetic construct
  source 1..75: mol_type = other DNA
tcagtcggtgctggtgcgctggtatcacgaaggtctggatgcattcgagcatacctgcccgaccggacgcactat

SEQ ID NO: 723009 - DNA, 75 bp, synthetic construct
  source 1..75: mol_type = other DNA
gcagatgcaagtcgaagaagtaaaagaagaaaatggcttgctgacctatatcggtactcgcctggatactgaaga

SEQ ID NO: 723010 - DNA, 75 bp, synthetic construct
  source 1..75: mol_type = other DNA
tgggagcatccgctgatccgcaacggtctggatctgatcctttctggcgataccggtagcagcacgatttcactg

SEQ ID NO: 723011 - DNA, 75 bp, synthetic construct
  source 1..75: mol_type = other DNA
ttacgacagcgtgtataacgatctgattaactatctggcttcacccgatcaaaccgaaggctttgatgagctgat

SEQ ID NO: 723012 - DNA, 75 bp, synthetic construct
  source 1..75: mol_type = other DNA
tgaccgtatggaccgctttgcgctgcgttatcgcgcgcgtaagtattccagcgaacagttccgtatgccgtacag

SEQ ID NO: 723013 - DNA, 75 bp, synthetic construct
  source 1..75: mol_type = other DNA
aatcagggaaggtgtgacaccagaaaccatgctcaacggtgtgaaacgctatgctgcctgggtgcgtgtctcagg

SEQ ID NO: 723014 - DNA, 75 bp, synthetic construct
  source 1..75: mol_type = other DNA
cgagtggggcgataaatataaatcagaagttgatgttaaaagtcatgacatcatgcttggtatgacttataactt

SEQ ID NO: 723015 - DNA, 75 bp, synthetic construct
  source 1..75: mol_type = other DNA
ttgagcagaagcggatacaacattgctgtggtagatacagatccacaaatgagcctgacgaactggagcaaagca

SEQ ID NO: 723016 - DNA, 75 bp, synthetic construct
  source 1..75: mol_type = other DNA
gacaggtcgatgtcctgtctggccttggtgccatgtctgacaaattcggtaaatccagcgacaaattgacattct

SEQ ID NO: 723017 - DNA, 75 bp, synthetic construct
  source 1..75: mol_type = other DNA
cggcaatctccgaactggaggctgatggctggctgacgcgtcagtcacgccgcaaaggtaaccgtaatacgtcca

SEQ ID NO: 723018 - DNA, 75 bp, synthetic construct
  source 1..75: mol_type = other DNA
atcgtcatttcgaggaatcctggcaacagccagcagcccccggaggtgggcggggcaaaagcctcccgatctcgg

SEQ ID NO: 723019 - DNA, 75 bp, synthetic construct
  source 1..75: mol_type = other DNA
atgaaaaaggttattgctgtttcagcgcttgctatggcgggcgtattttcagcccaggctctggctgataggggt

SEQ ID NO: 723020 - DNA, 75 bp, synthetic construct
  source 1..75: mol_type = other DNA
acgttacatgatgcatataaagcttccgatgagcgtttatatgtcaataagcagaacaaaaacagccgttcatga

SEQ ID NO: 723021 - DNA, 75 bp, synthetic construct
  source 1..75: mol_type = other DNA
atgcggaaaaatataacgaaggaaattttctgagcagatttttaaaattactggcgacgagaatgcggcaaaaaa

SEQ ID NO: 723022 - DNA, 75 bp, synthetic construct
  source 1..75: mol_type = other DNA
ctgcgcgagatgaaaccgcacgcccaattcatcttcgctacccacaacgccaactttccggtgctgggtgatgcg

SEQ ID NO: 723023 - DNA, 75 bp, synthetic construct
  source 1..75: mol_type = other DNA
cattgcagactgcatccactgactgcgacacgattgtggaagctgcggcgctcttaccggcatttgatcaggcag

SEQ ID NO: 723024 - DNA, 75 bp, synthetic construct
  source 1..75: mol_type = other DNA
ttatccattgatattctttactttatcacgtcttcgtggaaaagcgttctgttctggattttgacggcgttaatt

SEQ ID NO: 723025 - DNA, 75 bp, synthetic construct
  source 1..75: mol_type = other DNA
atttacgcgatgaaagaaaacgatacgttacatgatgcgtataaagcttccgatgagcgtttatatgtcaataag

SEQ ID NO: 723026 - DNA, 75 bp, synthetic construct
  source 1..75: mol_type = other DNA
aaaacaggcttttatgtgaccggtaaagcaggtgcttctgttatgtcacttgcagaccagcgtttcctgtcgggt

SEQ ID NO: 723027 - DNA, 75 bp, synthetic construct
  source 1..75: mol_type = other DNA
cgagtggggcgataaatataaatcagaggttgatgttaaaagtcatgacatcatgcttggtgtgacttataactt

SEQ ID NO: 723028 - DNA, 75 bp, synthetic construct
  source 1..75: mol_type = other DNA
aaggagtgtccgttaaactcaggctacctcatgttttcgacccaggctctggctgatgaaagcaaaacaggcttt

SEQ ID NO: 723029 - DNA, 75 bp, synthetic construct
  source 1..75: mol_type = other DNA
caaaaaatcggatttatggatgaggagttgtttatagatttcgttgacattgaatggtgcgaacgcgcgaagaaa

SEQ ID NO: 723030 - DNA, 75 bp, synthetic construct
  source 1..75: mol_type = other DNA
actctgatgctgaatacgtactatgacttccggaacgacagtgcattcacaccatgggtatccgcagggattggt

SEQ ID NO: 723031 - DNA, 75 bp, synthetic construct
  source 1..75: mol_type = other DNA
atttccggaacgacagtgcattcacaccatgggtatccgcagggattggttacgccagaattcaccagaaagcaa

SEQ ID NO: 723032 - DNA, 75 bp, synthetic construct
  source 1..75: mol_type = other DNA
atgcaattttctacaaccccaactctggaaggccagaccatcgttgaatattgcggtgtggtgaccggcgaagcg

SEQ ID NO: 723033 - DNA, 75 bp, synthetic construct
  source 1..75: mol_type = other DNA
aaggccaactggaacaagaaattctcgacaacgcctggctaaccgctccggcagatctgaatattctgttcaaaa

SEQ ID NO: 723034 - DNA, 75 bp, synthetic construct
  source 1..75: mol_type = other DNA
ttgccatgcctgctctccaggatccgcttttccgccgctcagttgtttacatttgcgagcataatcccgatggcg

SEQ ID NO: 723035 - DNA, 75 bp, synthetic construct
  source 1..75: mol_type = other DNA
tggcaattaataagcaacaaggactttcatgcacaatcaccttcggtaaagagattgatgaaagtagaaattata

SEQ ID NO: 723036 - DNA, 75 bp, synthetic construct
  source 1..75: mol_type = other DNA
gatactgacgcagttagttttggcgggtctggcgaaggatagcggcgggtatgggaataaattcagacgctgcca

SEQ ID NO: 723037 - DNA, 75 bp, synthetic construct
  source 1..75: mol_type = other DNA
ccacgcatgatgacgagaactaccggagtaagcgaagcccagtgccagttaatactgactcagttagttctggcg

SEQ ID NO: 723038 - DNA, 75 bp, synthetic construct
  source 1..75: mol_type = other DNA
tcggtgaaagtgacaccccattactcaatgtccaactgaatagctatgacaggaaaggaatccttttagattccc

SEQ ID NO: 723039 - DNA, 75 bp, synthetic construct
  source 1..75: mol_type = other DNA
atgactggaacgtgcgcacccataccgccagcgggctggtagagcgtgtgaaagcgagcacgatgggcgatcgtg

SEQ ID NO: 723040 - DNA, 75 bp, synthetic construct
  source 1..75: mol_type = other DNA
tttctcttgttcatgaaatggtgaaacgtaatgcccgcaaaggactggcaacgctttgtatcggcggaggccagg

SEQ ID NO: 723041 - DNA, 75 bp, synthetic construct
  source 1..75: mol_type = other DNA
ttttgtctccagcattcgcatttctgacaacacgatcatgaccacatcccgtgatgtactggaaactctcggcac

SEQ ID NO: 723042 - DNA, 75 bp, synthetic construct
  source 1..75: mol_type = other DNA
tgcttccagcattcgcatttcagacaacacggtgatgaccacttcccgtgatgtgctggaaacgctcggcaccga

SEQ ID NO: 723043 - DNA, 75 bp, synthetic construct
  source 1..75: mol_type = other DNA
ctgactcagttagttctggcggggctggcgaaggataacggcgggtacgggaataaattcagacgctgccagtaa

SEQ ID NO: 723044 - DNA, 75 bp, synthetic construct
  source 1..75: mol_type = other DNA
ctgggcggcgagcaccatgaccccgtgcagttgctgaatatttactacgaaacgccggataactggctgcgtggg

SEQ ID NO: 723045 - DNA, 75 bp, synthetic construct
  source 1..75: mol_type = other DNA
tatgttttagacaacggccagggtggaagcgggcaacgttttgactggtcactattaaatggtcaatcgcttggc

SEQ ID NO: 723046 - DNA, 75 bp, synthetic construct
  source 1..75: mol_type = other DNA
atttataaacattacgcttcggcaatttcggtgctgactgatgagaaatattttcaggggagctttgatttcctc

SEQ ID NO: 723047 - DNA, 75 bp, synthetic construct
  source 1..75: mol_type = other DNA
gataagcaacaaggactttcatgcacaatcaccttcggtaaagagattgatgaaagtagaaattatatttgccag

SEQ ID NO: 723048 - DNA, 75 bp, synthetic construct
  source 1..75: mol_type = other DNA
ttaataacggagccatacagccgtccagtgagcagggttacggaaaagcttttgcggatgtggttagcgtgttgc

SEQ ID NO: 723049 - DNA, 75 bp, synthetic construct
  source 1..75: mol_type = other DNA
atggcagtgaagatcagcaatatatcgacgcactgcgtgacgcactgcctgaaagcgttgccatctggaaagcat

SEQ ID NO: 723050 - DNA, 75 bp, synthetic construct
  source 1..75: mol_type = other DNA
ttaagccacttcgctaatggttttttgattggctcggcgctgatggcgcacgacgatctaaacgccgccgtgcgt

SEQ ID NO: 723051 - DNA, 75 bp, synthetic construct
  source 1..75: mol_type = other DNA
gtgggtgcgcggcaacgatgcggcgaaagagcaggtgctggcagccatcggtcttgttcgccatacgctgatgct

SEQ ID NO: 723052 - DNA, 75 bp, synthetic construct
  source 1..75: mol_type = other DNA
gcgagcactcacttacgtgatttgctgactcaatgcgaagcgaccatcgcttcagcggtgtctgccgtaacggcg

SEQ ID NO: 723053 - DNA, 75 bp, synthetic construct
  source 1..75: mol_type = other DNA
gttcggtggtattgtgccgcgtaaagcgagcactcacttacgtgatctgctgactcaatgcgaggcgaccattgc

SEQ ID NO: 723054 - DNA, 75 bp, synthetic construct
  source 1..75: mol_type = other DNA
gcctggttcgtcatacgctgatgctgttcggtggcattgtcccacgtaaagcgagcactcacttacgtgatctgc

SEQ ID NO: 723055 - DNA, 75 bp, synthetic construct
  source 1..75: mol_type = other DNA
ccacctctattctgcatgttgcggcaaaagcggatgtcgagcaggggctggaagcggcgctggagctggcattag

SEQ ID NO: 723056 - DNA, 75 bp, synthetic construct
  source 1..75: mol_type = other DNA
cgaagctggcgttgaccgaatggctggtcagcaaagcctggcagccgtttttagatgccaaagcgcagggcaaaa

SEQ ID NO: 723057 - DNA, 75 bp, synthetic construct
  source 1..75: mol_type = other DNA
tcggcaatagccagttggttgatagtcttgtgcatgatgggttgtgggatgccttcaatgattatcatattggtg

SEQ ID NO: 723058 - DNA, 75 bp, synthetic construct
  source 1..75: mol_type = other DNA
taccactctgatgtccactaccgatctgcaaagctatatcactcatgctaatgacacttttgtgcaggtgagcgg

SEQ ID NO: 723059 - DNA, 75 bp, synthetic construct
  source 1..75: mol_type = other DNA
ggcataagtccatcagctcaacggaggtctacacgaaggtgtttgcactggatgtggctgcgcggcaccgggtgc

SEQ ID NO: 723060 - DNA, 75 bp, synthetic construct
  source 1..75: mol_type = other DNA
tgctggcgaccgtgcaggccgccgggcgtgaggatgtcgatcgcgccgtgaagagtgcccaacaggggcaaaaaa

SEQ ID NO: 723061 - DNA, 75 bp, synthetic construct
  source 1..75: mol_type = other DNA
cagatggcggcgtcggtgaaacagaactctgccacggcgtcggctgccgataaactttctatcaccgccagtaat

SEQ ID NO: 723062 - DNA, 75 bp, synthetic construct
  source 1..75: mol_type = other DNA
gggaggcgatgaccacggtgatcaagacaatggacgatatcgccgacagtacccagcgcattggcaccattactt

SEQ ID NO: 723063 - DNA, 75 bp, synthetic construct
  source 1..75: mol_type = other DNA
ctgcaaagctatatcactcatgctaatgacacttttgtgcaggtgagcggctttaccttgcaagagttacaaggg

SEQ ID NO: 723064 - DNA, 75 bp, synthetic construct
  source 1..75: mol_type = other DNA
tggcaaaaccggcgatgcagcacaaattgtcattggcgccggaatcaacatggcaatgcgtcgggttgaagagag

SEQ ID NO: 723065 - DNA, 75 bp, synthetic construct
  source 1..75: mol_type = other DNA
cttaaatctggcgatgcctgtgttgcagaatatcagcatgctggccgtggtcgtcgtggtcggaaatggttttcg

SEQ ID NO: 723066 - DNA, 75 bp, synthetic construct
  source 1..75: mol_type = other DNA
ctggatgacggcagtgtagccgtgctgccagttattgactccacgaatcagtatctcctggaccgcatcggagag

SEQ ID NO: 723067 - DNA, 75 bp, synthetic construct
  source 1..75: mol_type = other DNA
acgataccgactacggcctggcggcgggcatcgtgacggcggacctgaaccgcgcgcatcgcgtcattcatcagc

SEQ ID NO: 723068 - DNA, 75 bp, synthetic construct
  source 1..75: mol_type = other DNA
acgaactcgctaaactggaaaccctcgacaccggaaaagcgtattcagaaacctcaaccgtcgatatcgttaccg

SEQ ID NO: 723069 - DNA, 75 bp, synthetic construct
  source 1..75: mol_type = other DNA
gcgctggatgtggctgcacggcaccgggtgcagtttgcgatgcctgagtccgatgcggtgtctatgctcaaaaga

SEQ ID NO: 723070 - DNA, 75 bp, synthetic construct
  source 1..75: mol_type = other DNA
ctgccccggtggtgacgtatttcctctgtgcgttagtggtattgttggcaagcgcttgttttgaatggcagattg

SEQ ID NO: 723071 - DNA, 75 bp, synthetic construct
  source 1..75: mol_type = other DNA
acccgcatactgtcgccaatgtgctgttctttagtggctttggtgcggcggtggggtgctgcgtcggtggcttcc

SEQ ID NO: 723072 - DNA, 75 bp, synthetic construct
  source 1..75: mol_type = other DNA
ctacaacgttggcgcattgggcggtgcactggccccaatcatcggcgcgttgatcgctcaacgtctggatctggg

SEQ ID NO: 723073 - DNA, 75 bp, synthetic construct
  source 1..75: mol_type = other DNA
cggtaacctgcaaaatgccgcaatcgtcgctgttctcgggctgttatgcgccgcaatctttatcagctttatggt

SEQ ID NO: 723074 - DNA, 75 bp, synthetic construct
  source 1..75: mol_type = other DNA
acgtaatgcccgcaaaggactggcaacgctttgtatcggcgggggccagggtgtggcattgaccattgaacgtga

SEQ ID NO: 723075 - DNA, 75 bp, synthetic construct
  source 1..75: mol_type = other DNA
tgcgcatggggcatgcgcaggtgctcgacagcatgatccacgatggcctgtgggacgccttcaacgactgccaca

SEQ ID NO: 723076 - DNA, 75 bp, synthetic construct
  source 1..75: mol_type = other DNA
cggcctcaaggccgtgcatctggccatccaggcgatccgttgcggcgacgccgaggtggtcatcgccggcggcca

SEQ ID NO: 723077 - DNA, 75 bp, synthetic construct
  source 1..75: mol_type = other DNA
ctgcagagcctgatggggcataagtccatcagctcaacggaggtctacacgaaggtgtttgcactggatgtggct

SEQ ID NO: 723078 - DNA, 75 bp, synthetic construct
  source 1..75: mol_type = other DNA
ggattggggaggcggttgccgccgctgccgctgatggagtgacgttctctgtcccggtcacgccacatacgttcc

SEQ ID NO: 723079 - DNA, 75 bp, synthetic construct
  source 1..75: mol_type = other DNA
gtgcgcaggtgtcggcgatggtgaaacaccgcgccagcatcgcatccggcaattgcaccgcgccactggcggatg

SEQ ID NO: 723080 - DNA, 75 bp, synthetic construct
  source 1..75: mol_type = other DNA
ccactgcgctgtggttctgcttcgctggtaacctgcaaaatgccgcaatcgtcgctgttctcgggctgttatgtg

SEQ ID NO: 723081 - DNA, 75 bp, synthetic construct
  source 1..75: mol_type = other DNA
atgagtactacaacccagaatatcccgtggtatcgccatctcaaccgtgcacaatggcgcgcattttccgctgcc

SEQ ID NO: 723082 - DNA, 75 bp, synthetic construct
  source 1..75: mol_type = other DNA
atgcatctgtaccctacaattttcataccaaagcgtgtgggcatcgcccaccgcgggagactcacaatgagtact

SEQ ID NO: 723083 - DNA, 75 bp, synthetic construct
  source 1..75: mol_type = other DNA
gggatgtttattgaagctgttggcatcaacattcgggcagcgaaaaatgccggagtgaacacgcggatcatcgtc

SEQ ID NO: 723084 - DNA, 75 bp, synthetic construct
  source 1..75: mol_type = other DNA
tgtgtgcggcgattgcgggcattatcgtggcggcggatattcgcggtgccgatgccaacaacgccgggttatggc

SEQ ID NO: 723085 - DNA, 75 bp, synthetic construct
  source 1..75: mol_type = other DNA
cggtactgacgcttctcctcttctggctgttgacccgcaaaacggcgctggggatgtttatcgaagccgttggta

SEQ ID NO: 723086 - DNA, 75 bp, synthetic construct
  source 1..75: mol_type = other DNA
gctaaaaatcgcgtcaccgatttacagggaaaatataacgggctgcgtcagtcagtgcagcgtcagcgccttgcg

SEQ ID NO: 723087 - DNA, 75 bp, synthetic construct
  source 1..75: mol_type = other DNA
gacggacgtggcgtggatgcggggcgaacattactgggtgctcaggattttgcgtttgaagatcatgctctgggg

SEQ ID NO: 723088 - DNA, 75 bp, synthetic construct
  source 1..75: mol_type = other DNA
tatagagccagtacaggatggtataacccaggattaaacaaacctaaaacagctacagaaacacgtccacgcaac

SEQ ID NO: 723089 - DNA, 75 bp, synthetic construct
  source 1..75: mol_type = other DNA
ccagtacgcgccgaaggccagcccgatattcaccggcacgccaacagcgcccacgcctgcaaatagcgataacag

SEQ ID NO: 723090 - DNA, 75 bp, synthetic construct
  source 1..75: mol_type = other DNA
taccccaatctggcaaaggcttatcctacaaataaattaccggatttacggggtgaatttattcgcggctgggat

SEQ ID NO: 723091 - DNA, 75 bp, synthetic construct
  source 1..75: mol_type = other DNA
taccccaaactggcaaaagcttaccccaccaataaattaccggatttacggggtgaatttattcgtggctgggat

SEQ ID NO: 723092 - DNA, 75 bp, synthetic construct
  source 1..75: mol_type = other DNA
agcatttgccgcgcaggcgctttctgttggcaagatgctcgagtgggatgaacgccgggtcaatgtcaatggggg

SEQ ID NO: 723093 - DNA, 75 bp, synthetic construct
  source 1..75: mol_type = other DNA
actgatagccgcaccggtgcacagcttggcaatagccagttggttgacagtctggtgcatgatgggttgtgggat

SEQ ID NO: 723094 - DNA, 75 bp, synthetic construct
  source 1..75: mol_type = other DNA
gctgatattcctgacccggcgctgtttgtcaaaaaccttggtttaggggaagggtctgctttgccggttggcgtc

SEQ ID NO: 723095 - DNA, 75 bp, synthetic construct
  source 1..75: mol_type = other DNA
acgcgcaatattgaacaactgggcgatgcgctgaactacctggacgataacgctatgtcaaagggtggggacatt

SEQ ID NO: 723096 - DNA, 75 bp, synthetic construct
  source 1..75: mol_type = other DNA
agcaacctgcgacggtgaatgcagacggaaaagtgatgataccatcgggtggttttccctcatggggatatggct

SEQ ID NO: 723097 - DNA, 75 bp, synthetic construct
  source 1..75: mol_type = other DNA
cgaggttacgacgtgtcggggagcaacagcgaaaaatgcacgccgcccggggggcttacgtcaggcgtcttgagg

SEQ ID NO: 723098 - DNA, 75 bp, synthetic construct
  source 1..75: mol_type = other DNA
ggcaaacaacctgccggaactgcagcgccagctaaaactgacagcgggcaatgatgcgctcggctccatgcagaa

SEQ ID NO: 723099 - DNA, 75 bp, synthetic construct
  source 1..75: mol_type = other DNA
agcaacctgcgacggtgaatgcagacgggaaagtgatgattccatcgggtggttttccttcatggggatatggct

SEQ ID NO: 723100 - DNA, 75 bp, synthetic construct
  source 1..75: mol_type = other DNA
agcaacctgcgacggtgaatgcagacggcaaagtgatgatcccatcgggtggttttccgtcatggggatatggct

SEQ ID NO: 723101 - DNA, 75 bp, synthetic construct
  source 1..75: mol_type = other DNA
agcaacctgcgacggtgaatgcagacggtaaagtgatgatgccatcgggtggttttccttcatggggatatggct

SEQ ID NO: 723102 - DNA, 75 bp, synthetic construct
  source 1..75: mol_type = other DNA
tgcaggccttgtggggctggttcagtgatttacttacgccggttaaatccacttccgaagaactgaacagcgcag

SEQ ID NO: 723103 - DNA, 75 bp, synthetic construct
  source 1..75: mol_type = other DNA
tgtcggtatgtcaggtatccgtaatgttatcggtatggtgatgaacccgctggcggcgttgcggggtgggctgac

SEQ ID NO: 723104 - DNA, 75 bp, synthetic construct
  source 1..75: mol_type = other DNA
ttgtctgcgcagtggttgctggttaagactggcgcgcagaacgctttcagcagtctgggggaaacgttgcgtcag

SEQ ID NO: 723105 - DNA, 75 bp, synthetic construct
  source 1..75: mol_type = other DNA
aagaccagaaacgtgaccttttggcctttgccagcacggcagcaaaggcggcaacagcttttgagctgccagcgg

SEQ ID NO: 723106 - DNA, 75 bp, synthetic construct
  source 1..75: mol_type = other DNA
taaagcggcggcgctgggctccaccttcctgacactgggcgctgcgccagaggttgcagccagtgcagcaaacgc

SEQ ID NO: 723107 - DNA, 75 bp, synthetic construct
  source 1..75: mol_type = other DNA
aggtatcgcggagattatattagagataaccaggacgatatcgataaagccattaccgcccaaattaatgcctgg

SEQ ID NO: 723108 - DNA, 75 bp, synthetic construct
  source 1..75: mol_type = other DNA
cctgttccgtggccctcagccacaccgccaaccggttggctgaaatgtaacggtgcagcattttcttctgaaatg

SEQ ID NO: 723109 - DNA, 75 bp, synthetic construct
  source 1..75: mol_type = other DNA
tgggcaggcaaaaaccggaaacttacaacctggcgatcagaaaacgcattctggaaacgcggggcgttaaatcaa

SEQ ID NO: 723110 - DNA, 75 bp, synthetic construct
  source 1..75: mol_type = other DNA
cgatgatacctggctgattaactcaccggaggccgtcgcgcaggctgtaaaaacgcgattcgaattgtggtatgg

SEQ ID NO: 723111 - DNA, 75 bp, synthetic construct
  source 1..75: mol_type = other DNA
caacctcgctatccgcaagcggatcctcgaaacgcagggggttagctcaatcactgcatttaacaccaccgttga

SEQ ID NO: 723112 - DNA, 75 bp, synthetic construct
  source 1..75: mol_type = other DNA
gccatacagcctcacactcgatgaggcctgttcattgctcaatgatatccagacctaccatcgccgcatcaatgc

SEQ ID NO: 723113 - DNA, 75 bp, synthetic construct
  source 1..75: mol_type = other DNA
acacagagtgcattcgctgagattcgcgctgagcttgaaaatgatttagaactggcacggattgcactggcatct

SEQ ID NO: 723114 - DNA, 75 bp, synthetic construct
  source 1..75: mol_type = other DNA
tcggtaagcagaagccggaaacttacaacctggcgatccgtaagcgcattctggaaacgcagggcgttaaatcaa

SEQ ID NO: 723115 - DNA, 75 bp, synthetic construct
  source 1..75: mol_type = other DNA
acatctatgatacacgcaattgtggatcaatatagtcactgtgaatgggtggaaaatagcatgagtgccaatgaa

SEQ ID NO: 723116 - DNA, 75 bp, synthetic construct
  source 1..75: mol_type = other DNA
gtgttcctgacaccgccaaaaaccggaagatcgcaggtgaacttcgcacttccgtttgttttgcaatcagaatgg

SEQ ID NO: 723117 - DNA, 75 bp, synthetic construct
  source 1..75: mol_type = other DNA
cgaccgcgaagactggaagcgtatctcggcatcaatgcgcaaacagcctgatgcccttcgctacgaccgccaaac

SEQ ID NO: 723118 - DNA, 75 bp, synthetic construct
  source 1..75: mol_type = other DNA
atgcgataccgtcgcgaagatgctgacggcgattacactttcgggcagggtgacgataccttccttatcgacagc

SEQ ID NO: 723119 - DNA, 75 bp, synthetic construct
  source 1..75: mol_type = other DNA
acggtgattataccttcgggcagggcgatggcactttcctggctaactctccagagtgcgttgcccaggcggtta

SEQ ID NO: 723120 - DNA, 75 bp, synthetic construct
  source 1..75: mol_type = other DNA
cgccagtgggctggtggagcgtgtgaaggcgagcacgatgggcgatcgggaagcggaactggcgacgctcgagtt

SEQ ID NO: 723121 - DNA, 75 bp, synthetic construct
  source 1..75: mol_type = other DNA
aaaccacctctttcatgcagtttggtatctggtacgaatacggcggcggacgtttcgccacggcttttgatagcc

SEQ ID NO: 723122 - DNA, 75 bp, synthetic construct
  source 1..75: mol_type = other DNA
tcgagaataaatttaggcactatagaaaccagtgcacctggtggttcagaaacccgtccccgtaacattgcattt

SEQ ID NO: 723123 - DNA, 75 bp, synthetic construct
  source 1..75: mol_type = other DNA
atggacagatgcggttatggttctgatttattgtggtctggcaggttttttagctgtttgcggtatgcgggcgct

SEQ ID NO: 723124 - DNA, 75 bp, synthetic construct
  source 1..75: mol_type = other DNA
cgcatcttgccggcgggcaggtgtacccgtatgtggtccccctgctggatggcaggccgtcggtggcgcttccgt

SEQ ID NO: 723125 - DNA, 75 bp, synthetic construct
  source 1..75: mol_type = other DNA
cctgttccgtggccctcagccacacccccaactgggtggctgaaatgtaacggtgcagcattttcttctgaaatg

SEQ ID NO: 723126 - DNA, 75 bp, synthetic construct
  source 1..75: mol_type = other DNA
cctgttccgtggccctcagccacacctccaaccggatggctgaaatgtaacggtgcagcattttcttctgaaatg

SEQ ID NO: 723127 - DNA, 75 bp, synthetic construct
  source 1..75: mol_type = other DNA
cctgttccgtggccctcagccacacctccaacaggctggctgaaatgtaacggtgcagcattttcttctgaaatg

SEQ ID NO: 723128 - DNA, 75 bp, synthetic construct
  source 1..75: mol_type = other DNA
gtttgtgcgcccggcgtttgatgtgcgcagtgaacaggccgcccgggtggcgattgcgcggatgaaccgggccat

SEQ ID NO: 723129 - DNA, 75 bp, synthetic construct
  source 1..75: mol_type = other DNA
cagcagccttgacgtgcgagacgatattgagcgccgtgcttatgaaatcgcactcctatctctggaagtagaacc

SEQ ID NO: 723130 - DNA, 75 bp, synthetic construct
  source 1..75: mol_type = other DNA
ctccaccgcttacacctacgccaaacatcgtcctgaccacgcagaggatgaaactacctcctttatgcagtttgg

SEQ ID NO: 723131 - DNA, 75 bp, synthetic construct
  source 1..75: mol_type = other DNA
gcaatacccgcaagagattgcctgtattatcgtcgagccggtggcaggcaatatgaactgtgttccaccgctgcc

SEQ ID NO: 723132 - DNA, 75 bp, synthetic construct
  source 1..75: mol_type = other DNA
ggttttatgtctgtggcgcacagcatggaagatatcaacaacaccatcgatgctgcgcgtcgggtgtttgcgaag

SEQ ID NO: 723133 - DNA, 75 bp, synthetic construct
  source 1..75: mol_type = other DNA
gcctcggcaaaatcatcggcggtggaatgccggtaggcgcattcggtggtcgtcgtgatgtaatggatgcgctgg

SEQ ID NO: 723134 - DNA, 75 bp, synthetic construct
  source 1..75: mol_type = other DNA
gcagcgttcgaaccgcttaagcctgtgttccagtggattggcgacaaagtgcaggcgctgtggggctggtttact

SEQ ID NO: 723135 - DNA, 75 bp, synthetic construct
  source 1..75: mol_type = other DNA
ggcaatcagcactgatacgctggtggcgggtaaccatttcctccctgacatcgatcctgctgatctggcgtataa

SEQ ID NO: 723136 - DNA, 75 bp, synthetic construct
  source 1..75: mol_type = other DNA
atggaaactaccaagccttcattccaggacgtactggaatttgttcgtctgttccgccgtaagaacaaactgcaa

SEQ ID NO: 723137 - DNA, 75 bp, synthetic construct
  source 1..75: mol_type = other DNA
ctctccaaagaacgccgtgatatctccaaaaagctgaaagctatgggcgaaatgaaaaacggcgaagcgaagtaa

SEQ ID NO: 723138 - DNA, 75 bp, synthetic construct
  source 1..75: mol_type = other DNA
actcattggcggcgataccacgcgtggaccgctatcaatgacgttgggtatccacggctttgtcccgatgggacg

SEQ ID NO: 723139 - DNA, 75 bp, synthetic construct
  source 1..75: mol_type = other DNA
cctggctgacgctggcattgactttaccgaacgtagacgaagcgtggcttgaatctttcagcgacagtcttttcg

SEQ ID NO: 723140 - DNA, 75 bp, synthetic construct
  source 1..75: mol_type = other DNA
tatcgggcagatgagcgcagatatggaaggcgtcaattttacccgtgacggcgaacctgtcacgtttgactggaa

SEQ ID NO: 723141 - DNA, 75 bp, synthetic construct
  source 1..75: mol_type = other DNA
ggctggcagcatttccgaaccctgagttttataaggctcaggcaatgcgtatgtcagtctggaataagccccgtg

SEQ ID NO: 723142 - DNA, 75 bp, synthetic construct
  source 1..75: mol_type = other DNA
tactgtggtgccattcgccatacagcggtccgcccgaaggaaagcccacataatctggaggtactgaaccgcccc

SEQ ID NO: 723143 - DNA, 75 bp, synthetic construct
  source 1..75: mol_type = other DNA
tgaactatgctatgttgccagcgattgtcccgatgaacaggacacatggagtgaggcaggactaaacgccctggc

SEQ ID NO: 723144 - DNA, 75 bp, synthetic construct
  source 1..75: mol_type = other DNA
acagagcatgaagtcgtcattcaggaatcggtatttacccgccgtggtgtcgatcgcattttgcgttatgccttc

SEQ ID NO: 723145 - DNA, 75 bp, synthetic construct
  source 1..75: mol_type = other DNA
atttgggccggtgcaatgatgctcgattttctcggcaatggcgatgagcgtttccagcaagcgcataacggtatt

SEQ ID NO: 723146 - DNA, 75 bp, synthetic construct
  source 1..75: mol_type = other DNA
aaacggtttagccatcagcatgccgtactgggatgagcgagtggaagcaatggccgagaattacccggagatccg

SEQ ID NO: 723147 - DNA, 75 bp, synthetic construct
  source 1..75: mol_type = other DNA
tgcaaaacccatagacgtcgagcggatgatgatcgatttccgcgaattgcaggtagggattcgagagcagatgag

SEQ ID NO: 723148 - DNA, 75 bp, synthetic construct
  source 1..75: mol_type = other DNA
gctgatgttcaccttttcaaccagctcacactggtactgcaacccacagggaaacgactgagatggaaagagaat

SEQ ID NO: 723149 - DNA, 75 bp, synthetic construct
  source 1..75: mol_type = other DNA
attgaagtgacgctcgacaacaacgggtttacgggcgagggcgatattcatttgtttggtgagatgcttaaccgt

SEQ ID NO: 723150 - DNA, 75 bp, synthetic construct
  source 1..75: mol_type = other DNA
cgacttgtcgagcgtgaagttgtgtcgctgcaaatcaccggcacgaacggtcaactgccgcgccgggcgctgcag

SEQ ID NO: 723151 - DNA, 75 bp, synthetic construct
  source 1..75: mol_type = other DNA
tgcgcttctatgaacaggttaagcgtgagaatccgccagtcgaaaccggagcatggaaagacgctgttgactggg

SEQ ID NO: 723152 - DNA, 75 bp, synthetic construct
  source 1..75: mol_type = other DNA
gtgaaaaaaggcgttacagactttcaggggaagcagtgggttggtgactggaaatatgtaccgacaaaagaggat

SEQ ID NO: 723153 - DNA, 75 bp, synthetic construct
  source 1..75: mol_type = other DNA
cctcacagaacgtcctgcgggtgcgcaacctgtgcgccccaacgcagccctgctatcccccggcgcgtgaccgct

SEQ ID NO: 723154 - DNA, 75 bp, synthetic construct
  source 1..75: mol_type = other DNA
agagtatccagattgcagcgcagctcaggcaccacggctggacgatgtcagcggtgcaggtgatggagtgtggaa

SEQ ID NO: 723155 - DNA, 75 bp, synthetic construct
  source 1..75: mol_type = other DNA
cgattctgtgaacgggtggcctttttccagcgcgaactgaaacgcggttttaaacacagcaaatatcccattacc

SEQ ID NO: 723156 - DNA, 75 bp, synthetic construct
  source 1..75: mol_type = other DNA
agagcgtttggttttctccaccgtggcgacactggtcagataagcggccagggctgcaggagaagggtgggtaaa

SEQ ID NO: 723157 - DNA, 75 bp, synthetic construct
  source 1..75: mol_type = other DNA
gccataaaggggggatgatgcgtcgccatgcacctccgcgctattaccatacgcgcgttaagcgcagcgtgagcg

SEQ ID NO: 723158 - DNA, 75 bp, synthetic construct
  source 1..75: mol_type = other DNA
cattacgtattacaggtaccaatggtcagcttccccgtcgtgcgttgcagagtacgctgcttgatcggtgtgaac

SEQ ID NO: 723159 - DNA, 75 bp, synthetic construct
  source 1..75: mol_type = other DNA
agatatattcagtggatgcggtgacgggctccgggcggaccggcagtgcagagtacgtgccttttaccagcttcc

SEQ ID NO: 723160 - DNA, 75 bp, synthetic construct
  source 1..75: mol_type = other DNA
gcgtgtgctggatgcagccggggaattaggctgggaagtgcactttcttgatgatggtgctatctgccttgagga

SEQ ID NO: 723161 - DNA, 75 bp, synthetic construct
  source 1..75: mol_type = other DNA
cggaagaggttgaagctctggaaatgcagcgccgggaagaggccgagcgtttagcgcaaatgcagcagcttagcc

SEQ ID NO: 723162 - DNA, 75 bp, synthetic construct
  source 1..75: mol_type = other DNA
gaaatgcgtactggtgaaggtaaaacgctgactgcaacgctgcctgcttacctgaacgcattaagcggtaagggg

SEQ ID NO: 723163 - DNA, 75 bp, synthetic construct
  source 1..75: mol_type = other DNA
cctgcgccggatgcgcaaagtggtcaacatcatcaatgccatggaaccggagatggaaaaactctccgacgaaga

SEQ ID NO: 723164 - DNA, 75 bp, synthetic construct
  source 1..75: mol_type = other DNA
aaagttggacgtaacgatccttgcccgtgcggttctggtaaaaaatacaagcagtgccatggtcgcctgcaataa

SEQ ID NO: 723165 - DNA, 75 bp, synthetic construct
  source 1..75: mol_type = other DNA
gtccatcgaagtgtatcagcgtaaagaagaagtggttggcgccgagatgatgcgtcacttcgagaaaggtgtgat

SEQ ID NO: 723166 - DNA, 75 bp, synthetic construct
  source 1..75: mol_type = other DNA
cattccacacctgatccgccaggaaaaagaagactctgaaaccttccagggcgaaggtcacttctcggttgatga

SEQ ID NO: 723167 - DNA, 75 bp, synthetic construct
  source 1..75: mol_type = other DNA
ggcgaaaaaccgcagattgccgctggcgaaagctatgtgcgtaaaccgatctactcacgcgaaggcggaaacgtc

SEQ ID NO: 723168 - DNA, 75 bp, synthetic construct
  source 1..75: mol_type = other DNA
tgtctggtcttatgctggcaatggttgcaggtactgcttctgctgatatggatggtggtcagttaaatatcagtg

SEQ ID NO: 723169 - DNA, 75 bp, synthetic construct
  source 1..75: mol_type = other DNA
caactccttggtaatactctcacaggtaatgacgcagcaaaaggagtcggtgaaccgccccgggaatcctggaga

SEQ ID NO: 723170 - DNA, 75 bp, synthetic construct
  source 1..75: mol_type = other DNA
ggttacgaagtggcaattgatgattttggtattggctactctaacttgcataaccttaaatcattgaatgtcgat

SEQ ID NO: 723171 - DNA, 75 bp, synthetic construct
  source 1..75: mol_type = other DNA
atgaatccggcagagtttattccgttggcagaaaaggaggggatgatcgaacaggtaactgattatgttattgat

SEQ ID NO: 723172 - DNA, 75 bp, synthetic construct
  source 1..75: mol_type = other DNA
tgttcagcttgttgggcaggctcaggactacagaccgcaaccttacgatttgatggttcaggtacgccgcgtcaa

SEQ ID NO: 723173 - DNA, 75 bp, synthetic construct
  source 1..75: mol_type = other DNA
tcaggttaatggcgatataaccactgtaagtggtgatgttacttgtggcgatgtttctggtgacgtaaccactgt

SEQ ID NO: 723174 - DNA, 75 bp, synthetic construct
  source 1..75: mol_type = other DNA
tcctgaagcttagcgttaagactattggtaaaaaacctgatgtggggagccgggttctgacgtataccgaactgg

SEQ ID NO: 723175 - DNA, 75 bp, synthetic construct
  source 1..75: mol_type = other DNA
aggtaatcattttacgctacctggaaacgcacgcacgcttcagcgcaccagagctggttgaaaaactgggcgtga

SEQ ID NO: 723176 - DNA, 75 bp, synthetic construct
  source 1..75: mol_type = other DNA
gctggaaatatcccgttcacgtcagggggcgcatgtctggatattttttgcttcacgagtttcggcccgcgaagc

SEQ ID NO: 723177 - DNA, 75 bp, synthetic construct
  source 1..75: mol_type = other DNA
gacagtttacgactggatcgagaaaggcgaagtggtcatgtccggtaaaaaaatcgatgtggaagcgacagagca

SEQ ID NO: 723178 - DNA, 75 bp, synthetic construct
  source 1..75: mol_type = other DNA
tatgagcatccagccaagggacttcggctcccgcgctgaggtaggggatcgggtactgtcgtatcacgaactggc

SEQ ID NO: 723179 - DNA, 75 bp, synthetic construct
  source 1..75: mol_type = other DNA
gtttcccggccaggaactggacaagcctatagatcgctcgtcagcaaatctctatatgaaaaaattaaggggtaa

SEQ ID NO: 723180 - DNA, 75 bp, synthetic construct
  source 1..75: mol_type = other DNA
gtgtgagcacattcgcgaaactcctatcaatgaattgaaagccctctgccagatgataaaaccctccgagcgatt

SEQ ID NO: 723181 - DNA, 75 bp, synthetic construct
  source 1..75: mol_type = other DNA
ttgaaggattaaccaaagaaattataaagcaaatatgcaatgataaatccattcttctaagtgaaaaccttctaa

SEQ ID NO: 723182 - DNA, 75 bp, synthetic construct
  source 1..75: mol_type = other DNA
aaaaactgatgaatcagaaataacccccccgaacgatgaagagaaaacatcaccggactgggatgtttttggaga

SEQ ID NO: 723183 - DNA, 75 bp, synthetic construct
  source 1..75: mol_type = other DNA
gcgatccggattgggctgcaaaaaacatactcgcctggctaactgcgtaggaattatcgactccgattatcgcgg

SEQ ID NO: 723184 - DNA, 75 bp, synthetic construct
  source 1..75: mol_type = other DNA
gcggagcaggaagaggccgtttcggcattactccgttatgacactggtgtgctttgtgcgccaacggcttttggt

SEQ ID NO: 723185 - DNA, 75 bp, synthetic construct
  source 1..75: mol_type = other DNA
ctgatcaatgggcttttcttgcatcggtgatcccgatgaatgtgcaggatatagcaccgacgatattacgggcta

SEQ ID NO: 723186 - DNA, 75 bp, synthetic construct
  source 1..75: mol_type = other DNA
cagatagaaagtcagcagggcgtagataacgtcgatgccattgccgctaccgaaggtgtagacggcatcttcgtc

SEQ ID NO: 723187 - DNA, 75 bp, synthetic construct
  source 1..75: mol_type = other DNA
cgccggaactgatcagccataccttaagtctgacggcgcgtctcgatgcagacggttacagccaggccagcatca

SEQ ID NO: 723188 - DNA, 75 bp, synthetic construct
  source 1..75: mol_type = other DNA
agcacctgacggtcattaatcagtcgcatcagcaatatctgcaaaaagatctgccggatttatatgtcgatctct

SEQ ID NO: 723189 - DNA, 75 bp, synthetic construct
  source 1..75: mol_type = other DNA
ttgcggctgcctggaataaagattcaacggtcatcaataacggatccattggcctggcgatgtacgattttggta

SEQ ID NO: 723190 - DNA, 75 bp, synthetic construct
  source 1..75: mol_type = other DNA
ggcggtggacagcatcgtcgggctgaaactggactacgcagggaaaggcggctggagcgcgaatgcgacgctgga

SEQ ID NO: 723191 - DNA, 75 bp, synthetic construct
  source 1..75: mol_type = other DNA
ttataactttctgatcccatttgtggaaacggaagaggaagcagagcaggcggtggcgtcgacgcgttatccgcc

SEQ ID NO: 723192 - DNA, 75 bp, synthetic construct
  source 1..75: mol_type = other DNA
atgtctggcgatccttttgttttcaacgtacagcacgccagcacacaggcaatgaccgcgattgacgcaggaagt

SEQ ID NO: 723193 - DNA, 75 bp, synthetic construct
  source 1..75: mol_type = other DNA
gcggtcaggctatacctgctggggcagtgatggtggagcaaggagcttcggcaaccaataacggcacgataaata

SEQ ID NO: 723194 - DNA, 75 bp, synthetic construct
  source 1..75: mol_type = other DNA
gatacggatgtgaagcagcagtacatggagtttcgcagcgaaggggcgaaaacctatgagccgcacgcaggactg

SEQ ID NO: 723195 - DNA, 75 bp, synthetic construct
  source 1..75: mol_type = other DNA
tgtcagttggcggtgcgctgaacagccggggtatgaacggagaaggcctgtcgtggcgggtggcgatccaaaaac

SEQ ID NO: 723196 - DNA, 75 bp, synthetic construct
  source 1..75: mol_type = other DNA
cctcgctgcgcattggcgcgaagaccgatggcgcgatggatataaccgtcgggccgctggtgaatctgtggggct

SEQ ID NO: 723197 - DNA, 75 bp, synthetic construct
  source 1..75: mol_type = other DNA
ggatttatatgtcgatctctccaccgtcggtgaaggttatgcggcggatcacctggcacgcttgatggagcagga

SEQ ID NO: 723198 - DNA, 75 bp, synthetic construct
  source 1..75: mol_type = other DNA
aacaatggcaccttgaccaccaaaatgatgaatcagcacagtgtgctgaattatccggcagagtggaacttgtct

SEQ ID NO: 723199 - DNA, 75 bp, synthetic construct
  source 1..75: mol_type = other DNA
tgctgatttctggcctgatcgcctgtgtcgttggcggcacgaccgaaccgctggaattcctgttcctgttcgtgg

SEQ ID NO: 723200 - DNA, 75 bp, synthetic construct
  source 1..75: mol_type = other DNA
cgctatcacccgcttcaatctgaaaaccccggggcgcgatagcgaagttgccagctcactggcagatcccgcaat

SEQ ID NO: 723201 - DNA, 75 bp, synthetic construct
  source 1..75: mol_type = other DNA
tattgccgtttggtctgcatcacattctggtggcattaattcgctttactgacgcgggcggcacgcaggaagtct

SEQ ID NO: 723202 - DNA, 75 bp, synthetic construct
  source 1..75: mol_type = other DNA
tggtgtgaagccgctcgatttttgcaaactcagtgcgttgacatttgccgcaccggattatgatcgctatccatg

SEQ ID NO: 723203 - DNA, 75 bp, synthetic construct
  source 1..75: mol_type = other DNA
gcggtactaaacttgccgccgcgctgattggcgctgacgggcagatccgcgatcgtcgtgaacttcctacgccag

SEQ ID NO: 723204 - DNA, 75 bp, synthetic construct
  source 1..75: mol_type = other DNA
gaacaaaggcgtagcagcatttgccggttttgttggctacgcggtgatgaacctggcagttaacttctggttgac

SEQ ID NO: 723205 - DNA, 75 bp, synthetic construct
  source 1..75: mol_type = other DNA
atatgaacagtggcagcgaaacggcggtggacagcatcgtcgggttgaaactggattacgcaggtaaagacggct

SEQ ID NO: 723206 - DNA, 75 bp, synthetic construct
  source 1..75: mol_type = other DNA
gcgcggagctggagattggcgctgacgcaacgtttgatatgagcgatgtggattccttcacctattattatcgcg

SEQ ID NO: 723207 - DNA, 75 bp, synthetic construct
  source 1..75: mol_type = other DNA
aacagcggcaagctcatccttgataacagcaaaaacgccatccgcttccagggtagcaatgccaatgccacgtta

SEQ ID NO: 723208 - DNA, 75 bp, synthetic construct
  source 1..75: mol_type = other DNA
ttcctgccagtcatgttctgtatcgccatcccgctgggcctggcacgcgaaaacaaaggcgtagcggcattcgct

SEQ ID NO: 723209 - DNA, 75 bp, synthetic construct
  source 1..75: mol_type = other DNA
cggtgcgccgggtaaatcaggttacaacgttcctgcggtgatgcttccaattagtagaacatgtgtttttcaata

SEQ ID NO: 723210 - DNA, 75 bp, synthetic construct
  source 1..75: mol_type = other DNA
gaatggtgtgattaccgtctacaacgcgggtgcggggatggcggcgtatggtaataccaacatggtcattaacca

SEQ ID NO: 723211 - DNA, 75 bp, synthetic construct
  source 1..75: mol_type = other DNA
cgggctacaccaacaacgagctgtacaccagcctcaacgtcggcactacggcggagcttaacagcgcgctgaaac

SEQ ID NO: 723212 - DNA, 75 bp, synthetic construct
  source 1..75: mol_type = other DNA
taccagcaggtactactggcagcgggcgacaagccgattatcttccgcacaatggacatcggtggcgataaaagc

SEQ ID NO: 723213 - DNA, 75 bp, synthetic construct
  source 1..75: mol_type = other DNA
tccggcgtgggaacttaaagaacagtgcagccagtggcaaagcgaaatcacctttttcaaccatcgccagaacgc

SEQ ID NO: 723214 - DNA, 75 bp, synthetic construct
  source 1..75: mol_type = other DNA
gcactactgggagtagcctgtattatgagcgggttgatgttgattttcctgcccacgacaaaacaacgttactga

SEQ ID NO: 723215 - DNA, 75 bp, synthetic construct
  source 1..75: mol_type = other DNA
atgaaattattgcagcggggcgtggcgttagcactgttaaccacatttacactggcgagtgaaactgctctggcg

SEQ ID NO: 723216 - DNA, 75 bp, synthetic construct
  source 1..75: mol_type = other DNA
aaaccgggctatgtgaataccggctttattgatgccgaagtgctgaaagcgtatatccagaaaagctcgccgctg

SEQ ID NO: 723217 - DNA, 75 bp, synthetic construct
  source 1..75: mol_type = other DNA
atgttaacgattcaatttctctgtcctttgcctaacggtctacatgctcgtccggcgtgggaacttaaagaacag

SEQ ID NO: 723218 - DNA, 75 bp, synthetic construct
  source 1..75: mol_type = other DNA
gcatggaaagacgctattgactgggtgctcaaagaggcttgccaagctgtaaacattggcatcaaaggagagtga

SEQ ID NO: 723219 - DNA, 75 bp, synthetic construct
  source 1..75: mol_type = other DNA
attaaagcggtgcgcttctatgaacaggttaagcgtgaaaatccgccagtcgaaaatggagcatggaaagacgct

SEQ ID NO: 723220 - DNA, 75 bp, synthetic construct
  source 1..75: mol_type = other DNA
atgagcgagattaattatcaggaagggcatgaaacggcagggcaggcaaaaccagttgcatggcggtatcgctac

SEQ ID NO: 723221 - DNA, 75 bp, synthetic construct
  source 1..75: mol_type = other DNA
atgggtctgatgtggggattattcagcgtcattattgcttctgcagcacaattaagtctgggttatgcggcgagt

SEQ ID NO: 723222 - DNA, 75 bp, synthetic construct
  source 1..75: mol_type = other DNA
ccgcagataacgaatccggacatgtacaggccgttatcgcagaaaaagacttccagtttttcgaaaagttgggct

SEQ ID NO: 723223 - DNA, 75 bp, synthetic construct
  source 1..75: mol_type = other DNA
ataaatcaagcaaactaccggataaagcgatggactacctgaagcgaaacggactgataaacgaggaggatattt

SEQ ID NO: 723224 - DNA, 75 bp, synthetic construct
  source 1..75: mol_type = other DNA
ccgttccagaacaaaggcaaagcgcagctggaagtgaaaataggcgaaaccaatggtcgtctggaaggcgatcgt

SEQ ID NO: 723225 - DNA, 75 bp, synthetic construct
  source 1..75: mol_type = other DNA
attgcgtaaaactatcgacctgagcgaaagccagacgatgagtctggagtacggtatcgctcgtctcgatggtga

SEQ ID NO: 723226 - DNA, 75 bp, synthetic construct
  source 1..75: mol_type = other DNA
atgaaattagctacagatctggtcaatgcggttctgataaagaatggcattgtaccaacttccattaatgagttg

SEQ ID NO: 723227 - DNA, 75 bp, synthetic construct
  source 1..75: mol_type = other DNA
ccttggaaaggtaatacggacagacccgtacttaaccttgtctcacgagaaggacagctgttggggctggatatc

SEQ ID NO: 723228 - DNA, 75 bp, synthetic construct
  source 1..75: mol_type = other DNA
cgatggacaacatcggtacgatgaccgttgatggtcaaaactcgacgggaacaaaaattatcggcgatgacgcga

SEQ ID NO: 723229 - DNA, 75 bp, synthetic construct
  source 1..75: mol_type = other DNA
ggcaatgtcacgccgccaacgcctgctgcgcccattcactatgataacaacgtcatctgggataaagacggcaaa

SEQ ID NO: 723230 - DNA, 75 bp, synthetic construct
  source 1..75: mol_type = other DNA
gggccagtacgttttataacaccggaacggtgacagcatggaaaggcgattcaggctccgcaatgatgaacaacg

SEQ ID NO: 723231 - DNA, 75 bp, synthetic construct
  source 1..75: mol_type = other DNA
aaaaaacgctggtggatggtatccgcaaagaagtcgcggctgaaggcggtagcgtgctgttactttctggaggtg

SEQ ID NO: 723232 - DNA, 75 bp, synthetic construct
  source 1..75: mol_type = other DNA
cattagctctattgaccacattggcactggcgagtggaagtgctcaagcttatgagcaggataaaacttataaaa

SEQ ID NO: 723233 - DNA, 75 bp, synthetic construct
  source 1..75: mol_type = other DNA
caaatacgtgggacgggctgattttgagtttcgtaatggcgaaatgaaaatggttaactaccagctgattccggt

SEQ ID NO: 723234 - DNA, 75 bp, synthetic construct
  source 1..75: mol_type = other DNA
gtctttgataatcagcaggatgtgttaactgaattatttaaaatggacttcccagctgacaccatctgtcagacc

SEQ ID NO: 723235 - DNA, 75 bp, synthetic construct
  source 1..75: mol_type = other DNA
atgggacttttcgatgaagttgtcggtgcctttctgaaaggcgatgcggggaaatatcaggccattctgagctgg

SEQ ID NO: 723236 - DNA, 75 bp, synthetic construct
  source 1..75: mol_type = other DNA
tctgctttccgcaggcatggaactgctgaaagggctaagcaaatggggagcatgcaacccgcgttgcatccccct

SEQ ID NO: 723237 - DNA, 75 bp, synthetic construct
  source 1..75: mol_type = other DNA
atgaccgctgacgatatggtcgtggtcagcatcgaaaccggtgaagtggttgaaggtacgaaaaagccctcctcc

SEQ ID NO: 723238 - DNA, 75 bp, synthetic construct
  source 1..75: mol_type = other DNA
tggggcaaaaatgccgaagatgcggtgcataacgccatcgtgctggaagaggtcgcttatatggggatattctgc

SEQ ID NO: 723239 - DNA, 75 bp, synthetic construct
  source 1..75: mol_type = other DNA
atgtcggtggaacggccagtaccgcggacgtcacccgtgctgtagtggaatttatcgaagccagagcaaatatcg

SEQ ID NO: 723240 - DNA, 75 bp, synthetic construct
  source 1..75: mol_type = other DNA
attaactgccttccatccgtgccggtgaacaatgccactgaagccaacatgcaactgtgtgcgcttagcgccact

SEQ ID NO: 723241 - DNA, 75 bp, synthetic construct
  source 1..75: mol_type = other DNA
aaaacaccgaaggcgaatattcctcgctcggcggcagagtgaatgaaggtacagagcatgaagtcgtcattcagg

SEQ ID NO: 723242 - DNA, 75 bp, synthetic construct
  source 1..75: mol_type = other DNA
ggtccattctcacggcccatttgcatgggcaaaaatgccgaagatgcggtgcataacgccatcgtgctggaagag

SEQ ID NO: 723243 - DNA, 75 bp, synthetic construct
  source 1..75: mol_type = other DNA
gaccacccctcctgtcagacggctctatcctgccctgccgctggagcggctgcctgaactgcttgaacgtattgg

SEQ ID NO: 723244 - DNA, 75 bp, synthetic construct
  source 1..75: mol_type = other DNA
gcagtctcaaaccatctgataaaccctttaaagtttccgattcccacggtctgtatctcctggtcaaacctggcg

SEQ ID NO: 723245 - DNA, 75 bp, synthetic construct
  source 1..75: mol_type = other DNA
atgtcgcacttcaagaaagagcctgtctgggcacaagagttgatccagcaagttgaaaccaggtatgccgtgtta

SEQ ID NO: 723246 - DNA, 75 bp, synthetic construct
  source 1..75: mol_type = other DNA
agtcaattccggcaaccggcactacccacgccgactatttctacggcaccattccctgcacccgcaaaatgaccg

SEQ ID NO: 723247 - DNA, 75 bp, synthetic construct
  source 1..75: mol_type = other DNA
atgttagaagatctcaaacgccaggtattagaagccaacctggcgctgccaaaacacaacctggtcacgctcacc

SEQ ID NO: 723248 - DNA, 75 bp, synthetic construct
  source 1..75: mol_type = other DNA
gattgcggtagtgacgtcactggcaatgcgtttgccgaatccacgcatggtggcgatcgactttatctacgggac

SEQ ID NO: 723249 - DNA, 75 bp, synthetic construct
  source 1..75: mol_type = other DNA
tcctgatcaacttgctgattttcgtgctgaagttgaaccgacattagattatctggaaagagaacgtctgcaatg

SEQ ID NO: 723250 - DNA, 75 bp, synthetic construct
  source 1..75: mol_type = other DNA
ccgtaaagggctggacgatttagccaaacctagcgagaaagcgattcacccgcaatatctggcgcagcaaattag

SEQ ID NO: 723251 - DNA, 75 bp, synthetic construct
  source 1..75: mol_type = other DNA
atgaaacaaacggttgcagcttatatcgccaaaacactcgaatcggcaggggtgaaacgcatctggggagtcaca

SEQ ID NO: 723252 - DNA, 75 bp, synthetic construct
  source 1..75: mol_type = other DNA
gagaagccactagctgaaatcattgcggctttacaggcaatcgacgaccggagatcaaaagacaatcccaccgag

SEQ ID NO: 723253 - DNA, 75 bp, synthetic construct
  source 1..75: mol_type = other DNA
gattgccatgcgcaaagcggtgcttaaccgtggcgtttccgttgtcgtgttaccgggcgacgtggcgttaaaacc

SEQ ID NO: 723254 - DNA, 75 bp, synthetic construct
  source 1..75: mol_type = other DNA
ggccaaaggttttagcctgtatatgctgcgcgcaatcatcagcggacgcggcgatgaagtgatcgaactggcgaa

SEQ ID NO: 723255 - DNA, 75 bp, synthetic construct
  source 1..75: mol_type = other DNA
gtagtcgcgaaagaagagttagccattccgccgcagatcaaactcgaacaggccaaaggatttagcctgtatatg

SEQ ID NO: 723256 - DNA, 75 bp, synthetic construct
  source 1..75: mol_type = other DNA
tctttctggtctaatggaattatcagccacaacacattccttgcaacagcagcgatgatctccgctcaaaaacaa

SEQ ID NO: 723257 - DNA, 75 bp, synthetic construct
  source 1..75: mol_type = other DNA
gattgacaaactgcgagaaatctatacctccttcattgacagaaagaatcgctttaatgagcatatgtttgcgca

SEQ ID NO: 723258 - DNA, 75 bp, synthetic construct
  source 1..75: mol_type = other DNA
tagtatgcgtgacgaagcaactttcagtgtggagattgaaggaaggcgatattactggcatctgaccacagaaaa

SEQ ID NO: 723259 - DNA, 75 bp, synthetic construct
  source 1..75: mol_type = other DNA
caccaagcgcggggaaatgtgttaccgcagacaccatgctgctgacggagcgtggaatggtaacagtgaaagaac

SEQ ID NO: 723260 - DNA, 75 bp, synthetic construct
  source 1..75: mol_type = other DNA
ttgaggaaggtgaagcaccaacgttcgacgtagcgatgccggaaacacactctttctggtctaacgggattatca

SEQ ID NO: 723261 - DNA, 75 bp, synthetic construct
  source 1..75: mol_type = other DNA
ttgttctacgacgaagtcgtggctattgaggaaggtgaagcaccaacgttcgacgtagcgatgccggaaacacac

SEQ ID NO: 723262 - DNA, 75 bp, synthetic construct
  source 1..75: mol_type = other DNA
gagtttgaattgcccgccgatgttctcattatggcctttggtttccaggcacataccatgccgtggttgcagggc

SEQ ID NO: 723263 - DNA, 75 bp, synthetic construct
  source 1..75: mol_type = other DNA
tttcctggttgctggagaaacttggcattgtcagtaaagaggccgcaaaggcaaaactgccggaaagcgtgacgc

SEQ ID NO: 723264 - DNA, 75 bp, synthetic construct
  source 1..75: mol_type = other DNA
ctgatggatattctgtacacggtgaaaagcgttacgggagcgttgcgtcgctgggtcgaagctaacccggaactg

SEQ ID NO: 723265 - DNA, 75 bp, synthetic construct
  source 1..75: mol_type = other DNA
gcgatgggaactatccagcgtgtactggagaaggtgaacgcactgccgcaggataagcgcctgtctgccatgacc

SEQ ID NO: 723266 - DNA, 75 bp, synthetic construct
  source 1..75: mol_type = other DNA
acccgcaatattgaacagctcggcgatgcgctgaactatctggatgataacgctatgtcgaaaggggcggacatc

SEQ ID NO: 723267 - DNA, 75 bp, synthetic construct
  source 1..75: mol_type = other DNA
caggtttacttactacgccgttgtcgtctttgcgccgtacggcatcactgacgggaaatgtcctgaaaactgtag

SEQ ID NO: 723268 - DNA, 75 bp, synthetic construct
  source 1..75: mol_type = other DNA
cttcgccagcacggcggcaaaggcggcaacagcctttgaactgccagcggatgagctgtcagaaagtctggggaa

SEQ ID NO: 723269 - DNA, 75 bp, synthetic construct
  source 1..75: mol_type = other DNA
tgccgcaggcgcggtgcttcgtgtgctggcatccggtccgctggcgatgctgcgcgttgccctgtatgccatatc

SEQ ID NO: 723270 - DNA, 75 bp, synthetic construct
  source 1..75: mol_type = other DNA
gtcgcaaaccctgacgacagctgggaagatcagaaacgtgacctgctggccttcgtcagtacggcagcaaaggcg

SEQ ID NO: 723271 - DNA, 75 bp, synthetic construct
  source 1..75: mol_type = other DNA
gaaccgcttaagcccgtgttccagtggattggcgacaaagtacaggcgctgtggggctggtttactgatctgctg

SEQ ID NO: 723272 - DNA, 75 bp, synthetic construct
  source 1..75: mol_type = other DNA
gattcaaagcggcggcaggacccatcagtgccgcattcgaaccacttaagcctgtgttccagtggattggcgaca

SEQ ID NO: 723273 - DNA, 75 bp, synthetic construct
  source 1..75: mol_type = other DNA
taccttccgttacggcagcagtaacacgaaccagcagcgcgttgtcctggctggcagccgcaccactggcagtgc

SEQ ID NO: 723274 - DNA, 75 bp, synthetic construct
  source 1..75: mol_type = other DNA
gttacggcagcagtaacccgaacccgcagcgcgttgtcctggctggctggcgctccactggcactgctgcgacgc

SEQ ID NO: 723275 - DNA, 75 bp, synthetic construct
  source 1..75: mol_type = other DNA
ggtgaatgcagacggtaaagtgataatgccatcgggtggttttcagtcatggggatatggctttgcggggatgta

SEQ ID NO: 723276 - DNA, 75 bp, synthetic construct
  source 1..75: mol_type = other DNA
gcccacgatgcggtgcataacgcggtggtgatggaagaagtggcgaaaatggcgtggattgcgcgtagtattaac

SEQ ID NO: 723277 - DNA, 75 bp, synthetic construct
  source 1..75: mol_type = other DNA
ggccctgttgcgatgtttacagcaatgagccggatgctggtcaatggcggtgaaccggagccggatctgtctgaa

SEQ ID NO: 723278 - DNA, 75 bp, synthetic construct
  source 1..75: mol_type = other DNA
agcagtaaaactctggcgggcagacaacggccacgcgcatgcagactttaaattctggttacccgaagggcggct

SEQ ID NO: 723279 - DNA, 75 bp, synthetic construct
  source 1..75: mol_type = other DNA
ggcggcaaaactctggcgaacggataacgggcatgttcatgccgattttaaattctggcttccggaagggcgact

SEQ ID NO: 723280 - DNA, 75 bp, synthetic construct
  source 1..75: mol_type = other DNA
cgccatcaaggtattgcgaggctataacagcgacgtggagggcgcggtaaaagacgactcctactttgcgatcat

SEQ ID NO: 723281 - DNA, 75 bp, synthetic construct
  source 1..75: mol_type = other DNA
tttctgcggacaccctcagagccccctgcagatgcaggctttgctgtcacaccgcccgctgctgagagctgggca

SEQ ID NO: 723282 - DNA, 75 bp, synthetic construct
  source 1..75: mol_type = other DNA
atggctaaggttgcagaaggcatccgctacgccgagagggtggtggcgggggaaattattgcctgtgagtatgtg

SEQ ID NO: 723283 - DNA, 75 bp, synthetic construct
  source 1..75: mol_type = other DNA
acctctgccgaactgcagagtgcagtggcaatggggcgacgattcggggaggctctggcggaagggctgaatatg

SEQ ID NO: 723284 - DNA, 75 bp, synthetic construct
  source 1..75: mol_type = other DNA
tccagtggattggcgacaaagtacaggcgctgtggggctggtttactaatctgctgacgcccgttaagtcgacct

SEQ ID NO: 723285 - DNA, 75 bp, synthetic construct
  source 1..75: mol_type = other DNA
cctggtaaatgaagaaacaggcgaagttgtgttgcgtaatgatggcagtggccgtcctgtgatggtccgcaggtt

SEQ ID NO: 723286 - DNA, 75 bp, synthetic construct
  source 1..75: mol_type = other DNA
gttacgccgaacgcgtcgttgccggtgaagttatcacttgtgaatttgtccgtctcgcctgccagcgttttcttg

SEQ ID NO: 723287 - DNA, 75 bp, synthetic construct
  source 1..75: mol_type = other DNA
ttcagcctggcactggctgaagaagggataccgctggtggaggtttcgcagacggtccgcaatctgtcagaggcc

SEQ ID NO: 723288 - DNA, 75 bp, synthetic construct
  source 1..75: mol_type = other DNA
aagagaacgcactggcataccttgaatggtatggtgacaaatctgatatcaccgcctgttaccctcagtggaaca

SEQ ID NO: 723289 - DNA, 75 bp, synthetic construct
  source 1..75: mol_type = other DNA
aatacggcattatcagccggactatgatgaatattcgttcattgcgtgtttttgcccgtgagattgattttgagc

SEQ ID NO: 723290 - DNA, 75 bp, synthetic construct
  source 1..75: mol_type = other DNA
gggtttacctttctggcagaccagctggggataagcatgaagacggtatgtgcgcatctttacaatgcgatggag

SEQ ID NO: 723291 - DNA, 75 bp, synthetic construct
  source 1..75: mol_type = other DNA
aaccgaaacaatgaacagcgtatcgaaaatacctttgttgtcgatgaacaaacgccaatgaacgttgagatgaca

SEQ ID NO: 723292 - DNA, 75 bp, synthetic construct
  source 1..75: mol_type = other DNA
tccgaccatttacgcccgaatgcgttacctggattctgatgagttggctgaagagtcatcctggaaagagacgtc

SEQ ID NO: 723293 - DNA, 75 bp, synthetic construct
  source 1..75: mol_type = other DNA
cccgactttaacattagagcggcaatggaaattgaggacaaaaagactgctaccacgatggaattgccattgaag

SEQ ID NO: 723294 - DNA, 75 bp, synthetic construct
  source 1..75: mol_type = other DNA
acggtactgacacgatggaagaaaccgcttacttcctcgacctgacggtgaaatgtgacaagccagtggtgatgg

SEQ ID NO: 723295 - DNA, 75 bp, synthetic construct
  source 1..75: mol_type = other DNA
gaaaaaaattaacaccgactgcgataaaaccgacggcttcgttattacccacggtactgacacgatggaagaaac

SEQ ID NO: 723296 - DNA, 75 bp, synthetic construct
  source 1..75: mol_type = other DNA
aaagcgctggtagaggcgggctatgacggtatcgttagcgccggcgtgggtaacggcaatctgtataaaaccgtg

SEQ ID NO: 723297 - DNA, 75 bp, synthetic construct
  source 1..75: mol_type = other DNA
gtatcaacgagcatagtaaatctatttatgtcgattttgatttggtaaatatcacgatcacattaccgacctgtt

SEQ ID NO: 723298 - DNA, 75 bp, synthetic construct
  source 1..75: mol_type = other DNA
gttctggagccgaataacgcctcttccgtgtataaagattatgagtatgaagacgatgcaaccgaggggatatat

SEQ ID NO: 723299 - DNA, 75 bp, synthetic construct
  source 1..75: mol_type = other DNA
cgacggcgaccgaagcctttaccgcgctcgacgcgggcgctcaggcgctgaaaatattcccgtcatcggcttttg

SEQ ID NO: 723300 - DNA, 75 bp, synthetic construct
  source 1..75: mol_type = other DNA
cggaaagagaagtgtaagtatcaaaaagacagaagtaggaaagtggctttatagggcaaaaatgactaataaatt

SEQ ID NO: 723301 - DNA, 75 bp, synthetic construct
  source 1..75: mol_type = other DNA
tgatgtgagccaccaggtgagcgctgtgttggatgttgaagatcccatcaccgttgcttataacctggaagtctc

SEQ ID NO: 723302 - DNA, 75 bp, synthetic construct
  source 1..75: mol_type = other DNA
gtgggatttgaaaaaatccttctggaaagtgctccagaccgcagttgcggttatagggttcagttatataaagcc

SEQ ID NO: 723303 - DNA, 75 bp, synthetic construct
  source 1..75: mol_type = other DNA
agatcaagatgtgattttagttgagcaacaaggtccaatgatcaatgttgcgggaaaggttcgaaacccattccg

SEQ ID NO: 723304 - DNA, 75 bp, synthetic construct
  source 1..75: mol_type = other DNA
atacaaactttgatccaacagtaactcaacagatcaaattatccagctcatcaaattatctgtattcatttaaag

SEQ ID NO: 723305 - DNA, 75 bp, synthetic construct
  source 1..75: mol_type = other DNA
tgagaagatatctctgttctaaaaatattggagatagcttatcgtactatattgctacaaaactcgaaaaagttt

SEQ ID NO: 723306 - DNA, 75 bp, synthetic construct
  source 1..75: mol_type = other DNA
gtgtggggaagactttggctgcaaagtggctcgcttttaaactcgatatgccattgttaacattagatctcgcaa

SEQ ID NO: 723307 - DNA, 75 bp, synthetic construct
  source 1..75: mol_type = other DNA
gacctgtacgagtttatgcagcagggcaaaatgccgaagctggcgctgaaggatcaggacgtgatcctggttgaa

SEQ ID NO: 723308 - DNA, 75 bp, synthetic construct
  source 1..75: mol_type = other DNA
gaacgaaaagtaccgatgattatgattccctgagtccgactgaatggcagatgtccagtaacaatggatcaacct

SEQ ID NO: 723309 - DNA, 75 bp, synthetic construct
  source 1..75: mol_type = other DNA
tgtgattaatacaaaaggctctaaagccattgccactcataaccgtaaaaccgttaaagccgttgaaccgtttgc

SEQ ID NO: 723310 - DNA, 75 bp, synthetic construct
  source 1..75: mol_type = other DNA
atgggccggaggttttactgagcgagctaacgacaagcgaattgctattgtacatgcaaatggtcttgtagaatt

SEQ ID NO: 723311 - DNA, 75 bp, synthetic construct
  source 1..75: mol_type = other DNA
taaatacttacgtaaatcttttgactgcaacccctgtaagtgtattcgttacggggcctgtaattcgtcctgggc

SEQ ID NO: 723312 - DNA, 75 bp, synthetic construct
  source 1..75: mol_type = other DNA
ggaaactcccgaagctggcattaaaagatcaagatgtgattttagttgagcaacaaggtccaatgatcaatgttg

SEQ ID NO: 723313 - DNA, 75 bp, synthetic construct
  source 1..75: mol_type = other DNA
acggtaccgacacgatggaagaaacggcttacttcctggacctgacggtgaaatgagacaaaccggtggtgatgg

SEQ ID NO: 723314 - DNA, 75 bp, synthetic construct
  source 1..75: mol_type = other DNA
atcggggatacagaagcgcaaaaatttcactttgtattccatgacgccgatatggaaagaagatgtaaagacatg

SEQ ID NO: 723315 - DNA, 75 bp, synthetic construct
  source 1..75: mol_type = other DNA
aattgctatgcgcaaagcggtgcttaaccgtggcgtttccgttgttgtgttaccgggcgacgtggcgttaaaacc

SEQ ID NO: 723316 - DNA, 75 bp, synthetic construct
  source 1..75: mol_type = other DNA
cggtatgggcggcacgttatctgaaaatgaacggaaaacgccgcctgttaggttcttttaaccacggttcgatgg

SEQ ID NO: 723317 - DNA, 75 bp, synthetic construct
  source 1..75: mol_type = other DNA
agtgatagttcaagcggtgggcctatgacaattgaaaataaaatggtcgattcaggcaaacgttatggtgggcat

SEQ ID NO: 723318 - DNA, 75 bp, synthetic construct
  source 1..75: mol_type = other DNA
cttcaatattggggatgtgacaatgccaattctacaaaaaaatactgggctattggaggcgtttatcagagcctg

SEQ ID NO: 723319 - DNA, 75 bp, synthetic construct
  source 1..75: mol_type = other DNA
atttacccagaagatcaaggtataacatatccacttcatttccaggcgacgttaaagcaagacgggaatattgct

SEQ ID NO: 723320 - DNA, 75 bp, synthetic construct
  source 1..75: mol_type = other DNA
atgaaacaaacggttgcagcttatatcgccaaaacactcgaatcagcaggggtaaaacgcatttggggagtgact

SEQ ID NO: 723321 - DNA, 75 bp, synthetic construct
  source 1..75: mol_type = other DNA
agcgtgcggcattacgggtattcgcgtagaaaaagcctctgaaatcgatgaagctctgcaacgcgccttctccat

SEQ ID NO: 723322 - DNA, 75 bp, synthetic construct
  source 1..75: mol_type = other DNA
agcgtgcggcattacgggtattcgtgtagaaaaagcctctgaagtcgatgaagccctgcaacgcgccttctccat

SEQ ID NO: 723323 - DNA, 75 bp, synthetic construct
  source 1..75: mol_type = other DNA
ccattttgctgccgatgacgccatctttacctgtgacgttggcacacctacggtatgggcggcacgttatctgaa

SEQ ID NO: 723324 - DNA, 75 bp, synthetic construct
  source 1..75: mol_type = other DNA
tgcgcggtaaagaacatgtcgaatacgataatccgtatgatgtcggaatgacgggattaatcggcttctcgtcag

SEQ ID NO: 723325 - DNA, 75 bp, synthetic construct
  source 1..75: mol_type = other DNA
cgataatccgtatgatgtcggaatgaccggcttaatcggtttctcatcgggttttcataccatgatgaatgccga

SEQ ID NO: 723326 - DNA, 75 bp, synthetic construct
  source 1..75: mol_type = other DNA
gggccgttggtggcgttatgcaaacgctcacgattgaattttataccgataccgactttaacccgacaacgaatc

SEQ ID NO: 723327 - DNA, 75 bp, synthetic construct
  source 1..75: mol_type = other DNA
ttgacagatatcgtattaacaaaccctacctgttttactgctgcgcttagtggcccatcggtaagtggttcaacg

SEQ ID NO: 723328 - DNA, 75 bp, synthetic construct
  source 1..75: mol_type = other DNA
acgcgaacagcaccaaaaaatattgggccgttggtggcgttatgcaaactctcacgattaaattttataccgata

SEQ ID NO: 723329 - DNA, 75 bp, synthetic construct
  source 1..75: mol_type = other DNA
tattcaatcaccaggagtctatatcggagacactgcagtgcaagaatttcacttctccataacagacaacgatct

SEQ ID NO: 723330 - DNA, 75 bp, synthetic construct
  source 1..75: mol_type = other DNA
acggtaccgacacgatggaagaaaccgcttacttcctagacctgacggtgaaatgggacaaaccggtggtgatgg

SEQ ID NO: 723331 - DNA, 75 bp, synthetic construct
  source 1..75: mol_type = other DNA
acggtaccgacacgatggaagaaacagcttacttcctcgacctgacggtgaaatgggacaaaccggtggtgatgg

SEQ ID NO: 723332 - DNA, 75 bp, synthetic construct
  source 1..75: mol_type = other DNA
ttgactaccagcgtactccggcacgtaagcacaccagcgacacgccgttcgatgtctctaagctgaatgaactgc

SEQ ID NO: 723333 - DNA, 75 bp, synthetic construct
  source 1..75: mol_type = other DNA
taacccgtataagccaatgtgtgaaataacgaatccctcactctggcaaattaccaccacctccacaggaggtgg

SEQ ID NO: 723334 - DNA, 75 bp, synthetic construct
  source 1..75: mol_type = other DNA
atgaagacattcttcagatactttctttttttagcactatgctcttgttgttatacagcaaatgttggtgcagct

SEQ ID NO: 723335 - DNA, 75 bp, synthetic construct
  source 1..75: mol_type = other DNA
ctcacggtggaattttataccgataccaactttgaccccacaaagacaaacaaggtaacattatctaagccgggt

SEQ ID NO: 723336 - DNA, 75 bp, synthetic construct
  source 1..75: mol_type = other DNA
actgaataatgtcaaattaaccttaccaacatgttttacctccatacttaccggatcatcagtcaatggttcaac

SEQ ID NO: 723337 - DNA, 75 bp, synthetic construct
  source 1..75: mol_type = other DNA
gtggcgctggcgtggcataaaagtaaccggaaatggtcgcagaacaccgctgaccgtctgcttgccagcctgaac

SEQ ID NO: 723338 - DNA, 75 bp, synthetic construct
  source 1..75: mol_type = other DNA
ccagatgagtcatcaggagcgcaataccgtgcgcatggcttatattcataaggcagagcacctggaagcccgcaa

SEQ ID NO: 723339 - DNA, 75 bp, synthetic construct
  source 1..75: mol_type = other DNA
gcattgaccacggtaaaacgccagcatcgccctgctctagatctttcccgcctgcctgaacttttgtcgcgtatt

SEQ ID NO: 723340 - DNA, 75 bp, synthetic construct
  source 1..75: mol_type = other DNA
gcattgaccacggtaaaacgccagcatcgccctgctctagatctttctcgcctgcctgaacttctgtcgcgtatt

SEQ ID NO: 723341 - DNA, 75 bp, synthetic construct
  source 1..75: mol_type = other DNA
atggttcccgttactggcgtctccgttatcgtattctgggtaaaggagaaaaccctggcacttggtgtgtatccg

SEQ ID NO: 723342 - DNA, 75 bp, synthetic construct
  source 1..75: mol_type = other DNA
ctcgcagttatgctgaatttactggtttttattcgttccagtgaactcagataagcccggtggtctgaaattgat

SEQ ID NO: 723343 - DNA, 75 bp, synthetic construct
  source 1..75: mol_type = other DNA
cttgctgttatgctgaatttactggtttttattcgttccagtgaactcagataagcccgctggtctgaaattgat

SEQ ID NO: 723344 - DNA, 75 bp, synthetic construct
  source 1..75: mol_type = other DNA
ctagccgttatgctgaatttactggtttttattcgttccagtgaactcagataagcccggtggtctgaaattgat

SEQ ID NO: 723345 - DNA, 75 bp, synthetic construct
  source 1..75: mol_type = other DNA
cgggtgcacatgacccgcgtaaaccaatcagtgaaaatgtaatgaacgcatcccacacaattaaacacggagcag

SEQ ID NO: 723346 - DNA, 75 bp, synthetic construct
  source 1..75: mol_type = other DNA
atgggatatgacacaacccaagaagtctgtggtcatggattccgggcgatggcatgtagtgcgctgatcgaatca

SEQ ID NO: 723347 - DNA, 75 bp, synthetic construct
  source 1..75: mol_type = other DNA
gctacaatggtgggccgattttctggatgcaaacagagaaaaatttatcagtccatttgaatatgcaaagattaa

SEQ ID NO: 723348 - DNA, 75 bp, synthetic construct
  source 1..75: mol_type = other DNA
taggtcaaattgacgccagaatgttgagaaccagccagcttctcaatccgatcaaagctgttgatgcggcaggta

SEQ ID NO: 723349 - DNA, 75 bp, synthetic construct
  source 1..75: mol_type = other DNA
tgaaattgagggggcatatttatttgaaactatcgcaaggcaatggcacgcaagtaacctaacttggagcgaaga

SEQ ID NO: 723350 - DNA, 75 bp, synthetic construct
  source 1..75: mol_type = other DNA
acaatgccatgtggactattccagccgaacgcgaacctctgccaggcgtaaaattctcacaccggggctccaaga

SEQ ID NO: 723351 - DNA, 75 bp, synthetic construct
  source 1..75: mol_type = other DNA
ctggcggttatgctgaatttactggtttttattcgttccagtgaactcagataagcccgatggtctgaaattgat

SEQ ID NO: 723352 - DNA, 75 bp, synthetic construct
  source 1..75: mol_type = other DNA
cgggagatctttatggtgatctttctcgactcccaacaccgggttataacgcatagccgtcttttttccggcacg

SEQ ID NO: 723353 - DNA, 75 bp, synthetic construct
  source 1..75: mol_type = other DNA
ggacgaaaattgcgcttggcgtgtttgataacaatcggcaactgcaatgggaaaagcgggtgtcgacgccgcgtg

SEQ ID NO: 723354 - DNA, 75 bp, synthetic construct
  source 1..75: mol_type = other DNA
cggcaatcacatcgcaactggcggaaaggttgcctcgtcatctcttacctgtagctcgtgtcccgcgtattgaac

SEQ ID NO: 723355 - DNA, 75 bp, synthetic construct
  source 1..75: mol_type = other DNA
cggtcggcgggttgatggctgtgaccgccgtactgcctaccaacaccggacggccagccttcgatgccttggtgg

SEQ ID NO: 723356 - DNA, 75 bp, synthetic construct
  source 1..75: mol_type = other DNA
tccttacccatagccggctgttttccggcacgctaaaccatgtggaagtgcatccccgggagatcgttcgcgaag

SEQ ID NO: 723357 - DNA, 75 bp, synthetic construct
  source 1..75: mol_type = other DNA
gaactgctggcgttatttctgcgtacaggaacgcgcggtaaagatgtgttaaccctggcaaaagagatgctggag

SEQ ID NO: 723358 - DNA, 75 bp, synthetic construct
  source 1..75: mol_type = other DNA
cagtgaaaataccgtaaataaggccctcagagtgatggggtatggcacaaccaaggaagtctgtggccatggatt

SEQ ID NO: 723359 - DNA, 75 bp, synthetic construct
  source 1..75: mol_type = other DNA
tattcgttccagtgaactcagatatgcccgctggtctgaaattgatattgacaatgccatgtggactattccagc

SEQ ID NO: 723360 - DNA, 75 bp, synthetic construct
  source 1..75: mol_type = other DNA
gggctgcaaagcccactgacaaggcttataaactcactgacggggctggcatgtttctgctggttcatcctaatg

SEQ ID NO: 723361 - DNA, 75 bp, synthetic construct
  source 1..75: mol_type = other DNA
gtttgcctgttgatgcattaacgttgatggggctggattttccgttacgccgctgcggctgtggtcagcatggct

SEQ ID NO: 723362 - DNA, 75 bp, synthetic construct
  source 1..75: mol_type = other DNA
atgtattacgggtttgatattggtggaacaaaaattgcgctaggcgtgtttgatagcggtcggcagttgcagtgg

SEQ ID NO: 723363 - DNA, 75 bp, synthetic construct
  source 1..75: mol_type = other DNA
cagatgagtcatcaggagcgcaacggagtacgtgccgcgtatattcataaagcagaacatctggaagaacgtcgg

SEQ ID NO: 723364 - DNA, 75 bp, synthetic construct
  source 1..75: mol_type = other DNA
tccagccgaacgcgaacctctgccaggcgtaaaattctcacaccggggatccaagatgcgaacaccacatcttgt

SEQ ID NO: 723365 - DNA, 75 bp, synthetic construct
  source 1..75: mol_type = other DNA
ggatatggctggtgcattgaccacggtaaaacgccagcatcgccctgctctggagctttcacgcctgcctgaact

SEQ ID NO: 723366 - DNA, 75 bp, synthetic construct
  source 1..75: mol_type = other DNA
cttatccctgttcgtgctgcagaagctaaacaaatttatgaaatcgccagtcgtctgcagcaaagaatatctgct

SEQ ID NO: 723367 - DNA, 75 bp, synthetic construct
  source 1..75: mol_type = other DNA
gctggcatgccagtaataaacaatgggcacaatcacacagcgataaagtactcaaaagcctcgagacacacgttt

SEQ ID NO: 723368 - DNA, 75 bp, synthetic construct
  source 1..75: mol_type = other DNA
aaacaggctgtagccatactgacagaacttcagacatgggctggtgaaaatggtctgatctttacgggagcacat

SEQ ID NO: 723369 - DNA, 75 bp, synthetic construct
  source 1..75: mol_type = other DNA
aactgatattcactggcgatcataacccgtggaaaccgatgagtgaaaatacaatcaataatgcactgagactta

SEQ ID NO: 723370 - DNA, 75 bp, synthetic construct
  source 1..75: mol_type = other DNA
atgaaatcgccagtcgtctgcagcaaagaatatctgccgtaatgcgttatgccgtacagtctggcatcatcagat

SEQ ID NO: 723371 - DNA, 75 bp, synthetic construct
  source 1..75: mol_type = other DNA
gctctggatctttcacgcctgcctgaacttctgtcgcgtattgacggttataaaggccagcctgtcacccgactg

SEQ ID NO: 723372 - DNA, 75 bp, synthetic construct
  source 1..75: mol_type = other DNA
gttttcccctttatcggcaaccgggatatcacaacactcaataccccggacctgcttatccctgttcgtgctgca

SEQ ID NO: 723373 - DNA, 75 bp, synthetic construct
  source 1..75: mol_type = other DNA
tggtttcctttagcgtggcagcgattaattcgctaatgaagcaagttgcgctgcgagccgactttgattttctga

SEQ ID NO: 723374 - DNA, 75 bp, synthetic construct
  source 1..75: mol_type = other DNA
atcgggatatcacaacactcaataccccggacctgcttatccctcttcgtgctgcagaagctaaacaaatttatg

SEQ ID NO: 723375 - DNA, 75 bp, synthetic construct
  source 1..75: mol_type = other DNA
ctgatgctacagtggtgggcagattttctggatgcgaacagagaacaatgtatcagcccgtttgaatatgcaaag

SEQ ID NO: 723376 - DNA, 75 bp, synthetic construct
  source 1..75: mol_type = other DNA
agacatgggctggtgaaaatggtctgatctttacgggagcacatgacccgcgtaaaccaatcagtgaaaataccg

SEQ ID NO: 723377 - DNA, 75 bp, synthetic construct
  source 1..75: mol_type = other DNA
gccctgagggtgatgggatatgacacaacccaggaagtctgtggtcatggattccgggcgatggcgtgcagtgca

SEQ ID NO: 723378 - DNA, 75 bp, synthetic construct
  source 1..75: mol_type = other DNA
caaaacgggatgaggcccgaaaactgatttcggagggggttgacccttgcgaacagaaaagagctaaaaaagtag

SEQ ID NO: 723379 - DNA, 75 bp, synthetic construct
  source 1..75: mol_type = other DNA
gtgcaatcaggtattattggctataaccctgctattgataccgcaggggctgtaacgactgtacaacgccaacat

SEQ ID NO: 723380 - DNA, 75 bp, synthetic construct
  source 1..75: mol_type = other DNA
gttcgtgctgcagaagctaaacaaatttatgaaatcgccagtcgtctgcagcaaagaatatctgccgtaatgcgt

SEQ ID NO: 723381 - DNA, 75 bp, synthetic construct
  source 1..75: mol_type = other DNA
agccatactgacagaactacagacatgggctggtgaaaatggtctgatctttacgggagcacatgacccgcgtaa

SEQ ID NO: 723382 - DNA, 75 bp, synthetic construct
  source 1..75: mol_type = other DNA
ttactggtttttattcgttccagtgaactcagatatgcccgctggtctgaaattgatattgacaatgccatgtgg

SEQ ID NO: 723383 - DNA, 75 bp, synthetic construct
  source 1..75: mol_type = other DNA
gtgcattgaccacggtaaaacgccagcatcgccctgctctggatctttcacgcctgcctgaacttctgtcgcgta

SEQ ID NO: 723384 - DNA, 75 bp, synthetic construct
  source 1..75: mol_type = other DNA
gaaaatactgtaaataaagccctgagggtgatggggtatgacacaccccaggaagtctgtggccatggattccgg

SEQ ID NO: 723385 - DNA, 75 bp, synthetic construct
  source 1..75: mol_type = other DNA
gtgccactcagcaaacaggttgtagccatactggcagaacttcagacatgggctggtgaaaatggtctgatcttt

SEQ ID NO: 723386 - DNA, 75 bp, synthetic construct
  source 1..75: mol_type = other DNA
actggtttttattcgttccagtgaactcagatatgcccgctggtctgaaattgatattgacaatgccatgtggac

SEQ ID NO: 723387 - DNA, 75 bp, synthetic construct
  source 1..75: mol_type = other DNA
gatgctacagtggtgggcagattttctggatgcgaacagagataagggtatcagcccgtttgaatatgcaaagat

SEQ ID NO: 723388 - DNA, 75 bp, synthetic construct
  source 1..75: mol_type = other DNA
ttatgggatatgacacaacccaagaagtctgtggtcatggattccgggcgatggcatgtagtgcgctgatcgaat

SEQ ID NO: 723389 - DNA, 75 bp, synthetic construct
  source 1..75: mol_type = other DNA
actccgcatcttgttcccctcagcaagcaggctgtagctatacttacagaacttcagacatgggctggtgaaaat

SEQ ID NO: 723390 - DNA, 75 bp, synthetic construct
  source 1..75: mol_type = other DNA
gaaatttttacttgataaatatataccatatcgatatattcattatccatatttaactgagcaagagttgaatct

SEQ ID NO: 723391 - DNA, 75 bp, synthetic construct
  source 1..75: mol_type = other DNA
gatgtgcgacaacctggacgttatattaatctatatcctcgctttcttgaaaggtatcgagctgttgatattcct

SEQ ID NO: 723392 - DNA, 75 bp, synthetic construct
  source 1..75: mol_type = other DNA
cggcggagctgaccaccatgttctgctacatcgtcggtgtgagcaaatgcctgcgtgatatccagacgcacgcgg

SEQ ID NO: 723393 - DNA, 75 bp, synthetic construct
  source 1..75: mol_type = other DNA
gaagaaagtccacagccggtttttgcaaccagacccgctcagcaaaacgataaggatgccagtccatccgcgcca

SEQ ID NO: 723394 - DNA, 75 bp, synthetic construct
  source 1..75: mol_type = other DNA
gggtagaaattctggcttacaaagcggaactttctgccgaaggcatggctcttaaaaaatcactaccggttacat

SEQ ID NO: 723395 - DNA, 75 bp, synthetic construct
  source 1..75: mol_type = other DNA
gcgcgacgctaattcagcgttacaaacgttttttagccgatgtgatcacacccgatggtcgcgaattaacgctac

SEQ ID NO: 723396 - DNA, 75 bp, synthetic construct
  source 1..75: mol_type = other DNA
agtaaagcaaatgagctgatctcaaatgctaatgacaacgcagtaaaaattatttccgatgcagaagaaagagca

SEQ ID NO: 723397 - DNA, 75 bp, synthetic construct
  source 1..75: mol_type = other DNA
gaaatagcctgcggcggatgcccagcctgtcggagtaaagggtatcctccctttactccgacgctcggtcgtatc

SEQ ID NO: 723398 - DNA, 75 bp, synthetic construct
  source 1..75: mol_type = other DNA
cccggacgagcgtgatgaagcaaagatccgggcgtggtttgaccattatttcaaccatattcaggtttccgtacg

SEQ ID NO: 723399 - DNA, 75 bp, synthetic construct
  source 1..75: mol_type = other DNA
cgtcggtgtgagcaaatgcctgcgtgatatccagacgcacgcggagtacatcaacgacaaagcagagttcttctg

SEQ ID NO: 723400 - DNA, 75 bp, synthetic construct
  source 1..75: mol_type = other DNA
aatatagagagtcactggcgattgagcaagagcgcaaagcagcaacttccgccaacgatgaactgcatgttgctt

SEQ ID NO: 723401 - DNA, 75 bp, synthetic construct
  source 1..75: mol_type = other DNA
agcagcaccattatggcaatacgaagaattgcacagcgcagtgatggaggcagagaataagataaaaaatgcaga

SEQ ID NO: 723402 - DNA, 75 bp, synthetic construct
  source 1..75: mol_type = other DNA
gaaggctttgcttttttaatgggcagcctgcgcgagaagctggacgacgatctgccggagctgactgaagggctg

SEQ ID NO: 723403 - DNA, 75 bp, synthetic construct
  source 1..75: mol_type = other DNA
tcaagctgtcgatcgtcgggacgtggcccagcggaaccgccaacaggtcaatgcagataaccttttccggctctg

SEQ ID NO: 723404 - DNA, 75 bp, synthetic construct
  source 1..75: mol_type = other DNA
gaggccggacagggtgcttatgacgcacaagtcaggaacgatgagcaggatgtgattctggtcgatcacgaagaa

SEQ ID NO: 723405 - DNA, 75 bp, synthetic construct
  source 1..75: mol_type = other DNA
aaaatgcgaaagaaaaaatacttgaatttgttgagctggatgaaactgagcttgttgattttgggtaatgctgcc

SEQ ID NO: 723406 - DNA, 75 bp, synthetic construct
  source 1..75: mol_type = other DNA
cgagaacaaaaccttgttcttcaagctgtcgatcgtcgggacgtggcccagcggaaccgccaacaggtcaatgca

SEQ ID NO: 723407 - DNA, 75 bp, synthetic construct
  source 1..75: mol_type = other DNA
cgagaacaaaaccttgttcttcaagctgtctattgtcgggacgtggcccagcggaaccaccaacaggtcaatgca

SEQ ID NO: 723408 - DNA, 75 bp, synthetic construct
  source 1..75: mol_type = other DNA
tggtaacgtggctaacaaggccaacgaggccggacagggcgcttatgacgcacaagtcaggaacgatgagcagga

SEQ ID NO: 723409 - DNA, 75 bp, synthetic construct
  source 1..75: mol_type = other DNA
ccgctcacgccgcaggagttgttctttctgacgctgccggatgagagtaaaatccacaccgcggatttcaaaatc

SEQ ID NO: 723410 - DNA, 75 bp, synthetic construct
  source 1..75: mol_type = other DNA
cgtgctgtcaaacattagacctgatctccagtcaggagtttatatgtatgcccgggaagggttcggccgatttac

SEQ ID NO: 723411 - DNA, 75 bp, synthetic construct
  source 1..75: mol_type = other DNA
aaacacggtgcaaaaggagtaatccagtatcatcctgtcactgattgtatgctatgcacgaatacaagtatttat

SEQ ID NO: 723412 - DNA, 75 bp, synthetic construct
  source 1..75: mol_type = other DNA
acggcgcaacgacaactggtgataaaaatcgccatcgcgctagcggtcagtctgtttgtttcctggacgatgggc

SEQ ID NO: 723413 - DNA, 75 bp, synthetic construct
  source 1..75: mol_type = other DNA
agtttcaggctccttacgtagacggcgcaatcactagctcaccgatcattgcggactcgttctttatcctgccga

SEQ ID NO: 723414 - DNA, 75 bp, synthetic construct
  source 1..75: mol_type = other DNA
ccagcccgtcctggctgttctacgctgattctatctggcgtcagggagatgacatcaacctgtatggttccggta

SEQ ID NO: 723415 - DNA, 75 bp, synthetic construct
  source 1..75: mol_type = other DNA
aacaggccaaattctggtaccagtatctgcgcgagcgtggttatcggcgctgtggattgttccatggtgcgacgc

SEQ ID NO: 723416 - DNA, 75 bp, synthetic construct
  source 1..75: mol_type = other DNA
gcgtactccgcaggcgtaacgccggaacaatcgcaaacactaatcaaccaggcggcactggcagaatttatgcgc

SEQ ID NO: 723417 - DNA, 75 bp, synthetic construct
  source 1..75: mol_type = other DNA
gacctgcgtcatcgtgatgaaaatgacatcgatgccagcggtatgtcggtgtttgaagaacgtacgtcgaggatt

SEQ ID NO: 723418 - DNA, 75 bp, synthetic construct
  source 1..75: mol_type = other DNA
ttcgttcgatcggcaaatggctgggacgctacccgtcggtgcgtaatgcgtcggataacatccgtaacgccatga

SEQ ID NO: 723419 - DNA, 75 bp, synthetic construct
  source 1..75: mol_type = other DNA
cttatcatctggtgacaaaatatggtggctggcgaaaccgtaaactgatcgacttttttatccgcttcgcatcaa

SEQ ID NO: 723420 - DNA, 75 bp, synthetic construct
  source 1..75: mol_type = other DNA
taccagtttggctggaagcaaagcctgatcgctgccgccgtcgtgttgatgactcgcgtcgtggtggtgcgttat

SEQ ID NO: 723421 - DNA, 75 bp, synthetic construct
  source 1..75: mol_type = other DNA
cgatcctgccacaattgattgaaggctatatgaaccgtcgcgaggcggggagtatcgctttcggtttgagtattg

SEQ ID NO: 723422 - DNA, 75 bp, synthetic construct
  source 1..75: mol_type = other DNA
tttcccacatcttaaccctgaatccatcgaaatctttattggcatggtgatgctgctggggatcgcgataactca

SEQ ID NO: 723423 - DNA, 75 bp, synthetic construct
  source 1..75: mol_type = other DNA
ctgggccgtccggtacagaaaatggcggcaccggtcgtagccgtaatgatcaccggtattctgctgaatgttctt

SEQ ID NO: 723424 - DNA, 75 bp, synthetic construct
  source 1..75: mol_type = other DNA
gattgccaccaccgcgttagccaccggcgtgtatgcagttgcgggctttacctttgtttatgcggtgggctatct

SEQ ID NO: 723425 - DNA, 75 bp, synthetic construct
  source 1..75: mol_type = other DNA
gctacccgtcggtgcgtaatgcgtcggataacatccgtaacgccatgaatatgctgatggaagtggcgctgctgg

SEQ ID NO: 723426 - DNA, 75 bp, synthetic construct
  source 1..75: mol_type = other DNA
cgatcttcacactggagaaagcatattccgcaggcgtaacgccggaacaatcgcaaacgctgattaatcaggcgg

SEQ ID NO: 723427 - DNA, 75 bp, synthetic construct
  source 1..75: mol_type = other DNA
ggaagtggcgttgctggtcggttcgatctttgcagcaatcaaaattgccttacccggttggtgcagagtcaaaat

SEQ ID NO: 723428 - DNA, 75 bp, synthetic construct
  source 1..75: mol_type = other DNA
aacgaagggaagggaacgctggaacggatacgtaaagcgctgagagatcccctcataatttccccaaagcgtaac

SEQ ID NO: 723429 - DNA, 75 bp, synthetic construct
  source 1..75: mol_type = other DNA
acaacttataatcctggagtgattccagacttagtcgttccaacggtatctgtcagagacagaattagtgcattt

SEQ ID NO: 723430 - DNA, 75 bp, synthetic construct
  source 1..75: mol_type = other DNA
tcatttctttctcatggtatgcgaatgctacggattttgtttatagagtggattctcgcccgccagaggaaatat

SEQ ID NO: 723431 - DNA, 75 bp, synthetic construct
  source 1..75: mol_type = other DNA
gaaatctgctgtatcactgggtaaacgggacaaaaaaagctatcagatggatccggcgaatgcaatggaagctat

SEQ ID NO: 723432 - DNA, 75 bp, synthetic construct
  source 1..75: mol_type = other DNA
tctcgcttgcggagcgcggactactgggcgccgtgatagtggatgaagcgcaccttatcgatcaatggggggcgg

SEQ ID NO: 723433 - DNA, 75 bp, synthetic construct
  source 1..75: mol_type = other DNA
ttattttaaaatcgatatacataaatgcatttatgatggtttcactcactttcatggcatcgttcagagtcacat

SEQ ID NO: 723434 - DNA, 75 bp, synthetic construct
  source 1..75: mol_type = other DNA
agctaaagaagaatatgaaaaaataatagatgatgtgcaaggtcagtttttatgtgtgtcagaccataaaaagaa

SEQ ID NO: 723435 - DNA, 75 bp, synthetic construct
  source 1..75: mol_type = other DNA
atgaggggatctctcagagccgcgcatcagttggaaggtggctggaatgaaggaggaaaaggcatcagcatcgct

SEQ ID NO: 723436 - DNA, 75 bp, synthetic construct
  source 1..75: mol_type = other DNA
aatctttccgcaaggtgacgaacaggagccgaatgaagagggtttacaattttatgatgatctcttcgatgaatg

SEQ ID NO: 723437 - DNA, 75 bp, synthetic construct
  source 1..75: mol_type = other DNA
gcgattcttgccagaggttgtgtcgactttatcggctttagctactacatgtcttttacgacacaattttcgcca

SEQ ID NO: 723438 - DNA, 75 bp, synthetic construct
  source 1..75: mol_type = other DNA
caggaagtgccgtcgatgccgggcgtatttcgtctgtcggttgatatgttgcttcatgatgccgcgcaatttgtt

SEQ ID NO: 723439 - DNA, 75 bp, synthetic construct
  source 1..75: mol_type = other DNA
agcaaagtgaattagttgctgttgagatgatacctactgaaaacattgttgaagctgttcagttaaattacgaca

SEQ ID NO: 723440 - DNA, 75 bp, synthetic construct
  source 1..75: mol_type = other DNA
agggctcccgttttacggttgaactcatcaaaactgctgccgtcaccggcagcggtccgctggcagcaggggaat

SEQ ID NO: 723441 - DNA, 75 bp, synthetic construct
  source 1..75: mol_type = other DNA
tctacatgtacatgtggagtcaacaggcgagcagtaccggtttgtcatgcccggcgcaacattaagtgaagatga

SEQ ID NO: 723442 - DNA, 75 bp, synthetic construct
  source 1..75: mol_type = other DNA
gtcaggtgtgcagggagcgcaggtcacggcgcgacaggggcggcgcgaccggaacggtcgctgcaagccgggttt

SEQ ID NO: 723443 - DNA, 75 bp, synthetic construct
  source 1..75: mol_type = other DNA
cgtattgcatatgggccatgaacccttgcgaaaaacatatacatcacaggctgagagaatgattgctgaagccgt

SEQ ID NO: 723444 - DNA, 75 bp, synthetic construct
  source 1..75: mol_type = other DNA
tttcctgcgccgctgcgggaaagtggtcaatgcaatgctggctgtttacccgtatcttgaaaactatgttgatgc

SEQ ID NO: 723445 - DNA, 75 bp, synthetic construct
  source 1..75: mol_type = other DNA
gccatcgacgaagtaggcctgagcgtcgcccaggtcgaagagatgtatcgttacctcgccattgccaactatgaa

SEQ ID NO: 723446 - DNA, 75 bp, synthetic construct
  source 1..75: mol_type = other DNA
gcgccgccacgctcaatcagggaactcgcctgtgctcccatgatgatacgcaaaaaatttacgcttacctttccc

SEQ ID NO: 723447 - DNA, 75 bp, synthetic construct
  source 1..75: mol_type = other DNA
aacccatgtaaaggagtcagaaaattctctcttaaagcccgcactgtttacatcaccgatgaacagtatgcagcg

SEQ ID NO: 723448 - DNA, 75 bp, synthetic construct
  source 1..75: mol_type = other DNA
cctacggcaccgtaaaagggatgacgccggaagaagttgaagccactggcgcgcaaattatcctcggcaacacct

SEQ ID NO: 723449 - DNA, 75 bp, synthetic construct
  source 1..75: mol_type = other DNA
cacaccaggcgaatacctcgaaaaccgtagtctttacagcgcactgctggtcagtgcctgcgaagcggacattat

SEQ ID NO: 723450 - DNA, 75 bp, synthetic construct
  source 1..75: mol_type = other DNA
aacatgcaatcagtggctgcagcgttaaagattgaggcagaaaagtccgccagaatgcttgaagatagggaggcc

SEQ ID NO: 723451 - DNA, 75 bp, synthetic construct
  source 1..75: mol_type = other DNA
ttatggataaagggatctacattgagcaaaacaaaaccggcaccaaacaaatcaaggaatggtcaccgcgattac

SEQ ID NO: 723452 - DNA, 75 bp, synthetic construct
  source 1..75: mol_type = other DNA
tcagagggcgttgctggcggtattcggtaaagtgcttgctgataatgtaaaaattgagcaagtaagaattttcat

SEQ ID NO: 723453 - DNA, 75 bp, synthetic construct
  source 1..75: mol_type = other DNA
catcaccgatgaacagtatgctgcgatatatgcggaagcaattccacagttacgtattgcaatggagatatccta

SEQ ID NO: 723454 - DNA, 75 bp, synthetic construct
  source 1..75: mol_type = other DNA
cgtgccttaattatggcaccgacgcgtgaacttgccgtgcagatccacgccgacgcggaaccgctggcggaagct

SEQ ID NO: 723455 - DNA, 75 bp, synthetic construct
  source 1..75: mol_type = other DNA
tctgccaaaaccgctgcgcctgacacgcacgcgcccaggtaatggtccgcgtcgtactggcgctccgcgtaatcg

SEQ ID NO: 723456 - DNA, 75 bp, synthetic construct
  source 1..75: mol_type = other DNA
agaagttttccgacttcgccctgcatccgaaggttgtagaagcccttgaaaaaaaagggtttcataactgtacgc

SEQ ID NO: 723457 - DNA, 75 bp, synthetic construct
  source 1..75: mol_type = other DNA
tattggcttcctcgctttacatctcccggcggcactcctgcttggcccgatgatcgccgggatcatcttcagtat

SEQ ID NO: 723458 - DNA, 75 bp, synthetic construct
  source 1..75: mol_type = other DNA
ttattggtgcgctatagctcgctaccgggtaataccggcgcctggggttcttctcctggcggcgcagcggcaatg

SEQ ID NO: 723459 - DNA, 75 bp, synthetic construct
  source 1..75: mol_type = other DNA
tggatctatacaaagatccaaaggatattatttatcaatgtgataagaaaggactatatgttctttctgtcacga

SEQ ID NO: 723460 - DNA, 75 bp, synthetic construct
  source 1..75: mol_type = other DNA
acctagctgattttgggaatactccgcagcgtggcgctaaaacgctgcaagcagctactgagatcggagataaga

SEQ ID NO: 723461 - DNA, 75 bp, synthetic construct
  source 1..75: mol_type = other DNA
aggcattgaaccgcagccggttgatgttgtggtgacgctgccgctgggcgagtacctggatgaaaacgatcagcc

SEQ ID NO: 723462 - DNA, 75 bp, synthetic construct
  source 1..75: mol_type = other DNA
ccgttatatcccgaatgcagaacagcgtgagcggatcctgacagtattacgtgaccgggaaaaaaaactgcagca

SEQ ID NO: 723463 - DNA, 75 bp, synthetic construct
  source 1..75: mol_type = other DNA
atgaaaggattattacctttactcattttttctatgggcattcccgcccatgccggaattgtcatctacgggacg

SEQ ID NO: 723464 - DNA, 75 bp, synthetic construct
  source 1..75: mol_type = other DNA
agctaattgggtgacgatttcggatgtcaaagctaataatgtcaaagtcaattatgaaactattatgattgcccc

SEQ ID NO: 723465 - DNA, 75 bp, synthetic construct
  source 1..75: mol_type = other DNA
actcagttgaatattttgcagatggtacggccaccgcgggtaatgtaaccagtaatgtagtctatttcatccagt

SEQ ID NO: 723466 - DNA, 75 bp, synthetic construct
  source 1..75: mol_type = other DNA
ttctgctggttataggctggtttggtgtgcgcaaacgcgttgctgaaattcacagcactgcgccagtcgtcgagg

SEQ ID NO: 723467 - DNA, 75 bp, synthetic construct
  source 1..75: mol_type = other DNA
agaagacggtgtgttggttgatgagtcttcggtgagtgcgccgctggactacctgcatggtcacggttccctgat

SEQ ID NO: 723468 - DNA, 75 bp, synthetic construct
  source 1..75: mol_type = other DNA
atctatatatgcatactcgacatgtcgtttctggtcaaaagaaagtgtggctgtaggagatacaataaaattgtc

SEQ ID NO: 723469 - DNA, 75 bp, synthetic construct
  source 1..75: mol_type = other DNA
gttagtttaaatagcaatatcaaaaatgatattgtattgtccggagtaatgaccggaacatcaaagatttttcat

SEQ ID NO: 723470 - DNA, 75 bp, synthetic construct
  source 1..75: mol_type = other DNA
ccctgaatggcaaatgaaacgggaaatgctatcgccttcgtatacaacacaatggactgagatccccattgcttc

SEQ ID NO: 723471 - DNA, 75 bp, synthetic construct
  source 1..75: mol_type = other DNA
acaggacagccgggacattattgccgccgcatgcagagccttaaaccatgtctggcgtgaagggtaccgctatat

SEQ ID NO: 723472 - DNA, 75 bp, synthetic construct
  source 1..75: mol_type = other DNA
gtgcaacgcgttcctaaagacgtatttatgggcgttgatgaactgcaggtaggtatgcgtttcctggctgaaacc

SEQ ID NO: 723473 - DNA, 75 bp, synthetic construct
  source 1..75: mol_type = other DNA
tataaccccaatggggataaagatacaggaaacagtcagtggaaatgacaggttgtttttttaccctactccatt

SEQ ID NO: 723474 - DNA, 75 bp, synthetic construct
  source 1..75: mol_type = other DNA
atattttttatcagaacagcagtaaatcattctgggataagccctataccatcatcgaaaaagacggcgtgaaaa

SEQ ID NO: 723475 - DNA, 75 bp, synthetic construct
  source 1..75: mol_type = other DNA
cggttattacgtttatcacgcggtggttgattacttcaaagcgggcaacaccattacggatgaacagctcaacgg

SEQ ID NO: 723476 - DNA, 75 bp, synthetic construct
  source 1..75: mol_type = other DNA
tatcatatttcagatatctataaaatgtccagaggtagaaaattgtttaaattaaatgtagaaaagaaacctgac

SEQ ID NO: 723477 - DNA, 75 bp, synthetic construct
  source 1..75: mol_type = other DNA
agtttagctttaattcttttagtaaagatgtctatcgtgaacaaaatagtgatatatataaaatattttttaaaa

SEQ ID NO: 723478 - DNA, 75 bp, synthetic construct
  source 1..75: mol_type = other DNA
caaaaaacaataaagaaaaacaaattatctgtcattagtttaaatagcaacatcaaaaatgatattgtattgtcc

SEQ ID NO: 723479 - DNA, 75 bp, synthetic construct
  source 1..75: mol_type = other DNA
ttcatttgttgccgttttatccatggtcatctgatgatggcttttcggtaattgattatcatcaggtcgccagtg

SEQ ID NO: 723480 - DNA, 75 bp, synthetic construct
  source 1..75: mol_type = other DNA
ctttaagcccaaccagaagaagccggaatatgacgacctggtggcactttaccagggcaaagagctgtttcgcta

SEQ ID NO: 723481 - DNA, 75 bp, synthetic construct
  source 1..75: mol_type = other DNA
ttttattaatgacagtttttttaccgccaataacattactaatattattcttcaggtttcgataattgcaattac

SEQ ID NO: 723482 - DNA, 75 bp, synthetic construct
  source 1..75: mol_type = other DNA
ggcgtttcacggttaaacagccacagcgttattgtttgctgcgtattacgccgcctgcgcatcctcaaccgcttg

SEQ ID NO: 723483 - DNA, 75 bp, synthetic construct
  source 1..75: mol_type = other DNA
aaatcaaccacgccctgccgcctgttgtcggcggcctgtttgatgtggtttccaccgcactctgtgccgggatcg

SEQ ID NO: 723484 - DNA, 75 bp, synthetic construct
  source 1..75: mol_type = other DNA
cattattcattgctggcctggctgcatttagtacatcttcaatggcggcgcaatctttacgtttcggttatgaaa

SEQ ID NO: 723485 - DNA, 75 bp, synthetic construct
  source 1..75: mol_type = other DNA
atgaaaaaattgaaattattgtctttactgctaatcatgttgttccccttacttatcgcaggtaatgctcacgca

SEQ ID NO: 723486 - DNA, 75 bp, synthetic construct
  source 1..75: mol_type = other DNA
tgaatttcgtaacgaagccctaaaactcgctgaacgcatcggtgtggccgccgcagcccgtgaactcagcctgta

SEQ ID NO: 723487 - DNA, 75 bp, synthetic construct
  source 1..75: mol_type = other DNA
tgaatttcgcaatgaagccctgaagcttgcagaacgcatcggtgttgctgccgctgcacgcgagctcaacctgta

SEQ ID NO: 723488 - DNA, 75 bp, synthetic construct
  source 1..75: mol_type = other DNA
cgggttttgaagatttctttattgcggttgatccgcaaaccgatctcagtgccgtcacccgtccgcgtgcattac

SEQ ID NO: 723489 - DNA, 75 bp, synthetic construct
  source 1..75: mol_type = other DNA
atgaacgaccacaggttgtggctcaagggattcgcctcgggcgtttcacggttaaacagccacagcgttattgtt

SEQ ID NO: 723490 - DNA, 75 bp, synthetic construct
  source 1..75: mol_type = other DNA
ccagtcctggcggttagcgggagtgtggcggcgggcgattaacctgatgacggaaagcggtgaactgttaacgct

SEQ ID NO: 723491 - DNA, 75 bp, synthetic construct
  source 1..75: mol_type = other DNA
gcgttattgtttgctgcgtattacgccgcctgcacatcctcaaccgcttgcagctgcatggatgcaacgcgcgga

SEQ ID NO: 723492 - DNA, 75 bp, synthetic construct
  source 1..75: mol_type = other DNA
ggtgttaaaagcttgtggtgcagtagattatttctgccagcatgggcacggtttaatatctaaaaaacgcgttga

SEQ ID NO: 723493 - DNA, 75 bp, synthetic construct
  source 1..75: mol_type = other DNA
acaatggtgggccgattttctggatgcaaacagatatatatatatcagtccatttgaatatgcaaagattaataa

SEQ ID NO: 723494 - DNA, 75 bp, synthetic construct
  source 1..75: mol_type = other DNA
ggccgattttctggatgcgaaccgggagaagggtatcagtccgtttgaatatgcaaagattaacaatccattaaa

SEQ ID NO: 723495 - DNA, 75 bp, synthetic construct
  source 1..75: mol_type = other DNA
gggtctaaatactggcgcatgaaatgccgacgcccctcagacaaaaaagaggatcgcctcgcttttggtgtttgg

SEQ ID NO: 723496 - DNA, 75 bp, synthetic construct
  source 1..75: mol_type = other DNA
acagtggtgggcagattttctggatgcaaacagggaggagtgtatcagtccgtttgaatatgcaaagattaacaa

SEQ ID NO: 723497 - DNA, 75 bp, synthetic construct
  source 1..75: mol_type = other DNA
ctgattgaatcaggtttgtggtcccgcgatgctgttgaaaggcagatgagtcatcaggagcgtaacggtgtacga

SEQ ID NO: 723498 - DNA, 75 bp, synthetic construct
  source 1..75: mol_type = other DNA
cttgcggttatgctgaatttactggtttttattcgttccagtgaactcagataggcccgttggtctgaaattgat

SEQ ID NO: 723499 - DNA, 75 bp, synthetic construct
  source 1..75: mol_type = other DNA
gcattgaccacggtaaaacgccagcatcgcccagctcttgatctttctcgcctgcctgaacttatgtcgcgtatt

SEQ ID NO: 723500 - DNA, 75 bp, synthetic construct
  source 1..75: mol_type = other DNA
gcattgaccacggtaaaacgccagcatcgcccagctcttgatctttcacgcctgcctgaacttttgtcgcgtatt

SEQ ID NO: 723501 - DNA, 75 bp, synthetic construct
  source 1..75: mol_type = other DNA
ggcagattttctggatgcaaacagggaggagtgtatcagtccgtttgaatatgcaaaagttaacaatccactgaa

SEQ ID NO: 723502 - DNA, 75 bp, synthetic construct
  source 1..75: mol_type = other DNA
ctcgccgttatgctgaatttactggtttttattcgttccagtgaactcagatatgcccgttggtctgaaattgat

SEQ ID NO: 723503 - DNA, 75 bp, synthetic construct
  source 1..75: mol_type = other DNA
ctcgctgttatgctgaatttactggtttttattcgttccagtgaactcagatacgcccgttggtctgaaattgat

SEQ ID NO: 723504 - DNA, 75 bp, synthetic construct
  source 1..75: mol_type = other DNA
gtgggccgattttctggatgcaaacagagaaagatttatcagtccatttgaatatgcaaagattaataatccatt

SEQ ID NO: 723505 - DNA, 75 bp, synthetic construct
  source 1..75: mol_type = other DNA
atgcgctatgccgattttccaacgctggttgatgctttggactacgccgctctgagtagcgccggaatgaatttt

SEQ ID NO: 723506 - DNA, 75 bp, synthetic construct
  source 1..75: mol_type = other DNA
tttccccgtggcgtcattatcacccatcgcgaagtgatggctaatctacgtgctataagccacgacggcattaaa

SEQ ID NO: 723507 - DNA, 75 bp, synthetic construct
  source 1..75: mol_type = other DNA
cgccctgcgctggatctttcacgcctgcctgaacttctgtcgtgcattgacagttataaaggtcagcctgtcacc

SEQ ID NO: 723508 - DNA, 75 bp, synthetic construct
  source 1..75: mol_type = other DNA
tggcaacaaaaaacgctttatctcacggtaagtattggcgtcggtagtggtcgcgcatcgtaccgaacgctgacc

SEQ ID NO: 723509 - DNA, 75 bp, synthetic construct
  source 1..75: mol_type = other DNA
atctcacggtaagtattggcgtcggtagtggttgcgcatcgtaccgaacgctgaccgatgactttaataaattga

SEQ ID NO: 723510 - DNA, 75 bp, synthetic construct
  source 1..75: mol_type = other DNA
gctacgtaatagcatcgctatttttgcgctaaccacgctgttctattttattggtgcagagttacggctggttca

SEQ ID NO: 723511 - DNA, 75 bp, synthetic construct
  source 1..75: mol_type = other DNA
cagttatgctgaatttactggtttttattcgttccagtgaactcagatatgcccgctggtctgaaattgatattg

SEQ ID NO: 723512 - DNA, 75 bp, synthetic construct
  source 1..75: mol_type = other DNA
tgctgcttacattcataaagcagaacatctggaagaacgtcgactgatgctacagtggtgggccgattttcttga

SEQ ID NO: 723513 - DNA, 75 bp, synthetic construct
  source 1..75: mol_type = other DNA
ggagcgcaacggagtacgtgccgcgtatattcataaagcagaacatctggaagaacgtcggcttatgctgcaatg

SEQ ID NO: 723514 - DNA, 75 bp, synthetic construct
  source 1..75: mol_type = other DNA
attcataaagcagaacatctggaagaacgccgcttgatgctacaatggtgggccgattttctggatgcaaacaga

SEQ ID NO: 723515 - DNA, 75 bp, synthetic construct
  source 1..75: mol_type = other DNA
gatatctgctgtaatgcgttatgccgtacagtctggcatcatcagatataatcctgctctggatatggctggcgc

SEQ ID NO: 723516 - DNA, 75 bp, synthetic construct
  source 1..75: mol_type = other DNA
aataaagccctgagggtgatggggtatgacacaactcaggaagtctgtggccatggattccgggcgatggcgtgc

SEQ ID NO: 723517 - DNA, 75 bp, synthetic construct
  source 1..75: mol_type = other DNA
tcggagggggttgacccttgcgaacagaaaagagctaaaaaagtagtccctgatttacaactctcttttgaacat

SEQ ID NO: 723518 - DNA, 75 bp, synthetic construct
  source 1..75: mol_type = other DNA
gaccaatccttaccgactccggcggcttccaggtcttcagccttggtgatattcgtaaaatcaccgaacagggcg

SEQ ID NO: 723519 - DNA, 75 bp, synthetic construct
  source 1..75: mol_type = other DNA
gggtgagccgaaaggagatatgcaccgcattctggagcatgtatgcccgcaaattccggcagacaaaccgcgtta

SEQ ID NO: 723520 - DNA, 75 bp, synthetic construct
  source 1..75: mol_type = other DNA
acgtagccgcgaccatttcgatcgcctcggcaacaaaaatgcgttgtttggcattattcagggcagcgtttacga

SEQ ID NO: 723521 - DNA, 75 bp, synthetic construct
  source 1..75: mol_type = other DNA
tttattattataaaacaagattgagatatttacacaaacttttatcgtggatgttaatctatctctttccattat

SEQ ID NO: 723522 - DNA, 75 bp, synthetic construct
  source 1..75: mol_type = other DNA
ataccggtagcggaacgtgtggtgggccatatttgcatctctggccccagcctgatgagtggctactttggcgac

SEQ ID NO: 723523 - DNA, 75 bp, synthetic construct
  source 1..75: mol_type = other DNA
ctgattgccgaaaccagtagcgggtttgtcgaagcattttttgcctgccagtatgccgggttagtcgccgtcccg

SEQ ID NO: 723524 - DNA, 75 bp, synthetic construct
  source 1..75: mol_type = other DNA
tatggcgatgcaaaccctgcgcctgttcagtattttgctgacagggcctgccattgcgcggtttatttcaaccta

SEQ ID NO: 723525 - DNA, 75 bp, synthetic construct
  source 1..75: mol_type = other DNA
taccgcaaattctgttgtcaatttttgctctgctggctatttgcgccgcaatggcatgggggctgacccggttta

SEQ ID NO: 723526 - DNA, 75 bp, synthetic construct
  source 1..75: mol_type = other DNA
ccagtctggcgagttcatcacgattgagttaccggaatggctgctggcgatagcatatatggcgattggctggcg

SEQ ID NO: 723527 - DNA, 75 bp, synthetic construct
  source 1..75: mol_type = other DNA
cattacgttttgctgccatcgtgcctggcgcttatttctggcgtcatgctgatgataatgaacgggaatcaggga

SEQ ID NO: 723528 - DNA, 75 bp, synthetic construct
  source 1..75: mol_type = other DNA
gtggctgcggtactgactctgtggtcaatgttgcaatatttgagcgctgcgcgcgcagatttgcttgatcagtga

SEQ ID NO: 723529 - DNA, 75 bp, synthetic construct
  source 1..75: mol_type = other DNA
acgcagtagcgtggctgtctcctggattgggaaagtgaaagccactgcccagatggtggcgttggcctggctgct

SEQ ID NO: 723530 - DNA, 75 bp, synthetic construct
  source 1..75: mol_type = other DNA
ataataatgtaagaaatagatttaatttgattttgcatttcttattggttttttgtagatattgtttgcctgttt

SEQ ID NO: 723531 - DNA, 75 bp, synthetic construct
  source 1..75: mol_type = other DNA
gcgccaccttatccaacctgggcggcggtgggtgttacctggctggcaggctttgattttgaaattaaagtgata

SEQ ID NO: 723532 - DNA, 75 bp, synthetic construct
  source 1..75: mol_type = other DNA
tgccactcagccaacaggctgtagccatactggcagaacttcagacatgggcaggtgaaaatggtctgatcttta

SEQ ID NO: 723533 - DNA, 75 bp, synthetic construct
  source 1..75: mol_type = other DNA
ccgtttgattaaaaaaagagggctttctcgttcatcaggtaaaaatgaagaaggtattcagacagacccttttca

SEQ ID NO: 723534 - DNA, 75 bp, synthetic construct
  source 1..75: mol_type = other DNA
tcgctcattcagaagcacaaggtcggattacgcgaactgggaattcttccatttcaaaaggaacgattaaaaacc

SEQ ID NO: 723535 - DNA, 75 bp, synthetic construct
  source 1..75: mol_type = other DNA
ggcatacattcataaggctgaacatttggatgagagacgattgatgctgcagtggtgggcggattttctggatgc

SEQ ID NO: 723536 - DNA, 75 bp, synthetic construct
  source 1..75: mol_type = other DNA
cacgtgacattaccaccctcaggactcccgatttacttgttcccgttaaagcagccgaagcaaaggagatatatg

SEQ ID NO: 723537 - DNA, 75 bp, synthetic construct
  source 1..75: mol_type = other DNA
agccagttggacagaccacgaacgcagtgagtgggctgcccgcagggcgagcgaagcgagtcattcccccctcac

SEQ ID NO: 723538 - DNA, 75 bp, synthetic construct
  source 1..75: mol_type = other DNA
tgaactcaaatactacacgtttagcccgttgttaataaagcaaaaccatctcaatctcctgctgccacccttttt

SEQ ID NO: 723539 - DNA, 75 bp, synthetic construct
  source 1..75: mol_type = other DNA
tcaataactggcgcaacaacggatgttgctgatgaaagttatatgtattttggttttacctctggaggcgcgcgc

SEQ ID NO: 723540 - DNA, 75 bp, synthetic construct
  source 1..75: mol_type = other DNA
ctggagtcaggaagtgcaggggtcacgataggggcatatttgtctgtgatgcaggttttgggcctggaaacggat

SEQ ID NO: 723541 - DNA, 75 bp, synthetic construct
  source 1..75: mol_type = other DNA
gatgatcatttacgcaatcatggatttatcttgataccaggaaaaggttggcggctttctgaggcatatgatttg

SEQ ID NO: 723542 - DNA, 75 bp, synthetic construct
  source 1..75: mol_type = other DNA
aactagctgcgtttcttggagcaaagaatatctacttgcttggtgtcgatttacagtatccacgtagtaaaccac

SEQ ID NO: 723543 - DNA, 75 bp, synthetic construct
  source 1..75: mol_type = other DNA
ggcaaaggggcgaagcattttgatgttgacgccttcgatgcccgctgggcttacaccgttgatggtggtggcgtc

SEQ ID NO: 723544 - DNA, 75 bp, synthetic construct
  source 1..75: mol_type = other DNA
tacgctggagcaggaatttacccggctggggaaaaattcggtgggggaaaacaccgactcgcagcgtacccgccg

SEQ ID NO: 723545 - DNA, 75 bp, synthetic construct
  source 1..75: mol_type = other DNA
taattcgcgaagcgattctgcatgcggcccggctcaccgcccgcgaaaaaagacagacactgacccaggatatcc

SEQ ID NO: 723546 - DNA, 75 bp, synthetic construct
  source 1..75: mol_type = other DNA
taatcccgccccgcagatggccgactcaccccggcagttctggcaacagatggcgcagcaggatgacacgccgga

SEQ ID NO: 723547 - DNA, 75 bp, synthetic construct
  source 1..75: mol_type = other DNA
gcgccgctgaatggctacctccgggcgctgccgatgtgttttaacccgacgctggataagaagaactggtacacc

SEQ ID NO: 723548 - DNA, 75 bp, synthetic construct
  source 1..75: mol_type = other DNA
cgttgaggatgcgctccaggacagctttgacgagcgggacagtcacccgtgggttatccagttcttctgccagga

SEQ ID NO: 723549 - DNA, 75 bp, synthetic construct
  source 1..75: mol_type = other DNA
atgatggggctttcattattccgttcacgccggaaagcgcaggcggtttctgctgaaaaaacggctgacaaagcc

SEQ ID NO: 723550 - DNA, 75 bp, synthetic construct
  source 1..75: mol_type = other DNA
tggccacacacgcgacgtaccgggaagggcgacagatgctgccggaagatttgcaggtggcactccgggaaatct

SEQ ID NO: 723551 - DNA, 75 bp, synthetic construct
  source 1..75: mol_type = other DNA
agcggttattgactacagctttcacggtgttatccagcacattaatcacgccatcctcgacgaaattccgatgat

SEQ ID NO: 723552 - DNA, 75 bp, synthetic construct
  source 1..75: mol_type = other DNA
ttgttgttaatgcagatggacaggcgaagcaggatttgctgattgaaagcgggattgttcgccagttgggtaccg

SEQ ID NO: 723553 - DNA, 75 bp, synthetic construct
  source 1..75: mol_type = other DNA
tcagtgcagcgagctggaagccgcatttcatgtggcccggaagctggacaggctgcgtgggctgactgacgggga

SEQ ID NO: 723554 - DNA, 75 bp, synthetic construct
  source 1..75: mol_type = other DNA
cgacgcagaacctgaaggactatccggatatatcagagaaaatgctgaacatggcggagtggtgggtgtgtctga

SEQ ID NO: 723555 - DNA, 75 bp, synthetic construct
  source 1..75: mol_type = other DNA
tctggggcgtgatattgtgtttgcagtggatgaggcgcatatcgtgacggtgaatccgctgctctcgccctatat

SEQ ID NO: 723556 - DNA, 75 bp, synthetic construct
  source 1..75: mol_type = other DNA
gctcaaccaggtgtgtgaccgggttgtgaatgccctgggcggggtggggatccgctgcacccgacagaatggtct

SEQ ID NO: 723557 - DNA, 75 bp, synthetic construct
  source 1..75: mol_type = other DNA
ttagatgccaaagcgcagggtaaaatcagcgattccttcaaacgctttgccgatatccatctttcccgccatgcc

SEQ ID NO: 723558 - DNA, 75 bp, synthetic construct
  source 1..75: mol_type = other DNA
ctgtctcactcgcccttaaatctggcaacttcggtgatgaagcctttttttcacgagcccaaagagagtttttat

SEQ ID NO: 723559 - DNA, 75 bp, synthetic construct
  source 1..75: mol_type = other DNA
ccaggaaagtgtacttgctccactggtttttgccaccgccagcactgacgcattggcagcaattcaacagcaata

SEQ ID NO: 723560 - DNA, 75 bp, synthetic construct
  source 1..75: mol_type = other DNA
gcagccggcctcggattcacttataacgtaggtgctctgggaggagcggttgctccagtactgggggcagttgtt

SEQ ID NO: 723561 - DNA, 75 bp, synthetic construct
  source 1..75: mol_type = other DNA
aaatattccggaagcagaggactggaaagaaaaacatgaagggaaagcacctgtccgtacaatggtggatatttt

SEQ ID NO: 723562 - DNA, 75 bp, synthetic construct
  source 1..75: mol_type = other DNA
tcagttgccacgcctgacgcgtgatattgattcgatattgttgctggcgggttactacgatcctgtcgtcgcgca

SEQ ID NO: 723563 - DNA, 75 bp, synthetic construct
  source 1..75: mol_type = other DNA
ggaagagttcgacggcaacattgccagctttatcttttctggcaagcctggaactggcaaaaaccatctggcggc

SEQ ID NO: 723564 - DNA, 75 bp, synthetic construct
  source 1..75: mol_type = other DNA
cggcgaaaagctggatgaagtgagtatcagcctagtgttccacgatcactattgccagccggatgttgaactggc

SEQ ID NO: 723565 - DNA, 75 bp, synthetic construct
  source 1..75: mol_type = other DNA
atgtttgccgtactgggtgatattgagtttgaggtggtgacctactgggacggctttgatgcgtcgtttggtatg

SEQ ID NO: 723566 - DNA, 75 bp, synthetic construct
  source 1..75: mol_type = other DNA
gaacaaagccttatattattgctgtgtgttacttactactatgcttggtaaaaggtaattttaagcaatctttaa

SEQ ID NO: 723567 - DNA, 75 bp, synthetic construct
  source 1..75: mol_type = other DNA
accgctcagggagcagatgctgaacaggcgctgaaagctattggcgacgctatcgccgccggccttggggagggc

SEQ ID NO: 723568 - DNA, 75 bp, synthetic construct
  source 1..75: mol_type = other DNA
aacttcgcgcattgctgatgggcgaaaagcagagtgagcagctgaagctcgacaacgaaatgctgacgctggata

SEQ ID NO: 723569 - DNA, 75 bp, synthetic construct
  source 1..75: mol_type = other DNA
ttgatttcagccatagacgacaatctggggtcgtctcagaaaacggaatctatggtcactcccgtttttgcaaca

SEQ ID NO: 723570 - DNA, 75 bp, synthetic construct
  source 1..75: mol_type = other DNA
aatccccccaaagtctaaaaggcccgctgcgggatagtaatggacgttttgtatcccaaaaaagcaatgaggatg

SEQ ID NO: 723571 - DNA, 75 bp, synthetic construct
  source 1..75: mol_type = other DNA
ctccgcaaatccatgaaaacaaaaggtaatgggattaagttaagcgatctttttagtcgaaacagagatcgcatt

SEQ ID NO: 723572 - DNA, 75 bp, synthetic construct
  source 1..75: mol_type = other DNA
gcgctggcggtattacaacaaaaaaacattccgcatggtgatattcgcgtcgcctttaccccggatgaagaagtg

SEQ ID NO: 723573 - DNA, 75 bp, synthetic construct
  source 1..75: mol_type = other DNA
ggacaaaaaatgctggtgggaacgagggtagtacctcaccaaaatcatcgggtgataaatcttcagttaaaacca

SEQ ID NO: 723574 - DNA, 75 bp, synthetic construct
  source 1..75: mol_type = other DNA
aaagcactggagaacgtttattccgttctcaaagagattcttggcgtaagcaaagacaaccgcaaaggcgatcag

SEQ ID NO: 723575 - DNA, 75 bp, synthetic construct
  source 1..75: mol_type = other DNA
tatttccaaatgggcacccccaaaggagaacaatactaatcaatatattgataacgtcagcaaatatcttggcgt

SEQ ID NO: 723576 - DNA, 75 bp, synthetic construct
  source 1..75: mol_type = other DNA
gaatcaatggttcgcgctttacgcacgggaaattacagcgtggtgatcggttggttagcagatgatctgacagaa

SEQ ID NO: 723577 - DNA, 75 bp, synthetic construct
  source 1..75: mol_type = other DNA
accggataagggaaaacacgctgtgaacccgcgtcgcaacaatgccttattgtctctgcaactgggttatgaata

SEQ ID NO: 723578 - DNA, 75 bp, synthetic construct
  source 1..75: mol_type = other DNA
gatgagctgctcatgcgggataacttttttgtggcagatgagacccgtcatcagtgggtgaatgagcacaatggc

SEQ ID NO: 723579 - DNA, 75 bp, synthetic construct
  source 1..75: mol_type = other DNA
tggcaatatcccggcgattggctttatttctcatgtggatacctcaccggattgcagcggcaaaaatgtgaatcc

SEQ ID NO: 723580 - DNA, 75 bp, synthetic construct
  source 1..75: mol_type = other DNA
ataacgtcagtaaatatcttggtgtatcgcctaatgaaaaaatagatgtcagcaaaccagaggttatgacgcaat

SEQ ID NO: 723581 - DNA, 75 bp, synthetic construct
  source 1..75: mol_type = other DNA
gtttattatgcgtccagtaagcacaacctctcacgccacgagacaactttccggggtaaagattcactctaattt

SEQ ID NO: 723582 - DNA, 75 bp, synthetic construct
  source 1..75: mol_type = other DNA
gcggcagggaaagacgctggtaaagcggcaacttccgcaggggaaagccttaccaggaaagaggcgggtaaggtt

SEQ ID NO: 723583 - DNA, 75 bp, synthetic construct
  source 1..75: mol_type = other DNA
cgacccgacgggtgaatttgcgtttgttggtgcaggtattggagctgggttggagctacttagccaactaatcga

SEQ ID NO: 723584 - DNA, 75 bp, synthetic construct
  source 1..75: mol_type = other DNA
tgccggttacgccatcaactggaggtttatcgtggttatgccgcccataaagcggtcatcgattacagctttcac

SEQ ID NO: 723585 - DNA, 75 bp, synthetic construct
  source 1..75: mol_type = other DNA
tttatcgcggttatgccgcccacaaagcagtcatcgactacagctttcacggtgtcattcaacatattaatcacg

SEQ ID NO: 723586 - DNA, 75 bp, synthetic construct
  source 1..75: mol_type = other DNA
cagcgatacacctacagtcgccacaatgggatgctcaagcctgatgtggttgagggtgcgccgtgtaccggcttt

SEQ ID NO: 723587 - DNA, 75 bp, synthetic construct
  source 1..75: mol_type = other DNA
cagaaccggctggtggccgcaacggtcgcgggagtgactgtaagctacacatacaaccatctggatcagcgtgta

SEQ ID NO: 723588 - DNA, 75 bp, synthetic construct
  source 1..75: mol_type = other DNA
ccaatggcaacctgacgaagcagggggcggataccttcacctatgacagccagaaccggctggtggccgcaacgg

SEQ ID NO: 723589 - DNA, 75 bp, synthetic construct
  source 1..75: mol_type = other DNA
ggctctagcaatcagccaggctatggcgggcttttcgtctgcagcgccagcaccgaaaaccccacagcaggagca

SEQ ID NO: 723590 - DNA, 75 bp, synthetic construct
  source 1..75: mol_type = other DNA
gagtaactatttattcgaggtcgatctaatcgatctcgatgaactgcgtcgttacgatctcaatatcgtgcagca

SEQ ID NO: 723591 - DNA, 75 bp, synthetic construct
  source 1..75: mol_type = other DNA
aaggctggagcagttggcgcgtctcaacgatgggattgctcaatatgggccgtggagaaggttcacagatcattc

SEQ ID NO: 723592 - DNA, 75 bp, synthetic construct
  source 1..75: mol_type = other DNA
caaattcaacatcgccatctccacgacaatgccgactattcgccctgggagggctttacctgtcagggcgcgatt

SEQ ID NO: 723593 - DNA, 75 bp, synthetic construct
  source 1..75: mol_type = other DNA
ttaaccgcgccgcgctatcacgcattgagtcgacctctggaatgcgaagcagaagctatcgcccgcatgattaac

SEQ ID NO: 723594 - DNA, 75 bp, synthetic construct
  source 1..75: mol_type = other DNA
cggcttaggtctggattatctgcgtcttgcccgtgcgaatcaccagccagtctgggttgaaacctgcccacaata

SEQ ID NO: 723595 - DNA, 75 bp, synthetic construct
  source 1..75: mol_type = other DNA
ctttatcttaaactttgatctcaatggatggattatatctatgtttggtaaagcatgggattatctttccaacat

SEQ ID NO: 723596 - DNA, 75 bp, synthetic construct
  source 1..75: mol_type = other DNA
cgccgcatttttcgttatcttattgattatagtggctattttggcgcgctggatcgctccttatgacgccgaaaa

SEQ ID NO: 723597 - DNA, 75 bp, synthetic construct
  source 1..75: mol_type = other DNA
gcactggtttggcgtcgattcactggggcgcgacattttcagccgtgtcctggttggtgcgcaaatctcgctggc

SEQ ID NO: 723598 - DNA, 75 bp, synthetic construct
  source 1..75: mol_type = other DNA
cagccacgcactgtcaaacatgtattccgccgctgtattcagctacctggcggatgacctgcgcgagctgcagga

SEQ ID NO: 723599 - DNA, 75 bp, synthetic construct
  source 1..75: mol_type = other DNA
atgttgctgctccttatgtatctctcaaggagtattccagactaaccggcattccattcgacacatgcaggttaa

SEQ ID NO: 723600 - DNA, 75 bp, synthetic construct
  source 1..75: mol_type = other DNA
atagcgtgtagggtagctatgctggctttatctgtagcgacaaagctaacacccttcgggtggattcagatggct

SEQ ID NO: 723601 - DNA, 75 bp, synthetic construct
  source 1..75: mol_type = other DNA
cgaaggcgttcgactatatcctgaatcactggaatgcgctgaacgagttctgtcgtgacggccaggtggaaatag

SEQ ID NO: 723602 - DNA, 75 bp, synthetic construct
  source 1..75: mol_type = other DNA
ggtgaaaacgcgttacgatcggtggcggttggaagaaaaaattatctctttttcggctcagacaagggaggagaa

SEQ ID NO: 723603 - DNA, 75 bp, synthetic construct
  source 1..75: mol_type = other DNA
gtgatcgagaagctcaatgactggccgtcgaaccaagtgcatgaactgctgccctggaacttctcgtctgtaaaa

SEQ ID NO: 723604 - DNA, 75 bp, synthetic construct
  source 1..75: mol_type = other DNA
attgtgttggcgatttttgctcgctggatagccccttacgatgcagaaaactattttgattatgacaatctgaat

SEQ ID NO: 723605 - DNA, 75 bp, synthetic construct
  source 1..75: mol_type = other DNA
ctatcgtggtgtttttcaccatgcgcattggcacctcgattatctctgccgccagcctgtcatttctcggcctcg

SEQ ID NO: 723606 - DNA, 75 bp, synthetic construct
  source 1..75: mol_type = other DNA
acaccagagtggggagcaatgctcaatgaggcacgagcggatatggttatcgcgccgcatgtcgctgtttttccg

SEQ ID NO: 723607 - DNA, 75 bp, synthetic construct
  source 1..75: mol_type = other DNA
atcgtggcaacgccgggtcgtttgctggatcacttgcaaaaaggcacggtatcactggatgcgctgaatactttg

SEQ ID NO: 723608 - DNA, 75 bp, synthetic construct
  source 1..75: mol_type = other DNA
tgctgctgacggtgtgacgttctccgttccggtcacaccacatacgttccgccattcctatgcgatgcacatgct

SEQ ID NO: 723609 - DNA, 75 bp, synthetic construct
  source 1..75: mol_type = other DNA
ttgttcggtagccctatcgacattcttaaccgtgcggcccccgttgcgctactggcgattggtatgacgctggtt

SEQ ID NO: 723610 - DNA, 75 bp, synthetic construct
  source 1..75: mol_type = other DNA
cagcgcaggtgcggcggcactggcgggtgcggtaggttactttgtgttaaccaaagcgatggtgaccatcaaccc

SEQ ID NO: 723611 - DNA, 75 bp, synthetic construct
  source 1..75: mol_type = other DNA
atagtcattggagccgggatcaacatggcaatgcgccgtgttgaagagagtgtcgttaatcaggggtggatcacg

SEQ ID NO: 723612 - DNA, 75 bp, synthetic construct
  source 1..75: mol_type = other DNA
attatggtgggcgaagtggacgccacgaccgcaagcggtattcacggtctggctgatgaaaacgaagatattcgc

SEQ ID NO: 723613 - DNA, 75 bp, synthetic construct
  source 1..75: mol_type = other DNA
ttctctgtcccggtcacgccacatacgttccgccattcctatgcgatgcacatgctgtatgccggtataccgctg

SEQ ID NO: 723614 - DNA, 75 bp, synthetic construct
  source 1..75: mol_type = other DNA
gtgatggatgaggccgaccgcatgctggatatgggatttagcgatgccattgatgatgtcatccgttttgcgcca

SEQ ID NO: 723615 - DNA, 75 bp, synthetic construct
  source 1..75: mol_type = other DNA
aacgccgccagctaatagttccattgtgacgctggaagcagaaatggcaacgttgtgtatcgatggcgggaaaaa

SEQ ID NO: 723616 - DNA, 75 bp, synthetic construct
  source 1..75: mol_type = other DNA
tgcattgtcgttacacggcgatctggagcaacgtgatcgcgatcagaccctggtacgttttgctaacggtagcgc

SEQ ID NO: 723617 - DNA, 75 bp, synthetic construct
  source 1..75: mol_type = other DNA
ttgatgtataatctgccggccgccagccagaacgtctggatgctgctggtgatgggggttgtcttcttcgctatc

SEQ ID NO: 723618 - DNA, 75 bp, synthetic construct
  source 1..75: mol_type = other DNA
gctggagttcaatatttaaaaccattgctgccagcctgcgtcgtcaggggctgcgggcgaaagccagccggaagt

SEQ ID NO: 723619 - DNA, 75 bp, synthetic construct
  source 1..75: mol_type = other DNA
gcatctcgacagacgcttctgttttcggcaacctggccggaagccatcgccgcaatcagcggacgagtgcaacgc

SEQ ID NO: 723620 - DNA, 75 bp, synthetic construct
  source 1..75: mol_type = other DNA
gcttatccgcccgttgcttgcccgcacgcggggggaactggagcagtgggcattggcgcatggtttacgctggat

SEQ ID NO: 723621 - DNA, 75 bp, synthetic construct
  source 1..75: mol_type = other DNA
agtatcaggcctgggaagacgagtggatgattgatgagtgtttatgtgccatgtatgacgcatcatccgaatcat

SEQ ID NO: 723622 - DNA, 75 bp, synthetic construct
  source 1..75: mol_type = other DNA
aggcggccttgcagagcagaaggattctaaatcttcgtctggttggtctatttttggctcacgttcatcagaaaa

SEQ ID NO: 723623 - DNA, 75 bp, synthetic construct
  source 1..75: mol_type = other DNA
gtgccgatgttcctgttttaggtagtgttacagttaatggtaataattcaactcagtctgttgagtatcgtagct

SEQ ID NO: 723624 - DNA, 75 bp, synthetic construct
  source 1..75: mol_type = other DNA
ttggacacatctggcccgttttctttcggttttaaaggaggaaaaggcgttgctaccgcttttggagcaatcgca

SEQ ID NO: 723625 - DNA, 75 bp, synthetic construct
  source 1..75: mol_type = other DNA
ctaaaattctgtctgataaattcaatatttcagttggtgctgccggactggataattttatcaatattcgaaccg

SEQ ID NO: 723626 - DNA, 75 bp, synthetic construct
  source 1..75: mol_type = other DNA
gttgtcagtgcgccacgactgcgggtaaaaataatgcctcagcgtctttttcagtcggctctgatgtgccagtac

SEQ ID NO: 723627 - DNA, 75 bp, synthetic construct
  source 1..75: mol_type = other DNA
gcctgcctgagcccatccagttacttaatgctgaacagatattgggtcagctggatggcggtagtgtagccgtga

SEQ ID NO: 723628 - DNA, 75 bp, synthetic construct
  source 1..75: mol_type = other DNA
ttccattatcacaaggtttttcaatatatgtatcgctacaaatacaggcaagaattgctcctgcacttaaacaaa

SEQ ID NO: 723629 - DNA, 75 bp, synthetic construct
  source 1..75: mol_type = other DNA
tttacgcacacatgatgccattgatggcaagccattcagtggagcaggcatgattaaaaatgaatcctgtccgtc

SEQ ID NO: 723630 - DNA, 75 bp, synthetic construct
  source 1..75: mol_type = other DNA
acaataatttaacaattgattattatttagcactttcctctaccaaaggcagtggaattactaatatcatttcaa

SEQ ID NO: 723631 - DNA, 75 bp, synthetic construct
  source 1..75: mol_type = other DNA
cgcgccctatacgccgaaagagccggttaagccacgttatacatggacttatacgcctcagtaccgctctgttgc

SEQ ID NO: 723632 - DNA, 75 bp, synthetic construct
  source 1..75: mol_type = other DNA
gtaccttcttgatcgtatcggagagcttaaatcgggcgatgcctgtgttgcagaataccagcaggctggccgtgg

SEQ ID NO: 723633 - DNA, 75 bp, synthetic construct
  source 1..75: mol_type = other DNA
aaagaaaaacacgcaggcaaagcaccagtacgtaccatggtggacattctctaccgtggtgaacatcgtatcgcc

SEQ ID NO: 723634 - DNA, 75 bp, synthetic construct
  source 1..75: mol_type = other DNA
aacggtgttgcaacctatcgtaacacagatttctttggcatagtttgtatgggtccaccacatattgcaattttt

SEQ ID NO: 723635 - DNA, 75 bp, synthetic construct
  source 1..75: mol_type = other DNA
ggggtggcattgcggcacttatgttatgccggatggtgagattattggcgtaccagaaaggcccgttgcattctg

SEQ ID NO: 723636 - DNA, 75 bp, synthetic construct
  source 1..75: mol_type = other DNA
atggcgtttactgggttacgccaaaggttgataagcaatccggtgaaattatccgcccgtgtgagtggattggtg

SEQ ID NO: 723637 - DNA, 75 bp, synthetic construct
  source 1..75: mol_type = other DNA
agtttcggagtttgccggaacacggcttatccgcccgttgcttgcccgcacgcgggggaactggagcagtgggcg

SEQ ID NO: 723638 - DNA, 75 bp, synthetic construct
  source 1..75: mol_type = other DNA
ggcaaaggacacggtaagggaatgccgcgaacggtggcgcaacctgataccggagagttacggcgagcaggttca

SEQ ID NO: 723639 - DNA, 75 bp, synthetic construct
  source 1..75: mol_type = other DNA
tgtcggtgtcgcgtatgatgcagaagcatttactgatatgtttgttgagtgggcggtgactcatgggctggtact

SEQ ID NO: 723640 - DNA, 75 bp, synthetic construct
  source 1..75: mol_type = other DNA
gctgcgagctgttggtgcataaaaatccagaaggtgtggcgatggggattaatccattcgttcacggcagcgcca

SEQ ID NO: 723641 - DNA, 75 bp, synthetic construct
  source 1..75: mol_type = other DNA
tgtcctcttctctgctggtactctggcttgtggcttcgcgcctggctacatcaccatgtttatcgcacgtctggt

SEQ ID NO: 723642 - DNA, 75 bp, synthetic construct
  source 1..75: mol_type = other DNA
tcggtgactggttgggaacgcgcaaagcctatgtttgcagtctgctggcttcgcaactgctgattattccggtat

SEQ ID NO: 723643 - DNA, 75 bp, synthetic construct
  source 1..75: mol_type = other DNA
tttttccttcgtgagttgtgcggggtagattacgcccatgttccagagctcgccccaactaaagagatactcgac

SEQ ID NO: 723644 - DNA, 75 bp, synthetic construct
  source 1..75: mol_type = other DNA
gtgggtattaccggattttgctatggcggtggcgtatcgaacgcggcggctgtcgcgtatccggaactggcctgc

SEQ ID NO: 723645 - DNA, 75 bp, synthetic construct
  source 1..75: mol_type = other DNA
actaccagcgaacgtcagggccgtgtgattgaccgcgaccagtccggttctatggagctgaaaaaacgtcagggg

SEQ ID NO: 723646 - DNA, 75 bp, synthetic construct
  source 1..75: mol_type = other DNA
cggatataacgctttcgcgaatggggttggggacatgggccattggcggcggtcctgcatggaatggcgatctcg

SEQ ID NO: 723647 - DNA, 75 bp, synthetic construct
  source 1..75: mol_type = other DNA
aacgattcatggaatttagtgatcgatggtctggcgaagcgcgatcaaaaacgactgcgtcctgactcaaccgta

SEQ ID NO: 723648 - DNA, 75 bp, synthetic construct
  source 1..75: mol_type = other DNA
tgaatcgttgctcagcgatctgatcaacgactcatggaatttagtggttgatggcttagctaaacgcgatcaaaa

SEQ ID NO: 723649 - DNA, 75 bp, synthetic construct
  source 1..75: mol_type = other DNA
attttttacgccgatagctgaaactgtcgcagtgctcaatgagttaaaggccgaagggaaaattcgcgctatagg

SEQ ID NO: 723650 - DNA, 75 bp, synthetic construct
  source 1..75: mol_type = other DNA
ttgcaacgtctgggtattgattacatcgatatctacatgacgcactggcagtcggtgccgccattttttacgccg

SEQ ID NO: 723651 - DNA, 75 bp, synthetic construct
  source 1..75: mol_type = other DNA
agtggcagccactctgtgctcgttatcagtgcacaattcccactctggcactggcgtggatattaaaacagagtg

SEQ ID NO: 723652 - DNA, 75 bp, synthetic construct
  source 1..75: mol_type = other DNA
agccgtgtatggtcccggcgataaagagttaaaaccgctgtttgactggatgctgcgcggcctgctgccacgact

SEQ ID NO: 723653 - DNA, 75 bp, synthetic construct
  source 1..75: mol_type = other DNA
ggtactgcgattgtagttcaggctgcaggtaaaaacgtttctttcgatggcacagaaggtgatgctaataccctg

SEQ ID NO: 723654 - DNA, 75 bp, synthetic construct
  source 1..75: mol_type = other DNA
tcactactgccgttatgaaagatggtagtggcaaccctgtaaaagagggagccttctcagcaattgcgaatttca

SEQ ID NO: 723655 - DNA, 75 bp, synthetic construct
  source 1..75: mol_type = other DNA
atggataagcaatcattgcacgaaacggcaaaacgcatcgctctcgagctaccgtttgtcgaactttgctggccg

SEQ ID NO: 723656 - DNA, 75 bp, synthetic construct
  source 1..75: mol_type = other DNA
atggataagcaatcactgcacgaaacggcgaaacgcctggcccttgagttaccctttgtcgagctttgctggccg

SEQ ID NO: 723657 - DNA, 75 bp, synthetic construct
  source 1..75: mol_type = other DNA
cgcgctggcagcacggatccaaagcgaatttggcgtaacagcggctatcgatctgttgccgccccacagtattcc

SEQ ID NO: 723658 - DNA, 75 bp, synthetic construct
  source 1..75: mol_type = other DNA
gctttgggctaacaggttgacgaaagaggctatccttaatgaatcaatttcagaactgtcaggctatagctcgct

SEQ ID NO: 723659 - DNA, 75 bp, synthetic construct
  source 1..75: mol_type = other DNA
atgagtatgccggggagatgaacacctctccggtactgcgtgaaagtgaccttgctcctctgaaacccgcctgtg

SEQ ID NO: 723660 - DNA, 75 bp, synthetic construct
  source 1..75: mol_type = other DNA
aacgctgccgaccatatctatctgtcgcaagatttgggtatgcgcaaaccggaagtgcgaatttaccagcatgtt

SEQ ID NO: 723661 - DNA, 75 bp, synthetic construct
  source 1..75: mol_type = other DNA
tatcgtaacacagatttctttggcatggttgaaggtctaaattttgctctgcaatatcagggtaaaaatgaaggt

SEQ ID NO: 723662 - DNA, 75 bp, synthetic construct
  source 1..75: mol_type = other DNA
tttacagccccggtgaaggactggcggtaaggcgtggtgagcaggggcactggcttatcagcagcgatgacgggc

SEQ ID NO: 723663 - DNA, 75 bp, synthetic construct
  source 1..75: mol_type = other DNA
ccacaccatgttcgatatggtgcagtcgttgaccattgccgacagcctgaagtttggtaaggccgtgctaaataa

SEQ ID NO: 723664 - DNA, 75 bp, synthetic construct
  source 1..75: mol_type = other DNA
gataactgctgttccctcacatatcccaaataaaaaaggagagctttccgaggaagtgtgcttccagttaatggc

SEQ ID NO: 723665 - DNA, 75 bp, synthetic construct
  source 1..75: mol_type = other DNA
cagctaggcattaccagtattctggtgaaagataaaaccaccatcccggactatttcgcgaaggtgttatgctaa

SEQ ID NO: 723666 - DNA, 75 bp, synthetic construct
  source 1..75: mol_type = other DNA
cgtaggatttttagtagacatttcatttggcatataaaaagtattatcctttttttattatataaaaatggtatg

SEQ ID NO: 723667 - DNA, 75 bp, synthetic construct
  source 1..75: mol_type = other DNA
gtctggtattccacttccgacaacacaaaacggaaatatccgcacacctgggaattgacccaaagccaaagcggt

SEQ ID NO: 723668 - DNA, 75 bp, synthetic construct
  source 1..75: mol_type = other DNA
agttggcagcatcacccggcgttattagttgctggcgcagcaaatgcggctgaaatttataataaagatggcaat

SEQ ID NO: 723669 - DNA, 75 bp, synthetic construct
  source 1..75: mol_type = other DNA
tatacggcaagatggttggtgagcgcattctgaccgaccgtgaaaatggtgaaaaaggcgataattctcaagata

SEQ ID NO: 723670 - DNA, 75 bp, synthetic construct
  source 1..75: mol_type = other DNA
gttgtctgtagactacaacatcgaaggttttggttttgtaggtgcatatagcaaatctgatcgtactaatgaaca

SEQ ID NO: 723671 - DNA, 75 bp, synthetic construct
  source 1..75: mol_type = other DNA
gggtataccgtttccgttacggcgagcggtgccgggctacgggaaattatgcagaatcagtcggtaatggtgcca

SEQ ID NO: 723672 - DNA, 75 bp, synthetic construct
  source 1..75: mol_type = other DNA
tgtcgtggcggataaactgcgtctctggagtggcgttgcatggattattgttgccggcatcatcataatgttgat

SEQ ID NO: 723673 - DNA, 75 bp, synthetic construct
  source 1..75: mol_type = other DNA
tgtcgcggcggataaactgcgtctctggagtggcgttgcatggattatcgttgccggcatcatcataatgttgat

SEQ ID NO: 723674 - DNA, 75 bp, synthetic construct
  source 1..75: mol_type = other DNA
gaatttcgtgccctgatcaccgttttcgctttcctggcttctgcctggtactgcgttgttcagtacagaaaagag

SEQ ID NO: 723675 - DNA, 75 bp, synthetic construct
  source 1..75: mol_type = other DNA
gctggtgctgggcgataccaactcatgtatttctgccattcctgccaagcgtcgtaaagtgcctatcttccatat

SEQ ID NO: 723676 - DNA, 75 bp, synthetic construct
  source 1..75: mol_type = other DNA
ttgttggcactcgacctgaaattatcaggctatctcgtatcattgcaaagcttgatgcttattgtgaacatactt

SEQ ID NO: 723677 - DNA, 75 bp, synthetic construct
  source 1..75: mol_type = other DNA
taaacttacaagctctttatgaggatgttaaaaacgttgagcacggaaacagagagcgccacaggcaaaagcgcg

SEQ ID NO: 723678 - DNA, 75 bp, synthetic construct
  source 1..75: mol_type = other DNA
gcccaacgtgatttacagcacccggtacgcaccctgctgccggatatgaccgcccatcagctttaccaacaaaaa

SEQ ID NO: 723679 - DNA, 75 bp, synthetic construct
  source 1..75: mol_type = other DNA
cggcagttgcaacgtgtgaacgtgaactgatgttagaacgtaaacgagaagcgcaagccgtcaatcctacaaagc

SEQ ID NO: 723680 - DNA, 75 bp, synthetic construct
  source 1..75: mol_type = other DNA
accttaagtgagaagggaactttgatggcgacgttaccggctaacgtccctggcgatatcccggcgattggcttt

SEQ ID NO: 723681 - DNA, 75 bp, synthetic construct
  source 1..75: mol_type = other DNA
tcatctgcgccgcaccgctcgcgacggtggaaaaaggccacgcgatggcgcaacgctgcggtggtgaaattcaga

SEQ ID NO: 723682 - DNA, 75 bp, synthetic construct
  source 1..75: mol_type = other DNA
ctctgcgccgggatcgaagacgaatttaccctcaatgcggtgatggggacctgggcggtgaccagcggcataacc

SEQ ID NO: 723683 - DNA, 75 bp, synthetic construct
  source 1..75: mol_type = other DNA
ctgcaggaaaaaaccaaaggcgaactgaaattaaaactgttcccggatagcacccttggtaatgcgcaggcgatg

SEQ ID NO: 723684 - DNA, 75 bp, synthetic construct
  source 1..75: mol_type = other DNA
ttattgtctccacacacccaaggacacgtaaccgaatccgtgagcaaggaattgaatttcattcaaatataaatc

SEQ ID NO: 723685 - DNA, 75 bp, synthetic construct
  source 1..75: mol_type = other DNA
cgttgtgtatcgatggcgggaaaaaagccaaaatgcgcccgggtgatgtattaggtgcgctgacaggagacatcg

SEQ ID NO: 723686 - DNA, 75 bp, synthetic construct
  source 1..75: mol_type = other DNA
tcataagtttgttgtgctactaaatactttagctgagaaatattctttaccaataatagtatctacgcatccgag

SEQ ID NO: 723687 - DNA, 75 bp, synthetic construct
  source 1..75: mol_type = other DNA
aaactctcgatatttattgaaatgaccactggcgtatcaaaagaaaaattacgtccagatatttttcaaaagatt

SEQ ID NO: 723688 - DNA, 75 bp, synthetic construct
  source 1..75: mol_type = other DNA
gccattttgtatttatgatcttttttgcaccagaagataaaaatatatctggagatagtttgtttatttatctcc

SEQ ID NO: 723689 - DNA, 75 bp, synthetic construct
  source 1..75: mol_type = other DNA
gtaatgttaatgttttattgcgactaaaactatatggaagtcgaaaaaacggcgtttttaacgtgtatataacgc

SEQ ID NO: 723690 - DNA, 75 bp, synthetic construct
  source 1..75: mol_type = other DNA
cacaagtatgtaactcattaactggggttattgatgatgctcataaaacaatattaataggcatcaagaagctcc

SEQ ID NO: 723691 - DNA, 75 bp, synthetic construct
  source 1..75: mol_type = other DNA
ttcctgacacactggtaagcagtcgcaactcggcgacaacaaccgataacatcctgttagctacgttcttcagcg

SEQ ID NO: 723692 - DNA, 75 bp, synthetic construct
  source 1..75: mol_type = other DNA
acgttggcaccattcttcgacaccgttaacaacaagatggttgtgttcaacgagaacaaaaccctgttcttcaag

SEQ ID NO: 723693 - DNA, 75 bp, synthetic construct
  source 1..75: mol_type = other DNA
tcaagctatcaattgtcgggacgtggcccagtggaaccgccaacaggtcaatgcagctaactttttccggttctg

SEQ ID NO: 723694 - DNA, 75 bp, synthetic construct
  source 1..75: mol_type = other DNA
gagcttaatgaggtattctttaatgagcttgaaatcagaaaacctgattttttcatgaatgccgcgggccagaat

SEQ ID NO: 723695 - DNA, 75 bp, synthetic construct
  source 1..75: mol_type = other DNA
atgaataaattaaaaattatgactattgtggggactcgtccagaaattattcgtctgtctagagtaatgtctaag

SEQ ID NO: 723696 - DNA, 75 bp, synthetic construct
  source 1..75: mol_type = other DNA
catgaaacacgaatagctcagaatgaaagcgatattgcgtcgcttgacacaagagttcagtcgctggagtcgcag

SEQ ID NO: 723697 - DNA, 75 bp, synthetic construct
  source 1..75: mol_type = other DNA
gccgtcgtcgtttactgcaaggcgcgggtgccatgtggctattgagcgtaagtcaggtcagcctggctgcggtta

SEQ ID NO: 723698 - DNA, 75 bp, synthetic construct
  source 1..75: mol_type = other DNA
ctatcctgccaatgctcaggacatgcaggacccgctgctggcgctgctggaggattacaataaaggcgatctcga

SEQ ID NO: 723699 - DNA, 75 bp, synthetic construct
  source 1..75: mol_type = other DNA
gtattttcaggcataaaaaaagcggccccgataaggaaccgcctttcggaacaattaacctgctgcgaaaaaaat

SEQ ID NO: 723700 - DNA, 75 bp, synthetic construct
  source 1..75: mol_type = other DNA
caggatccactgttggcactgctggaggattacaacaaaggcgatctcgaaaagcaggtgccgcctgcgcagagt

SEQ ID NO: 723701 - DNA, 75 bp, synthetic construct
  source 1..75: mol_type = other DNA
tcaaggggatggctgcgcaaatccgcgctgacgacccgttcatcaagtcggcgcgcgtcgggcaatttgacccgc

SEQ ID NO: 723702 - DNA, 75 bp, synthetic construct
  source 1..75: mol_type = other DNA
cttcattccgttgcaagtgcgcgtagcaaaagcccagaaacagcgtgctgacctgtttgtctctatccatgccga

SEQ ID NO: 723703 - DNA, 75 bp, synthetic construct
  source 1..75: mol_type = other DNA
gcgcgtgatggaccgcatgcgtctcggaaacagcctatgggtagtgtttaactgggaaagctaccgacatcgtgt

SEQ ID NO: 723704 - DNA, 75 bp, synthetic construct
  source 1..75: mol_type = other DNA
gtccaagaggagccgacagaggagcctctcaaccaggagctgcctaaaactgacgacgatggcgactatttcttc

SEQ ID NO: 723705 - DNA, 75 bp, synthetic construct
  source 1..75: mol_type = other DNA
gcctctgtgttatccacgtagactttgacatctggagtggacaaacccgtttgtctgcatctgatctcaagctgg

SEQ ID NO: 723706 - DNA, 75 bp, synthetic construct
  source 1..75: mol_type = other DNA
caatgccacatttgcggctggtggacaatctgtcaggtttacaccaatgactctaggtttaaccgagggtcatta

SEQ ID NO: 723707 - DNA, 75 bp, synthetic construct
  source 1..75: mol_type = other DNA
atcgctgggttatgtcttatcgaaagggaaagatattgaaggtatcggtgatgaagatctggtcaattatatcga

SEQ ID NO: 723708 - DNA, 75 bp, synthetic construct
  source 1..75: mol_type = other DNA
atcaaccaactggatagcgataataagttgaatattaataatgatgatattgtcgcgataggaatgacatatcag

SEQ ID NO: 723709 - DNA, 75 bp, synthetic construct
  source 1..75: mol_type = other DNA
gaaagagggcaatatgaaggtgtacatgacgcgcaatgaagacatcttcattccgttgcaagtgcgcgtagcaaa

SEQ ID NO: 723710 - DNA, 75 bp, synthetic construct
  source 1..75: mol_type = other DNA
gcagccggaaatgccttggcttgccgacccggttaaaccctctgccagtgcgctgatgcagtatctgtatcacga

SEQ ID NO: 723711 - DNA, 75 bp, synthetic construct
  source 1..75: mol_type = other DNA
ggacaatcacacccggaacatcctcagaacgcctgcgaacaacaagctgcggatggaagacagacgcaatgagga

SEQ ID NO: 723712 - DNA, 75 bp, synthetic construct
  source 1..75: mol_type = other DNA
agctgcacagaccgtatccttgccgactccggtgaccatgcgagaatttaacccagaaacactcactccatgggt

SEQ ID NO: 723713 - DNA, 75 bp, synthetic construct
  source 1..75: mol_type = other DNA
ggcgggtaacgcgatgatcttcaaaccgagcgaagtcaccccgcttaccgcgttaaagctggctgaaatttacag

SEQ ID NO: 723714 - DNA, 75 bp, synthetic construct
  source 1..75: mol_type = other DNA
cgatcatccgggcattgccaaagtgtcatttaccggcggtgtcgccagcggcaaaaaagtgatggctaactcggc

SEQ ID NO: 723715 - DNA, 75 bp, synthetic construct
  source 1..75: mol_type = other DNA
acctcaaccgtcgatatcgttaccggtgcggacgtgctggagtactatgccgggctgatcccggcgctggaaggc

SEQ ID NO: 723716 - DNA, 75 bp, synthetic construct
  source 1..75: mol_type = other DNA
cggtcaatgcgcaggatatgcaagatccgctgctggcgctgctggaggattacaacaaaggcgatctcgaaaaac

SEQ ID NO: 723717 - DNA, 75 bp, synthetic construct
  source 1..75: mol_type = other DNA
cgtcgggcaatttgatccgcaaaccgtgcggatggtttttgaattaaagcaaaacgtaaaaccacagatgtttgc

SEQ ID NO: 723718 - DNA, 75 bp, synthetic construct
  source 1..75: mol_type = other DNA
gcaaaagcacagaaacaacgtgctgacctttttgtttctatccatgcagatgcctttaccagccgccagccgagc

SEQ ID NO: 723719 - DNA, 75 bp, synthetic construct
  source 1..75: mol_type = other DNA
ccgctccgtgccggtttacacccgccagcaggaggatgtggaactgcatttttttgttaaaaaaccacaacccga

SEQ ID NO: 723720 - DNA, 75 bp, synthetic construct
  source 1..75: mol_type = other DNA
ctaccagtttgatgtgcgcctgccctgttgtgagccgtcggggctttttgacggtgctgcagaatctgtctggga

SEQ ID NO: 723721 - DNA, 75 bp, synthetic construct
  source 1..75: mol_type = other DNA
gcagggggatgtcattacggacctgaaggaagggattgtcctcacactggtgacttaccggggagcccgggattc

SEQ ID NO: 723722 - DNA, 75 bp, synthetic construct
  source 1..75: mol_type = other DNA
gcaaaacgtcagcaatttaagaacatagaagcaggactaccaactgaaccgccccgggtttcctggagagtgttt

SEQ ID NO: 723723 - DNA, 75 bp, synthetic construct
  source 1..75: mol_type = other DNA
ggagacagccggtagccgtacggaatacgtccatgatgcggcagaccagctactggaaatccgccgccggaggcc

SEQ ID NO: 723724 - DNA, 75 bp, synthetic construct
  source 1..75: mol_type = other DNA
acgcgcagaatcaggtgacggcgtaccaggacgaagccggacaggtgacgacgttccgctggagcgacgaagaac

SEQ ID NO: 723725 - DNA, 75 bp, synthetic construct
  source 1..75: mol_type = other DNA
ggcgcatgataacggtcgtgtatatttggaacctgcgaataaaaaaccactcagtcaagtagacatagaggcgaa

SEQ ID NO: 723726 - DNA, 75 bp, synthetic construct
  source 1..75: mol_type = other DNA
ccacggccaggtggtacagataaccgatgcccgtggggggaataaataccttcagtggaacgaagacgggcagct

SEQ ID NO: 723727 - DNA, 75 bp, synthetic construct
  source 1..75: mol_type = other DNA
cagcatttccctgatactgcacctttactgctgcgtcgttacaactatgacgaggctggccacctgaacggcgtg

SEQ ID NO: 723728 - DNA, 75 bp, synthetic construct
  source 1..75: mol_type = other DNA
gtagggatcacgatggggtgcacggctgtcttgctgaccggttttgtggcgggtgtggcgatggtgtacaccggc

SEQ ID NO: 723729 - DNA, 75 bp, synthetic construct
  source 1..75: mol_type = other DNA
tgataacacagaaggccatcagcgcccttccacatccggtcaacgccgccaccggagccaaatatctggcggatg

SEQ ID NO: 723730 - DNA, 75 bp, synthetic construct
  source 1..75: mol_type = other DNA
cacacggacagcggtgaacagtaccggctggcgtgggacctggcgcagcgcaggctgtgcgtgacggacggactg

SEQ ID NO: 723731 - DNA, 75 bp, synthetic construct
  source 1..75: mol_type = other DNA
gacggcgcagggcgtcctgacccatcagtacgatgaactcagcaaccggacagccaccacctttccggacggcag

SEQ ID NO: 723732 - DNA, 75 bp, synthetic construct
  source 1..75: mol_type = other DNA
tggagtcacgctgatggctctaaagttcgtgtcgatccctatggaaatcaaagtatgacgatgaaaaacggtgat

SEQ ID NO: 723733 - DNA, 75 bp, synthetic construct
  source 1..75: mol_type = other DNA
gcattacaatctgcacaggtactatgatccggatgtcgggcggttcatggtaacggacccgatagggctaaatgg

SEQ ID NO: 723734 - DNA, 75 bp, synthetic construct
  source 1..75: mol_type = other DNA
cgggtctacagcagccgtgacgggcgcacggaagggatgttcgggcagggctggagtgtgatgtatgaagtcagc

SEQ ID NO: 723735 - DNA, 75 bp, synthetic construct
  source 1..75: mol_type = other DNA
tcaggtgcaactggaaaacaaccgtctggagcaggagttggttctgctggcacaacgaattgacgttgccgaaga

SEQ ID NO: 723736 - DNA, 75 bp, synthetic construct
  source 1..75: mol_type = other DNA
caaaggatgctgttcttgtctcagagagaaataaagttcaggatgtaaagaaaatagtcgaacaaattaaaaatt

SEQ ID NO: 723737 - DNA, 75 bp, synthetic construct
  source 1..75: mol_type = other DNA
cgtggtaatcgtatgtggcaagcgcccacactcaataaaaattggtgatgtgactgtccacctgattagctggcg

SEQ ID NO: 723738 - DNA, 75 bp, synthetic construct
  source 1..75: mol_type = other DNA
cattaccacaaccacaaagaggtcattcctggagttatcagtgtcggtgcactgacccatcaaaattggggagat

SEQ ID NO: 723739 - DNA, 75 bp, synthetic construct
  source 1..75: mol_type = other DNA
ggagtgtatggccgctgtgctgaaccgcatgaaaaggccggatggctcacgttgctggaaagctgtccgcttgtc

SEQ ID NO: 723740 - DNA, 75 bp, synthetic construct
  source 1..75: mol_type = other DNA
gtcgtgctgcgcgtgcggatgcgctcgtcaccgcacaattagcctttgccctgaacggctattcctttgatggat

SEQ ID NO: 723741 - DNA, 75 bp, synthetic construct
  source 1..75: mol_type = other DNA
gtcgctggaaagccgtccggttgtccgaccgggttttcaatggccgggtgcatccggtacgcaagactcctgatg

SEQ ID NO: 723742 - DNA, 75 bp, synthetic construct
  source 1..75: mol_type = other DNA
ctgttttacgtcactacagacagatcattaacgccagacggcgtgaagatggcatgaaagctctcagcacgccgc

SEQ ID NO: 723743 - DNA, 75 bp, synthetic construct
  source 1..75: mol_type = other DNA
cgcgagtcgaacaccctggcctcgaagtctatcaatgccgaagtaactaattcagctattgaactgaaagtactg

SEQ ID NO: 723744 - DNA, 75 bp, synthetic construct
  source 1..75: mol_type = other DNA
gaagtgactaactccgccattgagctgaaagtgttgatcgagcagatgcgcgagcagatccagaacattgaataa

SEQ ID NO: 723745 - DNA, 75 bp, synthetic construct
  source 1..75: mol_type = other DNA
ctgactgccactaccacaaatgggatgcgttctccacgacgaacgctgaggggcttaactccagacttgaaatac

SEQ ID NO: 723746 - DNA, 75 bp, synthetic construct
  source 1..75: mol_type = other DNA
ccgccagtggtttgtggtgggggaactcctccagcatttgccgccagaagatcgtattacgcccattgttggtat

SEQ ID NO: 723747 - DNA, 75 bp, synthetic construct
  source 1..75: mol_type = other DNA
ccgtgcagtatctggatgggatgcgatcacaaacgcgagcccaggcgttgttggcgttgatgttgaatcacgtat

SEQ ID NO: 723748 - DNA, 75 bp, synthetic construct
  source 1..75: mol_type = other DNA
cgcacacactccctctggcgtcaccaggcatggctcgcatctgcctttacggggatttgcaacgatttggccgcc

SEQ ID NO: 723749 - DNA, 75 bp, synthetic construct
  source 1..75: mol_type = other DNA
ctgttccgggacgcttaccatctggcgggaattgagatgccggattttcatcgcggggataactggtggcgtcac

SEQ ID NO: 723750 - DNA, 75 bp, synthetic construct
  source 1..75: mol_type = other DNA
agtatgatcctgggcggagtggcgcagatgctggcaccgaaagccaggacgcccacggcagcaagtacagataac

SEQ ID NO: 723751 - DNA, 75 bp, synthetic construct
  source 1..75: mol_type = other DNA
cgtcttcacgaacctctgggtgagggggcggtcatccatattgtgccgcgactggccggagccgaaaagggcgga

SEQ ID NO: 723752 - DNA, 75 bp, synthetic construct
  source 1..75: mol_type = other DNA
tggtcggaggcatccgagcaggcctggatggcatcggtgtacaaattctacggtgccggcgcatccgaagagctt

SEQ ID NO: 723753 - DNA, 75 bp, synthetic construct
  source 1..75: mol_type = other DNA
ctgtacctggataatctggaggccacagggctgtatcaggtgccgttgtcatcagcacaaccgggcgatgtgctg

SEQ ID NO: 723754 - DNA, 75 bp, synthetic construct
  source 1..75: mol_type = other DNA
ctcccggcgaatctcccaggacatcagtacccgtgatgaaggcggtgacgggaagatggtggttatcgggcggca

SEQ ID NO: 723755 - DNA, 75 bp, synthetic construct
  source 1..75: mol_type = other DNA
tgaccggacggcgctttgaacacggtgtgacggactgttacaccctgttccgggatgcttaccatctggcgggga

SEQ ID NO: 723756 - DNA, 75 bp, synthetic construct
  source 1..75: mol_type = other DNA
ctgaaatgccggattttcatcgcgaggatgactggtggcgccacggtcagaacctttacctggacaatatggcgg

SEQ ID NO: 723757 - DNA, 75 bp, synthetic construct
  source 1..75: mol_type = other DNA
ttgagatgccggattttcatcgcggggatgactggtggcgtaacggtcagaatctctatcttgacaatatggagg

SEQ ID NO: 723758 - DNA, 75 bp, synthetic construct
  source 1..75: mol_type = other DNA
ggtgtggcacagatgctggccccgaagccaaaaacaccggaatacagggcaacggataacggtaaacagaacacg

SEQ ID NO: 723759 - DNA, 75 bp, synthetic construct
  source 1..75: mol_type = other DNA
tcccggcgaatctcccaggacatcagcacccgtgatgaaggtggtggcgggaaggtggtggttatcgggcggcag

SEQ ID NO: 723760 - DNA, 75 bp, synthetic construct
  source 1..75: mol_type = other DNA
agcggagtcgtgcggcttcgtggtgagaacgccggagggggagcggtatatcccttgtgtgaatatctctgcaga

SEQ ID NO: 723761 - DNA, 75 bp, synthetic construct
  source 1..75: mol_type = other DNA
cggtggccaatcatgccgccatatactgcggcaacggtgagctgcttcaccatctgcctgaacaactgagtaaac

SEQ ID NO: 723762 - DNA, 75 bp, synthetic construct
  source 1..75: mol_type = other DNA
accggacggcgctttgagcacggggtgacagactgttacacgctgttccgggatgcttaccatctggcggggatt

SEQ ID NO: 723763 - DNA, 75 bp, synthetic construct
  source 1..75: mol_type = other DNA
aaaatggcaacgacgaacgcattctgtctggcgtcaccgccactggcacgcatctgccttcacggggatttacaa

SEQ ID NO: 723764 - DNA, 75 bp, synthetic construct
  source 1..75: mol_type = other DNA
tgcagggggagattgtggcactggtccacagtcatcccgatggcccgccctggctgagcgaggccgaccggcgac

SEQ ID NO: 723765 - DNA, 75 bp, synthetic construct
  source 1..75: mol_type = other DNA
ccggattttgtgcgtgaggatgactggtggcgcaacggtcagaacctttacctggacaatatggccggcgactgg

SEQ ID NO: 723766 - DNA, 75 bp, synthetic construct
  source 1..75: mol_type = other DNA
cgcagagatcgccaaagacggctctttcaccatcaaagtgctgccgagctggcgtccggacaaagccttcaacat

SEQ ID NO: 723767 - DNA, 75 bp, synthetic construct
  source 1..75: mol_type = other DNA
ccggcggacatcaacctgctgggcgagatggtgaaaaatatttgctttaacaatgcgcgtgactacttcgccatt

SEQ ID NO: 723768 - DNA, 75 bp, synthetic construct
  source 1..75: mol_type = other DNA
cggctatggcgatagcagcaaactttatgcgcgcctgccacgtctgtcctttgaagaagcctgcgggctgttgta

SEQ ID NO: 723769 - DNA, 75 bp, synthetic construct
  source 1..75: mol_type = other DNA
tggactgcagattgtgctgggggcggcagccatcgtgggctctttcttcacggccggagcatcgatggcagcctg

SEQ ID NO: 723770 - DNA, 75 bp, synthetic construct
  source 1..75: mol_type = other DNA
tcaaactgctggggccggatgtcggctttgactccatcaacgaccgtccgatggcggaagagttgtctaagctgc

SEQ ID NO: 723771 - DNA, 75 bp, synthetic construct
  source 1..75: mol_type = other DNA
gttttcactgggggccagcatgatactgggcggtgtggcccagatgctggccccgaaggcaaagacgccggagta

SEQ ID NO: 723772 - DNA, 75 bp, synthetic construct
  source 1..75: mol_type = other DNA
ctgaaatgccggattttgagcgtgaggatgactggtggcgcaacggtcagaacctttacctggacaatatggcgg

SEQ ID NO: 723773 - DNA, 75 bp, synthetic construct
  source 1..75: mol_type = other DNA
cgcagagatcgccaaagacggctctttcaccattaaagtgctgccgagctggcgtccggataaagccttcaacat

SEQ ID NO: 723774 - DNA, 75 bp, synthetic construct
  source 1..75: mol_type = other DNA
ggcgtccggataaagccttcaacatcgaacaggcgacctttaacgactatatggcgaagctgggtgaagtttctg

SEQ ID NO: 723775 - DNA, 75 bp, synthetic construct
  source 1..75: mol_type = other DNA
tggatcacttcgccgctcacggctgtaaagtgtctgaccacgcgctggatgtggtgatgtttgctgaagcgaacg

SEQ ID NO: 723776 - DNA, 75 bp, synthetic construct
  source 1..75: mol_type = other DNA
tggctgagcgaggcggaccggcggctgcagataaagagtgccctgccctggtggctggtctgccgggggaaattc

SEQ ID NO: 723777 - DNA, 75 bp, synthetic construct
  source 1..75: mol_type = other DNA
actatcccctgttgcaggagaagaacctggtacgtcgcgtaccgttcgtgctggagctgcgcaacgtgccgttca

SEQ ID NO: 723778 - DNA, 75 bp, synthetic construct
  source 1..75: mol_type = other DNA
gtggaataccgtagcctgacgcttgatgattttttattgcgcccgcaaattaaccgggaaaccctaaatcatcgt

SEQ ID NO: 723779 - DNA, 75 bp, synthetic construct
  source 1..75: mol_type = other DNA
gaacagtattttgtatggggaatgaccgcaggcataattcgtgaactggcgctgcaaattggtgtgaaaccctga

SEQ ID NO: 723780 - DNA, 75 bp, synthetic construct
  source 1..75: mol_type = other DNA
ggtcagaatctctatctggataaccttgaaacacagggtttttaccgggtctcaccgcatgaggcacaggcaggc

SEQ ID NO: 723781 - DNA, 75 bp, synthetic construct
  source 1..75: mol_type = other DNA
cacattgtgccgcgactggccggggccggaaagggcggactgcagattgtgctgggggcggcagccatcgtgggg

SEQ ID NO: 723782 - DNA, 75 bp, synthetic construct
  source 1..75: mol_type = other DNA
tggcgcatgcccggcggtgtgcgcctgcggagtcgtgcggcttcgtggtgagaacgccggagggagacaggtatc

SEQ ID NO: 723783 - DNA, 75 bp, synthetic construct
  source 1..75: mol_type = other DNA
tcgcggggatgactggtggcgtcacggtcagaatctctatcttgacaatatggaggcaacgggtttttaccgtgt

SEQ ID NO: 723784 - DNA, 75 bp, synthetic construct
  source 1..75: mol_type = other DNA
actttatggatcgcggtcgcgtgaagaaagtctatgtgcaggcagctgcgccgtatcgcatgctgccagatgaca

SEQ ID NO: 723785 - DNA, 75 bp, synthetic construct
  source 1..75: mol_type = other DNA
ttacaactacctccaaatgctgaagagcgaagagttccgggcaaaagttagcaccgacattaccgaccctctcta

SEQ ID NO: 723786 - DNA, 75 bp, synthetic construct
  source 1..75: mol_type = other DNA
aaaaactggaagcagctggccgaaactcaacaatctcttctgctacagatgacgcaccaggtgagtcagaacaat

SEQ ID NO: 723787 - DNA, 75 bp, synthetic construct
  source 1..75: mol_type = other DNA
gaatggtctctgcaacgttgctggcaatcttcttcgtaccggtgttctttgtggtgatccgccgttgctttaaag

SEQ ID NO: 723788 - DNA, 75 bp, synthetic construct
  source 1..75: mol_type = other DNA
cctctaacgttaaagatacgcttagccgtctgaatggcgtcggtgacgtacagcttttcggcgcacagtatgcga

SEQ ID NO: 723789 - DNA, 75 bp, synthetic construct
  source 1..75: mol_type = other DNA
gctgccgcaggaggttcagcagcaggggatcagtgttgaaaagtccagtagcagctatttgatggtggcgggctt

SEQ ID NO: 723790 - DNA, 75 bp, synthetic construct
  source 1..75: mol_type = other DNA
tcacgacggatatcccaggacatcagcacccgtgatgaaggcggagacgggaaggtggtggttatcgggcggcag

SEQ ID NO: 723791 - DNA, 75 bp, synthetic construct
  source 1..75: mol_type = other DNA
gggatgcataccatctggcggggataacgctgccggattttgtgcgtgaggatgactggtggcgcaacggccaga

SEQ ID NO: 723792 - DNA, 75 bp, synthetic construct
  source 1..75: mol_type = other DNA
ggatgactggtggcgcaacggtcagaacctgtacctggacaacctggcggacaacggcttttaccgggtgtctcc

SEQ ID NO: 723793 - DNA, 75 bp, synthetic construct
  source 1..75: mol_type = other DNA
ctcccggcgaatctcccaagacatcagcacccgtgatgaaggtggtggcgggaaggtggtggttatcgggcggca

SEQ ID NO: 723794 - DNA, 75 bp, synthetic construct
  source 1..75: mol_type = other DNA
gttggctcccggcgaatctcccaggacatcagtacccgtgatgaaggcggtgacgggaaggtggtggttatcggg

SEQ ID NO: 723795 - DNA, 75 bp, synthetic construct
  source 1..75: mol_type = other DNA
gccggaggcgtattttcgtattgcaccggaagactggctgcgggcagagatgcagggtgagattgtggcactggt

SEQ ID NO: 723796 - DNA, 75 bp, synthetic construct
  source 1..75: mol_type = other DNA
gtatgctgaaacggacgtgggcttcctgcgtcgactggccagcgagtatggttatgccgtgaaagtggtcagcga

SEQ ID NO: 723797 - DNA, 75 bp, synthetic construct
  source 1..75: mol_type = other DNA
agagcttcgcacgaatcttttaagtggcggtatatggagcctcccgaatgaagggtatgcggaagattcgcaggg

SEQ ID NO: 723798 - DNA, 75 bp, synthetic construct
  source 1..75: mol_type = other DNA
tagacagctattataactctttatatggtgctcagaagagcatgataaatttagctttacaacttcaagaaaaga

SEQ ID NO: 723799 - DNA, 75 bp, synthetic construct
  source 1..75: mol_type = other DNA
agttgcgggtatttttgttcttcgaaaaaaaccaagcactaaaagcaaatctaaaaacgacaataaccacgatga

SEQ ID NO: 723800 - DNA, 75 bp, synthetic construct
  source 1..75: mol_type = other DNA
aatggctccgtatggtattacttcaaaaatcacctcctgttataccaactatcaataccgaaacctggaaagctt

SEQ ID NO: 723801 - DNA, 75 bp, synthetic construct
  source 1..75: mol_type = other DNA
agatcgttgtaagtaagcattcccgtaatggaagcgttaacgaagcgaagctctcatacaaccagcttcgttctc

SEQ ID NO: 723802 - DNA, 75 bp, synthetic construct
  source 1..75: mol_type = other DNA
ataaaaaagaattacctcaaaatttgttgagaacacattgcgtcagtgttcgtttgaatcaaactgagctacagc

SEQ ID NO: 723803 - DNA, 75 bp, synthetic construct
  source 1..75: mol_type = other DNA
cacccgcgtaacctacagcgataacatcaaaagcgagtccgataccattgaggtggagctggacgacaccgatgg

SEQ ID NO: 723804 - DNA, 75 bp, synthetic construct
  source 1..75: mol_type = other DNA
aggcgaaaaaaggtaaaaagaccggcaagagtcagacactgaccgtctataaaccggacggcagcacgtccacgg

SEQ ID NO: 723805 - DNA, 75 bp, synthetic construct
  source 1..75: mol_type = other DNA
actctgtggtatctgcagaaaaacatcacctctgatatcgcgccttatgtcacccgtgtgacctggagcgataac

SEQ ID NO: 723806 - DNA, 75 bp, synthetic construct
  source 1..75: mol_type = other DNA
gaacagtgatcggtactgttgtcgcagttgcgggtatttttgttcttcgaaaaaaaccaagcactaaaagcaaat

SEQ ID NO: 723807 - DNA, 75 bp, synthetic construct
  source 1..75: mol_type = other DNA
aagcgagccctgaacaaagatgaacctgtttttacgcccatcaaaggtgttgagccaccggagtggttcgcagaa

SEQ ID NO: 723808 - DNA, 75 bp, synthetic construct
  source 1..75: mol_type = other DNA
cttccgcgagacgcaggactggcttgatgagcatctgaaaccattactggaggcgctccccgctggtgcccgctc

SEQ ID NO: 723809 - DNA, 75 bp, synthetic construct
  source 1..75: mol_type = other DNA
agggaacggtcatccacattgtgccgcgactggccggagccggaaagggaggactgcagattgtgctgggggcag

SEQ ID NO: 723810 - DNA, 75 bp, synthetic construct
  source 1..75: mol_type = other DNA
caacattaccggtatgtcgagcaaaaccctttcggtgattaacggtattatcggtacggtctgcgcactatggct

SEQ ID NO: 723811 - DNA, 75 bp, synthetic construct
  source 1..75: mol_type = other DNA
ggccactggttaccggggattgttccggtcaacgcggtattaggtggcgcgctgagctatctgatccttaacccg

SEQ ID NO: 723812 - DNA, 75 bp, synthetic construct
  source 1..75: mol_type = other DNA
tgcgattgtggtgctggggctgaatatctggaccaccaacgataacgcgctctatgcgtcgggtttaggtttcgc

SEQ ID NO: 723813 - DNA, 75 bp, synthetic construct
  source 1..75: mol_type = other DNA
gccggaggagtattttcgtatcgcgccggaagactggctgcgggcagagatgcagggggagattgtggccctggt

SEQ ID NO: 723814 - DNA, 75 bp, synthetic construct
  source 1..75: mol_type = other DNA
tcaccgccggtgcaacgatggcgttgtggggcgcagccctgagtgccggagggctgactgccaccacgatgctgt

SEQ ID NO: 723815 - DNA, 75 bp, synthetic construct
  source 1..75: mol_type = other DNA
gggctgactgccaccacgatgctgttctcactgggtgccagcatgatactgggtggtgtggcccagatgctggcc

SEQ ID NO: 723816 - DNA, 75 bp, synthetic construct
  source 1..75: mol_type = other DNA
ctggccccgaaggcaaaaacaccggattaccgcgcaacggataacggcagacagaacacgtacttttcctcgctg

SEQ ID NO: 723817 - DNA, 75 bp, synthetic construct
  source 1..75: mol_type = other DNA
tggtgtggcccagatgctggcaccgaaggcaaaaacaccggattaccgcgcaacggataacggtaaacagaacac

SEQ ID NO: 723818 - DNA, 75 bp, synthetic construct
  source 1..75: mol_type = other DNA
cgccgtcagatgaacgaaggctggtaccagatacgtattcgcggtgaggacacggcaccggaggcggtgtacgcc

SEQ ID NO: 723819 - DNA, 75 bp, synthetic construct
  source 1..75: mol_type = other DNA
cagaaatgcagggtgagatagtcgcgctggtgcacagccatcccggtggtctgccctggctgagtgaagccgacc

SEQ ID NO: 723820 - DNA, 75 bp, synthetic construct
  source 1..75: mol_type = other DNA
gcccgtcttcacgaacctctgggtgagggggcggtcatccatattgtgccgcgactggccggagccggaaagggc

SEQ ID NO: 723821 - DNA, 75 bp, synthetic construct
  source 1..75: mol_type = other DNA
gccggaggtgtattttcgtatcgctccggaagactggctgcgggcagagatgcagggggagattgtggccctggt

SEQ ID NO: 723822 - DNA, 75 bp, synthetic construct
  source 1..75: mol_type = other DNA
gacggcgctttgagcacggggtgacggactgttacaccctgttccgggatgcataccatctggcggggactgaaa

SEQ ID NO: 723823 - DNA, 75 bp, synthetic construct
  source 1..75: mol_type = other DNA
ccacagtcatcccggcggtctgccctggctgagtgaggcagaccggcgtctgcagataaaaagcgcactgtcctg

SEQ ID NO: 723824 - DNA, 75 bp, synthetic construct
  source 1..75: mol_type = other DNA
cgtattcgcggtgaggacacggcaccggaggcggtgtacgcccgtcttcacgaacctctgggtgagggggcggtc

SEQ ID NO: 723825 - DNA, 75 bp, synthetic construct
  source 1..75: mol_type = other DNA
attgcccaggggaacccgatgccggtgccttacggtgaaatgctggttggctcacggcgaatctcccaggacatc

SEQ ID NO: 723826 - DNA, 75 bp, synthetic construct
  source 1..75: mol_type = other DNA
ttttctgccaccacgatgctgttttcacttggagccagcatgatactgggtggtgtggcccagatgctggccccg

SEQ ID NO: 723827 - DNA, 75 bp, synthetic construct
  source 1..75: mol_type = other DNA
ctgctgtgctgttttggttcatcggtgccgaatcatgccgccatttactgtggtgatggcgagctgttgcaccat

SEQ ID NO: 723828 - DNA, 75 bp, synthetic construct
  source 1..75: mol_type = other DNA
gccggaggggtattttcgtatcgcaccggaagactggctgcgggcagagatgcagggggagattgtggccctggt

SEQ ID NO: 723829 - DNA, 75 bp, synthetic construct
  source 1..75: mol_type = other DNA
gccggaggcgtattttcgtatcgccccggaagactggctgcgggcagagatgcagggggagattgtggcactggt

SEQ ID NO: 723830 - DNA, 75 bp, synthetic construct
  source 1..75: mol_type = other DNA
cctgcggagtcgtgcggcttcgtgataggcaccccggagggcgaacggtaccagccctgcgtgaatatctccgca

SEQ ID NO: 723831 - DNA, 75 bp, synthetic construct
  source 1..75: mol_type = other DNA
tacaacggcttttaccgggtgtctccgtcctgtgcacaggcgggcgatatcctgctgtgctgctttggttcatcg

SEQ ID NO: 723832 - DNA, 75 bp, synthetic construct
  source 1..75: mol_type = other DNA
accaatgtgcgccgggtgtttaacgaattgattggcgatgacgaaagcgaaactcaggaagagtcgctgtcggaa

SEQ ID NO: 723833 - DNA, 75 bp, synthetic construct
  source 1..75: mol_type = other DNA
aactcaggaagagtcactgtcggaacagtggcgtgagttgtggcaggatgtattgcaggaagatgacactacgcc

SEQ ID NO: 723834 - DNA, 75 bp, synthetic construct
  source 1..75: mol_type = other DNA
gaaatgcgcgagaaaatgcgcgctcatctcggcaataaacatcgcgatcgctttgatatcaaagctgatgaaggc

SEQ ID NO: 723835 - DNA, 75 bp, synthetic construct
  source 1..75: mol_type = other DNA
tgctggatcaaccaacgcaggatggctttgtctatcgcgtggatatgcgactgcgtccgtttggcgaaagtggcc

SEQ ID NO: 723836 - DNA, 75 bp, synthetic construct
  source 1..75: mol_type = other DNA
gggaacgccgtgcaatgcgcagggcgaagcgcaaccgctgctgattttaggcatgggtaagctgggcggcgggga

SEQ ID NO: 723837 - DNA, 75 bp, synthetic construct
  source 1..75: mol_type = other DNA
ggattgttacccgcaccacctatttagaattgctcagtgaattccccgcggcgcttaaacatttgatttctctgt

SEQ ID NO: 723838 - DNA, 75 bp, synthetic construct
  source 1..75: mol_type = other DNA
acagtcaggatcctggaagacgaattaggggagtttttaacaatgggattaggtggtgagcattcaagactagta

SEQ ID NO: 723839 - DNA, 75 bp, synthetic construct
  source 1..75: mol_type = other DNA
atgaatgataagcacagtcctgatgagcataaacgaaaagtagatgtctgggagcaaatgctgagtaattacttt

SEQ ID NO: 723840 - DNA, 75 bp, synthetic construct
  source 1..75: mol_type = other DNA
atatattgctctggatgcatacagtacagtcaggatcttggagaatgagttaggtgagtttttaacaatgggatt

SEQ ID NO: 723841 - DNA, 75 bp, synthetic construct
  source 1..75: mol_type = other DNA
gttgcacgcagggcggacgccgcgaactggataacgctcagttctttacccgtatgggccagcggctgattaaag

SEQ ID NO: 723842 - DNA, 75 bp, synthetic construct
  source 1..75: mol_type = other DNA
ggaaaatcagagcctggcgagtaaagttggcggcataaaatcatcagaaattatgagcggagagaaactgctggc

SEQ ID NO: 723843 - DNA, 75 bp, synthetic construct
  source 1..75: mol_type = other DNA
aaaaaagggattgtttcacttaaagaaaacccgttctcagaaacacaaattgaaccgggtgaaaaacagaaaaaa

SEQ ID NO: 723844 - DNA, 75 bp, synthetic construct
  source 1..75: mol_type = other DNA
gcaactcagccatctggcggagacgctgattgtcgcggcgcgcgactggctgtatgaagcctgctgtcgcgagtg

SEQ ID NO: 723845 - DNA, 75 bp, synthetic construct
  source 1..75: mol_type = other DNA
acattccgtgaacaatttggcttagaacttccgcgttcaacgtatgaacagcaggaaatggggaaatcagtttcc

SEQ ID NO: 723846 - DNA, 75 bp, synthetic construct
  source 1..75: mol_type = other DNA
acctggttcgtaatgtcgacgtaaaatcgcgaattatggatcagtatgctgactggaaaggcgtacgttatcgtc

SEQ ID NO: 723847 - DNA, 75 bp, synthetic construct
  source 1..75: mol_type = other DNA
gatatatcttgcgcgggattcccgcgattgcagtagcggttctgctttctgcatgtagtgcaaataacaccgcaa

SEQ ID NO: 723848 - DNA, 75 bp, synthetic construct
  source 1..75: mol_type = other DNA
ttgaagcgtcagtttttgaatttcttgacgatggttgtgaattgagtcctttaaggagaaaaaaagcaaaatata

SEQ ID NO: 723849 - DNA, 75 bp, synthetic construct
  source 1..75: mol_type = other DNA
tgccgaaccatgccgccatttactgcggcaacggtgagctgcttcaccatctgcctgaacaactgagtaaacggg

SEQ ID NO: 723850 - DNA, 75 bp, synthetic construct
  source 1..75: mol_type = other DNA
cggacgccatgtcggtatttatatcggtaataatcagtttgttcacgcatccaccagcagtggtgtaattatttc

SEQ ID NO: 723851 - DNA, 75 bp, synthetic construct
  source 1..75: mol_type = other DNA
tctctatcttgacaatatggaggcgactggtttttaccgtgccgcactgacagaggcgcagccgggcgatgtgct

SEQ ID NO: 723852 - DNA, 75 bp, synthetic construct
  source 1..75: mol_type = other DNA
gatcgcaaacaggtgctaacgctgattgccgatttccgcaaagagttggataaacgcaccattgggcctcgcggg

SEQ ID NO: 723853 - DNA, 75 bp, synthetic construct
  source 1..75: mol_type = other DNA
tggtggttgaggctgccggtggtgtgccgccttattcttatgtctggaagaaaggtggttctcctgtttccggac

SEQ ID NO: 723854 - DNA, 75 bp, synthetic construct
  source 1..75: mol_type = other DNA
gctgagctatctgatccttaacccgattttgaatcgtaaaacgacagcagcaatgacgcatgtggaggctaacag

SEQ ID NO: 723855 - DNA, 75 bp, synthetic construct
  source 1..75: mol_type = other DNA
tcgatattctggtcggtcagattgacgacgcgctgaagctggcaaatgaaggtaaagtaaaagaagcgcaggctg

SEQ ID NO: 723856 - DNA, 75 bp, synthetic construct
  source 1..75: mol_type = other DNA
ctaattgctccgattctgtctactcctatatttatcaggcactgcaacaacgctctggtgccgagaatgaaagcc

SEQ ID NO: 723857 - DNA, 75 bp, synthetic construct
  source 1..75: mol_type = other DNA
gatacgacgcgtgccattcgtactggagttgcgtaacgtgccgttcaggcagcaggagcaaatcacctggtatct

SEQ ID NO: 723858 - DNA, 75 bp, synthetic construct
  source 1..75: mol_type = other DNA
gcagcgacgcacacactccctctggcggcaccgggcatggcacgcctctgcctttacggggatttgcaacgattt

SEQ ID NO: 723859 - DNA, 75 bp, synthetic construct
  source 1..75: mol_type = other DNA
ttccatgagcaactggacgagctgctgaaggcggcgctggcaatgcttatctggggcggtaaagtgcgcgttatc

SEQ ID NO: 723860 - DNA, 75 bp, synthetic construct
  source 1..75: mol_type = other DNA
aagacacactggatgacctgcgggccgttcaggtggtgaacggtgtcccccgcgtaccggagcaacgctcaaaag

SEQ ID NO: 723861 - DNA, 75 bp, synthetic construct
  source 1..75: mol_type = other DNA
gtttctcatttaccttctggtgagaaagttgatgccttttcgttctggcataatgggcggcctttaattatgtta

SEQ ID NO: 723862 - DNA, 75 bp, synthetic construct
  source 1..75: mol_type = other DNA
gacccaatcgagaaagacgagatgaaccgggtattcatcttcgggaaagtcatcgggagcatgccgcagacgtat

SEQ ID NO: 723863 - DNA, 75 bp, synthetic construct
  source 1..75: mol_type = other DNA
aactccgggaacggcgcagcgggtccggtggtggacgccatcgaagcccgctttaaagccctcggcgcacctgtg

SEQ ID NO: 723864 - DNA, 75 bp, synthetic construct
  source 1..75: mol_type = other DNA
ggtgacggactgttacaccctgttccgggatgcataccatctggcggggataacgctgccggattttgtgcgtga

SEQ ID NO: 723865 - DNA, 75 bp, synthetic construct
  source 1..75: mol_type = other DNA
cgtcgcctgagtgaagccgaattactcgccgggataacgccagttacagcgcacgcggacgaaattgccacccca

SEQ ID NO: 723866 - DNA, 75 bp, synthetic construct
  source 1..75: mol_type = other DNA
gttattttaccggaaattgatattccggattttgaggttttggatgaatcagacattgaagatatcgctatgcag

SEQ ID NO: 723867 - DNA, 75 bp, synthetic construct
  source 1..75: mol_type = other DNA
catccgagtctggtggactaccgcccattgcacaggcattaaaagatcatttagctgcctatgagcaatcgaaaa

SEQ ID NO: 723868 - DNA, 75 bp, synthetic construct
  source 1..75: mol_type = other DNA
cccctcaggctgttcgtctgaatccgattagggctcaatctcctttttctcccggtacgtcgaatatcaatgcga

SEQ ID NO: 723869 - DNA, 75 bp, synthetic construct
  source 1..75: mol_type = other DNA
gactgaatcagcgattctggcgcatgcccggcggtgtgcgccagcggagtcgtgcggctttgtgataagcacgcc

SEQ ID NO: 723870 - DNA, 75 bp, synthetic construct
  source 1..75: mol_type = other DNA
gtttcctttccattaataaactttcgcagtaaataccattttatgacacagactgaatcagcgattctggcgcat

SEQ ID NO: 723871 - DNA, 75 bp, synthetic construct
  source 1..75: mol_type = other DNA
ccgccaccgacaagtggacaggcatccgaggcatcccggccattaccgcctattgctcaggcattaaaagatcat

SEQ ID NO: 723872 - DNA, 75 bp, synthetic construct
  source 1..75: mol_type = other DNA
aaagatcatttagctgcctatgaaaagtcgaaaagtcttgatacttcaggtcttaagccaagccgcccggcaccg

SEQ ID NO: 723873 - DNA, 75 bp, synthetic construct
  source 1..75: mol_type = other DNA
cgatcgagaaagacgagatgaaccgggtgttcatcttcggtaaagtcattggaagcatgccgcagacatatagaa

SEQ ID NO: 723874 - DNA, 75 bp, synthetic construct
  source 1..75: mol_type = other DNA
cgctcgatgagatgaagcaatacaccgtccagtgggcaaacaacatcatcattggccacggtaatgttggtgcgg

SEQ ID NO: 723875 - DNA, 75 bp, synthetic construct
  source 1..75: mol_type = other DNA
ctggagcataactttactgatgcctggagcggctttgtgcgcggctatggctatgataaccgtaccaattatgac

SEQ ID NO: 723876 - DNA, 75 bp, synthetic construct
  source 1..75: mol_type = other DNA
tttaccgcccattgcgcaggcattaaaagatcacctggctgcctatgaaaaatcgaaaagccttgaggcttcagg

SEQ ID NO: 723877 - DNA, 75 bp, synthetic construct
  source 1..75: mol_type = other DNA
gtattgcgtctgacctgcaaggaaggttataaactgctgtctgatgaggttcgcttccgcgagacgcaggactgg

SEQ ID NO: 723878 - DNA, 75 bp, synthetic construct
  source 1..75: mol_type = other DNA
ccgggatgcataccatctggcgggaattgatatgccggattttgagcgtgaggatgactggtggcgcaacggtca

SEQ ID NO: 723879 - DNA, 75 bp, synthetic construct
  source 1..75: mol_type = other DNA
aagaacttcacatgatgacggggcggagaaaacctccggagatacaggctgttcttaacacccggtactggaaaa

SEQ ID NO: 723880 - DNA, 75 bp, synthetic construct
  source 1..75: mol_type = other DNA
ttttcgtattgcaccggaagactggctgcgggcagagatgcagggggagattgtggcactggtccacagtcatcc

SEQ ID NO: 723881 - DNA, 75 bp, synthetic construct
  source 1..75: mol_type = other DNA
ggtcacctgcttattctgccactaaacatgctcttgccggattcaccaaagcctattgcgatgaattaggccaat

SEQ ID NO: 723882 - DNA, 75 bp, synthetic construct
  source 1..75: mol_type = other DNA
ggtaccgaaccatgccgccatttactgcggcaacggtgagctgcttcaccatctgcctgaacaactgagtaaacg

SEQ ID NO: 723883 - DNA, 75 bp, synthetic construct
  source 1..75: mol_type = other DNA
cctcactggacaacatgattgcccagggtaacccgatgccggtgccctacggtgaaatgctggtgggttcacgac

SEQ ID NO: 723884 - DNA, 75 bp, synthetic construct
  source 1..75: mol_type = other DNA
actgttacacgctgttccgggatgcttaccatctggcggggattgagatgccggattttcatcgcggggatgact

SEQ ID NO: 723885 - DNA, 75 bp, synthetic construct
  source 1..75: mol_type = other DNA
cggtgtggcacagatgctggccccgaaggcaaaaacaccggaatacagggcaacggataacggtaaacagaacac

SEQ ID NO: 723886 - DNA, 75 bp, synthetic construct
  source 1..75: mol_type = other DNA
ttcattttcccaacgacgacgaaatattcggcacgacagaggcaaaacagctcgtctctgaagttctgatcccga

SEQ ID NO: 723887 - DNA, 75 bp, synthetic construct
  source 1..75: mol_type = other DNA
ttgatatgccggattttcatcgcgaggatgactggtggcgcaacggccagaacctgtacctggacaatatggcag

SEQ ID NO: 723888 - DNA, 75 bp, synthetic construct
  source 1..75: mol_type = other DNA
tacctgaacaactgagtaaacgggagaggtattctgaaaaatggcaacgacgaacgcattctgtctggcgtcacc

SEQ ID NO: 723889 - DNA, 75 bp, synthetic construct
  source 1..75: mol_type = other DNA
tgcccgccttcacgaaccactgggtgagggaacggtcatccatattgtgccgcgactggccggtgccggaaaggg

SEQ ID NO: 723890 - DNA, 75 bp, synthetic construct
  source 1..75: mol_type = other DNA
agagtcccgcatgtccgctgatacgccggtattgcgtctgacctgcaaggaaggttatgaactgctgtctgatga

SEQ ID NO: 723891 - DNA, 75 bp, synthetic construct
  source 1..75: mol_type = other DNA
gtgaacacggcagcggaagccattcgcgccctgtcgatgcagatgccgggctttcgccttcagatgaacgaaggc

SEQ ID NO: 723892 - DNA, 75 bp, synthetic construct
  source 1..75: mol_type = other DNA
tggcgttggaaagaaggcacttttaatcatattgcaaaaagaatagatggaaagtatgcagatattaaaaaacta

SEQ ID NO: 723893 - DNA, 75 bp, synthetic construct
  source 1..75: mol_type = other DNA
atcatcagagcatcaaatgttgaaatctctaaagagtcatactgcttaaactggcttggcaaatcctatgctcgc

SEQ ID NO: 723894 - DNA, 75 bp, synthetic construct
  source 1..75: mol_type = other DNA
tggctaacttttatttatcctcgactatatatagctcgtgaacttttacgtgatgacgggataatctatatctcc

SEQ ID NO: 723895 - DNA, 75 bp, synthetic construct
  source 1..75: mol_type = other DNA
ccgggggatgtcattcatctggtaccccggactgaaggagccaaaagtggcggtgtgtttcagactgtgctgggc

SEQ ID NO: 723896 - DNA, 75 bp, synthetic construct
  source 1..75: mol_type = other DNA
tgtctgcctgcgcaccgggcgtgaatggacaccggaaggtgaaagcgactggatggcatcggtgtaccgcttcta

SEQ ID NO: 723897 - DNA, 75 bp, synthetic construct
  source 1..75: mol_type = other DNA
ctggagttgcgtaacgtgccgttcaggcagcaggagcaaatcacctggtatctgatggatggcctgcccggtctg

SEQ ID NO: 723898 - DNA, 75 bp, synthetic construct
  source 1..75: mol_type = other DNA
atgtcgccggaggactggctgcgggcagaaatgcagggtgagattgtggtgctggtccacagccaccccggtgga

SEQ ID NO: 723899 - DNA, 75 bp, synthetic construct
  source 1..75: mol_type = other DNA
attaaagggtcaaaacaaatgaaggcgttgaataagattttcggctcgttgtttatgctggtgggagcactgttg

SEQ ID NO: 723900 - DNA, 75 bp, synthetic construct
  source 1..75: mol_type = other DNA
tgtttgattcgccgtgatggtgaaatagtccagtatgttcctttcgataaacgtgcctggcatgcgggagtctct

SEQ ID NO: 723901 - DNA, 75 bp, synthetic construct
  source 1..75: mol_type = other DNA
ccgggcagacgtacgccaacaacatgagcagcattgcacagcaaagcgcagctcttgccgctgctaatgccaata

SEQ ID NO: 723902 - DNA, 75 bp, synthetic construct
  source 1..75: mol_type = other DNA
gaaaactgcgcggcgaggaaccttattgccctgaaaagggtgggaaaggtggcagttctgataaaagcgcaaagt

SEQ ID NO: 723903 - DNA, 75 bp, synthetic construct
  source 1..75: mol_type = other DNA
ggctctgtggtgcctggaataggtacagctgttggcgctattggtggcggtattatcggtggtcttggatcattg

SEQ ID NO: 723904 - DNA, 75 bp, synthetic construct
  source 1..75: mol_type = other DNA
acgtcagccaattgtatcaacagcaggcggcagcatctgcggcgaatgctaaccgaccatcaggattgcaatcag

SEQ ID NO: 723905 - DNA, 75 bp, synthetic construct
  source 1..75: mol_type = other DNA
ggcgctggatgaaactaaccagtatgaccttagcgacgagcgtattcagagctggtgtgagcaaatcctcaacga

SEQ ID NO: 723906 - DNA, 75 bp, synthetic construct
  source 1..75: mol_type = other DNA
tgatgtcaccacgctgtgttctgttgagcaggaaaatattaacggtcttggtgccgcgtcagagatttccatgtc

SEQ ID NO: 723907 - DNA, 75 bp, synthetic construct
  source 1..75: mol_type = other DNA
ccttgaattttcaacagatggtacggctaagataatcatccatccgcttgagtttttttatcgttgctatggaca

SEQ ID NO: 723908 - DNA, 75 bp, synthetic construct
  source 1..75: mol_type = other DNA
tgtcggcagcctcgagaacttatcgtctctggaggggcaaggtcaggcacttaaccagtattacaactctcagca

SEQ ID NO: 723909 - DNA, 75 bp, synthetic construct
  source 1..75: mol_type = other DNA
agcatacctggtctgtgggaaccaacggtgttgttgctgccacattttccctgcgcctgaaaggaaagccctctc

SEQ ID NO: 723910 - DNA, 75 bp, synthetic construct
  source 1..75: mol_type = other DNA
gaactgcttcaccatctgcctgaacaactgagtaaacgggagaggtattccgaaaaatggcaacgacgaacgcat

SEQ ID NO: 723911 - DNA, 75 bp, synthetic construct
  source 1..75: mol_type = other DNA
atcgcaccaacgcttggtcagcagtggctgtctggtcagatgaacaactaccagaatctggcaaatattggtctt

SEQ ID NO: 723912 - DNA, 75 bp, synthetic construct
  source 1..75: mol_type = other DNA
aacctgtacctggacaatatggagggaacgggcttttaccgggtgcccctgtcctctgcacaggcgggcgatatt

SEQ ID NO: 723913 - DNA, 75 bp, synthetic construct
  source 1..75: mol_type = other DNA
cataaattccgctgtgtgccgcacctgaccgggcgtcgttttgagcacggggtgacggactgttacaccctgttc

SEQ ID NO: 723914 - DNA, 75 bp, synthetic construct
  source 1..75: mol_type = other DNA
cgcgtccgagccaggataaagacgacgagcaagaggtgttctataccaccgcattagcccaggatcaggcagatg

SEQ ID NO: 723915 - DNA, 75 bp, synthetic construct
  source 1..75: mol_type = other DNA
atacctgagcaactgagtaaacgggagaggtattctgaaaaatggcaacgacgaacgcattccgtctggcggcac

SEQ ID NO: 723916 - DNA, 75 bp, synthetic construct
  source 1..75: mol_type = other DNA
tatgttattcatataccctcgtcccatcctacataaggaagaaagtctcatccctgatgagagattctggcagga

SEQ ID NO: 723917 - DNA, 75 bp, synthetic construct
  source 1..75: mol_type = other DNA
gggttttttattttcaggagacgagtatgtcctctaattttgagcgttcgcaactgacgaaaattatgatttcgt

SEQ ID NO: 723918 - DNA, 75 bp, synthetic construct
  source 1..75: mol_type = other DNA
tacttctattatttacttagcctgttagtattcgccttagttccttatactattataacgaacagcaaaaagact

SEQ ID NO: 723919 - DNA, 75 bp, synthetic construct
  source 1..75: mol_type = other DNA
cgtggtattctatttttctgttgatttcagctacgggcatgaccggtctaaataagctgagtactgaagctattc

SEQ ID NO: 723920 - DNA, 75 bp, synthetic construct
  source 1..75: mol_type = other DNA
gagtcagatttcgcagcaaagtgcggctcttgcagcggcaaatgccaacagaccatcagcaatgcaatctgctat

SEQ ID NO: 723921 - DNA, 75 bp, synthetic construct
  source 1..75: mol_type = other DNA
tgcgttatcagttctggcacgattttctcggcaacgcgccgaccattccgccagtgctctacggcctgaatgaaa

SEQ ID NO: 723922 - DNA, 75 bp, synthetic construct
  source 1..75: mol_type = other DNA
ggggaaagatattttccctgcgtgaatatttccggtgagccggaggattatttccgtatgtcgccggaagactgg

SEQ ID NO: 723923 - DNA, 75 bp, synthetic construct
  source 1..75: mol_type = other DNA
ctggcgtcaccgccactggcacgcatctgccttcacggggatttacaacgatttggccgccgcctcagcctgtat

SEQ ID NO: 723924 - DNA, 75 bp, synthetic construct
  source 1..75: mol_type = other DNA
atggctaacgcagatctggataaacagcctgattctgtatcttctgtgctaaaagtttttggcattttgcaggcg

SEQ ID NO: 723925 - DNA, 75 bp, synthetic construct
  source 1..75: mol_type = other DNA
gcaatattttgctggccgatgaagccatcggtgtgcggattgtcgaagcgttagagcaacgatacattctgccgg

SEQ ID NO: 723926 - DNA, 75 bp, synthetic construct
  source 1..75: mol_type = other DNA
gtaatattttgctgaccgatgaagccatcggagtgcggattgtcgaagcattagagcaacgatacattctgccgg

SEQ ID NO: 723927 - DNA, 75 bp, synthetic construct
  source 1..75: mol_type = other DNA
gcaatattttgctgactgatgaagccatcggtgtgcggattgttgaagcgttagagcaacgatacattctgccgg

SEQ ID NO: 723928 - DNA, 75 bp, synthetic construct
  source 1..75: mol_type = other DNA
gtcagtcagtgccaacgggggaacgccgccgtataaatacgcctggaagaaggatggtcagccggttgacgggca

SEQ ID NO: 723929 - DNA, 75 bp, synthetic construct
  source 1..75: mol_type = other DNA
gtgaatattggctgccacctgactattccgcagagctgcgagttccagctgctgcgcgacaagcaggaggcgtaa

SEQ ID NO: 723930 - DNA, 75 bp, synthetic construct
  source 1..75: mol_type = other DNA
ctggttatataggttcccatacaattttaatgttgctaaatgaaggttatgatataattgttatagataattttt

SEQ ID NO: 723931 - DNA, 75 bp, synthetic construct
  source 1..75: mol_type = other DNA
cccaacagagtactacgataataatgtatacggtacacttgttcttattgaggaaatgattagtaataatatcaa

SEQ ID NO: 723932 - DNA, 75 bp, synthetic construct
  source 1..75: mol_type = other DNA
tgaacgacgagatccaccagaatctggttggcgtttccaaccaccgtacgctggaattcgctaaatatctggcga

SEQ ID NO: 723933 - DNA, 75 bp, synthetic construct
  source 1..75: mol_type = other DNA
caaactcgacggtgttaaaccacctaagaaagagaccatggaacgcgtgaaaggcattcttgagcagtacggtca

SEQ ID NO: 723934 - DNA, 75 bp, synthetic construct
  source 1..75: mol_type = other DNA
gcggtcttaccggaaacagcactgcatcagcagcagtgggagcacagagcgggaagaatgctgttgagaataacc

SEQ ID NO: 723935 - DNA, 75 bp, synthetic construct
  source 1..75: mol_type = other DNA
gctgatgttctctcctgtagtgataatccttccggtgaagcctgtaagcgggggcaggctgaaaataaagcttat

SEQ ID NO: 723936 - DNA, 75 bp, synthetic construct
  source 1..75: mol_type = other DNA
agccggtgagtgaactgagtgagacagagaagcagacggtctcgacactgacaacggttgctgccggcctggccg

SEQ ID NO: 723937 - DNA, 75 bp, synthetic construct
  source 1..75: mol_type = other DNA
gtgaacctcccacaagacggcatcaaactgcatcgcggtaacttcaccgctatcggtcagcagctccagccttat

SEQ ID NO: 723938 - DNA, 75 bp, synthetic construct
  source 1..75: mol_type = other DNA
tgcgtattgctttccacggctcattgagttggaggtgttgacgtcagcgtcgttaaaatatgcaattgccgagcg

SEQ ID NO: 723939 - DNA, 75 bp, synthetic construct
  source 1..75: mol_type = other DNA
gagctggaagtgctgacatcagcgtcgttgaaatatgcaattgctgagcgtggttatcggttggggagttatcgg

SEQ ID NO: 723940 - DNA, 75 bp, synthetic construct
  source 1..75: mol_type = other DNA
tcgtgcagcctggtagaacctgcaagccttgcgtggcgcggggtgtggtgattcagtgtgattctgggcggattt

SEQ ID NO: 723941 - DNA, 75 bp, synthetic construct
  source 1..75: mol_type = other DNA
gccggatgcgcgccgccgggatatcgataattacaacaaagccctgtttgacgcgctgacgcatgcgggtgtctg

SEQ ID NO: 723942 - DNA, 75 bp, synthetic construct
  source 1..75: mol_type = other DNA
ccccaacaaaggggcgtttgctggtaagagcctgataagcgcggcggggcgaaaattccagagcgcggcgtgtgc

SEQ ID NO: 723943 - DNA, 75 bp, synthetic construct
  source 1..75: mol_type = other DNA
ccgatgattttggcttaagcaaaggtcagaactacggcattatcgaggcctgtcgaaacggtattgtcacgtcaa

SEQ ID NO: 723944 - DNA, 75 bp, synthetic construct
  source 1..75: mol_type = other DNA
tacttcactacctgtcttaagaaattaaattatatcaataaggttatttctgagttatcgcggttttatactgat

SEQ ID NO: 723945 - DNA, 75 bp, synthetic construct
  source 1..75: mol_type = other DNA
gttgtttcctccggataaccggatccgcgatctggacaactataacaaggcgctgtttgacgccctgacccacgc

SEQ ID NO: 723946 - DNA, 75 bp, synthetic construct
  source 1..75: mol_type = other DNA
tgacttcatcaccggcgaaaaaaccactacatgggaaccgcgacataccgccgatctcgataccggggaaatgca

SEQ ID NO: 723947 - DNA, 75 bp, synthetic construct
  source 1..75: mol_type = other DNA
tcccacgcttaacggagctggatgtgttgacatcagcgtcgttgaaaggtgctatcgctcagcgtggttatcggt

SEQ ID NO: 723948 - DNA, 75 bp, synthetic construct
  source 1..75: mol_type = other DNA
agctatttggacgcaaacctacgcatcttgatagccatcatcatgtgcatatgttcccgcagattttcccgattg

SEQ ID NO: 723949 - DNA, 75 bp, synthetic construct
  source 1..75: mol_type = other DNA
atggaacgcttactgattgttaatgccgatgattttggcttaagcaaaggtcagaactacggcattatcgaggcc

SEQ ID NO: 723950 - DNA, 75 bp, synthetic construct
  source 1..75: mol_type = other DNA
tacctcttgatgaaagttgtcaggttggtaaaacgattaatccatacggcacttcaaaatttttttctgaacaaa

SEQ ID NO: 723951 - DNA, 75 bp, synthetic construct
  source 1..75: mol_type = other DNA
ttcgccacggattaccagcaactgtttgccgagaagccgtctctgacgctacatcagcggatgcaggaactggag

SEQ ID NO: 723952 - DNA, 75 bp, synthetic construct
  source 1..75: mol_type = other DNA
tgctggacttgtgtaatcaactgcatgtcagccgccgcacgctacaaaacgcgtttcacgctattttaggcattg

SEQ ID NO: 723953 - DNA, 75 bp, synthetic construct
  source 1..75: mol_type = other DNA
tttgccacggattaccagcagctgtttgccgagaagccgtcgttgacgttgcatcagcggatgcgggaatggggg

SEQ ID NO: 723954 - DNA, 75 bp, synthetic construct
  source 1..75: mol_type = other DNA
tcaattattgaatcagcaggtggaacagctggaggcggtggaacgctggccgacgcgccacctgcatgtgcttga

SEQ ID NO: 723955 - DNA, 75 bp, synthetic construct
  source 1..75: mol_type = other DNA
gatgcaggtgcaacggtacgttggggaaagcggccttatgacggcaacagagagcataatttatatgttgaattt

SEQ ID NO: 723956 - DNA, 75 bp, synthetic construct
  source 1..75: mol_type = other DNA
gccaggtagaacgcgccagggcatacagcgtcaacttcagaaccgcagagcgatttgggttaattgaagtcacgg

SEQ ID NO: 723957 - DNA, 75 bp, synthetic construct
  source 1..75: mol_type = other DNA
cccccacataagtatctcattagaaaagtcatcctttcagttatatatcatttctatctttaacaaaagatacaa

SEQ ID NO: 723958 - DNA, 75 bp, synthetic construct
  source 1..75: mol_type = other DNA
ctggtctgacgatgacgattcagcgcatcgccttggtgaatttacccgtgatatgggcaacgttgagaaaatcga

SEQ ID NO: 723959 - DNA, 75 bp, synthetic construct
  source 1..75: mol_type = other DNA
ggtctgccgccaaccgctggtctgggtattggtatcgaccgaatgattatgctgtttacaaacagtcatactatt

SEQ ID NO: 723960 - DNA, 75 bp, synthetic construct
  source 1..75: mol_type = other DNA
cggacgattacacaattcttggcgtggtgctttctgaagacgtcattacccggcaggctaactttttgcataatc

SEQ ID NO: 723961 - DNA, 75 bp, synthetic construct
  source 1..75: mol_type = other DNA
tagttacacaactggggtatgggcaacgcgttgcgtggaatgacgtaatagatgccggtgcaacggtacgttggg

SEQ ID NO: 723962 - DNA, 75 bp, synthetic construct
  source 1..75: mol_type = other DNA
tacgggcaatgaaaaatggcataaccggcaacagtgctcaggcatatttacgctggtatcagaatgagcgccgtc

SEQ ID NO: 723963 - DNA, 75 bp, synthetic construct
  source 1..75: mol_type = other DNA
gtccttagagtattattcaaataatgttggtggaactttggtgttacttgaatgcatggaaaaatataacattaa

SEQ ID NO: 723964 - DNA, 75 bp, synthetic construct
  source 1..75: mol_type = other DNA
ttcctttgaaggaagatagtagcgttggcggaacaactaatccatatggcttttcaaaacttatagtagagaggg

SEQ ID NO: 723965 - DNA, 75 bp, synthetic construct
  source 1..75: mol_type = other DNA
gctgatccttctttagcagaagaggagctaagatggagggctcataggactatcgagcagatgatggtagatgca

SEQ ID NO: 723966 - DNA, 75 bp, synthetic construct
  source 1..75: mol_type = other DNA
acctataagttattatgataataatgtcgtcggaactctagcattgcttgaagagatgttacgacatgatgtaat

SEQ ID NO: 723967 - DNA, 75 bp, synthetic construct
  source 1..75: mol_type = other DNA
tgcagaagcggaaaaatggatggactgggcaaaccagacgctcagtaatgcccatcgcgggatcctgatgggatt

SEQ ID NO: 723968 - DNA, 75 bp, synthetic construct
  source 1..75: mol_type = other DNA
gttatattggatctcatactgtagttgaattactatctcgtgattatgaagtaattattttagataatttttcta

SEQ ID NO: 723969 - DNA, 75 bp, synthetic construct
  source 1..75: mol_type = other DNA
cgttatttcaatcctgtaggagcccactcttctggtctattaggtgaagatcctaatggtgttccaaataattta

SEQ ID NO: 723970 - DNA, 75 bp, synthetic construct
  source 1..75: mol_type = other DNA
tgtgtaatgcattttgccggtgcaaagtctgttgctgagtctttaataaaacccattttttattatgataataat

SEQ ID NO: 723971 - DNA, 75 bp, synthetic construct
  source 1..75: mol_type = other DNA
ctttattaacttaacaaagaaaataatggaacaaatgtatcattcagccaaatctcaatcttggtcttctggagg

SEQ ID NO: 723972 - DNA, 75 bp, synthetic construct
  source 1..75: mol_type = other DNA
aatcttacatttaacagactccctatagaagcacaaaaaaaaataaaagatgccttaaaagaaatgaatttgtta

SEQ ID NO: 723973 - DNA, 75 bp, synthetic construct
  source 1..75: mol_type = other DNA
aaacccattttctataaaggcgacgtgatggacagacatcttctgaagaagatttttgcgtcgcataatattact

SEQ ID NO: 723974 - DNA, 75 bp, synthetic construct
  source 1..75: mol_type = other DNA
tcagatccgtcccgagcacggcgggaattgggctggcaggccacccgcactattgaagaaatgatgcgtgatacc

SEQ ID NO: 723975 - DNA, 75 bp, synthetic construct
  source 1..75: mol_type = other DNA
gatggaaccggtgttcgtgattatatacacgtaatggatttagcagaagggcatgtggctgctttatcttacctt

SEQ ID NO: 723976 - DNA, 75 bp, synthetic construct
  source 1..75: mol_type = other DNA
ttgccgccgggcatgcgctggccgaagaccaccagagagcgattgagtcaattaagcaggctgattcggctgtta

SEQ ID NO: 723977 - DNA, 75 bp, synthetic construct
  source 1..75: mol_type = other DNA
cagcgacgcagagcgactggcgctatttgatatggatttacagggtttaggtttatctcctcagcaaaaaggtgt

SEQ ID NO: 723978 - DNA, 75 bp, synthetic construct
  source 1..75: mol_type = other DNA
tgcaaacatgcttgcaaaagattcaggtgcagaagattctattctatttaaaatcagtaatagagtcaggggtag

SEQ ID NO: 723979 - DNA, 75 bp, synthetic construct
  source 1..75: mol_type = other DNA
tcaccacaaaagcccattccagctaccgacgctttcctggctgaagtacgggcacagggggtggagatgatgcgc

SEQ ID NO: 723980 - DNA, 75 bp, synthetic construct
  source 1..75: mol_type = other DNA
tggtgaataccggcatgcaattatcgcttccgcagcaacatctttcgccgcagagcttcgcaaaggaggcaacca

SEQ ID NO: 723981 - DNA, 75 bp, synthetic construct
  source 1..75: mol_type = other DNA
ctgaagtacgggccagcgaacttgatagcttggctggcttggctgaaacaatgttggtcaagttctccaatcagc

SEQ ID NO: 723982 - DNA, 75 bp, synthetic construct
  source 1..75: mol_type = other DNA
tcgggcgtgctggccgtaaacagagtgaggatgaaattatcgggggccgggtactctgcgaatcgccaaaggaag

SEQ ID NO: 723983 - DNA, 75 bp, synthetic construct
  source 1..75: mol_type = other DNA
gtccactgctgttgctgcggaagctggctcagcctccaccggagggaatgagcgggatatcgaacaggatttacc

SEQ ID NO: 723984 - DNA, 75 bp, synthetic construct
  source 1..75: mol_type = other DNA
acattacagacagaaaacgctgccggcgatgcagataccaaaaacacgggatccactgttgttgtaactgaaggg

SEQ ID NO: 723985 - DNA, 75 bp, synthetic construct
  source 1..75: mol_type = other DNA
taaaaactaaccttccaacagcccaacttgatgttcaagcacagaaattattgggttttgaggggcgctatacgc

SEQ ID NO: 723986 - DNA, 75 bp, synthetic construct
  source 1..75: mol_type = other DNA
tcagaacaaaaagtctgcctcaaaacggccttacaatacgatgtgccagcggtatcgaagctgtgccagccattg

SEQ ID NO: 723987 - DNA, 75 bp, synthetic construct
  source 1..75: mol_type = other DNA
tatctacgacaaaggctgtacgttcgttgaggacttctacgacgaatcccgggataaagtacttaatgcgctgga

SEQ ID NO: 723988 - DNA, 75 bp, synthetic construct
  source 1..75: mol_type = other DNA
ggttcagacctggtagggaaggttgaaatgaccgagtggttagttgactttgccgcagagcttcgcaaaggaggc

SEQ ID NO: 723989 - DNA, 75 bp, synthetic construct
  source 1..75: mol_type = other DNA
actggttaaagcgccgtgtggcacggttcattcatgggaaaaacggaatagacccgccgttgcagcacacttttg

SEQ ID NO: 723990 - DNA, 75 bp, synthetic construct
  source 1..75: mol_type = other DNA
gattctggggccagaatccatgtggaaacgggatgatagacatcaccgtccctatgaaacgttggttcttgactg

SEQ ID NO: 723991 - DNA, 75 bp, synthetic construct
  source 1..75: mol_type = other DNA
gtgtgggcgggaagacgctaaatctcggagagctagagcttcgagattatgggctcaatatgcacatcggttgcg

SEQ ID NO: 723992 - DNA, 75 bp, synthetic construct
  source 1..75: mol_type = other DNA
cttcggttcgcactggtacatttgccagcgatgaaaaagctaggactgcattatgccataccgcccgacataaca

SEQ ID NO: 723993 - DNA, 75 bp, synthetic construct
  source 1..75: mol_type = other DNA
tctttatgcagagtttcttataaaaaataaaaatcaggaggacagatattcgaagatattatctgaactttctga

SEQ ID NO: 723994 - DNA, 75 bp, synthetic construct
  source 1..75: mol_type = other DNA
aattacgttccggggcaggcatcgtatgtccctgatgattatttcaaacgaatattaacgtggaatttttataag

SEQ ID NO: 723995 - DNA, 75 bp, synthetic construct
  source 1..75: mol_type = other DNA
gatgatataagagattatttttataaatcaaaatatccaacaagagaatttcttttgtgttatggtttagaatca

SEQ ID NO: 723996 - DNA, 75 bp, synthetic construct
  source 1..75: mol_type = other DNA
acaacagagcacgcaccacaaaaccggagaatgcggacaccctttatttcacagtagacgactgctaccgcgtgg

SEQ ID NO: 723997 - DNA, 75 bp, synthetic construct
  source 1..75: mol_type = other DNA
gcatgacgactggggatttgacacggatcttttccatgagctggtaacaccatcgattgtgcaggcgctgctgga

SEQ ID NO: 723998 - DNA, 75 bp, synthetic construct
  source 1..75: mol_type = other DNA
ccatcgctggactgccgaagagtgcaagaccatcaaggcggagtatcaacagaaacttaaaaaactgcgaaatag

SEQ ID NO: 723999 - DNA, 75 bp, synthetic construct
  source 1..75: mol_type = other DNA
ggcgcctttcctttgggttctctatatcgggcggatcgtggccggcatcaccgggggcgactggggcggtagccg

SEQ ID NO: 724000 - DNA, 75 bp, synthetic construct
  source 1..75: mol_type = other DNA
tattctttactctcttccagcaaggttaagaggtcaggtttttgttcctatgggaccagctctttccgcgtcatt

SEQ ID NO: 724001 - DNA, 75 bp, synthetic construct
  source 1..75: mol_type = other DNA
agaccagctttggtcatgaacaggtgcgtgacgggatttcttttggcaaggaagaagaacgcgtcagtattgtca

SEQ ID NO: 724002 - DNA, 75 bp, synthetic construct
  source 1..75: mol_type = other DNA
atgctggtggagtgggggaacatcgtgaagaaagggaaagtagaaatcaccatcagacgttttcgtgcagctgcc

SEQ ID NO: 724003 - DNA, 75 bp, synthetic construct
  source 1..75: mol_type = other DNA
agaatgctggtggagtggggaccggttatcccggaagggaaggtcgagatcactatcagtaagtacgagaaaacg

SEQ ID NO: 724004 - DNA, 75 bp, synthetic construct
  source 1..75: mol_type = other DNA
atgaagctgatcgtgcctttccctcccagcgtgaacacgtactggcgacaccccaacaaaggggtgtttgctggt

SEQ ID NO: 724005 - DNA, 75 bp, synthetic construct
  source 1..75: mol_type = other DNA
tgttaataatccacgtggtgataaggcttggactgaaatcgaagatcccgcaaagattaaacagaaagccgaagc

SEQ ID NO: 724006 - DNA, 75 bp, synthetic construct
  source 1..75: mol_type = other DNA
aaggtttcgaaagaattagttccaggaagattagcaggtaataaaggtaatgaagcggactttattgcaaagagt

SEQ ID NO: 724007 - DNA, 75 bp, synthetic construct
  source 1..75: mol_type = other DNA
cgataaagcagcccgacaagcagcctcggcagcggctaaagccaaggcattacgtgagaaagaagctaaagaacg

SEQ ID NO: 724008 - DNA, 75 bp, synthetic construct
  source 1..75: mol_type = other DNA
atgaagctgatcatgcctttcccccccagcgtgaacacgtactggcgacaccccaacaaaggggcgtttgctggt

SEQ ID NO: 724009 - DNA, 75 bp, synthetic construct
  source 1..75: mol_type = other DNA
ccagcgtgaacacctactggcgacaccccaacaaagtggcatttgctggtaagagcctgataagcgcggcggggc

SEQ ID NO: 724010 - DNA, 75 bp, synthetic construct
  source 1..75: mol_type = other DNA
cgagcgtgaacacttactggcgcgcccctaataaggggccgctggccggtcgtcacctcattagcgctgatggtc

SEQ ID NO: 724011 - DNA, 75 bp, synthetic construct
  source 1..75: mol_type = other DNA
atgaagctgatcctgcctttcccccccagcgtgaacacgtactggcgacaccccaacaaaggggagtttgctggt

SEQ ID NO: 724012 - DNA, 75 bp, synthetic construct
  source 1..75: mol_type = other DNA
atgaagctgatcctgcctttcccacccagcgtgaacacgtactggcgacaccccaacaaaggggcgtttgctggt

SEQ ID NO: 724013 - DNA, 75 bp, synthetic construct
  source 1..75: mol_type = other DNA
atgaagctgatcttgcctttccctcccagcgtgaacacgtactggcgacaccccaacaaaggggggtttgctggt

SEQ ID NO: 724014 - DNA, 75 bp, synthetic construct
  source 1..75: mol_type = other DNA
aaatgagactactaatcagcaaaatatgttattagctagtaaacaagttagtacagaagggcaagcattcttagg

SEQ ID NO: 724015 - DNA, 75 bp, synthetic construct
  source 1..75: mol_type = other DNA
actgggtaaatcgccttcacctggcgaaaaattacaacgcgcagcaaaacaactcgaggtgttttccgggataac

SEQ ID NO: 724016 - DNA, 75 bp, synthetic construct
  source 1..75: mol_type = other DNA
ctggcaagccttgccgatgcatttaacaaagccgtcgcagcaaacaagaaaatactgccggaggtgagtcagctg

SEQ ID NO: 724017 - DNA, 75 bp, synthetic construct
  source 1..75: mol_type = other DNA
gtggtgaagtgtcagacgacgcttgaacggctgaaccagaacccggacatcccgccgcaggagtccgtcgaactg

SEQ ID NO: 724018 - DNA, 75 bp, synthetic construct
  source 1..75: mol_type = other DNA
ccgcagtgaagaagaacggcacaggtttgccggcctgttcgaaggagaatcgttaattcaggctgttccgggcgg

SEQ ID NO: 724019 - DNA, 75 bp, synthetic construct
  source 1..75: mol_type = other DNA
ccgccagatattgagtgacaattacaccgtatattgcgggcagttgctgaagcaggaactgatcattgccggttg

SEQ ID NO: 724020 - DNA, 75 bp, synthetic construct
  source 1..75: mol_type = other DNA
tttcgtcgaacgccgacacccatgcctccctgaagccggtgatctccatgtggctgtccattgctattcgtggtc

SEQ ID NO: 724021 - DNA, 75 bp, synthetic construct
  source 1..75: mol_type = other DNA
ctcgacaggcagcaagatctacagaaacagtaccaaagtggtgatataagcaaatcgctttatgaccaggaaacg

SEQ ID NO: 724022 - DNA, 75 bp, synthetic construct
  source 1..75: mol_type = other DNA
caggctgaacgagcatcacaaaaatggcgaaaacaggttcaggctgatgcaaaagcagctgcggtagcatttact

SEQ ID NO: 724023 - DNA, 75 bp, synthetic construct
  source 1..75: mol_type = other DNA
agatgaatgctttatgggactggtttaataaaggctggggtacatctgactttatgaaggcagttgataaactca

SEQ ID NO: 724024 - DNA, 75 bp, synthetic construct
  source 1..75: mol_type = other DNA
ttcaggcgatgcgggacaaactggaagggcgcgcccctgtcgctgaaattcagggtagctcgcaactttttgtca

SEQ ID NO: 724025 - DNA, 75 bp, synthetic construct
  source 1..75: mol_type = other DNA
gagaagctgttgccgttttctgacgtccgcgaggagctgccgcgcggcacgtttgcttatacccgtgttccgacg

SEQ ID NO: 724026 - DNA, 75 bp, synthetic construct
  source 1..75: mol_type = other DNA
gcagtccctgttagcctggcaatatgctgcagaaaaagcaggtgtttccggcgatcagatggccgatatctttaa

SEQ ID NO: 724027 - DNA, 75 bp, synthetic construct
  source 1..75: mol_type = other DNA
cattgaatttatccatgacgttcatgaacgtataagtcccatcaacgcaattcaattagcaaaatcacttgaacc

SEQ ID NO: 724028 - DNA, 75 bp, synthetic construct
  source 1..75: mol_type = other DNA
gcccaattatgaataatgccttgtcagggatcgatatggctttgtgggatctaaagggaaaagtcgccggactcc

SEQ ID NO: 724029 - DNA, 75 bp, synthetic construct
  source 1..75: mol_type = other DNA
gcgattacaggcatcttcacgttattttttaactgctcttccggaagtattattactggcaccagaggaaaacag

SEQ ID NO: 724030 - DNA, 75 bp, synthetic construct
  source 1..75: mol_type = other DNA
tttatattgcttgttaatataattaatttatttcttttcctaagaaaaggaatgatggtaagtagtttttctcaa

SEQ ID NO: 724031 - DNA, 75 bp, synthetic construct
  source 1..75: mol_type = other DNA
tttctttttctaagaaaaggaatgatggtaagtagtttttctcaatcaagttttaaatcattaaaatttgataac

SEQ ID NO: 724032 - DNA, 75 bp, synthetic construct
  source 1..75: mol_type = other DNA
caaaggctgacggtggtaaacgccacggggattcagccatcgcactggcgctggcgtatttcgccagccgtgaaa

SEQ ID NO: 724033 - DNA, 75 bp, synthetic construct
  source 1..75: mol_type = other DNA
ttttatcccgattagtgtgtcgcatgacagagatcggaaaaatgcccacaaccgacgattacgaggaacggcttc

SEQ ID NO: 724034 - DNA, 75 bp, synthetic construct
  source 1..75: mol_type = other DNA
tgccagagaaacggcacatgtaaaattccggccgtggcaggatgataagtggagtcgagttttgccgcatttacg

SEQ ID NO: 724035 - DNA, 75 bp, synthetic construct
  source 1..75: mol_type = other DNA
cgtttgtcggtcatcgcaatctggacgacaccattttcaataccaatattgaagcgacgcaggctatcgctcgcc

SEQ ID NO: 724036 - DNA, 75 bp, synthetic construct
  source 1..75: mol_type = other DNA
tgtgttgcgtttgttaggaataacactgtcatgcagaaaaccggtcatcttactgggggcagacgcgaagaatca

SEQ ID NO: 724037 - DNA, 75 bp, synthetic construct
  source 1..75: mol_type = other DNA
gagaatctcaagcgttggatagatttgctagagcaaccagcattccggctcgctattgattctttaacaactcac

SEQ ID NO: 724038 - DNA, 75 bp, synthetic construct
  source 1..75: mol_type = other DNA
cttgggatgtattccctgctcttcaagccaactcgtgtgaagtccaacttcttgaggacgtgccggcagttcgga

SEQ ID NO: 724039 - DNA, 75 bp, synthetic construct
  source 1..75: mol_type = other DNA
atgaagaaaaaccccgtaagtataccacacaccgtctggcacgccgacgatatccgacgtggcgaacgcgaagcg

SEQ ID NO: 724040 - DNA, 75 bp, synthetic construct
  source 1..75: mol_type = other DNA
aaagtcctttatctggatgcagatatcatttgtcaggggactattgagccactaattaatttctcatttcctgac

SEQ ID NO: 724041 - DNA, 75 bp, synthetic construct
  source 1..75: mol_type = other DNA
ctcccgcaggagaagagttagtgagccgtctacgcacactggggcaggtggcctggcattttccgctgattgagt

SEQ ID NO: 724042 - DNA, 75 bp, synthetic construct
  source 1..75: mol_type = other DNA
gaagtcactttttgtgaatgttatcaacgatgcgcaatccattacgatggtgcagaagaagcgatgcgctggcaa

SEQ ID NO: 724043 - DNA, 75 bp, synthetic construct
  source 1..75: mol_type = other DNA
ggaattgctaaaggttactttaactccggttttttattgattaatactgaccaatgggcggctcagcaggtttct

SEQ ID NO: 724044 - DNA, 75 bp, synthetic construct
  source 1..75: mol_type = other DNA
atgcagcaggtatttttccaggaaactgagtatctaaattcagttattgattataatcataaagtagaaacagaa

SEQ ID NO: 724045 - DNA, 75 bp, synthetic construct
  source 1..75: mol_type = other DNA
acgatactatttttatccattatatcgggccaaccaagccctggcatgattgggcctgggattatcctgtatcac

SEQ ID NO: 724046 - DNA, 75 bp, synthetic construct
  source 1..75: mol_type = other DNA
acagtatcccgactggcacatgctgagggggaaaccggaatgctttatcagcagtgaccttgcctcgcgcgtgtt

SEQ ID NO: 724047 - DNA, 75 bp, synthetic construct
  source 1..75: mol_type = other DNA
cacacaccgtctggcacgccgacgatatccgccgcggagaacgtgaggcggcagatgcgctggggcttacactct

SEQ ID NO: 724048 - DNA, 75 bp, synthetic construct
  source 1..75: mol_type = other DNA
cctgttagcacaaaccggagccacgccaggtgcggtgatcaacgcctctcacaccgtgacctttattgccctaaa

SEQ ID NO: 724049 - DNA, 75 bp, synthetic construct
  source 1..75: mol_type = other DNA
ccgtcgcaatatgattaacgtcgcgctgaataacggcactctgcaacaccctgttaaaggtgttcatacgggttc

SEQ ID NO: 724050 - DNA, 75 bp, synthetic construct
  source 1..75: mol_type = other DNA
ggtggtgcagagtcaggactggcagcacaacattatcagagttttgttgagcagctcgggattaaacagggggct

SEQ ID NO: 724051 - DNA, 75 bp, synthetic construct
  source 1..75: mol_type = other DNA
accaatttacagaggtaatggagccgattaagctttcaatgcaccaatacttattgatgacaaatgagcctgttc

SEQ ID NO: 724052 - DNA, 75 bp, synthetic construct
  source 1..75: mol_type = other DNA
tggatatcaacgacgcccgtatgctccaggcataccgcatagctcaggctgcactacaggcaaaaccgtcagatg

SEQ ID NO: 724053 - DNA, 75 bp, synthetic construct
  source 1..75: mol_type = other DNA
cccaccccgccccacagaatgcagggcaatacttcgagttacccggcagtggtcaggggttaagtagccagcccg

SEQ ID NO: 724054 - DNA, 75 bp, synthetic construct
  source 1..75: mol_type = other DNA
attaataccaaagcctggaaagctttaactgatatatcgcaaaagttaaatcgaattgcgatccatatcgatggt

SEQ ID NO: 724055 - DNA, 75 bp, synthetic construct
  source 1..75: mol_type = other DNA
gacccatatagattgtaaaagcaaggacagtcagcttacacatacagagcttttcgctgtgaagcgacaattgga

SEQ ID NO: 724056 - DNA, 75 bp, synthetic construct
  source 1..75: mol_type = other DNA
agcgtagcgtgctggtgggcttacagtcctttgccgaaggtcttgatctgaaaggcgatctgctcagccaggtgc

SEQ ID NO: 724057 - DNA, 75 bp, synthetic construct
  source 1..75: mol_type = other DNA
ccgttttttgttgctcgtcgggagattcaggaagcggaagtggtggtggcaaaccatgcgctggtgatggcggcg

SEQ ID NO: 724058 - DNA, 75 bp, synthetic construct
  source 1..75: mol_type = other DNA
acacttataaatgggatggtctgcgcgatcatactgatatcgctatagatgacgatctctggcgtcgtttaagta

SEQ ID NO: 724059 - DNA, 75 bp, synthetic construct
  source 1..75: mol_type = other DNA
ctgaggagcgtttgcaggagtacgtgactatgctgcatacggcggcgcgtaaaatttcctctcaaatggggtatc

SEQ ID NO: 724060 - DNA, 75 bp, synthetic construct
  source 1..75: mol_type = other DNA
accttggcgcgctggatgaagacagcattgtttacatccacaaaattgactctatgtacaatttgcgcatgtatt

SEQ ID NO: 724061 - DNA, 75 bp, synthetic construct
  source 1..75: mol_type = other DNA
tcaatgtacaatttgcgtatgtattcacggattggacgtcgtaatccgctctacagcacggccatcggtaaagta

SEQ ID NO: 724062 - DNA, 75 bp, synthetic construct
  source 1..75: mol_type = other DNA
acatttcaccatctacagaagtcaggctcttcacccccaccatgaaaaaaacttctaaagtgcatcccaacgagc

SEQ ID NO: 724063 - DNA, 75 bp, synthetic construct
  source 1..75: mol_type = other DNA
gccacgctgtacggctttgcaatggcgctcggcctgctggagcagaaaattcacgcccgtggcccgggtgagcag

SEQ ID NO: 724064 - DNA, 75 bp, synthetic construct
  source 1..75: mol_type = other DNA
tgcgaaatcgaaattttcgccacgctttcgccgctgttcgatgcagaacgcttcggcattaaagtcgttccgtca

SEQ ID NO: 724065 - DNA, 75 bp, synthetic construct
  source 1..75: mol_type = other DNA
tactatcgcgaatgcccgttttttgtcgctcgtcgggaaattcaggaagcggaagtggtggtggcaaaccatgcg

SEQ ID NO: 724066 - DNA, 75 bp, synthetic construct
  source 1..75: mol_type = other DNA
ccagaaagaagtggcgttattgctcgatacactagagggcgattactggcgtgttgcgcttttgtgtttaagtac

SEQ ID NO: 724067 - DNA, 75 bp, synthetic construct
  source 1..75: mol_type = other DNA
tctttgggatgcagaacatccagtaaggggaatttctattctttatgtatctccacgagaaatggcgttcctgtc

SEQ ID NO: 724068 - DNA, 75 bp, synthetic construct
  source 1..75: mol_type = other DNA
ctttttgagatccgcacgatggggacggacatagccagaggcatctgggtataccacaaaggcaataccatcatc

SEQ ID NO: 724069 - DNA, 75 bp, synthetic construct
  source 1..75: mol_type = other DNA
ttcttatcagtctgcaaggatcgcgccctctaaatcgaggattaatattcctgaatctattcaggctatacgtct

SEQ ID NO: 724070 - DNA, 75 bp, synthetic construct
  source 1..75: mol_type = other DNA
cagcgcaacggtggataacaagggcaccatgaccgtcaccgatccggagtccatcggtatccagattgacggcga

SEQ ID NO: 724071 - DNA, 75 bp, synthetic construct
  source 1..75: mol_type = other DNA
atgcaggatattgacagttttgaacatcatgggacaagaaccctggatttgcccctatatttccagacatctgtt

SEQ ID NO: 724072 - DNA, 75 bp, synthetic construct
  source 1..75: mol_type = other DNA
actgactggcattaccccagaagggaccgtttatgttgccagacagcgctactgattaagcggatttcttcgctt

SEQ ID NO: 724073 - DNA, 75 bp, synthetic construct
  source 1..75: mol_type = other DNA
cagttgcttaactgactggcattaccgcccttcggggcggtttttttacatggcacgaaagaccaaacatttgtt

SEQ ID NO: 724074 - DNA, 75 bp, synthetic construct
  source 1..75: mol_type = other DNA
tgaagggcgatctcgacacttataaatgggatggtttgcgcgatcacactgatattgctattgatgacgatctct

SEQ ID NO: 724075 - DNA, 75 bp, synthetic construct
  source 1..75: mol_type = other DNA
ggtcaaagctgcactggaagacggcaacctggtggacttaccaaaggatgaagacacactggatgacctgcgggc

SEQ ID NO: 724076 - DNA, 75 bp, synthetic construct
  source 1..75: mol_type = other DNA
ttcgtttcgtcgaatggccgtggttacggcgacaaatcccgccagttgccgcgcttatctttatgctctgtttcg

SEQ ID NO: 724077 - DNA, 75 bp, synthetic construct
  source 1..75: mol_type = other DNA
aaggatggtgacgtcagtctggtaccggaaaagggcgttaaaaacgccgtaaaaaaagagggcgtaattaaatga

SEQ ID NO: 724078 - DNA, 75 bp, synthetic construct
  source 1..75: mol_type = other DNA
ggatatagaggaaatatgcagaatctgagggccggaaatttttctgcaacagcaacactggtggcttcatattca

SEQ ID NO: 724079 - DNA, 75 bp, synthetic construct
  source 1..75: mol_type = other DNA
agcgtttctggtgatgggttgctcatttatctttacaacagtaataacagtagtattggtaacgcagtcacttta

SEQ ID NO: 724080 - DNA, 75 bp, synthetic construct
  source 1..75: mol_type = other DNA
atggcaacgcgccgtcagtcattaattcccggctggttaatccctgggttaagcgccgccacgctggtagtggcg

SEQ ID NO: 724081 - DNA, 75 bp, synthetic construct
  source 1..75: mol_type = other DNA
gtgattggcgagaaatgctggctggcaaccgatgtctttgttgcccctggcgtcacgatcggcgacggcaccgtc

SEQ ID NO: 724082 - DNA, 75 bp, synthetic construct
  source 1..75: mol_type = other DNA
gtagagattcagacattgaatgcagatggaagtgggcatcaaaaagagttttctgttgacatggtgtgtccttat

SEQ ID NO: 724083 - DNA, 75 bp, synthetic construct
  source 1..75: mol_type = other DNA
ttgctgacctgtgcggcggagtgcattaccgaagagggatttttctgcgtggtgctgccagagcagattggtaat

SEQ ID NO: 724084 - DNA, 75 bp, synthetic construct
  source 1..75: mol_type = other DNA
ctgggtggcagtctggcaggacagctacctgtggcatgtggtgcgcttctccttctggcaggcgtttctctcggc

SEQ ID NO: 724085 - DNA, 75 bp, synthetic construct
  source 1..75: mol_type = other DNA
tccttcacgccttccggcaccacccgtgaagaagtgaccggctcgcgggtttatggctggaaaggtaaaccacgt

SEQ ID NO: 724086 - DNA, 75 bp, synthetic construct
  source 1..75: mol_type = other DNA
ttatggctggaaaggtaaacctcgtgccgcaaagctggaatgcaaaattccgggcggtggtgatatcggtctgga

SEQ ID NO: 724087 - DNA, 75 bp, synthetic construct
  source 1..75: mol_type = other DNA
gggtcaggcgctggagatgagcggcatgttgatcctcgccatgccggggattgtgctggctacgggcttcttttt

SEQ ID NO: 724088 - DNA, 75 bp, synthetic construct
  source 1..75: mol_type = other DNA
gcgcttatctttatgctctgtttcgccagcttcgccaccgtgctatcgctgggcggcggtccgcaggcaactact

SEQ ID NO: 724089 - DNA, 75 bp, synthetic construct
  source 1..75: mol_type = other DNA
tccaggcactggaaaacattcccggcgaacagcgtcagcttgctgcccagcttggcatgcgcggctggcattttt

SEQ ID NO: 724090 - DNA, 75 bp, synthetic construct
  source 1..75: mol_type = other DNA
atgcaagatttaagcggtttctcggtaccgaaagggttccggggcggcaacgctattaaagtgcaattatggtgg

SEQ ID NO: 724091 - DNA, 75 bp, synthetic construct
  source 1..75: mol_type = other DNA
gtgaattgttagctcgttgtatcggaacaggtagattgaaaggagatgtggtaagtgattttattgggtttaatg

SEQ ID NO: 724092 - DNA, 75 bp, synthetic construct
  source 1..75: mol_type = other DNA
aatgggtggcgatgggcgaagagtacaagctcgacggtgtaaaaccaccgaaaaaagagacgatggagcgagtaa

SEQ ID NO: 724093 - DNA, 75 bp, synthetic construct
  source 1..75: mol_type = other DNA
ggtaggcgtttccaaccatcgtacactcgagtttgctaaatatctggcgaacaaaaatgtgaaagtctggatacg

SEQ ID NO: 724094 - DNA, 75 bp, synthetic construct
  source 1..75: mol_type = other DNA
gaggactggaatcagaccaggccagtagataccagaccgacactggaggattttaaaaagacggttggcgactat

SEQ ID NO: 724095 - DNA, 75 bp, synthetic construct
  source 1..75: mol_type = other DNA
accggctggcgcgatgatggtacaggcgaactgcatcatgaaatcggcgtgtggtacgtatcaaagaataattta

SEQ ID NO: 724096 - DNA, 75 bp, synthetic construct
  source 1..75: mol_type = other DNA
gtctgtaaaatctgttgagccggaaattaccgaactggcgaactcatggcttaaatcttacaggcttgattacaa

SEQ ID NO: 724097 - DNA, 75 bp, synthetic construct
  source 1..75: mol_type = other DNA
atgtctcaggtcaggttccggccagaaacatttctctctatgcaaaacttggatataaaggagatatacagaatt

SEQ ID NO: 724098 - DNA, 75 bp, synthetic construct
  source 1..75: mol_type = other DNA
gatactggtgcccaatacatcaacttcttccagtgatgggttgcttatttatctgtacgatcgtaataaaaatgg

SEQ ID NO: 724099 - DNA, 75 bp, synthetic construct
  source 1..75: mol_type = other DNA
atcacttcatgccaaacttggatataaagggaatatgcagaatctgagggctggggatttttctgcgacagcaac

SEQ ID NO: 724100 - DNA, 75 bp, synthetic construct
  source 1..75: mol_type = other DNA
ttattaccgacgcatgggattgtttgttgaacaggttaaagaatggcgggctatctcaattcaggcgcatgaaaa

SEQ ID NO: 724101 - DNA, 75 bp, synthetic construct
  source 1..75: mol_type = other DNA
atgcggaagaatacggggaagacgccgatgagtgaactgttgcaaaagctgacccgtagctgttttgtcgaccgg

SEQ ID NO: 724102 - DNA, 75 bp, synthetic construct
  source 1..75: mol_type = other DNA
gcgcttaaccttgccaccagtgatgcagcggcggtggccggccttgtgatgacggtgctgactgttggtctggtg

SEQ ID NO: 724103 - DNA, 75 bp, synthetic construct
  source 1..75: mol_type = other DNA
agaagcgcctgccctttctggtgatgcgccgcttgaagtattgctggtgacactggcgaaagagatgacgccagt

SEQ ID NO: 724104 - DNA, 75 bp, synthetic construct
  source 1..75: mol_type = other DNA
taacagcattccgcaagagagcgtggaaacgatgcgccaggcgctgcgggcagcaaacgcgaaagcagagattat

SEQ ID NO: 724105 - DNA, 75 bp, synthetic construct
  source 1..75: mol_type = other DNA
tgtcgccgtctggcgctggaggggtatctggctatcgcacctgaactttacttccgcgaaggcgatccgaatgat

SEQ ID NO: 724106 - DNA, 75 bp, synthetic construct
  source 1..75: mol_type = other DNA
atgacgacagtgattattgagccaaaaaaagagtcgcaggatgtgccgggcgtggtgataccaccaccgggcgtg

SEQ ID NO: 724107 - DNA, 75 bp, synthetic construct
  source 1..75: mol_type = other DNA
agctgacgcaggtgatgatttcatctaccccggcgactgctgaaactatggagaaggcggaatatctgcgtctgg

SEQ ID NO: 724108 - DNA, 75 bp, synthetic construct
  source 1..75: mol_type = other DNA
tcgctttatgagcgttatcgcggcgtggatgccagtgcgaaaggcgacaagaaggccgacagcattgacagcacc

SEQ ID NO: 724109 - DNA, 75 bp, synthetic construct
  source 1..75: mol_type = other DNA
tgtattccggccaacggtggcggtgcctggctgtcccgtgccctgatagagtcccgcatgtccgctgatacgccg

SEQ ID NO: 724110 - DNA, 75 bp, synthetic construct
  source 1..75: mol_type = other DNA
catggccgggcgttatctgattgaacgcggtcaccgcgaaatcggcgttatccctggcccgctggaacgtaacac

SEQ ID NO: 724111 - DNA, 75 bp, synthetic construct
  source 1..75: mol_type = other DNA
taaggtatagcgcaaaacatatgctgaaaaagcatagatatctaaaaggatttagcaattatcttttgtatttta

SEQ ID NO: 724112 - DNA, 75 bp, synthetic construct
  source 1..75: mol_type = other DNA
taagatatagtgccaaacatatgctaaaaaagcatagatacctaaagggatttagtaattatcttttgtacttta

SEQ ID NO: 724113 - DNA, 75 bp, synthetic construct
  source 1..75: mol_type = other DNA
gccagacgtaaggtcatcaaagagacgatccttagctggcttctcgttgacccttcatctaccgcgcacgaataa

SEQ ID NO: 724114 - DNA, 75 bp, synthetic construct
  source 1..75: mol_type = other DNA
agagcctgaaggaaaaattgctgctatgtgcggttaatgaatttgccgaatatggttatgaaggggccagagtag

SEQ ID NO: 724115 - DNA, 75 bp, synthetic construct
  source 1..75: mol_type = other DNA
cgcggccatcgcgaaatcggcgttattcctggccctctggagcgcaacaccggtgctggccgtctggctggcttt

SEQ ID NO: 724116 - DNA, 75 bp, synthetic construct
  source 1..75: mol_type = other DNA
agcgcgccgtgtgtgcgatggcgaccgcgtcgctttatgagcgttatcgcggcgtggatgccagtgcgaaaggcg

SEQ ID NO: 724117 - DNA, 75 bp, synthetic construct
  source 1..75: mol_type = other DNA
tttttgacctctttgccggaagctctgtttttggcaccggaaagtgacagcgtggagtttaactggctgagggag

SEQ ID NO: 724118 - DNA, 75 bp, synthetic construct
  source 1..75: mol_type = other DNA
gttttgcccagcttttccgtgatgtttccggaaccacgccgctggctgtattaacaaagttgcgtctacaaatag

SEQ ID NO: 724119 - DNA, 75 bp, synthetic construct
  source 1..75: mol_type = other DNA
atgagcgtgataaaaactcatacaggaattgttatcacccgagacggtccgcaggtaaaaaaactgcaccagaca

SEQ ID NO: 724120 - DNA, 75 bp, synthetic construct
  source 1..75: mol_type = other DNA
gcgggcatttttattacgtttattcggcgcaaaaataggaaaaaacgtagttattcgtccgtcagtaaaaattac

SEQ ID NO: 724121 - DNA, 75 bp, synthetic construct
  source 1..75: mol_type = other DNA
atgcaagatttaagcggtttctcggtgccgaaagggttccggggcggcaacgctattaaagtgcaattgtggtgg

SEQ ID NO: 724122 - DNA, 75 bp, synthetic construct
  source 1..75: mol_type = other DNA
atatcgccgcctttctcgacatgctggcagtgtccgaagggacggcgaatcatccgctgacgaaaaaccgtggct

SEQ ID NO: 724123 - DNA, 75 bp, synthetic construct
  source 1..75: mol_type = other DNA
caccatcgatgaactgtggcgggatatgcgctgggcggtggcgcgtatccaggacaagccgcgctgcatcgtgag

SEQ ID NO: 724124 - DNA, 75 bp, synthetic construct
  source 1..75: mol_type = other DNA
tgcgcaacgccatcaagaccggcatggcagaaaccaatgcggagctttacgactaccggctgcgccagattgccg

SEQ ID NO: 724125 - DNA, 75 bp, synthetic construct
  source 1..75: mol_type = other DNA
ggcgtggatgccagtgcgaaaggcgacaagaaggccgacagcattgacagcaccattgatgagctgtggcgggat

SEQ ID NO: 724126 - DNA, 75 bp, synthetic construct
  source 1..75: mol_type = other DNA
gaattaatatttatgttatcaattgtgataagctgaagtcattaccaagcacgaaaaactggacttacgctacat

SEQ ID NO: 724127 - DNA, 75 bp, synthetic construct
  source 1..75: mol_type = other DNA
tcatcctttttgagtataattttcattatcaaaatataagatctaaaaatactcttgatatagcatttggaattg

SEQ ID NO: 724128 - DNA, 75 bp, synthetic construct
  source 1..75: mol_type = other DNA
tcgcccgagctatcacgccgagtcggcgaaagatggctggcagcgaatgctggaatggtttacgcagtatggtgg

SEQ ID NO: 724129 - DNA, 75 bp, synthetic construct
  source 1..75: mol_type = other DNA
atgcgaaacgcaaatgaaggaatttctcttgcagctattgtagctaaagaaacaacaacaggtaaatggaatggt

SEQ ID NO: 724130 - DNA, 75 bp, synthetic construct
  source 1..75: mol_type = other DNA
ggcggcaatcgaccttgaagcactggaggcgttgtctcgtggtagtgatgagcctgtcgataccgacaaacgaga

SEQ ID NO: 724131 - DNA, 75 bp, synthetic construct
  source 1..75: mol_type = other DNA
gacgccatcaaattgcagcaggaactggagtccctggtgctgggtgacgttgaggtctttggttttgaagagcga

SEQ ID NO: 724132 - DNA, 75 bp, synthetic construct
  source 1..75: mol_type = other DNA
atgatatccattaagagctattttaactggaataagttatttgtgtttttagctgtggccttatactggttttgg

SEQ ID NO: 724133 - DNA, 75 bp, synthetic construct
  source 1..75: mol_type = other DNA
ataaaagttctcgtttttggcgtgctatttggtttatctgcccgtttatttacatttttatcagacactggttct

SEQ ID NO: 724134 - DNA, 75 bp, synthetic construct
  source 1..75: mol_type = other DNA
ctggtggtattggcttattcatcggaggtgtttctggttctaaacaagagcagacacaaagggcaaaaaactttg

SEQ ID NO: 724135 - DNA, 75 bp, synthetic construct
  source 1..75: mol_type = other DNA
gacccagcaactggcgcagacggttttacagggcaaaaccgttgacctcaccgacacccgcgactacgggcgatt

SEQ ID NO: 724136 - DNA, 75 bp, synthetic construct
  source 1..75: mol_type = other DNA
atgatgatgcccgctctgcaaaaactccctttttctggcttgcctttttccggcatttgcggatatagtttttcc

SEQ ID NO: 724137 - DNA, 75 bp, synthetic construct
  source 1..75: mol_type = other DNA
tccctttttctggcttgcctttttccggcatttgcggatatagttttcccgctgccgcaaaatcggcagccgggc

SEQ ID NO: 724138 - DNA, 75 bp, synthetic construct
  source 1..75: mol_type = other DNA
ataagcccataggaattatgctttcagaagattcagttcctgaatctacttataacctgacactggttccactgg

SEQ ID NO: 724139 - DNA, 75 bp, synthetic construct
  source 1..75: mol_type = other DNA
gcaccgcgattacagcagtgattttgctggcaacttcgaatgtggtatttgctgaagactatcagttaccggcga

SEQ ID NO: 724140 - DNA, 75 bp, synthetic construct
  source 1..75: mol_type = other DNA
tctgcgcgatgacgggcgcatcaaccagtttatcgccgccaacctttccggtgttctgaaacgtgaaggccgcta

SEQ ID NO: 724141 - DNA, 75 bp, synthetic construct
  source 1..75: mol_type = other DNA
tgatgccagtaatgctgttagttacactggttatagcattttactttgcgcctgaacaacttcttactgatgtta

SEQ ID NO: 724142 - DNA, 75 bp, synthetic construct
  source 1..75: mol_type = other DNA
aataaattaccggatttacgcggtgaatttatccgtggctgggatgatgggcgcgggattgatgcgggacgtacc

SEQ ID NO: 724143 - DNA, 75 bp, synthetic construct
  source 1..75: mol_type = other DNA
ttattttctacgccatttacaaatcagtgctatggcattgttttcggacaaacatatggagccaactactggatg

SEQ ID NO: 724144 - DNA, 75 bp, synthetic construct
  source 1..75: mol_type = other DNA
ggcagtataaaagatgtcctcaattaccttggtttgggggaaggctcggcgctgcccgttggtgtacctgttccg

SEQ ID NO: 724145 - DNA, 75 bp, synthetic construct
  source 1..75: mol_type = other DNA
cgttgtgtcaggcacgcttaaaaaaaacgattttacgtggtttaagaggcatattacccgatgtttcagcagcaa

SEQ ID NO: 724146 - DNA, 75 bp, synthetic construct
  source 1..75: mol_type = other DNA
ccgaagcgcatccacgtttccgtgatggctatgcaataggcaccgggcgctggcgcgcgttgccgtttgctatca

SEQ ID NO: 724147 - DNA, 75 bp, synthetic construct
  source 1..75: mol_type = other DNA
ttcagcccgatgtacagagcatctgatctgagtaataccagttttgcattcattaacaaaacctggtctggcgtt

SEQ ID NO: 724148 - DNA, 75 bp, synthetic construct
  source 1..75: mol_type = other DNA
acctcaactccagcgtcaaaatcgtcaatccgattatgggcgtgaaattctgggacgagagcgtgaagatcccgg

SEQ ID NO: 724149 - DNA, 75 bp, synthetic construct
  source 1..75: mol_type = other DNA
gaaacttttcggttatgccaaaactggcctgctttcctcctctgccgcttcaggcgtgccgcaggtggagaatct

SEQ ID NO: 724150 - DNA, 75 bp, synthetic construct
  source 1..75: mol_type = other DNA
actggaataagttatttgtgtttttagctgtggccttatactggttttggcgcgttctctacagaagcacaaagc

SEQ ID NO: 724151 - DNA, 75 bp, synthetic construct
  source 1..75: mol_type = other DNA
gcggaggataattttaccggggcatggatatcaatgcgcccccgcaatgttgcgtttaattacatcgtaagggcc

SEQ ID NO: 724152 - DNA, 75 bp, synthetic construct
  source 1..75: mol_type = other DNA
gatgaaatcatgttgtaccgctgttaaaaacagtcgttcagtcctttatgttacccgttttggtaacaatcagtt

SEQ ID NO: 724153 - DNA, 75 bp, synthetic construct
  source 1..75: mol_type = other DNA
acacatgaagcgaaggatctggaatacctcaactccagcgtcaaaatcgtcaacccgattatgggcgtgaaattc

SEQ ID NO: 724154 - DNA, 75 bp, synthetic construct
  source 1..75: mol_type = other DNA
gacaccggacgcgccatgcgtctttttttgtgtctatgcctatgtgcacctgttgtttacgcatcggttcttaag

SEQ ID NO: 724155 - DNA, 75 bp, synthetic construct
  source 1..75: mol_type = other DNA
gacgccggactcagttcactggcgaaccagctcgatgacatcgcccatgccagctacaacggcgtgtcgattgtt

SEQ ID NO: 724156 - DNA, 75 bp, synthetic construct
  source 1..75: mol_type = other DNA
caataaattcactaaacagaccatttttatatgccattcgtgaaatattaggttcggtattaaatattctcttat

SEQ ID NO: 724157 - DNA, 75 bp, synthetic construct
  source 1..75: mol_type = other DNA
aaagaagggcgatgtaactaaaagtgaggaggtaatggctgcggtgcagtcattaatccttttttcatttttttc

SEQ ID NO: 724158 - DNA, 75 bp, synthetic construct
  source 1..75: mol_type = other DNA
accagctcgatgacattgcccacgccagctacaacggcgagtcgattgtcgattacggcattacgctcgactcca

SEQ ID NO: 724159 - DNA, 75 bp, synthetic construct
  source 1..75: mol_type = other DNA
gacctggcggcggcggatcagaacggtgacggcgacggttttatcgacgccagcgagctggtgaatgcgattaac

SEQ ID NO: 724160 - DNA, 75 bp, synthetic construct
  source 1..75: mol_type = other DNA
atgattaacccaagaaccattgcacaagaaatcgcctatgcggatgttgccactcaggcagcaaatttgcaggaa

SEQ ID NO: 724161 - DNA, 75 bp, synthetic construct
  source 1..75: mol_type = other DNA
gacagccagtacggacttgcatcttcggtatggactaaagatgtgggcagggcgcatcgtgtcagcgcacggctg

SEQ ID NO: 724162 - DNA, 75 bp, synthetic construct
  source 1..75: mol_type = other DNA
gccgtatctacgcgcaaagagagatttacgatacgctggtggaaaaacttggttctgcagttgcgacacttaaat

SEQ ID NO: 724163 - DNA, 75 bp, synthetic construct
  source 1..75: mol_type = other DNA
gcatttgccgaatgggggcaaaccacgccgaaagcgcgtgcggaatgcctgctgaaactggcggatgttatcgaa

SEQ ID NO: 724164 - DNA, 75 bp, synthetic construct
  source 1..75: mol_type = other DNA
cacctaaaaaactaagggatctaaaaaagaagggcgatgtaactaaaagtgaggaggtaatggctgcggtgcagt

SEQ ID NO: 724165 - DNA, 75 bp, synthetic construct
  source 1..75: mol_type = other DNA
gcgcatctcgaacgcgtcagccgggcggtggaagaggcgaaggcgacgggacacattaaggtgatcaccggcggt

SEQ ID NO: 724166 - DNA, 75 bp, synthetic construct
  source 1..75: mol_type = other DNA
tttggcagaggcaaaacggtgggtgatccgctgaccggacatccaaaagtgcgcatggtgtcgctgacggggtct

SEQ ID NO: 724167 - DNA, 75 bp, synthetic construct
  source 1..75: mol_type = other DNA
gcagcggcctggactcgctcagctcagcgttgagcgatttccagagcgccgttgacgcgctgaacagcgataccg

SEQ ID NO: 724168 - DNA, 75 bp, synthetic construct
  source 1..75: mol_type = other DNA
tccctttttctggcttgcctttttccggcatttgcggatatagtttttccgctgtcgcaaaatcggcagccgggc

SEQ ID NO: 724169 - DNA, 75 bp, synthetic construct
  source 1..75: mol_type = other DNA
agctgacactcaactccgtatctgtatgcttcgcactgtcgcctgcgatgagcgttccgcgcgcctttcgctggt

SEQ ID NO: 724170 - DNA, 75 bp, synthetic construct
  source 1..75: mol_type = other DNA
tggtggcaataaccgctactcaatggaggttgccactatggctacgaccctcaccccgtcacacccgcaatttgt

SEQ ID NO: 724171 - DNA, 75 bp, synthetic construct
  source 1..75: mol_type = other DNA
gcgtggaaactccggcgatagcgtaacctgctatctaacggaggctgccatcatggctacaacccttaccccctc

SEQ ID NO: 724172 - DNA, 75 bp, synthetic construct
  source 1..75: mol_type = other DNA
tgtttgcggctgtccgtcgcgcagaccgtcatccccgtatctgtatgcttcgcaccgtcgccggtgatgaacgca

SEQ ID NO: 724173 - DNA, 75 bp, synthetic construct
  source 1..75: mol_type = other DNA
tatctgaatcacggaatcgccgatcgcgcgtgtcagcaagaaggatatactcacgccatcccctttggccagcca

SEQ ID NO: 724174 - DNA, 75 bp, synthetic construct
  source 1..75: mol_type = other DNA
tgcggatgatttgtggcacgagaaaaaattagagcgtcaaatcgaagtgttaaataatgaatgtgtagatgtggt

SEQ ID NO: 724175 - DNA, 75 bp, synthetic construct
  source 1..75: mol_type = other DNA
atgatagttaaatttcatgccaggggaaaaggtggtggcagtggtccggttgattacctgctggggagggagcgt

SEQ ID NO: 724176 - DNA, 75 bp, synthetic construct
  source 1..75: mol_type = other DNA
acggcccggtgacttttgccgccaccagcaataatgactcggcgaccgtttccgccaattcccaggcgcaggcgg

SEQ ID NO: 724177 - DNA, 75 bp, synthetic construct
  source 1..75: mol_type = other DNA
gcgattgcgcgtgatattagcgtgcaactgcatacggtcatcgcccagtatcccggtgcggagctggagacgaaa

SEQ ID NO: 724178 - DNA, 75 bp, synthetic construct
  source 1..75: mol_type = other DNA
cggagcgccgtgacatcaatggtaaaacgcatatcgttcatttgccggatgcgattgcccgcgatattagcgttc

SEQ ID NO: 724179 - DNA, 75 bp, synthetic construct
  source 1..75: mol_type = other DNA
gggctatcgccatcgagcgtgagaactccggcgatagcgtaacctgctatctaacggaggctgccatcatggcta

SEQ ID NO: 724180 - DNA, 75 bp, synthetic construct
  source 1..75: mol_type = other DNA
actgctggacaatctcacctcggcgctgaacaaagtgtatcagcgtaaaggggtcaatatttctctcgatatttc

SEQ ID NO: 724181 - DNA, 75 bp, synthetic construct
  source 1..75: mol_type = other DNA
ataaccgcgaattgctcaatccagccacaacgcgagaactgaccagtctggtacgaaacctgaaccgactgttaa

SEQ ID NO: 724182 - DNA, 75 bp, synthetic construct
  source 1..75: mol_type = other DNA
ttgatctctctcgccgtgaattatctattaatgacgaagtgatcaaactgaccgcgttcgaatacaccattatgg

SEQ ID NO: 724183 - DNA, 75 bp, synthetic construct
  source 1..75: mol_type = other DNA
ttctgtgaactcgctggatgcaagtcagcaagcgtggttgcgttattgctacggtggtaacctggcattcaaaca

SEQ ID NO: 724184 - DNA, 75 bp, synthetic construct
  source 1..75: mol_type = other DNA
ggaattaccgatatcgaatttattacccaatatctggtgttgcgctacgcccatgaaaaaccgaagttaacgcgc

SEQ ID NO: 724185 - DNA, 75 bp, synthetic construct
  source 1..75: mol_type = other DNA
tgcaaccacattcacctgtaaggccattcaggaagggcagatcgattctggtagccaaaaatcttctgtcgagac

SEQ ID NO: 724186 - DNA, 75 bp, synthetic construct
  source 1..75: mol_type = other DNA
tcaagctgcaggttgcagctggtatggctaacccgagtccgccagtaggtccggctctgggtcagcagggcgtaa

SEQ ID NO: 724187 - DNA, 75 bp, synthetic construct
  source 1..75: mol_type = other DNA
gacgctctgtgtggtgaatatgtataacgttcatacccgggttattccgatgatcagcgcctttgcaccggaaga

SEQ ID NO: 724188 - DNA, 75 bp, synthetic construct
  source 1..75: mol_type = other DNA
tttttcatcgggtacggattctggctctgcggggccattttcgccctgactgttctgatccgtttttcattcagc

SEQ ID NO: 724189 - DNA, 75 bp, synthetic construct
  source 1..75: mol_type = other DNA
gtggtggttgataccatccctgtagagcttaaaagttcctatatggtgtggagctggtttgtctatgtgctctca

SEQ ID NO: 724190 - DNA, 75 bp, synthetic construct
  source 1..75: mol_type = other DNA
tcaccatacagaccaacggcctgcgccgccgtgtgaaggccacccgcataagcggatgcacggtttactgggagg

SEQ ID NO: 724191 - DNA, 75 bp, synthetic construct
  source 1..75: mol_type = other DNA
caatcgaggaataatgagtcctacttctgggatggtgacaaacctcttattgatagccttcataaagaacttcaa

SEQ ID NO: 724192 - DNA, 75 bp, synthetic construct
  source 1..75: mol_type = other DNA
tgaatgccaacagacaggtattgttattgatactcaaaaacatactgtccgtattttcaataaagataaagacag

SEQ ID NO: 724193 - DNA, 75 bp, synthetic construct
  source 1..75: mol_type = other DNA
gaatattttttaccttccggcgacaaatgacgctgatgacggctatcagggtgattacgatggtgacttcaacag

SEQ ID NO: 724194 - DNA, 75 bp, synthetic construct
  source 1..75: mol_type = other DNA
gtggatcactattgcaccgttcgtgacacttatatcgctgagatcgcaaagaacacgccaagcgcagcaaacatc

SEQ ID NO: 724195 - DNA, 75 bp, synthetic construct
  source 1..75: mol_type = other DNA
gaaaatttatccggacagtgacaggtaacttcaccggcaacgggccatggtctgaatggaaggaggttgccatac

SEQ ID NO: 724196 - DNA, 75 bp, synthetic construct
  source 1..75: mol_type = other DNA
atttgaccagccttactggatgatgaaggcatcactgcctgcggcaatgaataaagtcatcacagatgtcggacc

SEQ ID NO: 724197 - DNA, 75 bp, synthetic construct
  source 1..75: mol_type = other DNA
ggtccggcagggccacgaggtgaaaggggaccagcgggggcacagggtgttccggggccggttggtccggcaggt

SEQ ID NO: 724198 - DNA, 75 bp, synthetic construct
  source 1..75: mol_type = other DNA
atcaagcgagaaaaaggatgtgttggcatgattctggtcgattacagggagaaggcgcatgagactcgaaagcgt

SEQ ID NO: 724199 - DNA, 75 bp, synthetic construct
  source 1..75: mol_type = other DNA
atcaagcgcgagaagggctgcgtaggaatgattttggttgactacctgactctgatgaccgccgaaaaagccgac

SEQ ID NO: 724200 - DNA, 75 bp, synthetic construct
  source 1..75: mol_type = other DNA
attgctaactggagagaacaactttcagcgaataaacggtctggcctaaatattttaaccgatgatattaaaaat

SEQ ID NO: 724201 - DNA, 75 bp, synthetic construct
  source 1..75: mol_type = other DNA
gtattttcaataaagataaagacagcacatatacttttgatcaaattcgagaaataaattatacactttcagagg

SEQ ID NO: 724202 - DNA, 75 bp, synthetic construct
  source 1..75: mol_type = other DNA
ggccaccgggcacgtggcgggcctgcgctgacatttatgcaggcgcaggaatcggaatatttgagcgcattgcct

SEQ ID NO: 724203 - DNA, 75 bp, synthetic construct
  source 1..75: mol_type = other DNA
actgtcggtgtgatgattgccagcagtgacctgattaatcccattccggaagaatcaacggaaacggcagcaaga

SEQ ID NO: 724204 - DNA, 75 bp, synthetic construct
  source 1..75: mol_type = other DNA
ctacgccatcaaccgcatgactgaagcgacggaattgctctattcccgcaacggaatgactgcaacgcagaagta

SEQ ID NO: 724205 - DNA, 75 bp, synthetic construct
  source 1..75: mol_type = other DNA
gaatgcatcgcgtccattaaatccagcggcatgttatccggtgctctgcccacctgggtgccgccggaagaagcc

SEQ ID NO: 724206 - DNA, 75 bp, synthetic construct
  source 1..75: mol_type = other DNA
tgtcacagtatccgcgtgcacgtcactttgacgttgcgcgcattgttattgatcaggcggtacgtcttggcgtag

SEQ ID NO: 724207 - DNA, 75 bp, synthetic construct
  source 1..75: mol_type = other DNA
agtctggtgttcgatctgcaaagtaagctcgatcgtattatcagctggggacagcaatctatcgacttgtggatt

SEQ ID NO: 724208 - DNA, 75 bp, synthetic construct
  source 1..75: mol_type = other DNA
cgccgaagagggcggtgatgaatttcactggcaccgtaatgtctatgcgccactgaaatattcggtagcagaaat

SEQ ID NO: 724209 - DNA, 75 bp, synthetic construct
  source 1..75: mol_type = other DNA
attgcaggatacgctggaagcggcaggtgataaattgcaggctaatctgttacgcattcaggatgcgacgatgac

SEQ ID NO: 724210 - DNA, 75 bp, synthetic construct
  source 1..75: mol_type = other DNA
cggcaatcatcgaagagcagctcgccgtctataaaaccagacaagtaccgctggatcttggtctggtggtacgcg

SEQ ID NO: 724211 - DNA, 75 bp, synthetic construct
  source 1..75: mol_type = other DNA
aactcgaccgtattatcagttggggtcagcaatccatcgatttatggatcggttatgaccgccacgtacataaat

SEQ ID NO: 724212 - DNA, 75 bp, synthetic construct
  source 1..75: mol_type = other DNA
gtaacctgcatgtggtgggtgaaaaacagatcgccattaatcagggcaccgaatttattcgcttctccggcgtgg

SEQ ID NO: 724213 - DNA, 75 bp, synthetic construct
  source 1..75: mol_type = other DNA
atgcaaaaaaacgctgcgcatacttatgccatttccagcttgttggtgctttcactaaccggctgcgcctggata

SEQ ID NO: 724214 - DNA, 75 bp, synthetic construct
  source 1..75: mol_type = other DNA
tcaagaggaacgcgtggtggataaccgcatgcacgaccattattgtgaactccgcactgccgcgggccatcctgt

SEQ ID NO: 724215 - DNA, 75 bp, synthetic construct
  source 1..75: mol_type = other DNA
acgccatttccagcttgttggtgttttcactgaccggctgtgcctggataccctccacgccgttggtacaggggg

SEQ ID NO: 724216 - DNA, 75 bp, synthetic construct
  source 1..75: mol_type = other DNA
taattttggctttgatactgtgccgcgctatttgcaggggctgtttggtaacgctcgtgccgatgtcgaagcctc

SEQ ID NO: 724217 - DNA, 75 bp, synthetic construct
  source 1..75: mol_type = other DNA
gtggggactctcaccggtttactgattttgaagatgatagccatgcaaaaaaacgctgtgcatacttacgccatt

SEQ ID NO: 724218 - DNA, 75 bp, synthetic construct
  source 1..75: mol_type = other DNA
gcagctggtatggctaacccgagtccgccagtaggtccggctctgggtcagcagggcgtaaacatcatggaattc

SEQ ID NO: 724219 - DNA, 75 bp, synthetic construct
  source 1..75: mol_type = other DNA
ctattggtcgcgctattatcgctaagggcagtataaaagatgtcctcaattaccttggtttgggggaaggctctg

SEQ ID NO: 724220 - DNA, 75 bp, synthetic construct
  source 1..75: mol_type = other DNA
cccggggaaaatacacagcccaggatgcaacaacgacccgtaaagggatcgtacaactgagcagtgccaccaaca

SEQ ID NO: 724221 - DNA, 75 bp, synthetic construct
  source 1..75: mol_type = other DNA
cttctaatccaaatggatattttgtcgggaatcagagaacaacagcatatgggataaatgaaacccgtccacgga

SEQ ID NO: 724222 - DNA, 75 bp, synthetic construct
  source 1..75: mol_type = other DNA
cactacgagccattagctctcgtaatgtaaaacggtttggtgaaattagtggaaatgtaggtacagaaactcgcc

SEQ ID NO: 724223 - DNA, 75 bp, synthetic construct
  source 1..75: mol_type = other DNA
tacgatgcaggaacacgatcagcgacaatggcgaataacacaactgctataggcaaaaccgatgaccttggattc

SEQ ID NO: 724224 - DNA, 75 bp, synthetic construct
  source 1..75: mol_type = other DNA
aaaggtctgccgattccggtagtaatcaccgtttacgctgatcgttctttcactttcgttaccaagactccgccg

SEQ ID NO: 724225 - DNA, 75 bp, synthetic construct
  source 1..75: mol_type = other DNA
tggtcttgatgcttcaagaattgttccaactgcaaacgaaaaccgtcctcgtaacattgcctttaattatatcgt

SEQ ID NO: 724226 - DNA, 75 bp, synthetic construct
  source 1..75: mol_type = other DNA
ggcaggacttgccactgcagcagatcggttgccttattttaccggagcagaccgcgcagcgctgacaacccttac

SEQ ID NO: 724227 - DNA, 75 bp, synthetic construct
  source 1..75: mol_type = other DNA
ttgctgtccgcacaaggggcaacgctgttaagaacagcaatgctggattattataaccaggacactacgggaacc

SEQ ID NO: 724228 - DNA, 75 bp, synthetic construct
  source 1..75: mol_type = other DNA
ttgcttaattggcagccacacacaatttggacccatgcacactatatggaattatggacaggggacggactcgcc

SEQ ID NO: 724229 - DNA, 75 bp, synthetic construct
  source 1..75: mol_type = other DNA
aaacgaacagcgacaggactgagtaccagtattgtcggcacagcagaaacacgcccccgcaacgttgcattcaat

SEQ ID NO: 724230 - DNA, 75 bp, synthetic construct
  source 1..75: mol_type = other DNA
ttccacaactaatgccttgtccccggacgatattgatgccaccaactcgttaattggtaatgacgattacaactg

SEQ ID NO: 724231 - DNA, 75 bp, synthetic construct
  source 1..75: mol_type = other DNA
gcaggatcttggtgggtgccgggctattttaaataatctggatcaagtgtatgatttagttaataaaataaaatc

SEQ ID NO: 724232 - DNA, 75 bp, synthetic construct
  source 1..75: mol_type = other DNA
ggcagttgtggtaccggaaaaaatcatctggctgtggctatggcaaaacacatcatccgtaaccatctggccagt

SEQ ID NO: 724233 - DNA, 75 bp, synthetic construct
  source 1..75: mol_type = other DNA
gaggacggatctctgtcctattcaccagaaaaaacatttgaagaaggctttagtcggactaacgacttcttcgaa

SEQ ID NO: 724234 - DNA, 75 bp, synthetic construct
  source 1..75: mol_type = other DNA
atgagagaggccacactgtattccctgttgtctcagctggccggaggacaggtttatccttatgtggtcccactg

SEQ ID NO: 724235 - DNA, 75 bp, synthetic construct
  source 1..75: mol_type = other DNA
acctgttccagcagaccatgaaccagtttcgccgtcagcggggcggggcgattgtcactgttgcgtccgacgccg

SEQ ID NO: 724236 - DNA, 75 bp, synthetic construct
  source 1..75: mol_type = other DNA
gtggcgatccgcctgaaacgtccgcttatcgccagtcttatcagcggctttatttgcggcgcggttgccggtatg

SEQ ID NO: 724237 - DNA, 75 bp, synthetic construct
  source 1..75: mol_type = other DNA
ttcttgctatgggcttcactggtaaacgtgctgcccggttcaaagaggcatacatcaatgcctttaaccagatgg

SEQ ID NO: 724238 - DNA, 75 bp, synthetic construct
  source 1..75: mol_type = other DNA
acttatggtctgccaatatcagccaataaacaacaagaaataccggtgaaagagaacaagacggtgactccgctg

SEQ ID NO: 724239 - DNA, 75 bp, synthetic construct
  source 1..75: mol_type = other DNA
gattttgcgtgaagctatccaggaaatgcctgtttttatcagcgcagaacagcgccgggcgctctgccgtatgca

SEQ ID NO: 724240 - DNA, 75 bp, synthetic construct
  source 1..75: mol_type = other DNA
cctcaatttcgggacgttacactgttcaggcaccttataaaacgggtgccgggattggcgtcctgaaattgatta

SEQ ID NO: 724241 - DNA, 75 bp, synthetic construct
  source 1..75: mol_type = other DNA
ctttcaccggaagagttgtgggcattcatcagcccccgcattgccgacaggatcacagacgggggacgcaactgg

SEQ ID NO: 724242 - DNA, 75 bp, synthetic construct
  source 1..75: mol_type = other DNA
ttacccgtgctgtgaaaaactgctggcgaaatgacagcgaaaaaacagcggatgaagttattgagcattatgcgt

SEQ ID NO: 724243 - DNA, 75 bp, synthetic construct
  source 1..75: mol_type = other DNA
gttgacttaattggctacacaccgtggggctgcattgacctggtttctgccggaacaggggaaatgaaaaagcgc

SEQ ID NO: 724244 - DNA, 75 bp, synthetic construct
  source 1..75: mol_type = other DNA
atgcaaaatcaaaatacccccgctcaggaaaaacacaccgtatacctttttaatgctgaacatgctgaacatgct

SEQ ID NO: 724245 - DNA, 75 bp, synthetic construct
  source 1..75: mol_type = other DNA
gccgccaagcaagccgggaaactcttcacgctggacattgaacacccaatgaccctcaacgatctctcgctgctg

SEQ ID NO: 724246 - DNA, 75 bp, synthetic construct
  source 1..75: mol_type = other DNA
ccatttgagcaaattcacggctgggtcggcggcggtacaaaaggtgatttcccgcattatgcctaccacggttat

SEQ ID NO: 724247 - DNA, 75 bp, synthetic construct
  source 1..75: mol_type = other DNA
aacaggtcagttggtcaggatttattatgaacccggggtatggacgtatccgccctttgtgaaggcattaacgtc

SEQ ID NO: 724248 - DNA, 75 bp, synthetic construct
  source 1..75: mol_type = other DNA
ggttgtgtcgactttatcggctttagctactacatgtcttttacgacacaattttcgcccgataacccgcaactg

SEQ ID NO: 724249 - DNA, 75 bp, synthetic construct
  source 1..75: mol_type = other DNA
agacgatggggaaaaataaggatgcaccgatcgtttccattggcgcggtgttcttcactccagaaaccggagaca

SEQ ID NO: 724250 - DNA, 75 bp, synthetic construct
  source 1..75: mol_type = other DNA
gtccgctggctccgtttgccgtctctcaaacccagggatacgattctgattctggccttaaccgggccacgctgg

SEQ ID NO: 724251 - DNA, 75 bp, synthetic construct
  source 1..75: mol_type = other DNA
cgcattccccaccactctccgttctcaaagtggagcgctcaggatgacgaagcgattgccgccgcgctgcagcgg

SEQ ID NO: 724252 - DNA, 75 bp, synthetic construct
  source 1..75: mol_type = other DNA
tagtggaaggtgacgcccgcgtgaaaagcgtcagagtggatcaacccggcgtcagactcagtgcgcaggctggcg

SEQ ID NO: 724253 - DNA, 75 bp, synthetic construct
  source 1..75: mol_type = other DNA
gcaggacgcggccttgatacgctgggtaaccgctacacggcgatgattgccgggcttgggggcagcgtgacagta

SEQ ID NO: 724254 - DNA, 75 bp, synthetic construct
  source 1..75: mol_type = other DNA
ctgccataccgggcacttcagtgaggagggggtggcagaatgaacggtataaaaacggggctggggatcacgccg

SEQ ID NO: 724255 - DNA, 75 bp, synthetic construct
  source 1..75: mol_type = other DNA
aggcattatatccagcagcatttagttttgaagtgaaagaaggcgatattacagaaacatgggcagaaggtttaa

SEQ ID NO: 724256 - DNA, 75 bp, synthetic construct
  source 1..75: mol_type = other DNA
tagcaattttagatagtgattatccaagagagttatatccagatggactttctgatgagcatatagaatatatgg

SEQ ID NO: 724257 - DNA, 75 bp, synthetic construct
  source 1..75: mol_type = other DNA
cgttctgaacgtggcaacaaccaccgctaacgtgttctgggctgatgactcaatccgtctgctgtctcagccgat

SEQ ID NO: 724258 - DNA, 75 bp, synthetic construct
  source 1..75: mol_type = other DNA
gaccatcaccgggcaggatggacagacccgtgtcaccaccgtgcaaaccattcttgaccagttaatgccaggcct

SEQ ID NO: 724259 - DNA, 75 bp, synthetic construct
  source 1..75: mol_type = other DNA
aggtatatggaaaaagttgatgttttgatattaatgtttggacatataaatgccctttttttaggggtgttcatg

SEQ ID NO: 724260 - DNA, 75 bp, synthetic construct
  source 1..75: mol_type = other DNA
aatacgcgaactggtcgcctgcaacagggataataaaggaaatgatgaatcattttgaggatgtcgacgggaatt

SEQ ID NO: 724261 - DNA, 75 bp, synthetic construct
  source 1..75: mol_type = other DNA
aagataaatttccatatgaagtattacacccgcaacatgggattgaaattttagcgggactaagctttggaagta

SEQ ID NO: 724262 - DNA, 75 bp, synthetic construct
  source 1..75: mol_type = other DNA
ttagcgggaataagctttggaagtaaaactaaataccgaataaaactcatatgggatgacaattataaaagaaga

SEQ ID NO: 724263 - DNA, 75 bp, synthetic construct
  source 1..75: mol_type = other DNA
tatcgtcgcgttaatgttatgcgtatacgcgattgtaatgactggtgcgctaatttacagagaagcgaagcatat

SEQ ID NO: 724264 - DNA, 75 bp, synthetic construct
  source 1..75: mol_type = other DNA
tgatttgagatttgttgattttattagtttacggttacagaaatctatttttttatcctgtcgcttccgtgattg

SEQ ID NO: 724265 - DNA, 75 bp, synthetic construct
  source 1..75: mol_type = other DNA
agggctggtcggcggaagatcgcaaaagctgggctcttcggcgttatggttttcctgtagcggaacgctttaaac

SEQ ID NO: 724266 - DNA, 75 bp, synthetic construct
  source 1..75: mol_type = other DNA
acacccgcaacatggaattgaaattttagcgggaataagctttggaagtaaaactaaataccgaataaaactcat

SEQ ID NO: 724267 - DNA, 75 bp, synthetic construct
  source 1..75: mol_type = other DNA
tggcaacccgttactacggcgtagcgtatggttactccaaaggatcgatatcgttaaagatatgggtggtggctt

SEQ ID NO: 724268 - DNA, 75 bp, synthetic construct
  source 1..75: mol_type = other DNA
acgcagccgacacaacaggcggtgcacgaggtgggaacgaccattatcgataatggcgaggcacaggaattgttc

SEQ ID NO: 724269 - DNA, 75 bp, synthetic construct
  source 1..75: mol_type = other DNA
tggtggctggcacaagtgccggaagtgaactcggcgctggtgtcgatcaatccgcaaaacggtgccgttatggcg

SEQ ID NO: 724270 - DNA, 75 bp, synthetic construct
  source 1..75: mol_type = other DNA
cttaccgttcggatactcagcagggaccgacgccgcgtaaagtgaccgatgttctgcaaacgggtcagcaaatct

SEQ ID NO: 724271 - DNA, 75 bp, synthetic construct
  source 1..75: mol_type = other DNA
cgcatttccctgaaagagttaagcgaagcctgttttttgagtcaggctgccgttgaatttatcatcgaacagatg

SEQ ID NO: 724272 - DNA, 75 bp, synthetic construct
  source 1..75: mol_type = other DNA
tttgcccgattggtgcgattacctggcagcaggaagagggatgtataaccgtcgatcataaacgttgcattggtt

SEQ ID NO: 724273 - DNA, 75 bp, synthetic construct
  source 1..75: mol_type = other DNA
cgcaggaagcaacagcaatgctggcggacggaacatctgtgacgctgcgtatggaagggattcgctgggcacggc

SEQ ID NO: 724274 - DNA, 75 bp, synthetic construct
  source 1..75: mol_type = other DNA
gcgtaaccctggcgctggaagaacagcgtgctaatggtgcggagatcgatgatggcgccatcaacggtatcaaag

SEQ ID NO: 724275 - DNA, 75 bp, synthetic construct
  source 1..75: mol_type = other DNA
ttctggaccagttaatgccaggcctggtaccactgctgctgacctttgcttgtatgtggctgctgcgcaaaaaag

SEQ ID NO: 724276 - DNA, 75 bp, synthetic construct
  source 1..75: mol_type = other DNA
ttgcttctctatggttccggcgattcgccgtctctacccggagaataatgaagcccgtaaacaagcaatccgtcg

SEQ ID NO: 724277 - DNA, 75 bp, synthetic construct
  source 1..75: mol_type = other DNA
ccgcgaagagtatttcatcgaaggtacgcagccgacacaacaggcggtgcacgaggtgggaacgaccattatcga

SEQ ID NO: 724278 - DNA, 75 bp, synthetic construct
  source 1..75: mol_type = other DNA
agagtgctttgaacaccaatatctttggtgaaccaggctggcagggtaccggctggcgtgcaggtcgtgatttgc

SEQ ID NO: 724279 - DNA, 75 bp, synthetic construct
  source 1..75: mol_type = other DNA
accgtacgtccggtatttgccgcactgggggctggtattgcaatgagcggcagtctgttaggaccgttgctgttc

SEQ ID NO: 724280 - DNA, 75 bp, synthetic construct
  source 1..75: mol_type = other DNA
caacgcaggcatttcagtgaaaaaacgcggtgatcttctcgacctcgaaccagacagcttcgaccaaaatattgc

SEQ ID NO: 724281 - DNA, 75 bp, synthetic construct
  source 1..75: mol_type = other DNA
aaagagtacaacgctgcacctccattgcagggatttggtatttccgccccggatcaggtaaaagcagcgattgat

SEQ ID NO: 724282 - DNA, 75 bp, synthetic construct
  source 1..75: mol_type = other DNA
tattacgctgcatagataaaaaatcccccgccgaagctgaaacaaccctgcgttatctggctaatgccctacatc

SEQ ID NO: 724283 - DNA, 75 bp, synthetic construct
  source 1..75: mol_type = other DNA
tacatgccggacaggtgaagaattttatacgcttggctgctggaaactcaaaacccgcgccagcgaaggcgaaaa

SEQ ID NO: 724284 - DNA, 75 bp, synthetic construct
  source 1..75: mol_type = other DNA
accagctctagctcttgctgctctttataatatcaactttaatagtaatagtttgcttttagttcttgctgcaga

SEQ ID NO: 724285 - DNA, 75 bp, synthetic construct
  source 1..75: mol_type = other DNA
ccgctggccgtagagtacatccacagggtagtgcttgaaggtgaatttatcggcaaacaagagaagaaaaccaac

SEQ ID NO: 724286 - DNA, 75 bp, synthetic construct
  source 1..75: mol_type = other DNA
cgggtaaaatcaccactgaacagcaggaagccattaaacaactcgtcatgagtcgcggtcagtctctgccaaagg

SEQ ID NO: 724287 - DNA, 75 bp, synthetic construct
  source 1..75: mol_type = other DNA
agccagacggaccaacgaatctttccgcatgggtaagacttaagaacaaagagttgccgccttcactgcatcgct

SEQ ID NO: 724288 - DNA, 75 bp, synthetic construct
  source 1..75: mol_type = other DNA
acattgaccatattgcaacgctgcgtaatgcacgcggtactgcttacccggatccagtgcaggcggcgtttattg

SEQ ID NO: 724289 - DNA, 75 bp, synthetic construct
  source 1..75: mol_type = other DNA
ctgagcaggcgggagcggacggcattaccgtgcatttacgtgaagatcgccgccacattaccgaccgcgatgtgc

SEQ ID NO: 724290 - DNA, 75 bp, synthetic construct
  source 1..75: mol_type = other DNA
ttgagacgaagccgcatttctgctgtctggtgccggaaaagcgtcaggaagtgacaaccgaaggcggcctggacg

SEQ ID NO: 724291 - DNA, 75 bp, synthetic construct
  source 1..75: mol_type = other DNA
gggatgctgctgatacgcagcttcccggcgagtatgacctttttgatttaatggcgaaggttactgaagataacc

SEQ ID NO: 724292 - DNA, 75 bp, synthetic construct
  source 1..75: mol_type = other DNA
ttaacgatcttcccgatgccgacagcgtagaaaaactgcatatcacacaacaagaatgtatagctgaaggcgtgg

SEQ ID NO: 724293 - DNA, 75 bp, synthetic construct
  source 1..75: mol_type = other DNA
ctatgaagtgcgccctggtctcatcaaaaccgatatgactattccagcaacggcttattacgacgaactgattgc

SEQ ID NO: 724294 - DNA, 75 bp, synthetic construct
  source 1..75: mol_type = other DNA
gcctttgtaatgaacaaattggcgtttatgaagtgcgccctggtctcatcaaaaccgatatgactattccggcaa

SEQ ID NO: 724295 - DNA, 75 bp, synthetic construct
  source 1..75: mol_type = other DNA
gcgccagtgattgtttttgatgatgctgatattgaagcagtggtcgaaggtgttcgcacttttggctattacaat

SEQ ID NO: 724296 - DNA, 75 bp, synthetic construct
  source 1..75: mol_type = other DNA
tggggttatccggctgatatcgcctccacagtacgggcaatggcggaaggcaaactgatttatacctgtggccag

SEQ ID NO: 724297 - DNA, 75 bp, synthetic construct
  source 1..75: mol_type = other DNA
ccactgtccgcgcgatggcggaaggcaaactgatttacacctgtggtcaggcagtcgccatcgacggtggcttaa

SEQ ID NO: 724298 - DNA, 75 bp, synthetic construct
  source 1..75: mol_type = other DNA
attttttaaccgtcatgtcaatccagtcataaagaatgcgctaaataaaaaaatcaacaattatgaaaaacggcc

SEQ ID NO: 724299 - DNA, 75 bp, synthetic construct
  source 1..75: mol_type = other DNA
gcacaattttacggcaaaaccgtttcgatcctaaaacaaaaaacagcgattatgatatttatgtcactgcaaaaa

SEQ ID NO: 724300 - DNA, 75 bp, synthetic construct
  source 1..75: mol_type = other DNA
cggcgagtatgacctttttgatttaatggcgaaggttactgaagataacctgcacgccccggtggattccgggcc

SEQ ID NO: 724301 - DNA, 75 bp, synthetic construct
  source 1..75: mol_type = other DNA
catgcttcaaagcaagccagggagagttctgctaccactcatatcaccaaaaaagcagataaaaagaaaagcacg

SEQ ID NO: 724302 - DNA, 75 bp, synthetic construct
  source 1..75: mol_type = other DNA
gaaaaggtcaaaacagggcttggtggcctttcactggtaacagtgactattgcctgtctgtgggtgggctacaag

SEQ ID NO: 724303 - DNA, 75 bp, synthetic construct
  source 1..75: mol_type = other DNA
tcgcgccttagattcatggatgcgagatgggtatagtgctgcgcaaatttatgacttagccatttcaaaaggcga

SEQ ID NO: 724304 - DNA, 75 bp, synthetic construct
  source 1..75: mol_type = other DNA
ctatgggattatgccaaccgctcacaggcattattccgcgaactgtatccggcgctaaaacaaattcaatcgaac

SEQ ID NO: 724305 - DNA, 75 bp, synthetic construct
  source 1..75: mol_type = other DNA
acagaatatcagtttacgcagctgtcaaaacgaaatgtcggctatccgggcgatatttcgtgttgccggacgtca

SEQ ID NO: 724306 - DNA, 75 bp, synthetic construct
  source 1..75: mol_type = other DNA
caggtgcagtacaaatcttttatggtgatgaatcctctcgtccgttcggtcctaccggttctgatccgctgcaag

SEQ ID NO: 724307 - DNA, 75 bp, synthetic construct
  source 1..75: mol_type = other DNA
gattatcaggagcaggcggcgaaagccgtcgattgtctggcgcagatggatacgacctggcagcaaatggcagat

SEQ ID NO: 724308 - DNA, 75 bp, synthetic construct
  source 1..75: mol_type = other DNA
accaatcatattgagctgtatgtcaagagtcgccaggccgaagggatatctaaaagaacaatgcagaatgagatg

SEQ ID NO: 724309 - DNA, 75 bp, synthetic construct
  source 1..75: mol_type = other DNA
agccttatgatcagggagtggcattaaccatgcagttatcccgtagtctggggctgagaaatgaagaagccgtgc

SEQ ID NO: 724310 - DNA, 75 bp, synthetic construct
  source 1..75: mol_type = other DNA
agccttatgatcagggggtggcattaactatgcagttatcccgtagtctgggattgagaaatgaagaagccgtgc

SEQ ID NO: 724311 - DNA, 75 bp, synthetic construct
  source 1..75: mol_type = other DNA
atgatttccatccagaacgccgtcgaaccggtagcaagcctggtccgtgaatgcccgaaatgggatggattaccg

SEQ ID NO: 724312 - DNA, 75 bp, synthetic construct
  source 1..75: mol_type = other DNA
cctgttccgtgaagggggcgacaaagcagcagagttattattattagcgccaggcgcggtacaaatcttttatgg

SEQ ID NO: 724313 - DNA, 75 bp, synthetic construct
  source 1..75: mol_type = other DNA
aacggcgatcccagtaatgaccagagttacggacgtcataaagacggtatggcagaaattggcacttttcacggc

SEQ ID NO: 724314 - DNA, 75 bp, synthetic construct
  source 1..75: mol_type = other DNA
tttccggcgacgagttacaaaaaacgctgggcaaccgctggagcgactggaaacccgcagccgggcaaacctggc

SEQ ID NO: 724315 - DNA, 75 bp, synthetic construct
  source 1..75: mol_type = other DNA
ttatgccacgctggcggatatgcaggagtatcagtttggcgcgttatacctttctggtgatgagctgaaaaaaac

SEQ ID NO: 724316 - DNA, 75 bp, synthetic construct
  source 1..75: mol_type = other DNA
actggcggatatgcaggagtatcagtttggcgcgttatatctttctggtgacgaagtgaaaaaaacgttgggtga

SEQ ID NO: 724317 - DNA, 75 bp, synthetic construct
  source 1..75: mol_type = other DNA
cgactcagcaataacgcacaagttattggactgggttgccgggtcaacgatctcgaatacagcaaaatgattgtc

SEQ ID NO: 724318 - DNA, 75 bp, synthetic construct
  source 1..75: mol_type = other DNA
tgatgaactttcaattgaacaaatcccgctggccgtagagtacatccacagggtagtgcttgaaggcgagttaat

SEQ ID NO: 724319 - DNA, 75 bp, synthetic construct
  source 1..75: mol_type = other DNA
atgggattatgccaaccgctcacaggcattattccgcgaactgtatccggcgctaaagcaaattcaatcgaacta

SEQ ID NO: 724320 - DNA, 75 bp, synthetic construct
  source 1..75: mol_type = other DNA
cttccagcgtcatgatttcatcgccaatggcggtgagctcaaaccgcaagaaaacccgaacgcgcaagcgattca

SEQ ID NO: 724321 - DNA, 75 bp, synthetic construct
  source 1..75: mol_type = other DNA
gtcatgagtcgcggtcagtctctgccaaaggaaaaacaggctaaggcgatgatcaccatgtggtcgtcactgaaa

SEQ ID NO: 724322 - DNA, 75 bp, synthetic construct
  source 1..75: mol_type = other DNA
cactgaaatctcattttgggtgttcatacaaagaaatcagtgaggagcagtttaccgaagcactgtcacttgctg

SEQ ID NO: 724323 - DNA, 75 bp, synthetic construct
  source 1..75: mol_type = other DNA
gaactgtatccggcattaaaacaaattcaatcgaactattccggcagatgctacgactacggtcatgagttctcg

SEQ ID NO: 724324 - DNA, 75 bp, synthetic construct
  source 1..75: mol_type = other DNA
atgaaaaaatcactgttaattatcccgcttctgctggctgggtgcgcaaaagtaagcgactatcaggcaagttgc

SEQ ID NO: 724325 - DNA, 75 bp, synthetic construct
  source 1..75: mol_type = other DNA
atccaacacgagttgacacttacacaaactgcaattcaggatttggaaacacggtaacatgcaacagtagcagta

SEQ ID NO: 724326 - DNA, 75 bp, synthetic construct
  source 1..75: mol_type = other DNA
tccttgctgcgaagatgctcgggcaaggtgtcgatgaaggcaagataagtgacgcacaggcaagacttgagcttc

SEQ ID NO: 724327 - DNA, 75 bp, synthetic construct
  source 1..75: mol_type = other DNA
ctgaacagcaggaagctattaaacaactcgtcatgagtcgcggtcagtctctgccaaaagaaaaacaggctaagg

SEQ ID NO: 724328 - DNA, 75 bp, synthetic construct
  source 1..75: mol_type = other DNA
taaccgttcacaggcattattccgcgaactgtatccggcattaaaacaaattcaatcgaactattcaggcagatg

SEQ ID NO: 724329 - DNA, 75 bp, synthetic construct
  source 1..75: mol_type = other DNA
atgaatagtatagcaattttagaagcagtgaacacctcttacgtgccattcaacggtcagcaaattatcaccgcc

SEQ ID NO: 724330 - DNA, 75 bp, synthetic construct
  source 1..75: mol_type = other DNA
tggctgtgtgcttacgggaattgcgggaacaaacatgccagacaagagccgtatagatgaaatctactacagacc

SEQ ID NO: 724331 - DNA, 75 bp, synthetic construct
  source 1..75: mol_type = other DNA
tgcaaaagcagctggatccgcaaaaccgcgcacatcgcccgattatcgacgaattgcaggaacgtatggcggaca

SEQ ID NO: 724332 - DNA, 75 bp, synthetic construct
  source 1..75: mol_type = other DNA
atcgaccagttgttcccggttctgccgctggaagggctggatcaagtgccggaacgccgcgctgtgctgctggat

SEQ ID NO: 724333 - DNA, 75 bp, synthetic construct
  source 1..75: mol_type = other DNA
tggcacatgctggcatgacccgtagcgtcatcgtctgcaacggttataaagaccgcgaatatatccgcctggcat

SEQ ID NO: 724334 - DNA, 75 bp, synthetic construct
  source 1..75: mol_type = other DNA
tacggcctgtcggctgccgttctggcgttgattgccgcaggggcttctgcgcctgaaatcctcgaccagtttctg

SEQ ID NO: 724335 - DNA, 75 bp, synthetic construct
  source 1..75: mol_type = other DNA
cgtatccgttcaaataactgctatggacaggttattcgtcgtgaccaggaaagcgcattatcctgttgggggata

SEQ ID NO: 724336 - DNA, 75 bp, synthetic construct
  source 1..75: mol_type = other DNA
tggcatgaaactgacgaaggaaaaatgcgaccaggttaatgccattgagcgggataaggcgctggcatgggtgga

SEQ ID NO: 724337 - DNA, 75 bp, synthetic construct
  source 1..75: mol_type = other DNA
ggtactcgcgcagcggcaaaaggtggtatcaccaccatgatcgaaatgccgctcaaccagctgcctgcaacggtt

SEQ ID NO: 724338 - DNA, 75 bp, synthetic construct
  source 1..75: mol_type = other DNA
ccgtcgacgttttataaacgaattaatgcaggcgatcgaaaaggtgcctgtgaggcgattcgctggtggattaag

SEQ ID NO: 724339 - DNA, 75 bp, synthetic construct
  source 1..75: mol_type = other DNA
cgctggtggattaaggacggtggcagagactgccgtatccgctcaaataactgttatggtcaggtatcccgtcgt

SEQ ID NO: 724340 - DNA, 75 bp, synthetic construct
  source 1..75: mol_type = other DNA
aatacgccaacaacatcatctgggcgattggtgatgcgtgtgaagaaaacggtctgccgcatccgacggtaatca

SEQ ID NO: 724341 - DNA, 75 bp, synthetic construct
  source 1..75: mol_type = other DNA
gtatgtcacggacacaccggaaaagacatcattcccggtaaaacgtataccaaagcagaatgcaaagcactcttg

SEQ ID NO: 724342 - DNA, 75 bp, synthetic construct
  source 1..75: mol_type = other DNA
cagaaacgcggtatgtctctggcaatgttcggcaaattaatggcgactaacgcagcagatattttcggtctgcag

SEQ ID NO: 724343 - DNA, 75 bp, synthetic construct
  source 1..75: mol_type = other DNA
acgcaatatcaaggtgtctctgaccgaacctcagaaagtgggtatcgcgtcattttgtccttataacatcggtcc

SEQ ID NO: 724344 - DNA, 75 bp, synthetic construct
  source 1..75: mol_type = other DNA
gtccgtacaacattggccccggaaagtgtttcagctcaacgttttaccggaaactgaacgccggagaccgtaaag

SEQ ID NO: 724345 - DNA, 75 bp, synthetic construct
  source 1..75: mol_type = other DNA
cggaatcgctcaaataactgttacgggcaggtatcgcggcgtgaccaggagagcgcgctggcgtgctggggaatg

SEQ ID NO: 724346 - DNA, 75 bp, synthetic construct
  source 1..75: mol_type = other DNA
aaaaagagatgcgagtctttcagtcgctggtggggccggatctcgacgctgatggattgctggagcctgcgcggt

SEQ ID NO: 724347 - DNA, 75 bp, synthetic construct
  source 1..75: mol_type = other DNA
ccgtgatggtgcgggtatctggaccatctgccgaggcgccatcatggtggatggtaagcctgtgattcctggcat

SEQ ID NO: 724348 - DNA, 75 bp, synthetic construct
  source 1..75: mol_type = other DNA
aagaaggtaaccacaccacggcataccgtgatggtgcggggatctggaccatctgccgcggtgccacccgagtgg

SEQ ID NO: 724349 - DNA, 75 bp, synthetic construct
  source 1..75: mol_type = other DNA
gcaaagcactcttgaataaagaccttgccactgtcgccagacaaattaacccgtacatcaaagtcgatataccga

SEQ ID NO: 724350 - DNA, 75 bp, synthetic construct
  source 1..75: mol_type = other DNA
cgctggtgttaacgccggagcacctggaactgcgcaagcgtgatgagccgaagctgggcggcatctttgttgatt

SEQ ID NO: 724351 - DNA, 75 bp, synthetic construct
  source 1..75: mol_type = other DNA
ggtggacgccaccgcagggctggggcgcgatgcctttgtgctggcttcggtcggctgccgcgtgcggatgctgga

SEQ ID NO: 724352 - DNA, 75 bp, synthetic construct
  source 1..75: mol_type = other DNA
tcggctgccgcgtgcggatgctggagcgtaatccagtggttgccgcgctgctcgacgatggcctggcgcgtggtt

SEQ ID NO: 724353 - DNA, 75 bp, synthetic construct
  source 1..75: mol_type = other DNA
atgcggatgcggaaatcggcggctggttgcaggagcgtttgcagttaattcacgcttccagcctgacggcgctga

SEQ ID NO: 724354 - DNA, 75 bp, synthetic construct
  source 1..75: mol_type = other DNA
gtgaaaatctgcttaattgatgaatcgggcaccggagacggtgccttatctgttctggcgacccgctgggggctg

SEQ ID NO: 724355 - DNA, 75 bp, synthetic construct
  source 1..75: mol_type = other DNA
atgcggatgcggaaatcggcggctggttacaggaacgtttgcagttgattcacgcctccagtctgacggcgctga

SEQ ID NO: 724356 - DNA, 75 bp, synthetic construct
  source 1..75: mol_type = other DNA
tgtcggctgccgttctggcgttgattgccgcaggggcttctgcgcctgaaatcctcgaccagtttctggatgaaa

SEQ ID NO: 724357 - DNA, 75 bp, synthetic construct
  source 1..75: mol_type = other DNA
tataccggaaacaacgcgcggcgctctttactcattcgtttacaacgtgggtgctggcaatttcagaacatcgac

SEQ ID NO: 724358 - DNA, 75 bp, synthetic construct
  source 1..75: mol_type = other DNA
cccagaaagcggggatcgcgtcattctgtccgtataacattggccccggtaagtgtttcccgtcgacgttttata

SEQ ID NO: 724359 - DNA, 75 bp, synthetic construct
  source 1..75: mol_type = other DNA
gacgcttcttcgcaaaataaaccacggtgatatcaaaggcgcatgtgatcagctacggcgctggacatacgctgg

SEQ ID NO: 724360 - DNA, 75 bp, synthetic construct
  source 1..75: mol_type = other DNA
tattaaagtaccactgaccgaaccacagaaagcggggatagcgtcattttgtccctataacattggccccggtaa

SEQ ID NO: 724361 - DNA, 75 bp, synthetic construct
  source 1..75: mol_type = other DNA
cccagaaagcggggatcgcgtcattctgtccgtacaacattggccccggtaagtgcttcccgtcgacgttttata

SEQ ID NO: 724362 - DNA, 75 bp, synthetic construct
  source 1..75: mol_type = other DNA
ggcgatatcaagggcgcatgtgaccagctacgtcgctgggcatacgctggcggtaagcaatggaaaggcctgatg

SEQ ID NO: 724363 - DNA, 75 bp, synthetic construct
  source 1..75: mol_type = other DNA
gtgcctgcgaagcgattcgctggtggattaaggacggtggcagagactgccgtattcgctcaaataactgttatg

SEQ ID NO: 724364 - DNA, 75 bp, synthetic construct
  source 1..75: mol_type = other DNA
cgggttaacgccattgagcgtgataaggcgctggcatgggtggagaaaaacatcaaagtgccactgactgaaccc

SEQ ID NO: 724365 - DNA, 75 bp, synthetic construct
  source 1..75: mol_type = other DNA
aattgctatagcatcagtgttaatcactggcccaagtggtaacgatggtctggaaggtgtgagacataatcctta

SEQ ID NO: 724366 - DNA, 75 bp, synthetic construct
  source 1..75: mol_type = other DNA
cgtatccgttcaaacaactgttacggtcaggtatcaagacgtgaccaggagagtgcgctggcgtgctggggtatc

SEQ ID NO: 724367 - DNA, 75 bp, synthetic construct
  source 1..75: mol_type = other DNA
gtattcgctcaaacaactgttacggtcaggtatcccgtcgcgaccaggagagtgcgctggcgtgctggggaattg

SEQ ID NO: 724368 - DNA, 75 bp, synthetic construct
  source 1..75: mol_type = other DNA
gcgcgaaaccggcgcctgtaatgtacaggtcatcggtaaaacgctggtgctttatcgcccaactaaagaacgtaa

SEQ ID NO: 724369 - DNA, 75 bp, synthetic construct
  source 1..75: mol_type = other DNA
tgcagccggagcttctgcccctgacattctcgatcagtttctggatgaaaaagagggtaaccacaccactgcata

SEQ ID NO: 724370 - DNA, 75 bp, synthetic construct
  source 1..75: mol_type = other DNA
tcaaataactgctatggacaggttattcgtcgtgaccaggaaagcgcattagcctgttgggggatagatcagtga

SEQ ID NO: 724371 - DNA, 75 bp, synthetic construct
  source 1..75: mol_type = other DNA
gaaactgtcgaaggaaaaatgcgaccaggttaacgccattgaacgggataaggcgctggcatgggtggggcgcaa

SEQ ID NO: 724372 - DNA, 75 bp, synthetic construct
  source 1..75: mol_type = other DNA
cgtatccgctcaaataattgctacggtcaggtatcccggcgagaccaggaaagtgcgctggcgtgctggggaatc

SEQ ID NO: 724373 - DNA, 75 bp, synthetic construct
  source 1..75: mol_type = other DNA
tttctggatgaaaaggaaggcaaccacaccacggcataccgtgatggtgtgggtatctggaccatctgccgtggt

SEQ ID NO: 724374 - DNA, 75 bp, synthetic construct
  source 1..75: mol_type = other DNA
atggtaagcctgtgattcctggcatgaagctgtcgaaggaaaaatgcgactgggttaacactatcgaacgggata

SEQ ID NO: 724375 - DNA, 75 bp, synthetic construct
  source 1..75: mol_type = other DNA
atgaacaccaaaatcaaatacagcctgtcggctgccgttctggcgctgattgccgcaggggcgcctgcgcctgat

SEQ ID NO: 724376 - DNA, 75 bp, synthetic construct
  source 1..75: mol_type = other DNA
atgaacgcaaaaatcaaatacggcctgtcggctgtcgttctggcgctgattggtgcaggggcgtctgcgcctgaa

SEQ ID NO: 724377 - DNA, 75 bp, synthetic construct
  source 1..75: mol_type = other DNA
atggaaaacccgttgttcccggtatgaaactgtcgaaggaaaaatgcgaccaggttaacgccattgaacgggata

SEQ ID NO: 724378 - DNA, 75 bp, synthetic construct
  source 1..75: mol_type = other DNA
atgagcgcaaaaatcaaatacggcctgtcagctgctgttctggcgctgattgctgcaggcgcgtctgcccctgac

SEQ ID NO: 724379 - DNA, 75 bp, synthetic construct
  source 1..75: mol_type = other DNA
cagaaagcgggcatcgcgtcattctgtccgtacaacatcgggccgtcgaaatgcttcacctcaacgttttaccgg

SEQ ID NO: 724380 - DNA, 75 bp, synthetic construct
  source 1..75: mol_type = other DNA
tgccgcaggtgcgcctgcgcctgaaatcctcgaccagtttctggatgaaaaggaaggtaaccacaccacggcata

SEQ ID NO: 724381 - DNA, 75 bp, synthetic construct
  source 1..75: mol_type = other DNA
caggttaacgccattgagcgtgataaggcgctggcatgggtggagaaaaacatccgggtgccactgactgaaccc

SEQ ID NO: 724382 - DNA, 75 bp, synthetic construct
  source 1..75: mol_type = other DNA
taaatgaaactatgctttatgagcagtacgctattgctaaggataacctgttttcaggtaagatcacttccttag

SEQ ID NO: 724383 - DNA, 75 bp, synthetic construct
  source 1..75: mol_type = other DNA
atgacgggtctgcgaacacgacgttatgccggcgcatttttggtgtgggcagcgactgtttctgtggctgacgct

SEQ ID NO: 724384 - DNA, 75 bp, synthetic construct
  source 1..75: mol_type = other DNA
gtctggcggaccggaatgcctgaatccctgtatccggaagccctcattcccggtaaacgtgaaatcggcagtcag

SEQ ID NO: 724385 - DNA, 75 bp, synthetic construct
  source 1..75: mol_type = other DNA
gcttgctggaggtggtggcggaagcagtcgccataaaagtgctgctggagaggggcagaatcaggtacaggctga

SEQ ID NO: 724386 - DNA, 75 bp, synthetic construct
  source 1..75: mol_type = other DNA
gatgctgccgcgcaggctgataaggacggtaacggcctgatcacgccggaagaggcgaaagccgtggaagatgcg

SEQ ID NO: 724387 - DNA, 75 bp, synthetic construct
  source 1..75: mol_type = other DNA
tgaggaaactggcatttagcttacggagtcgttattctgatgcggatgccagaactagactgattgaagaatata

SEQ ID NO: 724388 - DNA, 75 bp, synthetic construct
  source 1..75: mol_type = other DNA
caacctatgtcgcaccgggcggcaacccgtggcaggaaatggcgtttgtcagccagaccgccggcgggccggaga

SEQ ID NO: 724389 - DNA, 75 bp, synthetic construct
  source 1..75: mol_type = other DNA
gcggtggtctcggcctaccatgccccgggtgaaaacccgtggcgggaaatgtcactggtcagcggggcggccggc

SEQ ID NO: 724390 - DNA, 75 bp, synthetic construct
  source 1..75: mol_type = other DNA
ctcgccgtgatcttgcccggcaaccgcgttatgccactgggtgacctctctcagtttgtgtttttcattgcctgc

SEQ ID NO: 724391 - DNA, 75 bp, synthetic construct
  source 1..75: mol_type = other DNA
gtgccggggccctgctgctgagtgttgcagccctgcctctggcgtcagcttcactgaataccgccagtattgtgg

SEQ ID NO: 724392 - DNA, 75 bp, synthetic construct
  source 1..75: mol_type = other DNA
atgaccctgaaaagtcgtctgcgtgcctgcgtactgttactgagtgtggcatcactgcctctggcgtctgcgtca

SEQ ID NO: 724393 - DNA, 75 bp, synthetic construct
  source 1..75: mol_type = other DNA
cgggctattcctgtgatacagccgccaccccgttaatgccttacttcctgagtacgctggattcggttgcctggc

SEQ ID NO: 724394 - DNA, 75 bp, synthetic construct
  source 1..75: mol_type = other DNA
agcaggagcatgatgatcttgcggcgaagaacgatgcggtaacggcggcgaaagcagatgcggcgaaagcggtgg

SEQ ID NO: 724395 - DNA, 75 bp, synthetic construct
  source 1..75: mol_type = other DNA
cgtttatatctgctttatgcctggtgggttgtgatgagcagccaaagagtaagcaatggtatatggataaccctg

SEQ ID NO: 724396 - DNA, 75 bp, synthetic construct
  source 1..75: mol_type = other DNA
aagattgttgctacaatggtgagtttggaacaacagcaaactgctgatgatgaatcaaaggaagcagcttctgat

SEQ ID NO: 724397 - DNA, 75 bp, synthetic construct
  source 1..75: mol_type = other DNA
agagggtagtgtaatcttcgaagatcaaaaagataggattgaggttaataattgtgatgaaggagcaaattactt

SEQ ID NO: 724398 - DNA, 75 bp, synthetic construct
  source 1..75: mol_type = other DNA
acgtacgcggtgacagcatgtcaggaacgatcgaaccaggtgatcttctgttcgttgatatcacggttaaatctt

SEQ ID NO: 724399 - DNA, 75 bp, synthetic construct
  source 1..75: mol_type = other DNA
agcaagagcgtatttgtgacgctgccggaaaccattgtcactttgcatgacaacaacggcgcggatcattatttg

SEQ ID NO: 724400 - DNA, 75 bp, synthetic construct
  source 1..75: mol_type = other DNA
cggcaaggcggatgcagaggaagcggcagcagcggtggcggcggccacggagaaagtggaagcggcagaagcggc

SEQ ID NO: 724401 - DNA, 75 bp, synthetic construct
  source 1..75: mol_type = other DNA
acaaggctgccgaggtcgaagcaaaagtggctgcagcagagtctgcagagaaagccgcggaagatgaactggtga

SEQ ID NO: 724402 - DNA, 75 bp, synthetic construct
  source 1..75: mol_type = other DNA
cgcgaaggcgctggttgaggcagccgaagcgaagcaggctgaagcggaaggtgcgctgacggaggccaataaaga

SEQ ID NO: 724403 - DNA, 75 bp, synthetic construct
  source 1..75: mol_type = other DNA
ctgccgggagtggtaatactaaaaacaatggcgcatcaggggccgatatcaataactatgccgggcagattaaat

SEQ ID NO: 724404 - DNA, 75 bp, synthetic construct
  source 1..75: mol_type = other DNA
tcgataactacccgctgattttgtgtgaggcgctatcgattggcgtgccggtgattgccacccatagcgacgcgg

SEQ ID NO: 724405 - DNA, 75 bp, synthetic construct
  source 1..75: mol_type = other DNA
aggcagatacaacagcaccatcagcaccggcattaacggccggagataatggttcagtttctgttgaactgccgg

SEQ ID NO: 724406 - DNA, 75 bp, synthetic construct
  source 1..75: mol_type = other DNA
gcgcatatgtctggacgctgtggcgcccctataaatgctgtccacgtcgtgggcagacctttctcggcagcagcg

SEQ ID NO: 724407 - DNA, 75 bp, synthetic construct
  source 1..75: mol_type = other DNA
tggcgctcctttgcgccagttcttccgcctatgcgcttgatggtgaatatgtcgtgatgggaggatttaccacca

SEQ ID NO: 724408 - DNA, 75 bp, synthetic construct
  source 1..75: mol_type = other DNA
cccatgccggtgtgccatctcactggaaggggaaaaatctgctgggatttgcgcttatggtagtcagagaccgtt

SEQ ID NO: 724409 - DNA, 75 bp, synthetic construct
  source 1..75: mol_type = other DNA
atggcgctttatattgatatcagcgccattgccggacaggtaagagttatcagagcggtaactaagcggtatgcg

SEQ ID NO: 724410 - DNA, 75 bp, synthetic construct
  source 1..75: mol_type = other DNA
taggactgtttagtataccatctcgttatattgcgttattatttgtttttattcctgtatatgctcatgcagcat

SEQ ID NO: 724411 - DNA, 75 bp, synthetic construct
  source 1..75: mol_type = other DNA
gggaatcactttagccctgagcaaattcaggctaacagtgcctggagtaccgagaaaggtgcgaatgttattaaa

SEQ ID NO: 724412 - DNA, 75 bp, synthetic construct
  source 1..75: mol_type = other DNA
agaatcctccgttggcgatagccgtggccgtaaagccgctgccgacaataccagtatgtcagtatctgatatgac

SEQ ID NO: 724413 - DNA, 75 bp, synthetic construct
  source 1..75: mol_type = other DNA
aggcgctggcatgggtggcgaaaaacatcagagtgccactgaccgaaccccagaaagcgggtattgcgtcattct

SEQ ID NO: 724414 - DNA, 75 bp, synthetic construct
  source 1..75: mol_type = other DNA
ccccagaaagcgggtattgcgtcattctgtccttacaacattggcccaggtaagtgtttcccgtcgacgttttat

SEQ ID NO: 724415 - DNA, 75 bp, synthetic construct
  source 1..75: mol_type = other DNA
cgtattcgttcaaataactgctacggacaggttattcgtcgtgaccaggaaagcgcattagcttgttgggggata

SEQ ID NO: 724416 - DNA, 75 bp, synthetic construct
  source 1..75: mol_type = other DNA
gtgttagtggatcggctgacctgagccagtttccgatcgctttggtgcagcgtatcgaatatatccgtgggccac

SEQ ID NO: 724417 - DNA, 75 bp, synthetic construct
  source 1..75: mol_type = other DNA
cgcttgggcacaggataccagcccggatactctcgtcgttactgctaaccgttttcaggaaccattaagtgccgt

SEQ ID NO: 724418 - DNA, 75 bp, synthetic construct
  source 1..75: mol_type = other DNA
gagtttcgtggagtgggcaagggcgtcgcccggatgctttcaaggggttgggtgctgtcgagttggagcgttacc

SEQ ID NO: 724419 - DNA, 75 bp, synthetic construct
  source 1..75: mol_type = other DNA
cccaatatgaaactgtcgaaggaaaaatgcgaccaggtcaacgccattgagcgtgataaggcgctggcatgggtg

SEQ ID NO: 724420 - DNA, 75 bp, synthetic construct
  source 1..75: mol_type = other DNA
gccaccgatgcttttctggctgaaattcgtgcggaagcacgcaacgaggggattaactataccgccagccgtctt

SEQ ID NO: 724421 - DNA, 75 bp, synthetic construct
  source 1..75: mol_type = other DNA
gcgaggaactggagagaatatagaaggcgctatggctatcacttatgaagagtacaaaggtcagcctgatgctca

SEQ ID NO: 724422 - DNA, 75 bp, synthetic construct
  source 1..75: mol_type = other DNA
cgattatatcttgagcaatgcccgcaagcagaagaaggaccgttgctggcgttaacccgtgcctggacattggtg

SEQ ID NO: 724423 - DNA, 75 bp, synthetic construct
  source 1..75: mol_type = other DNA
ctgaacaccgccagcattatcgccagtactgcggcaccggactatatcagctggcgtgtcagcgggatttgttac

SEQ ID NO: 724424 - DNA, 75 bp, synthetic construct
  source 1..75: mol_type = other DNA
cgccggtgacaccggcaatgccttatttcctgagtaccctggacagtctcgtctggcggaccggaatgcctgaat

SEQ ID NO: 724425 - DNA, 75 bp, synthetic construct
  source 1..75: mol_type = other DNA
gcatgtctacagggaggtgaagggcgtgaaacgtgacggctactggcccccggaggcggtggaggaaaacaccgg

SEQ ID NO: 724426 - DNA, 75 bp, synthetic construct
  source 1..75: mol_type = other DNA
cgtatccgctcaaataactgctacggtcaggtatcccgtcgtgaccaggaaagtgcgctggcgtgctggggaatt

SEQ ID NO: 724427 - DNA, 75 bp, synthetic construct
  source 1..75: mol_type = other DNA
gataaaggacggtggacgtgattgccgcattcgttcaaataattgttacggtcaggttattcgtcgtgaccagga

SEQ ID NO: 724428 - DNA, 75 bp, synthetic construct
  source 1..75: mol_type = other DNA
atctgccgtggtgccacaatggtggacggtaagcctgtcgttcctggcatgaaactgacgaagacaaaatgcgag

SEQ ID NO: 724429 - DNA, 75 bp, synthetic construct
  source 1..75: mol_type = other DNA
gtttctatgttgagcatgtggggttgccgggttgtcgtcggttatgtgctgggcatcatgcttggctggggtgtg

SEQ ID NO: 724430 - DNA, 75 bp, synthetic construct
  source 1..75: mol_type = other DNA
tatatcggtgaggggttaagactaaatccagttacttcagttgatgagtttgagaaaaagataaaaataattggt

SEQ ID NO: 724431 - DNA, 75 bp, synthetic construct
  source 1..75: mol_type = other DNA
gtctgcgcctgaaatcctcgaccagtttcttgacgaaaaagaaggtaaccacaccacggcataccgtgatggtgc

SEQ ID NO: 724432 - DNA, 75 bp, synthetic construct
  source 1..75: mol_type = other DNA
caggttgatggtctgcaacaaagcgatgatattttacgccttctaccgccagaactggcgacgcttgggataact

SEQ ID NO: 724433 - DNA, 75 bp, synthetic construct
  source 1..75: mol_type = other DNA
tgttgcaccggatactccgactatttgtgacctggtgctgtctccaatgttgcgtggtgacattaatcagtcctc

SEQ ID NO: 724434 - DNA, 75 bp, synthetic construct
  source 1..75: mol_type = other DNA
cgttgcaaagtcaggacatggtggcaacctggcctgccgatactaaagagggctggtggcgctatcgtctgaaag

SEQ ID NO: 724435 - DNA, 75 bp, synthetic construct
  source 1..75: mol_type = other DNA
tcaacttgaaccggttctggcggaaaacaacaccgcagccggtcgcctgtgggatatgagcgccggtcagctcaa

SEQ ID NO: 724436 - DNA, 75 bp, synthetic construct
  source 1..75: mol_type = other DNA
ccacgccgcaatttattgtgcaactaccgcagatactggacttactgcatcgactgaattccccgtgggccgaac

SEQ ID NO: 724437 - DNA, 75 bp, synthetic construct
  source 1..75: mol_type = other DNA
tgctatcagcaaagccagcttctttccacgccgcaatttattgtgcaactaccgcagatactggacttactgcat

SEQ ID NO: 724438 - DNA, 75 bp, synthetic construct
  source 1..75: mol_type = other DNA
ggtgccctgctgctgactggcggctacgaaatggacgcgcgcatttccaaactgtgcgaacgtgctttcgctacc

SEQ ID NO: 724439 - DNA, 75 bp, synthetic construct
  source 1..75: mol_type = other DNA
acagcgttctgctgacctgatctctatcggaccgatgctgcagggtatgcgcaagccggttaacgacctgtcccg

SEQ ID NO: 724440 - DNA, 75 bp, synthetic construct
  source 1..75: mol_type = other DNA
ccgcgttgcagcgtctcagggcgtagaactgggcgcaggcattgaaatcgttgatccagaagtggttcgcgaaaa

SEQ ID NO: 724441 - DNA, 75 bp, synthetic construct
  source 1..75: mol_type = other DNA
gttgccggttccaccaacatcagcaacatcaccgacaccgtttatcactggccgctgagccagagcattccgctg

SEQ ID NO: 724442 - DNA, 75 bp, synthetic construct
  source 1..75: mol_type = other DNA
actgccgttcgacctggcggaagcgagcaggagttgcaggaaggtccgctctctgagtatagcggcagcggcttt

SEQ ID NO: 724443 - DNA, 75 bp, synthetic construct
  source 1..75: mol_type = other DNA
ctaccggaaccagcgtcggtctgactagcgtcagccttggcgtgatccgtgcaatggaacgcaaaggcgttcgtc

SEQ ID NO: 724444 - DNA, 75 bp, synthetic construct
  source 1..75: mol_type = other DNA
ccgccaagcgaacgggtttctggattgagagaaatcgtgactcaccctaactacataatcctatacagggtagct

SEQ ID NO: 724445 - DNA, 75 bp, synthetic construct
  source 1..75: mol_type = other DNA
atgaacggcaaatctaggttagcctcttacgtgccgaaaggcaaggagatgtatgggtccaccacatattgcaat

SEQ ID NO: 724446 - DNA, 75 bp, synthetic construct
  source 1..75: mol_type = other DNA
cggcgctggacatacgctggcggtaagcaatggaaagggctgatgactcgccgtgagattgagcgtgaagtctgt

SEQ ID NO: 724447 - DNA, 75 bp, synthetic construct
  source 1..75: mol_type = other DNA
cgcatgtgaccagctacgtcgctggacatacgctggcggtaagcaatggaaaggcctgatgactcgtcgtgagat

SEQ ID NO: 724448 - DNA, 75 bp, synthetic construct
  source 1..75: mol_type = other DNA
ttatctccgctctgctcatctgcatcatcgtctgcatgtcatgggctgttaatcattatcgtgataacgccatta

SEQ ID NO: 724449 - DNA, 75 bp, synthetic construct
  source 1..75: mol_type = other DNA
tattaaagtacctctgaccgaaccacagaaagcgggtatagcgtcattttgtccctataacattggccccggtaa

SEQ ID NO: 724450 - DNA, 75 bp, synthetic construct
  source 1..75: mol_type = other DNA
tgcgtgaaattgtagctcaccccaattacatcattctgtaccgcgtgacaatttcaggcattgaaattgttaacg

SEQ ID NO: 724451 - DNA, 75 bp, synthetic construct
  source 1..75: mol_type = other DNA
ctgctcgcgatgatttaagtcagattataacttacattgctaaaaaaaaccctccggcagcgcgcagactaaaaa

SEQ ID NO: 724452 - DNA, 75 bp, synthetic construct
  source 1..75: mol_type = other DNA
cataacttacatcgccaaggagaacccaccggcagcgcgtagacttaaaatacgtattgaaacatcggtattacc

SEQ ID NO: 724453 - DNA, 75 bp, synthetic construct
  source 1..75: mol_type = other DNA
gtaacccgattacctatgacggcggcactctactggatctgaatcgtcatgagctgatttatcagttcgattttt

SEQ ID NO: 724454 - DNA, 75 bp, synthetic construct
  source 1..75: mol_type = other DNA
atcgcgttgccggtttctcgccgatcccggcgatgtcgatggtttcttacgccgccggaacgcgttatctgtcgc

SEQ ID NO: 724455 - DNA, 75 bp, synthetic construct
  source 1..75: mol_type = other DNA
ttctaggtaatacgtcaaaaactgtttggatggtagttggcacgtatggtatctgtcgagggctatgggttaagt

SEQ ID NO: 724456 - DNA, 75 bp, synthetic construct
  source 1..75: mol_type = other DNA
cacctgaatgcgaccatcatcaacgaaggcgacatcaatactcgccgcgttaaatccgtcactttctgcgcacgc

SEQ ID NO: 724457 - DNA, 75 bp, synthetic construct
  source 1..75: mol_type = other DNA
tccggctcatacaacactgggaatggttatttcgcaacctatataatagccacaggtgatgccgtagtgctagaa

SEQ ID NO: 724458 - DNA, 75 bp, synthetic construct
  source 1..75: mol_type = other DNA
cgcacgcctctccccgctttgccacggacatatcaatatgctcggccattattccttcacgctggcagaactggt

SEQ ID NO: 724459 - DNA, 75 bp, synthetic construct
  source 1..75: mol_type = other DNA
tcaacggagcaattagttgccattatggagcagaagaaagggaaacttcgttcgatagccgatgctgaaattagc

SEQ ID NO: 724460 - DNA, 75 bp, synthetic construct
  source 1..75: mol_type = other DNA
cattgccgtgcgcgaagccctgcgtgccgggcggcttattgaagtgttgcctggctaccgtgccgagccgctctc

SEQ ID NO: 724461 - DNA, 75 bp, synthetic construct
  source 1..75: mol_type = other DNA
gccacatctgggcgtgcacccattgggttttgaggtcgccagtggtcatggcgtccagtggtttaagtccggcgg

SEQ ID NO: 724462 - DNA, 75 bp, synthetic construct
  source 1..75: mol_type = other DNA
taaagagtatgattatcttactcccaaaaatagcggctatagtgggatccaccttgcatacagttgctttgatca

SEQ ID NO: 724463 - DNA, 75 bp, synthetic construct
  source 1..75: mol_type = other DNA
caacatatcgggccactggccccggtggcaggctctgatttgtatgtgttcaggccggtgcgcatacggtggatt

SEQ ID NO: 724464 - DNA, 75 bp, synthetic construct
  source 1..75: mol_type = other DNA
agggaccgaagggagacactggagcccccgggcaaggaacagaactgcttactactgccaatacatggactcagg

SEQ ID NO: 724465 - DNA, 75 bp, synthetic construct
  source 1..75: mol_type = other DNA
ggggagcagaagagccagactgactactggcaggatttaaccgaagggttttccgtcattgtgtttgtcagcaat

SEQ ID NO: 724466 - DNA, 75 bp, synthetic construct
  source 1..75: mol_type = other DNA
acggataaaaatggttatcctgtatgggttgatatcccagccctgtctgcaaaacaactggtcgctcaggctggg

SEQ ID NO: 724467 - DNA, 75 bp, synthetic construct
  source 1..75: mol_type = other DNA
gacacgtaaacatgaaaactggaaatatacgccgctggacgggctgaccaatagccagtttgtctgcattgcggg

SEQ ID NO: 724468 - DNA, 75 bp, synthetic construct
  source 1..75: mol_type = other DNA
gcacgctgaccagccagtggctgaagcaaaccgataaagccattctggatagcaaagacgacgccgaactggcac

SEQ ID NO: 724469 - DNA, 75 bp, synthetic construct
  source 1..75: mol_type = other DNA
agatcataaagagcttgaaacagccccgagctctttctttcttctaatattaaacactcacagattaattctttg

SEQ ID NO: 724470 - DNA, 75 bp, synthetic construct
  source 1..75: mol_type = other DNA
gcacattatcggaaatgaacacctacgtttatgacgcgaaaggctccatgaatgcacaggaaggctgctttgatg

SEQ ID NO: 724471 - DNA, 75 bp, synthetic construct
  source 1..75: mol_type = other DNA
cctgcatatctcagagcacggcaaaatttgcgcgaaatatccggctaaggcgaaagagctgcgaaccggtacgct

SEQ ID NO: 724472 - DNA, 75 bp, synthetic construct
  source 1..75: mol_type = other DNA
gaagacgaggaaaacgatgatgaaggtgaagaaaataatcaggcgaatacctccagccgcgataatgccatctaa

SEQ ID NO: 724473 - DNA, 75 bp, synthetic construct
  source 1..75: mol_type = other DNA
cgcgtgtagccatgctctcctactccaccgggacttctggcgcaggcagcgatgttgagaaagttcgcgaagcaa

SEQ ID NO: 724474 - DNA, 75 bp, synthetic construct
  source 1..75: mol_type = other DNA
ttctgataaatggcaacaaatcagttgggaagaggcgtttgatcgcatcgccaaactgatgaaagaagaccgcga

SEQ ID NO: 724475 - DNA, 75 bp, synthetic construct
  source 1..75: mol_type = other DNA
gtgtgggtggcgatttttacgagatgagtaaccgggcacaggaaatcactgcatcagggctggcgctgacgccac

SEQ ID NO: 724476 - DNA, 75 bp, synthetic construct
  source 1..75: mol_type = other DNA
tcacttatttaagtgatattggttgtctggagattcagggggccagtctagcagattatggtgcgcagttataca

SEQ ID NO: 724477 - DNA, 75 bp, synthetic construct
  source 1..75: mol_type = other DNA
ccaggagatgcgcgccagaatgcctgtgagggtaaaacagaaaacggataaacgcagaactacacactggatggc

SEQ ID NO: 724478 - DNA, 75 bp, synthetic construct
  source 1..75: mol_type = other DNA
cggacgaagaactgatgcatcttggggaaggtatttccggaggtgtgcgttatggaccagatagccaacctggtc

SEQ ID NO: 724479 - DNA, 75 bp, synthetic construct
  source 1..75: mol_type = other DNA
ggaagcggcacacaagatggcgcaaatcaatcaggcatgtcttgctactggtgagcaggtattcagcggtgatga

SEQ ID NO: 724480 - DNA, 75 bp, synthetic construct
  source 1..75: mol_type = other DNA
ggcccagccagtgtagtggaaatggaagaggaaaacgatgatgaaggtgaagaaaataatcaggcgaatacctcc

SEQ ID NO: 724481 - DNA, 75 bp, synthetic construct
  source 1..75: mol_type = other DNA
atcaatcaggcttgcctggctactggtgaagaaatatttagcggtgacgagatccgcgaggctgccggatacgat

SEQ ID NO: 724482 - DNA, 75 bp, synthetic construct
  source 1..75: mol_type = other DNA
gatctcacctgaagaactggagcagttaattaagctcatcgcaaaacttgagcataatattattgagctacaggc

SEQ ID NO: 724483 - DNA, 75 bp, synthetic construct
  source 1..75: mol_type = other DNA
atcgtcgggctaaacgtattaaactgacggaaaaggcagagccactgatcagcgaaatggaagctgttattaaca

SEQ ID NO: 724484 - DNA, 75 bp, synthetic construct
  source 1..75: mol_type = other DNA
aatttccgcagaggaagtagaacagttgattaagctcattgcaaaacttgagcataatattactgagctgcaggc

SEQ ID NO: 724485 - DNA, 75 bp, synthetic construct
  source 1..75: mol_type = other DNA
catgtgaagcaatcaggtggtggataaaagacggtggacgcgattgccggatccgttccaataactgctacgggc

SEQ ID NO: 724486 - DNA, 75 bp, synthetic construct
  source 1..75: mol_type = other DNA
cgtattcgttccaatagctgcttcgggcaagtttcgcgtcgggaccaagaaagtgtgctggcgtgctgggggata

SEQ ID NO: 724487 - DNA, 75 bp, synthetic construct
  source 1..75: mol_type = other DNA
cgtattcgctcaaataactgttacggtcaggtctcacggcgtgaccaggagagcgcgctggcgtgctggggaatt

SEQ ID NO: 724488 - DNA, 75 bp, synthetic construct
  source 1..75: mol_type = other DNA
tattaaagtaccactgaccgaaccacaaaaagcgggtatcgcgtcattttgcccctataacattggccccggtaa

SEQ ID NO: 724489 - DNA, 75 bp, synthetic construct
  source 1..75: mol_type = other DNA
agtcatggtaattttgttcttgtaaaatgctcctcggaaatactaaaaaaaacattaataaaaggcctggaggaa

SEQ ID NO: 724490 - DNA, 75 bp, synthetic construct
  source 1..75: mol_type = other DNA
cgtattcgctcaaataactgttacggtcaggtatcccggagagaccaggagagcgcgctggcgtgctgggaaatc

SEQ ID NO: 724491 - DNA, 75 bp, synthetic construct
  source 1..75: mol_type = other DNA
cgccagacaaattaacccgtacatcaaagtcgatataccggaaacaacgcgcggcgctctttactcattcgttta

SEQ ID NO: 724492 - DNA, 75 bp, synthetic construct
  source 1..75: mol_type = other DNA
aaacttcgatgccccgtccatcgcgccgtagaaatcggcctcgctggcaacatctttacgccgggtttgcgcctg

SEQ ID NO: 724493 - DNA, 75 bp, synthetic construct
  source 1..75: mol_type = other DNA
cgcattcgttcaaataactgttacggtcaggttattcgtcgtgatcaggagagcgcgttagtgtgctgggggagc

SEQ ID NO: 724494 - DNA, 75 bp, synthetic construct
  source 1..75: mol_type = other DNA
gaagttgtcgaaggaaaaatgcgaccaggttaacgccattgaacgtgataaggcgctggcatgggtggcgaaaaa

SEQ ID NO: 724495 - DNA, 75 bp, synthetic construct
  source 1..75: mol_type = other DNA
ggcggtaagcaatggaaaggcctgatgactcgtcgtgagattgagcgtgaggtctgtttgtgggggcaacaatga

SEQ ID NO: 724496 - DNA, 75 bp, synthetic construct
  source 1..75: mol_type = other DNA
ggtgatatcaaaggtgcgtgtgaccagctacgtcgctggacatacgctggcggtaagcaatggaaagggctgatg

SEQ ID NO: 724497 - DNA, 75 bp, synthetic construct
  source 1..75: mol_type = other DNA
agaaagcgggtattgcgtcattctgtccttacaacattggccccggtaagtgtttcccgtcgacgttttataaac

SEQ ID NO: 724498 - DNA, 75 bp, synthetic construct
  source 1..75: mol_type = other DNA
ttgctgctgctattggtggcggagcaattgctatagcatcagtgttaattactggcccaagtggtaacgatggtc

SEQ ID NO: 724499 - DNA, 75 bp, synthetic construct
  source 1..75: mol_type = other DNA
aagatatcgttggcgtatggactgtatgtcacggacacaccggaaaagacatcatgcccggtaaaacgtataccg

SEQ ID NO: 724500 - DNA, 75 bp, synthetic construct
  source 1..75: mol_type = other DNA
aaaacgtataccgaagcagaatgcaaagccctcctgaataaagaccttgccacggtcgccagacaaattaacccg

SEQ ID NO: 724501 - DNA, 75 bp, synthetic construct
  source 1..75: mol_type = other DNA
aaccagggcgaccagaaaggtgcgtgcgaccagctgcgccgctggacttacgccaagggcaagcagtggaaaggc

SEQ ID NO: 724502 - DNA, 75 bp, synthetic construct
  source 1..75: mol_type = other DNA
gtgaagtttgcctgtgggcagagaaacctcaggttctgggggatggactcgggccgcttaaccctggcattccgg

SEQ ID NO: 724503 - DNA, 75 bp, synthetic construct
  source 1..75: mol_type = other DNA
tggactgtatgctggggccatactggtaaagatattatcctcggcaagacctacaccaaagcagagtgccaggcg

SEQ ID NO: 724504 - DNA, 75 bp, synthetic construct
  source 1..75: mol_type = other DNA
gacaaattaccccgtacatcaaagtcgatataccagaaacaacgcgcggcgctctttactcattcgtctataacg

SEQ ID NO: 724505 - DNA, 75 bp, synthetic construct
  source 1..75: mol_type = other DNA
gtgaccagctacgtcgctggacatacgctggcggtaagcaatggaaaggcctgatgactcgtcgtgagattgagc

SEQ ID NO: 724506 - DNA, 75 bp, synthetic construct
  source 1..75: mol_type = other DNA
cgatataccggaaacaacgcgcggcgctctttactcgttcgtttacaacgtgggcgctggcaattcagaacatcg

SEQ ID NO: 724507 - DNA, 75 bp, synthetic construct
  source 1..75: mol_type = other DNA
atgacacagttaacttgttttaaggcatatgacatccgtggtgaactgggtgaggaactgaacgaggacattgcc

SEQ ID NO: 724508 - DNA, 75 bp, synthetic construct
  source 1..75: mol_type = other DNA
gtccgtacaatattggccccggtaagtgttttccgtcgacgttttacagacgaattaatgcaggtgatcgaaaag

SEQ ID NO: 724509 - DNA, 75 bp, synthetic construct
  source 1..75: mol_type = other DNA
gctttctactcagccgggcgtgagttatagcgaacataacatcagcaaagacaaaccgttaacgcggatgcagct

SEQ ID NO: 724510 - DNA, 75 bp, synthetic construct
  source 1..75: mol_type = other DNA
cccgctcgatgccgccttcacgccggaaggggccgagggcactgttgcaaagttagcgatgaggcagccttttgt

SEQ ID NO: 724511 - DNA, 75 bp, synthetic construct
  source 1..75: mol_type = other DNA
ccgtgatggtacgggtatctggaccatctgccgtggtgccacaatggtggacggtaagcctgtcgttcctggcat

SEQ ID NO: 724512 - DNA, 75 bp, synthetic construct
  source 1..75: mol_type = other DNA
catcagagtgccgctgaccgaaccccagaaagcggggatcgcgtcattctgtccgtacaacattggccccggtaa

SEQ ID NO: 724513 - DNA, 75 bp, synthetic construct
  source 1..75: mol_type = other DNA
atctcaactatgaccagctgcttgacgaaatcaaaggcatctttcgcgtactctgccggcacaacagtaatcccc

SEQ ID NO: 724514 - DNA, 75 bp, synthetic construct
  source 1..75: mol_type = other DNA
tggggtcggcagcaggggatgtggcgttttacgacgatgtgccgatgatcccggtgcttatcgtcttcattaccc

SEQ ID NO: 724515 - DNA, 75 bp, synthetic construct
  source 1..75: mol_type = other DNA
cactggtttcagcagaaacagctaaagttggcatggatctttattataaaaatcgcggtcaaaaaccagtggtgg

SEQ ID NO: 724516 - DNA, 75 bp, synthetic construct
  source 1..75: mol_type = other DNA
accggtagtggcggttatctatacacacagtcatgtcgatcactacggtggtgttcgtggcgtaattgatgaagc

SEQ ID NO: 724517 - DNA, 75 bp, synthetic construct
  source 1..75: mol_type = other DNA
atgaagtttacttcaaaaaatcgttgcacttggtttgacaattcaagccgcaaaaaggtaacgaataccatggag

SEQ ID NO: 724518 - DNA, 75 bp, synthetic construct
  source 1..75: mol_type = other DNA
ctaatgcgttgcttaatcggctggagaaaaagctgattgctcgcggctgcccgaaaattcagatcaacgtgccgg

SEQ ID NO: 724519 - DNA, 75 bp, synthetic construct
  source 1..75: mol_type = other DNA
cagatttcgaagaggtgatcaccctttgggagcgttgcgacttgttgcgtccgtggaatgatccggaaatggaca

SEQ ID NO: 724520 - DNA, 75 bp, synthetic construct
  source 1..75: mol_type = other DNA
cgtctgggcgtttttgtgccgacccttaaatcactgaagaacagtaaaaaaaatacactgtcacgtactgatgcc

SEQ ID NO: 724521 - DNA, 75 bp, synthetic construct
  source 1..75: mol_type = other DNA
cattggccccggtaagtgtttcccgtcgacgttttataaacgaattaatgcaggcgatcgcaggggagcgtgtga

SEQ ID NO: 724522 - DNA, 75 bp, synthetic construct
  source 1..75: mol_type = other DNA
cgtcgtttatcgagggatattacattgtcggcctgctggctgaggcgttcctgcagaagcagccgggagcgaaaa

SEQ ID NO: 724523 - DNA, 75 bp, synthetic construct
  source 1..75: mol_type = other DNA
agcgggatgatcccgtggctgctggtggcggagctgctgtgcctgaagaacagctcgctgaaatcgctggtggcg

SEQ ID NO: 724524 - DNA, 75 bp, synthetic construct
  source 1..75: mol_type = other DNA
cagctacgtcgctggacatatgctggcggtaagcaatggaaaggtctcatgactcgtcgtgggattgagcgtgaa

SEQ ID NO: 724525 - DNA, 75 bp, synthetic construct
  source 1..75: mol_type = other DNA
aacgccggaacggtgggctataagtcgatgaccacccagttttccgccatgtatgccggaagccaggcgatgggc

SEQ ID NO: 724526 - DNA, 75 bp, synthetic construct
  source 1..75: mol_type = other DNA
gcaccgcgtgggtacaaaccggcgaatccggcaccccgctgattggcgttcccggttccggcacctgcggcacgc

SEQ ID NO: 724527 - DNA, 75 bp, synthetic construct
  source 1..75: mol_type = other DNA
aatcgatcgattctgcattacaaaccatacaaggtggtttaatactagaggaattacaggtcggcggcgttgaaa

SEQ ID NO: 724528 - DNA, 75 bp, synthetic construct
  source 1..75: mol_type = other DNA
gctcctgcagcccctgaacgccgggattaccgtctgccggacggccgggtggtcaatctgaagaactacaaactg

SEQ ID NO: 724529 - DNA, 75 bp, synthetic construct
  source 1..75: mol_type = other DNA
ttcttcgcaaaataaaccagggcgatatcaaaggcgcatgtgatcagctacgtcgctggacatatgctggcggta

SEQ ID NO: 724530 - DNA, 75 bp, synthetic construct
  source 1..75: mol_type = other DNA
tctatccgtattcgtaaacgtcacctgacggaaaacgatcgtcgccgcgccaaccgcgcaccgaaagacgattaa

SEQ ID NO: 724531 - DNA, 75 bp, synthetic construct
  source 1..75: mol_type = other DNA
cgcgcttcgtaaccaaaaaagcgtttgcttacggcctgaagccgattgttgttatcaacaaagttgaccgccctg

SEQ ID NO: 724532 - DNA, 75 bp, synthetic construct
  source 1..75: mol_type = other DNA
gtgatcgaaaaattgcgtaatatcgccatcatcgcgcacgtagaccatggtaaaaccaccctggtagacaagctg

SEQ ID NO: 724533 - DNA, 75 bp, synthetic construct
  source 1..75: mol_type = other DNA
caaacggattgccgagcgtggggagaatattcaagtctggatagaacctgtggtgtttaatgacctgctgaactg

SEQ ID NO: 724534 - DNA, 75 bp, synthetic construct
  source 1..75: mol_type = other DNA
atggcagcagttatgaaccgcgacgggttacaatacgcagtaaaaagggacgcatcaaacgccagatgtttgcaa

SEQ ID NO: 724535 - DNA, 75 bp, synthetic construct
  source 1..75: mol_type = other DNA
gcagtttgaaggtaaggtgcagcgcattgcccgcgtccaccattatggcctgcgtgatcgcgtcagccgcaaagg

SEQ ID NO: 724536 - DNA, 75 bp, synthetic construct
  source 1..75: mol_type = other DNA
gagaaaccgtcctgattgataaacaggagcataacgctgaccagatacttacagctattgattcctgcctgcgcc

SEQ ID NO: 724537 - DNA, 75 bp, synthetic construct
  source 1..75: mol_type = other DNA
agcagctatgaaccgaggcgagtaacagcacgcagcaaaaagggtcgcatcaaacgtcagatgtttacaaagctg

SEQ ID NO: 724538 - DNA, 75 bp, synthetic construct
  source 1..75: mol_type = other DNA
ttttaaagtgaaatatgcgcaacggcgtcttctaggcgttaataaagacatagaaatttgggttcgaaacacact

SEQ ID NO: 724539 - DNA, 75 bp, synthetic construct
  source 1..75: mol_type = other DNA
ccgccagcgccgactctgccagcgtacagtttgaaggcaaggtgcagcgtattgcccgtgttcaccattacggcc

SEQ ID NO: 724540 - DNA, 75 bp, synthetic construct
  source 1..75: mol_type = other DNA
tgccgcccattcgccttttggcggggtaagcattacagtagagttaccgctggaacgagatttacagggagaagc

SEQ ID NO: 724541 - DNA, 75 bp, synthetic construct
  source 1..75: mol_type = other DNA
ccggcaaactgtttctggcaatcttcgccacctgcattgtcttgctaatcacgatgcattgggcggtgcgcatca

SEQ ID NO: 724542 - DNA, 75 bp, synthetic construct
  source 1..75: mol_type = other DNA
ggatggcgtgcgtaaattcacgccggagacggtggcgtctttacaggcggaggtcggtacactgaccaaactggt

SEQ ID NO: 724543 - DNA, 75 bp, synthetic construct
  source 1..75: mol_type = other DNA
cgccgcctgctgggtgtaaatgatgatgttgaggcaatgacccgcgacatgattctgcaatggctggcggggtga

SEQ ID NO: 724544 - DNA, 75 bp, synthetic construct
  source 1..75: mol_type = other DNA
tgcgtgatcgcgtcagtcgcaaaggaccggaggtccgttacgcagagcgccgcctgctgggtgtaaatgatgatg

SEQ ID NO: 724545 - DNA, 75 bp, synthetic construct
  source 1..75: mol_type = other DNA
atgatgcgccagctggcgcaggaactgcgccggacacagcagcagaacatcaggatgcaacgcaatcctgatggc

SEQ ID NO: 724546 - DNA, 75 bp, synthetic construct
  source 1..75: mol_type = other DNA
actggctgagtgctttgttggcgaatctggaaccagccgcaagaagccgcatgatgcggcagctggcgcaggaac

SEQ ID NO: 724547 - DNA, 75 bp, synthetic construct
  source 1..75: mol_type = other DNA
tgcgcgatcgcatcagtcgcaaaggacctgaggtccgttacgcagaacgtcgccttctgggtgtaaatgatgatg

SEQ ID NO: 724548 - DNA, 75 bp, synthetic construct
  source 1..75: mol_type = other DNA
gccggaggtgttatacgctcaaagacaactgctaggggttagtcaagatgtagagtctttgacccgaagtatttt

SEQ ID NO: 724549 - DNA, 75 bp, synthetic construct
  source 1..75: mol_type = other DNA
gccagaaatacgttatacagagcgacgtctattaggcttctgcactgagagtaacgatgctattagtataatttt

SEQ ID NO: 724550 - DNA, 75 bp, synthetic construct
  source 1..75: mol_type = other DNA
atggcagcgcttgtggtaacctggtttaatccggtgaaagaggcgttttacatgcatctgctagcagccggaaaa

SEQ ID NO: 724551 - DNA, 75 bp, synthetic construct
  source 1..75: mol_type = other DNA
actggttgagtgccttgctggcgaatctggagccagccgcaagaagccgtatgatgcgccagctggcgcaagaac

SEQ ID NO: 724552 - DNA, 75 bp, synthetic construct
  source 1..75: mol_type = other DNA
attgcccgcgttcaccattacggcctgcgtgatcgcgttagtcgcaaaggacctgaggtccgttacgcagagcgt

SEQ ID NO: 724553 - DNA, 75 bp, synthetic construct
  source 1..75: mol_type = other DNA
caggatgcagcgcaaccctgatggcagcagctatgaacctcgacgggtaacagcacgcagtaaaaaggggcgcat

SEQ ID NO: 724554 - DNA, 75 bp, synthetic construct
  source 1..75: mol_type = other DNA
gtggctgaactgcaaaaagtggacgactggttgagtgccttgctggcgaatctggagccagccgccagaagccgc

SEQ ID NO: 724555 - DNA, 75 bp, synthetic construct
  source 1..75: mol_type = other DNA
attgcccgtgttcatcactacggcttacgtgatcgcgtcagccgcaaaggaccggaggcccgttacgcagagcgt

SEQ ID NO: 724556 - DNA, 75 bp, synthetic construct
  source 1..75: mol_type = other DNA
accggaggtacggtacgcagagcggcagttgttggggagcaacgatgagttagaggccatcactcatgatatttt

SEQ ID NO: 724557 - DNA, 75 bp, synthetic construct
  source 1..75: mol_type = other DNA
acctgaggtccgttatgcagagcggaaattgttaggaagcaacaaagatgttttagatttcaccaaggatatatt

SEQ ID NO: 724558 - DNA, 75 bp, synthetic construct
  source 1..75: mol_type = other DNA
tgcgcgatcgcgtcagtcgcaaaggacctgaggtccgttacgcagagcgtcgccttctgggtgtaaatgatgatg

SEQ ID NO: 724559 - DNA, 75 bp, synthetic construct
  source 1..75: mol_type = other DNA
accggctacgagccgcgaaaagtcacggcacggactaaaaaggggcgtattaagcgacagatgttttcgaaattg

SEQ ID NO: 724560 - DNA, 75 bp, synthetic construct
  source 1..75: mol_type = other DNA
cccggcgtggcgcgaattcacgaaggggcatggtacgatccagataaaggcggcgagcctggtgcgctgtgcaaa

SEQ ID NO: 724561 - DNA, 75 bp, synthetic construct
  source 1..75: mol_type = other DNA
acacaaaaataagtgttcacatatgttatgaagggttgtttcctgaagttctatcacagaactccaatatatcag

SEQ ID NO: 724562 - DNA, 75 bp, synthetic construct
  source 1..75: mol_type = other DNA
cattagataatactatgtatagtacatcacaaaagaaattaaatgttgttgttgttcaggttggactttatcttg

SEQ ID NO: 724563 - DNA, 75 bp, synthetic construct
  source 1..75: mol_type = other DNA
accggtctgaatgaatcatcagtaatatcagaggaaacttataatgacagaaaacaaaaagaatcaggaattcaa

SEQ ID NO: 724564 - DNA, 75 bp, synthetic construct
  source 1..75: mol_type = other DNA
gtggtgttactcattgccggaatatccggcatcgcgacgggaataatcgtcagcctgaatatcccctttatccgt

SEQ ID NO: 724565 - DNA, 75 bp, synthetic construct
  source 1..75: mol_type = other DNA
tttttgtgggggcaattgtgggatggatttcggtgtctgaaatatattacagccgcatgaccggtctgaatgaat

SEQ ID NO: 724566 - DNA, 75 bp, synthetic construct
  source 1..75: mol_type = other DNA
atattaatatgcgactgttttttgcaatggcaatcattgtctatggttacggctatataattatttgtattttta

SEQ ID NO: 724567 - DNA, 75 bp, synthetic construct
  source 1..75: mol_type = other DNA
agttttttattttctttcatgtcgtttaatgatgacaatatgtggggcggttctcctgatttgacgctatcagta

SEQ ID NO: 724568 - DNA, 75 bp, synthetic construct
  source 1..75: mol_type = other DNA
aatgggttttctctggtattggcgtttatgccatatcacttatagtattagccatcacagcattaatatttagaa

SEQ ID NO: 724569 - DNA, 75 bp, synthetic construct
  source 1..75: mol_type = other DNA
gccattaccgtcattagatatatcaattttaaacctatttgtcttgaatttaattccagccatttttttttcgtt

SEQ ID NO: 724570 - DNA, 75 bp, synthetic construct
  source 1..75: mol_type = other DNA
aagaaaaagatgggcgaggcttttttttactatttttttatactctatcattttctctggaatatatttttctgg

SEQ ID NO: 724571 - DNA, 75 bp, synthetic construct
  source 1..75: mol_type = other DNA
attaatggaagcatattatcgaaattctctgtttcgccgaatacccctcttattaatattcaaaattatggtgga

SEQ ID NO: 724572 - DNA, 75 bp, synthetic construct
  source 1..75: mol_type = other DNA
gtctgaaatatattacagccgcatgaccggtctgaatgaatcatcagtaatatcagaggaaacttataatgacag

SEQ ID NO: 724573 - DNA, 75 bp, synthetic construct
  source 1..75: mol_type = other DNA
gcacctggcgaccgtgcgatcaggtggaagcggcggtgggctggaagctggcggttgagcgccacaacggaccga

SEQ ID NO: 724574 - DNA, 75 bp, synthetic construct
  source 1..75: mol_type = other DNA
ctgggatgcccgcgaaaaaggcgaaaaagcgcagcagagctggaatgagaagtttgccgcgtataaaaaggccca

SEQ ID NO: 724575 - DNA, 75 bp, synthetic construct
  source 1..75: mol_type = other DNA
ctgaccggttacgacctgccgctggaagaactgaagaacttccgtcagttgcattcgaaaacccctggtcacccg

SEQ ID NO: 724576 - DNA, 75 bp, synthetic construct
  source 1..75: mol_type = other DNA
gctttatattagcaaatattccaaacgagaaaatagttgagatagctgctaacgctttacaggttcccgttccat

SEQ ID NO: 724577 - DNA, 75 bp, synthetic construct
  source 1..75: mol_type = other DNA
cttttaccacttttcttttgggtattatactagcgccatacgttgagtctagaaaggaaaaagaaaagataaaaa

SEQ ID NO: 724578 - DNA, 75 bp, synthetic construct
  source 1..75: mol_type = other DNA
accggtcgcatttcaggcagtggactcgcgtttaatcgcagaacgccgtgatgatggctcatggtggaccgtcga

SEQ ID NO: 724579 - DNA, 75 bp, synthetic construct
  source 1..75: mol_type = other DNA
gcaaaacgttttgaagcctatcactggcatgtgatccatgaaatcgacggtcacgatccgcaggcggtgaaggaa

SEQ ID NO: 724580 - DNA, 75 bp, synthetic construct
  source 1..75: mol_type = other DNA
gtgcgatcaggtggaagcggcggtgggctggaagctggcggttgagcgccacaacgggccgacagcactgatcct

SEQ ID NO: 724581 - DNA, 75 bp, synthetic construct
  source 1..75: mol_type = other DNA
cgattcgcgcactcagtatggatgcggtacaaaaagccaattctggtcatcccggcgcgccgatgggcatggctg

SEQ ID NO: 724582 - DNA, 75 bp, synthetic construct
  source 1..75: mol_type = other DNA
cgccgcgcggatggcggcactgatgaaagcgcggcagattatggtttatacccacgactcaattggtctgggcga

SEQ ID NO: 724583 - DNA, 75 bp, synthetic construct
  source 1..75: mol_type = other DNA
agattgctcgtggcggttatgtgttgaaagacagcggcggcaagccggatattatcttgattgctaccggttcag

SEQ ID NO: 724584 - DNA, 75 bp, synthetic construct
  source 1..75: mol_type = other DNA
gctctacagtttgctgcatctgaccggttacgacctgccgctggaagagctgaagaactttcgtcagttgcattc

SEQ ID NO: 724585 - DNA, 75 bp, synthetic construct
  source 1..75: mol_type = other DNA
gtaagtgcaactttcaatttaaacggcctgtcaaacgcgctaaaaccacttcaagctgcttgtaactggaaatag

SEQ ID NO: 724586 - DNA, 75 bp, synthetic construct
  source 1..75: mol_type = other DNA
gctgaaaggctggcagcggtcagcaggtgctaaggcagaattggcactggcggagaaactggggcatgcggttat

SEQ ID NO: 724587 - DNA, 75 bp, synthetic construct
  source 1..75: mol_type = other DNA
gtgaggatttatatcgccggtccgatgacgggatatgaaaattttaaccgcgaggcatttcacaaggcggcagag

SEQ ID NO: 724588 - DNA, 75 bp, synthetic construct
  source 1..75: mol_type = other DNA
aaaattggtacgcatagaaatacaactagccgaaggatttattgatggttgcctttcaatgttggattttaacct

SEQ ID NO: 724589 - DNA, 75 bp, synthetic construct
  source 1..75: mol_type = other DNA
ttaattattgaggggtgtttagctcgacttcaaaaacgaaagccctatgaacattctctcttagttgcacactat

SEQ ID NO: 724590 - DNA, 75 bp, synthetic construct
  source 1..75: mol_type = other DNA
gtaagtgcaactttcaatttaaacggcctgtcaaccacgctaaaaccgcttcaagaagcctgtaactggaaatag

SEQ ID NO: 724591 - DNA, 75 bp, synthetic construct
  source 1..75: mol_type = other DNA
agaagcaaattgtgcaatgatcggcggttcgctttctgttgcccgtcaactggatggtacggcgattgggatgtg

SEQ ID NO: 724592 - DNA, 75 bp, synthetic construct
  source 1..75: mol_type = other DNA
aggtcttgtgattgtggccgaaacagttcttttattatggtctgtgattgcgtgtatttttatgatttattgtga

SEQ ID NO: 724593 - DNA, 75 bp, synthetic construct
  source 1..75: mol_type = other DNA
gtgagggtgagaatttatatcgccggtccaatgacgggatatgaaaatttcaaccgcgaggcatttcacaaggcg

SEQ ID NO: 724594 - DNA, 75 bp, synthetic construct
  source 1..75: mol_type = other DNA
gctgaaaggctggcagcggtcggcaggcgctaaggcagaactggcactggcggagaagctggggcatgcagttat

SEQ ID NO: 724595 - DNA, 75 bp, synthetic construct
  source 1..75: mol_type = other DNA
aggctggcagcggtcggcaggcgctaaggcagaactggcactggcggagaaactggggcatgcagttattttcca

SEQ ID NO: 724596 - DNA, 75 bp, synthetic construct
  source 1..75: mol_type = other DNA
gtgagggtgagaatttatatcgccggtccgatgacgggatatgaaaatttcaaccgcgaggcatttcacaaggca

SEQ ID NO: 724597 - DNA, 75 bp, synthetic construct
  source 1..75: mol_type = other DNA
gcctcgtcgtcccacatattgcccgcttgttgactggtcacaaccatcagcaactattgcctgtggcgatgtcta

SEQ ID NO: 724598 - DNA, 75 bp, synthetic construct
  source 1..75: mol_type = other DNA
cagcaaggggtaaaactggaaggcgcatccagtaacttcatctcgccgcaaccgggcaacatctatattcctctc

SEQ ID NO: 724599 - DNA, 75 bp, synthetic construct
  source 1..75: mol_type = other DNA
ccgctggcgcacacggttgtgctgctcaatagcggaggcgacaccacccaggctgccgctattttaagtggttta

SEQ ID NO: 724600 - DNA, 75 bp, synthetic construct
  source 1..75: mol_type = other DNA
aacgacatgcgtcagatgatacaggataaccgtctgcggctgatgcaactggcagggtcaggtgcgcgctttacc

SEQ ID NO: 724601 - DNA, 75 bp, synthetic construct
  source 1..75: mol_type = other DNA
tttcttgttgcagtttttaggcggtatcgcagtgatgggtttaactatcgcctggtacatgggtgcagatgtcag

SEQ ID NO: 724602 - DNA, 75 bp, synthetic construct
  source 1..75: mol_type = other DNA
tcattcaaccgatgttgcaaatgatgccgtttattctgacaaaaagaaaatatccaggttcttttatctgctgac

SEQ ID NO: 724603 - DNA, 75 bp, synthetic construct
  source 1..75: mol_type = other DNA
aacgctggggggcatgggcggcaagtggtaacaccggggtggactattctccgatcgctgccggattcaaaggcc

SEQ ID NO: 724604 - DNA, 75 bp, synthetic construct
  source 1..75: mol_type = other DNA
acaatctgacattacgcgataaagacggcttaattctcgctgggttaagtcatgcagtcagcggtaagggcagca

SEQ ID NO: 724605 - DNA, 75 bp, synthetic construct
  source 1..75: mol_type = other DNA
cgcgtaatggcgggcaggggagtttccgcctgccagaaaatgccgttgccggaggttatgagttacgtcttgctt

SEQ ID NO: 724606 - DNA, 75 bp, synthetic construct
  source 1..75: mol_type = other DNA
tgctgcaccgatcattctcataggctccttgcccctgttttttctccgctggcgcatgaatttactcacgctttc

SEQ ID NO: 724607 - DNA, 75 bp, synthetic construct
  source 1..75: mol_type = other DNA
agaatgtgactcaggcgttacccgaattacagctcggcaatgccatcattaaaccttcccgttacgtgcaaaaca

SEQ ID NO: 724608 - DNA, 75 bp, synthetic construct
  source 1..75: mol_type = other DNA
ctccactggcagatgcggtggcaaacgtcttaaccatgacgttgctgaaaaaagcgcagttgaagtccacggtga

SEQ ID NO: 724609 - DNA, 75 bp, synthetic construct
  source 1..75: mol_type = other DNA
ccactatggcaggcaaaaccggtcgagccgcagcaaggggtaaaactggaaggcgcatccagcaatttcatctcg

SEQ ID NO: 724610 - DNA, 75 bp, synthetic construct
  source 1..75: mol_type = other DNA
aaagatttaccgccttactttgtgcccttgggctaatttccatcgtggcgatttatcccagccagacggttaatt

SEQ ID NO: 724611 - DNA, 75 bp, synthetic construct
  source 1..75: mol_type = other DNA
tgtaagccgggagcctgggctgaacaacctggagcgtgtccaacaacgtacgagttatacgaaggtgacgctacc

SEQ ID NO: 724612 - DNA, 75 bp, synthetic construct
  source 1..75: mol_type = other DNA
aggcggctatatggatggccctggtggaggtatcacgccagtaaatattaacggtacagtctggctccagggtga

SEQ ID NO: 724613 - DNA, 75 bp, synthetic construct
  source 1..75: mol_type = other DNA
tgtggtgtgggagacggtacaggaatggctgccggcgttgctccagcaattgcccgccgtgcgtcaggatgccga

SEQ ID NO: 724614 - DNA, 75 bp, synthetic construct
  source 1..75: mol_type = other DNA
tcgcatctgtaatgattacattgttaatgaacaacacgcggtttctgcctgcctcggctatcacggttatccgaa

SEQ ID NO: 724615 - DNA, 75 bp, synthetic construct
  source 1..75: mol_type = other DNA
taagcggggaaatgacggacaaccgccgtggtttgaacatgaccagatgactgttgctgcgaaaatcctgctgcg

SEQ ID NO: 724616 - DNA, 75 bp, synthetic construct
  source 1..75: mol_type = other DNA
agatggcatcaatggtccggtggattttaatgtgtttaatggcacggggatgagttgcaggcattcgttgatggg

SEQ ID NO: 724617 - DNA, 75 bp, synthetic construct
  source 1..75: mol_type = other DNA
acgaagaggcgtttaacgaagcctttatgatgcataccaccacctcgcccagttatcccattgttgcttcggttg

SEQ ID NO: 724618 - DNA, 75 bp, synthetic construct
  source 1..75: mol_type = other DNA
ctaccagggtaaaagtggtatgagcggcgagcgtgttgcgggaaaagtgatcttcgaaacgcagtcgacccacaa

SEQ ID NO: 724619 - DNA, 75 bp, synthetic construct
  source 1..75: mol_type = other DNA
accttcaatgcgagggttgtgggcgtttctgacggtgatacagtcacggttttgactgaacgagactgtgactca

SEQ ID NO: 724620 - DNA, 75 bp, synthetic construct
  source 1..75: mol_type = other DNA
aaaagtgatcttcgaaacgcagtcgacccacaaaatgctggcggcgttatcgcaggcgtcgctgatccacattaa

SEQ ID NO: 724621 - DNA, 75 bp, synthetic construct
  source 1..75: mol_type = other DNA
tgggatcgtagtagagaaaaccggcccttataacctgctgtttctctttagtattggcatcgataaaaccaaagc

SEQ ID NO: 724622 - DNA, 75 bp, synthetic construct
  source 1..75: mol_type = other DNA
ccggcagtacgctgttgattgaccgcaattgtcataaatcgctggcgcatctgttgatgatgaacgatgtagtgc

SEQ ID NO: 724623 - DNA, 75 bp, synthetic construct
  source 1..75: mol_type = other DNA
gcctcggctatcacggttatccgaaatccgtttgcatctctattaatgaagtggtgtgccacggtatcccggacg

SEQ ID NO: 724624 - DNA, 75 bp, synthetic construct
  source 1..75: mol_type = other DNA
ggagttacaggcagatatgtctactatttgattccatcatgcgagactacccgataaactctttcatgatgtggg

SEQ ID NO: 724625 - DNA, 75 bp, synthetic construct
  source 1..75: mol_type = other DNA
gcaaagactactgaatcgggtatttcttacaacaaaaatagattcatcaccatccacaatggatacggatgaaga

SEQ ID NO: 724626 - DNA, 75 bp, synthetic construct
  source 1..75: mol_type = other DNA
accggagaacctcagcttttatgaaaatccggaacactgggacaccataccgaatcttcatttactgaatcattc

SEQ ID NO: 724627 - DNA, 75 bp, synthetic construct
  source 1..75: mol_type = other DNA
gctgaaaggctggcagcggtcagcaggtgctaaggcagaattggcactggcggagaagctggggcatgcagttat

SEQ ID NO: 724628 - DNA, 75 bp, synthetic construct
  source 1..75: mol_type = other DNA
tcaatgaatacccgtggtgggtggcccattattatcaacgacgcccggacaatgacggccaggcctggcatttct

SEQ ID NO: 724629 - DNA, 75 bp, synthetic construct
  source 1..75: mol_type = other DNA
ctttatacaaaaataagaactgagaacatcatccactacttcaatgagagtagccaggatattgaccatgtgctg

SEQ ID NO: 724630 - DNA, 75 bp, synthetic construct
  source 1..75: mol_type = other DNA
ggaacgttgtgcggagcggggatatcgctaataaaaacgctggccgatccttatacccagttaccgtcaattacc

SEQ ID NO: 724631 - DNA, 75 bp, synthetic construct
  source 1..75: mol_type = other DNA
taatgacctatatgcgggcgactggtaaaagctgggagcagactatgtcggacgctcaaaaatcaaacctgctaa

SEQ ID NO: 724632 - DNA, 75 bp, synthetic construct
  source 1..75: mol_type = other DNA
aaagatcgcagcttgtctgcacaatacgagcatactattgtggtgactgataacggctgcgaaattctgacgcta

SEQ ID NO: 724633 - DNA, 75 bp, synthetic construct
  source 1..75: mol_type = other DNA
tgctggatttcatgatttcaaggcggtgattgatggtcagcaacgtctcacatcattatatattggattgtgtgg

SEQ ID NO: 724634 - DNA, 75 bp, synthetic construct
  source 1..75: mol_type = other DNA
agccgcattccaggtgtgtcgttcggcgtatcctgacgcccgccactggctggtgctgtgcggtcatggtaataa

SEQ ID NO: 724635 - DNA, 75 bp, synthetic construct
  source 1..75: mol_type = other DNA
gctttgccggtggtgagattggaccgtcgttgtacggtcgtatcgacatggcgaagtaccaggtggcattgcgca

SEQ ID NO: 724636 - DNA, 75 bp, synthetic construct
  source 1..75: mol_type = other DNA
ttgagttcaccgacggcacgcgctttgaagaagtggtggtggagtacccaattggtcatgctcgccgccgtcagg

SEQ ID NO: 724637 - DNA, 75 bp, synthetic construct
  source 1..75: mol_type = other DNA
ggcgatgccacttcccgcgcggtacgtctggcgctgatggcgaaaacgggcgaaatgggttacccgtcagccctg

SEQ ID NO: 724638 - DNA, 75 bp, synthetic construct
  source 1..75: mol_type = other DNA
tgaagaagtggtggtggagtacccgattggtcatgcccgtcgccgtcaggatggcattccgaaactggtcgataa

SEQ ID NO: 724639 - DNA, 75 bp, synthetic construct
  source 1..75: mol_type = other DNA
agccttcacgaagacttttcgtcggtcattcagtcacgacgcgcctggtttagcgccgtgggaggccaacagtga

SEQ ID NO: 724640 - DNA, 75 bp, synthetic construct
  source 1..75: mol_type = other DNA
gcggcaaagcgccattgaccatgaagcacgtgctgaccgcaatgatcaaagcccacgaaattcagggctgcatcg

SEQ ID NO: 724641 - DNA, 75 bp, synthetic construct
  source 1..75: mol_type = other DNA
cagcaggcaaaacggcggcagatatcgaaaaagtgaccattcgcacccacgaagcctgtattcgcatcatcgaca

SEQ ID NO: 724642 - DNA, 75 bp, synthetic construct
  source 1..75: mol_type = other DNA
agctgacggagcgtgtgctggtcagcactgacggcagagtgtcaagagttgaagcggtgccggagccggacgaac

SEQ ID NO: 724643 - DNA, 75 bp, synthetic construct
  source 1..75: mol_type = other DNA
tggttgccaccggggccagctccatgtcatgggagtaccgctacaccctgaacgtggtgattgaagatttcagcg

SEQ ID NO: 724644 - DNA, 75 bp, synthetic construct
  source 1..75: mol_type = other DNA
attcactgctgatcattggcgcactgattgccatcggcaatgtgctgaccagtaatgaccccataacgccgcgcc

SEQ ID NO: 724645 - DNA, 75 bp, synthetic construct
  source 1..75: mol_type = other DNA
tcgcatcatcgacaaaaaaggaccgctcaataacccggcagaccgcgatcactgcattcagtacatggtggcgat

SEQ ID NO: 724646 - DNA, 75 bp, synthetic construct
  source 1..75: mol_type = other DNA
catatgaccttgctttatttaatggatcctgcacaacgcgcgacggctcagcatggtgaggaagaaatggccggg

SEQ ID NO: 724647 - DNA, 75 bp, synthetic construct
  source 1..75: mol_type = other DNA
cagtccgatgcaatcaataacccggtgttacgggaaaagttattcacctttgaggtggatattttgcgcaacgat

SEQ ID NO: 724648 - DNA, 75 bp, synthetic construct
  source 1..75: mol_type = other DNA
ggtagcaggctgggtggctgaaaaccagaccgcgctgctctacctgatgacccgtgaacaacgggcggtcaggca

SEQ ID NO: 724649 - DNA, 75 bp, synthetic construct
  source 1..75: mol_type = other DNA
ctatcgcggcttcacattcccgttgtggggatttctcgccaataccgacatctcttacgatccgcagcagattga

SEQ ID NO: 724650 - DNA, 75 bp, synthetic construct
  source 1..75: mol_type = other DNA
aaccccgaatcaccctggcgtgactggtactcgtttagtgatgatggcacggcgctcgactggctgggctatgcc

SEQ ID NO: 724651 - DNA, 75 bp, synthetic construct
  source 1..75: mol_type = other DNA
gggggaagcgggtggggcgcgcaataatttgcagcacgttgctgggatcaccgaagcggcgaaagaaacccagcc

SEQ ID NO: 724652 - DNA, 75 bp, synthetic construct
  source 1..75: mol_type = other DNA
acgatccgttttgccgtaaaccgttcccctggcaggtggaaaagcaggatacggcgttattcgcgctgtaccagc

SEQ ID NO: 724653 - DNA, 75 bp, synthetic construct
  source 1..75: mol_type = other DNA
tttggtgatgcgcggcagtggttgcaggcagatgtggaagatgccgccatgaactaccgtggctttacattcccg

SEQ ID NO: 724654 - DNA, 75 bp, synthetic construct
  source 1..75: mol_type = other DNA
cggtgtccccgtttgttaagcaaagcaaagatcaactgcttattacactgtggttgacaggcgaagagccgccac

SEQ ID NO: 724655 - DNA, 75 bp, synthetic construct
  source 1..75: mol_type = other DNA
catttgatggaggattataatttatggctaagagtaattgctgcaggttataaaagttataatattcctcaggta

SEQ ID NO: 724656 - DNA, 75 bp, synthetic construct
  source 1..75: mol_type = other DNA
atggaaaagagaaaaattattctggattgtgatccgggtcatgatgatgctattgctataatgatggcggcgaaa

SEQ ID NO: 724657 - DNA, 75 bp, synthetic construct
  source 1..75: mol_type = other DNA
cgctgaatacaggtaacgcgctgctacaggcggtggatattgaagtcagccgtcacgaagacttttcgtcggtaa

SEQ ID NO: 724658 - DNA, 75 bp, synthetic construct
  source 1..75: mol_type = other DNA
cgatccgttttgccgtaaaccgttcccctggcaggtggaaaagcaggatacggcgttattcgcgctgtaccagcg

SEQ ID NO: 724659 - DNA, 75 bp, synthetic construct
  source 1..75: mol_type = other DNA
tatataatagagagtctaaacacaacttgttcgattgtcttgaaagtattaagtcaaacactataaagccagaac

SEQ ID NO: 724660 - DNA, 75 bp, synthetic construct
  source 1..75: mol_type = other DNA
cagaccgcgctgctctacctgatgacccgtgaacaacgggcggtcaggcatcagggcgagagcgatatggctgga

SEQ ID NO: 724661 - DNA, 75 bp, synthetic construct
  source 1..75: mol_type = other DNA
acggcaaattggcctgcgccatgctcgaatcggtccagatggtgtacggcgatgccagggtcgaagccgttgaat

SEQ ID NO: 724662 - DNA, 75 bp, synthetic construct
  source 1..75: mol_type = other DNA
cgcggggcgtatcactatttttccccgtcggtagctgcgccggttcaggcgcgattatttctgcaaacggtggat

SEQ ID NO: 724663 - DNA, 75 bp, synthetic construct
  source 1..75: mol_type = other DNA
accattcacggaatagatgtttcgcgctggcaggagcggatcgactggcagcgggtggcaaaaatgcgcgataac

SEQ ID NO: 724664 - DNA, 75 bp, synthetic construct
  source 1..75: mol_type = other DNA
aaataagcgagcgagtgctaacaaacaaggagcttggcgagctactccgcgcactggatgaaaaaattttcccgc

SEQ ID NO: 724665 - DNA, 75 bp, synthetic construct
  source 1..75: mol_type = other DNA
aatttgcctttattaaggcgacggaaggcgaaaagctggtggacccctatttttcgcgtaactggcaactaagcc

SEQ ID NO: 724666 - DNA, 75 bp, synthetic construct
  source 1..75: mol_type = other DNA
catcggtagcggctccagttcaggcgcgattatttctgcaaacggtagattttagtcctggcgattttcccgctg

SEQ ID NO: 724667 - DNA, 75 bp, synthetic construct
  source 1..75: mol_type = other DNA
catcacgcagctggtggagcagaacagacacacgggcttattgcttggtgaactgaaaggacaatcttcggtagc

SEQ ID NO: 724668 - DNA, 75 bp, synthetic construct
  source 1..75: mol_type = other DNA
tgaaaaaagataccacggtagcgcaatatgggcgaaatgcgcataagcggcttaaccaggaacactggacgctgc

SEQ ID NO: 724669 - DNA, 75 bp, synthetic construct
  source 1..75: mol_type = other DNA
ccgcatatcgtggagcacatcacagcgcatcagatgccaggtcagcaaaaaacctataaccattcacgctatttg

SEQ ID NO: 724670 - DNA, 75 bp, synthetic construct
  source 1..75: mol_type = other DNA
gttaacctggtatttcacttacagggccggaactggcaggcaggtatcaccggaacgcctgagactgggcaacta

SEQ ID NO: 724671 - DNA, 75 bp, synthetic construct
  source 1..75: mol_type = other DNA
gatccgcatattgtcgagcagcttacagcccaccagatgccagggatgcaacgagtctataaccactcccgctat

SEQ ID NO: 724672 - DNA, 75 bp, synthetic construct
  source 1..75: mol_type = other DNA
agacacacgggcttattgcttggtgaactgaaaggacaatcttcggtagcagagtacggaagaacagcgcacaga

SEQ ID NO: 724673 - DNA, 75 bp, synthetic construct
  source 1..75: mol_type = other DNA
agaccgttaatcgcggtgcggtcatgccaggaatgctggtcaaacgcaaagatggtacctggactgcatcagcta

SEQ ID NO: 724674 - DNA, 75 bp, synthetic construct
  source 1..75: mol_type = other DNA
aagaccagttcgtcaatatggctttcattacccatctcaccggattaaccgataaatggttctacaagctcatca

SEQ ID NO: 724675 - DNA, 75 bp, synthetic construct
  source 1..75: mol_type = other DNA
ggcggaaatctgagcgtgaaatatttaacatcagggaaattaacctggtatttcacttacagggcaggaacggga

SEQ ID NO: 724676 - DNA, 75 bp, synthetic construct
  source 1..75: mol_type = other DNA
gcagctggtggagcagaacaggcacacgggcttattgctgggggaagtgaaacaggaggccagcgtatcgcagta

SEQ ID NO: 724677 - DNA, 75 bp, synthetic construct
  source 1..75: mol_type = other DNA
cattcatatgaacgcgggggaaaaacaattatgtccgcgctgtgcaaatccagaatggacgaaggcaagtcgggc

SEQ ID NO: 724678 - DNA, 75 bp, synthetic construct
  source 1..75: mol_type = other DNA
tacaggcccgcattgatgcatcccggggagagaattccgccatggcaatgacccacaaacttaccgtaactcccg

SEQ ID NO: 724679 - DNA, 75 bp, synthetic construct
  source 1..75: mol_type = other DNA
cgacagagtgaagtcgaagcctggctgcaggcccgtattgatgcatcccggggagagaattccgccctgacaact

SEQ ID NO: 724680 - DNA, 75 bp, synthetic construct
  source 1..75: mol_type = other DNA
cgaattaaaggaaattttacgcgctatcgatggtgatgtgttcgcgccttactacagcgcgttaatgcgcttgct

SEQ ID NO: 724681 - DNA, 75 bp, synthetic construct
  source 1..75: mol_type = other DNA
catacagggttattactcggagaactgaaaaaagataccacggtagcgcaatatgggcgaaatgcgcataagcgg

SEQ ID NO: 724682 - DNA, 75 bp, synthetic construct
  source 1..75: mol_type = other DNA
aacgatgctgaacgatttaggcgtggaaccgcatgttgtggagcagcttaccgcgcaccagttgccaggaatgca

SEQ ID NO: 724683 - DNA, 75 bp, synthetic construct
  source 1..75: mol_type = other DNA
cttactacgtcgcactaatccgcctcctgattgttttcggatgccggacagtagaactgaggttatcggagatcg

SEQ ID NO: 724684 - DNA, 75 bp, synthetic construct
  source 1..75: mol_type = other DNA
cctcactggtcactgcatgacatccggcgcacctttacaaccatgctgaacgatttaggcgttgatccgcatgtc

SEQ ID NO: 724685 - DNA, 75 bp, synthetic construct
  source 1..75: mol_type = other DNA
aggctaaatcaccctcactggtcactacatgacatccggcgcacctttacaacgatgctgaacgatttaggcgtg

SEQ ID NO: 724686 - DNA, 75 bp, synthetic construct
  source 1..75: mol_type = other DNA
taagcatgaaatcagcataattcaggcgaacctttcacaggcagtttcaattgagcgactgaacggcgtgaaagt

SEQ ID NO: 724687 - DNA, 75 bp, synthetic construct
  source 1..75: mol_type = other DNA
cgcgaagcctccactgataaagacgctacgctgaatctcattgaaaaatttaagcatgaaatcagcataattcag

SEQ ID NO: 724688 - DNA, 75 bp, synthetic construct
  source 1..75: mol_type = other DNA
tggcgaagaaaaactgctccgtatttatggcaacccagcagctgggcgacgcggctaaatccggcattctggatg

SEQ ID NO: 724689 - DNA, 75 bp, synthetic construct
  source 1..75: mol_type = other DNA
tttgctatcagcgaagaagataaacgtatctaccgtgaagagttgttcccgtactgggaaaaacgttcgatgaaa

SEQ ID NO: 724690 - DNA, 75 bp, synthetic construct
  source 1..75: mol_type = other DNA
ccgatctgaatgattttgccaccatcaatgaagtctataagcagttcttcgatgagcatcaggcgacctacccga

SEQ ID NO: 724691 - DNA, 75 bp, synthetic construct
  source 1..75: mol_type = other DNA
cgtgggcgatatcatcaagatgaccgtgttcatcaccgatctgaatgattttgccaccatcaatgaagtctataa

SEQ ID NO: 724692 - DNA, 75 bp, synthetic construct
  source 1..75: mol_type = other DNA
ctggcatttgtgggagctactgatcccgattcaatcgatgcagttaaacaactgtccgaaacatacggtgatggc

SEQ ID NO: 724693 - DNA, 75 bp, synthetic construct
  source 1..75: mol_type = other DNA
acgatggatcagcagctggagtacctgcagtattgcattacggggctgcaacatcctatacgtctgccaaacaat

SEQ ID NO: 724694 - DNA, 75 bp, synthetic construct
  source 1..75: mol_type = other DNA
ttattttcctcgatgctcacgaagccatttcaaagctgacggcattccgcaggaagtggaaacagaaagtacgcg

SEQ ID NO: 724695 - DNA, 75 bp, synthetic construct
  source 1..75: mol_type = other DNA
tgcgaatatcgctggtctacgcgtttcattttcctcgattctcatgaggccatatctaaactttccgcgtaccgc

SEQ ID NO: 724696 - DNA, 75 bp, synthetic construct
  source 1..75: mol_type = other DNA
ctacgctgaatctcattgaaaaatttaagcatgaaatcagcatcgtccaggcgaacctttcacaggcggtttcga

SEQ ID NO: 724697 - DNA, 75 bp, synthetic construct
  source 1..75: mol_type = other DNA
taaagcgattggcagactcggcaacggctggatgatgcacgttgatgcaatgcgtaacccggctccgtcatacag

SEQ ID NO: 724698 - DNA, 75 bp, synthetic construct
  source 1..75: mol_type = other DNA
tggcggaaacgatggcggcaaactgcacagatgcccagcgtcgcgaagagctgctgactattgcagagatccccc

SEQ ID NO: 724699 - DNA, 75 bp, synthetic construct
  source 1..75: mol_type = other DNA
gtccgcagcacgaggcgggcacgccggtgttgagtcttgagaatgtgactggcgaagggtttatgaacgtcagtt

SEQ ID NO: 724700 - DNA, 75 bp, synthetic construct
  source 1..75: mol_type = other DNA
gatatttcttttcccgccccctacccgccgaagaaattccaggctggatgagcagcgtgttaccgctgaaaatct

SEQ ID NO: 724701 - DNA, 75 bp, synthetic construct
  source 1..75: mol_type = other DNA
aatcagaaagtagttcgcgtgacttatacgtggaagctggttgacgttccgggctggattgacaaaaaagccttc

SEQ ID NO: 724702 - DNA, 75 bp, synthetic construct
  source 1..75: mol_type = other DNA
aaaagcaggtgatgttcatccggtttataaggcgctgaatacgctggattatacggtcggtacactcggcaatca

SEQ ID NO: 724703 - DNA, 75 bp, synthetic construct
  source 1..75: mol_type = other DNA
tgagtttaactacggtctggattacctgaaaaatgcgctggcaggagcgaaattcccggtgatgctgccaactta

SEQ ID NO: 724704 - DNA, 75 bp, synthetic construct
  source 1..75: mol_type = other DNA
ttatccggtggcaaccagcaaaaaatcctcattgccaaatgcctggaagcttcgccgcaagtattgattgtcgat

SEQ ID NO: 724705 - DNA, 75 bp, synthetic construct
  source 1..75: mol_type = other DNA
tggactgaaccgggaaacggtaatcagaaagttgttcgcgtgtcttatacatggaagttggcggatgttccttca

SEQ ID NO: 724706 - DNA, 75 bp, synthetic construct
  source 1..75: mol_type = other DNA
gtggattttaatgtgtttaatggcacggtggaggagttgcaggcattcgttgatgggattaaagaaacgccttaa

SEQ ID NO: 724707 - DNA, 75 bp, synthetic construct
  source 1..75: mol_type = other DNA
atgcgctcaacacgaaaattgctgaactgactgaaattcgccagaaacagcaaatacgaattctgaaagcatttt

SEQ ID NO: 724708 - DNA, 75 bp, synthetic construct
  source 1..75: mol_type = other DNA
caataacaccagcttccccatccgtcttgccaagccactacttgattcgactggcacagggacgaattcagtgat

SEQ ID NO: 724709 - DNA, 75 bp, synthetic construct
  source 1..75: mol_type = other DNA
tgattgaagataaaccattcccgctcaccttgagcattggcatcagctacgacgtgggtaaaaaccgcgattacc

SEQ ID NO: 724710 - DNA, 75 bp, synthetic construct
  source 1..75: mol_type = other DNA
gtgaaagggatgtctgaaccagaagaagccaaaattgttctggtgaaaatcaataacggttggcaagcccggtaa

SEQ ID NO: 724711 - DNA, 75 bp, synthetic construct
  source 1..75: mol_type = other DNA
tacgccgcgtatcgggaaaaactttattcaggttgtggcgattgaaggctacccgtctgaatcttatccgggcat

SEQ ID NO: 724712 - DNA, 75 bp, synthetic construct
  source 1..75: mol_type = other DNA
aagttcaggtacgtatgcctgaagaggttgaggagctggaacaacagcgtcgtatggaagccgagcgtttagcgc

SEQ ID NO: 724713 - DNA, 75 bp, synthetic construct
  source 1..75: mol_type = other DNA
gtataggagatatgcttgatggttttgcatttaacatgcatccatgggcacgtaaatatctggaaaataatatta

SEQ ID NO: 724714 - DNA, 75 bp, synthetic construct
  source 1..75: mol_type = other DNA
gcatgatgtttgtgacccgtaatatcgactggtatgcgttttcactgccgaaaatgaaagccagtaaagaagtta

SEQ ID NO: 724715 - DNA, 75 bp, synthetic construct
  source 1..75: mol_type = other DNA
tagcagcgtcgattgtggcaatttcttccattcacttactgcgcgtctttatggatgcgaaaaatgtccctgata

SEQ ID NO: 724716 - DNA, 75 bp, synthetic construct
  source 1..75: mol_type = other DNA
tgttcagtttccccgccttcgccacggaagtggtgcagtgggaaaacatcccgctgcccgtcacgctgcatgtcg

SEQ ID NO: 724717 - DNA, 75 bp, synthetic construct
  source 1..75: mol_type = other DNA
ccaggagttccgcagcgcgttaaccgttgcagatattctcgtcacgcttgttaagccgtcgtccagcttcgaacg

SEQ ID NO: 724718 - DNA, 75 bp, synthetic construct
  source 1..75: mol_type = other DNA
cttatagcacatggctgtattttaatctttcgtcacgatacactgaaatgcgtgcaatatcagactctcatagta

SEQ ID NO: 724719 - DNA, 75 bp, synthetic construct
  source 1..75: mol_type = other DNA
agctgtgtgagatggttatggaaggtcgcgctcgctttaagggcaacaaagcgatggaagagcgcattaatagta

SEQ ID NO: 724720 - DNA, 75 bp, synthetic construct
  source 1..75: mol_type = other DNA
aatataaactataatttggaaaaaatgtcccaaaccttgttcaaatcctggtttgtggattttgatccggtgatt

SEQ ID NO: 724721 - DNA, 75 bp, synthetic construct
  source 1..75: mol_type = other DNA
acctggtcggcaacagccaaaaaagacaccaccagtaagctggttgtgacgccactcggtagcctggcgttctag

SEQ ID NO: 724722 - DNA, 75 bp, synthetic construct
  source 1..75: mol_type = other DNA
tggtataacgagaaaataaatccgaaggaaaaagaaaataaaccagtacctgcagccccccgtcaggagccggac

SEQ ID NO: 724723 - DNA, 75 bp, synthetic construct
  source 1..75: mol_type = other DNA
attcgatgatatctgcaaagcaatcaccgaagacatcgctgatgatatcggtaatccactgagcaaagaggaagg

SEQ ID NO: 724724 - DNA, 75 bp, synthetic construct
  source 1..75: mol_type = other DNA
ccacgccacagaaaagcagcgattgatctcgacaagttactccgggagaacccggtgtggatacagccacttcgt

SEQ ID NO: 724725 - DNA, 75 bp, synthetic construct
  source 1..75: mol_type = other DNA
ccgcagtattactggcatcaggtatgctgatgtctactgcggtaaccgcagcacccggcgatgcaacacaatttg

SEQ ID NO: 724726 - DNA, 75 bp, synthetic construct
  source 1..75: mol_type = other DNA
gtcgcatgacccgtatcgtactgctcatcagctttatcttcttctttggccgttttatctactcgtccgtgggtg

SEQ ID NO: 724727 - DNA, 75 bp, synthetic construct
  source 1..75: mol_type = other DNA
actgtggcaggcagtggtgaattacgtctgaacagcatgatgccggagcgttggcgggtgtcactgccggtaagt

SEQ ID NO: 724728 - DNA, 75 bp, synthetic construct
  source 1..75: mol_type = other DNA
acgtgaggggctttcaccccgggtcagttacggaacgggcggtgattttttttcacttgtctggacagcacctgg

SEQ ID NO: 724729 - DNA, 75 bp, synthetic construct
  source 1..75: mol_type = other DNA
catggcgaaagtgacgctgcctgtgaccggcgataaaaatgttcgtgcggggacattcaccttcaggatgcaggc

SEQ ID NO: 724730 - DNA, 75 bp, synthetic construct
  source 1..75: mol_type = other DNA
gtcattttacgtttcgtatgcaggcggcagggcttatgcggcatgtaagtaacggtcaggttacttataccagta

SEQ ID NO: 724731 - DNA, 75 bp, synthetic construct
  source 1..75: mol_type = other DNA
aaattattgtcgtttgcgcactgatatttttcccgctgggctatctggcgcggcactctttgcgacgcattcgcg

SEQ ID NO: 724732 - DNA, 75 bp, synthetic construct
  source 1..75: mol_type = other DNA
gctggacgtctccgccagcaagggcgagcacatcctggagccgatgcgcattgtccgcgaagagaaaaaaacgcc

SEQ ID NO: 724733 - DNA, 75 bp, synthetic construct
  source 1..75: mol_type = other DNA
gctggacgtctccgccagcaagggtgagcacatccaggagccgatgcgcattgtccgcgaagagaagaaaacgcc

SEQ ID NO: 724734 - DNA, 75 bp, synthetic construct
  source 1..75: mol_type = other DNA
accggagataataacgtccgggcaggcacatttgttttcagaatgcagactgcaggggtgttgcgccatgtgaag

SEQ ID NO: 724735 - DNA, 75 bp, synthetic construct
  source 1..75: mol_type = other DNA
ctgttgcccggtgataagatgaaacccccatcggtcccatctcaccagattgttgacgataattttactgccaat

SEQ ID NO: 724736 - DNA, 75 bp, synthetic construct
  source 1..75: mol_type = other DNA
acactttgcgtttgttatttgctaaacctcgttatgtaaaaccggccggtacattacgccgtgcggaaaaagcca

SEQ ID NO: 724737 - DNA, 75 bp, synthetic construct
  source 1..75: mol_type = other DNA
tccagatgtgttaccagtaagaagcaggtggataaaggatgtgataacaaatccaacaaccagattaatatctga

SEQ ID NO: 724738 - DNA, 75 bp, synthetic construct
  source 1..75: mol_type = other DNA
aggtttaaataatatgggtattgcgccacatattgtagagcttttacttggtcatgcattgccgggggtgatggc

SEQ ID NO: 724739 - DNA, 75 bp, synthetic construct
  source 1..75: mol_type = other DNA
ataaaaaattaagatcgcttctcggcgtaaagcgggattcagtaattaccattgcggatggtgaaggattaagca

SEQ ID NO: 724740 - DNA, 75 bp, synthetic construct
  source 1..75: mol_type = other DNA
ctgcgcttatcagcctgctgtactacattggcgtaatgggactgctaattcgtattcttggcagcattttccaga

SEQ ID NO: 724741 - DNA, 75 bp, synthetic construct
  source 1..75: mol_type = other DNA
aatgggattttaacgaatggatttggaccgttccaagaaataacagtaaaaatagtaaaaagattattagaccaa

SEQ ID NO: 724742 - DNA, 75 bp, synthetic construct
  source 1..75: mol_type = other DNA
aattgaactccaactttttactgaagaatcccgtgctcctgttactgttcgagatgcgttggaatattggttggt

SEQ ID NO: 724743 - DNA, 75 bp, synthetic construct
  source 1..75: mol_type = other DNA
agtggtatggccgattagaacttctggcgggtaatcatcaaaatgtggtgctgttacctgtatcgaatagaggtt

SEQ ID NO: 724744 - DNA, 75 bp, synthetic construct
  source 1..75: mol_type = other DNA
tgccggaatgggcgtgccgattgattatttgttagcggcttcgctgatggctattcccggcggcattctgtttgc

SEQ ID NO: 724745 - DNA, 75 bp, synthetic construct
  source 1..75: mol_type = other DNA
tggtggcattatgctctacttcccaccgggaaaatgggcagtagagcaggcggcattaggcgtgcataaagtgat

SEQ ID NO: 724746 - DNA, 75 bp, synthetic construct
  source 1..75: mol_type = other DNA
tcgcccagcttggtttacgggcgctggcagcagcaacgctttccaacctgatgagcgcgaccattgccgggttct

SEQ ID NO: 724747 - DNA, 75 bp, synthetic construct
  source 1..75: mol_type = other DNA
gtcctacagtgacgcaggaagtgcctttatttttggttcgctggtcggtcccaaaatggatgttctgtttgacgg

SEQ ID NO: 724748 - DNA, 75 bp, synthetic construct
  source 1..75: mol_type = other DNA
ctgcgctgctgctgcaaattgccattggtggcatcatgctctattttcccccgggaaaatgggcagtagagcagg

SEQ ID NO: 724749 - DNA, 75 bp, synthetic construct
  source 1..75: mol_type = other DNA
ccgcgcttatcagcttgctgtactacattggcgtaatggggctgctgatccgcattcttggcagtatttttcaga

SEQ ID NO: 724750 - DNA, 75 bp, synthetic construct
  source 1..75: mol_type = other DNA
ggggttaaacaatatgggcatagcaccgcatattgtagagttgctgctgggtcatgctctaccgggcgtcatggc

SEQ ID NO: 724751 - DNA, 75 bp, synthetic construct
  source 1..75: mol_type = other DNA
acaggctgacgcacaggagctgaaaaatgcccgcgaagaagggctggtgctggaaacggaattgtttactttcat

SEQ ID NO: 724752 - DNA, 75 bp, synthetic construct
  source 1..75: mol_type = other DNA
gaccttcagcctggtaccattgattacgaacgttaccgactgacgaaggcacaggcagatgcacaggaactgaaa

SEQ ID NO: 724753 - DNA, 75 bp, synthetic construct
  source 1..75: mol_type = other DNA
tgccgactccggcctcacctccctgctgacctacgcaaaattcgggggggcggcgctgttcatcgggggcctggt

SEQ ID NO: 724754 - DNA, 75 bp, synthetic construct
  source 1..75: mol_type = other DNA
gtttaaacatctgcatcagagcggcaaagtgcgccattttggcgtatcgaactttacgcctgcgcaatttgccct

SEQ ID NO: 724755 - DNA, 75 bp, synthetic construct
  source 1..75: mol_type = other DNA
cacgctgatatttatggtggctatcagtgcgaagcggcgtttggcgaggcgttgaaactggcgcctcatttgcgt

SEQ ID NO: 724756 - DNA, 75 bp, synthetic construct
  source 1..75: mol_type = other DNA
ggtggtcgtctgtttaatgatgattatttccagccgctgcgtgatgaactggctgtggtggcagaggagttaaac

SEQ ID NO: 724757 - DNA, 75 bp, synthetic construct
  source 1..75: mol_type = other DNA
atgatgattgccgctgcgctggcgatgccggaaatcccgctgccggtgttctgcctgatggttggcgcggcaatt

SEQ ID NO: 724758 - DNA, 75 bp, synthetic construct
  source 1..75: mol_type = other DNA
ggccgtttccggtttttctaattcggttatctggctgattttcgccgcctttatgtttggcacaggctatgaaaa

SEQ ID NO: 724759 - DNA, 75 bp, synthetic construct
  source 1..75: mol_type = other DNA
cgaattattgcaggcactggacaaaaaaatattctccccttactacgtcgcgttaatccgcctcctgattgtctt

SEQ ID NO: 724760 - DNA, 75 bp, synthetic construct
  source 1..75: mol_type = other DNA
tgccgactccggcctcacctccctgctgacctacgcaaaattcgggggcgcggcgctgttcatcgggggcctgct

SEQ ID NO: 724761 - DNA, 75 bp, synthetic construct
  source 1..75: mol_type = other DNA
cgtgctggatgccacgctcacttcgctgaacatccatttttaacccttcagtccacctttctgttttatgaggaa

SEQ ID NO: 724762 - DNA, 75 bp, synthetic construct
  source 1..75: mol_type = other DNA
ttattagctggtttggcaaactgttagcaggcagcttaagcggttattcgccgacgatggtgatggtggcgttga

SEQ ID NO: 724763 - DNA, 75 bp, synthetic construct
  source 1..75: mol_type = other DNA
acgggcgctggcagcagcaacgctttccaacctgatgagtgcgaccattgccgggttctttattggtttagcttg

SEQ ID NO: 724764 - DNA, 75 bp, synthetic construct
  source 1..75: mol_type = other DNA
tgtaaataccaatagcaatatgccagaagccacacgtctgcaccttgaaccgacgattaatctcccgttgtcgaa

SEQ ID NO: 724765 - DNA, 75 bp, synthetic construct
  source 1..75: mol_type = other DNA
attcagtacgatactcgtctggataacgtagcgaccagtaactccagcattgaataccgtcgggatgaagaccgt

SEQ ID NO: 724766 - DNA, 75 bp, synthetic construct
  source 1..75: mol_type = other DNA
tcagcgttggctatgcggtgcaaaacttcaatgccaccgtttcaaccaagcagttccaggtcttcagcgaacaga

SEQ ID NO: 724767 - DNA, 75 bp, synthetic construct
  source 1..75: mol_type = other DNA
ctttcacagaagtggtagacttcgttccttatgaagattctctgaaacaactggcgcgcgaacgctataaaagcc

SEQ ID NO: 724768 - DNA, 75 bp, synthetic construct
  source 1..75: mol_type = other DNA
cgtctggtgcagctgaactaccgttacgccagcccggaatatattcaggctacactgccaagagacagtagagat

SEQ ID NO: 724769 - DNA, 75 bp, synthetic construct
  source 1..75: mol_type = other DNA
gggattcagtacgacactcgcctggataacgtggcgaccagtagttctagtattgagtatcgccgagatgaagac

SEQ ID NO: 724770 - DNA, 75 bp, synthetic construct
  source 1..75: mol_type = other DNA
catcggtgtgatggggatcttaattcgcattctcggcggtatcttccagaaagcattaaatatcagcaagatcga

SEQ ID NO: 724771 - DNA, 75 bp, synthetic construct
  source 1..75: mol_type = other DNA
tggcggtattatgctttggcttccgcctggacgttgggttgcagaaaaggtcgcttttggtgtccataaagtgat

SEQ ID NO: 724772 - DNA, 75 bp, synthetic construct
  source 1..75: mol_type = other DNA
ggcatttgttgccatcattgcgttaattaacggtattatcggcggcgttggcggctggtttggttttgaacatgc

SEQ ID NO: 724773 - DNA, 75 bp, synthetic construct
  source 1..75: mol_type = other DNA
tgtgaataccaatagcaatatgccagaagctacgcgtctgcacctggaaccgactatcaatctcccgttgtcgaa

SEQ ID NO: 724774 - DNA, 75 bp, synthetic construct
  source 1..75: mol_type = other DNA
gggattcagtacgatacacgtctggataacgtagcgaccagtaactccagcattgaataccgtcgggatgaagac

SEQ ID NO: 724775 - DNA, 75 bp, synthetic construct
  source 1..75: mol_type = other DNA
ccagggcgttgggtcgcagaaaaagtcgcttttggcgtccataaagtgatggcgtacagcgatgcaggtagcgca

SEQ ID NO: 724776 - DNA, 75 bp, synthetic construct
  source 1..75: mol_type = other DNA
gaagacgaagtgcgtaaagaaaataacctcggtgctgatgttgcgctgcgtcaggatgaagacgttctcgacacc

SEQ ID NO: 724777 - DNA, 75 bp, synthetic construct
  source 1..75: mol_type = other DNA
ttacttggtcaaagcgtgaactatttctttgtactgggcgtgttgctggttagtagtattgccggggtgattgtg

SEQ ID NO: 724778 - DNA, 75 bp, synthetic construct
  source 1..75: mol_type = other DNA
cctcacctggctgttttttatcgcggtgattgtgttgctggtggtctacgccaaaaaagtggactgggaagaggt

SEQ ID NO: 724779 - DNA, 75 bp, synthetic construct
  source 1..75: mol_type = other DNA
gaccaacaatactcaacaactgcgggcagatgaacaacgtagcgcggaaattctcgaccgcattccagctggccg

SEQ ID NO: 724780 - DNA, 75 bp, synthetic construct
  source 1..75: mol_type = other DNA
aagagatagaaacggataccgaaggctatctcaaagaaagcagccagtggagcgaacctctggcagtggtgatag

SEQ ID NO: 724781 - DNA, 75 bp, synthetic construct
  source 1..75: mol_type = other DNA
acgaagggatttcgctgtcgccagaacactgggaagtggtgcgttttgtgcgtgatttctatctggaattcaata

SEQ ID NO: 724782 - DNA, 75 bp, synthetic construct
  source 1..75: mol_type = other DNA
tagactgggaagaggtctggaaggtcatccgcgattacaatcgcgttgcgttgctcagtgcgattgggctggtgg

SEQ ID NO: 724783 - DNA, 75 bp, synthetic construct
  source 1..75: mol_type = other DNA
gtatcccggcatggtacgacgaagcgggtaacgtttatgttggccgcaacgaagaagaagtgcgcaaggaaaata

SEQ ID NO: 724784 - DNA, 75 bp, synthetic construct
  source 1..75: mol_type = other DNA
tttgtgctgatgaacacggaaggtcaggattgcggcttcaacggcggtgaaatgacgctgtcgctggcggatcgc

SEQ ID NO: 724785 - DNA, 75 bp, synthetic construct
  source 1..75: mol_type = other DNA
aggattgcggcttcaacggcggtgaaatgacgctgtcgctggcggattgctggattctggcggagttcaaccaga

SEQ ID NO: 724786 - DNA, 75 bp, synthetic construct
  source 1..75: mol_type = other DNA
gggtaacgtttatgttggccgcaacgaagacgaagtgcgtaaagaaaataacctgagcgcggacgtcgcgctgcg

SEQ ID NO: 724787 - DNA, 75 bp, synthetic construct
  source 1..75: mol_type = other DNA
aaagcgcccaggtgttcgataccaaaggtaacgaatctgacgtttattccagcgagatcccggcagaattccaga

SEQ ID NO: 724788 - DNA, 75 bp, synthetic construct
  source 1..75: mol_type = other DNA
cgttctcgatacctggttctcctctgcgctgtggaccttctctactcttggctggccggaaaacaccgacgccct

SEQ ID NO: 724789 - DNA, 75 bp, synthetic construct
  source 1..75: mol_type = other DNA
gcaacacactttatctttccgctgacggaaactaccaggaacaagccctgcactccttccccctgtcagcctgtc

SEQ ID NO: 724790 - DNA, 75 bp, synthetic construct
  source 1..75: mol_type = other DNA
caccggcgcccgcctggttgacgcgaacaatatggcatttgcgaaattcgggtttatcggcaccccgtccatcgt

SEQ ID NO: 724791 - DNA, 75 bp, synthetic construct
  source 1..75: mol_type = other DNA
cctcgccgcctataccagaggtcttttcccgaccactattggcgcggtgctcatagcgtttgttatttggcttat

SEQ ID NO: 724792 - DNA, 75 bp, synthetic construct
  source 1..75: mol_type = other DNA
aatactacaacagcagaagaattagcctgaaattaaaaagtctgactccaattgaatatcggaatcagacctata

SEQ ID NO: 724793 - DNA, 75 bp, synthetic construct
  source 1..75: mol_type = other DNA
cgtcggtagcagcgccggttcaggcacgattatttctgcaaacggtggatttctcacaaggcgatttccctgcgg

SEQ ID NO: 724794 - DNA, 75 bp, synthetic construct
  source 1..75: mol_type = other DNA
gagccgaagggtgtccccgcccccgggagtcagaacaacagaaacgacaaaacagaaaaatgcctcacactatga

SEQ ID NO: 724795 - DNA, 75 bp, synthetic construct
  source 1..75: mol_type = other DNA
attctcagctgaaaaatagtaattatacgccgcctcttggcaccgaatctaacgcacttgcaaggaacattgatc

SEQ ID NO: 724796 - DNA, 75 bp, synthetic construct
  source 1..75: mol_type = other DNA
ctggcctgctgtcatcgatcggatttttgatgttatatgcaaggctttgcacaggtatggtggctcgcgtatttg

SEQ ID NO: 724797 - DNA, 75 bp, synthetic construct
  source 1..75: mol_type = other DNA
tatctcttttcgttgtggcgtcgccttcatattcagcggatttggggattgatggcataactgaagcggctaaac

SEQ ID NO: 724798 - DNA, 75 bp, synthetic construct
  source 1..75: mol_type = other DNA
gctttattgttctcaacgttcattacctcgccgcctatacaagaggtctttttccgaccactattggcgcggtgc

SEQ ID NO: 724799 - DNA, 75 bp, synthetic construct
  source 1..75: mol_type = other DNA
gggcataaagataaagcgtcaggacgcgcagaacgcatcacagcgaagcgattaaccgaccgtgaccgcgaggtt

SEQ ID NO: 724800 - DNA, 75 bp, synthetic construct
  source 1..75: mol_type = other DNA
gcaaaagggatgtttgaaacaaacctttgtgctttgggtgtaaatcaggggattgctcaaatggaggcttctggc

SEQ ID NO: 724801 - DNA, 75 bp, synthetic construct
  source 1..75: mol_type = other DNA
tacagattatgtactggcgctggatgataatggctatacggtcattaccgctattagcggaggaaaagttactga

SEQ ID NO: 724802 - DNA, 75 bp, synthetic construct
  source 1..75: mol_type = other DNA
gtctactgctttatggtggcgtggaacgactatctgtttgcgtcgattttcctctccagcgccagcaatttcacc

SEQ ID NO: 724803 - DNA, 75 bp, synthetic construct
  source 1..75: mol_type = other DNA
tttcccgtttgtcgactacttccgtaacagcatggtggtgtcggtggtttcatccgtggtggcggtatttctcgg

SEQ ID NO: 724804 - DNA, 75 bp, synthetic construct
  source 1..75: mol_type = other DNA
gtcaggcgctggagtctgccaacggacgcagcattattgtgcgcactatggacattggcggcgacaaacccgttg

SEQ ID NO: 724805 - DNA, 75 bp, synthetic construct
  source 1..75: mol_type = other DNA
tatcgtcatgccgccgaactacactggtccgcaacgctggcagaaattgaacgggtaaagcgcatctaccaggca

SEQ ID NO: 724806 - DNA, 75 bp, synthetic construct
  source 1..75: mol_type = other DNA
gcggtgaagcgttacaaaacctcggaaatgctgcggtttatttttgccaccatagcatatgaccctgacccggat

SEQ ID NO: 724807 - DNA, 75 bp, synthetic construct
  source 1..75: mol_type = other DNA
cattctcggggcttacgcgctttcccgcctgcgctttaaagggcgaatgaccatcaacgccagcttttacacggt

SEQ ID NO: 724808 - DNA, 75 bp, synthetic construct
  source 1..75: mol_type = other DNA
cgacgtctgcttccagttactccagcaaatttatggcgaacaacgcttccctgcccccggaaaactgacgcaacc

SEQ ID NO: 724809 - DNA, 75 bp, synthetic construct
  source 1..75: mol_type = other DNA
gttaacacccgcgtcggcatgacattcgcccgtggcctgcgcgcgattttgcgtcaggacccggatgtggtgatg

SEQ ID NO: 724810 - DNA, 75 bp, synthetic construct
  source 1..75: mol_type = other DNA
tgtatccccgcttcaagttagttcctggacaagtgattgcacctggatttagttctgatagtgaagttggtcagc

SEQ ID NO: 724811 - DNA, 75 bp, synthetic construct
  source 1..75: mol_type = other DNA
attcctgcgggcgcttgattacgccgttcaggcagtgcatcgccagggtaaatggatcggcctgtgcggagaact

SEQ ID NO: 724812 - DNA, 75 bp, synthetic construct
  source 1..75: mol_type = other DNA
gcaacgctggggcgattgtggttgagccaggggaagccgtagcccgttattatcagcaagaagcccgcgtacagg

SEQ ID NO: 724813 - DNA, 75 bp, synthetic construct
  source 1..75: mol_type = other DNA
ttactggctggcgtgagcgagggattaagctgcgccgaagcaattgttaccagtgcaaatcacttctgcgaagag

SEQ ID NO: 724814 - DNA, 75 bp, synthetic construct
  source 1..75: mol_type = other DNA
tgattagtgggctgataaagcagcgtgagtcatggcaaccagccagacagagagcgcataagaagcccgtagcaa

SEQ ID NO: 724815 - DNA, 75 bp, synthetic construct
  source 1..75: mol_type = other DNA
tggcgtgagcaacggcagtggcgtccttctgcgacccttgtttcgctcaccggaagaggctatgagttttccaag

SEQ ID NO: 724816 - DNA, 75 bp, synthetic construct
  source 1..75: mol_type = other DNA
tggcgtgagcaacggtagcggcgttcttctgcgacccttgtttctctcgccagaagaggctatgagttttccaag

SEQ ID NO: 724817 - DNA, 75 bp, synthetic construct
  source 1..75: mol_type = other DNA
agccgtatcaatgcccgtttgccctatatcttcctgctgtcccgcattgctcactacctgaaaattattcagcgc

SEQ ID NO: 724818 - DNA, 75 bp, synthetic construct
  source 1..75: mol_type = other DNA
acgcgctggcgggccgtgaagcagcaatcgtaaccgatatcgccggaaccacgcgtgacgtgctgcgtgagcata

SEQ ID NO: 724819 - DNA, 75 bp, synthetic construct
  source 1..75: mol_type = other DNA
agcgagatcaccggggaatttacttcagacgacctactggggcggattttctccagtttctgtatcggtaagtaa

SEQ ID NO: 724820 - DNA, 75 bp, synthetic construct
  source 1..75: mol_type = other DNA
atatgccgtttattggttcagttggcccggcgttcttccagaaagaaaccatggaagaggtggctgccatcaagg

SEQ ID NO: 724821 - DNA, 75 bp, synthetic construct
  source 1..75: mol_type = other DNA
gatttcaccctgtttggcgcgtcgccggaaagttcgctcaagtatgacgccaccagccgccagattgagatctac

SEQ ID NO: 724822 - DNA, 75 bp, synthetic construct
  source 1..75: mol_type = other DNA
gcaactgaccgaagccgcgccgccgctgccggtggtttccgtgccgcatatgcgttgtgaatgtaatcagagcga

SEQ ID NO: 724823 - DNA, 75 bp, synthetic construct
  source 1..75: mol_type = other DNA
cgtcgtgccgatggttcactggacagagacctcgacagccgcatcgaactggaaatgcgtaccgatcataaagag

SEQ ID NO: 724824 - DNA, 75 bp, synthetic construct
  source 1..75: mol_type = other DNA
cctgtagcctcattaatatccagctatgaatttgataacagcccgcaggatattgccctgctgcgtaatatttcc

SEQ ID NO: 724825 - DNA, 75 bp, synthetic construct
  source 1..75: mol_type = other DNA
tccctgttcgataaaattaatttaaccccggtctcttccattcaggaaatcgatttatggcaaaacagcgaaacg

SEQ ID NO: 724826 - DNA, 75 bp, synthetic construct
  source 1..75: mol_type = other DNA
atggaagaggtggctgctattaaggatattggcaatcactttgagcgtgccgagtacatcaagtggaatgctttc

SEQ ID NO: 724827 - DNA, 75 bp, synthetic construct
  source 1..75: mol_type = other DNA
gcggcttcctggcgcgtcgtcgccacctacaggcgctggaacaggcagcggagcatttgcagcaaggtaaagcgc

SEQ ID NO: 724828 - DNA, 75 bp, synthetic construct
  source 1..75: mol_type = other DNA
gattatctcgatttgagcgcctcagcgcgccgtagcatcgataaacattacgggatggggcgaaatgccacctgt

SEQ ID NO: 724829 - DNA, 75 bp, synthetic construct
  source 1..75: mol_type = other DNA
agcctataccctcgatgaactggctgattatctcgatttgagcgcctcagcgcgccgtagcatcgacgaaactgc

SEQ ID NO: 724830 - DNA, 75 bp, synthetic construct
  source 1..75: mol_type = other DNA
gggccggtggtattccttgcctccagtgcttcagactatgtgaatggttataccgttgctgtggatggcggctgg

SEQ ID NO: 724831 - DNA, 75 bp, synthetic construct
  source 1..75: mol_type = other DNA
aggatattattaagggtgtaattaaaactgcggctccgatcgtatacatgattttagtcgctctgttctgtatag

SEQ ID NO: 724832 - DNA, 75 bp, synthetic construct
  source 1..75: mol_type = other DNA
gaagtcgccgcgattaaagatatcggcaactactttgaccgcgcggaatatatcaaatggaagtcgttccgcgat

SEQ ID NO: 724833 - DNA, 75 bp, synthetic construct
  source 1..75: mol_type = other DNA
gatattgaggacaatccgggcttcttccgcgtcagactctttgccgtgccgcatttccagattgaagggatggat

SEQ ID NO: 724834 - DNA, 75 bp, synthetic construct
  source 1..75: mol_type = other DNA
tatccataacgcggtcgatcattcacgcacatggcggtgatctgtcggctgaacaacagggccgcactatcctct

SEQ ID NO: 724835 - DNA, 75 bp, synthetic construct
  source 1..75: mol_type = other DNA
gattatttactcaggagccgttttttatcacaccaatctggcgggctatttcaatgaatatccgtggtgggtggc

SEQ ID NO: 724836 - DNA, 75 bp, synthetic construct
  source 1..75: mol_type = other DNA
aggcagcctgacggctgcggcttgtcatggtctgcaattaccgttataaaaacaggcaatgtcattgtctttcag

SEQ ID NO: 724837 - DNA, 75 bp, synthetic construct
  source 1..75: mol_type = other DNA
cgccggattgattcgccgcgaagacgctctcgagttcagcgaaaaagactgggacgatgtcatgaacctgaatat

SEQ ID NO: 724838 - DNA, 75 bp, synthetic construct
  source 1..75: mol_type = other DNA
gaagaaaataacaccgtgtaccgcagtatctcgcggcgggttgccgtgacgccggaacagggtaaaagcaaacat

SEQ ID NO: 724839 - DNA, 75 bp, synthetic construct
  source 1..75: mol_type = other DNA
tcttaatcccgatctggctccgccggaaatctctgagaccatgcaggagttcaataacatgttcgatcgcctgga

SEQ ID NO: 724840 - DNA, 75 bp, synthetic construct
  source 1..75: mol_type = other DNA
aggttaacgttggcaccagcgagcagcacggcagcgtggatggttatctgagccacgacggttcgctggcgaagg

SEQ ID NO: 724841 - DNA, 75 bp, synthetic construct
  source 1..75: mol_type = other DNA
aaatcaacgccgaatacgttaagcattacaccaacgccagtctgctggtgcgtgatgattttgctttcgaagacg

SEQ ID NO: 724842 - DNA, 75 bp, synthetic construct
  source 1..75: mol_type = other DNA
gcgacagcggcgcttcaggggctggcggggggtaatttagcaggtgctctggccggagcttcagcaccggaactg

SEQ ID NO: 724843 - DNA, 75 bp, synthetic construct
  source 1..75: mol_type = other DNA
gacaggctggttcaactgatacagaactcgctgaatgaagaactggcgcagatcctgttccactatctgctgaac

SEQ ID NO: 724844 - DNA, 75 bp, synthetic construct
  source 1..75: mol_type = other DNA
ggagcattaaccaacgccataaacggagatgatcctcttactggggcgattacaaatggagcgggggccgggttt

SEQ ID NO: 724845 - DNA, 75 bp, synthetic construct
  source 1..75: mol_type = other DNA
cactgatgacgggaagcggacggcgtttgtctgggattcaggtaaacggcgttacaaacgcgcccctgagaagga

SEQ ID NO: 724846 - DNA, 75 bp, synthetic construct
  source 1..75: mol_type = other DNA
ctggccgtccgctgcaatgccaaatactgtaatcgatagctggtccagtatggtgtttttgaagttcaacggggc

SEQ ID NO: 724847 - DNA, 75 bp, synthetic construct
  source 1..75: mol_type = other DNA
ttggagagaacacacttactcaaatggggaatggagcaatcaccactttacatggtgtggcggatttagccttag

SEQ ID NO: 724848 - DNA, 75 bp, synthetic construct
  source 1..75: mol_type = other DNA
gtcggtcgtgctggcaacgcgccagtatgtcgacgataaggttattgaggtgaaagcctatgccgataatctgct

SEQ ID NO: 724849 - DNA, 75 bp, synthetic construct
  source 1..75: mol_type = other DNA
ctcagttaccagccagagcaaggcacggctgtttatgtggatggtatttcttcacagggtttagacaaccgcaac

SEQ ID NO: 724850 - DNA, 75 bp, synthetic construct
  source 1..75: mol_type = other DNA
catcaactgcctgaaagtgaattttgctggcacggcaaactggctgatactgcaggcgcaagcgatgaaagtgaa

SEQ ID NO: 724851 - DNA, 75 bp, synthetic construct
  source 1..75: mol_type = other DNA
gtttgacacctcgcaggtcaaacgtgtttttgtcgtgatctcggatgcattgcgctacgaagtggcggaagagct

SEQ ID NO: 724852 - DNA, 75 bp, synthetic construct
  source 1..75: mol_type = other DNA
ggaagctggaaactgcctgcaatatgctgaatgccggaatggaccgtcagacggtgctgcagatgaccgggcttt

SEQ ID NO: 724853 - DNA, 75 bp, synthetic construct
  source 1..75: mol_type = other DNA
aattaatggtgaagagatcgttgatacgaatatttaccatgttgcaacaacgactttccttgcactggggggcga

SEQ ID NO: 724854 - DNA, 75 bp, synthetic construct
  source 1..75: mol_type = other DNA
ggtacgccaaccgggccgtttatcatgcagccggaagggatgggacgcctgtttgccatcaacaaaatggcggaa

SEQ ID NO: 724855 - DNA, 75 bp, synthetic construct
  source 1..75: mol_type = other DNA
gtagctttgcgcatctgcgtgatgacggtacaaccgcatcttcttgctggatctacaccggtagctggacagagc

SEQ ID NO: 724856 - DNA, 75 bp, synthetic construct
  source 1..75: mol_type = other DNA
ccgatgatgtgcgtccgatgcttgagcagatggtgaaagaggccgtaagccatatccctgctccgcgtgatggtc

SEQ ID NO: 724857 - DNA, 75 bp, synthetic construct
  source 1..75: mol_type = other DNA
cagccgccagattgagatctacccgattgccggaacacgcccacgaggacgtcgcgccgatggttcactggacag

SEQ ID NO: 724858 - DNA, 75 bp, synthetic construct
  source 1..75: mol_type = other DNA
aagatttaccgcaactggcagcggaaaataactgtcctgatttctgtttttatctcgctgaaacgctgatggtga

SEQ ID NO: 724859 - DNA, 75 bp, synthetic construct
  source 1..75: mol_type = other DNA
tcaaaggccttgatattctcattaccgggcatgcccatgtaggaacacccgaacctatcaaagtgggaaatacat

SEQ ID NO: 724860 - DNA, 75 bp, synthetic construct
  source 1..75: mol_type = other DNA
tcccttgtacgggatattgaacccgataagtttaaaaataacgtgctggcgctgggcgacttagctaaatacttc

SEQ ID NO: 724861 - DNA, 75 bp, synthetic construct
  source 1..75: mol_type = other DNA
caggatctgctgaccaagattgctgaaggtgccccgaaaaggccctatgcggaaatcgtgagggttcgtcacaat

SEQ ID NO: 724862 - DNA, 75 bp, synthetic construct
  source 1..75: mol_type = other DNA
cgggcagatttattcgctatttctgccatacgtagaagagatctggctatcgcatattggcgtggatgtgccgtg

SEQ ID NO: 724863 - DNA, 75 bp, synthetic construct
  source 1..75: mol_type = other DNA
attggcggcggtggggtatttgctctgttagccgattttttatgggatgttgcgaacccaatatcaataggggta

SEQ ID NO: 724864 - DNA, 75 bp, synthetic construct
  source 1..75: mol_type = other DNA
gacctttgttgctattattgctctgattaacggtataatcggtggtatcggaggctggtttggttatggcaatat

SEQ ID NO: 724865 - DNA, 75 bp, synthetic construct
  source 1..75: mol_type = other DNA
atccgtttggcgatatcaaatcggatggcacagtgaaaacggctctcgaaaaccttggtttgggagaaggctcag

SEQ ID NO: 724866 - DNA, 75 bp, synthetic construct
  source 1..75: mol_type = other DNA
cggtttctgcccgagctgtggggcgcggcggatggccgaaagtgccgccttgctggttgatgaagtactgcctga

SEQ ID NO: 724867 - DNA, 75 bp, synthetic construct
  source 1..75: mol_type = other DNA
tgacctgggtagcttcttgactcttcgtgaactggatgaagcaatgtttaattacggtaaagaaaccgctcagga

SEQ ID NO: 724868 - DNA, 75 bp, synthetic construct
  source 1..75: mol_type = other DNA
tgatttaggctcttactatgggatcgctgatcttgaccagattatggctgattacggcaaacaacccgctcagga

SEQ ID NO: 724869 - DNA, 75 bp, synthetic construct
  source 1..75: mol_type = other DNA
cctgtttgcagaaattgctcctcatttcttccctgtggtcatgtttgcaatcacgacaggccttcgccgttccaa

SEQ ID NO: 724870 - DNA, 75 bp, synthetic construct
  source 1..75: mol_type = other DNA
tatggtacgccagtttcacattgccgaacggaaaaagatttaaacagtctcttggaacaaaggacaaaaggcagg

SEQ ID NO: 724871 - DNA, 75 bp, synthetic construct
  source 1..75: mol_type = other DNA
gaaaaaataatggaggcggtagacgggatggaaaaccgccgccatcgcctgaactgggagatgagccgggatagg

SEQ ID NO: 724872 - DNA, 75 bp, synthetic construct
  source 1..75: mol_type = other DNA
aatctaccagcaattattgttcgtgatgatctgccgtttcaagtccgttccggtgacattgacctgggtagcttc

SEQ ID NO: 724873 - DNA, 75 bp, synthetic construct
  source 1..75: mol_type = other DNA
tttatcaggtagtagaagccggtaaaggcgaagcaccgaaagacagcgatactgttgtcgtgaactacaaaggta

SEQ ID NO: 724874 - DNA, 75 bp, synthetic construct
  source 1..75: mol_type = other DNA
atgttgaaaatgcatggattttccagatgtgttaccagtaagaagcaggtggataaaggatgcgataacaaatcc

SEQ ID NO: 724875 - DNA, 75 bp, synthetic construct
  source 1..75: mol_type = other DNA
caacaaccgcgttatatcccgctcagccaacccatgcctttactggcaaatacaccgtttatcgtcaccggctcg

SEQ ID NO: 724876 - DNA, 75 bp, synthetic construct
  source 1..75: mol_type = other DNA
tatgttttcggaagaaataaacgtcctaccatcgttgttaactgcttcaccgatgaagatcgcctgaaataccag

SEQ ID NO: 724877 - DNA, 75 bp, synthetic construct
  source 1..75: mol_type = other DNA
atgatcttccgtttgaagtccgttccggtgacattgacctgggtagcttcgttactgtctatgaactggatgaag

SEQ ID NO: 724878 - DNA, 75 bp, synthetic construct
  source 1..75: mol_type = other DNA
agctgtaccaaaccagacggaacgaaagcgccaacagtaaggaagatgcggtatgacgcaaacacagcctggaaa

SEQ ID NO: 724879 - DNA, 75 bp, synthetic construct
  source 1..75: mol_type = other DNA
tagatatggatggtaaattgattattgggaaaagacatcatttgcttggaaatagaggtccagtgctggctgctg

SEQ ID NO: 724880 - DNA, 75 bp, synthetic construct
  source 1..75: mol_type = other DNA
ggcacgtaccgaccgcgttcgcgttcattacaccggtaaattgatcgacggtactgtatttgacagttccgttgc

SEQ ID NO: 724881 - DNA, 75 bp, synthetic construct
  source 1..75: mol_type = other DNA
agtacgcttcagggggaaatatttctcaaacgcgaggggcatatccaacaacaaatggggggaataaatgcccgc

SEQ ID NO: 724882 - DNA, 75 bp, synthetic construct
  source 1..75: mol_type = other DNA
gtatgacgcaaacacagcctggaaagcggcgctgagacgagctggtattgatgatttcagatttcacgacttgag

SEQ ID NO: 724883 - DNA, 75 bp, synthetic construct
  source 1..75: mol_type = other DNA
atcgtctgaccgagcacttccactactggaccaaacacgcgctgttgaacgcgattttgcagccagagcagtttg

SEQ ID NO: 724884 - DNA, 75 bp, synthetic construct
  source 1..75: mol_type = other DNA
ttagttatgaaaggactgctgaagtaatacacgatttactgtttctgaaggatctcctttctgttgggaatgttt

SEQ ID NO: 724885 - DNA, 75 bp, synthetic construct
  source 1..75: mol_type = other DNA
tggaaagataatgggcaaatcaagatgctgggcaactggctggctgcccagcagatcacaggttttgtaccttag

SEQ ID NO: 724886 - DNA, 75 bp, synthetic construct
  source 1..75: mol_type = other DNA
ccgctttaactcgttgacctgctactttgcttctgatgtttgtcaggaacagttcatttcacgcttagtctggct

SEQ ID NO: 724887 - DNA, 75 bp, synthetic construct
  source 1..75: mol_type = other DNA
tggcaggagtgggatattgcgcctggtgatcagatcctcgtcagccttgccggtcagggtattcctcgcattgat

SEQ ID NO: 724888 - DNA, 75 bp, synthetic construct
  source 1..75: mol_type = other DNA
ttctctgggcgtatttatctgggcgtggccggatggaccgcagtcaatgactgatcgattgcatttgcttgcgac

SEQ ID NO: 724889 - DNA, 75 bp, synthetic construct
  source 1..75: mol_type = other DNA
tgccacctttggcaggcacagttatgcatccagttgcgcatacaggcgtgcgtaaattagcggataaaaatgcac

SEQ ID NO: 724890 - DNA, 75 bp, synthetic construct
  source 1..75: mol_type = other DNA
gaagggcaaagtactattgaagacagtatttacgatcagttaagcgcccgccttgcccagtggcaacgctgtttt

SEQ ID NO: 724891 - DNA, 75 bp, synthetic construct
  source 1..75: mol_type = other DNA
gctggaatccggcatacaattgctttgatcgtccgggtaaaaatgtatctcttttacgctacacatcaacggcaa

SEQ ID NO: 724892 - DNA, 75 bp, synthetic construct
  source 1..75: mol_type = other DNA
catcgtattaaattgcctttgacactaggaagccatcgtaccgactcgttaatgaattcacctacaacaggatat

SEQ ID NO: 724893 - DNA, 75 bp, synthetic construct
  source 1..75: mol_type = other DNA
atgccggacaacgtagattttattcaggcacaacaggctgaattactggagcgccagattaacgcggcaagggta

SEQ ID NO: 724894 - DNA, 75 bp, synthetic construct
  source 1..75: mol_type = other DNA
gattgtcgatgagccgacgcgcggcgtggatgtctcggcccgtaatgatatctaccagctgttgcgcagcatcgc

SEQ ID NO: 724895 - DNA, 75 bp, synthetic construct
  source 1..75: mol_type = other DNA
cgaaagcctgcctcgtatttttccagaaggcagtacagacaagtctgcactattgcaacgcctcgctaatgaaga

SEQ ID NO: 724896 - DNA, 75 bp, synthetic construct
  source 1..75: mol_type = other DNA
aatcgtagtttatcatcaggaacaagtaaatggaccgcttgtcgacgagtcagggcgggttatttttgccgattt

SEQ ID NO: 724897 - DNA, 75 bp, synthetic construct
  source 1..75: mol_type = other DNA
cgatctcaatgttcatatgatggtcgtactgatgttaattgccgcgattgttggtgatgcagtcaactacaccat

SEQ ID NO: 724898 - DNA, 75 bp, synthetic construct
  source 1..75: mol_type = other DNA
ggcgtctgggtttatgccatcctgtttttgattttgttctgtgaaaccggtctggtggtgacaccgtttctgccg

SEQ ID NO: 724899 - DNA, 75 bp, synthetic construct
  source 1..75: mol_type = other DNA
ttcgtcgtagctatctcgacaaaactcatcagttttatgaaaaacacggcggcaaaaccattattctcgcccgtt

SEQ ID NO: 724900 - DNA, 75 bp, synthetic construct
  source 1..75: mol_type = other DNA
aggttactatctgcagttaccgccaccccccgaagatttgctgaagcaacatctttccataatggggcagaaaac

SEQ ID NO: 724901 - DNA, 75 bp, synthetic construct
  source 1..75: mol_type = other DNA
atgccggacaacgtagattttattcaggaacaacaggctgaattactggagcgccagattaacgcggcaaggggt

SEQ ID NO: 724902 - DNA, 75 bp, synthetic construct
  source 1..75: mol_type = other DNA
tggccgactgtttggtgagaagttattcagcaatcccaattcgaagattttccgtcgcagttatctcgataaaac

SEQ ID NO: 724903 - DNA, 75 bp, synthetic construct
  source 1..75: mol_type = other DNA
atgcatcagggcgaaattacccactctgcactgaccgggcgcgagactattatgcgcgttgccttcggcgatagt

SEQ ID NO: 724904 - DNA, 75 bp, synthetic construct
  source 1..75: mol_type = other DNA
tgttgttatcatcacgacctttataccttgaaaccgatgaactgccttttgttaacagttctgttctgaactatg

SEQ ID NO: 724905 - DNA, 75 bp, synthetic construct
  source 1..75: mol_type = other DNA
actactggagcaactatccgaagttcttcgttagcctgatgaaatctttctatggcgatgccgcgcagaaagaga

SEQ ID NO: 724906 - DNA, 75 bp, synthetic construct
  source 1..75: mol_type = other DNA
cccgtcggtttccgctgggcgatggaagcgaaaaacaacaacgatgcaaccttgatcgttgtcgatcctcgtttt

SEQ ID NO: 724907 - DNA, 75 bp, synthetic construct
  source 1..75: mol_type = other DNA
cagatattgaaagccatcaacaaagctacatctgtatgtgtgagcctcgatatccctgtatacgataacttcatc

SEQ ID NO: 724908 - DNA, 75 bp, synthetic construct
  source 1..75: mol_type = other DNA
cgcaggtccgtggtccgatcccgctgccgacacgcaaagagcgttttaccgttctgatctccccgcacgtcaaca

SEQ ID NO: 724909 - DNA, 75 bp, synthetic construct
  source 1..75: mol_type = other DNA
gtatgaagtcatcagtatatagtgtttctgcaggtgagcatagtgatactgttaatggcgaaatttcttcaagaa

SEQ ID NO: 724910 - DNA, 75 bp, synthetic construct
  source 1..75: mol_type = other DNA
gatcgatcaagcaaccgcggaaatcgtcgagactgctaagcgcactggtgcgcaggtccgtggtccgatcccgct

SEQ ID NO: 724911 - DNA, 75 bp, synthetic construct
  source 1..75: mol_type = other DNA
tgtaccgactgttcccgaaaggtccggcaaagcaagccaccaaaattgctggcctgcctaaaccggtaaaatgca

SEQ ID NO: 724912 - DNA, 75 bp, synthetic construct
  source 1..75: mol_type = other DNA
taacacaaatatggcttgcaattctagagggagaagagaagtttggtctattaaatatttataaatctattactg

SEQ ID NO: 724913 - DNA, 75 bp, synthetic construct
  source 1..75: mol_type = other DNA
tggtgggcaaactaataacgccttccggcacgttgccatttttattgccgatccaccagacggacgacggcgagt

SEQ ID NO: 724914 - DNA, 75 bp, synthetic construct
  source 1..75: mol_type = other DNA
gctaacattttccctggcgacatgctgtttaaaaacttcggtgtcacccgtcacgggcgtgtggtgttttatgat

SEQ ID NO: 724915 - DNA, 75 bp, synthetic construct
  source 1..75: mol_type = other DNA
gtcgagactgctaagcgcactggtgcgcaggtccgtggtccgatcccgctgccgacacgcaaagagcgcttcact

SEQ ID NO: 724916 - DNA, 75 bp, synthetic construct
  source 1..75: mol_type = other DNA
cgcaggacccctggctggttgtcctgtatcaggatgaccatattatggtggtcaacaagccgagcggtttgttgt

SEQ ID NO: 724917 - DNA, 75 bp, synthetic construct
  source 1..75: mol_type = other DNA
ctttaatgaaattacccggcattcggcatgggatcgcatgtcgcaggcaggagctcagttgatgacgtggttcgg

SEQ ID NO: 724918 - DNA, 75 bp, synthetic construct
  source 1..75: mol_type = other DNA
gccattgaagaagggtttgatgtctttgttgtgactgacgcgtcagggacctttaatgaaattacccggcattcg

SEQ ID NO: 724919 - DNA, 75 bp, synthetic construct
  source 1..75: mol_type = other DNA
tcttcggtgcgttgtgctggatgacgacctttacgcgggtgtggagtgggtatctgacgctgaagtcgctccagc

SEQ ID NO: 724920 - DNA, 75 bp, synthetic construct
  source 1..75: mol_type = other DNA
tttgaagatatggccaatgaagaagggctggccggtgagttttacaccatcaccgcgccatcacgtttccacgca

SEQ ID NO: 724921 - DNA, 75 bp, synthetic construct
  source 1..75: mol_type = other DNA
ttatgcacataagtcgttttactatctggggggattaaccgaaggcacagaaacgatcttactgtttgtgctggg

SEQ ID NO: 724922 - DNA, 75 bp, synthetic construct
  source 1..75: mol_type = other DNA
tggcgtaacgatattgaaggtctggcgacgctattctctaaccacattcctgactatcgtaatttgatgaccagt

SEQ ID NO: 724923 - DNA, 75 bp, synthetic construct
  source 1..75: mol_type = other DNA
cacctgctggggctgaaagtgggcgataaaaccaccttctcgctggagcccgatgcggcgtttggcgtgccgtca

SEQ ID NO: 724924 - DNA, 75 bp, synthetic construct
  source 1..75: mol_type = other DNA
atgacgttttcatcggtcgtccgttttcaaagccggcgggttttatgacgagtgatgtgacagccggttttaatc

SEQ ID NO: 724925 - DNA, 75 bp, synthetic construct
  source 1..75: mol_type = other DNA
ttctctgctggatttacgggacattgagcaggggctggagaatatgcaacgactgccgggtgtgcaggctgatat

SEQ ID NO: 724926 - DNA, 75 bp, synthetic construct
  source 1..75: mol_type = other DNA
ttacgcgctggtgccgtttggctttattcttgctgcactggcagcaaaacatcagattgataaccccggttatgc

SEQ ID NO: 724927 - DNA, 75 bp, synthetic construct
  source 1..75: mol_type = other DNA
caatccggtggtagtgggcgaagcaggcgtgggtaaaagcgcgctgattgaagggctggcgctgcgcatcgtggc

SEQ ID NO: 724928 - DNA, 75 bp, synthetic construct
  source 1..75: mol_type = other DNA
atctgggaatggattacggcgaggtgggggagccggcagtgaataccttgtgggacgtcatctggccggtggtgt

SEQ ID NO: 724929 - DNA, 75 bp, synthetic construct
  source 1..75: mol_type = other DNA
ggataaccactgcgacaccgcaataagatcaaattcacagcgacgctctgaggtagccacatgcagacaaaataa

SEQ ID NO: 724930 - DNA, 75 bp, synthetic construct
  source 1..75: mol_type = other DNA
ggacggtgcgctggcgcggcgcagggggcttaccgacgcgggcggctttctcgatatttctctcgattttctctt

SEQ ID NO: 724931 - DNA, 75 bp, synthetic construct
  source 1..75: mol_type = other DNA
atgactcctgtagccaatggccaacatcactccgtcgatacctggcggcgtgaaacgttcgcaccgggtacgcct

SEQ ID NO: 724932 - DNA, 75 bp, synthetic construct
  source 1..75: mol_type = other DNA
gatcttaaaaaactggctggccaggtatctggctggatttcccagtcactttatgacttcaccgaacagtttgat

SEQ ID NO: 724933 - DNA, 75 bp, synthetic construct
  source 1..75: mol_type = other DNA
ggagtatgcggcggataacacggcaagagtggtgttaaaaccgattaccgggcgttcgcatcagctgcgtgtgca

SEQ ID NO: 724934 - DNA, 75 bp, synthetic construct
  source 1..75: mol_type = other DNA
atggggatggaaaactacaatccaccgcaggaaccctggttggttatcctgtatcaggatgaccatattatggta

SEQ ID NO: 724935 - DNA, 75 bp, synthetic construct
  source 1..75: mol_type = other DNA
tctcaaatttggccgatctgccctgatttacagggaagggaggttgcaggagaaacggaacaatccggaagatga

SEQ ID NO: 724936 - DNA, 75 bp, synthetic construct
  source 1..75: mol_type = other DNA
gcgaaagcccgcgccgctatttcccgcgcaggtatccatgtttttggttttcgtgtggtagagcctcaccacgat

SEQ ID NO: 724937 - DNA, 75 bp, synthetic construct
  source 1..75: mol_type = other DNA
aggtagccacatgcagacaaaataaatctttcgcagacaaaaacggcactacaccgcacccgcctgcggtttctg

SEQ ID NO: 724938 - DNA, 75 bp, synthetic construct
  source 1..75: mol_type = other DNA
cagaaaaagcggaaccttgagttctttaaaaagtttgacctgctgaatgatgaagggctgcgtattgcactggac

SEQ ID NO: 724939 - DNA, 75 bp, synthetic construct
  source 1..75: mol_type = other DNA
gtgctgaccgatcgcaaaatggatgcagtgctggccgctgctgatgttggagactgggcagcgtatacccaggcg

SEQ ID NO: 724940 - DNA, 75 bp, synthetic construct
  source 1..75: mol_type = other DNA
gtacggaggggggaacccgcagacggttaaaactggaattacgcagtcggggttttgatggttccgatgaagaaa

SEQ ID NO: 724941 - DNA, 75 bp, synthetic construct
  source 1..75: mol_type = other DNA
acgtgcgcgtgatacgcagcgcgaacatatggccatcgcggtggggcaggtacaaaaagcggccagtgcttatgt

SEQ ID NO: 724942 - DNA, 75 bp, synthetic construct
  source 1..75: mol_type = other DNA
tgcagcattattatgacatcgttgataacctgaacctcaaagtcctggacttcgatatcgaaggcacctgggttg

SEQ ID NO: 724943 - DNA, 75 bp, synthetic construct
  source 1..75: mol_type = other DNA
tgcagaaagtttctccttctgacagcaacccgtggcgtgtttttgttgactggaccggaaccaaagagcgcgtag

SEQ ID NO: 724944 - DNA, 75 bp, synthetic construct
  source 1..75: mol_type = other DNA
atgtatgaggagggtgtgacatttttcatgagagtaaaacaggtgataacctcctttcgtaagggggattcacag

SEQ ID NO: 724945 - DNA, 75 bp, synthetic construct
  source 1..75: mol_type = other DNA
gcgacgcagttacatgggaggctctgtaccgaacaggtccggtcgcaggcccgtcatggctttggtgaagcggtg

SEQ ID NO: 724946 - DNA, 75 bp, synthetic construct
  source 1..75: mol_type = other DNA
tcattaccacgatgttcactccccgtcatccagtctgcgtggtgtcagcgttgttcgactggggcattgaagaga

SEQ ID NO: 724947 - DNA, 75 bp, synthetic construct
  source 1..75: mol_type = other DNA
gatcatgagtatcgggccctgtaccgtcgaatgctgccgaagctggacttggtgctgtgggtcattaaggccgat

SEQ ID NO: 724948 - DNA, 75 bp, synthetic construct
  source 1..75: mol_type = other DNA
atgtatgaggagcgtgtgacatttttcatgagagtaaaacaggtgataacctcctttcgtaaggggcattcacag

SEQ ID NO: 724949 - DNA, 75 bp, synthetic construct
  source 1..75: mol_type = other DNA
atgtatgaggagagtgtgacatttttcatgagagtaaaacaggtgataacctcctttcgtaaggggaattcacag

SEQ ID NO: 724950 - DNA, 75 bp, synthetic construct
  source 1..75: mol_type = other DNA
gtattcacaggtattattacagaacaatgttgtttctggcttgttcttttttttggcgactggaatagcctcttt

SEQ ID NO: 724951 - DNA, 75 bp, synthetic construct
  source 1..75: mol_type = other DNA
atgtatgaggagggtgtgacatttttcatgacagtaaaacaggtgataacctcctttcgtaaggggcattcacag

SEQ ID NO: 724952 - DNA, 75 bp, synthetic construct
  source 1..75: mol_type = other DNA
atgtatgaggagggtgtgacatttttcatgatagtaaaacaggtgataacctcctttcgtaaggggtattcacag

SEQ ID NO: 724953 - DNA, 75 bp, synthetic construct
  source 1..75: mol_type = other DNA
atgtatgaggagggtgtgacatttttcatgaaagtaaaacaggtgataacctcctttcgtaaggggaattcacag

SEQ ID NO: 724954 - DNA, 75 bp, synthetic construct
  source 1..75: mol_type = other DNA
gggtgtaggtgaaaacgggagaagggatcatgagtaccgtgccctgtaccgtcgaatgctgccggagctggatct

SEQ ID NO: 724955 - DNA, 75 bp, synthetic construct
  source 1..75: mol_type = other DNA
caccgttttgcgatgggcgaactgcctgatgaagtgctggagatctgccagcggctggcaaaactcaccgagatg

SEQ ID NO: 724956 - DNA, 75 bp, synthetic construct
  source 1..75: mol_type = other DNA
gaaaaagatcattcccgatcttaaattcactgccgcttttgggcgtgggcgctacgtttgcccgcgtaatctgac

SEQ ID NO: 724957 - DNA, 75 bp, synthetic construct
  source 1..75: mol_type = other DNA
atgggatggtctgcgcgatcatacggatatcgctatagatgacgatctctggcgtcgtttaagtaccgacaaagc

SEQ ID NO: 724958 - DNA, 75 bp, synthetic construct
  source 1..75: mol_type = other DNA
gccgcgctaccgcttagttgaactgcatcgcaaacgcgtcgctaacggtgaacgcagtgtactggtaggtttaca

SEQ ID NO: 724959 - DNA, 75 bp, synthetic construct
  source 1..75: mol_type = other DNA
agtaccgacaaagccagctgcctcaaccgcaactgttactactatcgcgaatgcccgttttttgtcgctcgtcgg

SEQ ID NO: 724960 - DNA, 75 bp, synthetic construct
  source 1..75: mol_type = other DNA
catcacctgccggatgtggcacgggatgcgctggagatgagcgccgaaattaccgcgccgtggtatcggctgcag

SEQ ID NO: 724961 - DNA, 75 bp, synthetic construct
  source 1..75: mol_type = other DNA
tgatgttgctggtgcagggcgatcagccgcgctatcgcttagttgaactgcaccgcaaacgcgttgccaacggtg

SEQ ID NO: 724962 - DNA, 75 bp, synthetic construct
  source 1..75: mol_type = other DNA
agtctgtgcaatgcgctgtttgccggggacgtttcaccggtcagcgacgtggccgcctgcacacgcgaacccatg

SEQ ID NO: 724963 - DNA, 75 bp, synthetic construct
  source 1..75: mol_type = other DNA
gatcatgagtaccgtgccctgtaccgtcgaatgctgccggagctggatctggtgctgtgggtcattaaggccgat

SEQ ID NO: 724964 - DNA, 75 bp, synthetic construct
  source 1..75: mol_type = other DNA
ggcgtgggcgctacgtttgcccgcgtaatctgacggcgctcgccagcactgaacccacgcaacaggatctgctgg

SEQ ID NO: 724965 - DNA, 75 bp, synthetic construct
  source 1..75: mol_type = other DNA
tattgccgaaatggcggcgttctttcgtaagcaggtggagagtaaaaaacatctcggtatgttagtgctgtttgc

SEQ ID NO: 724966 - DNA, 75 bp, synthetic construct
  source 1..75: mol_type = other DNA
ttatcgcctcgttaaacaacattctcaatctctacatgcctgccgggcaggaggcagagcaccgttttgcgatgg

SEQ ID NO: 724967 - DNA, 75 bp, synthetic construct
  source 1..75: mol_type = other DNA
ccagcgtaacgcttgatgaaagcggaaacggcacattcaactggcagatgagcccgtgtaatctgaagatggcaa

SEQ ID NO: 724968 - DNA, 75 bp, synthetic construct
  source 1..75: mol_type = other DNA
accacgaaagcgtcagaagctgccacctcagcccgggatgcggcggcctcaaaagaggcagcgaaatcatcagaa

SEQ ID NO: 724969 - DNA, 75 bp, synthetic construct
  source 1..75: mol_type = other DNA
aaggctggcgaagccactgaacaggccagcgcagcagcgaggtctgcttccgcagcgaagacatccgaaacgaac

SEQ ID NO: 724970 - DNA, 75 bp, synthetic construct
  source 1..75: mol_type = other DNA
ctcgagcgccagcagcgcagcttcctcggcaacggcggcagcaaattctgcgaaggcggcaaaaacgtctgagac

SEQ ID NO: 724971 - DNA, 75 bp, synthetic construct
  source 1..75: mol_type = other DNA
ccatccagtgggtttccgagctgactgacgagctgatggcgaaaatccgcaaccatgaatacagccgaacaatgg

SEQ ID NO: 724972 - DNA, 75 bp, synthetic construct
  source 1..75: mol_type = other DNA
acccggatgcctcgctgaccgcaaaaggctttgttcaactcagtagcgccactaacagcgattctgaaacgctgg

SEQ ID NO: 724973 - DNA, 75 bp, synthetic construct
  source 1..75: mol_type = other DNA
gcgttattctgttggtggagggattcccgccgtcacatgccgggaccatcaccgtgtatgaagattctcgacccg

SEQ ID NO: 724974 - DNA, 75 bp, synthetic construct
  source 1..75: mol_type = other DNA
gctgtacgattaaagaggttcagtttaccgccgggcagaaacaggatattgatgtcaccacgctgtgttctgttg

SEQ ID NO: 724975 - DNA, 75 bp, synthetic construct
  source 1..75: mol_type = other DNA
ggtgccatctaaccgaaaagttaacggaaaagcactgactgcggatataacattaacgccgaaagatattggtac

SEQ ID NO: 724976 - DNA, 75 bp, synthetic construct
  source 1..75: mol_type = other DNA
tgaaacgcttgccgcgacaccgaaggcagttaaagcagcgaatgacaatgcgaatggtcgggtaccttctgaccg

SEQ ID NO: 724977 - DNA, 75 bp, synthetic construct
  source 1..75: mol_type = other DNA
cgcatacccatagtgttagcggtacggctgcttcagccggtgcacatacccattcgatgacatttgtttcaggtg

SEQ ID NO: 724978 - DNA, 75 bp, synthetic construct
  source 1..75: mol_type = other DNA
atctgaaacgcttgccgcgacaccgaaagcagtgaaagcagctaatgataatgcgaatggtcgggtaccttctgc

SEQ ID NO: 724979 - DNA, 75 bp, synthetic construct
  source 1..75: mol_type = other DNA
ggcaacttttatctgaatgctgcccagaacgcgttgcgcagtgcctatgacaatgacaccacgtatggctttaaa

SEQ ID NO: 724980 - DNA, 75 bp, synthetic construct
  source 1..75: mol_type = other DNA
ccctgcagtgggtttctgaattgactgatgaactcatggcaaaaatcagaactcacgaatacaaccgctcaatgg

SEQ ID NO: 724981 - DNA, 75 bp, synthetic construct
  source 1..75: mol_type = other DNA
tgaatacaagtctgttgtgaacagcggagacactgacgcggttcgtgcagatgaggcggggcggaaagtcaccgg

SEQ ID NO: 724982 - DNA, 75 bp, synthetic construct
  source 1..75: mol_type = other DNA
ataccatcctgggcatgtccctgccgcaggtgaacaacagcgccatcggttacggcaagtccgtggatggggcgg

SEQ ID NO: 724983 - DNA, 75 bp, synthetic construct
  source 1..75: mol_type = other DNA
gggggatgtgatacagggggcgacgggggcggtggccagtctgccggcgatggttatccagcgggcgaatccggg

SEQ ID NO: 724984 - DNA, 75 bp, synthetic construct
  source 1..75: mol_type = other DNA
ccagcgtaacgcttgatgaaagcggaaacggcacatttaactggcagatgagcccatgtaatttgaagatggcaa

SEQ ID NO: 724985 - DNA, 75 bp, synthetic construct
  source 1..75: mol_type = other DNA
gttgcggaagtggaaaaattggcggggcagaaactggtagcaaaagctaagcctggagaatacattcgcgggata

SEQ ID NO: 724986 - DNA, 75 bp, synthetic construct
  source 1..75: mol_type = other DNA
atggatgtaaagcgaaattattttgagtccgatctgggagaagggaaagcgaaatactggactttaaatatcgaa

SEQ ID NO: 724987 - DNA, 75 bp, synthetic construct
  source 1..75: mol_type = other DNA
ggatggtgatgcggtggggacaatgaatcaggtggaaaaagagccggacggtaaggccggggtgccgtggatagg

SEQ ID NO: 724988 - DNA, 75 bp, synthetic construct
  source 1..75: mol_type = other DNA
caatgagcgcgtgggcagcaacccgatgatccagcctgcagacaatactgacagtcgtgtccgggcactggaaac

SEQ ID NO: 724989 - DNA, 75 bp, synthetic construct
  source 1..75: mol_type = other DNA
ctcttcagtgggcttctgagttgaccgatgagctgatggcgaaaattcgtagccatgaatacagccgatcaatgg

SEQ ID NO: 724990 - DNA, 75 bp, synthetic construct
  source 1..75: mol_type = other DNA
gggttttaacatgatgaataacctgccggttaccagtacatcaacggtcggaaccgccagttgcaccggaagtgt

SEQ ID NO: 724991 - DNA, 75 bp, synthetic construct
  source 1..75: mol_type = other DNA
ggaaagccgtgaagccgatcatggcctgcgtcagtcaacgcaacagaatgatgatgccgtacagaatctcaatga

SEQ ID NO: 724992 - DNA, 75 bp, synthetic construct
  source 1..75: mol_type = other DNA
atgatgaaagcaaaacgacacactttttttccgccggtgctgacactgatggtgttatgcagtgtaccggcattc

SEQ ID NO: 724993 - DNA, 75 bp, synthetic construct
  source 1..75: mol_type = other DNA
agttcagcggctctaaccgtatgagtgcaaagggcatttcggtattctatggtgccagttcagtcgatacggcta

SEQ ID NO: 724994 - DNA, 75 bp, synthetic construct
  source 1..75: mol_type = other DNA
gatcattgacgctggaccaggtacagctatcccgtcactgtaccgtgcccggtggtgccggaatcatcatgagct

SEQ ID NO: 724995 - DNA, 75 bp, synthetic construct
  source 1..75: mol_type = other DNA
tggaattattgcatcaattgcagctccgattgtcactctttgcgtatcaaagctaacaagtaaaatatatacaga

SEQ ID NO: 724996 - DNA, 75 bp, synthetic construct
  source 1..75: mol_type = other DNA
aacattcggagcatttccagaggaagatcaagaacaaatgcttaaagatatgaaagacaaaaaagagtcgatgga

SEQ ID NO: 724997 - DNA, 75 bp, synthetic construct
  source 1..75: mol_type = other DNA
atgaacagggaccagccaggggtattttgctcttacttcagccggtgctgcatgctggtggtgccatctacaaag

SEQ ID NO: 724998 - DNA, 75 bp, synthetic construct
  source 1..75: mol_type = other DNA
caaaagtatctcgatacctattttgccgaccttaaatctactactgatcggctccagccgctgaccttagatacc

SEQ ID NO: 724999 - DNA, 75 bp, synthetic construct
  source 1..75: mol_type = other DNA
cagcaatgcagccggcatccgaacaggacgatattgtaaattcacctaattacgaggacattgcagtagttgaat

SEQ ID NO: 725000 - DNA, 75 bp, synthetic construct
  source 1..75: mol_type = other DNA
gcggtattcgtaccaatggccttcttcggcggttcgactggtgcaatctatcgccagttctccattaccattgtt

SEQ ID NO: 725001 - DNA, 75 bp, synthetic construct
  source 1..75: mol_type = other DNA
tatcaacaccgatggctccatgacgcaggaggatatctccgactatgtagcggcgaatatgaaagatgccatcag

SEQ ID NO: 725002 - DNA, 75 bp, synthetic construct
  source 1..75: mol_type = other DNA
ttggcgttattgcttttaatcttggtaaacaccacgcctatgatgttggcagttttctcgataattacggcattg

SEQ ID NO: 725003 - DNA, 75 bp, synthetic construct
  source 1..75: mol_type = other DNA
gggcgacaacctgatgctgcattacgtcggcaaaccccagccgggcaccgacagcgccgacgaaaacgagccgtc

SEQ ID NO: 725004 - DNA, 75 bp, synthetic construct
  source 1..75: mol_type = other DNA
ttctccagtgccgaactaaattatgtgacacgctggatcctttataacggcgagcaacaggtagccgcctttgca

SEQ ID NO: 725005 - DNA, 75 bp, synthetic construct
  source 1..75: mol_type = other DNA
tgtacagaattagcaggctcctcaaagaaacaggatggagccaagctgaacttgctcgtagagtcggtgtgacac

SEQ ID NO: 725006 - DNA, 75 bp, synthetic construct
  source 1..75: mol_type = other DNA
tgagaatccgggggccgttgaaggtagcggtattgtgctgattgtgctggcactggtgagccgtaagaaaaaaga

SEQ ID NO: 725007 - DNA, 75 bp, synthetic construct
  source 1..75: mol_type = other DNA
cgttgaaggtagcggtattgtgctgattgtgctggcactggcgctggtgagccgtaagaaaaaagaagccgtcag

SEQ ID NO: 725008 - DNA, 75 bp, synthetic construct
  source 1..75: mol_type = other DNA
gcgggaagagtctgacggttggtttttcgatatctggcaaccgccgcaggtggatgaagccgaatgctggcccgt

SEQ ID NO: 725009 - DNA, 75 bp, synthetic construct
  source 1..75: mol_type = other DNA
gctaaagattattcttggtgcggaagtagctaaggctatgcattgcgatatcgaacaggtggataaagagcttgt

SEQ ID NO: 725010 - DNA, 75 bp, synthetic construct
  source 1..75: mol_type = other DNA
ggcgctggtgatgagtgtggtcgctttactggtgccgcaacgtgaaattgactggcagcccaccgtgttctgggc

SEQ ID NO: 725011 - DNA, 75 bp, synthetic construct
  source 1..75: mol_type = other DNA
tgtcgttaacatcctggcagatgctttatgcggcgctggtgatgagtgtggtcgcctggctggtgccgcaacgtg

SEQ ID NO: 725012 - DNA, 75 bp, synthetic construct
  source 1..75: mol_type = other DNA
gatatgcggcctccccttgagggcgtcgggccagaactcgggatcctcggccgacaaggtgcaacagccgacgat

SEQ ID NO: 725013 - DNA, 75 bp, synthetic construct
  source 1..75: mol_type = other DNA
cccggcggcttttctggcgcttcgccacggcgataacccactgaatggttattccatttgcgcattcccagacgc

SEQ ID NO: 725014 - DNA, 75 bp, synthetic construct
  source 1..75: mol_type = other DNA
acgccagatattggctatatgccgggtcatctcacctggtacttcggcgaagagttgaagaaaatgggcatgaac

SEQ ID NO: 725015 - DNA, 75 bp, synthetic construct
  source 1..75: mol_type = other DNA
gtcaatacgcgttttggtgagcagcaatattgcgcttcgatgacgcttggcgttgagattgatacctctgctgca

SEQ ID NO: 725016 - DNA, 75 bp, synthetic construct
  source 1..75: mol_type = other DNA
gtcaggtgcggtctgcccgcagcgcaatggaagatatgagcgcggcggccaaaacctcaccattaacgccgatcc

SEQ ID NO: 725017 - DNA, 75 bp, synthetic construct
  source 1..75: mol_type = other DNA
atgaaccagttttatgttcacgttcgtctgtttgaagcaacagccgaacagaccaaaaaatttgaagaattaatg

SEQ ID NO: 725018 - DNA, 75 bp, synthetic construct
  source 1..75: mol_type = other DNA
gcgtgggtgacgttcagttgttcggttcacagtacgcgatgcgtatctggatgaacccgaatgaactgaacaaat

SEQ ID NO: 725019 - DNA, 75 bp, synthetic construct
  source 1..75: mol_type = other DNA
gaaggcggtgattcgtaccgtgcgtgatgtagtggtgtcggtggcgcgggctgtctgggactggattttcttctg

SEQ ID NO: 725020 - DNA, 75 bp, synthetic construct
  source 1..75: mol_type = other DNA
gatcaagaataccgtgccctgtaccgtcgaatcctgccggagctggacctggtgctgtgggtcattaaggccgat

SEQ ID NO: 725021 - DNA, 75 bp, synthetic construct
  source 1..75: mol_type = other DNA
accgcgccctgtctgtggatgagtatttctggcgacacatcctgcaccggggacatcagcaggtgctgtttgtgg

SEQ ID NO: 725022 - DNA, 75 bp, synthetic construct
  source 1..75: mol_type = other DNA
accccatactacaaccctataaaaacgttcgatattgttccggcatttgaggcaagtcatttgttatggcgaagc

SEQ ID NO: 725023 - DNA, 75 bp, synthetic construct
  source 1..75: mol_type = other DNA
gctcaggcgtttgaattaccgctggtgaccagcgtcggctatgaaacgcccggctccttcggcagttggtgtgct

SEQ ID NO: 725024 - DNA, 75 bp, synthetic construct
  source 1..75: mol_type = other DNA
catcgttgtttctgcctgcgccgctgaagacggtgatacgtaccgtgcgtgatgcggtggtgtccgtggcccgcg

SEQ ID NO: 725025 - DNA, 75 bp, synthetic construct
  source 1..75: mol_type = other DNA
cggcgtgggcgaaagtggcactcgcgataccgagtatgctgcgctgtaccgagagcagctttctcgcctcgacct

SEQ ID NO: 725026 - DNA, 75 bp, synthetic construct
  source 1..75: mol_type = other DNA
caaggttggcagctacgctgggaacccaggcggattttgttttgataacccgctgttatgaaaaaatgctcgccg

SEQ ID NO: 725027 - DNA, 75 bp, synthetic construct
  source 1..75: mol_type = other DNA
atatccataaaatcgcctttccgcctatcgacagtccagtggtgattaccgaaggcgaatggctaaaaagtctta

SEQ ID NO: 725028 - DNA, 75 bp, synthetic construct
  source 1..75: mol_type = other DNA
tctctctgcaatgccctgttccagggcgaagtcacgcctgtcagcgatgtggcggcctgcacccgcgatgtgctg

SEQ ID NO: 725029 - DNA, 75 bp, synthetic construct
  source 1..75: mol_type = other DNA
aagggccgtggttcgaaccgtgcgggaagccgtggtgaccgttgcccgtgccgtctgggactggattttcttctg

SEQ ID NO: 725030 - DNA, 75 bp, synthetic construct
  source 1..75: mol_type = other DNA
gggcgtgggagagaacggacaacgggaccatgaataccgcgccctgtaccggcgtatattgccggaactggacct

SEQ ID NO: 725031 - DNA, 75 bp, synthetic construct
  source 1..75: mol_type = other DNA
taatattaatctggaggttgaacaagcctggacagcattaacgttacaagaatggcagcaggcagctgtcggtga

SEQ ID NO: 725032 - DNA, 75 bp, synthetic construct
  source 1..75: mol_type = other DNA
gttcggggcgcgaggcgctggcggggctgccggggcgcggtgtgcaggtgtgtatttgcgatatctccatgcctg

SEQ ID NO: 725033 - DNA, 75 bp, synthetic construct
  source 1..75: mol_type = other DNA
tgtatttgcgatatctccatgcccgatatctccggtctggagctgctaagccagctgccgaaaggtatggcgaca

SEQ ID NO: 725034 - DNA, 75 bp, synthetic construct
  source 1..75: mol_type = other DNA
cgcacgccaaccaccaccgtgattgaaatggtggttaacgacaccgacggtgcgcaaactctccagcagttgctg

SEQ ID NO: 725035 - DNA, 75 bp, synthetic construct
  source 1..75: mol_type = other DNA
ccgccgaaagaagccactcgtaagtcaatggggcagattcagggcgcactggttggtatcgcgatggtgctgtcg

SEQ ID NO: 725036 - DNA, 75 bp, synthetic construct
  source 1..75: mol_type = other DNA
gcgtgctgctgcgtgatgtggcgaagattgagctgggtggtgagaactacgacatcatcgcagagtttaacggcc

SEQ ID NO: 725037 - DNA, 75 bp, synthetic construct
  source 1..75: mol_type = other DNA
caggtattgccagggcaaaagcagctggaaagcggtttggtcgtccttctgctctgaatgaagagcagcaactta

SEQ ID NO: 725038 - DNA, 75 bp, synthetic construct
  source 1..75: mol_type = other DNA
gatgtgttgtcgcaaaccgggcagccattaccgtgtgccgatctctggttaagcaatgccaaagctatcagcgag

SEQ ID NO: 725039 - DNA, 75 bp, synthetic construct
  source 1..75: mol_type = other DNA
aagctccatgaggatgcggaacaactctgtcgtactctgactattcgtctggatggtcatcagggggatttataa

SEQ ID NO: 725040 - DNA, 75 bp, synthetic construct
  source 1..75: mol_type = other DNA
agcgtgagcgtttctatctgatgccgcaaaatgtccattttgagcacgccgctgcgatgtttgagttgaaatatc

SEQ ID NO: 725041 - DNA, 75 bp, synthetic construct
  source 1..75: mol_type = other DNA
gacgtactgtcgcaaaccggacagccgctgccgtgtgccgatctctggttaggcaatgccaaagcgatcagcgag

SEQ ID NO: 725042 - DNA, 75 bp, synthetic construct
  source 1..75: mol_type = other DNA
gctgggcggcggtcattctggaagcattaacacgtcacggcgtcagacacgtctgcatcgcccctggctctcgtt

SEQ ID NO: 725043 - DNA, 75 bp, synthetic construct
  source 1..75: mol_type = other DNA
tgatgaacggggggaacattattgcgttacagcaaattctggggcacgccagcatacaacagacgatggtttatg

SEQ ID NO: 725044 - DNA, 75 bp, synthetic construct
  source 1..75: mol_type = other DNA
tagcactgctatgcctcagcactggcgctcgttggggtgaaggcagcacgttgcgaggtgagcaggttagccacg

SEQ ID NO: 725045 - DNA, 75 bp, synthetic construct
  source 1..75: mol_type = other DNA
gcaccttaagcgagttgttagatacctggtggctgctgtatggacagactcaggaaaatggcgagattgaaaaac

SEQ ID NO: 725046 - DNA, 75 bp, synthetic construct
  source 1..75: mol_type = other DNA
gacttatcaaaaaagcattcatgaaaagcggaacaaattaaatgcactttttgaaaaacagctgatgtcgagaag

SEQ ID NO: 725047 - DNA, 75 bp, synthetic construct
  source 1..75: mol_type = other DNA
tcgcgcttttatgtctgagcactggaggaagatggacggaagttgccacgctaaaaccagcacagattacaagtt

SEQ ID NO: 725048 - DNA, 75 bp, synthetic construct
  source 1..75: mol_type = other DNA
gtgaaaagtttgagaccgattttgcgtttgactctatctggatcaacggagataccgcggttgtccgcactcacc

SEQ ID NO: 725049 - DNA, 75 bp, synthetic construct
  source 1..75: mol_type = other DNA
aaaatccggcacgacaacgccggcacagatatcgcgagtcatcagcgacagcgcttctgcacattctgtggttat

SEQ ID NO: 725050 - DNA, 75 bp, synthetic construct
  source 1..75: mol_type = other DNA
cgatccggactctggatattggtggtgataaaccgttaccttcgtaccctttacccgcagaggacaacccgttcc

SEQ ID NO: 725051 - DNA, 75 bp, synthetic construct
  source 1..75: mol_type = other DNA
ggcgatatttttgccgcccataaaatgatgcttgaagatccagagattagccggcaactacaacaaagtctggca

SEQ ID NO: 725052 - DNA, 75 bp, synthetic construct
  source 1..75: mol_type = other DNA
aggtttccgacattatcataaaaactcactgttttatgaacgaaattatttttaaatcgtttgatttcaaaggtg

SEQ ID NO: 725053 - DNA, 75 bp, synthetic construct
  source 1..75: mol_type = other DNA
gcgctgcgggtgatacaaattgatgtcagcgcaggtgagaagcctgggatggtgaatgtgcagcggctggaattt

SEQ ID NO: 725054 - DNA, 75 bp, synthetic construct
  source 1..75: mol_type = other DNA
ccgcgccggatattattgcagcgcgaaaatctgccacaacaacgcctgcgcaggtatcgcgggtcatcagtgaca

SEQ ID NO: 725055 - DNA, 75 bp, synthetic construct
  source 1..75: mol_type = other DNA
ctagaaaaagacctcggcactgtgatggatggtatagaatcaattgatttaatagaatattttgaccttggagat

SEQ ID NO: 725056 - DNA, 75 bp, synthetic construct
  source 1..75: mol_type = other DNA
gcaacgtctggggctgaaacgcacgaccttgctgtcacggatgaagcggcttggaattgataaatcggcattgat

SEQ ID NO: 725057 - DNA, 75 bp, synthetic construct
  source 1..75: mol_type = other DNA
aattgccgcgactaaccgcgatctgaaaaaaatggtcgccgaccgtgagttccgtagcgatctctattaccgcct

SEQ ID NO: 725058 - DNA, 75 bp, synthetic construct
  source 1..75: mol_type = other DNA
ggagtggccgggtaacgtacgcgaactggaaaacgtcattgagcgcgcggtattgctaacacgcggcaacgtgct

SEQ ID NO: 725059 - DNA, 75 bp, synthetic construct
  source 1..75: mol_type = other DNA
ttttgtcagcatcattattcttatctgtataattaaaaagacatatgcagacagagttgtttttattcaacgaaa

SEQ ID NO: 725060 - DNA, 75 bp, synthetic construct
  source 1..75: mol_type = other DNA
atgagtaagcaaactgttcagtgccccttttgttttaaagaaagtccccacggcgtaaaaatatgcaccggatgc

SEQ ID NO: 725061 - DNA, 75 bp, synthetic construct
  source 1..75: mol_type = other DNA
aaaaaaatggtcgccgaccgtgagttccgtagcgatctctattaccgcctgaacgtattcccgatccacctgccg

SEQ ID NO: 725062 - DNA, 75 bp, synthetic construct
  source 1..75: mol_type = other DNA
cactcggacactattgcagcagcccgatctggcctcgctgtgtgaggctctttcgcaactggtaaagcgttctgc

SEQ ID NO: 725063 - DNA, 75 bp, synthetic construct
  source 1..75: mol_type = other DNA
cgatttattcaacaaagccttgtctggttaacgtttattggcgcgattgtagcttttatggataacgcccacgtt

SEQ ID NO: 725064 - DNA, 75 bp, synthetic construct
  source 1..75: mol_type = other DNA
ttatttatttgtctggttaacatttattggcgcgattgtggcttttatggataacgcccacgttcaggtcacctt

SEQ ID NO: 725065 - DNA, 75 bp, synthetic construct
  source 1..75: mol_type = other DNA
ccgcgacggtcgtcgcccaggaaggtgaagatgaatatcaactgattgtccgtgtactgaaagagaccaatggtg

SEQ ID NO: 725066 - DNA, 75 bp, synthetic construct
  source 1..75: mol_type = other DNA
gtgaaactggcacgggtaaagagctgattgcccgcgcgatccataatctcagtgggcgtaataatcgccgcatgg

SEQ ID NO: 725067 - DNA, 75 bp, synthetic construct
  source 1..75: mol_type = other DNA
caaacaggttgagatggtggcgcaaagcgacagcaccgtactcattcttggtgaaactggcacaggaaaagagct

SEQ ID NO: 725068 - DNA, 75 bp, synthetic construct
  source 1..75: mol_type = other DNA
cggcattcatgctcgtccggcagccagcatcctgaaagtatcagcacaatattcggcaaacattatcgtcatcaa

SEQ ID NO: 725069 - DNA, 75 bp, synthetic construct
  source 1..75: mol_type = other DNA
gccagtgcgagcattgaacggctattcaaggtgttttccatcctgggcgtaaaaatcagcttctcctcggcaacc

SEQ ID NO: 725070 - DNA, 75 bp, synthetic construct
  source 1..75: mol_type = other DNA
cggcacctcgcaggtagtatttatccacatgaacctctccccggagcgatcaataaaagtattcttgatggcgat

SEQ ID NO: 725071 - DNA, 75 bp, synthetic construct
  source 1..75: mol_type = other DNA
acctgtcgaaatacgttctgctatgaatgctgcacgagcaagagacatttctgctgttgattctgataatgcatc

SEQ ID NO: 725072 - DNA, 75 bp, synthetic construct
  source 1..75: mol_type = other DNA
aatgtggaagaaagcagctactggttccgccgtatagcggcgggtgatgtggtacgtgttaaacaggataaggct

SEQ ID NO: 725073 - DNA, 75 bp, synthetic construct
  source 1..75: mol_type = other DNA
ggtcggttcctgaccctgcccgtggagaccttttgccttctgacgggcgaaatgtggaagaaaacagctactggc

SEQ ID NO: 725074 - DNA, 75 bp, synthetic construct
  source 1..75: mol_type = other DNA
ggtcagttcctgaccctgcccgtggagaccttttgccttctgacgggcgaaatgtggaagaaagcagctactggc

SEQ ID NO: 725075 - DNA, 75 bp, synthetic construct
  source 1..75: mol_type = other DNA
gcggaaattctcttcacctccggcaccacctcccgaccgaaaggtgtggtgattacccattacaacctgcgcttc

SEQ ID NO: 725076 - DNA, 75 bp, synthetic construct
  source 1..75: mol_type = other DNA
tgcggcacatttgcctgacagatgtggcacttcccgctgatgatggcgtgagttcgtttactcaactgaaaaatc

SEQ ID NO: 725077 - DNA, 75 bp, synthetic construct
  source 1..75: mol_type = other DNA
gtgcttccgcgcactcggtggtcatcaagcgaatagccgagcgcggggagaatattcaggtctggatagaacctg

SEQ ID NO: 725078 - DNA, 75 bp, synthetic construct
  source 1..75: mol_type = other DNA
cagagaagttagaaaaaatccttgaagagaaagcaaaggaagagtgtcgctcatttagtgcagaagtaattaaac

SEQ ID NO: 725079 - DNA, 75 bp, synthetic construct
  source 1..75: mol_type = other DNA
acgacgcatgatcgtagaaacccacagcgccgcgtcagtctgcgcaatggtacgggcgggggtaggcgtttcagt

SEQ ID NO: 725080 - DNA, 75 bp, synthetic construct
  source 1..75: mol_type = other DNA
tttgagcgcatacgtggacgattacatcctaccgtgcaaggactgcgtctgtttgaagaagtgcaacgatcctgg

SEQ ID NO: 725081 - DNA, 75 bp, synthetic construct
  source 1..75: mol_type = other DNA
ttcacagcaaaagcggctccgatgaacgcgtcaaagggctctccgacagttcagagcaaaaagacgcgctcatgg

SEQ ID NO: 725082 - DNA, 75 bp, synthetic construct
  source 1..75: mol_type = other DNA
cggttgagtacagagataatgagtctcaaaagtgagtttgaaaactacattatgttatgcaaagggcgaactgtt

SEQ ID NO: 725083 - DNA, 75 bp, synthetic construct
  source 1..75: mol_type = other DNA
gaagcggctaccactgatataaagacattgaacaaactcttgaagaagttccgcaaggtagtagcggaacggcgg

SEQ ID NO: 725084 - DNA, 75 bp, synthetic construct
  source 1..75: mol_type = other DNA
tgacaatttcaaaagcatcaatgacaaatgggggcatcatatgggtgatcaagtcatagtaatggttaccagaat

SEQ ID NO: 725085 - DNA, 75 bp, synthetic construct
  source 1..75: mol_type = other DNA
atcgctattggtccggttaaatggtttacctgcgaactaccagaaattacgcagcgtaccgtcaattccccacaa

SEQ ID NO: 725086 - DNA, 75 bp, synthetic construct
  source 1..75: mol_type = other DNA
gtctaccctgatggcaattttattgactggaagatctatcaatcggtagccgctgaattatatgcacacgatctg

SEQ ID NO: 725087 - DNA, 75 bp, synthetic construct
  source 1..75: mol_type = other DNA
tacgccatatttttactatgaccattgatgaatgcgcgacatggattgccctgacgggtgacagtgaaggttggc

SEQ ID NO: 725088 - DNA, 75 bp, synthetic construct
  source 1..75: mol_type = other DNA
tattatcgattgatgaattatcccgacttttatttgtctggttaacctttattggcgcaatcgttgcttatatgg

SEQ ID NO: 725089 - DNA, 75 bp, synthetic construct
  source 1..75: mol_type = other DNA
agggcgtgttaacccctcggattacggtaactttgattcccgttatgtgaaagatgttcgacttggttcacagca

SEQ ID NO: 725090 - DNA, 75 bp, synthetic construct
  source 1..75: mol_type = other DNA
cccttcaggtcatgtattgtctggtattaatgttcaggatacagggtctaactctgccgataatatagcgggtgt

SEQ ID NO: 725091 - DNA, 75 bp, synthetic construct
  source 1..75: mol_type = other DNA
cttgaacagcttttgaaaaatttcaggagcgtggtcaacgaacgtcgtgaagaatactatcaggagattggtgag

SEQ ID NO: 725092 - DNA, 75 bp, synthetic construct
  source 1..75: mol_type = other DNA
cgactggtcgataccgccacgcttgaagttgaagtgctgcgcgagcaggggatcaacagtgtgtttacgcagtta

SEQ ID NO: 725093 - DNA, 75 bp, synthetic construct
  source 1..75: mol_type = other DNA
agcttaaaaaaacctatccaggcggcgttcaggcgcttcgtggaatagatttacaggtcgaagccggcgattttt

SEQ ID NO: 725094 - DNA, 75 bp, synthetic construct
  source 1..75: mol_type = other DNA
taaaccagatactttaaaatcagagcttaataaatacaaattgggttttagcaagaagtacaagacaaaacgaga

SEQ ID NO: 725095 - DNA, 75 bp, synthetic construct
  source 1..75: mol_type = other DNA
actagttacaattataatgaaaaaaaagatgatcgagttactaggcctaaagtatttataacaactcattcgccg

SEQ ID NO: 725096 - DNA, 75 bp, synthetic construct
  source 1..75: mol_type = other DNA
agcaagcacacagaaagaaaaaatattaagctacattaaagctggcttaaaaggatataagtttgaaattgatga

SEQ ID NO: 725097 - DNA, 75 bp, synthetic construct
  source 1..75: mol_type = other DNA
gcatcaggcattactgcgttacttcgacacggctgcacgtccgcagatgaaagcgatcctggacgcagaagccag

SEQ ID NO: 725098 - DNA, 75 bp, synthetic construct
  source 1..75: mol_type = other DNA
tcacgccggaatcagtaaaagcccagcatcaggccctgctgcgctatttcgatacaacaacccgccctcagatga

SEQ ID NO: 725099 - DNA, 75 bp, synthetic construct
  source 1..75: mol_type = other DNA
tctgcgttttatatgaccgggattgatgtgtatccgaatgccggggtggtggatttcagggggacgctgaagacg

SEQ ID NO: 725100 - DNA, 75 bp, synthetic construct
  source 1..75: mol_type = other DNA
atcgcctgaagctggtggatatcccggtggctaacctggcgaaaaatgctgaagggatgctggtgactgccgacg

SEQ ID NO: 725101 - DNA, 75 bp, synthetic construct
  source 1..75: mol_type = other DNA
gacgggtggcgaataagcaaagacaaaacgcgtgcttttgcgcccgggcataaagttttgaggattaacaaatga

SEQ ID NO: 725102 - DNA, 75 bp, synthetic construct
  source 1..75: mol_type = other DNA
cgtcatgggctggctgtgcaaaagaggcacgtaaagatgggtggcgaataagcgtcgacaaaacgcgtgcttttg

SEQ ID NO: 725103 - DNA, 75 bp, synthetic construct
  source 1..75: mol_type = other DNA
cacgggtgtggcggagaaaaccgaacgcccgctggacgtggcgattcagggcgcgggttacattgcggtgcagga

SEQ ID NO: 725104 - DNA, 75 bp, synthetic construct
  source 1..75: mol_type = other DNA
agcgcgatgaaaatatcaaagtcagcggcggttttctcgagggcagcaacgtctcggcggtgagcgaaatgatgt

SEQ ID NO: 725105 - DNA, 75 bp, synthetic construct
  source 1..75: mol_type = other DNA
gcgttccggcccagcgcgatgaaaatatcaaagtcagtggcggttttctcgaaggcagcaacgtctcggcggtga

SEQ ID NO: 725106 - DNA, 75 bp, synthetic construct
  source 1..75: mol_type = other DNA
aaagccgtaacgatacgctgctgcgcgtcagtcgttgtatcgttgaacagcagcaagccttctttgaacaaggcg

SEQ ID NO: 725107 - DNA, 75 bp, synthetic construct
  source 1..75: mol_type = other DNA
ttggtatcaaatgattcacctggttacacaggtcaggagacgaaaattcagcggttttcggcagaacaactttct

SEQ ID NO: 725108 - DNA, 75 bp, synthetic construct
  source 1..75: mol_type = other DNA
tgctgtgcggtcatggtaataacggcggcgatggctacgtggtcgcgcgactggccaaagcggtcggcattgagg

SEQ ID NO: 725109 - DNA, 75 bp, synthetic construct
  source 1..75: mol_type = other DNA
aggtcacgctgctggcccaggagagcgacaaaccgttgccggaagaggccgcgctggcacgcgaagcatggttaa

SEQ ID NO: 725110 - DNA, 75 bp, synthetic construct
  source 1..75: mol_type = other DNA
gtaaatatccattgggattgtactgcaaatgcgacagtttctgtttatacatcgccaacatattcagcgagtaag

SEQ ID NO: 725111 - DNA, 75 bp, synthetic construct
  source 1..75: mol_type = other DNA
accaggcttgctcactggaaaagcgcgggatgttaccggacaactgcattttgactcactggggctggatagctg

SEQ ID NO: 725112 - DNA, 75 bp, synthetic construct
  source 1..75: mol_type = other DNA
gtcagcatcttccagcgcaggaacagcatcaacaaaggccactgaagcctcaaaaagtgcctccgcagcagcaga

SEQ ID NO: 725113 - DNA, 75 bp, synthetic construct
  source 1..75: mol_type = other DNA
acaacgtctggattggtggtcgtgccatcattaacccgggcgttaccattggcgataacgtcgtagtggcatcag

SEQ ID NO: 725114 - DNA, 75 bp, synthetic construct
  source 1..75: mol_type = other DNA
attggcaggctctggtgtccttttacgctaccatgctaataatcagcacaataataagcccaaccacggagttga

SEQ ID NO: 725115 - DNA, 75 bp, synthetic construct
  source 1..75: mol_type = other DNA
gtggagttgttttcgacggttctgcaaatattaaccttccaggtgtaaacactacgggtaatcagaacaccactg

SEQ ID NO: 725116 - DNA, 75 bp, synthetic construct
  source 1..75: mol_type = other DNA
aatggtaaggcgctttcagcggatataacactgacgccgaaagatattggtacgcttaactcaacaacaatgtca

SEQ ID NO: 725117 - DNA, 75 bp, synthetic construct
  source 1..75: mol_type = other DNA
acagcgccagcgcatccagtactgatttggggacgaaaaccacatcgtcgtttgattacggcactaaatccacga

SEQ ID NO: 725118 - DNA, 75 bp, synthetic construct
  source 1..75: mol_type = other DNA
atggctattgctgcaagttacaccatgcatctctattgtgattgcctccagtgtacagatggcaaatataagtcg

SEQ ID NO: 725119 - DNA, 75 bp, synthetic construct
  source 1..75: mol_type = other DNA
cgccggcaacgctgggtttaaaagccagtcgctcggcaaattatcagcgcaaaaacaaggtttttatgcgcgctt

SEQ ID NO: 725120 - DNA, 75 bp, synthetic construct
  source 1..75: mol_type = other DNA
tagaggaaccagcttgtcatcgttgatcacgtcatcggttgaagccattcacacggccttgatcgatgggtggac

SEQ ID NO: 725121 - DNA, 75 bp, synthetic construct
  source 1..75: mol_type = other DNA
acgccggtacgcttgggaagatcgccatcccgtaggtcgaacgatttatgaggggggttacatcaaaatacagcc

SEQ ID NO: 725122 - DNA, 75 bp, synthetic construct
  source 1..75: mol_type = other DNA
caccgcccgtcttcagcactggtacaggcatttacagagcatttacaagtcggtttaccgaaactggttgcctcg

SEQ ID NO: 725123 - DNA, 75 bp, synthetic construct
  source 1..75: mol_type = other DNA
tacgggcgggggcgggagtttccgtggttaacccgctcaccgcactggattatgcggcaagcggtttagtggtgc

SEQ ID NO: 725124 - DNA, 75 bp, synthetic construct
  source 1..75: mol_type = other DNA
caccggcaacgctgggtttaaaagccagtcgctcggcaaattatcagcgcaaaaaaacaaggtttttatgcgcgc

SEQ ID NO: 725125 - DNA, 75 bp, synthetic construct
  source 1..75: mol_type = other DNA
ataaatttatggttatgcaggtaacaggttacaaacgctggcatatcactcaacaggtgattatgccgccgcagc

SEQ ID NO: 725126 - DNA, 75 bp, synthetic construct
  source 1..75: mol_type = other DNA
ggcaacttctacaagaatccggcgcaggacgccttgcgtgaagcgtatgacaacgatacgacctacgcgttccag

SEQ ID NO: 725127 - DNA, 75 bp, synthetic construct
  source 1..75: mol_type = other DNA
tcagggaaagttattctggtattgaaccaggcaggaatggtgttaagcgttcttttattaatgcatccagtttat

SEQ ID NO: 725128 - DNA, 75 bp, synthetic construct
  source 1..75: mol_type = other DNA
atcaggcgcgtgaccgttaccgtgaggcgctggcctggctgaaagatgtcatgaacggcaatgtgccggtcggtg

SEQ ID NO: 725129 - DNA, 75 bp, synthetic construct
  source 1..75: mol_type = other DNA
atgaattacgccaccgaaaccgatatgcgggcgcgttaccgcgaggattttctcaggtcattactgagcgtgccc

SEQ ID NO: 725130 - DNA, 75 bp, synthetic construct
  source 1..75: mol_type = other DNA
ctaaagagagtcctgaaatgcaggcgcacgtagccgagcgagttgaaaaagccagcattcagctcgcacttagtg

SEQ ID NO: 725131 - DNA, 75 bp, synthetic construct
  source 1..75: mol_type = other DNA
tacttgaagagtggctttcagcccaacgccatgatttaggactcactgagacgctacacacgcctgcgggaacag

SEQ ID NO: 725132 - DNA, 75 bp, synthetic construct
  source 1..75: mol_type = other DNA
tgaacatccagatagcagataacggaagcgtacatatcaatggcgttgcatcaaaagttacttttgttgagagag

SEQ ID NO: 725133 - DNA, 75 bp, synthetic construct
  source 1..75: mol_type = other DNA
tgcttacagtgatgaattgtcaaacagcgatgtggcaaatccggaacatttccttaccgcgtatcagaatcaaca

SEQ ID NO: 725134 - DNA, 75 bp, synthetic construct
  source 1..75: mol_type = other DNA
aaagcattacaggaaggtgaaaaatcctataccgccgtaattaagggcaaatcttttgagttattacgcctgaaa

SEQ ID NO: 725135 - DNA, 75 bp, synthetic construct
  source 1..75: mol_type = other DNA
ggcccgtaaagacgggtggcgaataagcaaagacaaaacgcgtgcttttgcgccagggcataaaattttgaggag

SEQ ID NO: 725136 - DNA, 75 bp, synthetic construct
  source 1..75: mol_type = other DNA
ccagacttcggtgagtatatcggtacgtcatgggctggctgtgcaaaagaggcgcgcaaggatggctggcgaata

SEQ ID NO: 725137 - DNA, 75 bp, synthetic construct
  source 1..75: mol_type = other DNA
atggctattgccgcaagttacaccatgcatctctattgtgactgccgccagtgtacggaaggtgtatatccagtg

SEQ ID NO: 725138 - DNA, 75 bp, synthetic construct
  source 1..75: mol_type = other DNA
aactggccgcgcctagcgaatacaaccaggtggaatatttctccaacgtgaaaccagacttgtttgccgatgtga

SEQ ID NO: 725139 - DNA, 75 bp, synthetic construct
  source 1..75: mol_type = other DNA
gacagattggtctggagcaacgttcactaatactgacggcatttggcctgatgttgattgtcgttattcccgcaa

SEQ ID NO: 725140 - DNA, 75 bp, synthetic construct
  source 1..75: mol_type = other DNA
tacttgaagagtggctctcagcccagcgccatgatttaggcctcaccgagacgctgcatacgcctgcgggtacgg

SEQ ID NO: 725141 - DNA, 75 bp, synthetic construct
  source 1..75: mol_type = other DNA
gcaggctgattttgttgtgataacccgctgttatgaaaaaatgctcgccgccagtgagaacaacaaagagatttc

SEQ ID NO: 725142 - DNA, 75 bp, synthetic construct
  source 1..75: mol_type = other DNA
gtataccgctgctgcgcggcgctgatgaacagcagctggcggagcgtgtcagggcgcacctttgcgcacagcgtc

SEQ ID NO: 725143 - DNA, 75 bp, synthetic construct
  source 1..75: mol_type = other DNA
ggcagccgtgaatggtggcagttatttcgcctggtgtcacagtggcactgcgatgtggttatcacggaccgtgcc

SEQ ID NO: 725144 - DNA, 75 bp, synthetic construct
  source 1..75: mol_type = other DNA
gaacagaaaaaacattaaaacaaaaggtggcttttgctcagcttgaacttaaccgtcttaagtctctggaaaaat

SEQ ID NO: 725145 - DNA, 75 bp, synthetic construct
  source 1..75: mol_type = other DNA
tggtctgcagggcgaaacgcctgacaaattctcgctgaccggtcgggcagaaggtatcaatctgcagatactgga

SEQ ID NO: 725146 - DNA, 75 bp, synthetic construct
  source 1..75: mol_type = other DNA
ccgtgctaatcatcgctatcctggttgtaggctccatctggattatgtggaaccttaactacaacatgatgatgc

SEQ ID NO: 725147 - DNA, 75 bp, synthetic construct
  source 1..75: mol_type = other DNA
ttggcaatacactttcctgcgaaaagagcggcagctcatcttcttcaaattcaaatacgcctgcatccaatacgc

SEQ ID NO: 725148 - DNA, 75 bp, synthetic construct
  source 1..75: mol_type = other DNA
gttgtccgtaatggtcagccgttaaaggcgggagattattatgccgcattacgttttaaggtggattacgaataa

SEQ ID NO: 725149 - DNA, 75 bp, synthetic construct
  source 1..75: mol_type = other DNA
aactgacgaaaattatgatttcgtctgcaccggtaacagcagaaaccctggattctgccagctatcttggcctga

SEQ ID NO: 725150 - DNA, 75 bp, synthetic construct
  source 1..75: mol_type = other DNA
agtactggggagaggagcatgtctggtggcatggtcgggcgagttttaaggggcaggtgattgctccggcctgca

SEQ ID NO: 725151 - DNA, 75 bp, synthetic construct
  source 1..75: mol_type = other DNA
tagcactgaaagagcttgagagaaagttagtccaagctatttctgatcgtaaacgactggcagcgcgttacgggg

SEQ ID NO: 725152 - DNA, 75 bp, synthetic construct
  source 1..75: mol_type = other DNA
atcagccattaataatggtgtcattaatattcgcccatttaaaaatgctttcgcaccagaggggattaacaccgc

SEQ ID NO: 725153 - DNA, 75 bp, synthetic construct
  source 1..75: mol_type = other DNA
attaccggaaccgtcagtgcaaaagagggtaacaatacatttttatttgatgatggcagcacactgacaggagaa

SEQ ID NO: 725154 - DNA, 75 bp, synthetic construct
  source 1..75: mol_type = other DNA
gactatttaccggtatctacgctaaccagtccggcccgtgaccaacaacgtcgcgccaggcaaaaacatctccac

SEQ ID NO: 725155 - DNA, 75 bp, synthetic construct
  source 1..75: mol_type = other DNA
gcaccggtttttatatgagtctaatggtacgccagatgagcagcgtgttgctgatgcctggaaagcggcaatgga

SEQ ID NO: 725156 - DNA, 75 bp, synthetic construct
  source 1..75: mol_type = other DNA
gctgatgcctggaaagcggcaatggaagacgtgctgaaagggcaggatcagaatcagatcccggaactgaacgtc

SEQ ID NO: 725157 - DNA, 75 bp, synthetic construct
  source 1..75: mol_type = other DNA
caggtgatagctccggcctgcacgctggctatggccgacacctggcaggttattgatatgggtaatacacctgtt

SEQ ID NO: 725158 - DNA, 75 bp, synthetic construct
  source 1..75: mol_type = other DNA
atcggtctgggtgatatttccgtactggttttctttggctggttgagtgtcatggggagctggtatttacaggct

SEQ ID NO: 725159 - DNA, 75 bp, synthetic construct
  source 1..75: mol_type = other DNA
gcgcaaaggcgattgcattactggctgcaaaaggtacgcagttaaaagctgccttttccgttggtggtaaactgg

SEQ ID NO: 725160 - DNA, 75 bp, synthetic construct
  source 1..75: mol_type = other DNA
ggcagcggcgaacccggaaattatcgccgggatcgggaaagcggcggcgggattttttgttattaaaagttcgat

SEQ ID NO: 725161 - DNA, 75 bp, synthetic construct
  source 1..75: mol_type = other DNA
acaacgcgcagacgagtcccatggtggacgcctttgcgccagccgcgctttgtcgcgtttattctcgcctacagc

SEQ ID NO: 725162 - DNA, 75 bp, synthetic construct
  source 1..75: mol_type = other DNA
agttcgctacacgcaaaacggaaaagcgattggtagttttccgttagctgtaacgaatggctacggtgataataa

SEQ ID NO: 725163 - DNA, 75 bp, synthetic construct
  source 1..75: mol_type = other DNA
atgaacgttaaccagcaaggccagcagcagaaagcgccaccgccacagcagaataacaacgggaataatcctccg

SEQ ID NO: 725164 - DNA, 75 bp, synthetic construct
  source 1..75: mol_type = other DNA
ggcaaaatccttgccggtggattaatgcgtggcgtgatgatggccgcccgtgccgtaatgtttctgggccgtgcg

SEQ ID NO: 725165 - DNA, 75 bp, synthetic construct
  source 1..75: mol_type = other DNA
ggtgttcagcattttgccacgtctggcacctttagccgaagtgctcgccagcggtgaaaccaatctcttcaacag

SEQ ID NO: 725166 - DNA, 75 bp, synthetic construct
  source 1..75: mol_type = other DNA
aagaacacgtctggtgggatgggcgggccagctttaaagggcaggtcatcgctcctgcctgtacgctggccatgg

SEQ ID NO: 725167 - DNA, 75 bp, synthetic construct
  source 1..75: mol_type = other DNA
ctggcgcgtaataccaatggcagcaccgaagccacggcgcgactaaaccgcgagttacagagtgtgggcaggacg

SEQ ID NO: 725168 - DNA, 75 bp, synthetic construct
  source 1..75: mol_type = other DNA
cggcaaccggggccaagctaggctcgtttgagctgaaggatatggcgaaagcgttacccggtatggccaaagcct

SEQ ID NO: 725169 - DNA, 75 bp, synthetic construct
  source 1..75: mol_type = other DNA
acgccagaatgccttaacccgggcaacagaacgttatggtcaactgggttcttcccggatgcagcatctcaacag

SEQ ID NO: 725170 - DNA, 75 bp, synthetic construct
  source 1..75: mol_type = other DNA
ttctgcacttacggcgtctggtaagaactcttatgcacttattgccacgggaaaatcggatggcggtgtggcctc

SEQ ID NO: 725171 - DNA, 75 bp, synthetic construct
  source 1..75: mol_type = other DNA
actcgttgcaggaagcgcaggatattgcgcgtagcattctggaacgtgacgtgcgcatcaacagcaacgaagaac

SEQ ID NO: 725172 - DNA, 75 bp, synthetic construct
  source 1..75: mol_type = other DNA
gcaccggtttttatatgagtctgattggtacgccagatgagcagcgtgtcgctgatgcctggaaagcggcaatgg

SEQ ID NO: 725173 - DNA, 75 bp, synthetic construct
  source 1..75: mol_type = other DNA
aatatcgaactttccaggttaactcatcaatctgcacatcgcgctaagcctcatgctatgtcaggagacaaactg

SEQ ID NO: 725174 - DNA, 75 bp, synthetic construct
  source 1..75: mol_type = other DNA
aggcgcatccagcaatttcatctcgccgcagccgggtaacatctatattcctctcggcaaacaagagccgggact

SEQ ID NO: 725175 - DNA, 75 bp, synthetic construct
  source 1..75: mol_type = other DNA
tagcgttctggatatggtgttgatgggactggcgccagccatgggcgcttttgctgttcccgggaagcgggaacg

SEQ ID NO: 725176 - DNA, 75 bp, synthetic construct
  source 1..75: mol_type = other DNA
tcgatcatacccggatggaagcgcctgcagttcgggtggcaaaaacaatgaacaccccgcatggcgacgcaatca

SEQ ID NO: 725177 - DNA, 75 bp, synthetic construct
  source 1..75: mol_type = other DNA
cctggcgtagcaatgtttgtcacccgcgtttcccgcggtcgtaagattaaagaagttatctggggactgatcctc

SEQ ID NO: 725178 - DNA, 75 bp, synthetic construct
  source 1..75: mol_type = other DNA
tcttttcatcgcagctgcattaagccttttcccacaacaatcggccgacgcggccaacgcaatatacacttttgt

SEQ ID NO: 725179 - DNA, 75 bp, synthetic construct
  source 1..75: mol_type = other DNA
gtagtgatcactctgatcccgctttccatcttgtttaccggtgcttcgctggaaacaatgaaaactaccgtcgtc

SEQ ID NO: 725180 - DNA, 75 bp, synthetic construct
  source 1..75: mol_type = other DNA
tgcggtggcctacaccatggcggcaaccagtacgcgtaatctccaggaaggtgacgatcctgaccgtgggctgcg

SEQ ID NO: 725181 - DNA, 75 bp, synthetic construct
  source 1..75: mol_type = other DNA
gccatcggcctgaccacgcaaaacttcctgcaaatgagcttattcaccgatccgcttggcgatggttcatttacc

SEQ ID NO: 725182 - DNA, 75 bp, synthetic construct
  source 1..75: mol_type = other DNA
atcttcaggaaggtgatgatccagaccgtgggctgcgtcttttctggtgcgtggtaatcaccctgatcccgcttt

SEQ ID NO: 725183 - DNA, 75 bp, synthetic construct
  source 1..75: mol_type = other DNA
gcacaatacagtaatagcggcgagtcggttgttttccgttatgccgcgctggaatcttcaaagcaggtgcctgtt

SEQ ID NO: 725184 - DNA, 75 bp, synthetic construct
  source 1..75: mol_type = other DNA
gagcgggttaacccatgcaatgctgatgtctgaaagcgggaatatcacaacggttggctccggtgttcagcagat

SEQ ID NO: 725185 - DNA, 75 bp, synthetic construct
  source 1..75: mol_type = other DNA
agactgtctgtcgaacctgaataccgccgcaatggaacacaaaatttcgatggctggttccctcgatattacact

SEQ ID NO: 725186 - DNA, 75 bp, synthetic construct
  source 1..75: mol_type = other DNA
aagccacaatacgctaaagcagcattgacacggtttcttggggaacctgttaattggttggattgtaatgaccat

SEQ ID NO: 725187 - DNA, 75 bp, synthetic construct
  source 1..75: mol_type = other DNA
tccgggatgaaaaactccgggattatcaatgttaatggtctgaacagtaccgggctacaggtaatcaatgcaggg

SEQ ID NO: 725188 - DNA, 75 bp, synthetic construct
  source 1..75: mol_type = other DNA
gtctggtgggtcaggtcttatctggatgactgtagaacaggcaattttaaatggctacaccactggagataattt

SEQ ID NO: 725189 - DNA, 75 bp, synthetic construct
  source 1..75: mol_type = other DNA
tacgttaattatcaataccgtgctgggggatgatacttctgccactgacaaactgattgtcacgggtaacacctc

SEQ ID NO: 725190 - DNA, 75 bp, synthetic construct
  source 1..75: mol_type = other DNA
gttgcgcctggcgcgactaaccgcagcgagcggcgagtaaaaatgctggaacgtccacggcgtgaagaggtggat

SEQ ID NO: 725191 - DNA, 75 bp, synthetic construct
  source 1..75: mol_type = other DNA
ccgcagataaaccaagccgctatttgttaaccgtctccgccagtgacggtgcggcgtatcgtgtcaccaccacca

SEQ ID NO: 725192 - DNA, 75 bp, synthetic construct
  source 1..75: mol_type = other DNA
gttaactgtctccgccagtgacggcgcggcgtatcgtgtcaccaccaccaaagagatcctcattgaacgtggtct

SEQ ID NO: 725193 - DNA, 75 bp, synthetic construct
  source 1..75: mol_type = other DNA
cctgcgaagagcttcgtcctgacattgactgggcctatttaagaggtgcagcaatgcgaaagcttaatgtcactg

SEQ ID NO: 725194 - DNA, 75 bp, synthetic construct
  source 1..75: mol_type = other DNA
gagaaagctactggtggtgctgtcacctgcgaagagcttcgtcctgacattgactgggcctatttaagaggtgca

SEQ ID NO: 725195 - DNA, 75 bp, synthetic construct
  source 1..75: mol_type = other DNA
ccacaggttcagcaatatgcgtgggataaagcggcaaacagtaaccagccgctggcgcacacggttgtggtgctc

SEQ ID NO: 725196 - DNA, 75 bp, synthetic construct
  source 1..75: mol_type = other DNA
caggcaaaattcaggattatccgcaaagtcgccccagcgcgattgcgaaaatccaggtcgatggcgaactggtgc

SEQ ID NO: 725197 - DNA, 75 bp, synthetic construct
  source 1..75: mol_type = other DNA
ttccgccggttgtggggaaaataacccccggagtgtaggcctgataagacgctatcagcgtcgcatcaggcatcc

SEQ ID NO: 725198 - DNA, 75 bp, synthetic construct
  source 1..75: mol_type = other DNA
ggcgatattttccgctggggagaggcattaattcaggtcagccagccacgctcaccttgctataaactcaattac

SEQ ID NO: 725199 - DNA, 75 bp, synthetic construct
  source 1..75: mol_type = other DNA
cggatgaactaaccgaagatgatataaattcaattatatccgcagcacaaacatctcgaaaattttcatatagag

SEQ ID NO: 725200 - DNA, 75 bp, synthetic construct
  source 1..75: mol_type = other DNA
aatgaagagcttgcaaactatcatggtatcagtcacgtgtccgtctctaagcgagttcaggctgcaaagattaac

SEQ ID NO: 725201 - DNA, 75 bp, synthetic construct
  source 1..75: mol_type = other DNA
caaaatcagaccgcagaaaattttgttctggaacccggagaaacgcttttcaaaattcccgttacgtgccccatt

SEQ ID NO: 725202 - DNA, 75 bp, synthetic construct
  source 1..75: mol_type = other DNA
ctggatcaactggctgaaatcgtaaaaccgcagcgtacgcttcccacgaccatggaatttgtcgatatcgccggt

SEQ ID NO: 725203 - DNA, 75 bp, synthetic construct
  source 1..75: mol_type = other DNA
acaccgattttgaaaaaggctttatccgtgcacaaaccatctcgtttgaagatttcatcacttacaaaggtgaac

SEQ ID NO: 725204 - DNA, 75 bp, synthetic construct
  source 1..75: mol_type = other DNA
ggtcacgttgttcgctgctttgaaaatgacaacatcattcacgtttccggcaaagttaacccggcagacgatatt

SEQ ID NO: 725205 - DNA, 75 bp, synthetic construct
  source 1..75: mol_type = other DNA
gcggagttgtttgttgcgcctgcgtttggcgaaaatctctcaaccgacggtctgacggaaagtaatgtttatatg

SEQ ID NO: 725206 - DNA, 75 bp, synthetic construct
  source 1..75: mol_type = other DNA
atgcgatatccggttgatgtatacacaggcaagattcaggcttatcccgaaggcaaacccagcgcaattgccaaa

SEQ ID NO: 725207 - DNA, 75 bp, synthetic construct
  source 1..75: mol_type = other DNA
cgccgaagagatgattggcaaattgaccggaatgcccattccactcaacagcttacgccagtggattttaggttt

SEQ ID NO: 725208 - DNA, 75 bp, synthetic construct
  source 1..75: mol_type = other DNA
aaatcacctacagccagaatggcaaaaactggaaagttgtttacggtggttatgacaccaaaactcaacctgcga

SEQ ID NO: 725209 - DNA, 75 bp, synthetic construct
  source 1..75: mol_type = other DNA
gcatacgctgccggacctgctgctgccggtgattaagaaccggcagtatgttgtggcaacagagcaggggcgacc

SEQ ID NO: 725210 - DNA, 75 bp, synthetic construct
  source 1..75: mol_type = other DNA
gcgggtctataaccactcccgctatattgatgcgaaacgtaacgcgctggatatgtggacagagcgattagagat

SEQ ID NO: 725211 - DNA, 75 bp, synthetic construct
  source 1..75: mol_type = other DNA
caaagaactgggcgaattattacaggcactggataaaaaaatattcccaccctactacagcgcactaatccgcct

SEQ ID NO: 725212 - DNA, 75 bp, synthetic construct
  source 1..75: mol_type = other DNA
tccgcctgctgccgctggcggctcttgtgctcaccgcctgttccgttactacgccaaaaggtcccggtaaaagcc

SEQ ID NO: 725213 - DNA, 75 bp, synthetic construct
  source 1..75: mol_type = other DNA
ctcagccaggaggcagaggcgcgttatcttacgcagccggcaattcttatgcctcagtcggactggaacagtggc

SEQ ID NO: 725214 - DNA, 75 bp, synthetic construct
  source 1..75: mol_type = other DNA
agcttcagtgagtttaaacaggcactcagaataagaatgtgctctcacaatgacgcggagcacaaatatgagaag

SEQ ID NO: 725215 - DNA, 75 bp, synthetic construct
  source 1..75: mol_type = other DNA
tcgaaaatcataacgaagatatcaacatctgcatctctaaatttgatattaacattgataattattccgtattta

SEQ ID NO: 725216 - DNA, 75 bp, synthetic construct
  source 1..75: mol_type = other DNA
cactgttagccagttgcgcaccgaagcaacaaagcttgccgcccacctggacgccgcaaagcacacctcagatct

SEQ ID NO: 725217 - DNA, 75 bp, synthetic construct
  source 1..75: mol_type = other DNA
actgacgcccgcacggctgaaaagcattgccgatgatgtgcgccaggtgtgtaacctcgccgatccagtggggca

SEQ ID NO: 725218 - DNA, 75 bp, synthetic construct
  source 1..75: mol_type = other DNA
agcggcctgcgtcttgagcgtcgtcgcgtaccgctggggggtattggcgtgatttatgaagcgcgcccgaacgtg

SEQ ID NO: 725219 - DNA, 75 bp, synthetic construct
  source 1..75: mol_type = other DNA
ctggatattatgctaaacgcgctgacgaaaattaccgcgctggattgacatgtgaacgcatttataattcagtca

SEQ ID NO: 725220 - DNA, 75 bp, synthetic construct
  source 1..75: mol_type = other DNA
aaagcttaccgtcagactggaagcggcagagcataccgcaaatattgccgctaccgtcagaagcaaaacaatcga

SEQ ID NO: 725221 - DNA, 75 bp, synthetic construct
  source 1..75: mol_type = other DNA
tctgacgaaagctaccgggctggaatgacatgtgagcgtgtttacgactcagtgagagagtcaaacaatagcagg

SEQ ID NO: 725222 - DNA, 75 bp, synthetic construct
  source 1..75: mol_type = other DNA
tcagtgaaatgctgcgtatggataaatacatcgacatgctgatcccacgcggcggggctggtttgcataaactgt

SEQ ID NO: 725223 - DNA, 75 bp, synthetic construct
  source 1..75: mol_type = other DNA
gaggtgttcgtaatgtcagaagtcattgatggcaaaccgcagtattcacgtattgaaactaacggcaaggacgtt

SEQ ID NO: 725224 - DNA, 75 bp, synthetic construct
  source 1..75: mol_type = other DNA
aggtcaagataaagcttttccaacagtgttacttcttgaagaagcgcatcattatttaagagatccttattctga

SEQ ID NO: 725225 - DNA, 75 bp, synthetic construct
  source 1..75: mol_type = other DNA
tacacgccgatgctaccgcactgacgcaattgcaggcaggtcccgcgaaggtggttgctgttaaagctgaagagt

SEQ ID NO: 725226 - DNA, 75 bp, synthetic construct
  source 1..75: mol_type = other DNA
attgccgatgatgtgcgccaggtgtgtaacctcgccgatccagtggggcaggtaattgatggcggggtgctggac

SEQ ID NO: 725227 - DNA, 75 bp, synthetic construct
  source 1..75: mol_type = other DNA
tcagtgaaatgctgcgtatggataaatacatcgacatgctgatcccgcgtggtggcgctggcctgcataaactgt

SEQ ID NO: 725228 - DNA, 75 bp, synthetic construct
  source 1..75: mol_type = other DNA
gaacaggctgcaaaagcagctgcgaatgctgctggtctgtctgccactgttagccagctgcgcaccgaagcaaca

SEQ ID NO: 725229 - DNA, 75 bp, synthetic construct
  source 1..75: mol_type = other DNA
ggtcaggcatcggcacagctggcggcaacgctggacgtggttactcagaaggctaatgagctgggtgtacctgtc

SEQ ID NO: 725230 - DNA, 75 bp, synthetic construct
  source 1..75: mol_type = other DNA
tgagttaatgctggaagcaacagaagatgattgtcatcctggttgtccggtatttgctggtatggaattaccgaa

SEQ ID NO: 725231 - DNA, 75 bp, synthetic construct
  source 1..75: mol_type = other DNA
tcatcaccgtgtttaccgacattacctgcggttactgccacaaaatgcatgagcagatggctgactacaacgcgc

SEQ ID NO: 725232 - DNA, 75 bp, synthetic construct
  source 1..75: mol_type = other DNA
gggctggttcaggaagagccccagttcggactggaaacggttctctgtctgcgtctgcgtgtagacagtgagctt

SEQ ID NO: 725233 - DNA, 75 bp, synthetic construct
  source 1..75: mol_type = other DNA
gatatccttggccctcatcttcccgcctccgatgccgggttccaggcgctgattaaccggctttacgggtgggcc

SEQ ID NO: 725234 - DNA, 75 bp, synthetic construct
  source 1..75: mol_type = other DNA
cgccacttcaggtttttctgaccacacactctcccgtggccgtgcgtgagcttaatggcaaccagctctttgtcg

SEQ ID NO: 725235 - DNA, 75 bp, synthetic construct
  source 1..75: mol_type = other DNA
tgtttgacacactggactccaccaacaaggaactggttaaccgattccgatctatatatcaccggaagaacttat

SEQ ID NO: 725236 - DNA, 75 bp, synthetic construct
  source 1..75: mol_type = other DNA
caacaatgttgaagccggagaagaggttgaaatcacccgcagaggccgtgagccagcagtaattgtcagcaaggc

SEQ ID NO: 725237 - DNA, 75 bp, synthetic construct
  source 1..75: mol_type = other DNA
gttgaaatcacccgcagaggccgtgagccagcagtaattgtcagcaaggctactttcgaagcctacaaaaaagcg

SEQ ID NO: 725238 - DNA, 75 bp, synthetic construct
  source 1..75: mol_type = other DNA
atgacgatgaattcctgtcgttagatttgaacgtcaaaatcgtcagcgatcttgacgacgccatcgcccatattc

SEQ ID NO: 725239 - DNA, 75 bp, synthetic construct
  source 1..75: mol_type = other DNA
catatttacgttgatgaaagcgctgacatttctgcagccctgaaagtgatcgtcaacgcgaaaacccagcgtccg

SEQ ID NO: 725240 - DNA, 75 bp, synthetic construct
  source 1..75: mol_type = other DNA
gcagttgcagacaggccctgcgaaggtggttgctgttaaagccgaagagtatgacgatgagtttctgtcattaga

SEQ ID NO: 725241 - DNA, 75 bp, synthetic construct
  source 1..75: mol_type = other DNA
atcataacgcgtggccccgcacccgccccggagaagtgcgccggcgtcttgcgtcctggctggaaagtcagggga

SEQ ID NO: 725242 - DNA, 75 bp, synthetic construct
  source 1..75: mol_type = other DNA
gcgtcctggctggaaactcaggggattgatacaacgaagagttttgatgctgtacagggcgcagccacgccccgt

SEQ ID NO: 725243 - DNA, 75 bp, synthetic construct
  source 1..75: mol_type = other DNA
tcatggtgggtttatggccgtcatcggtgagtccggtgcgggtaaatccacgctgcgccgcgacctgactgaacg

SEQ ID NO: 725244 - DNA, 75 bp, synthetic construct
  source 1..75: mol_type = other DNA
tcaggacgcccgctttcgccagatgcatcgcgtcctgaaagacagctgccaggcggggttcagccacgttctggt

SEQ ID NO: 725245 - DNA, 75 bp, synthetic construct
  source 1..75: mol_type = other DNA
tatcaaccgcgagaatgcgccggtaattgttatcgagccatacatcatcgcaatggaagacaacgatgtgaaagg

SEQ ID NO: 725246 - DNA, 75 bp, synthetic construct
  source 1..75: mol_type = other DNA
accaccccggacattcgctacgtgcgtgaggcgctgtaccagacagcccgtcatggggggtttatggccgtcatc

SEQ ID NO: 725247 - DNA, 75 bp, synthetic construct
  source 1..75: mol_type = other DNA
cacgagtgatgagatcctcgaggcgtacagctggtcgcattttaatatcagctggctgtggtatttactcccgag

SEQ ID NO: 725248 - DNA, 75 bp, synthetic construct
  source 1..75: mol_type = other DNA
ccgctggcaaacctttaacggcgtgtttgtgccgttgttgaagcccgcgctcgccaatgcctttttaatcgtcgt

SEQ ID NO: 725249 - DNA, 75 bp, synthetic construct
  source 1..75: mol_type = other DNA
taccacgcgcatcgccaaacgcagcgccattattggccgcatcttttccattctgcccatcgttacgccaccgtt

SEQ ID NO: 725250 - DNA, 75 bp, synthetic construct
  source 1..75: mol_type = other DNA
ggcctacaaaagcggcatgtcggtgatgggctgggaagtcacctctgcagtgacgctgatcttcctcgcgctaat

SEQ ID NO: 725251 - DNA, 75 bp, synthetic construct
  source 1..75: mol_type = other DNA
cgatgatcagttatttcatcgccgccgtagtgattgtctacctgatttttgacagctggcggcatcgtcacgacc

SEQ ID NO: 725252 - DNA, 75 bp, synthetic construct
  source 1..75: mol_type = other DNA
ttacatcctcaaccgcgtggaagatggcgaatacggtgtagcgattgcctacggttccattctgatcgtggtgat

SEQ ID NO: 725253 - DNA, 75 bp, synthetic construct
  source 1..75: mol_type = other DNA
tcaggacgcccgctttcgccagttgcatcgcgtcctgaaagacagcagccaggcggggttcagccacgttctggt

SEQ ID NO: 725254 - DNA, 75 bp, synthetic construct
  source 1..75: mol_type = other DNA
tggatacatggatagcccgcgtcagccgggaagagcgtgaggcactggaagcccgtcaggccgccattcttgctg

SEQ ID NO: 725255 - DNA, 75 bp, synthetic construct
  source 1..75: mol_type = other DNA
tttcatatcgtcgcccgtcttgtttacagcaaaccctggatggctttttttctggcggagttgattgcagccatc

SEQ ID NO: 725256 - DNA, 75 bp, synthetic construct
  source 1..75: mol_type = other DNA
atggcagggcacaaaggacatgaatttgtgtgggtaaagaatgtggatcatcagctgcgtcatgaagcggacagc

SEQ ID NO: 725257 - DNA, 75 bp, synthetic construct
  source 1..75: mol_type = other DNA
tatctgaaggtttatgtacccgagaagagttatttataacgtctaaattgtgggtgcaggatatgttgaatcagg

SEQ ID NO: 725258 - DNA, 75 bp, synthetic construct
  source 1..75: mol_type = other DNA
aaattttgctatctgggatttctcactgacagagaaagaaatggcgcaaattagttcgctagatttgggttatgt

SEQ ID NO: 725259 - DNA, 75 bp, synthetic construct
  source 1..75: mol_type = other DNA
cagcctggaagagcgtgaggcactggaagccaggcaacaggccatgatggaagggcagcaggagggcggacatgt

SEQ ID NO: 725260 - DNA, 75 bp, synthetic construct
  source 1..75: mol_type = other DNA
ctgccgaaagcggttactgctcgcgttgcggtggaagcgggcattgctgactactggtacaagtatgttggcctg

SEQ ID NO: 725261 - DNA, 75 bp, synthetic construct
  source 1..75: mol_type = other DNA
aggcggggttcagccacgttctggtgattgaggacgcccacagtctgccctttccgacactgaaacacctcaaac

SEQ ID NO: 725262 - DNA, 75 bp, synthetic construct
  source 1..75: mol_type = other DNA
aggcggggttcagccacgttctggtgattgaggatgcccacagtctgccccttccgacactgaaacacctcaaac

SEQ ID NO: 725263 - DNA, 75 bp, synthetic construct
  source 1..75: mol_type = other DNA
caagggcggacgaaaattcgcgctcaccaaagctcaggtgcgtctcgcgcaagccgccatggcccagcgcgatac

SEQ ID NO: 725264 - DNA, 75 bp, synthetic construct
  source 1..75: mol_type = other DNA
tcaagctagggaaaacttacttacaacttcagataagtacattaaaatatactcaataaacctcaagatgcgggt

SEQ ID NO: 725265 - DNA, 75 bp, synthetic construct
  source 1..75: mol_type = other DNA
tctcaaagcggcgctggcgatgtacaacagccaggatgaaaacataaagaatcactggttactggaatcggcaaa

SEQ ID NO: 725266 - DNA, 75 bp, synthetic construct
  source 1..75: mol_type = other DNA
ggcctggggcagatcgacaaatcgctggatgaagcctcactcagcctgcgcgcgggttcactgcgaaccattacg

SEQ ID NO: 725267 - DNA, 75 bp, synthetic construct
  source 1..75: mol_type = other DNA
gcaatagccgtcaagaaatggctggaacaatatgggcaaggcggcacggtgcgcttttatggttgtcctggctaa

SEQ ID NO: 725268 - DNA, 75 bp, synthetic construct
  source 1..75: mol_type = other DNA
atgaaagcattcatatttccattaatggtttcaggtttgttgttgagtgcatcagttaatgccacagaggttaaa

SEQ ID NO: 725269 - DNA, 75 bp, synthetic construct
  source 1..75: mol_type = other DNA
atgaaagcgtttatattgtcattaatagtttcaggtttgttgttgagtgcatcagttaatgctacagaggttaaa

SEQ ID NO: 725270 - DNA, 75 bp, synthetic construct
  source 1..75: mol_type = other DNA
actggtgtacaggatgtctttcgtccatgccgtgactgtaatggaggcgtacctgatgtactgcgccagggctct

SEQ ID NO: 725271 - DNA, 75 bp, synthetic construct
  source 1..75: mol_type = other DNA
aagaaatggctggaacaatatgggcaaggcggcacagtgcgcttttatggttgtcctggcgaagaaggcggctcg

SEQ ID NO: 725272 - DNA, 75 bp, synthetic construct
  source 1..75: mol_type = other DNA
ggcaaacattcaggcatcatggcgctttaaagggatcgcagcacatgccgcgaattcccctcatttgggacgcag

SEQ ID NO: 725273 - DNA, 75 bp, synthetic construct
  source 1..75: mol_type = other DNA
tttggtgcaaatattgttcatgcaatgatgggatgtgcaggaatcaggcagttaacgcaacatatggtttccgtc

SEQ ID NO: 725274 - DNA, 75 bp, synthetic construct
  source 1..75: mol_type = other DNA
acgaagaatcagcactgaccgccggacaaggtggttttattaccgaaacgggtgcgcatatcattaacatcaccg

SEQ ID NO: 725275 - DNA, 75 bp, synthetic construct
  source 1..75: mol_type = other DNA
atgctactagagataccccacctacatccagatgataaagaaagatttaaaagaaacggaatgttatttctggct

SEQ ID NO: 725276 - DNA, 75 bp, synthetic construct
  source 1..75: mol_type = other DNA
agtaaatttgttgcacctgaatttcatggaaagaaaatcgggttagtgctccagaaagtattaaccacaaacaaa

SEQ ID NO: 725277 - DNA, 75 bp, synthetic construct
  source 1..75: mol_type = other DNA
atgagcaacgtgatttttacttataacgaagaagcagcactgaccgcagggcaaggtggttttattaacgaaact

SEQ ID NO: 725278 - DNA, 75 bp, synthetic construct
  source 1..75: mol_type = other DNA
ggagaatccgacgacggacggaaaatccaatatctcagtgtttgtgttcagaagaatgacggcactgaaaataaa

SEQ ID NO: 725279 - DNA, 75 bp, synthetic construct
  source 1..75: mol_type = other DNA
atgatggttgaagagattcgtaaaggagaatctctgtatttcgaagatatgaccgcgctcattaaggaggttgaa

SEQ ID NO: 725280 - DNA, 75 bp, synthetic construct
  source 1..75: mol_type = other DNA
gattgaggaggcccacagtctgcccattccgacgctgaagcacctcaaacgcttctttgagctggaatccggctt

SEQ ID NO: 725281 - DNA, 75 bp, synthetic construct
  source 1..75: mol_type = other DNA
gacgacagagccgctgaaagtgaaggtcgatttaaacagcacgctgcaggtttctgccggagcgaaactcgaaat

SEQ ID NO: 725282 - DNA, 75 bp, synthetic construct
  source 1..75: mol_type = other DNA
gcacggaggaatgcttcatgccgtccggacagatgtgcgcccccgtatacctgcagctcatcaccccgctgcacc

SEQ ID NO: 725283 - DNA, 75 bp, synthetic construct
  source 1..75: mol_type = other DNA
gccagttgctctggtgtgcactgaatgccctgaaaacggcacaggaaaaccacaatataaccagtgaaaccggat

SEQ ID NO: 725284 - DNA, 75 bp, synthetic construct
  source 1..75: mol_type = other DNA
tggccgtcagtaacctggtgatagccgccatgaatctggctgctgaaatcggggtttcacaggtcaacgctgacg

SEQ ID NO: 725285 - DNA, 75 bp, synthetic construct
  source 1..75: mol_type = other DNA
caccactggaaagcatcagacgcagtcaggacgcccgctttcgccagttgcatcgcgtcctgaaagacagcagcc

SEQ ID NO: 725286 - DNA, 75 bp, synthetic construct
  source 1..75: mol_type = other DNA
agcagcggctggtcccctgggagaagcgggcattgatggatggatcgattctcacttctgggagcgttttggtgg

SEQ ID NO: 725287 - DNA, 75 bp, synthetic construct
  source 1..75: mol_type = other DNA
cggtttccggcaaatcctaccgcggcgacgtccagccgcttccgatcaccctagtgtggagcgtggtcgccatac

SEQ ID NO: 725288 - DNA, 75 bp, synthetic construct
  source 1..75: mol_type = other DNA
gcgcgcggcgcccactgcgcacccccgtgggggacgtgcggcagctgcgtggcggcgggctgggttatggcttag

SEQ ID NO: 725289 - DNA, 75 bp, synthetic construct
  source 1..75: mol_type = other DNA
gaaagatgtcaacgtcggcaatatgcatttctcggaagggaaaaagcaaatcagcagtaaagtttatgtcgatga

SEQ ID NO: 725290 - DNA, 75 bp, synthetic construct
  source 1..75: mol_type = other DNA
aaaaaccattaacgtcatcggcaaagctgcaccgcatcaaaagatcttcctgatttgccgtacgccacaaacggt

SEQ ID NO: 725291 - DNA, 75 bp, synthetic construct
  source 1..75: mol_type = other DNA
aaatccgtactggtcttggtcagaattttgaccctgttgagaacaaagcaattattaatccaggtgctactggct

SEQ ID NO: 725292 - DNA, 75 bp, synthetic construct
  source 1..75: mol_type = other DNA
gaactggaggaaatgaaaatattcctggttttagtgggactgcggatttttttaatgcgacacgttttgtaacag

SEQ ID NO: 725293 - DNA, 75 bp, synthetic construct
  source 1..75: mol_type = other DNA
gacaacaatatcaggttaattcactcgctgaattacaacaatataatgattatctgactcaggcgatagttgacg

SEQ ID NO: 725294 - DNA, 75 bp, synthetic construct
  source 1..75: mol_type = other DNA
ataatacggcactcagtcaggacggagctacaaatattgctgaagtcaaaacgggtgttcagggtaaattgtcag

SEQ ID NO: 725295 - DNA, 75 bp, synthetic construct
  source 1..75: mol_type = other DNA
gtccggcgttgggctttgccgattgcagcgtggtgccacagccgacggcggcacaactggcggatatcgcgcttg

SEQ ID NO: 725296 - DNA, 75 bp, synthetic construct
  source 1..75: mol_type = other DNA
cgggtaatattatcaacggcggaaccctgacgctgggcggtgcagaggactggatgctgaacagtgataatgtga

SEQ ID NO: 725297 - DNA, 75 bp, synthetic construct
  source 1..75: mol_type = other DNA
gcagtatactctgaccaatatcaccacatttgatggcggtaccacttcactggctgccggtgcaacacttgctac

SEQ ID NO: 725298 - DNA, 75 bp, synthetic construct
  source 1..75: mol_type = other DNA
tccggatatatatcaggccagtaccggattactcgcagtcctggctgcaacggatagtggtacagcgcggttaag

SEQ ID NO: 725299 - DNA, 75 bp, synthetic construct
  source 1..75: mol_type = other DNA
cggatctggctgtggcggatgcatcagcgctgggggcgggtaatattatcaatggcggaaccctgacgctgcgcg

SEQ ID NO: 725300 - DNA, 75 bp, synthetic construct
  source 1..75: mol_type = other DNA
caaaattgtgaaaagctggctgaaggcgaactgcccatcacctgccacacttgtttcgctgtatggcaggatgca

SEQ ID NO: 725301 - DNA, 75 bp, synthetic construct
  source 1..75: mol_type = other DNA
cagccataacgtcggggatcaatttgccggaactctgaagctgggtaccagtagctttgctctggaagggctgaa

SEQ ID NO: 725302 - DNA, 75 bp, synthetic construct
  source 1..75: mol_type = other DNA
aactgttaactggaattctgaaaatgagttctacttgcaggccgcagcaacttctacaaacgggctcacatatac

SEQ ID NO: 725303 - DNA, 75 bp, synthetic construct
  source 1..75: mol_type = other DNA
ggaaccacagtactcagcagtgggatgtggtttcagaacttacaggtaacaaaaaaaaatgtaaatctgctcgct

SEQ ID NO: 725304 - DNA, 75 bp, synthetic construct
  source 1..75: mol_type = other DNA
gcggatatcgtgccgtcgggccactgatacaaggacttgccgcgccgatgcacgatctctctcgtggttgtagcg

SEQ ID NO: 725305 - DNA, 75 bp, synthetic construct
  source 1..75: mol_type = other DNA
gcacccgtttcgcatcatcaagcggcggttcggcttcgtgaaagccagatacagggggttgctgaaaaacgataa

SEQ ID NO: 725306 - DNA, 75 bp, synthetic construct
  source 1..75: mol_type = other DNA
accataatgaagatggcagtgtctggatgcgtttcaaggcgggtaatgccgggtcgcaggcggctgacggcaatg

SEQ ID NO: 725307 - DNA, 75 bp, synthetic construct
  source 1..75: mol_type = other DNA
tacgagattgtctgggacgaagagcagacgcacaaattcaagaatatctccccgcatttgcagcgcattaaagcg

SEQ ID NO: 725308 - DNA, 75 bp, synthetic construct
  source 1..75: mol_type = other DNA
gactggctgatcgccgagcgtcccggcaaggtaaaaaccttgaagcagcatccgcgcaagaacaaaacggccatc

SEQ ID NO: 725309 - DNA, 75 bp, synthetic construct
  source 1..75: mol_type = other DNA
gtggatcactattgcaccgttcgtgacagctaccaaggagcgccacagcgcgaggagctggccgaggtggatgtg

SEQ ID NO: 725310 - DNA, 75 bp, synthetic construct
  source 1..75: mol_type = other DNA
accgatccgctgatgttcgctgccgcaatggtcagcgccgggacagcggatgtctgtatcgcgggcaatctctct

SEQ ID NO: 725311 - DNA, 75 bp, synthetic construct
  source 1..75: mol_type = other DNA
cttcgtcagtttgcgctcagtcatggcgtagcgatggacgggctacaggtgatagatccgcatggcaacctcgca

SEQ ID NO: 725312 - DNA, 75 bp, synthetic construct
  source 1..75: mol_type = other DNA
cgtgaacgcgcgccacaactggtagtggatggcgagttgcagtttgacgccgcctttgtgccggaagtggcagcg

SEQ ID NO: 725313 - DNA, 75 bp, synthetic construct
  source 1..75: mol_type = other DNA
atgaaagataaaaaccgtaaaatctggctctggcgtggcgttattgtcgtcttgttgtttgcttcgctgctcgca

SEQ ID NO: 725314 - DNA, 75 bp, synthetic construct
  source 1..75: mol_type = other DNA
ttctggtttgttaccggactgtttatcctgtttgccctgactgtggtgattttcatggcgaaaaaaatatggttt

SEQ ID NO: 725315 - DNA, 75 bp, synthetic construct
  source 1..75: mol_type = other DNA
agggcaaagcgaatgtaatggtttttccgtcgctggaggcaggaaatattggctacaaaatcgcacaacgacttg

SEQ ID NO: 725316 - DNA, 75 bp, synthetic construct
  source 1..75: mol_type = other DNA
tgggtatgggaagaaaacggtgaatttctcggttttgccagcattatggaagggcggtttctggcagcaatgttt

SEQ ID NO: 725317 - DNA, 75 bp, synthetic construct
  source 1..75: mol_type = other DNA
tttttacacgggtgagggaagttgtccggcaatgcagtttcttgtggattataaaaacagggggattttttacag

SEQ ID NO: 725318 - DNA, 75 bp, synthetic construct
  source 1..75: mol_type = other DNA
gacacgtccactggtcatgcctgccccggaaaaggttccggatgtcagcgaaccggtaaccgctccggataactc

SEQ ID NO: 725319 - DNA, 75 bp, synthetic construct
  source 1..75: mol_type = other DNA
tcgttttcgctgtcttcgtttttctgtttgatactttactgatgcagtggattgaactgctggcaacagaaacag

SEQ ID NO: 725320 - DNA, 75 bp, synthetic construct
  source 1..75: mol_type = other DNA
tgggtgaatacatccggtgatacctatgatgtttatgttgaaataggtaattacgccacacgtgttaatattcag

SEQ ID NO: 725321 - DNA, 75 bp, synthetic construct
  source 1..75: mol_type = other DNA
ataacgttggctccccgcatcaagcaggcatctctgagctggttcttcgtgcgggaaatgggaatccaaaaggtc

SEQ ID NO: 725322 - DNA, 75 bp, synthetic construct
  source 1..75: mol_type = other DNA
aaaattggatttaaaaatgattcagatgctgattctgactcatacatgtggtttgaaactggtgataatggcaat

SEQ ID NO: 725323 - DNA, 75 bp, synthetic construct
  source 1..75: mol_type = other DNA
ctgaagcgccgtctcttttattacaccactccgtttttttcatcgcttctggcccttcataaggggccccggctg

SEQ ID NO: 725324 - DNA, 75 bp, synthetic construct
  source 1..75: mol_type = other DNA
atgctggaaaaatctctggcaatactcttcgcattgttaattttagcaacgctgataaaccgttttctggtaggg

SEQ ID NO: 725325 - DNA, 75 bp, synthetic construct
  source 1..75: mol_type = other DNA
aatgaagatgctgtcggtgaagctgttcgtgaggccatttcggaaggtctttgtacccgtgaggagttatttatt

SEQ ID NO: 725326 - DNA, 75 bp, synthetic construct
  source 1..75: mol_type = other DNA
gatgaaatgccaataaaaaagcctgagttcgatgagggacgaactcaggctggtgttaagttttacagtaacacg

SEQ ID NO: 725327 - DNA, 75 bp, synthetic construct
  source 1..75: mol_type = other DNA
tggtgctgttcgtcaccggactgttgccacacaaagaaggtctgcttccggtgtaaaagccgttcctgtccgcac

SEQ ID NO: 725328 - DNA, 75 bp, synthetic construct
  source 1..75: mol_type = other DNA
gccagtctggcaaccctgacagaagtcgggcgggatattcttgcgaaatcgaccgttgccgctgttatcgaatac

SEQ ID NO: 725329 - DNA, 75 bp, synthetic construct
  source 1..75: mol_type = other DNA
ggaactggcaaaggcttatccaacaaataaattacctgatttacgcggtgagtttattcgtggatgggatgatag

SEQ ID NO: 725330 - DNA, 75 bp, synthetic construct
  source 1..75: mol_type = other DNA
taaaaccagcactcagggagttcttgattaccttggtttgggagaaggttcggcattacccgttggtgtgcctgt

SEQ ID NO: 725331 - DNA, 75 bp, synthetic construct
  source 1..75: mol_type = other DNA
ccaactgcgcgacagggaacgaataatacccaaatcgcaagcacggctttcgttatggctgcgattgccgccctt

SEQ ID NO: 725332 - DNA, 75 bp, synthetic construct
  source 1..75: mol_type = other DNA
atgtctgaaatcacagcctcccgtccggaagtggtcaacggggacattatctgctccacctcagtcagccacatt

SEQ ID NO: 725333 - DNA, 75 bp, synthetic construct
  source 1..75: mol_type = other DNA
cgttgccaaaggatccggacgtgcacaaacatttcgcaccattctgaccgtatccagcactgccaccgtggcgct

SEQ ID NO: 725334 - DNA, 75 bp, synthetic construct
  source 1..75: mol_type = other DNA
gaaaatataccgctcaggacgccacgacggcacgaaaaggccttgtccagctcagtagcgccaccaacagcacgt

SEQ ID NO: 725335 - DNA, 75 bp, synthetic construct
  source 1..75: mol_type = other DNA
ctcagtagcgccaccaacagcacgtctgaaacgcaggctgcaacgccgaaagcagtaaaggccgcgtatgatctt

SEQ ID NO: 725336 - DNA, 75 bp, synthetic construct
  source 1..75: mol_type = other DNA
gcgccactaacagcgtgtctgaaacgcaggctgcaacgccgaaagcggttaaggccgcgtatgatcttgctaacg

SEQ ID NO: 725337 - DNA, 75 bp, synthetic construct
  source 1..75: mol_type = other DNA
acaggtttccgtattttacggggaatgatgtcgccagcctggcaaccctgacaaaagtcgggcgggatattcttg

SEQ ID NO: 725338 - DNA, 75 bp, synthetic construct
  source 1..75: mol_type = other DNA
ccatgttatgcgctttgtctccggcagtattcaaagtaataaaaccataaatattacagggcgtgttaatccctc

SEQ ID NO: 725339 - DNA, 75 bp, synthetic construct
  source 1..75: mol_type = other DNA
ttgaaataggtaattacgccacaggtgttaatattcagtgggattataccagtaacgccagcgtaacgattcata

SEQ ID NO: 725340 - DNA, 75 bp, synthetic construct
  source 1..75: mol_type = other DNA
aagaatgcaaggtttaatttatggggtaattcatcccgccccgtagttgcagaacttggtgatgattcaggttgg

SEQ ID NO: 725341 - DNA, 75 bp, synthetic construct
  source 1..75: mol_type = other DNA
atgaataaagcgtttgagctatgggtacgccagcgttacggcaatcgctatgacctgacccgcgatgcttacggc

SEQ ID NO: 725342 - DNA, 75 bp, synthetic construct
  source 1..75: mol_type = other DNA
gctggggtgtggttggcgtctggatgggaatgtttgccgactgggctgtgcgggccgtgctgttttactggcgaa

SEQ ID NO: 725343 - DNA, 75 bp, synthetic construct
  source 1..75: mol_type = other DNA
atgcggttgtattgcagcaaacagggcttacattgcggcaggcacaacgctttctttcatttccacgaaagtatc

SEQ ID NO: 725344 - DNA, 75 bp, synthetic construct
  source 1..75: mol_type = other DNA
atgaataaagcatttgaacgatgggtccaccagcgttacggcaatcgctatgacctgacacgagatgttgacggt

SEQ ID NO: 725345 - DNA, 75 bp, synthetic construct
  source 1..75: mol_type = other DNA
aagctatcacccgcaatctcgatcgcgaaatctggcgtgacctgatgcaacgttccgggattctttccttaatgg

SEQ ID NO: 725346 - DNA, 75 bp, synthetic construct
  source 1..75: mol_type = other DNA
tatttatctcaaaaaatggacaactgtctaaagttaccgaaagttcaggtaatggctttgactcattagaattag

SEQ ID NO: 725347 - DNA, 75 bp, synthetic construct
  source 1..75: mol_type = other DNA
gggtcaggaggtgattgtggacttcctcaacggcgatccggaccagccgatcattatggggcgcacctaccacca

SEQ ID NO: 725348 - DNA, 75 bp, synthetic construct
  source 1..75: mol_type = other DNA
gcaggggttcaggtaccacgctgaataaccactttgcggtaataccgacagacagaacatggcggccacagccgt

SEQ ID NO: 725349 - DNA, 75 bp, synthetic construct
  source 1..75: mol_type = other DNA
ttcttcgccaccgctggatgcgcctgcgcttatatcgtttccccagttctgttttgaccgattaccgaatactga

SEQ ID NO: 725350 - DNA, 75 bp, synthetic construct
  source 1..75: mol_type = other DNA
cttattactggttcacagcccaattatggtattgcctggctttgtacctctgtttttctctggcggtccaattgg

SEQ ID NO: 725351 - DNA, 75 bp, synthetic construct
  source 1..75: mol_type = other DNA
cgccaataaaaattattaccggcatggtcagcgccatggtgggattaatgatggtgttatttggtggtttccagt

SEQ ID NO: 725352 - DNA, 75 bp, synthetic construct
  source 1..75: mol_type = other DNA
ggtggaagactacgccgccggttgtctggtggaaaaaattaaggtcggtgatttctccacaccggctaaagcgac

SEQ ID NO: 725353 - DNA, 75 bp, synthetic construct
  source 1..75: mol_type = other DNA
agcgactacggtttctcctatggtgctggtctgcagttcaacccgatggaaaacgttgctctggacttctcttac

SEQ ID NO: 725354 - DNA, 75 bp, synthetic construct
  source 1..75: mol_type = other DNA
atggagccgctttgaaagtaacgacttacgatttgacggtgagcggtacgaatagtgaaggggcattctccatcc

SEQ ID NO: 725355 - DNA, 75 bp, synthetic construct
  source 1..75: mol_type = other DNA
atatgaaagccatgcgctggacacgacgattgaaggtggaactcagtctctggatagtaagtcaacggcaaaaaa

SEQ ID NO: 725356 - DNA, 75 bp, synthetic construct
  source 1..75: mol_type = other DNA
gatgaacgaggtacaacaaataacactcatattatcaaccatggccggcaggaggtccatggtgggatatctaat

SEQ ID NO: 725357 - DNA, 75 bp, synthetic construct
  source 1..75: mol_type = other DNA
caccatgaaatactgctgtgcttacatcgcaatacttggcttaaaagtaggtctcttttatttctggtttatgcg

SEQ ID NO: 725358 - DNA, 75 bp, synthetic construct
  source 1..75: mol_type = other DNA
tctgtttacaccttaggtggcacaattattctgcaattagcgatttttaatctcctgctgccctttgtcattatt

SEQ ID NO: 725359 - DNA, 75 bp, synthetic construct
  source 1..75: mol_type = other DNA
taattaaagataaaggaacaatgtcagttttaacgaatgctaaagctgatgcgacccgaatagataacggcggcg

SEQ ID NO: 725360 - DNA, 75 bp, synthetic construct
  source 1..75: mol_type = other DNA
atcgttacgggactggtcaaatgtgatcggtggggatttgggcttaactggggctggcaacgtgatcggcttgca

SEQ ID NO: 725361 - DNA, 75 bp, synthetic construct
  source 1..75: mol_type = other DNA
ttagcacgtttgaacaattacaccacagcaaaggcgaagtatttgagcgtggggtgatcaacgtgtttaaagggc

SEQ ID NO: 725362 - DNA, 75 bp, synthetic construct
  source 1..75: mol_type = other DNA
cagtatatggcgagacctgatgaagaagtcgggaatgctggcgctcatggacgcacaggcccgcgacgagtggta

SEQ ID NO: 725363 - DNA, 75 bp, synthetic construct
  source 1..75: mol_type = other DNA
gtcacagggctggtcaaatatgaccggtggggattcgggcttaaccatggctggcaacgtgaccggttagctgac

SEQ ID NO: 725364 - DNA, 75 bp, synthetic construct
  source 1..75: mol_type = other DNA
gcacatttgagcaattacatctgaataaaggaaaggtatttgagcgtggagtgataaatgtgtttaaagggctat

SEQ ID NO: 725365 - DNA, 75 bp, synthetic construct
  source 1..75: mol_type = other DNA
ggtgtcattaacgtcttcaaagggttgagctgggattttaagacgaacagcccctgtaaatttggagggaaaatc

SEQ ID NO: 725366 - DNA, 75 bp, synthetic construct
  source 1..75: mol_type = other DNA
gcgggacgccgctgctggagttcacgcgcgaccgcctgcaccgtgagacggtgcgcagcttcggcagcatggcag

SEQ ID NO: 725367 - DNA, 75 bp, synthetic construct
  source 1..75: mol_type = other DNA
gcagcggccaaactcaccccgaaaccagccagaaagatatttccagcgataattttgctgcccggatccctgtaa

SEQ ID NO: 725368 - DNA, 75 bp, synthetic construct
  source 1..75: mol_type = other DNA
tacgtcatcgaacctggcagattgcgatggatggcagccagaaattgccacagcggatgttggattctgttcgct

SEQ ID NO: 725369 - DNA, 75 bp, synthetic construct
  source 1..75: mol_type = other DNA
caaaccgtgatcagttgtgcaccacgcgatgaccgtaaagttcgcgtgatggcagccgattatgaaaatcagctc

SEQ ID NO: 725370 - DNA, 75 bp, synthetic construct
  source 1..75: mol_type = other DNA
cattcttcaataatacactccattcaaatcaatacgaaattaaagatgcgagcaaagaaaaaataaaggatatat

SEQ ID NO: 725371 - DNA, 75 bp, synthetic construct
  source 1..75: mol_type = other DNA
acgagtcctaaaagacgttacaaaaatgcatggtgcggcgcagaaattaaatgacttcgtacaatcgtgtgaccc

SEQ ID NO: 725372 - DNA, 75 bp, synthetic construct
  source 1..75: mol_type = other DNA
cgtcatctgtcagagatcaccatgaaaaatatccgtcagaatctgttttttgcatttatctacaacgcacttggc

SEQ ID NO: 725373 - DNA, 75 bp, synthetic construct
  source 1..75: mol_type = other DNA
gacagttcaaaaccattaatcacccatcaggaatcattcaatgagatgataggtaatgatgaaattgtgttcgag

SEQ ID NO: 725374 - DNA, 75 bp, synthetic construct
  source 1..75: mol_type = other DNA
ggatgtggtagctgcggctagcatttatgtccttaacaagaaaaaatcgaaagaaaaatatcattctaaatggct

SEQ ID NO: 725375 - DNA, 75 bp, synthetic construct
  source 1..75: mol_type = other DNA
tacttaatcatttccgtggtcgtatgcgtgtggttgtaaacgaaaaaaaatatgccctctcaggaaaattcttcg

SEQ ID NO: 725376 - DNA, 75 bp, synthetic construct
  source 1..75: mol_type = other DNA
ataatgaactaaaaagatcgataaaagtcataaatgaagcaaaaatattagtggaaaaattacaagattgcttaa

SEQ ID NO: 725377 - DNA, 75 bp, synthetic construct
  source 1..75: mol_type = other DNA
gcgcagtttttctatctgagcccgcagatgttctatttcccgttcatcttcttcgatcttttcttcggcacgtgc

SEQ ID NO: 725378 - DNA, 75 bp, synthetic construct
  source 1..75: mol_type = other DNA
ggacacgcataatctcggcaagactacgctagggcgcttgctcgactttggtttcttagccaaacgtgaccctaa

SEQ ID NO: 725379 - DNA, 75 bp, synthetic construct
  source 1..75: mol_type = other DNA
aagtcgtttgacccaacctcaaaggaagagattaaaatacttacagacacttctaaattaatttatgatttgttc

SEQ ID NO: 725380 - DNA, 75 bp, synthetic construct
  source 1..75: mol_type = other DNA
atggtgaattaccgtcttatatcactggcgctgacagcctccaccctctggctgacaaaagcgcgttaccagtac

SEQ ID NO: 725381 - DNA, 75 bp, synthetic construct
  source 1..75: mol_type = other DNA
gaagccattcatgttttggctcagtcagaaattaaagtcgtttcaacggggggggaactgaacaaaaatacgctt

SEQ ID NO: 725382 - DNA, 75 bp, synthetic construct
  source 1..75: mol_type = other DNA
ggcctgccgggaaattggtgccggaatgaatcaggttaaccgtattgttgaaaccatcatccagatactgcgcgt

SEQ ID NO: 725383 - DNA, 75 bp, synthetic construct
  source 1..75: mol_type = other DNA
gaaaactcacgcagagtgaagatgaggggcttatcaccctctggcactacgatgcgtcggaccgcatcacgcacc

SEQ ID NO: 725384 - DNA, 75 bp, synthetic construct
  source 1..75: mol_type = other DNA
gaatgagccgctcgccggagatatggccgggacggcgaattgtgctgacggagcatccgcaggcgaacctgaacc

SEQ ID NO: 725385 - DNA, 75 bp, synthetic construct
  source 1..75: mol_type = other DNA
tccgctacagcgcacaaatccgtccttcctccgtggtgaccaaagactacacctttaaacgccccggctgggccg

SEQ ID NO: 725386 - DNA, 75 bp, synthetic construct
  source 1..75: mol_type = other DNA
agcagggcgggaccgctatcagcttcccggaagacatcagccgggcccgccagaagctgttccgctttctggaca

SEQ ID NO: 725387 - DNA, 75 bp, synthetic construct
  source 1..75: mol_type = other DNA
cccgatggtcgctgccgacgtgcaaaatccccaccagccgaaaacagcaacaggggtgattgttgaggcgctggc

SEQ ID NO: 725388 - DNA, 75 bp, synthetic construct
  source 1..75: mol_type = other DNA
agcacattaatgactgcatggaagatgaacattatcgttatgcggcgtatggcttgatgttgcaggaacaagcgc

SEQ ID NO: 725389 - DNA, 75 bp, synthetic construct
  source 1..75: mol_type = other DNA
cggatcagcgtaatcgccgtattccgttagtgcgttttgaaagccgtttgtataaagatatttatcagaataatt

SEQ ID NO: 725390 - DNA, 75 bp, synthetic construct
  source 1..75: mol_type = other DNA
gttatctctctgcgtagagaagaaaacgtacttatcggtattacccaggctccttatattatggggctggctgat

SEQ ID NO: 725391 - DNA, 75 bp, synthetic construct
  source 1..75: mol_type = other DNA
cgagaacgtgcgccagctgacgcccgcaatcatggccgttttgccgctggagtatcgccatcgacttcttccaga

SEQ ID NO: 725392 - DNA, 75 bp, synthetic construct
  source 1..75: mol_type = other DNA
taaacacgaatatttttaaaagctctggaaaatatatcccaacaccagggacaaaaaagataagggtcattgcct

SEQ ID NO: 725393 - DNA, 75 bp, synthetic construct
  source 1..75: mol_type = other DNA
acggaacgcgaagcgcgtagccgttgcccgtctggttgtgttgctgtattcgctgcccgtattcgtcagggggtg

SEQ ID NO: 725394 - DNA, 75 bp, synthetic construct
  source 1..75: mol_type = other DNA
gaacggcgcatcacctaccgtcgtgaaggctacgaatatgattgcgtgatgcctgtttatcagttccggcgtgat

SEQ ID NO: 725395 - DNA, 75 bp, synthetic construct
  source 1..75: mol_type = other DNA
gcatctggctggttgccagcgttaccgatatgtgtaaatctttcaacggtctgggagaacagatacagcatgtgc

SEQ ID NO: 725396 - DNA, 75 bp, synthetic construct
  source 1..75: mol_type = other DNA
taaatgttaatcccttctccggtcacctgttatcttccgtggccgacggggtgacaccgttaaaattctttgggc

SEQ ID NO: 725397 - DNA, 75 bp, synthetic construct
  source 1..75: mol_type = other DNA
ccaggactgggttagatgctctaattgatgaggctactgggtatcagtatgagcgcgcagaggatgctctccaag

SEQ ID NO: 725398 - DNA, 75 bp, synthetic construct
  source 1..75: mol_type = other DNA
aattttgatggctatctggataagatgtcacatctggtgaatgaaggaacgctcgcccctgatattttaagcaaa

SEQ ID NO: 725399 - DNA, 75 bp, synthetic construct
  source 1..75: mol_type = other DNA
tgatatgaagaagtacctgggagagatgaagcgtctggcagatgggggagaaatgaattttgatggctatctgga

SEQ ID NO: 725400 - DNA, 75 bp, synthetic construct
  source 1..75: mol_type = other DNA
agaaaccaagaatggccttccctccacggttcagttattttatgaagaatctaaagataatgaacctttagcaaa

SEQ ID NO: 725401 - DNA, 75 bp, synthetic construct
  source 1..75: mol_type = other DNA
accgcctggacggaacgcgaagcgcgtaaccgttgcccgtccggttgtgtcgctgtattcgctgcccgtattcgt

SEQ ID NO: 725402 - DNA, 75 bp, synthetic construct
  source 1..75: mol_type = other DNA
caaacttccccgctatgtcgtgaagcttcacgacgatgacttctttgacgaagaagacgcagaagctctgcgctt

SEQ ID NO: 725403 - DNA, 75 bp, synthetic construct
  source 1..75: mol_type = other DNA
gcaaaatgcgagatgctgcaccacaattaattagcttcgcgaagtcgtttgacccaacctcaaaggaagagatta

SEQ ID NO: 725404 - DNA, 75 bp, synthetic construct
  source 1..75: mol_type = other DNA
ttatctggtcatcggtacgtgaaggcaaggtatccattacccgctcgcagctggcaatacacctcgataagctgg

SEQ ID NO: 725405 - DNA, 75 bp, synthetic construct
  source 1..75: mol_type = other DNA
gttgggacttgatgagccttcgaaagacaaatgcgaaaactcggagcgttttcaggaatatataataaaagaaat

SEQ ID NO: 725406 - DNA, 75 bp, synthetic construct
  source 1..75: mol_type = other DNA
cataaaatgtcgctatcaaatataacaatagaaaagagcgacctttcatatgggtattattttggttgtgtatta

SEQ ID NO: 725407 - DNA, 75 bp, synthetic construct
  source 1..75: mol_type = other DNA
aacatcatcagaaatgagaaaataccttaaaagcatcaacgagtgtatgttccttatgaaaaacatagctcatca

SEQ ID NO: 725408 - DNA, 75 bp, synthetic construct
  source 1..75: mol_type = other DNA
aaaaacgatacgtggcaagggatttagccttgccgcgcatattgaacaccacacggtcaggccgccggttgtttc

SEQ ID NO: 725409 - DNA, 75 bp, synthetic construct
  source 1..75: mol_type = other DNA
ggcactcttattacgattgtgtgcttagtacttttagctgtagtttggatgttaagcagtaaagtgattgagctt

SEQ ID NO: 725410 - DNA, 75 bp, synthetic construct
  source 1..75: mol_type = other DNA
cggctcagtttgagttaaataataggataaaaaatccgacaaagaaatcatccgtatatgactcacgctcaagtg

SEQ ID NO: 725411 - DNA, 75 bp, synthetic construct
  source 1..75: mol_type = other DNA
taaatgcggagcagcaggctccaaacactatctctgccagcaacgccatcttcaatgtgcaggcgttaacccagc

SEQ ID NO: 725412 - DNA, 75 bp, synthetic construct
  source 1..75: mol_type = other DNA
gcgggacgtacgacaagaaagaaatggtacgcggctggaccagcgccgacgagcaaggcctgtcggttcgtgtgg

SEQ ID NO: 725413 - DNA, 75 bp, synthetic construct
  source 1..75: mol_type = other DNA
gcatggccatcatcatgcaggcgatgcagtggggtatgaacccttacgccgtggcgcaaaagacgcacctggtta

SEQ ID NO: 725414 - DNA, 75 bp, synthetic construct
  source 1..75: mol_type = other DNA
gatgacaaaccgtcccgtttcgaaattttgataccattgatacaaactttagttcgcgacaatgtaaagctaaat

SEQ ID NO: 725415 - DNA, 75 bp, synthetic construct
  source 1..75: mol_type = other DNA
aacaggtgaatgatggcgtggaacgccaggtgaatattgtcatcaacaacctgctctaccccccccccaggccgt

SEQ ID NO: 725416 - DNA, 75 bp, synthetic construct
  source 1..75: mol_type = other DNA
atatcgaaagcgcgaaggtcacgctcggttctgccctgttcaccgagctgaagaacaaggcagttaagcgctatt

SEQ ID NO: 725417 - DNA, 75 bp, synthetic construct
  source 1..75: mol_type = other DNA
ctggatactttaataaaacactcaattcaaatcaattcgataataaagatgcaaccaacgataaattagataata

SEQ ID NO: 725418 - DNA, 75 bp, synthetic construct
  source 1..75: mol_type = other DNA
atgaaagaaatgactcatcatggatgtcaactgtcaaatcaactacagaagtaagttggaataaattgagttttt

SEQ ID NO: 725419 - DNA, 75 bp, synthetic construct
  source 1..75: mol_type = other DNA
attatgttcgccgggagacgtctctcagctctggatgctggttctggtgaattgtggtggacagcctttcgccgt

SEQ ID NO: 725420 - DNA, 75 bp, synthetic construct
  source 1..75: mol_type = other DNA
atcccggcagacagaacatggcgaccacagccgttgctgaaaccgctggtggacggcccgcagagcgctgtcgtg

SEQ ID NO: 725421 - DNA, 75 bp, synthetic construct
  source 1..75: mol_type = other DNA
gcagtggaaatatttcatgactaacaatcagttcagtgcaacgactttcattccagttgtggggctgtttactgg

SEQ ID NO: 725422 - DNA, 75 bp, synthetic construct
  source 1..75: mol_type = other DNA
agataaggcgccctgatattaattgcacaacagtacaaaacacaatgagaagaattcttgaaaattactttaaaa

SEQ ID NO: 725423 - DNA, 75 bp, synthetic construct
  source 1..75: mol_type = other DNA
tggtatgtcggtccctgagcatcctgcaaaccggattttttatgtcagaaatgagcaaaaaaataaactctacaa

SEQ ID NO: 725424 - DNA, 75 bp, synthetic construct
  source 1..75: mol_type = other DNA
ttatctttgcgctctatttcacaccttatgcgctaattgttggtcagttaggctcgaccttcaaagatgggaagg

SEQ ID NO: 725425 - DNA, 75 bp, synthetic construct
  source 1..75: mol_type = other DNA
agttgcgatggtacaacattgcgctgatgtcttttatcactgtctggggttttggcaacgttgttaataactatg

SEQ ID NO: 725426 - DNA, 75 bp, synthetic construct
  source 1..75: mol_type = other DNA
gctgattatctttgcgactattctcggtggttttatccagggagcctcagcacgcggtatgctggaagtatttat

SEQ ID NO: 725427 - DNA, 75 bp, synthetic construct
  source 1..75: mol_type = other DNA
acttcctcaacggcgatccggaccagccgatcattatggggcgtacctaccaccaggaaaaccgcacacccggca

SEQ ID NO: 725428 - DNA, 75 bp, synthetic construct
  source 1..75: mol_type = other DNA
tatgctatcaaaatttgaactatatttttcaaataattacagagttaatccggatgtttatttgatacatctgtt

SEQ ID NO: 725429 - DNA, 75 bp, synthetic construct
  source 1..75: mol_type = other DNA
aactcagtcggatcaatgtcattcagtcagttgttgaaaagcgcatgcgccgtcgtgatgcagctcagctgcttg

SEQ ID NO: 725430 - DNA, 75 bp, synthetic construct
  source 1..75: mol_type = other DNA
gtcttcagtcaaagatcattaaaaacaagactactaagaacgagctactcgctaagttaggtgaaccagatacaa

SEQ ID NO: 725431 - DNA, 75 bp, synthetic construct
  source 1..75: mol_type = other DNA
gcaggggttcaggcaccacgctggataaccattttgcggtaataccggcagacagaacatggcgaccacagccgt

SEQ ID NO: 725432 - DNA, 75 bp, synthetic construct
  source 1..75: mol_type = other DNA
acatgtcgaaagcgcagattatccagcaggccggtaactccgtgctggcaaaagccaaccaggtaccgcagcagg

SEQ ID NO: 725433 - DNA, 75 bp, synthetic construct
  source 1..75: mol_type = other DNA
gattgcggagtgcgtgattaataaattatgtccgtcacacaccgtcgttttattttcctatccagacgaggatga

SEQ ID NO: 725434 - DNA, 75 bp, synthetic construct
  source 1..75: mol_type = other DNA
ctgttggttgattgtggggtctggttcgcctgaactgcgggagcatttacagtatcagattgacagtatgggcat

SEQ ID NO: 725435 - DNA, 75 bp, synthetic construct
  source 1..75: mol_type = other DNA
agctctggtgactacaacaaaaaccagtactacggcatcactgctggtccggcttaccgcattaacgactgggca

SEQ ID NO: 725436 - DNA, 75 bp, synthetic construct
  source 1..75: mol_type = other DNA
aaccagtcactctcttcgcttttttccctcgatctctcccggggaagacagcagtctctccccctagaatttgcg

SEQ ID NO: 725437 - DNA, 75 bp, synthetic construct
  source 1..75: mol_type = other DNA
aagcaaaaagcaacgaaactcaagccctcgaagagctttacaaaaaagatgctacaatcttcacacaaatcactc

SEQ ID NO: 725438 - DNA, 75 bp, synthetic construct
  source 1..75: mol_type = other DNA
tttcaagggtgcccacgggcagaactttgcccgctggcagatggatggctggcgaaacaacgcagaagtggcgcg

SEQ ID NO: 725439 - DNA, 75 bp, synthetic construct
  source 1..75: mol_type = other DNA
tttcatacagtgcttttgatagttttcaaatacccgggtgtacttttaaagaaaagaaacagctaaggcaagaca

SEQ ID NO: 725440 - DNA, 75 bp, synthetic construct
  source 1..75: mol_type = other DNA
gtcaaggtatagaaaattccgtagatggtgagtacacggacatagcagttgctcaaaagtatcaatcattcgaga

SEQ ID NO: 725441 - DNA, 75 bp, synthetic construct
  source 1..75: mol_type = other DNA
tgcaatgtaacccgcagattgttaacggtgcgttgggcaagttaggcgcggcccggattgcgtttacccggcagt

SEQ ID NO: 725442 - DNA, 75 bp, synthetic construct
  source 1..75: mol_type = other DNA
atagtttgctggccgaatactatgaaaaaacaaatattgatggcgatatcattatacataaggatggtaggagga

SEQ ID NO: 725443 - DNA, 75 bp, synthetic construct
  source 1..75: mol_type = other DNA
gcgtttagcgtgatgtcatgcgataacatgccagaaaatggtcatgttatgcgtgacgttgtcacgtcttatgcg

SEQ ID NO: 725444 - DNA, 75 bp, synthetic construct
  source 1..75: mol_type = other DNA
ggactcatcattatggtcccctataacattgtcaatctagccagttcgttattttttagaaagaactttaatttt

SEQ ID NO: 725445 - DNA, 75 bp, synthetic construct
  source 1..75: mol_type = other DNA
aaaaattgagtttgttcttggtaagaaaataattaatctttatgaaatagacgatctctgtgacaaaaagaataa

SEQ ID NO: 725446 - DNA, 75 bp, synthetic construct
  source 1..75: mol_type = other DNA
acggcatcctgattaacaagctgaccgaaaagtatgacgtcagcggccgggtgctctatgtccacgatctctccc

SEQ ID NO: 725447 - DNA, 75 bp, synthetic construct
  source 1..75: mol_type = other DNA
aaagagttgacgggtaaagccctgtttatggcgctcaggagccagcgcccacctgccgggctaatccaccacacc

SEQ ID NO: 725448 - DNA, 75 bp, synthetic construct
  source 1..75: mol_type = other DNA
tctctccaggttgacaggaatccatctctttctttgcaaacaaatggaacagagaaattttctacaaagaaaatt

SEQ ID NO: 725449 - DNA, 75 bp, synthetic construct
  source 1..75: mol_type = other DNA
attcaacaggccgtacaaaacagtgaggaaggagaagctcgcgtacaggcattgatggcaattgaggcgatattt

SEQ ID NO: 725450 - DNA, 75 bp, synthetic construct
  source 1..75: mol_type = other DNA
tactcacccggtagcaaaaggtgcccagttcgcgccggacgagtggatctatcatcgtttaagctttatggacaa

SEQ ID NO: 725451 - DNA, 75 bp, synthetic construct
  source 1..75: mol_type = other DNA
ggcgcgtcttatccgacctacggggacgcatgtgtaggccggataaggcgtttacgccgcatccggcaatggtgt

SEQ ID NO: 725452 - DNA, 75 bp, synthetic construct
  source 1..75: mol_type = other DNA
atgcgcacacaggttgtattgcaaaaatggggtaatagcattgcccttcgactaacgggaaaccttaaaaccgtt

SEQ ID NO: 725453 - DNA, 75 bp, synthetic construct
  source 1..75: mol_type = other DNA
ttgaaaaactcgatgaaattgacacgcaggaggcggataccgacgctcaaaaccggaatttcatccactccggta

SEQ ID NO: 725454 - DNA, 75 bp, synthetic construct
  source 1..75: mol_type = other DNA
gccggtcgccgtaaactgtggtaccgctggcagcagcgccatatgctgagccatattaccggcgcgctggataac

SEQ ID NO: 725455 - DNA, 75 bp, synthetic construct
  source 1..75: mol_type = other DNA
gtctttgttaatgagtgcgcatttaatttatatagggcaatacagaatgattcgttagacagaaatattctttca

SEQ ID NO: 725456 - DNA, 75 bp, synthetic construct
  source 1..75: mol_type = other DNA
acgcctgatgacggcgctgagccgactgcacaagcggaatccaacattattcgtccggcatcggacaccactagc

SEQ ID NO: 725457 - DNA, 75 bp, synthetic construct
  source 1..75: mol_type = other DNA
acggccggtgtttcgatgttcagcccaatcacatcggttgtagtggccgtatctgcattgatcgtcctgatgtgt

SEQ ID NO: 725458 - DNA, 75 bp, synthetic construct
  source 1..75: mol_type = other DNA
acgtgctgtccggctgttttctcatctggtggtggacaaagagaaaatgcgcgctaattttgccgcgtcaaagaa

SEQ ID NO: 725459 - DNA, 75 bp, synthetic construct
  source 1..75: mol_type = other DNA
tcgaaacgcaggggcgcacatccgtggccgaactgcgtgaaggcgaaggaggaggtggttccagtaccatgccgc

SEQ ID NO: 725460 - DNA, 75 bp, synthetic construct
  source 1..75: mol_type = other DNA
cacgctctgcgtcgatcgcgtcagcgtcggccaggaaccggcttgtgtgaaaacctgtccgaccggggctatcca

SEQ ID NO: 725461 - DNA, 75 bp, synthetic construct
  source 1..75: mol_type = other DNA
ttgtaccttgcaaaaattggcatcagcagcccggatcgggcaatggaggcgctttatgaatcatccgttgaactt

SEQ ID NO: 725462 - DNA, 75 bp, synthetic construct
  source 1..75: mol_type = other DNA
ccgcccaccgacagcgagcaggatctggaatatattcaggttctggatgatcgaatgttgttggccttaccgcaa

SEQ ID NO: 725463 - DNA, 75 bp, synthetic construct
  source 1..75: mol_type = other DNA
acgaagcatattgaggcgtatattcagatgcggctggcgcaggggattcagaaacagacgctgcataatgaaacg

SEQ ID NO: 725464 - DNA, 75 bp, synthetic construct
  source 1..75: mol_type = other DNA
tggcggcggatttacgccgcgccgcagagcagggcgaagcgattgcaccgctgcgcgatctgattggtatcgata

SEQ ID NO: 725465 - DNA, 75 bp, synthetic construct
  source 1..75: mol_type = other DNA
agagacgtttgattcgctggcaatgctggaatttgccctcgacaacatgccagataccccactgctgaccgaagg

SEQ ID NO: 725466 - DNA, 75 bp, synthetic construct
  source 1..75: mol_type = other DNA
ggtgttatcagcaatgcgtgtcgctgtcatgggaaagggaaggtactggataagaaggcaactgaattacagggc

SEQ ID NO: 725467 - DNA, 75 bp, synthetic construct
  source 1..75: mol_type = other DNA
cgctggatacgtcgtatctttgaccatgcgatcaagctggggatgattgaggttaaccccgctgctgcctttgat

SEQ ID NO: 725468 - DNA, 75 bp, synthetic construct
  source 1..75: mol_type = other DNA
gccatgataaaggccattctccgtgctgcagaacgcgactggaagtggctggaaaaagcgcctgtcatcaagatg

SEQ ID NO: 725469 - DNA, 75 bp, synthetic construct
  source 1..75: mol_type = other DNA
attcagtctgtctcagatcagcataatgcaattttgagtgagtatgatcgaccagaagacgaacagaaagccagt

SEQ ID NO: 725470 - DNA, 75 bp, synthetic construct
  source 1..75: mol_type = other DNA
aggaaatcaacggaagagatcaacttgctctgaccagggagtccctgaaatctattatccagacgattaagtttc

SEQ ID NO: 725471 - DNA, 75 bp, synthetic construct
  source 1..75: mol_type = other DNA
ttaaatgaaacgaatttatatccaactgatgatatgtttcggataattgtgcgtgagattgatgttgaaaattta

SEQ ID NO: 725472 - DNA, 75 bp, synthetic construct
  source 1..75: mol_type = other DNA
gcaatcccattacagtatatctggattggaatgtcgtggtatggaatgtttattatattcattccgatttatgtc

SEQ ID NO: 725473 - DNA, 75 bp, synthetic construct
  source 1..75: mol_type = other DNA
gagggatccttgatcgtctggattcactcatttataccgctccattgttttttcacttctattactacttctata

SEQ ID NO: 725474 - DNA, 75 bp, synthetic construct
  source 1..75: mol_type = other DNA
tggcaccccaccctctttccatgagcagagatctttatcagagcgattgttcagagagcagggggttgataccaa

SEQ ID NO: 725475 - DNA, 75 bp, synthetic construct
  source 1..75: mol_type = other DNA
agcctgattcaggagcaccaaatgaggataatgtaaggatatttcggcaattacaagcctgtaatcgtcatggcc

SEQ ID NO: 725476 - DNA, 75 bp, synthetic construct
  source 1..75: mol_type = other DNA
ttaatgaatatgcggaaatttctcatcttgcgggatgtgaaaatgatgctatgaagatgtctgcggcattgtcca

SEQ ID NO: 725477 - DNA, 75 bp, synthetic construct
  source 1..75: mol_type = other DNA
ctgtttatgaaccaaagccagtatcaactcagacaaaggcaaagcatcttgccatgataatgaaccgccccggga

SEQ ID NO: 725478 - DNA, 75 bp, synthetic construct
  source 1..75: mol_type = other DNA
gaatgcataacagaaagacgaaagaaatatggaaacagaaagttcaggccgccatcaggaaaggtaaagaactgt

SEQ ID NO: 725479 - DNA, 75 bp, synthetic construct
  source 1..75: mol_type = other DNA
atttcatgcctatggttatgattttgaatatatagcgcaaaaatggaaatccaaaaaatatatagggtattggca

SEQ ID NO: 725480 - DNA, 75 bp, synthetic construct
  source 1..75: mol_type = other DNA
tataaaaaatttcgcattgaaatcatcacctctgtatttatctcttatgccgtattttacttaacccgcaagaat

SEQ ID NO: 725481 - DNA, 75 bp, synthetic construct
  source 1..75: mol_type = other DNA
tgaaggtgaagaatacgccggtttgtttgcaaacggtggtgttggccttgggctggcagtgaatcttgatgtcga

SEQ ID NO: 725482 - DNA, 75 bp, synthetic construct
  source 1..75: mol_type = other DNA
taattttgatccgaatggtcatgattccaacggtgacggggtgaaagataccaacgggggttggactgatgattg

SEQ ID NO: 725483 - DNA, 75 bp, synthetic construct
  source 1..75: mol_type = other DNA
gatggtgatgttttcactcttaaggaaggtgcgaataagcggggaaattcttctcggctgactcagtcatttcat

SEQ ID NO: 725484 - DNA, 75 bp, synthetic construct
  source 1..75: mol_type = other DNA
gcctgcggagttaatgcgactttcatcgcggacggggtgccacagtttgctctggttaatgggctgtacgcaatg

SEQ ID NO: 725485 - DNA, 75 bp, synthetic construct
  source 1..75: mol_type = other DNA
aaaaggaagaaacactgaaacaacgcgtgatccgcgcgctggcgggtttttcgggctacgggcgggtgatggttg

SEQ ID NO: 725486 - DNA, 75 bp, synthetic construct
  source 1..75: mol_type = other DNA
atgctgcctatgggtgaaagcagtgatggtcattatgtctatcagttctctgaatacggtactgatcgtgtaatt

SEQ ID NO: 725487 - DNA, 75 bp, synthetic construct
  source 1..75: mol_type = other DNA
gctgggtcatatcccaccggcagaagcagaaaaagcttattatgcttccatcagaaacgatgatctggcagcctg

SEQ ID NO: 725488 - DNA, 75 bp, synthetic construct
  source 1..75: mol_type = other DNA
aagatcgtcccggcacgctcggtttgcctaacgtcggtaagtggcgcaacgacccgacagaacttgcacaagtta

SEQ ID NO: 725489 - DNA, 75 bp, synthetic construct
  source 1..75: mol_type = other DNA
gttacgcataaagatgcggcaggttccattactggattcaggggcttgtttagttatttaggcgcggcaatggca

SEQ ID NO: 725490 - DNA, 75 bp, synthetic construct
  source 1..75: mol_type = other DNA
actgattactacaaagatggcgatgtaactaaatctactaacggcacttttgacgttagcgaaggcgttgctgtt

SEQ ID NO: 725491 - DNA, 75 bp, synthetic construct
  source 1..75: mol_type = other DNA
gtcttcgccaccgctggatgcgcctgcgcttatatcgttttcccggttctgttttgaccgattaccggatactga

SEQ ID NO: 725492 - DNA, 75 bp, synthetic construct
  source 1..75: mol_type = other DNA
tctcatcgtctatggaaacgacattcgtgctggatgcgctggagcaggcgttgtgggctggcaccatccatcaca

SEQ ID NO: 725493 - DNA, 75 bp, synthetic construct
  source 1..75: mol_type = other DNA
atgataccactagaattagtaatcttgctaacgacccgaaacagttttgttatttttttttgtgagtacataaaa

SEQ ID NO: 725494 - DNA, 75 bp, synthetic construct
  source 1..75: mol_type = other DNA
gcgtaaaaatacaaaaaaatcacatgcattaatacttaatctcatcatgttttgtgagatgtttttatcatcatt

SEQ ID NO: 725495 - DNA, 75 bp, synthetic construct
  source 1..75: mol_type = other DNA
gttaacgaccttaaagcgcttggtgatgtgacccatattaatcttcatatcaattcgcctggtggcgatgtcttt

SEQ ID NO: 725496 - DNA, 75 bp, synthetic construct
  source 1..75: mol_type = other DNA
agcgcctgccgggtattgatacggcgccgaaacagcgcctgttcatccgcgatctgattgctccaggccgtacgt

SEQ ID NO: 725497 - DNA, 75 bp, synthetic construct
  source 1..75: mol_type = other DNA
gacgttttccctgacgccggagggcaggctgacggcccgcaatgcggacatcagcggacatatcagtgcgaactc

SEQ ID NO: 725498 - DNA, 75 bp, synthetic construct
  source 1..75: mol_type = other DNA
gcaccttatatccccgccctgaatgaacggggttttacggcgcaccggataaagcaatcatcgttcttggggcgt

SEQ ID NO: 725499 - DNA, 75 bp, synthetic construct
  source 1..75: mol_type = other DNA
atcaccacctcagatcgcaaggagaccattgcactggccacttacggggagattttctccatcacccgccaggcc

SEQ ID NO: 725500 - DNA, 75 bp, synthetic construct
  source 1..75: mol_type = other DNA
tgaggcaatggcatgtattcagtcaaaacgtacagaggaatttaaaaagatgccggaatccatccgaaacatgat

SEQ ID NO: 725501 - DNA, 75 bp, synthetic construct
  source 1..75: mol_type = other DNA
gggcggatgcaaacgccggtgtcattaaccctatccagaactttgctgaggtgattgcagaagcgcgtcttgatg

SEQ ID NO: 725502 - DNA, 75 bp, synthetic construct
  source 1..75: mol_type = other DNA
acttcaatcccccagcaaatgggggcagcagcaagccgcacagtcggagatctggtttatgccgttctcgtggct

SEQ ID NO: 725503 - DNA, 75 bp, synthetic construct
  source 1..75: mol_type = other DNA
gtgccggaactgaacgacagcgtcaacaggccaccgacagccagcatgaagaataaatcctggttcaggatgcag

SEQ ID NO: 725504 - DNA, 75 bp, synthetic construct
  source 1..75: mol_type = other DNA
aatccccaccagccgaaaacagcaacaggcgtgattgtcgaggcgctggctcgccgtaaagccgcaggatttccc

SEQ ID NO: 725505 - DNA, 75 bp, synthetic construct
  source 1..75: mol_type = other DNA
cggtgcattcaacgctgcggcacagctgtttgaccgtgaagacgccaacgtggtgatctccactgagaacgccga

SEQ ID NO: 725506 - DNA, 75 bp, synthetic construct
  source 1..75: mol_type = other DNA
ctctcagtgagcgcgagcaaataagtaatctattaaaaaatatgccaacaagtcattctattagccgaaaaagct

SEQ ID NO: 725507 - DNA, 75 bp, synthetic construct
  source 1..75: mol_type = other DNA
catgggttcggcgttttctgctggaatatttgattagcgaacgaaatttttcccataacacgcagaaaagctacc

SEQ ID NO: 725508 - DNA, 75 bp, synthetic construct
  source 1..75: mol_type = other DNA
agccagtttcgatggttaatatatcatccatttacggtgtaattgctcctaaattcaatatttatgacaatactc

SEQ ID NO: 725509 - DNA, 75 bp, synthetic construct
  source 1..75: mol_type = other DNA
aataacttactttcaaaagatcagcctttttttagttacgcagcagtcgtgactgatgatgaggaaagtaaacag

SEQ ID NO: 725510 - DNA, 75 bp, synthetic construct
  source 1..75: mol_type = other DNA
gctcaatattttacaaccttaaattccacctattcatatccaatataatgtatttttctttaatagctaaggatg

SEQ ID NO: 725511 - DNA, 75 bp, synthetic construct
  source 1..75: mol_type = other DNA
tctatcagttcggcaattagttggttcttaataccaagagagatattttcggaattatatcaaataataggaata

SEQ ID NO: 725512 - DNA, 75 bp, synthetic construct
  source 1..75: mol_type = other DNA
agatttcacattaataatgtcctcaggaaactggatgtgacatctgtccgctatgcgatttttaaagctacatcc

SEQ ID NO: 725513 - DNA, 75 bp, synthetic construct
  source 1..75: mol_type = other DNA
ggctattgccaacggcattattaatgtcatcgctgactccggtgatacggcaataggctcagccgattatgtggg

SEQ ID NO: 725514 - DNA, 75 bp, synthetic construct
  source 1..75: mol_type = other DNA
gaccgtcatcagcagcgaagcactgaaagcattcgcggcaagcgtggaaggcggtaagcgcgtcagcgtaccggt

SEQ ID NO: 725515 - DNA, 75 bp, synthetic construct
  source 1..75: mol_type = other DNA
taaaacgtatggtcgtaagttattcgatgtaacgcttgccagcttcaatgaaaacttatcgcttcacttgggtag

SEQ ID NO: 725516 - DNA, 75 bp, synthetic construct
  source 1..75: mol_type = other DNA
aacaaatatattgtagcttatgttagagatagtcgatttagagttaatgctgtaagccctggcggtatttttgat

SEQ ID NO: 725517 - DNA, 75 bp, synthetic construct
  source 1..75: mol_type = other DNA
gttaagccgtccgaaatcccgaccatgaaggactacaccgcctgcctggtggatcagaaatggctgcgtctcgcg

SEQ ID NO: 725518 - DNA, 75 bp, synthetic construct
  source 1..75: mol_type = other DNA
tggataaaatcgaacaacttaccaacgtgcgcgatccggcaggcgtggcgtgtgagccgttccgtcagtgggtga

SEQ ID NO: 725519 - DNA, 75 bp, synthetic construct
  source 1..75: mol_type = other DNA
tgtttgttgcaaaggtgacggaagcgtacttgtctctattagcgcatggcgcgaaagcgaccgtggcgaaatata

SEQ ID NO: 725520 - DNA, 75 bp, synthetic construct
  source 1..75: mol_type = other DNA
tcaaagccaactcgtttgtttccattagcggatttcatcacgatttttgatagtctcaacgatctggaagaatta

SEQ ID NO: 725521 - DNA, 75 bp, synthetic construct
  source 1..75: mol_type = other DNA
tcgctgtggatgttgacgacgtacacgccgtgctgatgccgctaaatgttctggttggctggatttaccacaata

SEQ ID NO: 725522 - DNA, 75 bp, synthetic construct
  source 1..75: mol_type = other DNA
aaagaagggaacctcgtagtgattacagaccaggatcttgaaacgctgattgaaaatgcatcgaacctggcaatt

SEQ ID NO: 725523 - DNA, 75 bp, synthetic construct
  source 1..75: mol_type = other DNA
taatattaatagacaagccactaattaaaattagagcaaaaataagggcggacgctcaaagcaaaaataatcagg

SEQ ID NO: 725524 - DNA, 75 bp, synthetic construct
  source 1..75: mol_type = other DNA
ggtggatttctagcatggcttgctattggtggtgaaaatcgtggcttatccatctttttattaggctacccaata

SEQ ID NO: 725525 - DNA, 75 bp, synthetic construct
  source 1..75: mol_type = other DNA
atggaactcattaacgtaaaacgatattacccagaagaaatgccattcggcaataatgttcagtatttccagagt

SEQ ID NO: 725526 - DNA, 75 bp, synthetic construct
  source 1..75: mol_type = other DNA
gtggaaaatgaagacggttctcacgttcctgtttcgcaaccaatcatcattaacgctgctggatatccggtatat

SEQ ID NO: 725527 - DNA, 75 bp, synthetic construct
  source 1..75: mol_type = other DNA
tggtgcagttgggcgaaacgttgaaagctatggcgcttgagcaccgacatacggtgatggtcgccagaacgaatt

SEQ ID NO: 725528 - DNA, 75 bp, synthetic construct
  source 1..75: mol_type = other DNA
ccattgttgacggtgctgttgaggaaggactgctggattttctgaacgaggtgaatcccccacactgctgtctgt

SEQ ID NO: 725529 - DNA, 75 bp, synthetic construct
  source 1..75: mol_type = other DNA
taatgcgattagcgcaactattatcggtcagctggataccaattttaaaattggtcgtcgtgccgcgttacgcga

SEQ ID NO: 725530 - DNA, 75 bp, synthetic construct
  source 1..75: mol_type = other DNA
gagcagatcttgcgtaaccagcctgcgttgtccgcgtttacgtcagaaattaatgcgattagcgcaaccattatc

SEQ ID NO: 725531 - DNA, 75 bp, synthetic construct
  source 1..75: mol_type = other DNA
gcttggcgcgaaacgcggtgcgcactatattgcgataaccgatagccaggtcagcccgctggcagcgttcagtga

SEQ ID NO: 725532 - DNA, 75 bp, synthetic construct
  source 1..75: mol_type = other DNA
ctttaacaccttgtcccgtctgaaggcgaagctggatatctgggtggacggcgtggctgccagtatggcttcaat

SEQ ID NO: 725533 - DNA, 75 bp, synthetic construct
  source 1..75: mol_type = other DNA
accgcatcatcagaagcccgcacccgtggccacatgagccagcgggagtttgaggcctttgaagccggcagacgg

SEQ ID NO: 725534 - DNA, 75 bp, synthetic construct
  source 1..75: mol_type = other DNA
ccgggaacgtctctcccgagctgcggactccccggtccgcgaggcgtatgacagtgccggcatccacgccggtta

SEQ ID NO: 725535 - DNA, 75 bp, synthetic construct
  source 1..75: mol_type = other DNA
acatgctgacgcgtattccccaggcgatgggcagtgcagcacgtgcgacggtgggcgatctggtctgggcggtac

SEQ ID NO: 725536 - DNA, 75 bp, synthetic construct
  source 1..75: mol_type = other DNA
cataaagccgcgctgacgggatgggatgaggctaacgaaatttttgatcagtggacccgcaaaggtacgctgacc

SEQ ID NO: 725537 - DNA, 75 bp, synthetic construct
  source 1..75: mol_type = other DNA
gccgctttcaaggtgcgcattgatgcgggtgtggccccgcttgactggcgcgggctggttaaagtcaccaaaaaa

SEQ ID NO: 725538 - DNA, 75 bp, synthetic construct
  source 1..75: mol_type = other DNA
ggctgtacaaagtagtgccgaagggaaagcgcgcgtccagtcattgctggcgattaaggcgatctttggtgatga

SEQ ID NO: 725539 - DNA, 75 bp, synthetic construct
  source 1..75: mol_type = other DNA
atctgatatggtgcttatgtttagagatggagaatatgcaaccctttcttcattactatttttcaatgaacaagc

SEQ ID NO: 725540 - DNA, 75 bp, synthetic construct
  source 1..75: mol_type = other DNA
atgaagcatggtttttatactcaactgcgggagaaactcgctcgcgtcagcgcggtgattgacgcaaaaatcctc

SEQ ID NO: 725541 - DNA, 75 bp, synthetic construct
  source 1..75: mol_type = other DNA
tttggcggaactgatgtctgccctgccgtgggcgatctgccgggcggagacagccaggtgcgatcgctctatcag

SEQ ID NO: 725542 - DNA, 75 bp, synthetic construct
  source 1..75: mol_type = other DNA
tgaagccgtggaaaaaggcttcgctgatacgcttgaacctgaattacaggctgcggcctgtgtgaaccaaaataa

SEQ ID NO: 725543 - DNA, 75 bp, synthetic construct
  source 1..75: mol_type = other DNA
gtgttgctgccagcatggcctccatgattgtctgcctgcctggcgccacagtgcatatgcctgaaaattcctggc

SEQ ID NO: 725544 - DNA, 75 bp, synthetic construct
  source 1..75: mol_type = other DNA
aaattatttcctggccatttgttatcagcaggacagtatcgacgattataagaactgcatttcttacagaagact

SEQ ID NO: 725545 - DNA, 75 bp, synthetic construct
  source 1..75: mol_type = other DNA
cgtggaatttaccggcaaggtacaacggatggcgaatgtgcatcagtacggtctcaaagataagcctgggcgaaa

SEQ ID NO: 725546 - DNA, 75 bp, synthetic construct
  source 1..75: mol_type = other DNA
gcagactttattattacaccaccgctatttgtgctgaatccggcaaacgagaatctgttacgcattatgtacatt

SEQ ID NO: 725547 - DNA, 75 bp, synthetic construct
  source 1..75: mol_type = other DNA
tctccagatgaagctccggaaaaactacgttgcacttcgtcagctgacatggtttcggtcagtaacccaacacct

SEQ ID NO: 725548 - DNA, 75 bp, synthetic construct
  source 1..75: mol_type = other DNA
gattatccggcgcgtcctctgcttggctttaccggtgaggatgtgcagatgattgaagagattatcctggctcac

SEQ ID NO: 725549 - DNA, 75 bp, synthetic construct
  source 1..75: mol_type = other DNA
atgaatgagtttaagcgttttgaagaccggctggccggactgactgaatcgctgtcaccgtctgggcgtcggcga

SEQ ID NO: 725550 - DNA, 75 bp, synthetic construct
  source 1..75: mol_type = other DNA
ccagtggccgcaatgatactgccgtggtggaattcactggcaaggtgcaacgcatcgcgcagattcatcagttcg

SEQ ID NO: 725551 - DNA, 75 bp, synthetic construct
  source 1..75: mol_type = other DNA
tatactgttggggcatccattgtcgcctggcttggctttgtgtttttccagaaaacaagaaaaggatttgctgat

SEQ ID NO: 725552 - DNA, 75 bp, synthetic construct
  source 1..75: mol_type = other DNA
ataaagaaggcaaagagtttcgctcgctggatgagataatgcggcttattgacaaagaagcgcacggaacctggc

SEQ ID NO: 725553 - DNA, 75 bp, synthetic construct
  source 1..75: mol_type = other DNA
tgttcaaaagtagctgatttaagcgcaaaaaaaattatggcggttggcaggctagagcatcaaaagggttttgat

SEQ ID NO: 725554 - DNA, 75 bp, synthetic construct
  source 1..75: mol_type = other DNA
atgctgcctcgaaatgagggaggggaaataaggttgtcagccttgttttctccctcattacttgaaggatataaa

SEQ ID NO: 725555 - DNA, 75 bp, synthetic construct
  source 1..75: mol_type = other DNA
tctttaggtgtttatttgcgtgatgttagccaaatagttggtatagccactatggtgctgatgttcttatcgcca

SEQ ID NO: 725556 - DNA, 75 bp, synthetic construct
  source 1..75: mol_type = other DNA
tgaatgtattaatcgggctccgactgccatacttgcaaatgcgaattatgtgaaaaaggtaatattcccattgga

SEQ ID NO: 725557 - DNA, 75 bp, synthetic construct
  source 1..75: mol_type = other DNA
tttcggcctctctcgcagggcctaccgggttagttgagcttggctacggctcagcgaacgccgaagagggcatta

SEQ ID NO: 725558 - DNA, 75 bp, synthetic construct
  source 1..75: mol_type = other DNA
ttaaagtcttggttggaattggaccgagagaaagtgcgagaaaatgccgacaccattatcgatattctgcgaacc

SEQ ID NO: 725559 - DNA, 75 bp, synthetic construct
  source 1..75: mol_type = other DNA
tcagttggctaccatttggataacggtcagttgaagatgagtgttaagaaagtgaaggtttcctccatgttatcc

SEQ ID NO: 725560 - DNA, 75 bp, synthetic construct
  source 1..75: mol_type = other DNA
aaagcaggattgcgtgaccgtcacttgattattgcactggaagaagggcaaagtgagtttgaacttaaactgagc

SEQ ID NO: 725561 - DNA, 75 bp, synthetic construct
  source 1..75: mol_type = other DNA
acatcgctgaaactacaaactcactaattcattcttactcaaccgaagttgaggtggaaataaagtctgatacta

SEQ ID NO: 725562 - DNA, 75 bp, synthetic construct
  source 1..75: mol_type = other DNA
attgaagatggaaagcataaaaatatatcctcaatatccttaatgcaaggagtttctgaaagaggacgcgactgc

SEQ ID NO: 725563 - DNA, 75 bp, synthetic construct
  source 1..75: mol_type = other DNA
ttgagtaatctaaatatcacactatcaccatgggttgagtatttctggaaagggatggcttttttgttaattttc

SEQ ID NO: 725564 - DNA, 75 bp, synthetic construct
  source 1..75: mol_type = other DNA
atctcgaaaactccgaaattattttaaatgaaatcataataaggcgaagcggtggaagttcaaatataccgaaag

SEQ ID NO: 725565 - DNA, 75 bp, synthetic construct
  source 1..75: mol_type = other DNA
gaaataattactcatacaaaggtgctggtattaacaccggaaatagctctgttgttaactggaatgtaaaaggaa

SEQ ID NO: 725566 - DNA, 75 bp, synthetic construct
  source 1..75: mol_type = other DNA
tgatgtccgttggcctgaatgcagaaatcagggacaacgtccgctttggactggagtttgagaaatccgcctttg

SEQ ID NO: 725567 - DNA, 75 bp, synthetic construct
  source 1..75: mol_type = other DNA
ggagagagcgaagatcgcaatggtgtagcgctgagctatttagacctagaagactgcaaagtggtgccagtgctt

SEQ ID NO: 725568 - DNA, 75 bp, synthetic construct
  source 1..75: mol_type = other DNA
ttcagatgatatactgctggtgggctttaaagagggtaacctttatttgcttcctgtcgaagtgaaaacaggctc

SEQ ID NO: 725569 - DNA, 75 bp, synthetic construct
  source 1..75: mol_type = other DNA
ataaccaagtctgggcgtaatgatgacggtaaaggaaaattatctccagattttagtatttatgctgaaaatgac

SEQ ID NO: 725570 - DNA, 75 bp, synthetic construct
  source 1..75: mol_type = other DNA
gagcattaagaaatttattgtatagattcttttataaagtaatctgtattaataaaaatgacttgtataagtttt

SEQ ID NO: 725571 - DNA, 75 bp, synthetic construct
  source 1..75: mol_type = other DNA
gggaactcaacatcggaaacggcttcgcggcggcggcgtccggtttatccccgctggcgcggggaacacctgttt

SEQ ID NO: 725572 - DNA, 75 bp, synthetic construct
  source 1..75: mol_type = other DNA
gggaactcaacatcggaaacggcttcgcggcggcggcgtccggtttatccccgctggcgcggggaacaccaaaaa

SEQ ID NO: 725573 - DNA, 75 bp, synthetic construct
  source 1..75: mol_type = other DNA
agaatggtttatccccgctggcgcggggagctcggcatagccaggctgatccggcgacggccttacggtttatcc

SEQ ID NO: 725574 - DNA, 75 bp, synthetic construct
  source 1..75: mol_type = other DNA
ctgatttttatgctggtttacgtcaccgtgctgatcatcatcattttgattttttccgcaaacctacggacttac

SEQ ID NO: 725575 - DNA, 75 bp, synthetic construct
  source 1..75: mol_type = other DNA
ctcctgtggggaaggtatactgattaaaaatggaaatatgatcactggcggcgataattgcttctgtgtatcagg

SEQ ID NO: 725576 - DNA, 75 bp, synthetic construct
  source 1..75: mol_type = other DNA
atggtggtttatccccgctggcgcggggagctctacgtgaagaatatttgcaacacccgcaagaacggtttatcc

SEQ ID NO: 725577 - DNA, 75 bp, synthetic construct
  source 1..75: mol_type = other DNA
ttatccccgctggcgcggggaactcaccgagcgccgctgggaggcgtatctcacgttcggtttatccccgctggc

SEQ ID NO: 725578 - DNA, 75 bp, synthetic construct
  source 1..75: mol_type = other DNA
ctggcgcggggaacacaattgagacgttccacgcaattaaacaagccgcggtttatccccgctggcgcggggaac

SEQ ID NO: 725579 - DNA, 75 bp, synthetic construct
  source 1..75: mol_type = other DNA
acccggcgttgagcgccagatgactgagaaagagcggtttatccccgctggcgcggggaacacggtgttccgtta

SEQ ID NO: 725580 - DNA, 75 bp, synthetic construct
  source 1..75: mol_type = other DNA
actcgtatatcatcgatatggagcgcgggaagtgggaggtttatccccgctggcgcggggaactcgtgtgctcct

SEQ ID NO: 725581 - DNA, 75 bp, synthetic construct
  source 1..75: mol_type = other DNA
gggaaacaacgtcattgtgatccgaaacaaggtgagcggagacattatcacggcgcgcagcgtggctttccagaa

SEQ ID NO: 725582 - DNA, 75 bp, synthetic construct
  source 1..75: mol_type = other DNA
aacggtttatccccgctggcgcggggaacactccaaccttccatgagatacgcgcattagcggcggtttatcccc

SEQ ID NO: 725583 - DNA, 75 bp, synthetic construct
  source 1..75: mol_type = other DNA
ggggtacctataatcatgccctgtatattgatggtcgccgtgaaatgatgcagtggtatgctgactacattgatt

SEQ ID NO: 725584 - DNA, 75 bp, synthetic construct
  source 1..75: mol_type = other DNA
ggcgctttcttgtgcttggtgcccatggcggttgtcgcctttatctggcagtgcattaagtctgcccagcatgga

SEQ ID NO: 725585 - DNA, 75 bp, synthetic construct
  source 1..75: mol_type = other DNA
cgttttgccgtaagccgttcccctggcaggtggaaaagcaggattcggcgttattcgcgctgtaccagcgaatga

SEQ ID NO: 725586 - DNA, 75 bp, synthetic construct
  source 1..75: mol_type = other DNA
aataaaaatgggttgcagcaaagagatattatagcgacaaatatagctgacactccagtttggaagagaattctg

SEQ ID NO: 725587 - DNA, 75 bp, synthetic construct
  source 1..75: mol_type = other DNA
ggagctaccatgcgttgttctggctggcgatagggatgttgggtattgcgatgatttgcctgctgtttattaaag

SEQ ID NO: 725588 - DNA, 75 bp, synthetic construct
  source 1..75: mol_type = other DNA
agcgcaatgtctggatttgcgcaggtgtaatgataacaaagggcactattattggtgaaaacagtgttatcgcag

SEQ ID NO: 725589 - DNA, 75 bp, synthetic construct
  source 1..75: mol_type = other DNA
gatggtaaaggcgaaagagccgaagtttgggcgttgtcaacaaaatatgacgctaacaatgtctatgctgctgta

SEQ ID NO: 725590 - DNA, 75 bp, synthetic construct
  source 1..75: mol_type = other DNA
acagtacacatcagcgacatgcactggtgtttatcgatcttgatcgctttaaagcggtgaatgacagcgccgggc

SEQ ID NO: 725591 - DNA, 75 bp, synthetic construct
  source 1..75: mol_type = other DNA
caggtcactgacattctgcaacaactcaaaactttctccggacaataccggctggttttcccgggacgttgtgat

SEQ ID NO: 725592 - DNA, 75 bp, synthetic construct
  source 1..75: mol_type = other DNA
cggttacgatggcagagcaaccggtcatggttttcgtcacaccatgagtaccattctgcacgaacaggggtttaa

SEQ ID NO: 725593 - DNA, 75 bp, synthetic construct
  source 1..75: mol_type = other DNA
ggcgcgggatcggccggatgtggcattgccgaacatatcgtcacgcagatggtggctgaagggttgaccgatgag

SEQ ID NO: 725594 - DNA, 75 bp, synthetic construct
  source 1..75: mol_type = other DNA
tctggcatcggcgtcgatttgatttatggtgatgtgattgccgatgcccaaccgctggatttgctggtgaatagc

SEQ ID NO: 725595 - DNA, 75 bp, synthetic construct
  source 1..75: mol_type = other DNA
atgctgcgctccagcgacgtgctggcgcgactcggtggcgatgaatttggtctgctgctgccagattgtaatgtc

SEQ ID NO: 725596 - DNA, 75 bp, synthetic construct
  source 1..75: mol_type = other DNA
aatttatagctgatatacagtttaatactgacttatgtggtgacacttatatttccagaggtcccgttttatatg

SEQ ID NO: 725597 - DNA, 75 bp, synthetic construct
  source 1..75: mol_type = other DNA
agcgtaaaatgtctcattgagcctgagtcatctgttcgttttgctctcagtttccgttaccccggctgggcaaaa

SEQ ID NO: 725598 - DNA, 75 bp, synthetic construct
  source 1..75: mol_type = other DNA
aatactcccctactcatgaggaggctgctgtctgctgcgtaccgaatacagcaagaaccataccggcttttgtcg

SEQ ID NO: 725599 - DNA, 75 bp, synthetic construct
  source 1..75: mol_type = other DNA
catatattatttgattcgatatttattagggagtgaaaaactaaaaataaagatatcgatcatgctcaaggttat

SEQ ID NO: 725600 - DNA, 75 bp, synthetic construct
  source 1..75: mol_type = other DNA
ataaaactgaccactaatattggtctggccgatgatgctgagtggctattctataatgctagttttgcatgcagc

SEQ ID NO: 725601 - DNA, 75 bp, synthetic construct
  source 1..75: mol_type = other DNA
atgattttttttaacgatattaagcccactggttggttaaaaaataagatagaatggtatatgaacggtcatatc

SEQ ID NO: 725602 - DNA, 75 bp, synthetic construct
  source 1..75: mol_type = other DNA
gatggcggcgggaattatcataatcgctacagttcgtgggagattgtgcgcggacaggaaggcgatcactggcat

SEQ ID NO: 725603 - DNA, 75 bp, synthetic construct
  source 1..75: mol_type = other DNA
tcattcatcatactcgacagagtaccgatattatctttagtgatcctggctgggataaaaatggtatgtatacag

SEQ ID NO: 725604 - DNA, 75 bp, synthetic construct
  source 1..75: mol_type = other DNA
gctaatgtagatgctatcatacaagagcaagtcgattttgtaattgtagcatcaccagcaacttaccatttacgg

SEQ ID NO: 725605 - DNA, 75 bp, synthetic construct
  source 1..75: mol_type = other DNA
gtctatgagtttgattgtaaaagaagctattgatatttttagtatttttgttttccctggagtgaagggaaatat

SEQ ID NO: 725606 - DNA, 75 bp, synthetic construct
  source 1..75: mol_type = other DNA
tcccaaatataaaggtacgcttgaaggtaagaccgtattaatatttgatgatgtcattaccacaggctcaacctt

SEQ ID NO: 725607 - DNA, 75 bp, synthetic construct
  source 1..75: mol_type = other DNA
gcaatagataaccacgggaaggaaataacaaatagaaaaggattacctaatgtctgcagagttcatggtaatatg

SEQ ID NO: 725608 - DNA, 75 bp, synthetic construct
  source 1..75: mol_type = other DNA
gaagcaacccgatcacgctaacgccaaagtcggcaatacggtttcctgggtctttgactgcggcaagattgacca

SEQ ID NO: 725609 - DNA, 75 bp, synthetic construct
  source 1..75: mol_type = other DNA
cattctggagacgatcaagaaagagaagatgaatctgaccgccacgacaggcgctggcgttctggtacgacaggg

SEQ ID NO: 725610 - DNA, 75 bp, synthetic construct
  source 1..75: mol_type = other DNA
ccaccagctcgcaaaaaattggcgacattatcagcgttatcgacggaattgctttccagaccaatattctggccc

SEQ ID NO: 725611 - DNA, 75 bp, synthetic construct
  source 1..75: mol_type = other DNA
cccgtcgttatctgccgttacagcatatccgcgctggtcaggcatctttcgatgtttatgattcggtgcttaatg

SEQ ID NO: 725612 - DNA, 75 bp, synthetic construct
  source 1..75: mol_type = other DNA
gaagcggctaaaaggaatgtagggacaggggcgaatcagatacctgatatgggtagcttcacgctttctgtttca

SEQ ID NO: 725613 - DNA, 75 bp, synthetic construct
  source 1..75: mol_type = other DNA
gatgccgtaacgtgcttaacgtcaggcacaagccctggctctaatctttctgatgtttattttctggctattgga

SEQ ID NO: 725614 - DNA, 75 bp, synthetic construct
  source 1..75: mol_type = other DNA
ataaaagcggcacggtgaccatcaatctgctgaaaacctcaccgacgaacaaaaagctgtcgctggcgtacaacg

SEQ ID NO: 725615 - DNA, 75 bp, synthetic construct
  source 1..75: mol_type = other DNA
cggcgcgcagcgtggcgttccagaaacagccggataacgccaacgctaaagccggtaatacgatgccctgggtgt

SEQ ID NO: 725616 - DNA, 75 bp, synthetic construct
  source 1..75: mol_type = other DNA
gtacagtggcgcgcctcatggcggttatgggacttgccggtgttttccggggtaaaaaggtccgcactaccgtca

SEQ ID NO: 725617 - DNA, 75 bp, synthetic construct
  source 1..75: mol_type = other DNA
ccgattttacctacgtcagcacctggcaggggttcgcatatgtggccttcatcattgatgtgttcgccggtgtta

SEQ ID NO: 725618 - DNA, 75 bp, synthetic construct
  source 1..75: mol_type = other DNA
atcaccgatccgcaattgcatcagtcccagaaagttaagcgcgttattttgtgtagcggccaggtctattacgac

SEQ ID NO: 725619 - DNA, 75 bp, synthetic construct
  source 1..75: mol_type = other DNA
caatgggaatcatttaggctggtttactaatggtatgttgattgatcacgatggctatgttgcctgtgtgatcct

SEQ ID NO: 725620 - DNA, 75 bp, synthetic construct
  source 1..75: mol_type = other DNA
ggggaataacgttattgtgatccgaaacaaggtcagcggcgacatcatcacagcacgcagtgttgcgttccagaa

SEQ ID NO: 725621 - DNA, 75 bp, synthetic construct
  source 1..75: mol_type = other DNA
gcaatcgcctccctgaccggcacgttagcgggcacgcatatgatcacggctcgtctggctaacagcaatgtcagc

SEQ ID NO: 725622 - DNA, 75 bp, synthetic construct
  source 1..75: mol_type = other DNA
tgtcttatgttggtgaaacacctgaaggtgctcagaagctgctggcgaagtatatccagcaagttgacgaccagg

SEQ ID NO: 725623 - DNA, 75 bp, synthetic construct
  source 1..75: mol_type = other DNA
caggcgatattgtggaccggcggaaggggtaaatagcggcgcgcaggctatcagtctggcggctgaatcaggggc

SEQ ID NO: 725624 - DNA, 75 bp, synthetic construct
  source 1..75: mol_type = other DNA
attacaaccgtcaccggtactatgacccgctacaggggaggtatatcacccaggatccaatagatataaaaggag

SEQ ID NO: 725625 - DNA, 75 bp, synthetic construct
  source 1..75: mol_type = other DNA
agatttaaactcggctatgtccacaaatgcatctgagtttattaattggggtgcaggtacgtcgatgagaattta

SEQ ID NO: 725626 - DNA, 75 bp, synthetic construct
  source 1..75: mol_type = other DNA
gtaacgagccgggattgtgttgggatcttaatacgggtacaagcaagttatgccttacacaaatagaaggtaaag

SEQ ID NO: 725627 - DNA, 75 bp, synthetic construct
  source 1..75: mol_type = other DNA
tgctgatggtcgtgtcggtgctgataagctttgctggaatatagacaataaaatgtcaggaccatgtctggctgc

SEQ ID NO: 725628 - DNA, 75 bp, synthetic construct
  source 1..75: mol_type = other DNA
tctatcatggtttctgcctcatttgttatgttgatgatttatgataagtctttggcgttaatagtgataattgtt

SEQ ID NO: 725629 - DNA, 75 bp, synthetic construct
  source 1..75: mol_type = other DNA
tgataatacagtacatcttgatgatgttgctcacattacaaaagggctgggaatacatgacataataaatagctt

SEQ ID NO: 725630 - DNA, 75 bp, synthetic construct
  source 1..75: mol_type = other DNA
ggacgtattatctgtaataatatgaatgttgcaaaacatactattcactctctcagaaaaatcactggtacggtt

SEQ ID NO: 725631 - DNA, 75 bp, synthetic construct
  source 1..75: mol_type = other DNA
ctttaccactgcgaccaccggggactgccgcaggcgctcatcagcccggaaggggaaacggcgtggcagggggag

SEQ ID NO: 725632 - DNA, 75 bp, synthetic construct
  source 1..75: mol_type = other DNA
aacagccttacgacaagatgaccgaagtcatcatttttgcgggtagtgatgcgtgggcacatgcgaaacagtggc

SEQ ID NO: 725633 - DNA, 75 bp, synthetic construct
  source 1..75: mol_type = other DNA
ggcttattccggctgaatcattatgcagcacctacggggccagcggttcttataaatcgttcctggctatttcct

SEQ ID NO: 725634 - DNA, 75 bp, synthetic construct
  source 1..75: mol_type = other DNA
atgaaaatgagaggcttcacacttctggagatgattatcactctcgctataatgggtgtagggatgatatcagta

SEQ ID NO: 725635 - DNA, 75 bp, synthetic construct
  source 1..75: mol_type = other DNA
cctcaattgctccaacaaaaacgcctacaaagaccatcgttgttgctgaagcgactcgtgaactaaagccgggac

SEQ ID NO: 725636 - DNA, 75 bp, synthetic construct
  source 1..75: mol_type = other DNA
ccgacccgactatagcgacaacccgcacaaggattgcgaagggatgtttgtaccggaagactatgttcccgtgcc

SEQ ID NO: 725637 - DNA, 75 bp, synthetic construct
  source 1..75: mol_type = other DNA
gcaaccgaccgcgctcgctactggcgcattgtgcgcgaccatgagaagcgtatgaatgaagacctgccgatcggg

SEQ ID NO: 725638 - DNA, 75 bp, synthetic construct
  source 1..75: mol_type = other DNA
attatagggttacggcctctgtgagctctggttctcaggctaatcaacaggtgaattttatcggtgatcaaagta

SEQ ID NO: 725639 - DNA, 75 bp, synthetic construct
  source 1..75: mol_type = other DNA
gtgtccgttaaactcaggctacctcagtcggtgatcattatggatactcatcctatcatcagaatgtctattgaa

SEQ ID NO: 725640 - DNA, 75 bp, synthetic construct
  source 1..75: mol_type = other DNA
gacgaaaaagacattagagatatttcttcattgggtacaagaaatctcaatggttatcttatgcacaataatatt

SEQ ID NO: 725641 - DNA, 75 bp, synthetic construct
  source 1..75: mol_type = other DNA
tgaggaggtggaaattatcaacccactttatagtgatgaatctaaaaaaccatatactagccgtgttacaaataa

SEQ ID NO: 725642 - DNA, 75 bp, synthetic construct
  source 1..75: mol_type = other DNA
atctaagaacataagttcattagataagaataagaattatggtttacgcataagtatagatccaaatactggtaa

SEQ ID NO: 725643 - DNA, 75 bp, synthetic construct
  source 1..75: mol_type = other DNA
aaggatatattttaaaaggaaatcttgtataaatataggtgctcagggaaaatatgagttcagtaaggattatat

SEQ ID NO: 725644 - DNA, 75 bp, synthetic construct
  source 1..75: mol_type = other DNA
caggtatctgttgggacatggaaaatggaaccagtaaattatgtttgactcaggtttccgggaaggactcaaatg

SEQ ID NO: 725645 - DNA, 75 bp, synthetic construct
  source 1..75: mol_type = other DNA
tggaatatagacagcaaaatggcaggtccatgtcttactgcagataatacaggtaataatctggttctgacgagt

SEQ ID NO: 725646 - DNA, 75 bp, synthetic construct
  source 1..75: mol_type = other DNA
ggcgtgaagacaggaaatattttacacgtaaaacttgtaagaacacaggtggacaaagtgaatatgaattcacga

SEQ ID NO: 725647 - DNA, 75 bp, synthetic construct
  source 1..75: mol_type = other DNA
ttgaaaatgatgcggttattactgcatggcatcacaaaggcattaaaataaaaccactggaattgattttgtcca

SEQ ID NO: 725648 - DNA, 75 bp, synthetic construct
  source 1..75: mol_type = other DNA
taaatccttcggcaatatgaataatatccctgctggaacatatacagcaacattctacattcaacaatatcaaga

SEQ ID NO: 725649 - DNA, 75 bp, synthetic construct
  source 1..75: mol_type = other DNA
ccctctgtatctggtacttctgttaatagcatgcaaaaactaggtactcttaatattcaattaaccggttctcac

SEQ ID NO: 725650 - DNA, 75 bp, synthetic construct
  source 1..75: mol_type = other DNA
taggacttattttagatgtaacaaattcattcaatcctgtactctatttctttgctggttgcgcagtgatattta

SEQ ID NO: 725651 - DNA, 75 bp, synthetic construct
  source 1..75: mol_type = other DNA
cagaacgctggcgagtactaatgccagtccaggaagtgttggacaatggagcgagaaagtatcagggatgtcgtc

SEQ ID NO: 725652 - DNA, 75 bp, synthetic construct
  source 1..75: mol_type = other DNA
ttgataaaaaagtgtatgaaacctggataacgctggcgggagacgtctggagattgatgctcacaccttatgcac

SEQ ID NO: 725653 - DNA, 75 bp, synthetic construct
  source 1..75: mol_type = other DNA
ctttaacgcagcagcgaaagaaaaaatatcactgcttgcaccctatgatgaatggtatttcaattttttttaccc

SEQ ID NO: 725654 - DNA, 75 bp, synthetic construct
  source 1..75: mol_type = other DNA
ggagcctgcgcatctgccggaagtgaggctcaatcgggaggtgacggtgccccgggaatagttattgttgaggag

SEQ ID NO: 725655 - DNA, 75 bp, synthetic construct
  source 1..75: mol_type = other DNA
agagctgatgatcctaatagctcaataaccggtgaaactacgataccagtagaaacttacacacctgatgattct

SEQ ID NO: 725656 - DNA, 75 bp, synthetic construct
  source 1..75: mol_type = other DNA
gacacgacgagtaagtttttaccgggtggcggtcaccgaaacaaaaactggacgatgacgctaaaacactatgct

SEQ ID NO: 725657 - DNA, 75 bp, synthetic construct
  source 1..75: mol_type = other DNA
gcgtaggggaatttaacagcccggaagaagcccgcgcacagattcattatcagtaccattatttctacccgcaaa

SEQ ID NO: 725658 - DNA, 75 bp, synthetic construct
  source 1..75: mol_type = other DNA
gcccggaagaagcccgcgcacagattcattatcagtaccgttatttctacccgcaaactgaacctgaatttatag

SEQ ID NO: 725659 - DNA, 75 bp, synthetic construct
  source 1..75: mol_type = other DNA
aaagagctcggggagcaacactaatggatgcaggagggccatttggtgctgcaattggaggaatattagtagctg

SEQ ID NO: 725660 - DNA, 75 bp, synthetic construct
  source 1..75: mol_type = other DNA
atgggctggcaaaagtgtagtggtattaggcgcagctatttagatgatctctttaacgatctcggtcgtagtata

SEQ ID NO: 725661 - DNA, 75 bp, synthetic construct
  source 1..75: mol_type = other DNA
acatgattcatggcggcttccggtcctcagtactggcgaggccgatacggtgactttcgcgggccgggcacacat

SEQ ID NO: 725662 - DNA, 75 bp, synthetic construct
  source 1..75: mol_type = other DNA
agaaggctactatgctgtttgccgggagcatgtaccgaccgacagcggcagagaagaccaccagccgtaaacggc

SEQ ID NO: 725663 - DNA, 75 bp, synthetic construct
  source 1..75: mol_type = other DNA
ttgcccgtgatttgcgctttgatcacccctacgccgactacggcaatattccaaaaacactgtttacctttaccg

SEQ ID NO: 725664 - DNA, 75 bp, synthetic construct
  source 1..75: mol_type = other DNA
gcagaaacgcggatgggctacaacgaagtgaccttcttatcggaccgcgtgtgtgggatttgcggttttgcccac

SEQ ID NO: 725665 - DNA, 75 bp, synthetic construct
  source 1..75: mol_type = other DNA
caggcttgagcacgcgctcaccgcctgtgcgattaaggtcgaaaccatcaaagactgtcaggataaaatcgatgc

SEQ ID NO: 725666 - DNA, 75 bp, synthetic construct
  source 1..75: mol_type = other DNA
acctatgtagaactattggacactgatggtatctattatcagttcagaacgctggatgctaccgctccgagttcc

SEQ ID NO: 725667 - DNA, 75 bp, synthetic construct
  source 1..75: mol_type = other DNA
atccccctatgtctatccatttgtgctgggactcagtgattgataaaaaagtgtatgaaacctggataacgctgg

SEQ ID NO: 725668 - DNA, 75 bp, synthetic construct
  source 1..75: mol_type = other DNA
gaaaagtattatctgcggtatctgttaatcgggctggctccggaagggaaaataggagtgtggctggagaaacct

SEQ ID NO: 725669 - DNA, 75 bp, synthetic construct
  source 1..75: mol_type = other DNA
cgccaaaatgctggaaaccgatcaggcgtgggaagtgttcgaaaaactggaagacagctacttcaacaagtacga

SEQ ID NO: 725670 - DNA, 75 bp, synthetic construct
  source 1..75: mol_type = other DNA
tggcgcaattatgtggctatagcagcacgtcgtactttatctctgtttttaaggcgttttacggcctgacaccgt

SEQ ID NO: 725671 - DNA, 75 bp, synthetic construct
  source 1..75: mol_type = other DNA
tgattgataaaaaagtgtatgaaacctggataacgctggcgggagacgtctggaaattgatgctcacaccttatt

SEQ ID NO: 725672 - DNA, 75 bp, synthetic construct
  source 1..75: mol_type = other DNA
ctcgaaggcagcagttgcaaagccaatgcctgcggctgggactatatcgtaacactctataaccccaagacgcat

SEQ ID NO: 725673 - DNA, 75 bp, synthetic construct
  source 1..75: mol_type = other DNA
gcatgcagccccccttgatatgtcgataacaccgactgtttcactgaacggtgcacgggtggacggaaattgtct

SEQ ID NO: 725674 - DNA, 75 bp, synthetic construct
  source 1..75: mol_type = other DNA
gtatgggtttcgtctgacaagaacgctatccgccagcatttcagacgtgccactggccgttcggttgtgataaga

SEQ ID NO: 725675 - DNA, 75 bp, synthetic construct
  source 1..75: mol_type = other DNA
caactcgccagggccggtctgggcaggctgacccttattgatcctgacagactggagtcacccaatctggggcgg

SEQ ID NO: 725676 - DNA, 75 bp, synthetic construct
  source 1..75: mol_type = other DNA
gcccgcgccatcatccatgaaacaatacgccacgtagattactgcatgcctagcctcgatgaggcccgtttgcta

SEQ ID NO: 725677 - DNA, 75 bp, synthetic construct
  source 1..75: mol_type = other DNA
aggctattaaaaatgcttatctcgatatggcgtttcccaactttgcatttgtgatggagaagtataactcattaa

SEQ ID NO: 725678 - DNA, 75 bp, synthetic construct
  source 1..75: mol_type = other DNA
tgaaagccggggttgaggcagaaaaagtttccggaaatatgacgctgaaggcaggtatctggcggaatatcacgc

SEQ ID NO: 725679 - DNA, 75 bp, synthetic construct
  source 1..75: mol_type = other DNA
tgataacaacctgcgcccggaagccagctcctataccgcgaatatagctgcggcaaacaccatgtttgtgacccg

SEQ ID NO: 725680 - DNA, 75 bp, synthetic construct
  source 1..75: mol_type = other DNA
aacactacctaccgtgtgtgcttttccctggggatacacctactgaattcagcgttggccctgtcacattcatcc

SEQ ID NO: 725681 - DNA, 75 bp, synthetic construct
  source 1..75: mol_type = other DNA
gaacaaggccaggctccatatccggctggtttgtatcagttgcatccttccagtatttttgttggtgactttcaa

SEQ ID NO: 725682 - DNA, 75 bp, synthetic construct
  source 1..75: mol_type = other DNA
caggctttgaaggaatttaccagatttcagacgctggcaacctgagaagcctcgacagaactgtattaaacaaag

SEQ ID NO: 725683 - DNA, 75 bp, synthetic construct
  source 1..75: mol_type = other DNA
gcgatcagatctttttcatcgccgtcgaacagcagttgccgctgaacggccaaaatggcgcatccgataccatgc

SEQ ID NO: 725684 - DNA, 75 bp, synthetic construct
  source 1..75: mol_type = other DNA
tgtggattttagcaaacgctccaacgaagcgggtagaaagatgatgactcatattgagtcctcatcttattctaa

SEQ ID NO: 725685 - DNA, 75 bp, synthetic construct
  source 1..75: mol_type = other DNA
tacccgccagtgtatctctattaccccaaaaacgcgggtaaaacgaaaagagtgaaggccctgattgattttctg

SEQ ID NO: 725686 - DNA, 75 bp, synthetic construct
  source 1..75: mol_type = other DNA
gtgatgagctgtatgcaactgttagtagcagtcagaatcctaatcgatccacgcctttcatattcatcagcgcat

SEQ ID NO: 725687 - DNA, 75 bp, synthetic construct
  source 1..75: mol_type = other DNA
cagtctgcttactaatgctggatacattgtcgaggctacaacctcgcctgaacgagccctggaaaagcttctgcg

SEQ ID NO: 725688 - DNA, 75 bp, synthetic construct
  source 1..75: mol_type = other DNA
atgggttatacccggctggatgtcctgttacaggaggaagccatcgacgtggtctcggtggcgacacctgacccg

SEQ ID NO: 725689 - DNA, 75 bp, synthetic construct
  source 1..75: mol_type = other DNA
cattaacggtacagtctggttccagggcgacggttgcaaagccaatacctgcggctgggactttatcgtaacact

SEQ ID NO: 725690 - DNA, 75 bp, synthetic construct
  source 1..75: mol_type = other DNA
cgcggcgtggccgtgcgcgtggtggccgacgaaaaggcgaacagcgaccgctacaccgccgtgacgtatctgata

SEQ ID NO: 725691 - DNA, 75 bp, synthetic construct
  source 1..75: mol_type = other DNA
tatgtagaaaagctttaggggcaaaagtcaaagaacaactgaacacttggcggttagtaaatggtttattagatg

SEQ ID NO: 725692 - DNA, 75 bp, synthetic construct
  source 1..75: mol_type = other DNA
agtgtatgactaccccggacgtttcaagggtgcccacgggcagaactttgcccgctggcagatggacggctggcg

SEQ ID NO: 725693 - DNA, 75 bp, synthetic construct
  source 1..75: mol_type = other DNA
gccgatgtttgtaaaacatgcaatggtggagcattaagttttttagatgattatggaagtcagtttttagccaga

SEQ ID NO: 725694 - DNA, 75 bp, synthetic construct
  source 1..75: mol_type = other DNA
gaccataaaagaaatgcccataaagaaatatttcactttacatctctccgcgtaactactgttacgcctgaatga

SEQ ID NO: 725695 - DNA, 75 bp, synthetic construct
  source 1..75: mol_type = other DNA
attgccccggagcgccggccaatccagcctgggcgcagaacaccgtcgatggtgacgagattaatctgttcgata

SEQ ID NO: 725696 - DNA, 75 bp, synthetic construct
  source 1..75: mol_type = other DNA
acgttgttaattacgatccctccaacgtgattatgctcaccggacgcgcctcagtcgtggagcgtctgacggagg

SEQ ID NO: 725697 - DNA, 75 bp, synthetic construct
  source 1..75: mol_type = other DNA
cgctcgaaaacctataagggcagcgggtttaatgaactgaagtttgacgatgcgacagggaaagaacaggtctac

SEQ ID NO: 725698 - DNA, 75 bp, synthetic construct
  source 1..75: mol_type = other DNA
gttatcaatctgaacaatggaggattcgttattgaatcttccggtactgtgcttgggctagaagtgtataccgca

SEQ ID NO: 725699 - DNA, 75 bp, synthetic construct
  source 1..75: mol_type = other DNA
ggggttcggaggcgagcttgtagctcacggtatgcgttctattgcacgaacagcggcagaggagtctggtaaatt

SEQ ID NO: 725700 - DNA, 75 bp, synthetic construct
  source 1..75: mol_type = other DNA
cctgtgataagtttttaaaacatgcctgcaaaagttcaaattcatttgaagtgaaattagatgccactcatcaat

SEQ ID NO: 725701 - DNA, 75 bp, synthetic construct
  source 1..75: mol_type = other DNA
aaatgtctctcagatgcttacagggtttgcaactccagagctctcccctacctactattacatggtatggaaaat

SEQ ID NO: 725702 - DNA, 75 bp, synthetic construct
  source 1..75: mol_type = other DNA
atttggcacccctgagttgtcaccaacttattattataaaacatggaaaattcagggtttagcatataaaaacgg

SEQ ID NO: 725703 - DNA, 75 bp, synthetic construct
  source 1..75: mol_type = other DNA
aaagcttaatattaataattcaggtggtttaggccaaatatcatttacaacgtcaataggaaaagaagttggcat

SEQ ID NO: 725704 - DNA, 75 bp, synthetic construct
  source 1..75: mol_type = other DNA
gtgttacgacagcagggaaacggctgaaatggcgattaaggttatgaattccgtcgccagtagctgggaattcta

SEQ ID NO: 725705 - DNA, 75 bp, synthetic construct
  source 1..75: mol_type = other DNA
gacatcccctccgaccctgtcgaaacctgggggctgatcgccgctgctctcggcaagagcagcaaccgaggcgcg

SEQ ID NO: 725706 - DNA, 75 bp, synthetic construct
  source 1..75: mol_type = other DNA
agctcgcggcataaacgtcatgcgtgagatcaaggacgaacaaactggcgaaatcatcgatcgcgtgatgcccag

SEQ ID NO: 725707 - DNA, 75 bp, synthetic construct
  source 1..75: mol_type = other DNA
cgggtgaagttcaactgggaccgttataacccggcagaccaagacagttcgtgctggatccgtgtggcacaggcg

SEQ ID NO: 725708 - DNA, 75 bp, synthetic construct
  source 1..75: mol_type = other DNA
aggcgaacctgaaccgggaatggcaggtggtggcgagcgaactgcacggcgaacagccgcaggcggtgccgggac

SEQ ID NO: 725709 - DNA, 75 bp, synthetic construct
  source 1..75: mol_type = other DNA
gtggcgattatttctttcgcgttgagcggtttcgctaactttggttctatcggggtggtggtgggggcgttttct

SEQ ID NO: 725710 - DNA, 75 bp, synthetic construct
  source 1..75: mol_type = other DNA
ctgttccaagcgaatcaccacgcgacctgaagttcaacgccgggaaaattgatgaatttgtaacttccctggctg

SEQ ID NO: 725711 - DNA, 75 bp, synthetic construct
  source 1..75: mol_type = other DNA
atgacagcttgcctaaaacgaaagcagcggtttatccccgctggcgcggggaactctgctttcctacgacaaatc

SEQ ID NO: 725712 - DNA, 75 bp, synthetic construct
  source 1..75: mol_type = other DNA
gggtcaagcaagcactggaaaaaaatcaaccaggaaagccagtacgggtgataaatcctgatgatgaatcgatac

SEQ ID NO: 725713 - DNA, 75 bp, synthetic construct
  source 1..75: mol_type = other DNA
gatgctttttctgagttaccagaaaatacaatagtcgttccttatggcgagcttacaggtagttttgagataata

SEQ ID NO: 725714 - DNA, 75 bp, synthetic construct
  source 1..75: mol_type = other DNA
taagccagtcacaatctaccaactttacagtatcacacaaacaacacatccattatgttaaagaacgcttaatcc

SEQ ID NO: 725715 - DNA, 75 bp, synthetic construct
  source 1..75: mol_type = other DNA
gcggggaactcggcaatccgttggattcattgttttgttgctccggtttatccccgctggcgcggggaactccct

SEQ ID NO: 725716 - DNA, 75 bp, synthetic construct
  source 1..75: mol_type = other DNA
tatccccgctggcgcggggaactctgtaaacataacctattattaattaatgattttttaagccagtcacaatct

SEQ ID NO: 725717 - DNA, 75 bp, synthetic construct
  source 1..75: mol_type = other DNA
ggggattcaagattgccgcggccttcatcggtgaattggtcatgcgtaagacagttgtatctgacggctctcagc

SEQ ID NO: 725718 - DNA, 75 bp, synthetic construct
  source 1..75: mol_type = other DNA
tggcacacaattaccgttaacgtgtcatctggagcggcctactgctctgggatagagttctggagccagtcacgg

SEQ ID NO: 725719 - DNA, 75 bp, synthetic construct
  source 1..75: mol_type = other DNA
ccgtaccgagcgagtcccctagcgaccttaaattcaacgcagggaagattgaccaattcgttacctcaatggctc

SEQ ID NO: 725720 - DNA, 75 bp, synthetic construct
  source 1..75: mol_type = other DNA
ggtgatgaagtgggtgtccgcggcgtaccagtggctgtttgtggacagcggatttatggcctggatgaagcaggg

SEQ ID NO: 725721 - DNA, 75 bp, synthetic construct
  source 1..75: mol_type = other DNA
ttcctcagagaatatcccgaaatcaatgtcgaactggtggtggataacggttttgtcgatattgttgacggtcgt

SEQ ID NO: 725722 - DNA, 75 bp, synthetic construct
  source 1..75: mol_type = other DNA
acaccctgaagcttgagcgcgagctggaatcacttatccaactgaatggcgcgccatccgggaatattcgtttat

SEQ ID NO: 725723 - DNA, 75 bp, synthetic construct
  source 1..75: mol_type = other DNA
tcagtaaagaacttcctctcaaggaagccaatggtcgccatgaacagatcacctacttccggtccatcagtgacc

SEQ ID NO: 725724 - DNA, 75 bp, synthetic construct
  source 1..75: mol_type = other DNA
cttcgggcgtatgagtctgcccccgatcataaaatctgtgtttcctacggcgcgtgcggtgccggcggcggattt

SEQ ID NO: 725725 - DNA, 75 bp, synthetic construct
  source 1..75: mol_type = other DNA
ttcaagaccaataccgatggtgtagatgccagcgcgcagggtaaagatagcgtcgcgattggttctggctccatt

SEQ ID NO: 725726 - DNA, 75 bp, synthetic construct
  source 1..75: mol_type = other DNA
accggtagcaccaagtacttcaagaccaacaccgatggcgtagatgctaacgcgcagggtaaagacagtgttgcg

SEQ ID NO: 725727 - DNA, 75 bp, synthetic construct
  source 1..75: mol_type = other DNA
acgctgaagaagctcaactcaatcggctctccagtcgacctgctgactgtcacctcagacatagaggctcgcgga

SEQ ID NO: 725728 - DNA, 75 bp, synthetic construct
  source 1..75: mol_type = other DNA
ataaaaataatatacacactcatcaaaaaagcaaactgatacctttttttgaaaaaagaaatatatataattcat

SEQ ID NO: 725729 - DNA, 75 bp, synthetic construct
  source 1..75: mol_type = other DNA
cgcgtgcggtgccggcggcggattttccacgatctctacagcgtctggggcggcagcgacaccattgtccccatt

SEQ ID NO: 725730 - DNA, 75 bp, synthetic construct
  source 1..75: mol_type = other DNA
caataccgtttctgacgcaccgctgattatcggtagccttgatcccttgctactcctgtaccgaccgcatgacgg

SEQ ID NO: 725731 - DNA, 75 bp, synthetic construct
  source 1..75: mol_type = other DNA
cctttaccggcggcgatgttttctcccgcgtgatggtccgtgtcaaagagacgtttgattcgctggcaatgctgg

SEQ ID NO: 725732 - DNA, 75 bp, synthetic construct
  source 1..75: mol_type = other DNA
tgattatcggtagccttgatccctgctactcctgtaccgaccgtgtgacgctggtagatgtgcgcaagcgccagt

SEQ ID NO: 725733 - DNA, 75 bp, synthetic construct
  source 1..75: mol_type = other DNA
ggactttaaccgagacgaaggcgcaccgttggcgaccaagcgcaccagtctgcgaagcctcctgatcgacgccgg

SEQ ID NO: 725734 - DNA, 75 bp, synthetic construct
  source 1..75: mol_type = other DNA
tcattactgccctataaacacgtattacctaatggtacttattttgttgatggagaaccttacggtactgagcct

SEQ ID NO: 725735 - DNA, 75 bp, synthetic construct
  source 1..75: mol_type = other DNA
tgacaggcaaatggaacgaaaagctgaagttcagaaacaactggttgcggcggggaatgttcgccagcgtattcc

SEQ ID NO: 725736 - DNA, 75 bp, synthetic construct
  source 1..75: mol_type = other DNA
tagctcttgttcattcaccgttaaccctgacgatttgaaatgcggtgagttacatctgacttgtccgataacatt

SEQ ID NO: 725737 - DNA, 75 bp, synthetic construct
  source 1..75: mol_type = other DNA
ttcaccggtgttaagtttggtaggcaccacactacagaatcaggaccggcttttaaatgctcatctcgttttact

SEQ ID NO: 725738 - DNA, 75 bp, synthetic construct
  source 1..75: mol_type = other DNA
aataagaaattaacagcattcttggataaacaagaaggtggaagtacttcaggtgatattaccgttaacgcacca

SEQ ID NO: 725739 - DNA, 75 bp, synthetic construct
  source 1..75: mol_type = other DNA
ctggcggtggtgtatccgatgatcttaaagaatatggactcaacctacaggactataacaagtacttaaaacagg

SEQ ID NO: 725740 - DNA, 75 bp, synthetic construct
  source 1..75: mol_type = other DNA
gctggaatatcgtgcgcatgttgcgttccgccaataaagggatgccgattctgttgcttaccgcgcttggcacca

SEQ ID NO: 725741 - DNA, 75 bp, synthetic construct
  source 1..75: mol_type = other DNA
ggtacgggaagtatatgtattattatgggaaagcaaattgcaaagcagtaaggtatgtcgaggatttcgaacagt

SEQ ID NO: 725742 - DNA, 75 bp, synthetic construct
  source 1..75: mol_type = other DNA
tatgaatttacaggaacattattctgttaatccaagtgcttttattcggcctaaaacaaaagttaatctgaatga

SEQ ID NO: 725743 - DNA, 75 bp, synthetic construct
  source 1..75: mol_type = other DNA
ctggcggtggcgtgtctgatgatttaaaagagtttggcctgaatctacaggactataacaagtacttgaaacaaa

SEQ ID NO: 725744 - DNA, 75 bp, synthetic construct
  source 1..75: mol_type = other DNA
gcgtcgtaggtaaagccaaagtccgccagttgcagcgccacgaaacaggcgagcgcacgacggagtttaaagcct

SEQ ID NO: 725745 - DNA, 75 bp, synthetic construct
  source 1..75: mol_type = other DNA
atgattttgataaaaatcattaggggattcatcagtgctgtgcgtcatgtagcaagacacaataaccctgaaaca

SEQ ID NO: 725746 - DNA, 75 bp, synthetic construct
  source 1..75: mol_type = other DNA
tcaacgtcatggaaacactggcgagtgattcaagccacatgatcagtactctacagcagttcaatactgaagccg

SEQ ID NO: 725747 - DNA, 75 bp, synthetic construct
  source 1..75: mol_type = other DNA
taaagagtacgggctgaacctacagcaatataacaagtaccttaaacaagcagatggcggtatgcaggccgtgat

SEQ ID NO: 725748 - DNA, 75 bp, synthetic construct
  source 1..75: mol_type = other DNA
atcgatatcagtaacctgaatgcacaccaacaattgactatattcagtgatacggctcaatccttaagtgatggc

SEQ ID NO: 725749 - DNA, 75 bp, synthetic construct
  source 1..75: mol_type = other DNA
aaaaatggtatcgctgataaagatgtcttagccggcgctgaggaagccgaggcatatgtcaaaggtaagtataga

SEQ ID NO: 725750 - DNA, 75 bp, synthetic construct
  source 1..75: mol_type = other DNA
atacttcatggtttttcccacgggatcactttatatggaggtatgcaggctgctgaaaattatggttctgaggta

SEQ ID NO: 725751 - DNA, 75 bp, synthetic construct
  source 1..75: mol_type = other DNA
ccagtcagcgcgggtgacttattttgttaacgcatcgctgtttatctatctggttcaccacccgttaacgctgtt

SEQ ID NO: 725752 - DNA, 75 bp, synthetic construct
  source 1..75: mol_type = other DNA
ttgaaggatcttattcatttcatcacgcatgggaaagtcgagtttaattctcagcgagtatctaaactcatggca

SEQ ID NO: 725753 - DNA, 75 bp, synthetic construct
  source 1..75: mol_type = other DNA
gtgaaacaagagtgctgcctgaagaattaaacatggctattgttgttgaaaaccttagaaacttaccacacagtt

SEQ ID NO: 725754 - DNA, 75 bp, synthetic construct
  source 1..75: mol_type = other DNA
gaaaaaaatggagtgaaacaagatcgcttcctgaagaattaaatatagctattgttgttgaaaaccttagaaaat

SEQ ID NO: 725755 - DNA, 75 bp, synthetic construct
  source 1..75: mol_type = other DNA
gtcgagaacgaacagaaagcgattctgctgattgtgcgccgtcttgccgaaaccggcgagatggtgattggcagc

SEQ ID NO: 725756 - DNA, 75 bp, synthetic construct
  source 1..75: mol_type = other DNA
acgaaaactgctgaatctaaattcgtcgcggatgataaaaacgcggtgctcgccgcatctccagaacgtgtagat

SEQ ID NO: 725757 - DNA, 75 bp, synthetic construct
  source 1..75: mol_type = other DNA
ttctggatcctaaagggacggcgaaaactaatgagcaaggacaggctgttttcaccggctctaccactatcgcag

SEQ ID NO: 725758 - DNA, 75 bp, synthetic construct
  source 1..75: mol_type = other DNA
cggttttgtaatttgctcatttttgttgctttttattttaatgaaaatacgaggtgtcagacttttgcattccgt

SEQ ID NO: 725759 - DNA, 75 bp, synthetic construct
  source 1..75: mol_type = other DNA
tggctgccgccagcgtgctgcttgccgttgcaaatcaggcgctgctggcgcgacgcttgatgccgttcagaaaaa

SEQ ID NO: 725760 - DNA, 75 bp, synthetic construct
  source 1..75: mol_type = other DNA
aaatcctcgctttgcaatgccctttttgtctcagcccagtcagccatgcagaaggctgcacacgtaaacctttgc

SEQ ID NO: 725761 - DNA, 75 bp, synthetic construct
  source 1..75: mol_type = other DNA
tattacaaagaacgcctgcttgccgccagccatcatctgatcagcagcgatggcgtgattgttattaaggcacag

SEQ ID NO: 725762 - DNA, 75 bp, synthetic construct
  source 1..75: mol_type = other DNA
cgttcttggcaagcccgccaataccaaagtcggcatcactattgataccgactggttctggggattagtcgaaga

SEQ ID NO: 725763 - DNA, 75 bp, synthetic construct
  source 1..75: mol_type = other DNA
cgaagccaccaccttaagctcggcgtttctggtaggcatttacggtcagcgttcatcgctggaagctgcatggaa

SEQ ID NO: 725764 - DNA, 75 bp, synthetic construct
  source 1..75: mol_type = other DNA
cccacattgaccacgagatgctgggccggatgctggcgaggatggagcaggagcggctgttccagcagcgtctgg

SEQ ID NO: 725765 - DNA, 75 bp, synthetic construct
  source 1..75: mol_type = other DNA
ctggaagttgctgctgaaagacaaatccagcgttgaacgtgacttccttgagcgtatgaggagggagaatggcaa

SEQ ID NO: 725766 - DNA, 75 bp, synthetic construct
  source 1..75: mol_type = other DNA
taagggaatttcctgacgaaaagaatatagagtcttatcttgaaataatatttgaacttgaatcaatgatcgaat

SEQ ID NO: 725767 - DNA, 75 bp, synthetic construct
  source 1..75: mol_type = other DNA
taagagaatttcctgacgaaaagaatatagaatcttatcttgaaataatatttaaacttgaatcgatgatcgaat

SEQ ID NO: 725768 - DNA, 75 bp, synthetic construct
  source 1..75: mol_type = other DNA
acaatcttgcacattaggtgcgaataagaaaagttacccagaccgttttgtaattggcaataatgtcacaatggg

SEQ ID NO: 725769 - DNA, 75 bp, synthetic construct
  source 1..75: mol_type = other DNA
tgtaccgcccaatcatcaccgccctacaggcgcaagggctgagctgcacgctggtgatcaacgaccgcgtgttta

SEQ ID NO: 725770 - DNA, 75 bp, synthetic construct
  source 1..75: mol_type = other DNA
atgattgtgatttcccgacatgttgctatccccgatggcgagcttgagatcaccgccattcgtgctcagggggcg

SEQ ID NO: 725771 - DNA, 75 bp, synthetic construct
  source 1..75: mol_type = other DNA
tggtactgccataacccatcctgttcacgtaaaatttttgccgagtcgctggcacccttcgccggttcccggcag

SEQ ID NO: 725772 - DNA, 75 bp, synthetic construct
  source 1..75: mol_type = other DNA
gcacatcatactttataaaaatatttaaagatttctttggtgttacgcctaaacaaatgattttatttcttaaaa

SEQ ID NO: 725773 - DNA, 75 bp, synthetic construct
  source 1..75: mol_type = other DNA
ggaaaaacatgaaagtataaatattgtatcttcagcagtaggattttcaagcacatcatactttataaaaatatt

SEQ ID NO: 725774 - DNA, 75 bp, synthetic construct
  source 1..75: mol_type = other DNA
ttcccatatcggcggcacacctgaaaaaaccgtgtacacaaggatgtacacaataaaaatcgttattacagaaat

SEQ ID NO: 725775 - DNA, 75 bp, synthetic construct
  source 1..75: mol_type = other DNA
tgctattgtgacaattttaaaccgaaaaataggtcgattatcagaaactgattttgttaagtatatttctctgga

SEQ ID NO: 725776 - DNA, 75 bp, synthetic construct
  source 1..75: mol_type = other DNA
tatctttaccggtatgaccgtcacggcaggctgacagagaaaaccgacctcatcccggaaggggttatccgcacg

SEQ ID NO: 725777 - DNA, 75 bp, synthetic construct
  source 1..75: mol_type = other DNA
cgattttttaaaatacaatttaccagaccataattataaagttttttcaaacattccatttaacataacggcaag

SEQ ID NO: 725778 - DNA, 75 bp, synthetic construct
  source 1..75: mol_type = other DNA
gaaattatcaacctgatgaaaactcagcaggaagaagccgttattaccgccgtgcgtgaattcgacggcgagctg

SEQ ID NO: 725779 - DNA, 75 bp, synthetic construct
  source 1..75: mol_type = other DNA
catccgcagattatcgccactatcctggtgcatctgaaacgcgcccaggccgccgatattctggcgttgttcgat

SEQ ID NO: 725780 - DNA, 75 bp, synthetic construct
  source 1..75: mol_type = other DNA
gaagagatgtgctgactaaatactcttgctcagatttattatcgatgctttcacctcatcagctaaatgataatt

SEQ ID NO: 725781 - DNA, 75 bp, synthetic construct
  source 1..75: mol_type = other DNA
acaattactgaaatggtttcaaagtttgctgatgctctttataacttcaatctacaaacattttataataatgaa

SEQ ID NO: 725782 - DNA, 75 bp, synthetic construct
  source 1..75: mol_type = other DNA
gaagcggagaacgcaccagttaaattacgctttagcagtactttaccgtcagattactttgaacaactttcagca

SEQ ID NO: 725783 - DNA, 75 bp, synthetic construct
  source 1..75: mol_type = other DNA
actattactgaaatggtttcaaagtttgccgatgctctttataacttcaatcttcaaactttctggaacaacgaa

SEQ ID NO: 725784 - DNA, 75 bp, synthetic construct
  source 1..75: mol_type = other DNA
acgggctggaaggtatcgcagcacgccataatgacggccttctgtgccttgatgaaatcgcacaagtagacgcaa

SEQ ID NO: 725785 - DNA, 75 bp, synthetic construct
  source 1..75: mol_type = other DNA
ttcttatgaacaacaaaagcgtttaagaaaatctattaatctagacgaagatgttactttctccgaatggactta

SEQ ID NO: 725786 - DNA, 75 bp, synthetic construct
  source 1..75: mol_type = other DNA
cgatgatcgcagcattcagcgtctgttgcaggaagtggattccgaatcgctgttgatcgcgctgaaaggggccga

SEQ ID NO: 725787 - DNA, 75 bp, synthetic construct
  source 1..75: mol_type = other DNA
agtatgtcgctaaaaagtgagcgctcggctgtgcaggtttcctctgatgaacaattgaatctttggatacagctg

SEQ ID NO: 725788 - DNA, 75 bp, synthetic construct
  source 1..75: mol_type = other DNA
atcgatactctaccagcggctatcgtgatctggctgatgtgctgggagagcgtcatgctgccagcaataaacagt

SEQ ID NO: 725789 - DNA, 75 bp, synthetic construct
  source 1..75: mol_type = other DNA
aaacttgacatttatttcataggtaagcaagaaagttttaaatatggcgcgatatatgatttaaacaatacagta

SEQ ID NO: 725790 - DNA, 75 bp, synthetic construct
  source 1..75: mol_type = other DNA
gtctggatagcgaaaattattgtatgccaagtctgctttttaatcagtcgttggttctctataaagtgcctgaat

SEQ ID NO: 725791 - DNA, 75 bp, synthetic construct
  source 1..75: mol_type = other DNA
agcttttcagaagacagccgtggacgctggtacttcaatgtttgcgtagaggtcgaaactgtcccatcaacggcc

SEQ ID NO: 725792 - DNA, 75 bp, synthetic construct
  source 1..75: mol_type = other DNA
aatcagatctttaatctggcaaacgagataaccagcgcagcatacggcaacgctggcttttttggcgcgcaaaaa

SEQ ID NO: 725793 - DNA, 75 bp, synthetic construct
  source 1..75: mol_type = other DNA
aagggaaaacctgccagtggtcgggctgttctctctcaggaacaggatggcattaaatcgcatactcacagtgcc

SEQ ID NO: 725794 - DNA, 75 bp, synthetic construct
  source 1..75: mol_type = other DNA
ctctgaaaagaaaatgtcccacaggtacagatagagttgctgcttatcatactcacggtgcagatagtcatggcg

SEQ ID NO: 725795 - DNA, 75 bp, synthetic construct
  source 1..75: mol_type = other DNA
agtctgaatgacggtgatatcattgtgctgggcggactggcggagaacaagacatcaaaggcgcggacagggctt

SEQ ID NO: 725796 - DNA, 75 bp, synthetic construct
  source 1..75: mol_type = other DNA
gagcttgtccggcagcttctgccgcagattgacgtcagggcacaggaggtttcggttgccgggtatgtgtttgag

SEQ ID NO: 725797 - DNA, 75 bp, synthetic construct
  source 1..75: mol_type = other DNA
ctaatgccttcattgagaaggcgaacaaaggtgaactttctgagctgactcccatgaagctccagaagttgcttt

SEQ ID NO: 725798 - DNA, 75 bp, synthetic construct
  source 1..75: mol_type = other DNA
ccactgcgcgagaaattcctgcgcaatatgtcgcagcgtgccgccgatattctgcgcgacgatctcgccaaccgt

SEQ ID NO: 725799 - DNA, 75 bp, synthetic construct
  source 1..75: mol_type = other DNA
aaagataataatcttgaagcattttatctcgcaacacctgatggacgatttgaggcgcttaataataaaggagaa

SEQ ID NO: 725800 - DNA, 75 bp, synthetic construct
  source 1..75: mol_type = other DNA
tcacacaatatacatcaatattatatgtgaagaatatgagaaaaccgacactcgcgttatagaattaaatattta

SEQ ID NO: 725801 - DNA, 75 bp, synthetic construct
  source 1..75: mol_type = other DNA
aaatttcctgagggtattttaatatatgaaaataataaagagttcgcagagccgagatcacctattccgttcaac

SEQ ID NO: 725802 - DNA, 75 bp, synthetic construct
  source 1..75: mol_type = other DNA
tgggatatcaagcgcgcgcgcatcctgaagcgtgataatcatctgtgtcagaactgcctgcgtagtggacgtgct

SEQ ID NO: 725803 - DNA, 75 bp, synthetic construct
  source 1..75: mol_type = other DNA
gtggggaccattccggtaccgcgtgatggtcgtgattatgatccggatgtactgcagcaggcggtgaatgatgcg

SEQ ID NO: 725804 - DNA, 75 bp, synthetic construct
  source 1..75: mol_type = other DNA
ctctgtgactcctgggttttatgagctaagaagaagtattttatcaatacaaaacgaattaaataatccattcaa

SEQ ID NO: 725805 - DNA, 75 bp, synthetic construct
  source 1..75: mol_type = other DNA
aagaattggaggtgtttaataacgaaagaaataagttatataaaattaaaaattattcaacccctttaaatattg

SEQ ID NO: 725806 - DNA, 75 bp, synthetic construct
  source 1..75: mol_type = other DNA
aacccttttgatgcttttaatcgattgatttgcgggcttacagttggagttgtttatggatttgcaaaaattaga

SEQ ID NO: 725807 - DNA, 75 bp, synthetic construct
  source 1..75: mol_type = other DNA
gacgagaattattatcacaggctttgtctggtaaaacagtagatttaaagattgtttcgacttctcttctgacgc

SEQ ID NO: 725808 - DNA, 75 bp, synthetic construct
  source 1..75: mol_type = other DNA
ggaaattttttcgggtatcagacatggagttatatcagcctatggattgaaaaaaaactcatctgaaagagctgt

SEQ ID NO: 725809 - DNA, 75 bp, synthetic construct
  source 1..75: mol_type = other DNA
gtcgcaagagaggttgtcccggtacgactacggaccgttcaggctactgtgagcagcatcgaaatgagggctggc

SEQ ID NO: 725810 - DNA, 75 bp, synthetic construct
  source 1..75: mol_type = other DNA
agccagcgaaaggacacgttttcagtacaacctgagctgaagcgccatacgttgctgccggatgccatttacttt

SEQ ID NO: 725811 - DNA, 75 bp, synthetic construct
  source 1..75: mol_type = other DNA
ttcgcacggattccacccggctgttcttgtttgacagcttggggatacatagtcagcgcagggacaccttctcca

SEQ ID NO: 725812 - DNA, 75 bp, synthetic construct
  source 1..75: mol_type = other DNA
tgcggcctgacggtggagcagatgcaaaaccagatggacccggtgtacacgccggcgcgaaaaatccacctgtac

SEQ ID NO: 725813 - DNA, 75 bp, synthetic construct
  source 1..75: mol_type = other DNA
aagattctcagaaacagaactaaatacattaccaaacgaaatgaaaaatttcttgatatttttaaacaaaactca

SEQ ID NO: 725814 - DNA, 75 bp, synthetic construct
  source 1..75: mol_type = other DNA
gagcagttaaaacaggtagcatagtaagaactataggtaggggagtgagttatgttgatataccattggccttag

SEQ ID NO: 725815 - DNA, 75 bp, synthetic construct
  source 1..75: mol_type = other DNA
caaccagccaggaagagttctcctgtaatgactccaacttattgatagtgttttatgttcagataatgcccgatg

SEQ ID NO: 725816 - DNA, 75 bp, synthetic construct
  source 1..75: mol_type = other DNA
cacatgaataaaaagggcactgttgcaaagttagcgatgaggcagccttttgtcttattcaaaggccttacattt

SEQ ID NO: 725817 - DNA, 75 bp, synthetic construct
  source 1..75: mol_type = other DNA
ggatgcgctgacgcatgcggaagtgctcattgatgacgagcagtttgatgaaatcaatattgtgcgcggtcagcc

SEQ ID NO: 725818 - DNA, 75 bp, synthetic construct
  source 1..75: mol_type = other DNA
tttggcaatcggtgtaccccttgcttcaaagtggtgatcttgatcctgtctttaaaatgaaagcagaaaaagaac

SEQ ID NO: 725819 - DNA, 75 bp, synthetic construct
  source 1..75: mol_type = other DNA
cgcccggcgacggctggaaatatcgcggcagagggttaattcaaatcactggcctcgacaattatcgcacctgcg

SEQ ID NO: 725820 - DNA, 75 bp, synthetic construct
  source 1..75: mol_type = other DNA
ggtggcgaccttcggaaagaggatcacacagcagcaggctgatgcgcttggcagaacaaccgaacacgcagcccg

SEQ ID NO: 725821 - DNA, 75 bp, synthetic construct
  source 1..75: mol_type = other DNA
gatcagcacaccagagttgctgacacaggataagcatgcagcccgttctgctgcatggtatttcacattacgtgg

SEQ ID NO: 725822 - DNA, 75 bp, synthetic construct
  source 1..75: mol_type = other DNA
cgctgtgtgcctctggtcgatggggcctatggttttatattggctgactttatgaggttggttgagacccgtaga

SEQ ID NO: 725823 - DNA, 75 bp, synthetic construct
  source 1..75: mol_type = other DNA
tcaatgaaatagcccaactacaggtcaaagacgtcaggaccactgaggcgggaaccgtttatattcatatcaatg

SEQ ID NO: 725824 - DNA, 75 bp, synthetic construct
  source 1..75: mol_type = other DNA
ccgggcgatctggagcgtgtcacacagattattaacggcgggcagaatggcattaaagaccgccgtgaacgttac

SEQ ID NO: 725825 - DNA, 75 bp, synthetic construct
  source 1..75: mol_type = other DNA
tgacgttgacgttttttgcgctgataagttttctggcattgaaagaatattgtacgcttatatctgtacattttc

SEQ ID NO: 725826 - DNA, 75 bp, synthetic construct
  source 1..75: mol_type = other DNA
gtatcgcttcccgaatgaaggcgaaacgttagtggccagggaaactaccatggggccgggggtaaaggcgcgaat

SEQ ID NO: 725827 - DNA, 75 bp, synthetic construct
  source 1..75: mol_type = other DNA
cctgctggaagatattctcgaaacccgcgacaccgccagcggcatagaaacgctcaacttcatggagccgcagag

SEQ ID NO: 725828 - DNA, 75 bp, synthetic construct
  source 1..75: mol_type = other DNA
taataccgtttgtgcggatcctgtccgaaaaagtgcgtgcggacgcggacgcccgccaaaagatgaagtgcgcct

SEQ ID NO: 725829 - DNA, 75 bp, synthetic construct
  source 1..75: mol_type = other DNA
ttttaatacttatttcaactgttggtaaaactttaataacaatagtcgaatttataaatgacagacataaagaaa

SEQ ID NO: 725830 - DNA, 75 bp, synthetic construct
  source 1..75: mol_type = other DNA
cattatctaaaacctctaagcaccgatataatccctgattacattagcatcctccctattattgcaggcggtctt

SEQ ID NO: 725831 - DNA, 75 bp, synthetic construct
  source 1..75: mol_type = other DNA
ttgcttttctgacagaagaatgctgctcaggggcagatggactgtacgataccaatggcgatcttggaggaaaaa

SEQ ID NO: 725832 - DNA, 75 bp, synthetic construct
  source 1..75: mol_type = other DNA
atccacgtacagcggatacaagtaaggtgtccacgttccttaatcatatggcgtatctggtacctgatgcctggc

SEQ ID NO: 725833 - DNA, 75 bp, synthetic construct
  source 1..75: mol_type = other DNA
caacggttgcagcgaaacatccattaagtatttcccaaaagggacggggggatttgaacagggacattttaaaag

SEQ ID NO: 725834 - DNA, 75 bp, synthetic construct
  source 1..75: mol_type = other DNA
ttgcgggatatcctgtcgcaggatagttatcggagtatgatgtttcattcacaaatagcgctgaatcagttggtg

SEQ ID NO: 725835 - DNA, 75 bp, synthetic construct
  source 1..75: mol_type = other DNA
aacatgtacagcatcgcggtttataaccttggggcgtcgtttctcatcaattacgggacagagaccgtgttcgcc

SEQ ID NO: 725836 - DNA, 75 bp, synthetic construct
  source 1..75: mol_type = other DNA
agatatactgactcaaaaatcaaatgttgtattagagaacgggggccttctggctgtaacatcaggcggtacagc

SEQ ID NO: 725837 - DNA, 75 bp, synthetic construct
  source 1..75: mol_type = other DNA
cgcagcagttaccggtactggcagaagcggcgcgataccattgatccggcgcgagtcaggttgtatagcgaaata

SEQ ID NO: 725838 - DNA, 75 bp, synthetic construct
  source 1..75: mol_type = other DNA
tcttaaaaaaaattttgcatgacgttgattgttttatgttctttaatgatataggttacttagatgataatgatt

SEQ ID NO: 725839 - DNA, 75 bp, synthetic construct
  source 1..75: mol_type = other DNA
cgttgataaggtaaaaatcaccttcagttctgccagtgtcgacgcgaatgattccagcctcctgaaaaacactct

SEQ ID NO: 725840 - DNA, 75 bp, synthetic construct
  source 1..75: mol_type = other DNA
gttcccggtaagagtacttatgactctgttaggcgcggtacttcttatttccgcgatcaaaacctttaagcatac

SEQ ID NO: 725841 - DNA, 75 bp, synthetic construct
  source 1..75: mol_type = other DNA
cggaatcgcgaccattattgcgggtgttattgcgggtttcttcatcgggaatgttgctgctctgctgggtgttgc

SEQ ID NO: 725842 - DNA, 75 bp, synthetic construct
  source 1..75: mol_type = other DNA
atgctggaaaaatctctggcaacacttttcgcgttgttaattttagcaacgctgataaaccgttttctgctatgg

SEQ ID NO: 725843 - DNA, 75 bp, synthetic construct
  source 1..75: mol_type = other DNA
atttatagagcagttccgtcaggcagccgatcatccggtgatcgctacctatccggaagggctatatctgaaagg

SEQ ID NO: 725844 - DNA, 75 bp, synthetic construct
  source 1..75: mol_type = other DNA
cgcacagggctgcgccagaacttccgtatcttccagaatgaggacatcgcaagcatcctcggcacgatattgcag

SEQ ID NO: 725845 - DNA, 75 bp, synthetic construct
  source 1..75: mol_type = other DNA
gagcgcaggccagacgccgtttacggtttctgtgtctaactgccaggctccgactggtgcagatcaggcaatcaa

SEQ ID NO: 725846 - DNA, 75 bp, synthetic construct
  source 1..75: mol_type = other DNA
tggcctttctgacagaagaatgctgcgcaggcggcagctgcagtctgtcacccgcaaagactcccgaagagaccc

SEQ ID NO: 725847 - DNA, 75 bp, synthetic construct
  source 1..75: mol_type = other DNA
tttttgttgggaatgatttttataggaagggaggtggtgaagttgttttggcatttcaaaagctaataaaggaat

SEQ ID NO: 725848 - DNA, 75 bp, synthetic construct
  source 1..75: mol_type = other DNA
atgcaagcactacggcaatgccatcaggcctagtgatgtttgggttgagttcgggaagatcatctggtactcgta

SEQ ID NO: 725849 - DNA, 75 bp, synthetic construct
  source 1..75: mol_type = other DNA
ccctcatcatttgtactaaccccaaggatagagacggaatctgccaccaacttgtgaacgaagagcgccttcggt

SEQ ID NO: 725850 - DNA, 75 bp, synthetic construct
  source 1..75: mol_type = other DNA
catcatttacaaacaggttcaatttaacggcaagtcaagtgaagaggtcttaagactacttggtgagttgttttc

SEQ ID NO: 725851 - DNA, 75 bp, synthetic construct
  source 1..75: mol_type = other DNA
ctgggatgcttggctatagtctttttaccaatctaaaagactataaaaacctgaatgtaattggcacagcgcgta

SEQ ID NO: 725852 - DNA, 75 bp, synthetic construct
  source 1..75: mol_type = other DNA
atttattcctccatcgtggtatgacttgattaagtttatgtttaatgactatgttacaaggtattctctatgcaa

SEQ ID NO: 725853 - DNA, 75 bp, synthetic construct
  source 1..75: mol_type = other DNA
actttcttattaccaaaaagaattatcgtttctaaaaaaacatggaaagatcttttcagaaaaatttcccaaaat

SEQ ID NO: 725854 - DNA, 75 bp, synthetic construct
  source 1..75: mol_type = other DNA
ctgataagtcagaacagacgacaaattgccctcatccacccacacggtatgggattttctgaccaggtcttactg

SEQ ID NO: 725855 - DNA, 75 bp, synthetic construct
  source 1..75: mol_type = other DNA
cagaatgttgatatcttagatttaactaagttagaacggattattgctaaattaaaacctgatattgtgataaac

SEQ ID NO: 725856 - DNA, 75 bp, synthetic construct
  source 1..75: mol_type = other DNA
attctacgctatttcgtaataagacaaattttgtcccagaatcttgggataaattaattgaaaagatgaaagatg

SEQ ID NO: 725857 - DNA, 75 bp, synthetic construct
  source 1..75: mol_type = other DNA
gctctcaggcgttgaatacactgtctgccgggtttggctgtccccctgaaaagcttaaaaaggggcttctgtcgc

SEQ ID NO: 725858 - DNA, 75 bp, synthetic construct
  source 1..75: mol_type = other DNA
gaaatagagaaaacgaaattaagtcgtcgtgtatatactgagtacaggagtacagctttagctggttctttatgg

SEQ ID NO: 725859 - DNA, 75 bp, synthetic construct
  source 1..75: mol_type = other DNA
gagatatcaagttatttagggatagatgttacgtatgccaaccatgaaaggtggaaagacgctactccaatatct

SEQ ID NO: 725860 - DNA, 75 bp, synthetic construct
  source 1..75: mol_type = other DNA
gaagaagctaaaaaatggctatccaaaaaccatccagtctggtacgacccaaacaatgaatactcctctcttttt

SEQ ID NO: 725861 - DNA, 75 bp, synthetic construct
  source 1..75: mol_type = other DNA
gtgaatattaatgaatataatgagaactatctgacagctcagtttgaagaattatctcaacgtgatatgaagaag

SEQ ID NO: 725862 - DNA, 75 bp, synthetic construct
  source 1..75: mol_type = other DNA
gcgaagtcgtttgacccaacctcaaaggaagagattaaaatacttacagacacttctaaattaatttatgatttg

SEQ ID NO: 725863 - DNA, 75 bp, synthetic construct
  source 1..75: mol_type = other DNA
gcagcgttgcagaacactctacaactgggtctgtgcttcctcgcaagtctggtagtttcctggctgatcagtatc

SEQ ID NO: 725864 - DNA, 75 bp, synthetic construct
  source 1..75: mol_type = other DNA
tcgtatcgatgccttcgcaacttttcactatggcgcgttcttttaaagcggttgccaatggcaaaatttatatcg

SEQ ID NO: 725865 - DNA, 75 bp, synthetic construct
  source 1..75: mol_type = other DNA
atgacagacattacagccaatgttgtaattgggatgccttcgcaactcttcactatggctcgttcttttaaagcc

SEQ ID NO: 725866 - DNA, 75 bp, synthetic construct
  source 1..75: mol_type = other DNA
aatgagaccctatcgattatccgacttatcaaaaatgcctgtttaaaattatataatttggcacataccgcaacc

SEQ ID NO: 725867 - DNA, 75 bp, synthetic construct
  source 1..75: mol_type = other DNA
cggcggtaagttcaccgcaaatgcataccacacccagcgtcctcaggtaattttcaatgattaccctgatgggct

SEQ ID NO: 725868 - DNA, 75 bp, synthetic construct
  source 1..75: mol_type = other DNA
ttatgatgcgtatggtgcacagcagttcaaattcccaaatgtgctgaagtacgcccctgatcaatttgagattag

SEQ ID NO: 725869 - DNA, 75 bp, synthetic construct
  source 1..75: mol_type = other DNA
tctttaccttctccacataaaagtgactggaggtgtaaaaaataattatgctacttatatcatgtcttccggtgc

SEQ ID NO: 725870 - DNA, 75 bp, synthetic construct
  source 1..75: mol_type = other DNA
gatcgctggcgggacggcaatcgtctacgcaggtacgctggcggatgcatcggtcagtggcgcgacaggaagcct

SEQ ID NO: 725871 - DNA, 75 bp, synthetic construct
  source 1..75: mol_type = other DNA
agcagcactggagctggctaaaggcgtggacgtgatggttcatgaaacaacactcaatatggagatggaagccaa

SEQ ID NO: 725872 - DNA, 75 bp, synthetic construct
  source 1..75: mol_type = other DNA
ggcagcaagaaggctggaaagaagcgccggttccggtatggaatatgctcaactatgttgccttacaggaagggc

SEQ ID NO: 725873 - DNA, 75 bp, synthetic construct
  source 1..75: mol_type = other DNA
cgctcagtactttccttattgatatctgccttgatatatgccccgcctgggatgacggccttcactcctgatgtt

SEQ ID NO: 725874 - DNA, 75 bp, synthetic construct
  source 1..75: mol_type = other DNA
cagggactgatattgaaggatacaacaagctctctcacttcactattaccggaggggaggctaattatgttgtgc

SEQ ID NO: 725875 - DNA, 75 bp, synthetic construct
  source 1..75: mol_type = other DNA
tgagaaagatggtacggcaactggcagcaatattagcgccggaggctcgctgattgtctataccggtggtattgc

SEQ ID NO: 725876 - DNA, 75 bp, synthetic construct
  source 1..75: mol_type = other DNA
aatatagaaatacgtgtaaatggcgcgctaactggctatggcgaacttgttgaagtggatgataaattgggcgta

SEQ ID NO: 725877 - DNA, 75 bp, synthetic construct
  source 1..75: mol_type = other DNA
gcatttaaccccggaaaactggacagaatttttataagccatttacatggcgatcatctttttggcttgcccggg

SEQ ID NO: 725878 - DNA, 75 bp, synthetic construct
  source 1..75: mol_type = other DNA
acgtaccgatgcgtggtcatatccggttctgcggcttaaacgcctggggctgtcaaaaacgttccgtcgtctggt

SEQ ID NO: 725879 - DNA, 75 bp, synthetic construct
  source 1..75: mol_type = other DNA
aggcatgtcatcacattctccgatgccagtcgcggcaaaagtggcaccaggcgctgaccctaaatcgatggtcat

SEQ ID NO: 725880 - DNA, 75 bp, synthetic construct
  source 1..75: mol_type = other DNA
aacaatagagatatctcttgtgaatttcatgttttcacagattatatcagtgataaagacaaattatatttttct

SEQ ID NO: 725881 - DNA, 75 bp, synthetic construct
  source 1..75: mol_type = other DNA
tcggcggcgaccatctggggccaaactgctggcagcaagaaaatgcggatgcggcgatggaaaaatccgtcgagc

SEQ ID NO: 725882 - DNA, 75 bp, synthetic construct
  source 1..75: mol_type = other DNA
tgtttttacgattgccgataaagttgggtttgcacgcgaacgcattattctcggcggcgatcatctggggccaaa

SEQ ID NO: 725883 - DNA, 75 bp, synthetic construct
  source 1..75: mol_type = other DNA
taattaaattacgttacggagtaatttctgtaatttgtagttctattgtgaaaaaaaaaacacccaagatgttag

SEQ ID NO: 725884 - DNA, 75 bp, synthetic construct
  source 1..75: mol_type = other DNA
tctaacccgcgtgaaaagctgacgatgaaccgccaacagatgaatatcgctggcctcctggaacaggttgaggtg

SEQ ID NO: 725885 - DNA, 75 bp, synthetic construct
  source 1..75: mol_type = other DNA
agacgctcacgttaccgttgcctgctaattcttcgggtagccaaatgacctggcgatttattaatgattacggcg

SEQ ID NO: 725886 - DNA, 75 bp, synthetic construct
  source 1..75: mol_type = other DNA
acggtggcagtgtggtgttcccgccggtgctggtgcagatgctcgaccggctggaaagtgaaatcctggctgccc

SEQ ID NO: 725887 - DNA, 75 bp, synthetic construct
  source 1..75: mol_type = other DNA
acatcaaggagatcgagggggtgttatgcttcgaagtgacggagggtaagagcaaatcagccgctcgtattattc

SEQ ID NO: 725888 - DNA, 75 bp, synthetic construct
  source 1..75: mol_type = other DNA
cttctacgctaccctgaaatagagaaaggcttatcaatcaataaaaaatcaaatttaaggcgcaaaacaacacca

SEQ ID NO: 725889 - DNA, 75 bp, synthetic construct
  source 1..75: mol_type = other DNA
atgagcgcgctgaccgatttaagccagttacccatccctgatgtggtggaaacactcgattttgaaaccctgttc

SEQ ID NO: 725890 - DNA, 75 bp, synthetic construct
  source 1..75: mol_type = other DNA
gtggatctatcatcgtttaagctttatggacaagcagctttgggtaacgcgttatcatcctggcgagcgtttccc

SEQ ID NO: 725891 - DNA, 75 bp, synthetic construct
  source 1..75: mol_type = other DNA
ataatgacgtcggctttgcgcggctggtcaaccggtttgttttccagcgcaaacgcccagacagcttctttatct

SEQ ID NO: 725892 - DNA, 75 bp, synthetic construct
  source 1..75: mol_type = other DNA
tcaggtagaaaagcgccctcacccacttaatgcgctaactgcggacgaaattaaacaggccgttgaaattgttaa

SEQ ID NO: 725893 - DNA, 75 bp, synthetic construct
  source 1..75: mol_type = other DNA
tctgaaaagaaaatgtcccacagatacagatagagttgctgcttatcatactcacggtgcagatagtcatggcga

SEQ ID NO: 725894 - DNA, 75 bp, synthetic construct
  source 1..75: mol_type = other DNA
cggtatgggcacgctaacctcgccaattgcacgtggcaaagatgcaccctctaacgcagtgctcctgaatgaaac

SEQ ID NO: 725895 - DNA, 75 bp, synthetic construct
  source 1..75: mol_type = other DNA
ctctggcactgcaagtaccggtagtgatgaaagacaataaagcctgggtttctgacacctttattaacgatgttt

SEQ ID NO: 725896 - DNA, 75 bp, synthetic construct
  source 1..75: mol_type = other DNA
aatcattggtttcagggttggagccggagttacttcagtcgttcagaatggtgcatcgtataacacagaacagac

SEQ ID NO: 725897 - DNA, 75 bp, synthetic construct
  source 1..75: mol_type = other DNA
ctggttcaccagtcagctctcccgcagcgaacaccgtcatcaggccgcagaaaacacacaacaggcagcaacgtt

SEQ ID NO: 725898 - DNA, 75 bp, synthetic construct
  source 1..75: mol_type = other DNA
agtccgccgaagtgatcccgtatcagattgatgccgtactttattgctatcccggcccggagcaggaacccattc

SEQ ID NO: 725899 - DNA, 75 bp, synthetic construct
  source 1..75: mol_type = other DNA
actacaacgtagtcaatgtggcagagcttgagcacgattatcaagtacaagctgaggttgccaagccgcccacac

SEQ ID NO: 725900 - DNA, 75 bp, synthetic construct
  source 1..75: mol_type = other DNA
agcattaaacaaactgatattaaagtagtcccaactacaggggcgattgttaaggcaaaatataataccagtatc

SEQ ID NO: 725901 - DNA, 75 bp, synthetic construct
  source 1..75: mol_type = other DNA
atgaactaaaagaaacaaccgaaatatattttagaaataaaggtaatgatcttatcccttgtctgatacaggaaa

SEQ ID NO: 725902 - DNA, 75 bp, synthetic construct
  source 1..75: mol_type = other DNA
tttgtagatccaaaggaaaaagaaggtttaatggtacaacacagcaatgggcaactggttattactggtaaatat

SEQ ID NO: 725903 - DNA, 75 bp, synthetic construct
  source 1..75: mol_type = other DNA
tgtgatgatcgttaactgtggcagtatcccgcgttcagaaggcaaggcgtgtcgggtgtttgatctgcgcaatat

SEQ ID NO: 725904 - DNA, 75 bp, synthetic construct
  source 1..75: mol_type = other DNA
cctttttcttcagaagaactactcgttgttggaaaatatttacactgctcttctaactggaatgccgtcgattat

SEQ ID NO: 725905 - DNA, 75 bp, synthetic construct
  source 1..75: mol_type = other DNA
ctgaggacgtattcgcagttcacaaatatttcggaattaagccaaatccactttatatgcaaggtgcgtctcgtg

SEQ ID NO: 725906 - DNA, 75 bp, synthetic construct
  source 1..75: mol_type = other DNA
tatcgtacaatggtctggtgttcgcgcggatgagtcctctaagcgcgctggatatgagaggttttcccgcgatat

SEQ ID NO: 725907 - DNA, 75 bp, synthetic construct
  source 1..75: mol_type = other DNA
aaattcaagaattcttctaaggaaattaaaaacacctacaagcaaattgtactagcgcaaaaaaaaattgaacca

SEQ ID NO: 725908 - DNA, 75 bp, synthetic construct
  source 1..75: mol_type = other DNA
gccaaagtcattgccagcgcctattccgatcttggatttgacgttgatttaagtccgatgttctcgacaccagaa

SEQ ID NO: 725909 - DNA, 75 bp, synthetic construct
  source 1..75: mol_type = other DNA
cgatgatgctgccgtaaccgccgcactgaatgctctgactaatgcggcactgcaaaacggaaacctgctggctgc

SEQ ID NO: 725910 - DNA, 75 bp, synthetic construct
  source 1..75: mol_type = other DNA
tgcccgcaacacccagatcatcatccaggaagaatcagaactctgccgcaccgtcgatccactggccggatccta

SEQ ID NO: 725911 - DNA, 75 bp, synthetic construct
  source 1..75: mol_type = other DNA
ggattatccattcaccatttcattgtcagggcgcgaaaaaaaatttgggaagaatgacttaattagattatcacg

SEQ ID NO: 725912 - DNA, 75 bp, synthetic construct
  source 1..75: mol_type = other DNA
aagagcgtggcgtggcggcgatttatggcccgggtactcccatgctcgacagtgtacgtgatgtgctgaaccgaa

SEQ ID NO: 725913 - DNA, 75 bp, synthetic construct
  source 1..75: mol_type = other DNA
gagatctccagactggcggtagaaaacgacgttcatgtggtgggcgcatcctctctcgcggctggacacaaaacg

SEQ ID NO: 725914 - DNA, 75 bp, synthetic construct
  source 1..75: mol_type = other DNA
aatgtcaccactcagggcagacgggccattgaattcagtaacggtgaacacttcaacttatttatctcaaatggt

SEQ ID NO: 725915 - DNA, 75 bp, synthetic construct
  source 1..75: mol_type = other DNA
aagtagttaaacaagaaacactaaataaggaagaaaccaatactaaaccagaagttaaatcacctccagtacaga

SEQ ID NO: 725916 - DNA, 75 bp, synthetic construct
  source 1..75: mol_type = other DNA
aaagaaagggcaaaagcgaaatgaagctcttgattgcctttgttactccctaatagcacgtgaatacgctatgac

SEQ ID NO: 725917 - DNA, 75 bp, synthetic construct
  source 1..75: mol_type = other DNA
ctaattcagatggtgaaaagggtgtagtagggttcggaatctctcgtatgtactcacctctaggaacaatagagg

SEQ ID NO: 725918 - DNA, 75 bp, synthetic construct
  source 1..75: mol_type = other DNA
atgaagagattgatgaacatacacgccaccaaatgatcgacggtggtcgatggattgctactaacaaagatggtg

SEQ ID NO: 725919 - DNA, 75 bp, synthetic construct
  source 1..75: mol_type = other DNA
ctggctgaagcacgtaccagtactttcggcagtgattcactagtagttgtatcttcaacgccattgtataaagac

SEQ ID NO: 725920 - DNA, 75 bp, synthetic construct
  source 1..75: mol_type = other DNA
agatgaatttaacctttataaaattcctgaaagtaccttagcgttgtgtatttcagttgatcagcagggtgatag

SEQ ID NO: 725921 - DNA, 75 bp, synthetic construct
  source 1..75: mol_type = other DNA
cgggcaggaattctctcagagtgtactgttcgtcatgtttgaaagtaatacaagtgaagccagcgaatattttag

SEQ ID NO: 725922 - DNA, 75 bp, synthetic construct
  source 1..75: mol_type = other DNA
cttctctcggcaaacagataaacagtactacatgaatcagcagagaacgcaaagtgcccgtgagtacgatactaa

SEQ ID NO: 725923 - DNA, 75 bp, synthetic construct
  source 1..75: mol_type = other DNA
gaacagcagcccgaactctacctgacacaaccttccctgatgaatataatgaaacaggccggttacaaaacattc

SEQ ID NO: 725924 - DNA, 75 bp, synthetic construct
  source 1..75: mol_type = other DNA
atagcaatgaataagatgtttaatgatcctgcaaactttgcctttgcctctagtagtgaagatgatattaaaaag

SEQ ID NO: 725925 - DNA, 75 bp, synthetic construct
  source 1..75: mol_type = other DNA
aggggtaaatatcgaacaggcttattaccgccgttcgatggctgaccgcttttctgattacgtcggcgtatcgat

SEQ ID NO: 725926 - DNA, 75 bp, synthetic construct
  source 1..75: mol_type = other DNA
tataacgattacgataatgctaatatatttaatgaccatgttgttgcaacgttgatcaaaactttcaaagcaaca

SEQ ID NO: 725927 - DNA, 75 bp, synthetic construct
  source 1..75: mol_type = other DNA
cactggagcatattcgcgccacccgcgatgatgctgccgtaaccaccgcactgaatgctctgactaatgcggcac

SEQ ID NO: 725928 - DNA, 75 bp, synthetic construct
  source 1..75: mol_type = other DNA
tgtttctcgccagtaataacgaaataattgccgaagaatatttcactggcgaaataaaaaaagaagaagccaaaa

SEQ ID NO: 725929 - DNA, 75 bp, synthetic construct
  source 1..75: mol_type = other DNA
ctcgaagatcctcgacgaagtgaccaccaccgacgaactgattccttccggtgaaacctcttcttatcgttcaaa

SEQ ID NO: 725930 - DNA, 75 bp, synthetic construct
  source 1..75: mol_type = other DNA
gctgatttacggaccgaacattaaagactggccggaattgggtgcgctgactgacaatatcgtcctcaaagtgtg

SEQ ID NO: 725931 - DNA, 75 bp, synthetic construct
  source 1..75: mol_type = other DNA
tgtttctcgccggcaataacgagataattgccgaagaacattattccggtgaaataaaaaaagaagatgcgaaaa

SEQ ID NO: 725932 - DNA, 75 bp, synthetic construct
  source 1..75: mol_type = other DNA
atccatcaatatatgcgtgagatgatggcaggcggcggcaaaatgatcctcgggtcagacagccacacccgttac

SEQ ID NO: 725933 - DNA, 75 bp, synthetic construct
  source 1..75: mol_type = other DNA
gcgtaacttcccgaaccgcgaaggctctaagccagctaatgggcagatgtcagcggtggcgttgatggacgctcg

SEQ ID NO: 725934 - DNA, 75 bp, synthetic construct
  source 1..75: mol_type = other DNA
cgtcagcttgccggcatggggaataacctcaaccagattgcccggcaggttaacgccggtggcggcagcgggcac

SEQ ID NO: 725935 - DNA, 75 bp, synthetic construct
  source 1..75: mol_type = other DNA
aattgttgaaattacagcaggagaaatagttgatgatggcctgcgcaaggtaacggcatatccaatggaacatcc

SEQ ID NO: 725936 - DNA, 75 bp, synthetic construct
  source 1..75: mol_type = other DNA
ccccgccgtggccgcatgtgcgtggtgattccgttagtgccgcgagcctgatttctcgcatcgagaaagaagcgc

SEQ ID NO: 725937 - DNA, 75 bp, synthetic construct
  source 1..75: mol_type = other DNA
gtcgtgatttaatacaggcatatagcgaagttgccaataaaattcgtgacatcagattgtctgctaagtgtttgc

SEQ ID NO: 725938 - DNA, 75 bp, synthetic construct
  source 1..75: mol_type = other DNA
ggcttacatcagctaagcaaaagtcattactttataaatcattggctgatttggttcagtcaatgatggacacct

SEQ ID NO: 725939 - DNA, 75 bp, synthetic construct
  source 1..75: mol_type = other DNA
gacaatacccgtttgtttatttactgctggagctctttttagaatcagatgaagatgaccaggtattagttacac

SEQ ID NO: 725940 - DNA, 75 bp, synthetic construct
  source 1..75: mol_type = other DNA
attgtatctgcattctggaaaaaaaacatgttccaatattagtaatgctagtgcgcatataaatgagttaaattt

SEQ ID NO: 725941 - DNA, 75 bp, synthetic construct
  source 1..75: mol_type = other DNA
aggagagaccagtatggtgtacaccacctggtgctgcctgtgctggctggctgggctggggatgccgctcgataa

SEQ ID NO: 725942 - DNA, 75 bp, synthetic construct
  source 1..75: mol_type = other DNA
gggacttaagcaggcagatttcatttttcaccttgctggagtaaatcgtcctgtgaaggagagtgaatttgaaga

SEQ ID NO: 725943 - DNA, 75 bp, synthetic construct
  source 1..75: mol_type = other DNA
aaacagttcctggttggacacatgacattacaaatattggaactgaggaattaatagtcatgctctgggcaaatg

SEQ ID NO: 725944 - DNA, 75 bp, synthetic construct
  source 1..75: mol_type = other DNA
gttatcgggagcagctcaggcacgttgttttctgttgttgaaggaggacgtagttttccttcgcgccagtactgg

SEQ ID NO: 725945 - DNA, 75 bp, synthetic construct
  source 1..75: mol_type = other DNA
tttgcggactgatagtctggttgtttttgccatcaatacaaagaaatattcctgtcgttacccaacccgtagaaa

SEQ ID NO: 725946 - DNA, 75 bp, synthetic construct
  source 1..75: mol_type = other DNA
gaaatccggcgagaccagtatggtattcaccacttggtgctgcctgtgctggctggccgggctgggaatgctgct

SEQ ID NO: 725947 - DNA, 75 bp, synthetic construct
  source 1..75: mol_type = other DNA
gggaaaaattcttgactggatcaaaccttaccagaaggtgaaaaacacctcctttgcccccggtaatgtgtccat

SEQ ID NO: 725948 - DNA, 75 bp, synthetic construct
  source 1..75: mol_type = other DNA
tacctgataccttctggggcgaacagggaaaaattcttgactggatcaaaccttaccagaaggtgaaaaacacct

SEQ ID NO: 725949 - DNA, 75 bp, synthetic construct
  source 1..75: mol_type = other DNA
tgaatattgcattaagcagcggtggtaatttgtttacctcgacaggggcgaccgttaccggaactaaccactatg

SEQ ID NO: 725950 - DNA, 75 bp, synthetic construct
  source 1..75: mol_type = other DNA
tgatgccagtaatgctgttagttacactggttatagcattttactttgcgcctgaacaactttttactgatgtta

SEQ ID NO: 725951 - DNA, 75 bp, synthetic construct
  source 1..75: mol_type = other DNA
cctgaacaacttctcacagatgtgattaatacatggggcagttctactacagatgagaaaattacactggcaagg

SEQ ID NO: 725952 - DNA, 75 bp, synthetic construct
  source 1..75: mol_type = other DNA
atatactgtggtttatgcttgccttttctgttttgttctttactggtatggcaagtgcatccatgagtatggaaa

SEQ ID NO: 725953 - DNA, 75 bp, synthetic construct
  source 1..75: mol_type = other DNA
ttgttcttcactattatgattctatttgttctatttaatcaatggcaaactttaacagcaataaatgatgagtta

SEQ ID NO: 725954 - DNA, 75 bp, synthetic construct
  source 1..75: mol_type = other DNA
cctcaatggtcattgcatgacatccggcgcacctttacaaccatgctgaacgatttaggcgttgatcctcacgtc

SEQ ID NO: 725955 - DNA, 75 bp, synthetic construct
  source 1..75: mol_type = other DNA
ttgggtttctttcatttcagtaatatcgccattaagagaaaaagcccttactattttaaggaggaaaaataaaca

SEQ ID NO: 725956 - DNA, 75 bp, synthetic construct
  source 1..75: mol_type = other DNA
ttgcgaagggggcaaatcagtgtgcgcgggcaggggataaattaccggatttactcgatgaatatatcagagcaa

SEQ ID NO: 725957 - DNA, 75 bp, synthetic construct
  source 1..75: mol_type = other DNA
gcggagtggcggcgcagcacagttcgcagccgctaagcgcgctctggcaggtgctgccggaagatgttcgcctga

SEQ ID NO: 725958 - DNA, 75 bp, synthetic construct
  source 1..75: mol_type = other DNA
ggcggactgggcaccaatggcggacatcagcgaggatgagaacgcattcctcctcaagctggatctgccggaggt

SEQ ID NO: 725959 - DNA, 75 bp, synthetic construct
  source 1..75: mol_type = other DNA
tggaaagatctctttatttacggctggctggcggttatcagttgcgtactgacggttctcccctggggactggcg

SEQ ID NO: 725960 - DNA, 75 bp, synthetic construct
  source 1..75: mol_type = other DNA
acggatgtcagtctgcaggacaggagcctgcatataagacggatgaagaacgggttcagcacaatacacccgata

SEQ ID NO: 725961 - DNA, 75 bp, synthetic construct
  source 1..75: mol_type = other DNA
ccgacagacccggtgctgtaccggagtggagacacgacgcctcttcccgacagcctgactgtccgcaacgcagag

SEQ ID NO: 725962 - DNA, 75 bp, synthetic construct
  source 1..75: mol_type = other DNA
ggataacggggaagcccgcatcaccctgaagacggccctgatggttgacggaaagaaagtggcactcagtgccag

SEQ ID NO: 725963 - DNA, 75 bp, synthetic construct
  source 1..75: mol_type = other DNA
tccccgtggcagattgaagctgtggctgccgcgcttggatttactatccgggttactgtcattctgcctcaccac

SEQ ID NO: 725964 - DNA, 75 bp, synthetic construct
  source 1..75: mol_type = other DNA
atggaaaaatatgaactgaaaaaataccgacttaaaacactggaaggcgaaacattgcttcagcgtatagcccga

SEQ ID NO: 725965 - DNA, 75 bp, synthetic construct
  source 1..75: mol_type = other DNA
tgtgatatatacggcaagtaacgtggagcggttcaggaatatctggtcaaaaaagaagattgtgacagacagtta

SEQ ID NO: 725966 - DNA, 75 bp, synthetic construct
  source 1..75: mol_type = other DNA
atacttgtgcagaaccctatttattcccagacattaataaacccgatgggccagcaacagcagggatagatgatt

SEQ ID NO: 725967 - DNA, 75 bp, synthetic construct
  source 1..75: mol_type = other DNA
gtataataggaccaagtaaatttgatagtactgcagatgctgcgttagatgctttgaaagaaacgcagaatagat

SEQ ID NO: 725968 - DNA, 75 bp, synthetic construct
  source 1..75: mol_type = other DNA
gcagccacagcgtcttcagttacgatgcgctggaccggctggtacagcagggcggctttgacgggcggacgcaac

SEQ ID NO: 725969 - DNA, 75 bp, synthetic construct
  source 1..75: mol_type = other DNA
gttgaatggaaggttactccgcatgggttaagacctgatctatacccttatcccgaagatggaattcctgattcg

SEQ ID NO: 725970 - DNA, 75 bp, synthetic construct
  source 1..75: mol_type = other DNA
gctgggaatcacctgcggcatgggggtgatgaccaaaggttttctcgcccttgccgtgccggtattaagcgtgct

SEQ ID NO: 725971 - DNA, 75 bp, synthetic construct
  source 1..75: mol_type = other DNA
gggttatatctgattgatgatagagaacaatgcagggtctacgaactggaggaacgcgttaaggaactggatgct

SEQ ID NO: 725972 - DNA, 75 bp, synthetic construct
  source 1..75: mol_type = other DNA
ggtgaatttgagtacctgttattacttgcaggggagcaccctgaatacgttctgcataaaaaagctgaatcccgc

SEQ ID NO: 725973 - DNA, 75 bp, synthetic construct
  source 1..75: mol_type = other DNA
aataaagaaaaaactattattagaaaacacctccttcagtaagttattacttgatacacggatggcttttgctat

SEQ ID NO: 725974 - DNA, 75 bp, synthetic construct
  source 1..75: mol_type = other DNA
gtgataaaactgaatgattacgacatgttgcgtaaattgatccctcaaaacgccatagcgagatacatcggtgtt

SEQ ID NO: 725975 - DNA, 75 bp, synthetic construct
  source 1..75: mol_type = other DNA
tccagtacgcacggaagtggaattctatggccgtggagctgcagactcccgttatacactggatacatggcgttc

SEQ ID NO: 725976 - DNA, 75 bp, synthetic construct
  source 1..75: mol_type = other DNA
gagctattcagacaaatatctggaaattgaacttaatgacaataccgttggaaactatttatcgtattacagcca

SEQ ID NO: 725977 - DNA, 75 bp, synthetic construct
  source 1..75: mol_type = other DNA
aacacctccttcagtaagttattacttgatacacggatggcttttgctattaaattactaaagcaaaaccgcccc

SEQ ID NO: 725978 - DNA, 75 bp, synthetic construct
  source 1..75: mol_type = other DNA
gctttagtagtacatcgtactttgtgtgcctgttcaggcaatattataattgcacgccacgtgaatatgcaaaac

SEQ ID NO: 725979 - DNA, 75 bp, synthetic construct
  source 1..75: mol_type = other DNA
ccctggtcctgagtgcactcagtattcagtcagcactggccgctgaatacagcgagaaaacgcagtatctgggtg

SEQ ID NO: 725980 - DNA, 75 bp, synthetic construct
  source 1..75: mol_type = other DNA
aggttgacgccatgaagttaatagtgcaaccacagaaacaaaacgaggcaggactgaccagtggaaatctacgta

SEQ ID NO: 725981 - DNA, 75 bp, synthetic construct
  source 1..75: mol_type = other DNA
gacaacaggttgacgccatgaagttaatagtgcaaccacagaaacaaaacgaggcaggactgaccagtggaaatc

SEQ ID NO: 725982 - DNA, 75 bp, synthetic construct
  source 1..75: mol_type = other DNA
ctgatcaaccatgcagccgttgagcgcatggtctcccgtgttgtggcgctcaatcagccggtgaaaattgactac

SEQ ID NO: 725983 - DNA, 75 bp, synthetic construct
  source 1..75: mol_type = other DNA
caggttatgttttaacagccgcaattaacagcaatgcggatgatattgtcgacactgttgccagaaggccaattc

SEQ ID NO: 725984 - DNA, 75 bp, synthetic construct
  source 1..75: mol_type = other DNA
tgagaatcctgttattgtaggccctaaattttttcatgccgcggttaaaggatacgattcccaggtatccacttt

SEQ ID NO: 725985 - DNA, 75 bp, synthetic construct
  source 1..75: mol_type = other DNA
ccatcacagctcagaacgggatgctggcagataaacgactgacgtctgccggtggggtgctgttcacttccgtgg

SEQ ID NO: 725986 - DNA, 75 bp, synthetic construct
  source 1..75: mol_type = other DNA
tgtttaccccgtggcaatatacctttgagaatgctgcgataacagtgactatcccgaaccgacactggaatacgg

SEQ ID NO: 725987 - DNA, 75 bp, synthetic construct
  source 1..75: mol_type = other DNA
tatttctggggccgttattactcccggtgcttgtatctgggatcctgtgcgcattcactaaaaaaacgcgtaact

SEQ ID NO: 725988 - DNA, 75 bp, synthetic construct
  source 1..75: mol_type = other DNA
ccgccacaagcgatttccggcccaccaacgggcgaaaaacaaaatataacgaccgcatagcaaaacagatttgct

SEQ ID NO: 725989 - DNA, 75 bp, synthetic construct
  source 1..75: mol_type = other DNA
ggctatctggaacaactgggcgggcagattggcgttgcggcactttctgcacagcttgacgcccgccagccggtt

SEQ ID NO: 725990 - DNA, 75 bp, synthetic construct
  source 1..75: mol_type = other DNA
gtctatctggaacaactgggtgggcagattggtgttgctgcactttctgcacagcttgacgcccgccagccggtt

SEQ ID NO: 725991 - DNA, 75 bp, synthetic construct
  source 1..75: mol_type = other DNA
ctgcgtaatgcttacgtcattaaggctgaacgcgtggagaaagatgccgaaggcaatatcaccaccatcttctgt

SEQ ID NO: 725992 - DNA, 75 bp, synthetic construct
  source 1..75: mol_type = other DNA
cgcttgctggtcttgctacaggcgcaaataaattgccgtactttaccggtacagacactgtttctcagactgact

SEQ ID NO: 725993 - DNA, 75 bp, synthetic construct
  source 1..75: mol_type = other DNA
atgccactggcgggtgtcaaagccatacttgatacaagtaccggaggattttccagttgggtcaaaaagttatta

SEQ ID NO: 725994 - DNA, 75 bp, synthetic construct
  source 1..75: mol_type = other DNA
gaatcaatatgttgtacagaaaaagagtttacaaacgttaaacaaaacctcatagaaaaatattgtccgagaaat

SEQ ID NO: 725995 - DNA, 75 bp, synthetic construct
  source 1..75: mol_type = other DNA
cttgaaccacagcttttgcgtgcatgttatcgtggttttatcatggggaacatatcaacaacagatcagtatata

SEQ ID NO: 725996 - DNA, 75 bp, synthetic construct
  source 1..75: mol_type = other DNA
aaatggagaccttcaactttacatcgacttaaggaaagtattaaggcgaatggtcaaaactgaaggagatatccc

SEQ ID NO: 725997 - DNA, 75 bp, synthetic construct
  source 1..75: mol_type = other DNA
ttgagttacgttcggaggcacccgcagacctggagattcccgtgaattatcgcgggaatattcagattgcattac

SEQ ID NO: 725998 - DNA, 75 bp, synthetic construct
  source 1..75: mol_type = other DNA
acactataatactcagatcttctactacaaatactacaaatactacaaaagacctgtgcgataatggaaacatga

SEQ ID NO: 725999 - DNA, 75 bp, synthetic construct
  source 1..75: mol_type = other DNA
ccaatccgtgccgtttgcccgccgccattgaaaaggcgctcgattttctgcgcgctaccaacttcaacgtcctgg

SEQ ID NO: 726000 - DNA, 75 bp, synthetic construct
  source 1..75: mol_type = other DNA
aaagatactcaaaaaacagttatagattatataggtggtaattacaataaggtggtctcttggaaaaatgatgat

SEQ ID NO: 726001 - DNA, 75 bp, synthetic construct
  source 1..75: mol_type = other DNA
atacttagcatatttcaatgataataaaaccattgatttttctattttttgtcacgctaaaatttcggatgaaca

SEQ ID NO: 726002 - DNA, 75 bp, synthetic construct
  source 1..75: mol_type = other DNA
gtcgggcatatcgtcatacactggcgacaagtccgtactcctcataccgcaatcctgtccgcagacaaaggtttt

SEQ ID NO: 726003 - DNA, 75 bp, synthetic construct
  source 1..75: mol_type = other DNA
tgcctgttctcccggtgaggtgagcgtgctttatgccgtcgctccgaaagccggacgcagccagataccggatga

SEQ ID NO: 726004 - DNA, 75 bp, synthetic construct
  source 1..75: mol_type = other DNA
gcattcgagtggttactgcgaattcgtcacgactgcccgacgctgtttgcacactggtgcttagcttacgatact

SEQ ID NO: 726005 - DNA, 75 bp, synthetic construct
  source 1..75: mol_type = other DNA
actgaagtcgccatcaaggagagtgagcgttttaatggcattcccgcgctttcagtgcctgttgccgagccgatt

SEQ ID NO: 726006 - DNA, 75 bp, synthetic construct
  source 1..75: mol_type = other DNA
ttcgggctacaagatctgtttaatgaagaaaactcctggctgtggatgtaccgcaagctgggcggcgggctgctc

SEQ ID NO: 726007 - DNA, 75 bp, synthetic construct
  source 1..75: mol_type = other DNA
acgcttcagcccaatgaataaagggatggttggatattctgctcctcgtgacctggagaaagtgaatgcgttgct

SEQ ID NO: 726008 - DNA, 75 bp, synthetic construct
  source 1..75: mol_type = other DNA
caagcgacccgaaccgccagacaaccattgcgttccagctgtgtccggatggtctggaggatcaggctgtccatg

SEQ ID NO: 726009 - DNA, 75 bp, synthetic construct
  source 1..75: mol_type = other DNA
aatggcatgacgccacatatgtcaggcacgtcactttctgcacaggctcgttatgctgcggggacgctggaaatt

SEQ ID NO: 726010 - DNA, 75 bp, synthetic construct
  source 1..75: mol_type = other DNA
aactaaaaacgaccgatgaactggatgcgatattttttggtcgcggcgtcagctacgacaaaccaattatcgtca

SEQ ID NO: 726011 - DNA, 75 bp, synthetic construct
  source 1..75: mol_type = other DNA
cggcccttgggagagggctttgcccctcatttttcctctcgaacagcccttcgcgtaatttccgcttatcttcgc

SEQ ID NO: 726012 - DNA, 75 bp, synthetic construct
  source 1..75: mol_type = other DNA
atgagaatattgtgaaagaatatggggatacattactgaatgagcttaaaataaaaacaatgatatataaagaat

SEQ ID NO: 726013 - DNA, 75 bp, synthetic construct
  source 1..75: mol_type = other DNA
cacggctggatttacaccgacgcccagctgttacgcgatgatattcaaacacttttcacggcagaacgatattga

SEQ ID NO: 726014 - DNA, 75 bp, synthetic construct
  source 1..75: mol_type = other DNA
aaaggcactgccgacgtgggtatcgatcttggtctgaaagacattgccaccacttcggatggtgaaaaacttcct

SEQ ID NO: 726015 - DNA, 75 bp, synthetic construct
  source 1..75: mol_type = other DNA
gtggtgaactccacgaccgcgacgtaaacgcggcaaagaacattctcgcggcgggacatcgccgtctcgaaggag

SEQ ID NO: 726016 - DNA, 75 bp, synthetic construct
  source 1..75: mol_type = other DNA
gaactttctttgctcaagtagaggcggcaaacccaggagacgagctaattgcatttagctcgcccatttcaatgt

SEQ ID NO: 726017 - DNA, 75 bp, synthetic construct
  source 1..75: mol_type = other DNA
atttccgatccttgcggtagatgaatatcaagatttgggcgtggcactccatcgtatggtcaaacgtctggcttt

SEQ ID NO: 726018 - DNA, 75 bp, synthetic construct
  source 1..75: mol_type = other DNA
catttgctaggaatgacgatcctctataccagtcaggcggtagtttaccataaattgcaaaaagcaaccgatggg

SEQ ID NO: 726019 - DNA, 75 bp, synthetic construct
  source 1..75: mol_type = other DNA
tccatggttaaccccatgatctatgctccattccgggaagaagataaacgttgcttcgccatgatggaaaatctg

SEQ ID NO: 726020 - DNA, 75 bp, synthetic construct
  source 1..75: mol_type = other DNA
gactgcacttataaagatcgatggaaaaccctatcacattgttgcagatgtaaaacgggatgatcttgcccgcaa

SEQ ID NO: 726021 - DNA, 75 bp, synthetic construct
  source 1..75: mol_type = other DNA
gttccgctatgttgatcgtgtattctgggatgatacaacgcctgaagcagtacagacggcaggtgagccacgact

SEQ ID NO: 726022 - DNA, 75 bp, synthetic construct
  source 1..75: mol_type = other DNA
caattaatattgttgaagagattgtggatgagcgggttcgtctgattcgcgggcctggacgttctggcgtctctg

SEQ ID NO: 726023 - DNA, 75 bp, synthetic construct
  source 1..75: mol_type = other DNA
ggtcagtgtcattatgccggtatacaaccgggaagataccattactgccgctattagttctgttttagcacaaac

SEQ ID NO: 726024 - DNA, 75 bp, synthetic construct
  source 1..75: mol_type = other DNA
cagctaacagtcaaaaagcagcaaaaaccagtgaaaccaacgcaaaggtgagcgaaacagcggctgcgaactcag

SEQ ID NO: 726025 - DNA, 75 bp, synthetic construct
  source 1..75: mol_type = other DNA
aaaaccacatggtcttatattcagaacaccgcaattatccgtattggaggccagactacagccgggttacgtcat

SEQ ID NO: 726026 - DNA, 75 bp, synthetic construct
  source 1..75: mol_type = other DNA
cagcaccttatcgcaaagttgccttgacgagctgggtggaggattgcgcagcatggtgtgctggcggttggcgta

SEQ ID NO: 726027 - DNA, 75 bp, synthetic construct
  source 1..75: mol_type = other DNA
gattcggataatacatggcaaccggaatacctgactgcaatggttgcagcgctacaccagacccctcatgcacaa

SEQ ID NO: 726028 - DNA, 75 bp, synthetic construct
  source 1..75: mol_type = other DNA
ttccggctatctgattacggcagacgagaacaaagtgggagagacctttaataaaaccgtgacaaatggggtaat

SEQ ID NO: 726029 - DNA, 75 bp, synthetic construct
  source 1..75: mol_type = other DNA
atatggcagtagtttcaacctcgggggctgtcgatgtatcaggcgataataagtgtgtgacgacatcgtgcagat

SEQ ID NO: 726030 - DNA, 75 bp, synthetic construct
  source 1..75: mol_type = other DNA
cgcaaaaagggcaattcgttctgcctcctgctcgttatgtgcgttcctatgcacctgcacagcaaagtgttgcgg

SEQ ID NO: 726031 - DNA, 75 bp, synthetic construct
  source 1..75: mol_type = other DNA
aaatgataagaaaaccatatttgcatctaaaaaatgcaatcgtcatataacaggaattgttattaataacgaaga

SEQ ID NO: 726032 - DNA, 75 bp, synthetic construct
  source 1..75: mol_type = other DNA
ttgaaccttcattcattagcagaatgaaaaggaaatatggagtcgaagttgtcaactccataatcacatttaatc

SEQ ID NO: 726033 - DNA, 75 bp, synthetic construct
  source 1..75: mol_type = other DNA
agtctcgccattccgcccgcagatgccatcgatcgtcaggagcgtctggtgctaattcagtatcggcccaaatga

SEQ ID NO: 726034 - DNA, 75 bp, synthetic construct
  source 1..75: mol_type = other DNA
tggctaaacggggaaccgaatgtcgtcgaaggcacaacccttattccaactttcaggtcgatcggattcgcgagc

SEQ ID NO: 726035 - DNA, 75 bp, synthetic construct
  source 1..75: mol_type = other DNA
ctcgcagctgccataaacagagaggagccagaggttaatttgctcacagagatgaaaaccaatcttttattttct

SEQ ID NO: 726036 - DNA, 75 bp, synthetic construct
  source 1..75: mol_type = other DNA
cgagacggatttattccggtttatgacactgaaaatggttgctgggctatcactgaagaccaccggggtgaggtt

SEQ ID NO: 726037 - DNA, 75 bp, synthetic construct
  source 1..75: mol_type = other DNA
ggctggaaagtgaaatcctggctgaccggggtgagtgaggaaagccgccgctggctggcatcgtgcggcctgacc

SEQ ID NO: 726038 - DNA, 75 bp, synthetic construct
  source 1..75: mol_type = other DNA
taattgatgcactaagtaaggataagtatatctacattgccatcttgatattagtcattcacctcttgatgaagc

SEQ ID NO: 726039 - DNA, 75 bp, synthetic construct
  source 1..75: mol_type = other DNA
tcttgtcgttgtttctggttttactggttgcggaaaaagcgccattgccggggaaatagaaatcgcgatgaaggc

SEQ ID NO: 726040 - DNA, 75 bp, synthetic construct
  source 1..75: mol_type = other DNA
atgtacccttgaaaggggtaaggtatgtattacgcgtggcggatgacattattggaccaacgggtgatgtgatga

SEQ ID NO: 726041 - DNA, 75 bp, synthetic construct
  source 1..75: mol_type = other DNA
aaataacaggtatagtctttctatctacggtagtgggaatatctctccatatcaaaagaaaattctagaactaag

SEQ ID NO: 726042 - DNA, 75 bp, synthetic construct
  source 1..75: mol_type = other DNA
ttgaatataagcgtgataaggtgatcggtttactagagtctatttctgccgatgtatcagtcgatgtagctaaat

SEQ ID NO: 726043 - DNA, 75 bp, synthetic construct
  source 1..75: mol_type = other DNA
gcagacactcagaaaaaggagcatatacgcgagttatttcaactgctcgcaaggcacatttcaacaaatattacc

SEQ ID NO: 726044 - DNA, 75 bp, synthetic construct
  source 1..75: mol_type = other DNA
gcatgttaaactttcttgaagagtataaaattgtcaataccgacaggctgcatgttgcaatcttagcatctctgc

SEQ ID NO: 726045 - DNA, 75 bp, synthetic construct
  source 1..75: mol_type = other DNA
taggtcgagagggtgtattcagggagtactgggaatccggagccaaagctcccgatgaacaagcatggataaata

SEQ ID NO: 726046 - DNA, 75 bp, synthetic construct
  source 1..75: mol_type = other DNA
tatggaaacagaaagttcaggccgccatcaggaaaggtaaagaactgcctgtttatgaaccaaagccagtatcaa

SEQ ID NO: 726047 - DNA, 75 bp, synthetic construct
  source 1..75: mol_type = other DNA
gcgcttatatcgttttcctagttctgttttgaccgattaccggatactgaagaattacgccaaaacactgaaagg

SEQ ID NO: 726048 - DNA, 75 bp, synthetic construct
  source 1..75: mol_type = other DNA
gataaccgtattaccgcttttgagtgtgctgacaccgctcgccgcagtcgaacgaccgagcgtagcgagtcagtg

SEQ ID NO: 726049 - DNA, 75 bp, synthetic construct
  source 1..75: mol_type = other DNA
tttgcacagtgaatcaaatttagtccgtgaagccctaacagcaaggccaactgagtttgttgatgataaaacaat

SEQ ID NO: 726050 - DNA, 75 bp, synthetic construct
  source 1..75: mol_type = other DNA
ctgcctgcgctgcgtggtactctgcaaccccgtatgcggcgatacaggaaggtaaactgatcatttggggaggta

SEQ ID NO: 726051 - DNA, 75 bp, synthetic construct
  source 1..75: mol_type = other DNA
ctccattacctccatgctgcgaatcttggacctgaagcatcggcttcaatgagtgccgagcatggcatattttct

SEQ ID NO: 726052 - DNA, 75 bp, synthetic construct
  source 1..75: mol_type = other DNA
ttgctctccaagggtatggcacgcttagccggtaaatcaaacgatactgttttccacctgaagcaagctatgggt

SEQ ID NO: 726053 - DNA, 75 bp, synthetic construct
  source 1..75: mol_type = other DNA
cgccaggggctgaaagtcccggaagacctttccataatcggttttgataacatcgacctgacgcaattttgtgat

SEQ ID NO: 726054 - DNA, 75 bp, synthetic construct
  source 1..75: mol_type = other DNA
aggaggctaaacaagccattatagatttcgtgtcggaaactggtgataaagctgatatatttaataaaattaaat

SEQ ID NO: 726055 - DNA, 75 bp, synthetic construct
  source 1..75: mol_type = other DNA
ctgaagagctcgaacagcggggattatggcgcagagccgctgcacgctggcaggaattgctgctgaactacctgc

SEQ ID NO: 726056 - DNA, 75 bp, synthetic construct
  source 1..75: mol_type = other DNA
tggaatgccgaatcaggcgcttacaatgtcacccgctctggcgacagctatattctggttaacttctataccgga

SEQ ID NO: 726057 - DNA, 75 bp, synthetic construct
  source 1..75: mol_type = other DNA
gtggctggacgattaagggcaaacctgccagtggtcgtgccgtattgtctcaggaacaggacggcattaaatcgc

SEQ ID NO: 726058 - DNA, 75 bp, synthetic construct
  source 1..75: mol_type = other DNA
tgacctaccgtgtgcataccgacacggaagataacccgttcagcggtgggttgttcagccagtttggtctgtcag

SEQ ID NO: 726059 - DNA, 75 bp, synthetic construct
  source 1..75: mol_type = other DNA
cacctgattattctaaatacagtgttaacacttcttctgcaggcgctcatacgcactctgtatcgggtactgctg

SEQ ID NO: 726060 - DNA, 75 bp, synthetic construct
  source 1..75: mol_type = other DNA
gcatggggtttcgcaaagtaatttatctttatctataaaaaaaatacaacatacatataaaattgttaaagcttt

SEQ ID NO: 726061 - DNA, 75 bp, synthetic construct
  source 1..75: mol_type = other DNA
cgtgcggtcggtcaatcacaatctaatatatgtaatagggactttgctgcctgttttgttcttttttgctctgag

SEQ ID NO: 726062 - DNA, 75 bp, synthetic construct
  source 1..75: mol_type = other DNA
agcactggcaacattttcaggaagtatcgtatcgctcattgcgaccaaagttttgcgtcacacagccctaagaac

SEQ ID NO: 726063 - DNA, 75 bp, synthetic construct
  source 1..75: mol_type = other DNA
aaaaagcagcccaaaaacaatcctatggccttgatgatgcctctggcaaacgcatatttattgatgggggctctg

SEQ ID NO: 726064 - DNA, 75 bp, synthetic construct
  source 1..75: mol_type = other DNA
aaaaagacaaatcgctaaataaaacaatatctacagatgaactatctttttctgaagaggaaaaagataatatga

SEQ ID NO: 726065 - DNA, 75 bp, synthetic construct
  source 1..75: mol_type = other DNA
atcatggtcatcgtcttgaaatgtgtcaggacttcattgacttagttaatgcgaaatcacaacaacatcaggatg

SEQ ID NO: 726066 - DNA, 75 bp, synthetic construct
  source 1..75: mol_type = other DNA
ctgcttttagccacatcaggcgaggtggacctagttattccccaacaacaaggatttggttaatctggataaccg

SEQ ID NO: 726067 - DNA, 75 bp, synthetic construct
  source 1..75: mol_type = other DNA
gctgataaaatttaatgaactcaaagaatacgcaaaagatccggaaaatatggccgcgaaggcctcactctcgcc

SEQ ID NO: 726068 - DNA, 75 bp, synthetic construct
  source 1..75: mol_type = other DNA
agatgccacctgaattctgctcgtgtggcatgggtcgaaaaacactgcattaaggagatggggcaaaatgagtcg

SEQ ID NO: 726069 - DNA, 75 bp, synthetic construct
  source 1..75: mol_type = other DNA
tacctttcaatgaaagtagagcgcactatcatgaggaatgcagacttggcagatgtcacctgaattctgctcgtg

SEQ ID NO: 726070 - DNA, 75 bp, synthetic construct
  source 1..75: mol_type = other DNA
cgatcacatattacatgtttactggaaacatggttttgatatattgaatcatttagaccaaggtgagtatattat

SEQ ID NO: 726071 - DNA, 75 bp, synthetic construct
  source 1..75: mol_type = other DNA
ctctatccactggagaaatatctaaacgatcttacaggactacccggtgtagttattaatgatgcacaggcggct

SEQ ID NO: 726072 - DNA, 75 bp, synthetic construct
  source 1..75: mol_type = other DNA
aacgtgcgcgggattaacctgagcaaggctgacctttccggccaggatagcgctaaattgcgcagtcgtggcgca

SEQ ID NO: 726073 - DNA, 75 bp, synthetic construct
  source 1..75: mol_type = other DNA
actggggcgcctgcggtatcgacgtcgctattgggcaactcgctgacaaccaatgctgccagcggcgtaggcgta

SEQ ID NO: 726074 - DNA, 75 bp, synthetic construct
  source 1..75: mol_type = other DNA
tggaactaaatctacgaataacactggtgcgcatacccatagcgttagcggaacagcagcttcagcaggtgcaca

SEQ ID NO: 726075 - DNA, 75 bp, synthetic construct
  source 1..75: mol_type = other DNA
cattaagaccgtttgctattgataacgcaaccggcgaactggttattggaaccaaactgtccgcaagtctgaacg

SEQ ID NO: 726076 - DNA, 75 bp, synthetic construct
  source 1..75: mol_type = other DNA
tactacttggatgtgtatcaactgggatgttccaccgacgacttttttttagactatggcagtgaccttcttgat

SEQ ID NO: 726077 - DNA, 75 bp, synthetic construct
  source 1..75: mol_type = other DNA
ataacaaggacttgaacattacgccatttggcgaaaaacgtcttattgagtcattctattttttcactgccgagg

SEQ ID NO: 726078 - DNA, 75 bp, synthetic construct
  source 1..75: mol_type = other DNA
cacgggggtcatttactgtgcacctggggggatgggcggacccatttcactggaaagtcattttgtcgcaagccc

SEQ ID NO: 726079 - DNA, 75 bp, synthetic construct
  source 1..75: mol_type = other DNA
catcgccctctcttcagcggtgagcaaaggcgagaccctgaccgttaacaacattaatgattatggtgcagatgt

SEQ ID NO: 726080 - DNA, 75 bp, synthetic construct
  source 1..75: mol_type = other DNA
cagcgacaccttcgactacaccgtcaccagcggcggcaaaaccgaaaccgcgaccgttaccgtggacgtcaccaa

SEQ ID NO: 726081 - DNA, 75 bp, synthetic construct
  source 1..75: mol_type = other DNA
aaacgccggtcagcggcaatctgctgaccaacgaccgcgacgcggacagcgacccgctgcacgtggcgggcttcg

SEQ ID NO: 726082 - DNA, 75 bp, synthetic construct
  source 1..75: mol_type = other DNA
tactgaacggcaccagcggcgacttctccagcgtgccgggcctgagctacaccgccacgggcgtggacgcctcgc

SEQ ID NO: 726083 - DNA, 75 bp, synthetic construct
  source 1..75: mol_type = other DNA
agttattgataatatacaaaattctcaccaagagcattttttaaagaaaaataaaggagaactaaataaggttat

SEQ ID NO: 726084 - DNA, 75 bp, synthetic construct
  source 1..75: mol_type = other DNA
cgccgtcactggcggcgcaggtcgacgcgctggcccgtaaccgcgtcgccgcgccggaaccggtcaccgtgggag

SEQ ID NO: 726085 - DNA, 75 bp, synthetic construct
  source 1..75: mol_type = other DNA
aggacaccttcacctataccgtcaccagcggcggcgtcaccgaaaccgcccaggtcacgcttgaggtcaccaaca

SEQ ID NO: 726086 - DNA, 75 bp, synthetic construct
  source 1..75: mol_type = other DNA
atgggagaatacaatcttttaccggataaaaacagtcgtaatggtctaaaacttctacagaagcaagctgattta

SEQ ID NO: 726087 - DNA, 75 bp, synthetic construct
  source 1..75: mol_type = other DNA
tgatttagcatgcagaactatacagcagaatactccacaaaaaatattgattttattaatctatataatgaaata

SEQ ID NO: 726088 - DNA, 75 bp, synthetic construct
  source 1..75: mol_type = other DNA
gtgtgccgcactacacgctacgaactggagaaaaaagggcgctttccgtcacgtcttaatctgggcggtcgttct

SEQ ID NO: 726089 - DNA, 75 bp, synthetic construct
  source 1..75: mol_type = other DNA
gccagtatatagaggcggacggcggcggcgatccgggcgacacaacgctgactctcaccattaccgccctgccga

SEQ ID NO: 726090 - DNA, 75 bp, synthetic construct
  source 1..75: mol_type = other DNA
ccaaaccgctgtataagcagcttgaagacgccctgaaaggggcgatcttaagcggagagtttcagccggggcaac

SEQ ID NO: 726091 - DNA, 75 bp, synthetic construct
  source 1..75: mol_type = other DNA
gtattcgctacgctgatgacattcccgtctcattggaaaccgtccagatgccacctcgctttgcctttctgttac

SEQ ID NO: 726092 - DNA, 75 bp, synthetic construct
  source 1..75: mol_type = other DNA
tggaaaaaacgtagacttgattattttcgatgaaccgacaaaagggtttgattcacttggtataaaaataatcag

SEQ ID NO: 726093 - DNA, 75 bp, synthetic construct
  source 1..75: mol_type = other DNA
ctcatggatgcgataaatatttcattagcagagcacaaaatagcctctttacataatgaagtcatgagtattgag

SEQ ID NO: 726094 - DNA, 75 bp, synthetic construct
  source 1..75: mol_type = other DNA
tacatcgtctggcaccagtggttacagttctcttaattatcgtggagcttacggtaatacgaatgtcggttacag

SEQ ID NO: 726095 - DNA, 75 bp, synthetic construct
  source 1..75: mol_type = other DNA
atataagctccatccagaataaggatgcagacatcctgctgataggggcaattccgcaagaatttgcaggtcagc
